United States Patent Application Publication US 2007/0067865 A1 - sequence listing, part 16

SEQ ID NO: 104316 - DNA, 255 bp, Glycine max
cactctctattttgattctgtctcgaagtctctctctctctctctctctctctctctctctctgtgtgttgattctctctcgatcaaaacttttgaacagttctacgagtcgagtgtcaggctgtcgctctgatctggagtttgatcaactgtacctaattgaccttgatggatgagtgaacttctttaaaatgatattttcacggtcgagaatgtagaccctgactgcaaagtgtatgacaaggtctctcgggt

SEQ ID NO: 104317 - DNA, 261 bp, Glycine max
cttcttcccctcttctctagacaccgacagaaattaacccttctgtctcttgttcctctgtttttttctctttctcagagaggctattataccgaacctgctctttgtttcttgttttcacagatccgacccaaactacagagaatgtcagaaacacctcaaaggaagaaagcgagccttcccccgaaaagaggtcagatcaaggctcaaatttttactagccttgtgaattcagtggcctccaccatctcaaaaacgggg

SEQ ID NO: 104318 - DNA, 262 bp, Glycine max
cagaggtggaaatttagaggaacctaaaccgtggcgctttgcagacccctcttcactcaatgactttgatacttacagagcttctgagcgatttccacgaccatcgttgtcagatctacctaaaattgcccaagaaacaatgagtgcatatgaaactgtcaaaaagggtgtcaagaagttgatgaggaagtacactgtgaaagcttgcggttattgcactgaggttcatgtgggtccatggggtcacaatgctaagctttgt

SEQ ID NO: 104319 - DNA, 192 bp, Glycine max
cggctcgagataattagagagtgcgagagagagagaagatctgcgcccgaagaggtaagcgctattgatgtacggagacaattcggacgacatgatgcagaagtggggagacaactatggggcaatcgtgaaggtgctcgaagaactcgggacgaacagggaactttaaaaattcggccacggagagtaccg

SEQ ID NO: 104320 - DNA, 242 bp, Glycine max
ctagtttttatttttaagggagtggtgctgaaactaccaagagggtagccagaaattaaaatggcacatttgcaagaaatagatcgagtcaagaatgaagttatacgtttagagcgcgaatctgtcattcccattctgaagcctaggctcataatgacactggccaatcttattgaacatagttctgaccgggctgagttcttgaagctctccaagagattagagtacacaattcgagcttg

SEQ ID NO: 104321 - DNA, 247 bp, Glycine max
gactggttctagatcgcgagcggccgctcgcgatctagaactaaagaaatgtactctcaaggttttctagcatcagtggatgtgaccaaattggctgaagctcgtgcaagtgtattcaaggcaatgaacaacgaggcttctggtagatacatttgctttgaccatgtaattgatacacatagtgaggcagagaagctggcaaaggatattgggatgcctaaggaaaagatatgtggagatgcatcaa

SEQ ID NO: 104322 - DNA, 243 bp, Glycine max
ggtttagagaaactcattttagcagatggctctcctgtcaccctttctcttgctgatggtttgaataaactttccatgttgcaatcaattgtattagatggctgccctgttacatctgaaggattacgggccattggaaatttgtgcatttcacttagggagcttagtctaagcaaatgtttgggagtgacagatgaggcactctcatttcttgtgtcaaaacacaaagatttaaggaaactt

SEQ ID NO: 104323 - DNA, 239 bp, Glycine max
agatgattgaaaaataaaatgtttttagtcacattttttctctctctataacggtgttgtgcgcggtggcggcaagagaggcgaccaccatgagaaaccaatcgaggtagtcggagcagacgaagaggcgggagataaaaacagcggcaagtgaccccaatgctactccgaccctgactcttgcttcatcgcctgggatccgcaattggtttgactccctctctgcttcgccactgcaa

SEQ ID NO: 104324 - DNA, 225 bp, Glycine max
cttgaattcataatttatttctccacaacaacaaaaatgacttcatcaacacttttccttatgttattcaccctttccttgatcctcatttctcatgctcctatgtcaaccttaggcataaccttgtatgaatctctatgcgatcaggctgggcaggacaaggcaaggtgccttgaagttctccaagccgaacctcaaattgttggggctaaagataatgtggag

SEQ ID NO: 104325 - DNA, 241 bp, Glycine max
cagattcacagaattgcttaactggcacatttccacgatctattacaaatgttacaacactgtccttgtgtaaaatcaatgaacagtgttgtaacatttgtaacagattcacagaattgcttaactggcacatttccacgatctattttcatttttccaacagaaaatctgttttagttgttttccattgaccaatttagtttagtgtgctgctaagactcgaataatcttttcatcttac

SEQ ID NO: 104326 - DNA, 245 bp, Glycine max
cacgctcttcgcattctccgccaccttctcaattctctttcgattatctttgcatctttgcaccaacctccatggccacgaacacgttcaccggagcattactctccgaacgttgtctccgtctcaacttgaataagagattggcctaggatcttcttcatcaatggattcctttgcttcttggaagataaatggcagcggaatggggaaggaagagagagaggagacgccacttcaaggagaag

SEQ ID NO: 104327 - DNA, 231 bp, Glycine max
attttgtaacaagtcacctgtcatatctttctatttaatggttatcactttctaccttgcatatgttttatgccctaaatgattatcaatgggcatttaagtgaataaaaagtcccaagtagaagggaaacacctttggttctcacatcgcagtatttggtcatgtttttcgataaataaatctgaggatgaggtttttttttttttggtacatgaagatgacgttgtcga

SEQ ID NO: 104328 - DNA, 233 bp, Glycine max
ttaccaaattccatattccaattcaataccctaactccggtcgaagcaccaaatcgtgatggcaccaaaggcagagtagctaccatctcaggagaagcatgtggaggagaagactatcgacggtgggagacaaggctccggcggatctggtgccaaaagccggaacgaagcttgcgaaggatcgactcgccgtcgctgagtgtaagaagtcgacgagttacaagaagatcgtg

SEQ ID NO: 104329 - DNA, 264 bp, Glycine max
gaatcacacatcaatcagtccagaccggaagcttatgactgttgttggagataacctggatggactgctagtggatcctcaaaatggaaaggtacatggttcctctgatcatgcattttattggaaatttcttttcaagtacattttttcctccttttcccagtgaatattttgttgctgtctttcatttagttcatgcatatgttaaaggatcaaatcgtttaattttttccccctaaatttatgtctatgattctttttgtg

SEQ ID NO: 104330 - DNA, 258 bp, Glycine max
cacactagaactagttattctgtgaacctcaccttcaggcatggaatttgaaagtggtacacagaagcaaaagggcacatttgcatgcttgaagatggttgccttaatagctctatgtctcattctaatttctccagcagaatcatttgatccgttggatccaaccgggaacgtgacaataagatgggatatcatgtcctggacatcagatggttatttggccactgtgacattgtttaactttcaactgtaccgcaa

SEQ ID NO: 104331 - DNA, 129 bp, Glycine max
aatacttccgagtcacagaacaaatactgcttttttctgagaaaaccgtttcttactaatcacaatcagttacagaggtgtgctgctgaaataagttagctttaaaaaaaaatgtattacttatttttc

SEQ ID NO: 104332 - DNA, 165 bp, Glycine max
  unsure (1)..(165): unsure at all n locations
tcttagtgttgtaatgtaattattattatgaacataagtgacaacaccacgattgttggattctgtgtgtttgttgcacacaatatatgagagagatnnnnntgaanntgtngtnattaaggttaatggtggtgttgtgaaatggggattgggagttgatggtaa

SEQ ID NO: 104333 - DNA, 161 bp, Glycine max
cgagatagataaacatctgttagtaattgaacaagttaaaatagtgacaaagtaaaagcctgataaggctaacgaacaattttaacttgttcaattactaaccgatgttttccttcttgtaaatgtttagattaaagaagtataccgcttgacgagtaaga

SEQ ID NO: 104334 - DNA, 254 bp, Glycine max
tcttgaacgaagagacagaggtggttgaaaaaaatagagtaaacagagaacactctgagaataacagagaccggaagttggaggcgaagttacggttcttcaaagagcttgaagagtcactgagggagagaataataatggagtcagaaaaagcaagggaagaatctgactctgttcatcctctggttctgacgaggtgcaaatctgaacccgcgagaaccgcacaaaaactcgatcctgaaatgaacgggctt

SEQ ID NO: 104335 - DNA, 253 bp, Glycine max
atcatattgaaatgctagttaacatgattttagggaaatgttcacttgtttggtctctcacattgatgaactgattctgggtgtagaattgattttaacttttaggttgaagcaactttaggtagtgtttgcattggatcagaaattttataatgagatttgctattaacttgcattttagataagaacacttaaacatgattcatttcacttaaagatcaattctaattagaatcaatttttccgtttttga

SEQ ID NO: 104336 - DNA, 255 bp, Glycine max
atggatggttttgctacatggaaggaatctgatactccaccactttcttcttggaaagctgcatgatgaagtgcattgcttaatgcttatactagtgatccttaagtgtttgctgctgctactttaagaaacatatcagtatgagtggcaagccttcacagttgaaaggaataagccattctagtttctagtaattgatgtgtctttttaagtggtttgaactctgtggcagatggttccatatatgtgtttatg

SEQ ID NO: 104337 - DNA, 243 bp, Glycine max
ggggtagaagagacttctgctgcagcagatgttgcaaaaattcctgatgaatccgcttctacagaaagtgaagatatcaaattggatggggtgaaagagacattagctgcagcagatgttgcaaaaattcctgatgaatctgcccctttagaaagtgaagatagcaatttggatgtggtgaaagagccgttagctgcagcaaatgctgaagttacaaaaatttctggtgaattggtttctgta

SEQ ID NO: 104338 - DNA, 240 bp, Glycine max
atgagaatgtggaggaagggtcgttttatgagtactattatgggaagagaaaaggagggtggaagaggttcttctcttacggcaactctgattcttgtgcttggatttggttgcaaatgggttggagaattttggtgagcttcggaattgcgctgcttgtgttctacattgctacaaaacctccatcacccaatgtctccgttgagatcgcaaggtttccagaatttaaactagcggaag

SEQ ID NO: 104339 - DNA, 246 bp, Glycine max
gccaaaggtaagtgcaagccggccaccctgcaaataagttatacatagacgaaaatgcaaagttgtcctcatctaatctaaagctgccaaagttgactgcatgccagccaccctacaagtaagaagccaagattttgcttgtgattattggttatttagatgcctgaaatggatgccgagaaagtggtgcatactggaggctgccattgtaagagtgtaaggtggaaagtggttgcttcttccagt

SEQ ID NO: 104340 - DNA, 237 bp, Glycine max
ggttgaagcatggtggacccaacaacagaagcctcatggtttgggatctgccagttccagaagaagcaaccaggggcttatttcaactgccacgttcagctattgaaaaaatcaagcaaattgtggttatgtccaagaagaaagggaataacaacaccaaccttcacttgtcaacgttgtgttatctattgcatatgcgttggtttgcagagtgagagcagaagaagtaaaaagtaa

SEQ ID NO: 104341 - DNA, 229 bp, Glycine max
aattggtgcagcctatctagttggtagttggttccattggacacaagtgaaaactacgtgccatggcttccaagaatgtaattcttcaatttgtcttattttccatgtgtttggctatggcaaattcggtcgagttcaaatatccagcagttttcaacttcggtgattcaaattcggacacaggagaacttgctgcagggttgggctttcaggttgccccacctaatgg

SEQ ID NO: 104342 - DNA, 235 bp, Glycine max
tcgatctgctaactggaatctcttctcagttacgattagctcccttaacccaatctttgttttgcagaattatgtctaatgcaaatgatcaatcgagagagagaggccataaggtgaattttccattacagtggtcaaatgcaaatgcaattatgtaacttttttaaaaaagaccctgcgtattaaatcactgaacaggatttaatttagatgtttcgcaacatagaactggtgt

SEQ ID NO: 104343 - DNA, 231 bp, Glycine max
ctctgcaggtccgtgaagaaaattttattagattattcctctaatggctgtttgataggtatgtaaattttgattgcacaagagtcctgtagccatatgttaaaagttaattatcccgtcataatattttacacatgtttcaccttcattgcaaggtggtgtaaagttgtaacatctaacttgaaattttaaatcactgttagtccctttttatttccccgtccttcattc

SEQ ID NO: 104344 - DNA, 239 bp, Glycine max
aaaaaccgaaaaccctcgcaatttcccaattcacgcgtttctttcctttcaagactctctctctcgctctagttttttcgttccgcgactcagcctttccaatcctctcacccagagttagggtttttaactctattcgatcggcgatttcgaatactcggaggctcgaatcgtgttgggggttttccgttttgattaaaaaagtttccgttgtctgtgttgggtgatcaagggttgtt

SEQ ID NO: 104345 - DNA, 248 bp, Glycine max
tatatttcaaattttgaagataagtttgtctgtgtcaattgcttaacttgtgaatatcaggcagaggcaattgctggaaatttttgggttttggggtttaagaaagtcatattctgatgaaatctcaaatctgaaattaatatattttgaagctatggttgtatattttaatgttattgatgtatattttaatgtttgatagctgtttctgaattgggatttttatttctgagatcattaaaggttat

SEQ ID NO: 104346 - DNA, 249 bp, Glycine max
tgatgatcggtttgtgttgctatcgcggtgacaccgatgctgcaaggaggatgctccatgagatggtttaccaaggggcttttcctgatgtggtgacttataacttgttgtttaagttcttgctcaagggtcggaaactgagggaggcaaataattagtcatatcgaggttgagtaataccaaacaaattcaaaaagactatgttgcttctttatttttattttttgtgactatgttgcttctttatag

SEQ ID NO: 104347 - DNA, 239 bp, Glycine max
ctggtatggacatagtagttgttaacatgtgcaggattaggacatatttggtaccgatgtctccttattatatatagaaggatggtgatggatgggttgtactcacatgatatctgtgatagggtcattctgctgaaacgttagggccactgctggcgtgcaaatttcactgagacataggttgaccagctggcattctgatattcaagggaacactgttgaagaatgagttatgtaga

SEQ ID NO: 104348 - DNA, 254 bp, Glycine max
cggtacttttccaatgtagccgtgagggatgagcactttaagaccaaacgacacaagaagcggtatgcttcttttaattttgcttctgttttttaatcccctttgttttgaatcctatcctacattctccccatattttggtgaagattgattattagatttatagaattgcttttgaactttgaggctactcatgtttttaatgtatgagctttcagatgtgtgaaaacataaagcagttgggcactatgaaa

SEQ ID NO: 104349 - DNA, 243 bp, Glycine max
cttagttatcatcctctctttcaaattatgtgctgtcttgagattgattcttataaacaaagatgaatagatatgtttagcttcgtttcgtgttcattccactttgattggagcataatcattatagttattgtctgttatctacccgatttcagaggatgaccatataactggtaactccatgtcaaaactcagatattcttgtttagttgggatgatattcatatttagtatgacggcaat

SEQ ID NO: 104350 - DNA, 243 bp, Glycine max
actagttctagatcgcgagcggcgccctttttttttttttttttaaaacaaaacttctgaatcattttcctatacagatatctccgttgaaacttaaacacaaatttcccgaaagtaatacacaagatatgaagtttttcctaatagggggatcgaaggaaactagtagaacgaagaaagccttcaaaaatcaaatagaatttccaccacataaaacctgaaacttgattcattatagagaga

SEQ ID NO: 104351 - DNA, 251 bp, Glycine max
ctcctcaccacgtcctcgactccctcctctcgctccactccttcttcctccctctcctccccaagcttccttcctcctccgctccctcctccgccgacgaccaatccgagttcatctacctcgcctggctccgttccaagtttgacgagttcctcaagtccctcctcgacgccctcgcctcgccgcagggagatgagacgctcaaggaactcgtgctggacacgctcatggagtttgtcaaggtcgccaat

SEQ ID NO: 104352 - DNA, 243 bp, Glycine max
ataaatatatattgctgattagaattgagtttgttgatccttagaaatgtagtaaattagtaattctgaaaggatcaagttgttacctaggtttattctaacaagttttgttttcaaccttttgattgtcttccatagttccattttttctctctctttttttttttatttgaaatgtaattgccattactcatttgtatagactcacgtgcctctctttgtcatattgttctctatataatt

SEQ ID NO: 104353 - DNA, 239 bp, Glycine max
caaccctattgaattgaattgggggaagaagaacattagaagaagaagaagaaaaatcggcacaattgttgtaattgaacgatgtctgctgcggtgtgcggaagcaagagatctttgttcgaagagcttcccccttctccgccagtatccaagaggctccgctgttcctcctcccctattcgcctctctctcccttccctcatcgaccaccttcgctctctcttccctcatatggatga

SEQ ID NO: 104354 - DNA, 246 bp, Glycine max
acagctagctataaacatccttagtcctattaactatcaagatatgagtcaacatagtgtgatcaaaatttcggccgactcttcatatgttgccaagtgcctattgtatcctgcatgattacaatctcttgggagctcttcatagcacattggaagacctgacgatcagccacgacatgggtcgacgttgtcctccacagtgtgggcggaattggacaactacaaaggctttccgagaccattggc

SEQ ID NO: 104355 - DNA, 129 bp, Glycine max
tctaaatggtctctcaacttctggttcaatgataacacaaatcccttgctttgttcaattaaagtcattgaaattgaaaatgaaatcttcttcaaacatatctgatgagggagttagcaggatagtaga

SEQ ID NO: 104356 - DNA, 154 bp, Glycine max
ctgaggcactgaaagtgtgatatggcaagagtcatttcctcttcctgcgcacgcctcgcaatgcgcctcttctccaccaccaccacagccaccgcgttcgccgtcactttacccaaaccctcatcactctccctctcatcgcgtcgattcctct

SEQ ID NO: 104357 - DNA, 238 bp, Glycine max
agaagatggaactagaattcctctatctgaaggggattcttgtggtgaagaacttctgacatggtatcttgagcattcttcagtcagcacagatggtagaaaagtaaggcttccaggacagagattggttagcaacaggacagtaaggtgcttaacaaatgtggagtcattttcactctctgcttcggacattgaagaagtcacaatccttttcacaagattcgtgcggagtccatgc

SEQ ID NO: 104358 - DNA, 215 bp, Glycine max
ctgtccccaaaactacaagaccacaaggaagatacgcgagaagagagagggggaagcttgtctcgcaatattccttgaaggatctggaaggaattcttgttaaaaagggtgacgtatctgggagtactgataattctgatggtgaactggacatgttaaagacatctgaaattcaaaaatttgaagatgaaggaagcaaatatcctgctatacct

SEQ ID NO: 104359 - DNA, 108 bp, Glycine max
aagtattcagagtccacaactgaaggaccaataaaggctatagttttttcccagtggactagcatgttggacttagttgagacatcattgagacaatttagtatacag

SEQ ID NO: 104360 - DNA, 210 bp, Glycine max
tttgatttaactaatatgcttgagattttttaactactaatgtttgatatggggtcaaatgcaggaggagactgcaaaactttaatgtttgtgcaagtaagtccaagttcggcagacttgggagagacactttgctcgttgaattttgccacccgtgtccgtgggatcgagagtggcccagctcgcaagcaagtagaccacactgagctg

SEQ ID NO: 104361 - DNA, 229 bp, Glycine max
gggggagtttaaaggaagaagaaagaacagaacgccgaaaaaaagaagtcctatagaacaaaggttgaaaaagaggtaaccttttgtggaatggttaaggaagaagggtttaaaatcctattatgtttctgaagcaaaaaatgcattagaaaatcgtggagaaatcacaatgttatttctggggtaaaaatgggtgtttgaagcctatatcatagtagtcctgctataa

SEQ ID NO: 104362 - DNA, 233 bp, Glycine max
caagaaaataaaggcaatggtgaggtgatgggtggccatgcagccacaacttactcggcggccaagatttcggtgtggtgggacattgacaactgtcgtgttcccaaaggccacaacgccaattccatcgctcagaacataacctccgccctcgtcggcatcaactacgccggccccctctccatctccgcctatggtgacaccaaccgcatccctccccccgtccaacacgc

SEQ ID NO: 104363 - DNA, 226 bp, Glycine max
ctcgagccgctcgagccgctcgagccgactcgagccgattcggctcgagcttttttcacactgccctccgctaaatctaggtcgcccatcatcttgcagatctaaagaagccctatcacaaatctctttttccacatattggaccttgattgaaacagatttgagtagactcccccgtcccacagtcgatcttgcgcgcctccttcacttttggctttggtggttg

SEQ ID NO: 104364 - DNA, 226 bp, Glycine max
caagtagccaatggaaaaattgggattctaatttaataggcaacatttgggggagtgggtccttttttctttccccccctatctgtttgaaaaataaattatttcataacctgttgtcatttccaaattcttgcatccatagctccttaatgatgtcaaacctattttgttgtctgtttactatcatatgtcataagtaacctgaatttgatagaaatatgaagca

SEQ ID NO: 104365 - DNA, 227 bp, Glycine max
cgagttcgactcttactcgcacctttcctccaaacccaaccctaaccctaaccctaacccttattccaatcctaatccttattacgatgctaaccctcatccgtaatcccgaaacgtcgtcggtgtgctcccctcctatcgcctccgttcctaccgacgtcgacgccgctgcatcctctactccgccgtgctcttcctagtcctcctcatcggcggcgccgctttcc

SEQ ID NO: 104366 - DNA, 223 bp, Glycine max
gaacctagagaccttggatatcagaaacacgttggttcatgagttaccaagtgaaataaacatgctcaaaaagttaagatatcttcttgctttccatcgaaactatgaagcagattattctcttttgggatctacaactggtgtgctaatgaaaaaaggtattcaaaatttgacttccttacaaaacctttgttatgtggaggcagatcatgggggcatagat

SEQ ID NO: 104367 - DNA, 226 bp, Glycine max
cctccacctggccaatatcatcatcagtattatcctccatatggttatatgccaccagtttccccttatcaacagtacgcatctccatacaatgctgcagtggctccatcccagacaccagctgcaaatcatccttatcagcattctatgcagccagggtctggacaggctgcacatgccccagctgaatctggaacatcaacatcaggatcgcagcagcattaaa

SEQ ID NO: 104368 - DNA, 227 bp, Glycine max
caaattgtaggtcccttatattttgacattggtaagatagcactggagcatattgctgcttatgtttcaacatggcctgctcctgttcctggtaagttaatggatcttccaattgggaatacaatgcttaaagtgaacctgccacctgcacacagcttgcccatggaaaatggagtatctcttgatgaatctgctgctcctgtggctccttttcttcctaataatca

SEQ ID NO: 104369 - DNA, 227 bp, Glycine max
ctcgagccgattcggctcgagtgcgtgctataattgagaatgctagtcaaatatcaaaggtcatagatgagtttgggtccattgacaagtatatttggagttttgtgaaccacaagcctatagttagcagattcaggtatccaagacaggttcctgtgaaaacaccaaaggctgatgttattagcaaagacctggtgaggagaggtttccgaggcgttggccccaca

SEQ ID NO: 104370 - DNA, 222 bp, Glycine max
gagagcccgatatttatttctcctctcccaatcttgctatctaaatccagagttgttgagagaaaggtttttggtaagtttgatgagagtaccttgcttggtaccactcgattgcatctccattttcttctctctggctttgacagtgttttgataattgtcattgccatatacttcctgttccggccttgcatgcttgtccttagtactcctctgggaacg

SEQ ID NO: 104371 - DNA, 223 bp, Glycine max
gttagctcgacattttctctcagatctcaccgcaccttccaagtcctgcccattcttcctctccacctcttcgcctagcaactcagcgctgcccctctactccaaatcttttgcgagatcaacccttaagtgacaagaacgtcattattggcgtcttcgtcttccttgtccatggccctcttcatcgtccttgtcgacggcaaaggagagagaatgggagaat

SEQ ID NO: 104372 - DNA, 236 bp, Glycine max
ctcgagccgaatcggctcgagatcaatcaatcatattgtaaagagtttaagacgtacaggaagcatactggagtatggcatcagactttctgaagcagatggaatcgattacactgatcctgaagagcttgagttgttggtcagaactcttatagatctggatgcaatggatggtaaacaaagtgtttctttattggcagagtgttctagttcccctgatgtcagcactagacgag

SEQ ID NO: 104373 - DNA, 237 bp, Glycine max
ttctgaactatgaagtacagagcgtttgtttctggtttttggatactgccactctttcacggtgaaattcaagctcgttttcctttcaactcaaaatccctaatcatcaacacgaagggtttgtggaccaaaacgctgcgtttccatttcactcacaatctcaagctaacccagctctatcttatggcgtatcaggtagagataatgcaggaaatttccatcattgcttcaaaagga

SEQ ID NO: 104374 - DNA, 237 bp, Glycine max
atattagaggccattggtgagagactaaaacaaaactttacttcctttgatgtacgtcttttgttttagtctctcacaaatggcatctaagataggctcatccatcaaaggaagtaaagttttgagtcagggtggtcttgtagagaagatgacctttgctgtacgtgggaaattggagagctttggagatgatggaactatagttcccttatctgaaggggatgcttgtggtgaaga

SEQ ID NO: 104375 - DNA, 236 bp, Glycine max
cagaaattctgaaaagtccggattttttttattattaagaaagtaccttatcataaaaagggaatgtattgaggaaaagaaaagataccctttattttcataattcatgattgggttgggttctgtaaatctcaagctttcaatattttttctccatttttacttgtgaatctggcataagacagacattcgcgtactttcaaactttgttattaattgcatagtttgattctaac

SEQ ID NO: 104376 - DNA, 232 bp, Glycine max
ctcttttctctggtggttatggaatatcagaagttaaattggacaggagggtattattaggaaggctcagaagtcacaatggatgaagaggcagacctattattagtatttacattgaattatttgtttaaaatgctgatttttattgttctttcatgtggctgtgttatgacccctctagtttttggaaagtactctagggaaatttccatgtattttgagaggaatgtta

SEQ ID NO: 104377 - DNA, 211 bp, Glycine max
tggatttaggacatggaataatttaagaggaaaattttggatttcttttattttttggtgaaatttgacattttagttggtgaggttggagcaaaagaatgttgaaaatggtttatttaattcaacttgtgaagattttgagtgaaaaaggagaatttgagagttttaagtaaaaggaaagtgacatagggacttaattgacataattaaa

SEQ ID NO: 104378 - DNA, 233 bp, Glycine max
cttaaagcctaactcaaccccacaaaatcagtttgtaaggtgagacgtgttcaagtcttatagggactacattggtcatatctctagtcaatgtgggatctcaacatcagcatacatatccttttttgcttaaatgcatgcaatacaactcccttgcattacagtgcaaaatacttcaaagaatccctctagggactgctatgtaatgacaagctactgattttttttttcct

SEQ ID NO: 104379 - DNA, 234 bp, Glycine max
cacaatacccataaaccaaagccccaacccgactctcttctcatttatcctccctaaagcttcaacctttgggacgcccctcccactttgttttcttctctttcttcattttccttttcggtggggattaggataaccctcctctatttttcaactctaattttgatcatcatcaccttcacccacttcactcttacaaggaagaacaaccctttctctctctctctctctgtt

SEQ ID NO: 104380 - DNA, 215 bp, Glycine max
aattaaccttttttaattattttattttttgtgatgatttggtttctttttaattttactggtgctatggaattaattaactaattgtcagtttgatgatgtgtatttattatttatgtatgtatgtatgttgtggaaggagagtttatgaatgtgaatggtgactgtttttgtgttgattctacgttaagaaagaaactttggtttagcagaac

SEQ ID NO: 104381 - DNA, 232 bp, Glycine max
ctcctgcctcctataaaagccatttggctctcttccgtttgaagtaaaaagccacccaaccaaaagcccatcaactacattgctatattctgctactcctgagttcaacacacacacatatacatccatggcatcatctcaagcagacctcagaaagattgctgtagaaagcttcgatttgatagacaagctctacggtcgaaggggccccgccagcaatgatgcattcccc

SEQ ID NO: 104382 - DNA, 225 bp, Glycine max
gaatattagaagttgctatagctatagacacataaaatttggggataaggaaagatgagaaaccgtatggaaagattagtagttccatgctctttcagctgtgcttcccattcaagtgtggaattaggtgcacccaaaggaccaaaagaagattcaaaaggcactattgtttcaagaagacaagaaggacaagatagatcaatcatcaaggctaaaatgaagaga

SEQ ID NO: 104383 - DNA, 201 bp, Glycine max
tgcatagatcacctttcctttattcccacagaaaaaaacaccacctttctttttccgactaaaggttcgccggaaaatgcctctatcctccacttcctcctccgccgtaaactccgccgtctccggcgagatcatgctctttggcgttagaatcgtggtgaactccatgcggaagaatgtgcgtctgaataacctctcgcc

SEQ ID NO: 104384 - DNA, 218 bp, Glycine max
ctgattggttctgtcagaattgggactttggattgagaggttttagcccttccttttgcagcatattttgggttttgatgaatccattgacattccttcgttattggggaaggaatgtgagctactgtttcaatgattgcagggatattgagggtttcatagaatcctgtgttatgtttatgataggttgtggttttttactttacttgctgctcttg

SEQ ID NO: 104385 - DNA, 265 bp, Glycine max
cgaccctcaccgcctatgaaggcacttatctttgttttggagccaattacaccactagtgatgttctaccaaccttggaagaacaaggggtgcgccagctctattctaagggccctaatgttggtaagctttaacctttcaatgcttctgctgatccttgcttcctaatgttggtaagctttgtctgctctttgttgccataggttcggtattttatattatcattattatgttgcaaaatactcggtcacattttcatcctttt

SEQ ID NO: 104386 - DNA, 259 bp, Glycine max
gctcgcctcatttttgtattaagcataccatctgcagcatataatttttcattttgcatgccagcttcactgttccccttgttcttgccaacatcatcttcttccattgattcatcaacctcatccaggtttccaggaccttcaccttgttcagctggttaaatttgtgtctcgtcctctaacatcatctcatcaagagtgaggatgattatgaacaagtcaactccgaggtgcctatgaatgagtgatgggggaaatg

SEQ ID NO: 104387 - DNA, 263 bp, Glycine max
ttgggaggggatgatttttggtggcacagcaattcaaacgctgatactgatcatagtaacgatacgatgtgattgggaaaaggaggaggagaaagcttgctttcgtgtaagtaagtggtcaaaatctaactccaatggcaatctggaagcctaccaattaacatttgatttagccaatggatcgtgtttgttattcaccaatctggattctatgagttttgccgttgtattggatgctgcatatatatatatttctttcaata

SEQ ID NO: 104388 - DNA, 264 bp, Glycine max
agcaccaacatcacctgtcccctcaccactaagtaacacaccgacaccagcaccaacgccagcgattgaaatgccaacaccagcaccagcacctgaagatgacacgccacccccccctccccacaggcacaggagaagaagacacaagcacaagcacaagcacgagagacaccatgcactttctctggctccagcacctacaactattattcggagaagtcccccagcaccacttgctgacgatattgctacaaccgattcaga

SEQ ID NO: 104389 - DNA, 258 bp, Glycine max
gttgaaggcttacttcagttgcttgaacatacttcaatattttagagggttgtggattgtgaggatcatccatattcttatttctttttctcgtaagttgcaataaacaaagcaaaatgattccccttgtttatcaaagctcgtgtgcttttgtactccgatggttgtgagtactgatgttgaaacaagaagaagagtctaatgactaatggtgtctcgaattatttttgctgtctgtacaacgtggctcgttttcat

SEQ ID NO: 104390 - DNA, 247 bp, Glycine max
cttaatttattccaccaagaatggccacgacattttctgccaaatctcccaatattgcagcaaacaagttaatagaggagatagcagcaacagagaagaatcagtaatcatgaagagaagtagcagagcgggtgaaaagaaaacaggaggagccaaagttgcaagactcttgctagtgaatcaagcactagctactctagccttctttggagttggagtgaacttggtcctgttcctaaccagagtt

SEQ ID NO: 104391 - DNA, 247 bp, Glycine max
ccatgttggaaacacaatcgcatagtgaacttctttcagctgttagattgttggtatcagaggaccattgtgatggagatttgtctttggtcgccaggtcctaccacaatcaaagaaggaaacaaactccaaaactggtggtgtagctgaggagaaaaattataaaaatcaccttcaagcattccttaacagggctggacatgattcaccaacttacaaaacaaaggagctgaaaaacaaccaattt

SEQ ID NO: 104392 - DNA, 248 bp, Glycine max
ataccttcctctttccctctattggaagtagctagctaggcacgcccttatccatttctctcttgtatattcatattatctttctcttttcgaatcatgtttaaattgctcatggcaaacacaaacctccgaattgcctgtgttctcctcttgttttttatcttacaccaccaagatctctatgttgaaggaaagaggcacttgaggcttcggttgaacaatcggtgctcgaaagatggtgaaaaatt

SEQ ID NO: 104393 - DNA, 250 bp, Glycine max
aacaaattttatctaactggagaggaagtagcctattggtattgttgtacctttttttcgtgtcaccacttcaaggtcgaactcgtgaattgggtagttatttaattagtgtaaatattagagtgtaggtttggctttgaagaaatattagtttgtttcgaaggaaccttatttttgtacaagggttggtctaatttctctggagaaaatttactatatgtaaaccgacataagacctgatcctttaaaa

SEQ ID NO: 104394 - DNA, 242 bp, Glycine max
gcaaagggatcaatataaaccagacagaagcacaagtagttggagtccagattcatggaaatgaacaaagtatgagacagattctgctgcaaggccactggaaagaggacttgaggtgcctgcacaattaccagtacctgaggttgatcagtactcttatttacatacaaacaacttagtttcctcagaaagcatgtatatgagtggaaaaccaatgcactatcctgagttgcaaaaccctg

SEQ ID NO: 104395 - DNA, 247 bp, Glycine max
aatggcttccctggcctgtgtcaaccacctccctccctggctctcccctcgccccggatccgaccccgaaccgacttcgagttccccttagaccctcccaccaccatgctccccgccgaccagctcttctccgacggcaaactcctccctctccacctcaaacctctttccaccaccactcctcagaaccccaaatcaccttcctccgcttccgttaacaccgtcagggcccccaccactacctcct

SEQ ID NO: 104396 - DNA, 241 bp, Glycine max
tgctgaaacctcatccaagagcaacaacaaactactccaccccaacttggatcttcaactctccaccccaccaccaccaacaacacatcaaatgttgcaaaccgtattgatgctgcaatatcacctaagagggatcatcatcatcatcatgagaaccattcaacccatttgcaactctcaattgggtcatcagatatgagtgagaagaacgaatcaaacaggaactcatcagagaagagca

SEQ ID NO: 104397 - DNA, 230 bp, Glycine max
ggttgcttctcttttattgtctcgtggagaacaaacttgcctcatcttttctagtttcttatgattactaatagcatttacattttatgcgaattttatttgtttgctgaatactatttggtgaacgttatcacatttgattgttatgtataatttgcagtgccctcgaccttgagggggtgtaaaaaaaaaaaaaaaaaaaaaaaaaaaaaaaaaaaaaaaaaaagaat

SEQ ID NO: 104398 - DNA, 109 bp, Glycine max
cgcttccatttctgcgatcactagattatatcttaaccgcatttcgtacagcgacaaggagctacgtcttaggagatccgagctcgagagttctcgtcgagttcgacca

SEQ ID NO: 104399 - DNA, 235 bp, Glycine max
cgagttgaatgactcgccagaggtgatgaagcaaatgccacctcttcctgtgaaggtgaatgaagagctagccagttccatacttccaagaacaaatctcccaccacaatcatgataaatattcatacttaaccaggcttgcctcttgaatatttctgcctgcactgggacgcaaatcatcatattccacctctgagcaggagaataactgccaaatgccaatcaagttgacccc

SEQ ID NO: 104400 - DNA, 158 bp, Glycine max
ctcctattcctgccagttacaatagtcaactagtttctttttctcaagactttgaaaattcaacttttattttggcaaattcaaatcaatcacttgcaatgcaaaaattgcctctatctggcactgatttggctcttcaggcaacctttaggcttgtt

SEQ ID NO: 104401 - DNA, 189 bp, Glycine max
gcctcgccgactcggttgctatcagcgagtgagagtgagtgagtggttctcttgcagcaacaaggtttagtgacaccaaacagacgggaaatgggtcgtggggtcagtgctggtggtggacagagttccttggattatctctttggcagtggggtacctgccagcagtgcaaatggtgctcgcactcaa

SEQ ID NO: 104402 - DNA, 126 bp, Glycine max
ggataacatgttccatatgatctcaaaatgaggttaggccactgaattgtttggtttaaagtggcagtatggaatttatactgtctagcaattgaccatgggcaacattggcaaaacccccatttc

SEQ ID NO: 104403 - DNA, 242 bp, Glycine max
caaatgacgaaattacaagccaaactcttgtctctatgcttaatttactggaagggcgtatagcttttaataatgccttcctccggcattacttgttctgcatattacaaatacttgcaagaagacacccaactcttcatgggattcccagagaaaatagaatgctgcatatgagtcttacagaagctagtaactatcaaaagaacatgcttgctcttgattcagaaagcaaacctttggat

SEQ ID NO: 104404 - DNA, 235 bp, Glycine max
ggacagtatctcgaacaagattgtctagaaaagaggatagtcgtggatgaaatccttcactcacaaccaaagttcgaatccccgtccgaagaggtgcctatatttagtgcccggcagagcttcgaaaaagattgcccccacaggaagatactagtggagaaccaaataaactgggatgaaaacccagttgaggaggttgaaaaaggtggaagcccctatctccattgtagaagtc

SEQ ID NO: 104405 - DNA, 222 bp, Glycine max
ctgtaattggcctattattcttttgccagtgtgaaattaaattcatcgaatctgcatcataaatctctaggcagggatgtttagtctgtactcgataatgaacatggattattgttaatgtagcttagtttctcagaatcttatttgtgcttatgttctgaatttcgaactagctttatatttttatgcttgatattgtgcttaaaaaagaatcgacacttg

SEQ ID NO: 104406 - DNA, 125 bp, Glycine max
ctctctgagccccaatctcttgagcagcagaatcttcaggccaagccaggtaagcaagcacaacacaaccccgaaatggcttctgcttctgttcccatggctttctcgctgacctctgtaatcac

SEQ ID NO: 104407 - DNA, 173 bp, Glycine max
ctgctaattccatatccccgtattccttcactcttgaacgccgcttgctttccgccagcgcaggatgcgtggctgcgtttccgcgacctgcccacaagaaagctttgacataatctgagtatggacaatccaagggggttcgcaagtttactcagagcgtggctttgcctgag

SEQ ID NO: 104408 - DNA, 171 bp, Glycine max
attaatccatgtcagaaaagattaaacttaattttaatttggctgtggatggtctaatatctttccccctcttttatttggatttggaacctctaatgtaaattttggcaaaaaaagcatgacacgggcaagattatctcaaaagcttctatagattaaaaaaaagattgg

SEQ ID NO: 104409 - DNA, 251 bp, Glycine max
aaagaccatgaatacagcaaaaagagttgtgacataattcaaagtggacatgtcagtgatcctgggattggcaaagctgaattttgtgcttctccaaagctcaagcgatcctgctctgacctggaaagaagggatgtactaagggagacttgtcatctctttccatcttcaaagtcacagtcttttgaggatttgcaggggttatcagcacatcagatggttaatctagaaagccccaggtctgtgatgac

SEQ ID NO: 104410 - DNA, 104 bp, Glycine max
ctgctcgaggttctagatcgcgggcggccgctcgcgatctagaaccggctcgagccacaatacctaagtctatatctatcggtgtagtgtggggagaaaggtag

SEQ ID NO: 104411 - DNA, 132 bp, Glycine max
atgcatctcgagccgaatcagctcgacaaagttttcttctgatgtcagtcactcatggttctacacgagtgatggggacttttaggtatttggctccagactatgcttctagtggacaactgacagacaaat

SEQ ID NO: 104412 - DNA, 246 bp, Glycine max
gcgcaggctgcggagatcatcgcgggaaaatggttgaaaatatggattgattttggcgcggttttatctgcaattgggcttttcgaggcccaattgagcagcagcgcgtatcagatcctcggcatggcggagatcgggatattaccgaagcttttcggtgttcggtctaagtggttccacacgcgtggttggggattttggtttctaccataataccgattggtgtgtcgtacatggacttcaccg

SEQ ID NO: 104413 - DNA, 164 bp, Glycine max
atcaataccttagagaaaacaaaagcacagaatcgagagaagagttcttttttgagagagattgggatggcttcgacgaataagatcacactgaagagttcggacggcgaggccttcgagagtggaagaggacggtggcgagtggagatcccagcacgagtcaa

SEQ ID NO: 104414 - DNA, 246 bp, Glycine max
ctggcacagaggtagattcagagacttccattgaagttccagaagaaacatcatcactcatttctgctcttaacgtcgaaaagattctccgtggcttaccaattacagatgcagatcattatggtaggctaggtattccaagaggatgtccctttgacttggtggggggtgcatataatatcaaggttcaagaattgaagagtcagaatttagaggaggatgaacttgagaagaaattggaacttc

SEQ ID NO: 104415 - DNA, 224 bp, Glycine max
ctgtgaggaagaagatggaggacaaattggagagatttgtttggccatcggataaagggaacgatgaccctttgattaacccccttgtggaagaggctcaaggtatttaaggggttgcttgcgataaggatactgttactgatgcggagaaagacatactgaaggaataggggaactttatcacaaaatgttggagctacagtgactggagaggaaatgctgat

SEQ ID NO: 104416 - DNA, 244 bp, Glycine max
aaatggtaagatatcatccaaaagcaaatagcagtggcagcagctgacaaagctgagttttgttcaagggcaacatttgagttactgattatatttttcttaaaggtagagcatcatttaggtaatggtagatgtctataggtaattcatttttgtgccttcacaaacttaccataatcacccaccctgtataaaatttaaattcaaaaacacaaaaaaatccgtagctggttctcaggttata

SEQ ID NO: 104417 - DNA, 240 bp, Glycine max
catttccccaaaacctcaagagaataataataataataataatattccgaagcccatgacgagatcagaacccgcgaactcgtacccaacaacgttcgtccaagcggacacaacctcgttcaagcaagtagtccaaatgctaaccggttcctcggagacagcaaagcaagccgccgcgccgccgccgcctcctcctcctcctcgaaacctgcgaacccgatcccacccatgaaatccata

SEQ ID NO: 104418 - DNA, 241 bp, Glycine max
cggagaggaagaagatggtggataagtggtggagttttgtttgtccttcggataaagggaacgatgaccctttgattaacccctttgtggaggaggctccgggtattgaaggggttgcttgcgatagggttcttgttactgttgcggagaaagacatactgagggaaagggggaagctttatcacaaaatgttgagcaacagtgactggagaggaactgctgagttccacgagactccagg

SEQ ID NO: 104419 - DNA, 270 bp, Glycine max
ttctaaaaaagattgtcaacccacccgccggattgaaccatggtcgtcatacgagagaccttccaagaggatgaagaggagggtcacagcagaaaattgtgattttcttacttttccggagcctggcgtctctgcctccaccgaacccttccggaactgtgtacagcgcttcctctctcaccatgcgcgcatcactttccctccctcgctctttccttcactcatgacgtctcagatcttgttccgtgtcggagacctccttgacgctcc

SEQ ID NO: 104420 - DNA, 260 bp, Glycine max
agtgttgggtgtggaagaattaattcgatctattggctgcccctcgactgcaagaccaacctattttgaaatatcttcacctccttaagagaacgtagtgttgttcaggttcttcaaaaaagttttggtgtaaattgtgcatattatggtaaacaaaacatggagctagatatattttatcttgcttgtcacataaagctgtgagaaaatggtattttgccgtggacttggttatatggtgcttgactctattggctcca

SEQ ID NO: 104421 - DNA, 158 bp, Glycine max
ttggtttgcaaaacatataaaatcagttaaatgtataaaactgaataacgaaaagttatatttatccatatttttttatttattttatttcgttctttcttaatttgtattgtgatctttgctcaaaaatattaatgatacgagtttttgaattgttg

SEQ ID NO: 104422 - DNA, 255 bp, Glycine max
gcaattagcaagctcaatcgttgttgagtatactttcaatctcacgctaactctcagcaaaacggctgcgttagcggtcatctgaaacttttcgcggccaacgtatgacgaccatcagttcctgaatgatatcaaaggttaccaaccttatcgatgctgtcaacatcggccaactcggcatcgttctcgtatacagtaccgcttttccctcagtcccaaacttaatgcgatacttgccgtcataactgaccttaa

SEQ ID NO: 104423 - DNA, 253 bp, Glycine max
ctttacttcactttcatacacatacacatggtctttaggctagctaggaggttttctgatttatgtctatggaagcaatagagaaattggacttgtctttttttagccaagccaacactaacatgaacacatcatcctttagaaaaccacttttacttatgaaaaataaaatcacattaaataattactgctgcagttgcacaatctgccatggataccatcataaccaaaggcaaatcttcgaataaaccac

SEQ ID NO: 104424 - DNA, 251 bp, Glycine max
cagcgatgtcgcagcaaggtcaaattccgataaaccccatggtccctccgcagaacccgatggccaccatgcaggtccctatgcccatgcacatgcagatgcagatgcagatgcagatgcccatgcccatgcacatgcctttacccatgcagatgcagatgcagatgcccctccccatgccgctccagattcccttctccgtccaggacaccgccccctcctccgggaagcgccgccgcgacgacgagaat

SEQ ID NO: 104425 - DNA, 153 bp, Glycine max
gggtttgcaatcactgcgttgttgagatcagaatcagagcgtgttctcttcgtccattggcatacatggccattcacatgagcaagaagcgaaagtttatggcggctggagtgtgcttcgccggactgaacgatgttctgacacgtgagttgg

SEQ ID NO: 104426 - DNA, 180 bp, Glycine max
attgcttttcttagtcatttgcttttctttaatcttcttcttattgcttttcttagtcatttgcttttcttagtcatttgcttttcttcagcttcttcttattgtttttgttagacatttgcttttgctcattcgcctcactcattatctcccaaaatctcatttccacgatcatcgttt

SEQ ID NO: 104427 - DNA, 251 bp, Glycine max
tttaagacctaatgcatattactctaaactttcactactaggtcgatgccagtggtcaccagattctgtattatgtgtagtgtttttagtagttcagattttgtacatccacattatattgtcattatcgtaaatggtaatgtgggcccaatgttgttgcataatttttaaaagtacaatttacatgcatgggcagtctatattttagtatatgcacattgatcccttacccaagtatattataatttaat

SEQ ID NO: 104428 - DNA, 249 bp, Glycine max
gccggctaggattggcatgcctcgtgttagtgtcttggttctgattctgctattgtatgttgtttgattcagttcattatgttttagtatttgtgatttgttgtatggatgaacacaccctatgaggaaagaactcccaaaaattgataggaagtgccgtatgacactctaaacacagcgccaattttaagaacgctctcatccaccgatgtcatcggtcgagagcgttctttgtggtgctgtgtgtgt

SEQ ID NO: 104429 - DNA, 248 bp, Glycine max
ggaattactactgaagaagcaactaaaatccttgtcaattcttataaatcttctgaatttagcaatcatgttcagagtgaaatcgcaaaaagtgataccgacttcggtgcatgtgggaagaagaagaaaatccacgctgcattcattactcagtgcctaatccttataagaagagcttcactgcaaatctatcgtgacacaaacaattattgggcacgtttagttgtctttatcttcatatctttaag

SEQ ID NO: 104430 - DNA, 249 bp, Glycine max
caaagtagttgaaatatcttgtgtgttggcacaggagagaacttcattaggccctgcctcttctctgccaacacccaagagatcaagataataaagatagtgtgaaatgatgttggagtggacactactcattgttaatttgtgtatagattatattacttggccatatatcttggcttttgatgtttcctttctcttctataattcgaatatattttggtatataatgtatgtatacaattgagtatt

SEQ ID NO: 104431 - DNA, 246 bp, Glycine max
ggtggtagtgatggtggtatgtactcatcaagttatggtggcgattatgtatcccgtggaagtgatgttggtggccgttcatattcatctatgtattctggtagaggggtgggtgatagcagcaattatatgggtggtggtggatctgggtcatattattgaggtaagtcttctaactctttgccattgcattttgtgaagtacatgcggaggcactagtatatgtaaatctcattttctctagaa

SEQ ID NO: 104432 - DNA, 246 bp, Glycine max
taagggtactgttttcgattcgatcaactcactcacgcgcacgcctttcattccattccattccgatgcgatgacgacgacgaattccctcttcttctcccttgactggcacaatgaattctatcctacctatcatgatttctaccttctcccccttttcgctctcttcttcccttcccttcgcttctttctcgaccgattcatattcgagaaagtggcgagacggttgattttcggaaaggggca

SEQ ID NO: 104433 - DNA, 245 bp, Glycine max
tctctctctcccttgattttggtacaaggcacaaaacaaagtactctttcaccaatcaatgaaaatcaacttaaggctccaagaaacagaaaccccaccttccatgaacaactccccaagaagcaatctgagcaacaacaactgcaccaataataatagcattggcctccaaatccccaccacaccaaaaaccattcccagatctgactccaccaccaatccttaccccaccacctttgttcaag

SEQ ID NO: 104434 - DNA, 244 bp, Glycine max
ggaaaaggaatagaaaagttttgtaatttttctcttgctccaagttgttgtgaggatatgaaaaaatttatcaattctaactatggaaaaatatcgtgtaccatccttgccgccggcggtctttctcttttgatttatgtgttaaagagatggcccaaaccaaagcccaagcctgagactgagcccacgctcgggcccaagtccgagccccagtccatgcccaagcttgggcccaagtctgtat

SEQ ID NO: 104435 - DNA, 235 bp, Glycine max
ctcgagccgctcgagccgagaaaggttgcaagcttgtgtgcatagtttgaggattttgatcgctgattacggtgatcatttgttaaaatcttcgggaaaaaattatattagttgcaccgatcgatgacagatgcagttagcaatatttgaatatattgtcactatttgtttgaatgtaatgattcttacttacaagtgccaaaaaagaagaaaaaaaaaaacatctaaagaaata

SEQ ID NO: 104436 - DNA, 238 bp, Glycine max
ggtgaaagaagagcgagtcattttcagttcagcctcgatttgttttggaaaggtcgagagttgcagtataaagacactggactgttgaaaaatcttgacctttcaacaaacaacctgtccggagaaatcccgcctgaactttttagcctcactgaactgttgttcttgaacttgtctagaaataatttaatgggaaagatacctagcaagattggtggcatgaaaaatttggagtccc

SEQ ID NO: 104437 - DNA, 239 bp, Glycine max
atctttcgcaaatattttctttcgacgaaaatggatactatcattgtggtgcttcagttcatgtggtgataaggtgaagatcttgatcttgccacttcaattttcttcttcttttttaaacatgatatggagttaaaaatgggagtgcaaacaagcatcagccttaacgcaatatgttaaatgctagttcttgtagatgagcaatgaggggcacctaactttaatatgctttgaaagtt

SEQ ID NO: 104438 - DNA, 239 bp, Glycine max
gaaagttcttgtttaaaatttgcacaactttggagaattctaagtaattagctctagttttatgtgaacaagggttgtgcattggtcgggtacgggttgcaaatccttcatcaagctaaaatgacgggtgttgtcatccacattgtctctggctgtttcccatatgcgagtttcagtctaagtgggttgcatgttagttgggaacaatcaaatataattgatagggatggtgagcagat

SEQ ID NO: 104439 - DNA, 241 bp, Glycine max
cgaaaactttctaacaagcctaattgctggaacctcactactaagcattcaaaaagcatatatataattcgatggcaggtattgcgtatgggatcagcgtgcttgccgttggtgcaggtgaagctccacggcgaccaacacaagcccaaactactactcccaacactcatcacaataacaacactacttctgaagagttcacttatttaaattctgggaagcaaaatatcaagggtcttac

SEQ ID NO: 104440 - DNA, 235 bp, Glycine max
atcacttgctgatgtctcagaaggccttactttgcaggaccacactgaaccaattgatcgaaaatacgagttattgatcacaagaggctgagaatttggctgccatggatgaagctttcccaactttggaggcatagaagacggaatgccaaatggcaatggtgctttattctctgttatatatgattgcttttgctcgtttctctctttagtggtagttaaaaagaatagaatg

SEQ ID NO: 104441 - DNA, 140 bp, Glycine max
tcggaatcggctgcggtcgtttttagcttgaatgacgatattttcattctcacagtagaaggtgcacggccatctacctatatgtatttcagtacctctggtactcttttatctatatataaatacatatctttgctgat

SEQ ID NO: 104442 - DNA, 235 bp, Glycine max
cgcatacgcaccgacgaagactcttccaaagacgaagctgtttccgtatgcccctcccggaccaggggtcgtcccggcctggcccgatttcggacaaatttggagttttgtcgccgccgctgctgctcccgaaatggtgtcggtgccgcagcagcagcagcagcaggcttcgttgttcgctcatcaccaccgtcagcagcagcagctggcgatcggagaagctttggcggcgagg

SEQ ID NO: 104443 - DNA, 240 bp, Glycine max
tgctcgagccgctcgagccgctcgagccgctcgagccgtgattttttgcagagtagatgcctaggtggagactggtgaaaacaacagtactagtagtagtaaccaaagttgtgcagtgatgatggattctaaatggtacactcaattcagaaatgtatccaatccttggatggcaagatatgtgtatggcttgattttcctagtggccaatctgttggcatgggctgcccgtgacgaact

SEQ ID NO: 104444 - DNA, 266 bp, Glycine max
cccacctccacctcctcctcattcgaaccgaagctggaagccgttatagacctgactctcctaaccgctttccaatctaaacttgggcggttcctatcttccggcagagacgcttaccacaaacgcaggctcgtcgtttcgtgccgcccttccaccttgcatttcctcggaacttcagcggctttgaccttcctagccgtttctgtattcacggttttggctcaattgatttctaagttttcgtcttggcgtcgcaacgcttctag

SEQ ID NO: 104445 - DNA, 261 bp, Glycine max
atgaaagtttgtgccacacgaacctttttgatgaagagttcctaagagatattctgcaacggccacaagagggtgctccaaatcttaacaactcatccatcatgtcgtctctttgtgctcaagacattaagccaactaccttatttccaaccacttacatactctctttcgacaattccgctgcattgttaccaacagaaactgatcgtgatttttcttcttccaaattgccctcatcaaattcaagggccaaccatggaa

SEQ ID NO: 104446 - DNA, 246 bp, Glycine max
tcagttttatatttgagctggttattactttgttttttctttgtaaagggttgaatggttctcatgtgccaagagatcatttgctgctgtcaatgatctttctccatcgagattccccatgtggtgtggtctactatgtggatttatccgtcagttgccttgtcaaggagactcatgagatgagactattttccctttgtagtgttggggttggtcttagtatttgtatggcgcatttatgggtat

SEQ ID NO: 104447 - DNA, 255 bp, Glycine max
ctgatgttataataattaaattctcacatcaggtacctacctcgatttcctcagtgatatttattgaagattttaattagtcctggtttgtttgacctgcaccttaggtaatgccaataatattctgttttagatgtcttattgattgtttaactcatggctgtgcaaccccaaaaaatgcctcatgagtatgcctcagttttctatagtgtaatcatggcaaggtttttgtcaattttagtaccattaaaatca

SEQ ID NO: 104448 - DNA, 265 bp, Glycine max
aattgagactgcttgccagcatcaaagctatcaattcagcatcatggatctcacctatggtcttgtttagtgatagtaagtaccatgtttacatcccaggattttcatattatttttttgttctaggccagagaccatgagtgtcttccaacccattgagtcaaagactaatcccgctcacgatacatgactgtcgctgacttatgggaattttgcatacggatattgattttgagttcaagatattatcacttattgcaggaca

SEQ ID NO: 104449 - DNA, 253 bp, Glycine max
atcactgaggccctgttctttcatttgatgaatgattccaggacttccacggttacttcaacatggacacagttttattgaggatcaagaatcaataaaactgtgtccatgttgaagtttccgtggaagtcctggaatcattcatgatatgtataaataggaaaagcaagatagtgagtatgagtatttgaaaaatcactgaggccctgttctttcatttgattttaacttgagaataatgatattatcatgg

SEQ ID NO: 104450 - DNA, 256 bp, Glycine max
ctgcaaacaaggaatcagttacggtgtacgaggagaagattctcgtcattatggccggagatgagaaacccacattcttggccaccccgaaagcctcctcctttgtccctcatggtgtccccaaccattttgaggaaaacctcgaaaaccatgtgacttctgagaaatcagagaaaaaccatgttcaacaacctacgtctccgcaacaacagagccagccacgacaataagatgtcatttggtttgtaattctatg

SEQ ID NO: 104451 - DNA, 270 bp, Glycine max
caacagatatctcaaggcatacaatcctcttctgctgatcaatttctatgagatgcatctccggtatactcctacaccgtgactgaacagggtaatgaaggggcttcctgtgtttgctgttggtgataacaatgtagttttgtagacgcagcggatcgtgaagggtaatacttttttggttagtgtatgacgatataaccattagaccaattgtttcaaatgcctgcctgcatgacttcatactaagacaaccaagaattagagccatga

SEQ ID NO: 104452 - DNA, 255 bp, Glycine max
gtctgcactctgatctgtgggtatatattccttggttttgtcagaaacaaccccctagagctgcaaagggttctgatttgcagaaccaattgaatcttgctcaagaagacctaaagaaagcaaaggagctgcttattcaggctgagaaggagaagctaaaagcaattgatgacttgaaagaagcacaaagagtggctgaggaagcaaatgagaaactccgggaagcattggttgctcaaaaactcgctgaggaga

SEQ ID NO: 104453 - DNA, 229 bp, Glycine max
atcagattcaagctttagcgggacacaagcggtgaattgtgtcacacacccttttaaatttattttattttaatatcatggccatgatattaatgaagttcatatagtgtacacggaccctttaagtcttattcttttctttttcctacaaatgatgtagcattgtactcgtaataccatttttaatcttttttttatgtgcacataaattacaatcatggttggagtc

SEQ ID NO: 104454 - DNA, 209 bp, Glycine max
tccagatttaggatcaatttctttctggtttcgtaacaatttcccttcaatatctctgggtgttgttgctggacccaagagttatttaaatgtgcattccagatttaggatcaatatcaataacaatataacatttaatttaggaataaggaatcatttggttcaagtacgtcatcatcgggtggagctagcctcgatacctataggtt

SEQ ID NO: 104455 - DNA, 206 bp, Glycine max
aaactcttaagctcccgtagttaaatctgcgagccattagttaaagaaaaaaaaaaccctaaaaagtttaagatgggttccaaaactcgctctttccttgctcttttcctcacgatcaacattcccttctttgcccttgcctctgcctgcgggacatgccctagccctaagccaaggcataataggctcaagcctgttaagccaag

SEQ ID NO: 104456 - DNA, 209 bp, Glycine max
aagctaatgcttcgggccatagagcacgaaggccgctgtcaatatttgctgtgcaaggtcattgctgttacttataacaaaagggagcatggcaaagacgtagaactgggaagggagataacctatgcatgagagttaataacctgatgactgaaaacactgttttacccaatttgagttttgaatcacatcacaatgatgtagaaatt

SEQ ID NO: 104457 - DNA, 242 bp, Glycine max
cgaaagggataatattgttactccaatgagaaataagcctgctatattaagcactgcagataaaaagagatctactcctagatcagttaattttacacccattagagaacttaatagattgactgcttcagtcatgaggaaatttgaaagtacaagagctggtgctggttcttccaaggcttcaaaggatagcttgactcctctaagaactccaactatggcttccaaggagatgcaaaagc

SEQ ID NO: 104458 - DNA, 256 bp, Glycine max
cattcaaaggagcttcataatttcaacagctcaataaggaactcttctagttagattttgtgggatttggattcttaattgctcaaggtttttgcctcccccccgggcacaccgaagccgtagcagctggttcacaattcaaagcatcatctgcgggtgtgattgctaaattctgtgcacttggaaatatgagcgtcgatggatgggtaataaaatagacggttcaacttatttgaatgggctaatttgatcattc

SEQ ID NO: 104459 - DNA, 99 bp, Glycine max
caactttacccaacatgaataagcaaaggaatgcgacattattcttcccttgctctttaatggctcgatcctatctcccaagcaaggtctcagagatag

SEQ ID NO: 104460 - DNA, 254 bp, Glycine max
atgaactgaaaagagaagcagcagaaagaggctggaacttgggagctgtaacagaaaatgaccaattggcaaattccgaattatgagattcagaaaaccggttcaaaaaagaggggaggggctgcatctagttattcaatccttattgaaattagtactttcccatcttccccccctaatgcattagcagatcaagatacctgtttgtttcggtgatatacgaacttgattccatcggcaattcaacatgggat

SEQ ID NO: 104461 - DNA, 99 bp, Glycine max
gcccagaggcgaactggggttgcgagtggaggatttatgggacattcaagaaccacagctaagtcctgatgagaagctcaatgcttgctttgaaagcat

SEQ ID NO: 104462 - DNA, 100 bp, Glycine max
gtgattctgaaaatctgaaatttcatttctctctgtataaatatcctagtccttatcagcttcactatttcgattgacatcgccgaagaaggtattgacg

SEQ ID NO: 104463 - DNA, 248 bp, Glycine max
tggaaacactggcggtaacagtaacaataacaatattgttaatgtttggtattcatcatgggatgctactactacaactaatgcaccacacaccaccacggccgcggagggctacgccggcggcggtcaccgcctccatcaccaccaactatacggcggcgaagggtgtcacgtgcaggcggaccctcacctcacgtgcttgcatcttggtaaaagacattactttgaggatgctactaacggtgatg

SEQ ID NO: 104464 - DNA, 241 bp, Glycine max
ggagaactgaagtcatttttagaagcatgtctcctaggcataacaggtactatctatttctatttgccttaaactttgcctttgtcctcttttttcatttaagaaaaagaaaatgtgttgggacccaacccaagcaaggtacgacttttgagtctcatattttaagtattatattctgttatggagtttgtaagacctttccttgatcttgtcaactatagtgagtagctttcatggtgtg

SEQ ID NO: 104465 - DNA, 240 bp, Glycine max
atcattattatatttttaattagaatgtgactctttttaacttgttcattggctcactcttagaatagtaattttgatccataagcaaattagacatgatatgctcatttacgttaatgataactgactattgctaactatgttttgctgtctaccttctcttccattcgggtgacacagcactgagatgcttactgggtaacactttattaagctcttaaaagaagggtggtcatggcc

SEQ ID NO: 104466 - DNA, 236 bp, Glycine max
ctcaacaattcaactgcagggaactgtctggcaaatggaacttctgtaaatggtggtaaaggttattcttcaacactgaaaaggaagagatcacaagtggcaaatgctcatgaattattgaaaaggaaaaatcgacgccggcccttgactaaggttttggagagtacagccatggtgtcagttcctgtcatttgtaatcagcttcccagttcaagcagttctccactgtgtggggt

SEQ ID NO: 104467 - DNA, 237 bp, Glycine max
cactctttgatatacttatcctatttatttgcaagaacttgcaaatttttaggctttagggtggaagacaagctaatttaccaaattttgagcaatttgcagttttccagcaccaccacctagaagacaacaaattcatgtgcacaatgaggatatgagaaggcttagagagattttccttcagccacctcaaagatccacattccaaataaacacacaagctcccccaccggtaga

SEQ ID NO: 104468 - DNA, 168 bp, Glycine max
agcaggggcaaatgacaatggttttgtggtagtggtaatttgtgaaacattgatttggtacagatggcgtggagaaaagggtgtgaggaagtggctaattcggagcctctgttccacacgatctacgcttgtgtcagcatgggcgttaaggacggctacggctgcatc

SEQ ID NO: 104469 - DNA, 260 bp, Glycine max
gcgatgatgaagctgacaaggctgtgaagacacttctggccttaaatgaacacaaggataagtactcaggtggaggcaataatggtgacactgacaatgatgttgacgttgatgctgacaatgatgaagatgatagtgaggaagatttcgattgttctgaatcaaaactcgatgcagcagaagcaatacaagttgcatgatgaatataagatagagctaaatggggaattttttgctctcctactgattatacctgaagg

SEQ ID NO: 104470 - DNA, 252 bp, Glycine max
ggctgtaagaacaggcacagttgcagtggcctaatcaaagaataatccatgacatgatgatgagtggggaaagtgcccaatttttgaaggaaaaaaagatggaatattggaatggaaaaagttccaaatgaagaagtgaaatcatcaataatccatgaagattctgataacccgggatgaatcttcaattcgccgcctttgtaaagaaaaaagttgggttttccattgagccaaaattctttgttgattttt

SEQ ID NO: 104471 - DNA, 258 bp, Glycine max
gcatgatgttcttgggattgctatggaagagaaaagggttggatttggggaccagaaaattaacagtcatgttgattggacgcttggatctttcataattgaaacaatggcagaaccccttgaattggaacatatagatacagggatgattgttggcaatgaatcactcacatatttttcattatttgcatttcttttcttattcatacttgctgcattctttgtaatgcaatggagaaagccacaattgaagacggt

SEQ ID NO: 104472 - DNA, 255 bp, Glycine max
atcaaagtggtgtttacaccttgtagttaaatgttgagatcttacattgactagagacatggattagtagtgaagtctaagggttgtatatacccttcacttcaaacccgctgttgatatttatttgagccatgttttatattgctgctaattactttctatgtgccctttttcttaattcatttccccactatcctatttatctgctctttgaatgtctcagcatggcatgagatgaaatcgaccaaaataatc

SEQ ID NO: 104473 - DNA, 246 bp, Glycine max
atttgcactaacctcccttctatggagcctcaggtaatgccatattttattttttcccctgtttctaccgagtagagacctttagaggcatcttccttggtttcttgtgttgtttatcaagcaaattaaatgtcatttgctcccatacgatcctctgattaacttttctgaagtattaaaagtagagacagctgtgattttagttttatcgggtcactcttgtctgcaataaaattcatttttctt

SEQ ID NO: 104474 - DNA, 251 bp, Glycine max
aagagagtgaccccttaacatgtcagtgtcacaaatcctaactaacttcccccatagtcatatttcgtcgtcacaacattagaaggctcatcttgtttatgcccgacatgttcctttttgtaaatctgtgtgcatttagagttgcacttatagatgattcttgatatcatcagcaattttttatccaatattctattatgcctttgctgcttgtgtcacatgttccgtttcctcttttattaactttgcca

SEQ ID NO: 104475 - DNA, 253 bp, Glycine max
ggtagtttcttttcagttcgaacatgatggggtcgagacctaggatgcaccaaaacgggcaccaggacggaggacggaggacggaaaacggttaaaagaagagaaggttcaagtagttgatgtctcgctaagagagacatatgtgcttagcgagtgacatccgctaagcaaagcatgcagctcgcttagcatgttggaaaaccctagaataggatcagtcagagatgtgctcgcccagcatgccgcaaacttg

SEQ ID NO: 104476 - DNA, 247 bp, Glycine max
taccaggtttgaaagagaagatggcactggaggaaatgttgatacgatgccaactgaagatccttctaatggccttactcaaccaagcttgcaaattgaagatacagaccaaggcaatatgcatgagttaagtgaggtacatactgagcaatctcagcggggtgatataattaatgatgaaagcgatatagttgatgatgtagatttgattgaatctattgctctggaaggggagcaacaggaagaa

SEQ ID NO: 104477 - DNA, 241 bp, Glycine max
gaaagagagtgtttgggagtctgatttgtataacaagtgctgcgacggtggttataaatcggggatgaacgcatttgacataatatcgatgtcgtcggggttggatttgcgagggttgttcgaaacgacgtcggagaaggggagaaggagggagaagaggttcacttcggataaaaaagtggaaacagtggaagcgaaggtgaaggaagttggagagaaattagggtttaggattgagata

SEQ ID NO: 104478 - DNA, 244 bp, Glycine max
cgttaaactccaacttcaatatcttcaattcacaactctaaatttatcacatgcctttgaaaattctcagtagatgaaggctttgaactgatgagaagcttcaacactttgtcaagcatttcgaattcattagtgtcggacacttaagaatcacaagatattctctttggctgcaccagcttggagattaccgaccacctgctctgctttaagtgacttttggggccagtaatgaaacacaaca

SEQ ID NO: 104479 - DNA, 238 bp, Glycine max
gtcagtccaactataaccgaaaacccgtgactcagccccacttttgctttgcttggcctacccactaaccaaaccaaacctctcaagtctcaatggcttctcagcaacacgacgccgttttccgcgaagaagacatggacgacgacgacgacgagtctcaggaggacggagactacgaagaagaagacgacgacgttttagccgacgacgaagaaaacgagccctctccctccacggg

SEQ ID NO: 104480 - DNA, 231 bp, Glycine max
agcggccttctgctaaagaattgatagagaatccaattttttgtaggattcaaaaaacagcaagttgataaaccacgatttattgtgtttcggttggaccatatacgaccggtcttgattatgtcatggccaattttgtgaaatatcttttcggatatgtatgcaccaaatttatctcgagtatggtgcaaatattgtaaatttaacggtccaattatgcattgtattgta

SEQ ID NO: 104481 - DNA, 240 bp, Glycine max
ctcggagtattatgtggcagtggtttgtgatgaagaggttgtgctgcttctcggtgatctaaagaaagaggcatacagaaggacggggtgcagaccagcactcattgaccccattttggtttcaaagaaagaacacatttttgggaagaagaagttctccactagagccaagtttcacgagaagggtaggtggcatgagatttcaattgagtgcaagaacaaggggaattataatgtgga

SEQ ID NO: 104482 - DNA, 134 bp, Glycine max
ataaaaaaaaaagaaaaagaattggcagaagggcagttaaatgtaaaaatctccctgtggtttgtctcaaaaacctgctgttctgaaggttagggattggtatgtggattctttccgtgatgtcagcgccttcc

SEQ ID NO: 104483 - DNA, 234 bp, Glycine max
ctcggtgtcatgtgcagcagtggtatgtgatcgcgacgttgtgctagtactcggagatctagagaaagaggcatacagatggacggggtgcagacgaccactcattagaccgattttggtgacaccgaaacaacacattgatgggaccaagcgggtctcgactagagcgaagcatcacgacaagggtaaggggcatgagatgtcaattgagtgcatgagcaatgggaattataa

SEQ ID NO: 104484 - DNA, 217 bp, Glycine max
agatgaaagccactgagtgcgattcaataattgcgcttaacctcggggactgttatatgattcggtaccggctggaccaggtcctggatagagatgagatgctttcggcttaagaaaacttcgttaaccggggaaaccaaacgcaggatcggcggcagctattggcataggaagtacgtcgaggaggttctctactactaagaataatctcatccac

SEQ ID NO: 104485 - DNA, 244 bp, Glycine max
cagaattcctgttctatgcctccttttgcacagaaactactaatttaccactcattgccataaactcccatgtgttgctgttccctttctctttccccttacctttcacctgtgtgtgatgatgtagatagagaataaaaagagaccagtgtgcagtgagaaagaggttggtcacttcttgtgtggctttgttttgttctttgtgttggaatttgttgatgggtgaagagggagaagaggtgtc

SEQ ID NO: 104486 - DNA, 234 bp, Glycine max
gtaaatgagtgttatggttgagctccctggtggatgcttaatcgggcattgccaaagtgcttcagaagtaattcttgccacttgttactcagttctcatctcatatggtgcggttgtaccactctttgacgaatcaactaaccttctacagtcttccaatattcaatttctaatcgctgagttcatagcaatacttctcttcctttatgtcatcgtgctcaccattattcgcta

SEQ ID NO: 104487 - DNA, 233 bp, Glycine max
atgctgtaaaattctcaaactcacagtttcagttcaatcacattttggtctaaagatccgtgccttgacccttggcagtttcagctttcaaaagggttggagtttttcttcctcataagccactgaatagtccaaatttttcttttttcttttttttcccctctctctctctctctctaaagttcaaagtttttgttgttttccccccgagtctttctctctcttgctgtgga

SEQ ID NO: 104488 - DNA, 235 bp, Glycine max
tcagttacttaattttgtattaaatataagagacaaaaatattgttttgagaaatattcatcacagaaaattaattggattagtgataaaaattaaattgtttatattaacaacattgaaattgctcttggtgcgctgaagtattcattttttatttttacttttgcccttcatgatgatgactatcagacaaaatttctcatttctctactattaatgtgacagtaaaatttaa

SEQ ID NO: 104489 - DNA, 234 bp, Glycine max
cgtacacggaaagaagcattgcacgctcttgatgcattgtcacaatcagatgaagctcttgcatccttgcatcatgccggggccatttcagtaattaggtctgcaccaaattcacttgaggatgcagaagttgagcgattcaagttgagcttgatgaaaaggtttcaagatctcagatacgatgatgtgtcatcatgagttgaggtgcatgcctatttgttttttttttttggg

SEQ ID NO: 104490 - DNA, 267 bp, Glycine max
gagattttgaagggaaagggaagggaggacaattttttatttttaaattaagagagttatataatgtttataaaaataagcaaaagattagaggacattaagtttatgctaatctatcattatgtttcctttatattaaattaattatcaaattaaaagtcaggtagattgaaggttgttgaagttatatagggttttaggtattgtggaaagaatttagagaatacaaatcataaagcattaactcttaactaaatcatagtaaga

SEQ ID NO: 104491 - DNA, 100 bp, Glycine max
cacataaatgcccaaattcttgctcaaacaaaattgagagtactatatatctgcctttacttgagatctgatcatatccttcagtaaagcagcaaagcag

SEQ ID NO: 104492 - DNA, 259 bp, Glycine max
ttgatctcccctttatcctgttttttggttcccaacaagacaaagtcttcttcagcatctttgtggtgaaaaacaactcaaaggggattcaatttcagattccagttctgattcctgtgatcagtgccttacacaggtttaggtttggctttggcatcttacaagggacataaggccaaccatagtcttgatggttggttatggattgggatgtgaaagagtatgcttgggatacacgtcggttggaactggctaatgg

SEQ ID NO: 104493 - DNA, 276 bp, Glycine max
  unsure (1)..(276): unsure at all n locations
attggacatttatcatttttattttttaaagaaacatcttcttacaacaattaaaaattatttatttacctatatagtgttgagaattacacttcaaaaaaatatcgtacaaatataagagattccgccactcaatagtagcaaatagcaattaagacattcagatcttaacccctaagaaaagtatcgaaaaaagactcatagtccatcacccagcaagaaaaaagaaaatcgaagaggaagagcaaggacacaacacaaagaagcanaagaaga

SEQ ID NO: 104494 - DNA, 229 bp, Glycine max
gggatttcaaaagaaatggagtgatatttgtcagcgtcttcatcacacaagttcactacctcaatttgatatttctcaaacaaggtcccaagctccaacagttgaggttttacggtttggtctggcttttaggaaagcagcaataaagacccatcacacagtgaattccaatattctagtcaaatttcctgcatgcccaaagagttgcatagtatttttccttcgaagc

SEQ ID NO: 104495 - DNA, 223 bp, Glycine max
gatgtatggtaattgaaatatcatttcactttttatgcttctgtattttatcttttttggttcatgattttcttctttacaattaaagctagccccaaaacacatccttttgaagaacattattttcatcaatatatttctgtgtaagttcagttgttgaagggaattttttgaagttcaccaatcatttgttaaatttcaggagtacttagctaacccagtg

SEQ ID NO: 104496 - DNA, 227 bp, Glycine max
agatgagtgatctaggtcaaggttacaacatcctgagactttctcagggaaaatttcttggtagaggagctgtggaattttgtgatggacccaccttaggaggtttatgttgttctctcacgaattatccaacgttgtttggatcaacgttgggagagtcgagttgtttttttcttcttcattaggtgcgtccggatctgtcattgtgcattggaaaatactttcca

SEQ ID NO: 104497 - DNA, 129 bp, Glycine max
gtggagcaatatgctcacttgggattacgtacattatgtttggcttggcgtgagttaaagagagatgaatatcgagaatggtctttgatgtttaaagaggccagtagcactttggttgataggggtgga

SEQ ID NO: 104498 - DNA, 224 bp, Glycine max
gtcccaggaagacgagggatgatttcctgtcgcagggtttcaaattgacattatgaggaagtctaagaagaagaagcaatggtacatgggggtagctgaaactggctcggcgggtttgttttgagttgattcaagccaaagggaggttgaggaaaagtaagaaaatgttgcttccgttacaatgactgtaatgtatagttaaattaatactatcagctacatat

SEQ ID NO: 104499 - DNA, 230 bp, Glycine max
gcttaggaagatgaggctgcatactcttgtgtgaccaaagttgcttcctctatctatcgtgttcttcgcgttagggtttgcgtaattttcagatagaaaaacactgacatcattgtattgtgcggttcagaagatgagtgaagacgtggagatgaaagatcaggcaacgccttcacactcgctttcttcagttcctccatctgcattgcagcatttgaaggaaatagcat

SEQ ID NO: 104500 - DNA, 223 bp, Glycine max
aaaacatgttcttgtggaattcagaaaaagcggttaccaaactacttctgctgaagccatccatcgcagagcttcacctgaatatagcatcataaaaaatgaggaagagatctcacaaagcttgaagatggtgtggttcaacaattcaaaaggagtaaaagctcaaatgaaactagagcttctgattatgattccaacaagcatgatgctcgcctcatgcgaa

SEQ ID NO: 104501 - DNA, 210 bp, Glycine max
ttttcttttctcaatttttacccccccccctgatttcagtttcttattttctggggcaggtctttttcaaaaaattcccccttacaattattcactgtaaaatcttaggaccgattctgcattcttggtgcaaattcttattattattctggcaccaactgtaagatatatcgctaattaaacaaagattttctaccagctttcattgtc

SEQ ID NO: 104502 - DNA, 232 bp, Glycine max
ctctcttgttacacattctacattctctctctattatttttcaccctttttctctcttttgcaaagaaaacaatttaattaagtcaatttgtaccaaaatggcttctcaagtttgtgaaactttggctttcatcaacggtgatgatgggttgaaaatcaacggtgctcttctaatgtccctgatggaagagccatcaccaagtgatgagagtgatgatgatcgattggatag

SEQ ID NO: 104503 - DNA, 204 bp, Glycine max
gcattaatggtgcaactccgtgatcctatgagaaactatgagccggttggaacaccaatgcttgctcttatacaagatgacaagagagcgcgtgacgtctaaacctttggtttccaacagtgtgtctgagataaggataaattattcatacgctgacttcagtggtatatgttcaccagtcgggtcttcttattcgagcaagag

SEQ ID NO: 104504 - DNA, 230 bp, Glycine max
tgttactgttggagagtcagttacctcacctgctgctcttaatttagctggactcctttctgattgtgctgagcttttctctagaatattgagaaccctatttgaagttgttatatttgagaaccgtggcaatcattggactcttagccgagccattttgagcatgatactaatcagtgaagagatgttcacaaatgtcaaggctcaaattttggtttcgtatccaccag

SEQ ID NO: 104505 - DNA, 224 bp, Glycine max
gctcgagctgaaactttgtttaactttctgttccctaacatcccagtattaaaatattgcttggcgttgaactttgatatttcagttggcgcgttaagtttaaacctttggtttcttctatttgtagattgaagatgataaaacaatcataccacggaattcattggttgatgttaaccagtcgggtcttctgatggttattattatcgacattactcctcgtt

SEQ ID NO: 104506 - DNA, 224 bp, Glycine max
aagcaattggaagtggtggagctcagcgagaacgcgctcaccggaaccgtcgagtcgtggttcttccttttgccgtcgctgcagcaagtggacttggccaacaacaccttcacgggggtgcagatctcgaggccactcgaggcgcgtgagggaagcagcaacagcaacctcgtcgcgctcaacctcgggtttaacagaatccgaggctacgcgcccgcgaatct

SEQ ID NO: 104507 - DNA, 231 bp, Glycine max
gttttcttatgacaacatcttaaacatcgggaacccgttaaaaatgtcacttgtctgattatcaatcagccttgtctctcgggatacctgcagacgctagctatgttgagaaagtggtactggtaacagctcaagtaatataaattgtactacaatccttcttgaaataaaataaaagcgtaaatgtcttgttcaaaaaaaaaaaaaaaaaaaaaaaaaaaaaggggggcc

SEQ ID NO: 104508 - DNA, 221 bp, Glycine max
aaagattcttgttttgcaccgtttcacaaaatgccacaaagaaaaggttgcagttctctgaatgagcctcgtcttgttgccaggaaattcttggcacgacctcagattgagggtgttgggactgttgttagaagaagcataggagggtaagtagtaagagaaaatgaaaaaaaaaaattaaaattaaagcttcaagacccttttttcaatttgcatcaaaa

SEQ ID NO: 104509 - DNA, 239 bp, Glycine max
atcaaccccaattacttcatgtctggacaagaggcacgtgagccttgtaacaacccacctgtggagcagcataatataaccagtgactacttttacaatactgggagtggcacttttgcttcttcttcccctttgaacaaccgttctcctaattccaccagctcttatgctgctgtcattgggaactccaggtacctcaaaccggttcagtcccttcttgaagatcttgttgatgttgg

SEQ ID NO: 104510 - DNA, 236 bp, Glycine max
atcgaaagaaaaaagaaacaataacaactaaacaagcaccataaattttttaaaacctctcttctttcttctccatcgctgccggagaatgaacattccggcgaccctaacttccccgtcgatgaataatgctcgtctctccgaccaccgtcgccacgtcttccacacaacatacgaaccatattcatcgacggggaagttagggtcgccggaatgttcattctccggcagcgatg

SEQ ID NO: 104511 - DNA, 223 bp, Glycine max
attgtgcccaaggacggcagctatggtggttggaggggttgtacactggtttgcaatgtggggaaaacttgccatttatgatcctcgtcttggagacaggtatatagccttgattaaactaccaacaggtgtgttaacacatgagcatgaggaatctgttcttggggagtcatctgatgggcttttgcagtatggccagagcaataatttgggcctggagata

SEQ ID NO: 104512 - DNA, 233 bp, Glycine max
agtaaacatgagggcacgccaatcttggcaaaatggacaatgggttgtcatgtcaaagggatcaggaatgtctggagatgtgatgtctagccggtatttgatttcaaacagttacaaggatcaacctgaaaatcagtgcagaaatattttttctccaggattagatgccagtggtcttcaggaatctcgtctggcttcatcttcaacattgaagagaatgtccccttatgact

SEQ ID NO: 104513 - DNA, 228 bp, Glycine max
gacacaaatataatttcttttggtgggttcccagatgaaagggatattatctctgtgggtaggcctgctgcagagtatgatcaattatataatcaatcttcagtgcatgggtcaacaacagcccacgagaaagagttggatgtgtcaagtgctgatgcagttgcaagtacacttcaggtagcaaaagttaagtctgaaactgtatccaagaataaacaagagctcaaa

SEQ ID NO: 104514 - DNA, 224 bp, Glycine max
ctttgttagtgataattttgctatgctgttttggttcttttgatttctcagtttgattgagtaggctttaatgggtttgtttttcttgtgatggttgtttctttaatcaagaaggtggtgttgttgctatttactaaaccatgagtggatcatgtatttgttagcttaattgaatgcatctcttattctggatgttcactgggttgatttgattctgggatctg

SEQ ID NO: 104515 - DNA, 242 bp, Glycine max
tcggattcggcgcatgcttcaggttctggatctctaatacttctactcactgtatgctcttgagtaatttttgcagagaagtacactatgagcaggccaggagactggaattgcaggtcatgccagcacctgaacttgcagagaagagattcatgccagcgatgtggggacgcaaaatatggcgatagagttgatttttgtggctttggaggacgaggatggtcttcatttggtttaactgg

SEQ ID NO: 104516 - DNA, 227 bp, Glycine max
gtttttgcccttgaagtgaaagggttttgaagtttgatttttggtttagctgtgccacaagagtatgaggaaaaatgtcggttctcattcaggaaggatgtttagtgataggaagtggattctccccttttttgcaagtttgattatatctatgagtctagttctgacagccattcttggattacttagttctgatggcgggggagaacagtcaccgtttgaaatca

SEQ ID NO: 104517 - DNA, 271 bp, Glycine max
gtcgcatgctcgcgaatgcggctcgaggtataatatggtgctgaagtttccaaggagttaactcctttatggattttgggcccacttattgtggctacccaaatcttggcaatccgttggctatgtgcactctatgttttcagcttcaatcagactgtcaaattactcaagaattctccttattactgcattttggcctacagctatgtttttcgtggcaagctcaaagaggatatctcaacttatgttttgcagcctatattgcgcgtta

SEQ ID NO: 104518 - DNA, 242 bp, Glycine max
gacacaactctgccatattccatcttttatttgcttttacagctatatttgtttctgaatcatgccacacttttcaagtcccaacgcattcaactaggattttcaaggctgtatatacataaattcagctactgaggtcgtgtgctagaagcaaaatcaagaacaatttgatctttgttcaatttggtggatcattgggctgttgatgtgattgtgaagcataagaagcttttgttaaaaat

SEQ ID NO: 104519 - DNA, 244 bp, Glycine max
ggagaattgatcccaaatacgcctaagattgatctgtggcaaagtctcctcaagcgaactctttcctggaaacggtaaacataacattaaaaacttgtaaattacgcatgaaatgggaaacgcaagcagatgcagaagtaatatgcacctcactgttgtcgtgaccataacgaattaagatgttttctgcaacctctaatatcttgcattatcctttgtatctctagaatgtgagcatcatagt

SEQ ID NO: 104520 - DNA, 244 bp, Glycine max
gaacagtcttctgccactgctgtgacaagcagagatatgacaggacaaacttctagtcagagttaccttctgagattacaggggcctctccacccagtttgtgttgactttgcagggccagctggtgagacagacaatgctttggaaaatgctgaaaatggtgttgtacctgttgtgactcaaaagatgtcaactagagatcaggccacttctggtgaacacatgcctgttggtctttcctctt

SEQ ID NO: 104521 - DNA, 197 bp, Glycine max
tcgaatcgaatgtatgtaaggtacatacattcttggtttcacaaaccaacaaagtggcaatagccaaggatcaataaggatagagtgaaaattttgtgtatcataaatgagtgttatcatatttgtaaatgttctcaaggacatctgttttggttggaactgcccaaaaattgcagttttatctattcactgggtat

SEQ ID NO: 104522 - DNA, 141 bp, Glycine max
caccttcacaattagaaaaaaaaaaaaacacaaaatgggcgtttctcgttctcaaaagcctcatgttgtttgggggccattcccagcacaaggccacgtgaacccttttatgcaactaagcaaactccttctttgcaccgg

SEQ ID NO: 104523 - DNA, 242 bp, Glycine max
gtttaccaaaacaattagcatactaaaacgcattcatgtgacgataattgttcctgatgatgcgagtttcagtcaaatcaaaatcatttttttcaagagtgtctgtctttggccactgaactacctcagtgtttcgcatgtggttttgtgttctcagcaaaaaccaaagtcgcttcctctatgctaaaagggacaccgagagagagagagagagagagataaagagagggtttttcaatccc

SEQ ID NO: 104524 - DNA, 237 bp, Glycine max
ccagtttcgagcactgaagcacagtgatgcatttctgatgtgcactaccctcatgacaactgtgtttggggcaatggtggtacacctgctactaagggctggatgtttttctcctggccaagttgatgccattcctggaatcatttttttgttctttgtaggtcttctcatttgcccatttgacattttttatcgccctactcgtttttgcttcatccgggttattcgtaacatagt

SEQ ID NO: 104525 - DNA, 217 bp, Glycine max
tcggctcgagtgtatgtagggtacatacattcttggtttcacaaaccaacaaagtggcaatgcacaaggttcaataagggtaatctctacgtattatgtcgcgttgagtgtgggtagcatactcgtacttgataattttcatatctgcaattgcaagtgctagtgccgtcgtgccgtggtatctgttcactgggtattaatctaataggggcggccg

SEQ ID NO: 104526 - DNA, 238 bp, Glycine max
tgtgagatttgccacatgttgatgagggaaccatgcatggaatgaaaagtcatgattgtcatatattcatagagtgtttacttcctattgcttttagctcattgccgccacatgtcttaaatccacttaatgaaataagtcatttcttcaaagatttgtgttctacatctttgatgaaggatgacttgagtagaatggaacaaaatattcatttattttgtgcaatttggcgggaata

SEQ ID NO: 104527 - DNA, 236 bp, Glycine max
attccaggcaaaattttcgttcgcaaacgtacttttggctgtaaccaaacatgccaccaaaatgagtttactctccaaactgtgtttggattactccaaacggaaaaccaaacataccctaaaaccttttgcaactaagcgtgtttttatacctttcaatagagtgatctgtcttttgactatgtaaacccacttgctaccaattgggatcacagccgcacgtttttctatgatca

SEQ ID NO: 104528 - DNA, 233 bp, Glycine max
cttacagtctcgaaggctaaagcaacttcccttaatctcttgcacgaagaccctgaagtaatgggattctcagagcagtttggagatcttgcaaaagaggggaatgtagccatatctccaatggaaatacaagcctacagattggaattgaggccacaaccacaatagaacactcattgccgagttgctgctgctgattttaagctgaaccacgagggattcttggattgatt

SEQ ID NO: 104529 - DNA, 228 bp, Glycine max
cagcacttctttttgccaataacatggtctaagtttgtgatcattatatgcttcagaatcttcgcctgagccttctgccgagcacaacctgggagttcttttggttcattgtttttatttctatggaagcaaattgaacacctcagatgttggcatgtcttgtaatgggacaggcacctttttgtgcagagtagtgaagggcaccagagaatgacattgggaagaact

SEQ ID NO: 104530 - DNA, 212 bp, Glycine max
gtcggggaacattattgtgggcaagagaatgaataggggcttgagctctccctcttgcatgatgattcagccgtggaggacacgtcttgatcaatgcttgagggagagttcaagctcttattcattctctgtcccacaataatgttcctcgtcttctaatatcaaatttttttaagtcctttatagcttctcttgattcactaaggcattgt

SEQ ID NO: 104531 - DNA, 230 bp, Glycine max
gtacttgtaattggttctttgatatttttccaatccaattgaatggggaagccaagaggagaagcgattctttgttttttatttttcttctggttttggagctcttcgaatgctttgccgtctccaaagggtgtgaactttgaagtgcaagctttaatgggcataaaagcttctcttgtggatcctcatggtattctagataattgggatggggatgcagttgatccatg

SEQ ID NO: 104532 - DNA, 221 bp, Glycine max
acagaagtaatcttgaagacttatctgcagtttctcctaatgtgattttggtgaatgcttttttatcattcagaaaggcaataacaaactaaaatcaaagcataactacacccatagcatcagctagaagaagagggtgtaacagagggggacatatatcccaagtacataaagcgtattctgaacctgctacacactttgctagtcaatctgcacaagca

SEQ ID NO: 104533 - DNA, 226 bp, Glycine max
gcagcaggttggcatgtaaatagtattccaggtgctgacaatgtgaggccaaatgggaagttactacaaactcaaagcataagaagtgtgagtccaaatcatttggagcaatttggtcaaactccttataaagaatattctcatttccttggaccagcagactactcatctgctggagtgggtggttattgcaagccaatgggtgcatcatcatcccctccaccta

SEQ ID NO: 104534 - DNA, 226 bp, Glycine max
ctcagtttttgcaccgtttctccgatactctcttctctctaaaggtaaatccctcttcactcacaaaatcagatttttagtgctttagtgttagaatttttcagatatgccccaatgtctatgaacaacaacaacaacagcaacccccatggaccctcttcctccgggccagtaccctctttcccaggcccacgggctcacactcaacccgaacgccaaacgtttc

SEQ ID NO: 104535 - DNA, 219 bp, Glycine max
cggctcgagctcgagccgaatcggctcgagtgccaaaatttggcagctacattttggaggtgcacgaacacctactgaagctgatgatgaagccgatgatccaggtgctcttgctgctgttggttgtttgcgtgctattagcactttacttgaatcagtgagcagtcttcctcaactctttgttcatcttgagccagccttgctacccataatgcgtag

SEQ ID NO: 104536 - DNA, 222 bp, Glycine max
ctcgagccgctcgagccgcatttttattggccggttctccccacaatccatgtttttatatacttggccttcgccttgccctccaattttttataaccatctcagttcgtgagagttctcttgggctcccaaagagtccatctggtggaataaggaaacagctttcacagctattggttgctctaagaaagcctgaaatctcatattcaatatcatggttta

SEQ ID NO: 104537 - DNA, 226 bp, Glycine max
atttgtcagctattttttgtaccccacttgtcttctccttagattccctttcagttcaaatagttgttgtgtatttgtgcttttatattgatggttcttctaaggttgatctcttagattgggtggagggaaggttgagagcacacttttctatttacccggagccaagagaaattgtctagacggtttgtataacttggatttatggatgctcctacttatgttg

SEQ ID NO: 104538 - DNA, 251 bp, Glycine max
gttagatgattcaattcttaaaacgattgaatcttcttctcaacaagagctgaaggaatccagggacttgatccaacgcattcgaagaagggatctataccagtactgcaatgaattttctgttcccaaggaaagactggaccacttcagaagtatcacaccccaagatatcgtttgttcccagactaatggtgccaatctgaaagaagaggatgttgttgtgagctatgttagaattgatttaacaagag

SEQ ID NO: 104539 - DNA, 210 bp, Glycine max
ctagatttgggattccagatgtagatgccttcttgttaacatatgctgatgtcaatgaaataatctcaggtgacaaaatgttgaacatagttatactatagttgtcgatgatcgttatggatgagtggagtctagcttggtcatggtcgatgtatgagtcgtgagctcatcgatcacatacaaggatagcgtgtcatgtcagatacatga

SEQ ID NO: 104540 - DNA, 248 bp, Glycine max
tgtatatatgtggtattataactagaaaaccttatttgtacccttaatttgtccttagtgtctgcttcacccgagtatctttccatcctaatccctcatgttgaaaacatcaatatttcagcattcaaatgccactactagtccccatatgcttggaacagtatgaacagtatagtttatgcgcaaatcaataagtaactgttctgtttagtgcatgttctttaaatgaagatacattttttagatgt

SEQ ID NO: 104541 - DNA, 203 bp, Glycine max
attcgcttgaaagcaagtaactttgttccttctaaggagctacttcgtgtatctatacgcatgcataggttcttagatgggagcttggatgtcaaagacgtcgctgtcactgaggtgccatgcacatcatgttcgttctggagatctatgtcttccgtatcattagctgttgtcattgtgtcctcagctggagatggaatatg

SEQ ID NO: 104542 - DNA, 257 bp, Glycine max
tttatataataaaattccatgttatgtgggtagagccttaatttccttgcttgctattgtaattgtatgctatgctttgacttaatcgttctgaatcttcttctataaaccttaattgttattttttcaggccttcaatgggttactattattgtaaacccaggccttgtgatactcatactcccaatgttgttctgatcttggccgtggccttgattcttctatgtgccccaaagttcttctcaggtgaagcagag

SEQ ID NO: 104543 - DNA, 224 bp, Glycine max
attctatcttgtgcattgtgcttttgttggatttggatgaatccttttttttgttcctacgatgatactccctctctctctctatatatatatatgtatatatactttcctcaactgttaacaattgttactcaatttgatctgtaatgcatattaatgttagagactaaaaaaaaaaaaaaaaaaaaaaaaaaaaaaaaaggggcacccaaaaagaaccacct

SEQ ID NO: 104544 - DNA, 207 bp, Glycine max
tcgaattctgctttcttctgatggagagatgttgagttctatgaaccttcttctttacatggctccgattactgtagttatgccgcttcctgctagacttataatgtaagaggatgcagcatgtattacatatgctcttgtctgatatgatgtgaagaacattaggtatctgctatttacttcagcacttggttattttgtcaacct

SEQ ID NO: 104545 - DNA, 178 bp, Glycine max
ggagatggtagtggaagtgtcacttctattttcggatttgcgttttagattggagtaggagatattgattggattgctattggtatagagttatgatgtgttgtcgaatcttgttggtggttagcgctctctagatagaggcacaattaggagggtgttattccattcccggcatctc

SEQ ID NO: 104546 - DNA, 226 bp, Glycine max
  unsure (1)..(226): unsure at all n locations
gttgtaaagctgtatagattttattctaaactgtaaactggcatgttgcaatgcgatatgtcagtttacagtttagaatataatctgtagagctttaccagacataagtcttgtaagaactgctcgtgttccggctcagagtattcgtgcacacaaagtaaattatcttgctttcaccaagcccannaatagttgtagagctgtatagattttattctaaactgtg

SEQ ID NO: 104547 - DNA, 242 bp, Glycine max
gtcttgtttgttatgtttttcttcccttgtctacatctatatttattagaatttattggttgtgcatatcaattccaaagtaccctattgttcatttttttttttctgatttattgctattccacaaatcggacgttataaaggaaaccaattgtttaatatattaaggagtcttcaagagattgtcttgccctttggtttgctataatcaaacgctcaaccacttggtaaaaaagccttat

SEQ ID NO: 104548 - DNA, 237 bp, Glycine max
gtgtttccaatgtcaattacaaacacgttgaagccaagctcttgagtaaataaagaaatatgcatgcgtgattcagacttcagatactgaacgtaattggggcaagagattattatcaattctcaatctttatctcttgccccatgtacgttcagtatctgaagtctgaatcacgcatggggcaagagataaagattgagaattgataataatttctttaagcattatatgtgtttt

SEQ ID NO: 104549 - DNA, 257 bp, Glycine max
tattagagttacgaacaaagcgtggtgatacacccactaatgttagtgatcaatgtccttgtgacacacctaaaagctgtaaaataaaagaatcacaaaattatagtaggatggacactttagaaacttcccatgattcttaccatgaaaatattttagaaagcataaaaacagaaatcgaaatacaatatgaattatccgtagcataatctgattaaaattccgtcaaaattaataaaattataactttcgataat

SEQ ID NO: 104550 - DNA, 256 bp, Glycine max
tgcttccctgcattggcaagaagattccctattggtttctgccacagtcttcaacacagctacgaatacaatcaatctgggcctccctccattaagatggctgcagaaggctacacttttgggtctaacaagatacaccacactgaagtgttctactccacaaatctctcttacgccatggttaacctgcgtcctcttctccctggtcatatcctttacatgggtttcatgtttcaataacacagtgatggggtgg

SEQ ID NO: 104551 - DNA, 251 bp, Glycine max
atttctttgtggaattttgtgtgagtggaactggaagtctcgttgattttgttgaattattgtgtgaggactgaatcctgatgcatatgtacgaatagttgacatttttttgcctcttcattcaatgcccacctttgaagggaatggatagtcgcttcttgaaggaattagggctcaaattggttcaaagttaaccaatctattatctaactaggtaaaaatctcacccagatgtcaaatgttgggaactc

SEQ ID NO: 104552 - DNA, 247 bp, Glycine max
gaggaaactaacctaagcaacacgcatccacactgattccaaaccttgcagttgcagagcagaggttccaatggctactgcgcataacactctttcctctctcctcgcgcctcaagctaccggacgaaccactcttcgtattccaatttcttcaaaacgccacaggaaaaaccatttgcgacccaaaattctgaaaatccttactaaaccctaccccctcgcacttcctcttctaccgtcactgccg

SEQ ID NO: 104553 - DNA, 251 bp, Glycine max
gtacatttttatttttatctttttttttttgcagacgagcaatctcaaatgattacaaagagcatttcacgaaggaccggccatggattcaacttgatactttctcacgtaatcgccgatagttcttcttccaccagagacgctcgcgtttgttacactttacccatccctggcgctcctcaactctttttgacacaaagagtggacaaccgtgctgacctcagtgattttgagatatgtaacagatacaa

SEQ ID NO: 104554 - DNA, 244 bp, Glycine max
  unsure (1)..(244): unsure at all n locations
gtcttgttatatgcttgacaccaatttcttttcttaatctatctcattctctaacacactcanatgcttggctcttattcctattctcatggttggtgctgtttcagaaatatttgttccgtatagatttgctttcctctttatgtttttgacagaaactgccacgagccaacgaccttctatcttccatacaaaccattactaccctgttaggaattttctgttttgttgatcttagaggctg

SEQ ID NO: 104555 - DNA, 242 bp, Glycine max
gccaatatggaaacgcagattgactactgttaaaaaaaaaaaagagcggaggaaacatgcatattcttttgatagagtttattagtttcatgtttaaagtatatccagtagtaaatcgattcattcttgtataggcttggcttgaccatgcagtgagggttctgtttcctccaaatgcaccgtctcttataactgattgatgattcttgagttgtcagttgctagtgtagccaatatggaaa

SEQ ID NO: 104556 - DNA, 246 bp, Glycine max
tttaaaactctaataaaaaaattaatcatatctatatttttctataggtgtcgattaacacaaggtgtcatttaatcatttttcatttgtttttatctatatactacagaaacaaaggtaacaatttatctcccatgaattaaccttgtttgtctaacaaaaaggctaggtgaaaccaagtctctatgtgatatgatgctgctatgaagagcagattagcaaattgcaacgccaataacaatatta

SEQ ID NO: 104557 - DNA, 246 bp, Glycine max
cttatttccccattttcaaatatttttttcccattttggatatctgagctatggttacatcgattctatataagattttcttactcagttatgtattccctcttcagctattagatacttgatattgaaatctgatagatgatttcaagcataaatatagccatgtcatgtcttatatataatttctaaaaattttcatatcctgatatatgttaccaactataaatgattaaagaaatagtgtag

SEQ ID NO: 104558 - DNA, 244 bp, Glycine max
atcatcttgctttcttggaatgcaatatgctactctttccctttcctactgtttttgcttttgtgttgttgtgtgccactaatgagcaccctccttggatacaacatgagcatggggtcctctgctagaggggcatctgaagatcaaatctcacaactcccaagttggagatataaaggggttcacaccaacttggaccttggcaatgactctcaaagcagtgaaagattgatcaatgaagatc

SEQ ID NO: 104559 - DNA, 243 bp, Glycine max
gttcaatttctcaaaacagcgtggatactcgcaaacaaccaatattcaggccatctttacaaatttgaccataaatgtatatacagattttgtttttcaggcagcagtcccaaaggtatgctacttagtatgctgttgagtgacagctttctaattgtacttctaagatcatcataattcgggtgttaaacatataagttttgcctactgctttcaacagtatcatgatcttaattattattg

SEQ ID NO: 104560 - DNA, 242 bp, Glycine max
ggccatttcagcgaccgtgaccgcagccggagtccaagacgtagtcctagtccagaagacaggcgtcctcccattagtgaccaattaaaatcccgacttggtccaagaagtgatgaacgattgccagacagggggaggtcaaagtccaaatctaggagcaatggctcttcttgctccagatccccagatgctacaccaccaaaacgttatgataaaaggacttccgtgtctcgcagcaggtc

SEQ ID NO: 104561 - DNA, 244 bp, Glycine max
ttaagatcaaaagaagttgcacattgtagtcagtcttcaattgttcaaatgaatggattggagactcacccttgaagattgatgttattgtgtaggatgactgactctgagtacaattgttattggtgatgaattgcatttatattttcctcttaaaaataagtgcatttttgttgttttttccaattccttttttgccaagtgcttcctggtatggccatatttaagtgcctttttttttgta

SEQ ID NO: 104562 - DNA, 240 bp, Glycine max
ttcttcttctaccttttcctcacgcatcaccgtgtcactattcttgtttctgtctacgtgtggtgtcccactacacaatagaccaacaaacaatcgacacacacacaaacataactctctttatttctctctctcttttgctgaggtaattactgaaatccgtgcctgctgcgttcacccttttgtgccaaagtttgcaattttttttcgattatattgtgcctctgctctgcttgccac

SEQ ID NO: 104563 - DNA, 238 bp, Glycine max
gattttcgtttccttcacgatcgtgtctctgattactttgctgagtgtctgaggaaggatcacgagtttttgaaatctgggctggtgacaaaagtcagtcttgcggcgaaatggtgtccctctgtcgattcctctttcgatcgtcacacgttgttgtgtgaaactattggcaagagggtttttcctcgtgatgagtataaggagtatgagggggttgaggaggcttattatgcttaca

SEQ ID NO: 104564 - DNA, 238 bp, Glycine max
ggacagatggtcaagtgtggtggcctgctgagatcctggaagaaacatctgcattatccaaccctggcagtggtggacatgttttagttcagttttatggaaatcttcccagtgcctggattgatccaatgacagatatttcaacttttgaggattcttttgaagacaagagcaacaacccttcagaagattttcaacaggctttaaagaaggccttacagaggaaggcacaacttag

SEQ ID NO: 104565 - DNA, 235 bp, Glycine max
gcgttacccattgtagcgttatcgcttctcttgggtgccatcatcgcatttctctttttcagcacctactaccggaagcggcaatccgaaatccaatctatcgccgatcccaatcccaaacccttatcctccaaagcccctcccaagaagcctctctccaaaccccattcctccgacaaggatcaaaacaagcgacatcatccgttggatttgaataccttgaagggtcatggtg

SEQ ID NO: 104566 - DNA, 237 bp, Glycine max
atcatatttcattttcagtcgagtgaatatctagtttcaaattgtttgtagacacctgccgtattctatgaaaacacttttaatttagtttattatttttgttcttattgtctctttccccctctcttgacagcaaggatcctggttatatcaggatgaatatgcatgacaatcaggatacaaaagatgacgagcctctcttgaagattgagataaataatcctgctttgctagctg

SEQ ID NO: 104567 - DNA, 240 bp, Glycine max
gatcgcaaaggacaagcgcggttggatcttcgatcccatagcacccattattgttggatgcaattggaatacggcgtcgtttttggtttggaagtgtttaccgcgtgttcgtttgtggttcgtctctctcattcgaattctttttctctctagttcgaatttctcactcagactctctttttctctgaaacaattctctgaactactgattaaggcagctagtgattatggtgctttgac

SEQ ID NO: 104568 - DNA, 253 bp, Glycine max
agcgacaccgttttgccgtggaaggttaaaagcggaaaggcaagtcccgatgatattgtccacgtccacaacaacgtcgtgacagaggttcataatgataatgacgatgataacgagaacgcacattcaaccgttaactccgtttctgaaattgccaccagcgaaaccgacgctgttgaaggacaacgacatgttcatgttaatcacgttcaatacgaagttcgagtggcccccaaaccgcagtttcgaaact

SEQ ID NO: 104569 - DNA, 237 bp, Glycine max
gtccttgcagcttctgtggttgtaacctccactgttgagaattcagccaaccctggaagactagtctttcacgttgttactgacaagagaacttatactccaatgcatacttggtttgccatcaactctattaactcagcagttgtacaagttagagggttacaccactgtgattggtctaaagaagtgaacgctggtgttaaagagatgcaggaaacaaatcagttaatttggaag

SEQ ID NO: 104570 - DNA, 246 bp, Glycine max
agaaaatatagatggtagctatatgttgcagttcttaaattcatgttatattgttgggttaagctttgaaattgaaatagtacatagtttgattattctacatttagcttcagatccaaatattaacaaaaacaaaacgataccctgttatttctgttaacttgtaggttagttgcatatgctctccaatctctgggtctggagaaaggatctgcaattgcaattgatatgccaatgaatgtcaag

SEQ ID NO: 104571 - DNA, 251 bp, Glycine max
gaaatgaagtgtccctttgtccagcttgaagaacatcatgtccagtgagtggaggtgcactccttttattgcgatcactctcacacacttcttgaataattagctaactactgtgataaagatataaatgtcacctactagctatagtcatttatttttgtccatggaagttcaaactcactccctctcccccacctttcatttccaccttctctcccaatggaccaccgacaccaaccgaccttctctcg

SEQ ID NO: 104572 - DNA, 242 bp, Glycine max
tgaacttgaagctctatacaaagaaaagagcaagactactcagaacccctttggcgcttcgttccacaacatgaagccacatgagatgatggagccattgatggtgcaaccggagcagcaatggagacctcccactcaatatgaacaaggtgcagccaaggagaacaataatagtgaaagaaaagaaagagaggaggaggaagaagaagaagatgatgatgaaaatgaagagggagatctag

SEQ ID NO: 104573 - DNA, 186 bp, Glycine max
ataacttttggttgctgttatcagtcgggaaattgtatatttcaagttggttttgtttccatcctctaaaaagctttgaagagaacaagctcattttccctcaacccatttatgcacgagtttcatgctggaacttcatctgtctttaaaatatgctcttctcaaatgcatcatttttgctcctgc

SEQ ID NO: 104574 - DNA, 256 bp, Glycine max
gacttctgttgatgaaagttcagactagtttggcacagttcagattccatcaccttggaagcctgttttggaggattcttcaacactacaaatattttttgattactatgccattacaaaaccccctctttcaaaggaggtctgtacatgcgtttgtttctatgattgtatttttaatgtttagaccttgaagttcactaattaaccactaaaatttgaatcctttttagttcttgggaaattgtctactacttac

SEQ ID NO: 104575 - DNA, 150 bp, Glycine max
acggcatcccgttgttgcatccagggctcgtccctggtggataatccacagttctgaagataggtgatgatctcttgaatcacaatcttggatgcaaacctcagtagttacgacctgcctgtgcgatctaacatgggaaccgttcggacg

SEQ ID NO: 104576 - DNA, 253 bp, Glycine max
tctccacccaagcagggatgtagctgttcttgacttctcatacaagtttgataagaatatggtcaacgccaaacttcaccttctagctgtccctaaatagtttccttgggctaaaactgtatctgctgaagaattttcccctcaatggaaaatcacttttcttgaccacctttaaagcttcaagaagtggttagaggagttagaccccttccactgcttgaactggcaaacttattcaatagctaccatttaa

SEQ ID NO: 104577 - DNA, 254 bp, Glycine max
  unsure (1)..(254): unsure at all n locations
ggaaaatggggagctgttcgtggcttgtcatgtgtgaggatttcctagttgccgancgtgttatgcgtgcttcaggagtgtattgaatctgagatgtccttaatgcaacactcgagtataagttctacggacgttgtcctagagtagctcgagacgtagaggacaactttgatgcagatgattttgatgatgcgttgccggttaagaatcatcgtgacgatctagatcggaaccccaatgttagtcatattggc

SEQ ID NO: 104578 - DNA, 246 bp, Glycine max
gccgttgactggcaagctgacataacgaaatgctatccttatcttgctcaactgcaggtatgcaataccagagacgacaggctaagtcataatcgtggatcacgttcttcgacccgaatgcaacgaactcttcacagacgttggcatcgcatccgacatgatgcttctcgatcacaacgccggtggcaaagagaggaccgaatagaactggaactggctgtacaacgagacggtttcgcgcgttac

SEQ ID NO: 104579 - DNA, 102 bp, Glycine max
catgggcccattgcagaaggcgaatgagaaatcagaaccggagcgggaagtgggcctggaactgggccggaccaaatacaagtacacaacagtgactcacgg

SEQ ID NO: 104580 - DNA, 118 bp, Glycine max
gagtgacgaagatcttgcagctcaatcagccttcgttcatgaagaatttattggaaaacagaatgtatctaaagaatctgttgctgaccaagatattggactgatgagaacagaatgc

SEQ ID NO: 104581 - DNA, 185 bp, Glycine max
cttccactgcgaccccttcttcggttcgacgagattttaacccatttgggtggactggtgatccgctcctgtgcgaggcttacattaaccacgtccacaccggtgaaaggtacgatgtgggatcgcttttcaacgttactgcaaacatcatcaagcgtgctactgcacttgctgaccgtgttgct

SEQ ID NO: 104582 - DNA, 244 bp, Glycine max
ccgaaagttagagtaaaacttaacataaaggaaccaagatttgggtggtccggtccgggcacacacatgcgagcattggaacgatacaagccatcaatgctaatggaaagctccgaatatacacgccagagggatcaaaagcatggatgttggacccttcagaagtggaggtggtggaagagaaggggttctgcattggagattgggttaaggtcaaagcattagtttcacccccacccaccat

SEQ ID NO: 104583 - DNA, 184 bp, Glycine max
catgactggagcgacgagcactgcatccagatcttgaagaactgcaggtatgcaataccatagactacaggctaactcataatcgtggatcacgatcttcgatccgatagcaaccgaatcttcagagatcgttggcatcgcatccgagatgatgcttctcgatcataacgccggtagcaaagag

SEQ ID NO: 104584 - DNA, 238 bp, Glycine max
gtcaaggttaccaccagggcagctggtcggaatggacaatataggaacatgttgaactctagaggcattcagaagaggagaagttctcttaggaaaaggaagcccgtagtccttcaatggtgagtatacgcagaaatggggcagtagcttctgatttaacaggtggtaggaaaaacaatagccaattgcctgttgtgacctctagcaggaaacttaggagtatggccaatgatagcac

SEQ ID NO: 104585 - DNA, 241 bp, Glycine max
caacttctagggttttctgttgcctactcttttgctgctcccattttttcaatccatttgcatttgcatttccctcttccactcccttcgttccgtctactgacttctgagtaatgcggggacggcagagatagggattgttttggctgtcagattactttcttttgaggtttatgatcgtgttgggttttcactatgagtggtgttcctaagagatctcatgaggatgctgttcatcagt

SEQ ID NO: 104586 - DNA, 245 bp, Glycine max
gactttgtcacaacagacatcaggtggtatgcaatcggcacaatccaaatatgtgaaggtctgggagggaagcttgtctggacaaagacaaggacagccagtatttatcaccaaacttgaaggttacaggaattcttccgcctctgagacacttgcagcaaactggccccctgtaatgcaaatagttcggcttatatctcaggaccacatgaataacaaacaatatgtaggaaaggagatttcct

SEQ ID NO: 104587 - DNA, 245 bp, Glycine max
accaccctctgatcccacgctttttcagggtcaacaatcctggcagcaacaacatccacctcaaactcaacctcaacatttcaacccacagacccataactaccccaaccctcctccccctcccaatcaatttcctcatcaccataaccatcaatctcgccaacacaatgttcctcctcgtccatttccagaaaatggccgaaaccataatcagtggaacccccaacccacacacctcaaaatct

SEQ ID NO: 104588 - DNA, 241 bp, Glycine max
tgcaaatcttcttgatttcaccatatggttgacaaactagtaggactagttacaagtagcaattgaatttgcttggttctacagcttttactatttgccattctactagttttcttcaatatatgtaaagaaatgccatgccccgatggcttcttgaactctgcttttactgatttttgagactaagcgtttactttggtatctccaacattcaatctcggtgcttttctatctagaaaaa

SEQ ID NO: 104589 - DNA, 238 bp, Glycine max
ctctttccaatttttgttgaatgtaaccaacaattaaaatggaatggttatgttgtatttgtagtttgagtgttgacatgatataacatggagacattgcattctatctctgtaatcttgaaactctgcatccgtgtaatattacactgtcatttttaagcatattattgcataagatgtggttgatgtatgcttgtgtaacattgttttgtctgcctttgtgtgtgttattcgatga

SEQ ID NO: 104590 - DNA, 238 bp, Glycine max
atgggtttcccttcttttgctgattgttgtcagttgtcttcttttaagccccaaaaagcagcgaaaatagattgagatgtagtatttatattggcgaaggtgtgagcactgagcagatactttaagctctagggaaaagtaatattctatctgcgataagaggaagaccaccaccacacaacatagctctgctcaaaaacacaaacacagtgagtgagtgagtgagtttggctaatat

SEQ ID NO: 104591 - DNA, 259 bp, Glycine max
aggaaatgctgtttcattagatggatagaacccacaaattcaactggcttatcaccttcactattgttattactcctcggtggctcttcccagcgccatgaaaaattccaattaatgggtggtgctactagtttgttgaaagagcattttttttcaacatcttgatttcatgagtcactattttgactgaacaaagagatgaggtttatgccccttccagattaatttgccgtctccctcggccgcatacacgtgggcc

SEQ ID NO: 104592 - DNA, 260 bp, Glycine max
aagggattgggggaacggaacgcacttgctctaggtctagggttcccttttctatcctatataattattcaaatttgcgaatgattgattagttatcttctgtgcactgtgagatcagatcaaacactccgggattgcttacaacaactagattgattgctcttgcaggtgaaagccggggatcaccactaaacgtttggacggacgcactccatccatcatcacttaataagcttgctagcatgttctcgcagccttta

SEQ ID NO: 104593 - DNA, 260 bp, Glycine max
gttttaacaagaattatatactgatgtattattatacatgcaaatctgtacaaattcaatgtcactgcaaatggtaaaaccaatcaaactccagtaacattgaatttgtacagatttgcataactaataatacatcagttttaacaagaattatatactgagaaaatcatattttgcaaccattttcacattttttgcgttagatacttgaaggtaagcgatcctattgaccaataatatcccgaaacatctggttgatg

SEQ ID NO: 104594 - DNA, 258 bp, Glycine max
gaacgacacccaagtcgctccggccttaatcgccgttcaccccgaccaatcctccgtcgccgtcgcagtgggcccgcacctccgggtcttcgacctcctgtaagcaacccttcccaactccatctctctcacttcaactcagttacattatgctgataaacccacagtagcggttctgcagcttctttaaccgacgactctgatggcgccgtccgttccacaaggacaacatcccagccattcgcttcggcgcaaaag

SEQ ID NO: 104595 - DNA, 260 bp, Glycine max
cccactgctagaccaactagtgatggtactaacagtatgtcgtcaaacaacacaccttcacattcaggagggttgagcactggaggatctgtggctattggaattgtagttggttttactgtcctcagccttgttatggccgtgtggtttgtacagaagaaaaagacgaagggaacaggatcaagaggtggttatgctgctgcttctccatttacctatcccacaactcaggtacattattcttgaggtcgcagtctcca

SEQ ID NO: 104596 - DNA, 257 bp, Glycine max
tcggaatggcacaattgaatcagatcacctatgtgtgatgtacgaccaaagatgttctgccttcctatatagcagagccaaaaatcaaaaagagtttaaaatcgaggtttcaatggtgttacgatcctcatccaaagaaattttgacactgccgcagcagatgtttaaaggattcgggatcagcctaatagacaccttgggatttagcagttcaaacaacaaatggaattgcatgactcgctccatgtttaaatttc

SEQ ID NO: 104597 - DNA, 249 bp, Glycine max
aactgctgcaacccactcactcactctcaaccttgctcctccaagccgcaaacttcgccattctctctcgcatctcaaccctttatcactctctcgagttgcatccaggaaggaggaggtgcaatagagaagggcttgaccaacatgggtcatgttgagaagcccatcatcattaaggtggaacctctggatggaccaattaaccctacaagatcactgatgagagtggagtcgacattgtgagtttga

SEQ ID NO: 104598 - DNA, 253 bp, Glycine max
aagattctcacatggtcactttccttttcgggttgtctacaggttgctttgtatccttgttttgtgtatatgcaatcttggcacatttgtgcggtatattctcctctaataacgagccagcttatatggaaacagtctaccccgttttcagtgtgtttacattgttaagcctgcacttgtttatgtatggatgcaacctgttcatgtggagaatacaagaatcaattacaatttcatatttgaattttcacca

SEQ ID NO: 104599 - DNA, 250 bp, Glycine max
ctggacttaaatttgtctgttttggagcagtatatggaggacttaacttcgtagtatatgtccagtgtctctgggagctgttccgtggatttgaagaaagaccttttcctccaattgccgagtcaaagtttaaggcctaagttctctgagctctcattcaacccacttccatcatcaacttcttccttttcttcaccccgtacattcacaactctggccctcttcaaatctaagaccaaagccgctcctg

SEQ ID NO: 104600 - DNA, 263 bp, Glycine max
gttagactctcgacagattcacaaagcgctccaataagtcatactaacaatctcacagacacacggcaaggaaaaggagcacaaagattcaggccaatggggataaccccgagggaagaacaaaggcacagatgacataaaagctcagtcaaatcagctatagcagaataggacataacataacaagatcagctgcaaatgaagttaaacagaaagtttcataagatatccccaaaaagatgaacaggagaaccagtgccttc

SEQ ID NO: 104601 - DNA, 249 bp, Glycine max
  unsure (1)..(249): unsure at all n locations
tctcgagctgaatcggctcgacgcattgcgatctgggttttgctatgtttgatccacttcttcgactttgcttcatctcattctctgggttttttaaatattgttcttttatgtgccttttttgtttgaattttcaagctggtttttttctacacctgctggaaatcctgaatggannnttgctntnaaaaaatattaaaatttgtggtccaaatttttaggttgagggatcagggagagataaataat

SEQ ID NO: 104602 - DNA, 247 bp, Glycine max
gcgcgacccaactcctgaatcctccgactctgacgtatttgcctccttccgtttccgcggcaccgcaatgaagtgcaaccagcgcttcaagcgggtcgccaaacccagattaccggttcagacaaccgaaccagttcgtcgttccctcagaaccaaacccaatccctcaccgcaaccggacatatctcccggcaaaatgaaaaccttgaccctcgatttcttccaaatcgacgcgctggacctcgcc

SEQ ID NO: 104603 - DNA, 253 bp, Glycine max
atcagaactacgacaaattaagacagttcctaagagttagtgttgtactataggttacagagtgttagctagatggcatctcattgagttcgaatggtgcttctcattgcttgcattcttccagctttggttgcatgcatagtgaggcactatgatttcatgtggtgtctaaataaaccaatatattgtgtacaatcacatctattgtgaccattaatgggaagttgccaggtctcacactttacgctcaggg

SEQ ID NO: 104604 - DNA, 247 bp, Glycine max
cagaaggttggaacaatgcctaataaaataaagcattgtttagatctcgtaaagcttacgaggtttaatattttatctttattaaccttacagtatgtggcgtgagagtttgagaatcatgctgcagaagggtttagagtgatagttgcatgagtattttaatttctcaagatactgaattggaagaaagtttccaacataggctgttgaatctttatgtatcatgcatgcttaataatctattcaa

SEQ ID NO: 104605 - DNA, 113 bp, Glycine max
tgtgaatgttattggtctctggaattcccaaatcatcagagtgagtttcagcgagcatggcttccaacctcgctgcgaatatggccacttgctctaatctcgtcaaagtaatc

SEQ ID NO: 104606 - DNA, 250 bp, Glycine max
ggttgctacgttggtatctctgtgttgtaattaaacttcgaattcaaactcatactctggcaactcgttggtatgacagaaaagcttgaaacaaaaaaaaaaaaaaaaataaaaaaaaaaggggggccccccgacaaggggccccccgccccggggattgattccgggccgggcccctgggggggaccagctttccccaaaggggtcccgtttaaaacctgggggagaccagggccaagggggttcccgg

SEQ ID NO: 104607 - DNA, 183 bp, Glycine max
gtttgttgaaaaataaaagatcttgcttcatagtactatcctatatttgcgttatacaaatccatatatatatgcgcttgcaaattaatctattagtagattaatttgcaagtgaatatatatatggatttgtataatgtaaatataggatagtactatgaagcaagatctttttgtttgccg

SEQ ID NO: 104608 - DNA, 247 bp, Glycine max
atttctttctctcttttttttttcttttctgtttttttaaacctcaggaatctgttaagatagaactgaactgagcttcccagcgatttgtattttctgcggaaaatttcgtaatatttcgcaatatttgtctcccgcgttctctctatctgtgtttaaactgttttcggcagttactgattttattttatttgttgagtttgtgctggattcataatcgatctgatcatcatcaacactgaacagt

SEQ ID NO: 104609 - DNA, 247 bp, Glycine max
ccatcttgtacatagagaagcaataaggtccattgattggcacatcctaagcatgcaccctttcagctccgctgcatgctactaagcaacacttgtgtattcctgaatattgttattacttactattttcctaacataagagtggagatgaccttggaaattttgctacacttgtattatttgatatacaataaaggtgtatcatagcaatgcatccattgcggttaggcaatatgatgtttataaa

SEQ ID NO: 104610 - DNA, 241 bp, Glycine max
ggcttcttagcttgtgttgtaacagatgagcatatgtctgcccagaatgagacagatgagcatatgtctcatcctaggcttcttagcttgtgttgtaacgaataatttcgtgccattcaagaaaaatatgtaagagattccattagaatggatatgacttaacagaggatgataggacaagttttaaatgtatcttctagtctcctacagcattaccgaaataaataataaaaagcactgc

SEQ ID NO: 104611 - DNA, 244 bp, Glycine max
agaagaccgatggaagcgctgatggtttttctgggaatggacctgatttttcttttgaggaggctcagaggtcaaatatggttgccccaacagagtattcatctctggacgatttgctatcttcacttcgtttggtggctcaagaaccccttggagattacagcttcctgaatcctattgtaagcttcttctatgatttcaggaattcgatagttgtggctgatgattctgtaaaagatatatt

SEQ ID NO: 104612 - DNA, 254 bp, Glycine max
cagaagagaggaatatgaatcacccaagtgttgtgttaaaagtgggaatgcacaacaggacatcgaggtgattcattctgttattcctttttcctccctggatccgttcataatatttgtatataggtctttggaatcacgaaatgtacctttaatggaagtgatctttgttgttgtattgttctacagggagggttttcaatttttttggggtccatacaagggagtttatttagatgtcacatagatcaatt

SEQ ID NO: 104613 - DNA, 248 bp, Glycine max
atttattttaaatttcagtagattattgttgctggtaatatggaggccattaacatagaattggattttgattgttccccagacctttttcaactataaataactaagtgaaagattttgatcattataaatttaatagcattgcagttagagaggaatttgttcacgtctgtgttctcatgcaacacacactttaatcggtttcaggttgtgacggaatctgaggtcagtgatgagggttctataca

SEQ ID NO: 104614 - DNA, 221 bp, Glycine max
ccgtcttgcaactccgtggcatggacttgttttctaagctaaaaaaaaaagatgtatgttcacctaaaaaaggaatatttctacagcagcctggatgcatttcagaattgctccttttttgggtttgacaagaaggaagcaccttcaacagttgaggctcgagaatctgccactctttcagattttaaaattggaagtggcatctgagactcgtcatgatt

SEQ ID NO: 104615 - DNA, 247 bp, Glycine max
gggaaataggacatgtgaaatttgccattctgttgctcggaatgtttacggaggaaatgaggagtcgacggagcatttgagcgacgttaacaatgctactacagcagccaactctccacacctgctccttcagcagaacctcgaagattttggcacggccatcgcttcctgaatttcttgcttgcttgtatggtttttgcgtttgtcatatcatggctattccactttaatgtgccatcatcctaga

SEQ ID NO: 104616 - DNA, 246 bp, Glycine max
cttttattagttttttatctttcatttatttcctgctttattactttttacccgttttcattcatttagtgcaaattctttaaaagtatcataaaccttagtattctctacggctagaaagagctctttggaatgaactgaaattcattccctataatagtttaaaagcttaccatttacaatacattgactagtttttttattagtaagagaataaggaccaatcatcagctataggaagaggtt

SEQ ID NO: 104617 - DNA, 246 bp, Glycine max
cgggcaccgaggaagctgttagttgtgttagcaatagcacacacacagcgatggaaaacgacgacgaacacaagctccacaatcacagagaacaagtacaagaacaagaacaagaaaatgaagaagaagaacaagaagatgaggtttggagttcttcggattctgaaatcggtgaagcgttggactggttggattcaagggaggaagatgaaggctcctccttctccctcacttcgtggcgcccca

SEQ ID NO: 104618 - DNA, 244 bp, Glycine max
tcactgtggagtaagcaaaccagcaagatcttcatagcatattacaagatggccatctaatttctcataaggctatcatactgcaacaatgtataataaccctccaactcccttggtgggtgtcaaattgtcaatgataatgtataatgtatgggtcatttcaaattaaaagttctgtcaacaaaaataagtggaggcaaaaagttatcattccaaaagttcctctgtgtgtttaggcgtcact

SEQ ID NO: 104619 - DNA, 243 bp, Glycine max
gaaaaagagagggaataaggtgggccaagttgtctagaaacctcaacattttttagagggtttttgcaattaaaaaatgacttgagtgagggtgtagattataatagtatatatatgatatatctctatcgtatatactaagagagtttgatgggtttggagtaatttttatttttatgttggtgacttattaatattgagtttgcagaattcacctagggaagagggattttgcgacatgtt

SEQ ID NO: 104620 - DNA, 242 bp, Glycine max
aacaaatccagaagaaatgtactcttcttgtttcactcgtagagacaaagaggaaggcaaagagtgttaagggacaataattacgttatacaagcatcatatcattgagaggcaagttgattacctttcaagtaatttccgagtgtaaaagcacctgttttgtatatatgttcacccgtgttagaacaactctggctggttcggaagaaaaggcatactggactttgcacacatagtagaat

SEQ ID NO: 104621 - DNA, 244 bp, Glycine max
cgagaagatgagaaagtgggaggaacatcctaggactgaagagtgaggtatttctcatgtcttgttagatgattcttatttgttatacttacatgttttccacctcttgggtgattggtattgcattgaaatggatccaattttgttttggtagaatggagaacaatttaattggggggttattgtttttcttgcttgggttaatggaaaaggaaatatataatatactacatcttctattgat

SEQ ID NO: 104622 - DNA, 235 bp, Glycine max
aagacagagacgcagcagtggcctctgcagctgccttggtagctgcacagtgtgcaaaagtagctgaagcaatgggggcaaagaaagaacagcttagcggcgtaattggctcagccatgagtggcacaagtgcaagtgacatcctaactctcactgcggcagctgcaacatcattaaaaggagctgccacacttaaagtaagatcaagatgtaagaacagattgaatgggggagt

SEQ ID NO: 104623 - DNA, 261 bp, Glycine max
ggtgaaccaaacacaaaattccatccaccacttctcttttcaatccccaactcaaatctgtgaagaaaatctcaatttctaaattgtaattcttagcactactgctagtagtagtaaaaaaaaacaattagaaagtagtagagtgtttttttttctttttttcgtttgttttacttttaagatgggtgagaagagcaacgttggcggcgacgcgattaacacgacactgcttcacgggaagtacgagctgggccggctgtt

SEQ ID NO: 104624 - DNA, 255 bp, Glycine max
cggctcgagtttaactgttcaaaagtgtttttgaatctgcctgccaataatgacttagatttctttggaggcacctgagtgtcagtttctcccttacctacccttccctttcccttcatttgatattgggatcctgtaaccaaaagaataagtgtcttcgcttctgatgagcagttatcattgtttatttccaaacttcaatctcttttactcttaagtcttgttttggacctggcctcgatgaagaaaaaataa

SEQ ID NO: 104625 - DNA, 259 bp, Glycine max
ctaagtggtgttctacaagcaaaagacgataaagctcgtagggaaatgaaagctctgttatcaagattgcttaaagagaatgtgtctaatgatagcagcagacttgatgtttctaaagacacactttatcatctttgccataagtgtattggttctcttctcctatgcctgtccgaagcagccagcagcgatgagaagctggatcggggggctataatgagcgacataactcgtgaagctgacaatattcagtggattg

SEQ ID NO: 104626 - DNA, 264 bp, Glycine max
aattggataatagccaccaaccagaatcaaaataagaaaaacagagtaattttgcatcgtcgtcacacatggagatgtattactgagagagttagaagcagcaagagcaaaggagaaggaagtgaagaagaaaaggaaacaagagaagaaggccaaactcaaagctgccaagatgaattgtgaatcttcttcatcttcatcgtccgaatcaagtgacagcgattgtggttgtgatcaagtggttgacatgaacaccttcagagc

SEQ ID NO: 104627 - DNA, 253 bp, Glycine max
catataccctgcattaattggttatatcaacagagatgacgattggagtttggtgcgaaactcgagattggtgcaattattttaaaatgctagaaatgcccaactaactcccgtacttctagctctagacccaaaattcgggaacggtaaagaacgatgcctccattgacttcgtggctggtgctgcccattctcgtgttgttggcggctccggcaacaacccctccagcacgtgcctcaccggtcgcgtcgt

SEQ ID NO: 104628 - DNA, 252 bp, Glycine max
cgaagttttgaacaaagcaaaacgcgcatcggatagacgtcgtttcgagacgaattccattgaacgcagttcaacgcagatctcttgaaattgctcaatttttttcagactaaaaaattgatgtgcccgacaagtgatatattgaagctctatattcaaaatcgtcactgagcacaaaactcgcacatgtggcaacagtcaggaagggaaagaaataaatgacaaaatgcatcagtaagaagaccatctcgg

SEQ ID NO: 104629 - DNA, 248 bp, Glycine max
gcaaaagcagcagcagcaacatcaacaacaagctgccgccatttctcgtttcccttccaacattgacgctcacttgcgtcctatcagacccctcaatctccaacaaaaccctaaccctaaccctaacctcaatcccgctcccaaccctaaccctaatcccattctcaatttgcatcagaaccctaattccaaccatctaccaccgcagcagcaaccgccgcaacagcaacagcagcagcagcagaaga

SEQ ID NO: 104630 - DNA, 112 bp, Glycine max
gaaacaacttggaggcatagtaactggccatgatgctaagcatgagaatgacttcgcgtgtccctcagagactgaattctgcgaagcacttggatcagtctcatatggagag

SEQ ID NO: 104631 - DNA, 253 bp, Glycine max
gttttaggccgtttgaatcggatagaatgtgttgctttttttttttccggaaagatggaatcttctcagggtttacatatttggtaatttaattcaaatttcattaggattttcgaaggtcgccaatatatagctcttagtcatgatatctcgattaattcctctttatagctctttgatttcttcctaatcatgagcacaatatgtgtgtggaatggtttacttgttaaggcttctgtgtgaagattattag

SEQ ID NO: 104632 - DNA, 250 bp, Glycine max
gaattttcagtaggctgaattctccagctgccttgaacatgagagcaattagttcttctgcgcttatccggcctgttcagtctcaaaacatcaactgctccttaaacacacttggaaacattcagccatctgtttttcctgcaaatcatagctcaagtttattacagggaattccgacatcaattgagcttaaccaatctaagcaaagcaactgtacaactggaatatcacagttaagtcaagttgattc

SEQ ID NO: 104633 - DNA, 251 bp, Glycine max
  unsure (1)..(251): unsure at all n locations
ggccattcagatgtcttcttttgtctttgtttctcttacaattttattttgcgtctcttctttggagaagagttttgcctttcacacaacatacgacataggcatcaancactcgcgcaggtcatgtgctcagtcgctctgttggggcttcatcctctaccgttcttggattgccagcaatggccaaggtgtggtgagtgtcgtgctccatggtgggaaagtctgcaagcagctcattcctagggatgggg

SEQ ID NO: 104634 - DNA, 254 bp, Glycine max
gtcaaagcttccggcaaatcaagagcaaaaacatgcttttttggtaaaagttgcatcaataagggaggttgtccttggtgcaccattgagagtaattttagaacatcttgctgccagaactgttgctccagacctggatccacttgttgcccttgttcatcggcctaatgagtctttctttctttttcctcaggctgataaggtgactgtagtgtatcctatgagattcaacgattcaatagacattgttctcg

SEQ ID NO: 104635 - DNA, 249 bp, Glycine max
tctatccggaattcgttgttagctttaaagtctcgtctgacgctgcaggacatttttatggcagtgaagtctcagaatgttcagcgggcaaatacccattgttacctgccgctgggcccgaaacacacgcactcgccaactgcaactcatggacaactgcaatgaatcatcacatgcttcatcaacttacgggaatcccctcggataccatccccggtgcccattgccgttatcgcagagccggttcca

SEQ ID NO: 104636 - DNA, 247 bp, Glycine max
gtggtggctgcgtggcacttcttggtgctgccaaattggtgttggggttggtgttgggaacttctttggcacacattttgaagcagtttcctgtggggattttaggagtgttgcttttgtttgctggaattgaactagccatgtgtgctagggacatgaacaccaaggaagattcctttgtgactcttgttatcactgcagtttcacttgtgggatcaagtgcagctcttggctttttgtgtggaat

SEQ ID NO: 104637 - DNA, 207 bp, Glycine max
gataatattaatggattatcagttatacttttacacaaagcaacaatttgcgaggtgagttcttacaaactcaaaatacgtacttgtagggattaagtataaattgttgctttgtgtaaaagtataactgataatattaatggattatattttgccaaaaaaaaaaaaaaaaaaaaaaaaaaaaaaaaaaaaaaaaaaagggggggg

SEQ ID NO: 104638 - DNA, 234 bp, Glycine max
gatgggtcgttctacagaatcagcggatttgactaatattgacatgcttcattttcaaagaggttctttagatgaattcattgttgagggccctaaaattgcacgacttgagtctctctgggtcagtgttgaatcaggtcacggtcagtgtcgcctagtaagttgtatccgtaatggtgattaactgtgtcggggtatcatcagaacgagaagatgaggtaacaagttacgctg

SEQ ID NO: 104639 - DNA, 248 bp, Glycine max
tccatatatcaaacgaggaatattatggacataaaagcccagaatgtaagacatatgatgctatgcttgtatttctcatgtatttagaaactacttctgcacgaaagagagaagagggagcaggcagaagtggctcggagaatactgctggagaaatgcagggttcttttcaaccagcttcaagagtgcaatgtcagtcttccttacgaatacgaaggtaggacaattgtgaattcatcatcatcaac

SEQ ID NO: 104640 - DNA, 253 bp, Glycine max
ttcacgtactatatgtgtttgttttgcacagcaaaaatcataatatattataaataagattcagcacatgtatcaatcgtatgaaggcctgatggcgactagatggaaatggtggtggttagcattgacatggtccattggggagcacagaaatagcattattttctctggcagcaccttcaatgcaaatcaaatgatggaggatgcagtgtctttattatggacttggctgagacatttagagaagggtttt

SEQ ID NO: 104641 - DNA, 247 bp, Glycine max
ataaaagggaacgaacgtaatggctgcagcagcgttgctcgaacttgatcgagttctcaagtccaagaaggaaatgttgtcgcctcgggaagcaaatattcgtctatcgtggtaatctacctctctaatagatctcgctgccggtgcacttcctgggtccgcagctgcaggggctgatttatcatttccgtatccttaatgagcgacgatgctgtctgcttactcttctagttataggcttccctga

SEQ ID NO: 104642 - DNA, 164 bp, Glycine max
gtccgaagttggagatagtgattctggttctgttctgttcttctttctactcacaacaacatccgaatcagaaaccacaatggccaacactaacttggaagatgttccctctctggatctcatgatctgagctccttgcgtcgttctcaagtggctctatccaa

SEQ ID NO: 104643 - DNA, 236 bp, Glycine max
ctcgagccgctcgagccgattcggctcgaggaacacttaccttaatgtcaccaaatctaccaatgactaggatctagaatccctaggtactgaagagacagcttgtagctattcggatcaccatgggaaggcgttctaaggcctaggtgctgctggtggatagagagacattgttgctgataacaccagcgagatcactacgtcgacgttaaggactacccgggccacgtacttct

SEQ ID NO: 104644 - DNA, 249 bp, Glycine max
cctggggacaattttgttggtctaatatatgggcctgaaggtgataatcaaaaacaactagaaaaggaaactggtgcgaagataaaaattcatggaatcaaagcagacacaggagagaaaggtgaaattaaacccggaactgatatccagtgcaattacaaagagatgcatgttaacctatcagctgatagttttgaaaaagtggatgctgctatgttaatcattgaactgctaatcacctctgtaaca

SEQ ID NO: 104645 - DNA, 246 bp, Glycine max
  unsure (1)..(246): unsure at all n locations
ctcaaattaactctaattccatccttgtcgcgcttctngattgagattattatgaactccctgagcttgttaaccaagtagttcttctacagtagctagacgcagccgtcggtaaccaccacatcaccatcgtcgcgccgcgaaaccaagccctggcaaccgatntagcncctgaatttaagcgattcctgctctagcctcgcatatcttaggatcgttcagacgctcttgatgtctcaccttctt

SEQ ID NO: 104646 - DNA, 296 bp, Glycine max
tgcagtccagttttcagaatactggcggagattgtgattctttaatctgtctctcctcccccctcatgagtagagaacactgccttttgaatctgataagcaaaactattgcttgagggagttatgatcaaatgaacaaatggaagatttctgggcaactgcataacaaaggaaatatgtttattggccttggttttttaatattagtatattgtaggccttttcttatgtttttttgctgacataggttaccgcattaagcatgggggatgaccgtgaatatgtgatggcagcta

SEQ ID NO: 104647 - DNA, 288 bp, Glycine max
ggcacagtaatgtagtggaggatgtttcttctaaatttttacatctgagattcatctcacttgatgtggctcagcaggaaaatttatatgattgtggcctctttttgctccactatgtggaacgttttctggaagaagctccaatcactttaaccctttcatgataacgaagtcctccatctttttgaacagcaattggttccctccactggaggtttctctgaaacgatctcatatacagagcgtaatttatgatatatttgaaaataattctttgcaagcacctca

SEQ ID NO: 104648 - DNA, 296 bp, Glycine max
tcggctcgagcgatttgcgggggaacttgaacacttttttatgatttctgatacttaattgattctcagtgatgtgaataataaactgagatcttgtttactgtactaaaaaatagttgttctgtttattctaaaatttgtttgacccttaaatacatttgaaagtgattgttctctgaacacatttccgatttctaaatgcttgttccctgaacacttgaatatagcacttgaagaaaacagaagagtatagaaaacatctaccagctgttcctattttttttggattttaaaac

SEQ ID NO: 104649 - DNA, 280 bp, Glycine max
cttccaccatcttctggcttccttctgttgccaccactctccatcttaagtccctcttctagttccagcatatccgctcatcgttccatcttcggagctcgacctaacctcgtttctccacagcacagacatggagtcattcacgtcgttccatactactggaacgagtgcaccctgacacgccagctacgcataacccacgtaatatgacggctatagatacttcgagacatccatgaatagcttgaactatatcgggacatgaatgctatcagacact

SEQ ID NO: 104650 - DNA, 244 bp, Glycine max
cgcccttcctttcaccctcacttttcttctcattgcaaaagcatccataatccaggctctcaatcaccacaaccaacttttccaccttccttcaaatcaatactatccctttacaagcctctcctccacacctatttttgcaactgtttcttgattctctcagcaaatgcaactgcttttggtctcatgtttttggccttcagcttcattgaaagacttggctactcttcccctactggcctca

SEQ ID NO: 104651 - DNA, 248 bp, Glycine max
tggggagctcatggacaatgtacagcagctgacatcttggataactgcttgcaggctaattgcatcggatgttggcatatgtggtcgccagctgtgtgcttccagagccagaggcacggcctactctgagagttggtactgctcggttgcaggctatcaccgccatggggccggacggatcaactccgttagcatctgctctgaagtgggcaccaatagtgatttggtccagtgacttaactccggtc

SEQ ID NO: 104652 - DNA, 101 bp, Glycine max
gtttatatactttgtttgtaatgcattgtacaactaaagtatatagacttatacggtgattgtctcacaatttactacggggcctctgagatgaggtatcg

SEQ ID NO: 104653 - DNA, 105 bp, Glycine max
gccattttgagctatatttgttgcagtgttacgccaacaggatgtccagcgctatcttgcgcgatgaaatcggtcataatgatgagagcatgctgggtccatccg

SEQ ID NO: 104654 - DNA, 231 bp, Glycine max
caaattctctgtgttgtgttgtgtacttgtgttaattgtgttgttgttgtaggaaatttaagtgaaggagaatgatgatgaagtctgctatgtgtgcattggtgcttgtggcactggttgtggttgaagtggggcccatggctgaggctgcgagtgacttgcaacccatacacagttgactccttgatacttccgagcaatgtacattcaggggttctgctaccttcgagt

SEQ ID NO: 104655 - DNA, 239 bp, Glycine max
catctagtcatctgaattgaactttaatggaactgatcttatagaaatatggcgtcagaattaataccatcttgatgatgagggttctcaagctaaaaaaagaaaagttggaatttatgttttaagtttttaactctactggagtttgttatagagagactttgaatttaagatgtcattgtactctgagaagtttcagcaccactgcttccaccatatgctcatttcttcttcattac

SEQ ID NO: 104656 - DNA, 223 bp, Glycine max
ccgttcggagtctccggcggtcctactatccctactactactctactctatttacacggaataacaacatactatctccctactccaatacatagcccagagcggctccgttagggtttagtcctgtaccatatcgtgtaatctaatttttcatccgtaaaaatcttatcttgtggcgacgagatggcggaggttcaagtgcagcatcagagtccggtgtcag

SEQ ID NO: 104657 - DNA, 232 bp, Glycine max
atctgagaatgccatgcctgttgctacaaataatccctatgaaagaggtgttagtgacagtgtctcaaatccttgtctatacaaggaggatgataattccatatcaacaagtctcgcctacaatgaagaggttgcgaatataataacaatggatggcacatatgacaggacagataacaagtttacatcaagtattcaatcctataacaagggaaatgacagcttatctata

SEQ ID NO: 104658 - DNA, 258 bp, Glycine max
gtgattctaaacatggaaactataatggatgagtttgagatcattgggaatccaaagccatatatggattctgatataccaacagtgagagcttcagattcagcttcagctgatagcactgttgagaatttgcccaggagttataatagtaataatagttctgctggtcaaaatgcaagtcacaataacacgcagaatttcaggccaactattcaacctccataccaaccacctccactttacaaaggccgtgggcca

SEQ ID NO: 104659 - DNA, 168 bp, Glycine max
ggatttcggttcgagaccacacaaccctgttgaacccgtaatgttggcccgtatattgcgcctcttggcttgttacaaaatccccccttttccccttggaattctccctcatggcaaggttaaaaggccctatggtctcgcccctgtgcctaattacttggtcaggac

SEQ ID NO: 104660 - DNA, 213 bp, Glycine max
gggcttattggccaaagaccggtcttgaggtttgttcagtaaattgtggttcatgtaattgttggaaggaaaattccgggaacttcaacaattcagtttagacttccgtccagtgacctcggctccttaatctaatgatccaagaccgatcaccagctataagaagctgctctgggatattccacatgcttctggacactgatcgctatgagt

SEQ ID NO: 104661 - DNA, 105 bp, Glycine max
cggtccaagattaattactcagaagattgctcagttcagttaatccccttcctggcgccaccgatttccaagttcattaccttggtccaacattgcccagggctt

SEQ ID NO: 104662 - DNA, 239 bp, Glycine max
aattgcttctagttctctcacttaaactattttcacaaaccatagaaaaataataatttttttttccatggtaaaaggccttcctcaaagggggccttggaacagggatttgagtccccagaagccaacaatgtcctcctcatgtcccaaatggaagaggaccaagaggaagagtacctatggcgatgatagacttgtgagcatgattcaatcattggaggcagagatcactgacactg

SEQ ID NO: 104663 - DNA, 237 bp, Glycine max
atgggattggtctgaggatgaagttttcattgcttttaggaatcagcctaacgtcatgctgtactcaatggaaaaactcattacagtttggagaaaagggttgttctgaggggtttggttgtccagcatcttctctccaatggtttgataaagaagagttctagcttggttacactgtttagtaagtctgataaggtgtttctgcaaaagtacgtgagatgtttctgggacagggaa

SEQ ID NO: 104664 - DNA, 225 bp, Glycine max
cggtaatgtccatgctgcgtgggaaagggggttaagatacgtgaaactgatgaagcaaagcattcctgctgctgttcactctattgtggtgcagaccccttctggtctggctcgcactcatagatttgcaactgaaacagttgatctgccagctcaagaaggtgaaagggtaactgttgctgtggcagctccatctaatgtgtatcgaaaggagggcccctttaa

SEQ ID NO: 104665 - DNA, 181 bp, Glycine max
ttcagatcgaacgaccgtattggacacccggtgtactacaacgactttggagaatttgaggacaaggagttgtacagcaagacgtttttggacgaggaaaagaggaacaagttcataaagtggaggattcaaccttttagaaacaactttagaaatttgtcaaccccttgcattggtgatt

SEQ ID NO: 104666 - DNA, 259 bp, Glycine max
aaattctgtagaaaataaccatgataaaatagaaaatctagagggttctcctgccgatcaggatgaagcaggggacaaattagaagatgtacttgataacgatgatgaagccagtgatagtcctgggagtgaaggatctttgcataataaagtggaagagaatgcaaaagaagctgaggaagaacctattgtgaaatctgaaactgatataaaggtcggaaacaaagagtcttctgctgaaatcatcaataaggggaat

SEQ ID NO: 104667 - DNA, 256 bp, Glycine max
tggacattgtttgtgtgaagagaaaaggaagcgtatcaactgatgataataaacctgcaatgctgctacctgcggcttgtgagaatcattctattgagcttccgaaacttctcacaattgagggccttcaagaggagtctgggggagtagaaaccatgtcccacaaggatggcgatgaccaacttgaagatgcagtttatgtggaatctgaatcggacaggaatgttgtctccaagaatagtaaagcttctaagaa

SEQ ID NO: 104668 - DNA, 257 bp, Glycine max
gcaccgtcgtcttcatttcgcagccatcttctgcgccacagcataataacctgagcagtatagaagagtttagtagaatagaataggtagcaagattaggaaagagagaaggcgaagaagatccggtgattcttcacggtccgatgatgatgcggaaagccgtgatttgtcctctcaggagagacgccggagagacggtcacctcggccaccatcgattgtggcggggacggagcaggcaggactcagatagttcct

SEQ ID NO: 104669 - DNA, 223 bp, Glycine max
gctatccaccaccaactcaaacacagcctccactagagaataagagataccttcctgtcaacccagtctcggtagcttaagttgtctccttgactctatagacgctcttggtgatgaacatgatcatgcttgagacactcatcataggatatcaaagagactagctactccatctgctcagttgatgtcactagccatcatgggatccgttgcagagatcaat

SEQ ID NO: 104670 - DNA, 248 bp, Glycine max
ctaataccaagaaatcctaatgatagtatcaaaactaaatataataccataaaattataaatattcaacattacaacttcatcataatgcaaaccaatgtaataaagtatgacagagtaagtgtaaatcttacataaatgaccaaatcagaagtttgataggtgaaaacttattggatcaaagaagttcttgtaattcttggcttagaacctaactcaaccccactagatcggctagtacgataagga

SEQ ID NO: 104671 - DNA, 257 bp, Glycine max
ctcacaagtggtttctagggtttttccttttgaaccaattagttaataatcttaaacctcaatttggagcattctctgtgatttttatttttatttaaaccaaagtgggtcttttgtagattcctgaggagcatgcctcctttcctacacaaaataaaggattattctgattcctttaaataaaatgcttgttgatttatccttcatagtgttgtggtaaaacctccacctctgcttctcacttactatctccctct

SEQ ID NO: 104672 - DNA, 258 bp, Glycine max
ccggtaccttccttcaaccacaaaacctctctccctctaccacccattctcttctctctctctctctctcccttcctccatctctcaccttctcaatctcatcaccaccaccatcatcatcattatcttctcctatctctataacctcgatatccctcaaaacctcaccctcataccaaatgatatgaccctcttgtgagaacattttttcccccttaagaataggtcaaaggctgcaactttttctgaaccaatctc

SEQ ID NO: 104673 - DNA, 256 bp, Glycine max
gagaatcactacattaaactggacatttatcttatataaatttgaaaacaacctaataaaagcacaagtcagatataaagattacttatttaatcagctctttcaattttcctttactcagtagtatggttttaatttttccgtaatcatgtatggaatggggatgcagtattgttacatgtgtataatttattgagccagtcctagttttactgtgtcctatatataatatgaaggtgcctctcatatcatagag

SEQ ID NO: 104674 - DNA, 251 bp, Glycine max
acagaacatcttttttcttttcatccccacaacacaagtttcccgctcttgaataccctccaaagcagcaaactagttaccatatataccttcaaagaacaagaccatcactattacttcacagttcataaaggttacaagtccaacatgggaaactgcttgttggggggcatgtcagatcctgatacaataatcaaagtcacaacatctaatggtggcatcatggaattctatgctcctattactgtgag

SEQ ID NO: 104675 - DNA, 233 bp, Glycine max
gacataccagtttgagagcctcttcgcgaacgcaacttcgtcggtggcacatgcagtcggattctgggagtacagtactttcagcactgctgcagcactgtatcagtctcttggcttgggcacgactggaggttggaccagaggccaaaaggagcttagtccctgcagaagccatcgtagcagcaggagctctcgctgctatggggtgcctacaggttgtcacaagtcttcgg

SEQ ID NO: 104676 - DNA, 242 bp, Glycine max
tgacttcctaaacctaagccatacacattggtaatggatccaactcaactcattatcatattagtaatgatccaactgttcagtgtacagaagtagctcaaagtcaagtgtttaggaatgggtggatttttcaatttgtttaccattacagtagttccaatgacaatggaactaaagcttaagtcatcctcagatgaccccaatgcgtatgatttaggtcctctataggttgctggggtatt

SEQ ID NO: 104677 - DNA, 141 bp, Glycine max
aatgattgcaagtacttaaagttgatttcactatcttttcttgtgttgaattgtcaatattgaaggctagctttggccccagatagaggaaaagaaaaaataagacaaagacaaaccgtgcaatgaataagacaaagctgt

SEQ ID NO: 104678 - DNA, 253 bp, Glycine max
ctagggtttctctttctgaattgcaaccatgcaaccaacagcagcattgaccatggcggaggaccttactcagatcgctcacttgctcgaccaaacactcagccccgacgccatcgccgtcccagccgccaccgatgcgctcgatcgcctctcccttactccgcacttccctttctatctcctctccatttccaccggagcaggaaatcaaggtcagaaaatcgctgctgctacctacctcaagaacctcatt

SEQ ID NO: 104679 - DNA, 267 bp, Glycine max
gaaatatggatgtcccagaaaagaaccatgttttcaaaggtccatatctgaggtgactttggagagagtgtctggtctgtttggttccttgtcagtccttccttcaacaggcagaactagaggtacactacatcgacagagtagtgaaattgaaaattccagcaatcctccaaagcttcgcaggaatgcctctactgcatgtgatacgattagcacttcccaatatgctcctttgaagtgcacaagcggcttctgttttgatgaaaa

SEQ ID NO: 104680 - DNA, 257 bp, Glycine max
gtggtttgggcagtccaacaaacaggcccgagtggagaagcaagtggcgaatacgacgtcgtgggggtagcgaacctatttccgaagcaagatcgtggacgtcgttggggggtcagacagcgcaattgaaagctcagaagcattgttccgataaatcttcgcaggaaaacaaaacaaaagggaaaggatgattagcattctgagccagcggtggatttgggttgggaataggaacggcttctgggagcttcgttggg

SEQ ID NO: 104681 - DNA, 266 bp, Glycine max
cagaaactgagactgtagcagactctttcagtcccccttaggtttccttcttattagcctccccccctcacacctaccctatcatcatgcaccactttgccatggacaactctcagctcctccaattccttcccaacaccaccaccaccaccaccaccaccaacacccccttcttccatgctgcacctcagactcacaccatgcaccaccccctctctactaattcctccaatagtactaattactacgcctgccacctctcccaa

SEQ ID NO: 104682 - DNA, 260 bp, Glycine max
cttgtctgctagaataattctgtcatagccttgatagtgcattctgttatttccttgtggtctttggcagttagtacctacgtatgctatatatatctagcctctgtatgtactaaggggatatataaagaaaattatcagactcttttcttcaccttgcttctttggaggttccttagtcgtccttgaattctaaggattgtttctgatatccctaacatcttggtgctttcattgagcacatgactgaatcaacgcac

SEQ ID NO: 104683 - DNA, 254 bp, Glycine max
ggaaaagggcttttggaagtgatatcacaaacatcagttttgagaggaataacgtggaattgttcacgaatggcgactcaaatccgaatcctaagaagccaagaatggaatatggcagtgggctgggtcaggcagatgaaaacaatttaaaacaaggcacaaaacaagcttcaaagaactatcaatttggtcctttcgctccggcttgtgtgcccaaagttggagcctctgagaataataatctgaagcaggtg

SEQ ID NO: 104684 - DNA, 248 bp, Glycine max
gaatgttttgtttcttcataaatcatgattgcgcagtacagtgagcagctaaaggaggagcatgattatcccatggcatacttctgtgtccagctacgagcagtggctgcgcaatcatgatttatgaagaaacaagatatacttttaatgaatgttttgtcttttttttgtcagtggaaatcaaccatggtaagggaattgatgatgacttgtgaatatttctttgcaagacatcggtcatggaagaa

SEQ ID NO: 104685 - DNA, 266 bp, Glycine max
tgcagcggctcgagcttacccctactgtactggtgttgtcgttctcttctctgatgtgctttccctgactgtcaaatatggctcgtacaaccactctcgagtgctctggttgccctccacttcgcgctctaacgtttgacgcgcttggtcttatcaaagttgtggaggcccgcgataagcaacgaggagctcccctggtggtagagaggttgggcgaccctggaatcatccaaatgtgtgatggctgtatcaatgatcgaccgcaa

SEQ ID NO: 104686 - DNA, 257 bp, Glycine max
gtgggttatggtgcataagagcatttcaggaatgttatccaagtccatccagcacgcaggactgacctcttctactgcatgtaacgactgagactccgtagaggactaccacgacgttcaacactatggactcacagcttcccaccatctcatgcacccacttccgcagagtcctcgactggaggacaaatgatgacgggaaggcactctgcattgaagatacagtaatcccaatactcccaacttcagttcgaccg

SEQ ID NO: 104687 - DNA, 249 bp, Glycine max
cgtttttcttccaggaaatgcacgcgcatctagattcacctgctttctccccaaggcttgcagagcatttattgaagcaaagtttggattatgataactacaagtgcaaagggcatctttctgtgctagttatgctatctgtaatcggtttatagtatgtttcattggctcttttggtattgcaagaaattttggttttgttcgtggttatcaacaaggatacatttaccagcagaagtttagtcttgt

SEQ ID NO: 104688 - DNA, 265 bp, Glycine max
cggaggtcatcgaattcgcgaagatgtcgcggttcccgttcttcaaccgttcgaacacgattcactcgacgaaatcggaatcctcgcagaaaccctacctcgtccaccaccatctccacaatcttgaccggtccggttcggtgaaccgcttctacggttcactggactccatgaaatcctcaatccgcggaaaaatggtgaagaagctctgcaccttattcgaatcctccaaaaaacccttgccagaaccagaatccgaatctga

SEQ ID NO: 104689 - DNA, 263 bp, Glycine max
gaaaattcacaattttgattctcatattttaaaaaattaatgatttcgatgcaatcttcaattttatttacgttttattttatttatttcttacattatagttaattaaatcattttttgatgatatattaaattgagaattggactaaaattaaaaaatttgtaaaatagaaggtcaaatctttttattttgaaatagaagattaaaattgcatattctttaaaacagatgtcaaatgtttttattttaaaatggagagact

SEQ ID NO: 104690 - DNA, 217 bp, Glycine max
gaacggagcagctatgtaaaatataaaataccaagtatgcatacaaaatgtgaaattgagatccaaatttagggttgaaagggcatgcatttaaaatgagatccaaatttaatgttgaaaggtgacagagtttggccaccattattatttattattctagaatcccaagcgctaaaaaaaaaaaaaaaaagaaaaaaaagaaaacaagatatgtaaa

SEQ ID NO: 104691 - DNA, 260 bp, Glycine max
cttttggaaaccactaagccaattcgaactggagccaggccaatcctactatctgctaccattcagcaacagaaacaacaaccacaacaacaacaacagcaacaataatatagacactctaccatgtgatggtgaaaatgttaacgttgttgtgagacaagggcatgttagatctcaaagtgttcctacaatctcaaaccctgccttgtatagaatgtccttggactaccaccaccacaaccagggaatggggttgctca

SEQ ID NO: 104692 - DNA, 260 bp, Glycine max
ggtgtggtgatgagtggaagttctattcttgtggagttttttagatggaggagaagagtgcaggctctacaagagcagcaacatggcccggcagcacaaaatcctcgaactccaaacacgccgcgtccaggttcagggtcaggtccttccaatcacagtcaacctgtggtgcaaagtcaacagaactcaaatcagagctgaattgatgtgtttgtggtttctcttaacactaggggttgcagctgattgcttttcattct

SEQ ID NO: 104693 - DNA, 266 bp, Glycine max
cattttgatttcaatgtttcttataatggccatatttgaacatttgttcaaacccacgccaccagaatctatgctgcgacgttatcagattcaggaccaaccaggaaaacaaggaaatgcacaatcagttccagcatctaattatgcatctgatttctcagtcttaatgccagggcagcagtatcctacatacatcgcccaacctgcccctctgctgccttctcaaagggaaggggtttattggccttctcatgaacatcattttg

SEQ ID NO: 104694 - DNA, 255 bp, Glycine max
gcagaaactccatcaccgtcaacagaatccactagttcatggcgcgcttgcatcgcactagatccatgacgtcgtcgaacagcaacagttgctgctacaacagcacgagccctacagtgggatggtctcgctgttcgacaccgccacgttcatggttgtggtcaccacggtcacgttgcggacctcatcacggcggcaaaggagtcggtctaccaccaacgtcgaggccaaggacacgtggaacaaccaagtagg

SEQ ID NO: 104695 - DNA, 189 bp, Glycine max
attctgctctcggagagattataggtatcgcggaggaggctcacaacgcgagaatattatagagcaggagtgtgatcgcgagactcgctcataggggcgccacggagcactcgctgtgtaagcacctcgtaccgcatctcgtcgctgtgtatcacgtgatctcgtacgacaccatatgggctcggacca

SEQ ID NO: 104696 - DNA, 254 bp, Glycine max
gctgagtctgtctgatcgtcaattgcagatgtggttctgtcaccggagactgaaggaccgaaatgccaagaagctgcaaaatgattcatcacttgcgtcgggtccggcggtgggtgaggagggtgttgagcaagtgacaggggctgatgttgtccgtgattgtggtttagcttctgggccattcgatcatctggattcgcggagaattgcgcctcggcctgggttgacggcctttcctagtatgggagctggat

SEQ ID NO: 104697 - DNA, 143 bp, Glycine max
ggcacacgcacaagcacgatgaaagtaaatcaaatcataggcagttaaatctctgcctgcaacattctgagttcgacagacagtgataacctcaaatcatatatcatttgctgtttcagttcccctcttccactcttatcgtc

SEQ ID NO: 104698 - DNA, 107 bp, Glycine max
ccaagcctaccttgatcgccgtctcagtgtctgtgatagagtgatgtttggtcacagaacgagcgactatgatcccaattatcgatggggttcctcagatgaagaaa

SEQ ID NO: 104699 - DNA, 220 bp, Glycine max
catgaagagacaacaaaaaaacatgtcatcttcactcatcttaccattaaccattttgacagtactttcttttctctccttggccattggccaccgtgctcaaccctgcagtgaagaattcctcaagctagcccaacaaaagaacctctcagactgcaagacactgcgcactctgggggcagagtttgcttggtcctaccacaatgtcacgaataaatcc

SEQ ID NO: 104700 - DNA, 237 bp, Glycine max
cttttacttcgttaataccaaacatgtcattatgtttagtttttcttctaaccaaatgcttcctacagtaccttgtttgagtcttggtaatttgccaaaagttgggaaagagtttggatgaataaatgataaaagttgacgcaagtaaattgccaaaattaaaactttagccaggtaatttgacaaaaagtctaaaggttaaagcaggtaccttctttttaatgctagaaaagaatc

SEQ ID NO: 104701 - DNA, 274 bp, Glycine max
gattcaacccatcgagaaccaactcctgaaggttaggacaacattcaatattggctatcgaaactttatcacccataaggttggcctcccaacaatagcttctacggatacgaagttctcttaaaaggttgcaaccctccaaaactgcaacaagtccttcgtcactgcacatgccattcatctcaagatgcaaaacttctaagctggaacgttttgaaatcgcttttgagatagaaaaatcgacgccctccaaataaagggctttgagcgatga

SEQ ID NO: 104702 - DNA, 218 bp, Glycine max
cacacaacaaacgagcttgcgaaagggagaataacgaataacaacacaggcatacacgaacaacctaaaagcctagaagcccaggtcatagaagaaatctgaaacaaggcataacaagcggacatcgccacacaacgacggaatgacagcgaaggaaaacacgtcactcacgctgccatgatcggcgaagaagagtcgcggtcggctcagagtaccga

SEQ ID NO: 104703 - DNA, 171 bp, Glycine max
caattacacatgtgctgtacttgtaaatctgattacctagatctttggataaggcgcctctagaataagcaagtatgagggtattcacgcttaaatcaaattacgtaagatgagaaaatttagtaggcagaaagtaggaaggtggaaaacttgaaaggaaggtattctaca

SEQ ID NO: 104704 - DNA, 251 bp, Glycine max
tgaaaaggaggtatgtaatgtgtgggtgtggtgtgagtgacttaagcccacatgagccaatgagcagcgtccaggtcatgattgggtgcgtgctgtgaacgtggcgcacgttagccctttcccccagcaaatcggtggtgccctccctccctccctggtcctagccactatgttacccactttccctcaagcctctctcccatggcctcctttaagcctcctcccgatgcccccactgccgtccccctcgc

SEQ ID NO: 104705 - DNA, 268 bp, Glycine max
gtgcaatgttacagggaatggatgataaagtggttcctccatcgatgactgattttgtgcaccgcttgctgcccggagctgctgtacataaactcccatatgaaggtcatttcacctatatctacttttgtcatgaatgccacagacagatatttaccacactttttggaaccccacaaggcccactcagcatttctatagaagtagatcaagctaccctagaagagaccaatattgaacagtaataagtagtaaaagatggtgatta

SEQ ID NO: 104706 - DNA, 205 bp, Glycine max
ctatggactttttactagctgagcttcacaaggcttgaatacatactagctcacatcacctgttttacaacaagtctgcctatcaatcaatagacgcatacttcagaattattggctatcgagatgatgttggtcagatggatagtatggtacaatagacatggtggttagcatcagacctgatgatgaatatagcacttgtaca

SEQ ID NO: 104707 - DNA, 268 bp, Glycine max
  unsure (1)..(268): unsure at all n locations
catgatgaacaatttcaaagaccaagaccatctctactcctcatggagcttctcaaagctcatggctttcttcttcctcttaatctccatcttctacctcttctactccctaaggttcgttagccactccttcgattgtgatcaaacccctcacattcccaccatcactcatcgtttttcttccaacaccccatctgcgtagnagtccacacccccctttgaataagttaccaacatttcccacatagtcttggggtgaggagcctca

SEQ ID NO: 104708 - DNA, 261 bp, Glycine max
tatcagcttgtaccctatcatttgttctaatatagttgaaggtatacatttattttttctacataattatatgaatgcttgtgtacaatgtaacacgcttatgagatgttggcatggctgtgacgtgtttcgatgctaaaaaaaaaaaaaaaaaagaaaagaaaaaaaaaaaggggggtccccgtaattatagggtttgtacccggggtttatctgcgttccggattattggaggggccgttttttcccaaggggggagat

SEQ ID NO: 104709 - DNA, 218 bp, Glycine max
actctgtctcgtttacacatctctccaacccttcacgttcgtttctcagtcttattcgaatccctctctcaatctcctgtccacacggccttcgccctggcggcacaggaaacaccgacgagaggcccacacgacccacgagctcgcgcgagggggacctgcgaaggccccggggcctcgggcgcccgtccgacaggcgagcctggggccgggcgagg

SEQ ID NO: 104710 - DNA, 207 bp, Glycine max
ctgagagaagcagagcagaagaggtgaagtgaagatgatgtccacacgacatacgaccttgcgaaagcaggacgtcctcgaagccaagcccccccaactgcagcccacgccgacaaggcgtcaagagaacgctgcgagggggaccacacctgagcgcaagacacccaggcgcgcctaccccgattctgacagagtgcctgtcaaacc

SEQ ID NO: 104711 - DNA, 145 bp, Glycine max
cacaaaccgtaacagaaccaaacaatgataacccaacggcttaaccatctacttcactccctcttcctcttcgcagccgcattctccatcctcaacacaacatacatctttgcaaacggcggttatgccggtaatggctccagtg

SEQ ID NO: 104712 - DNA, 247 bp, Glycine max
gtacttaacaatttgccaggttattctagttgatgttattttggtatatgtgcagcacttgtctgtttagtggacatttatttggagcaaaattttgagaaagtttgccatctggtgatggttcaagtgcttcttgttcaggcctttgctttgttaaacaaatttgacattgtctcatgtacaagctgtttgtgttgtggacacccttctagctgaatcatatggatcaaattctgctttgtcgtac

SEQ ID NO: 104713 - DNA, 110 bp, Glycine max
ggttatggttcttaaccatatcggcctccgtgttgtcttggatgttgtctacaatcatttgtaatgaagtgggccttttgatgaacattctgtccttgataagattgttc

SEQ ID NO: 104714 - DNA, 260 bp, Glycine max
cagaaactgagattgggaggaaaagaaagcaataccatcggcttcttcagcactctcttgtttttgcctcagttgggactgctatggcatttgttggtttggcagcatgtcgtgcatatgcagttaaaaagaattcctctggttagtcatcaagaaaatttataatggcagagctgacttaaattaactgttgaattcgtgttcagtattgggcacactaatcttggtaactttaagttagaatatattttttgtacagt

SEQ ID NO: 104715 - DNA, 255 bp, Glycine max
catatttatgagagtaaaagagtgagcttgaatgcttgatatctgttatgaactgctgggtttgggctcatgtaagcttaagggctctactattggtacttaaaaaaagaaaactcccatctttttacaaaaagtagtcaaaacttgaaatcaaatcaggagcgggggaaaaagaaaagagagagaagtagggttcgaaaatggcagcagaatcatcagagggcgaagaagaaaccaagttaagcggagggagct

SEQ ID NO: 104716 - DNA, 148 bp, Glycine max
ggtgaggaaaactttggacagaaaatggagtgctagacaaggccagacaggagtgacaagaacctctcagcagagggagaagccaccatagaagcaaagaccagagagtactttgatggagtcgcaccacaacgccacacaaagcctc

SEQ ID NO: 104717 - DNA, 252 bp, Glycine max
aactcttctacacccccctctcactaaccttcaaggagaagtagtaacaatttgttgcttctcacaaaatggtgcttggaaacgtgtgtccacggaatgaaacggttaaacaaacataacctttgtatctgttattctgtaggtactttggaatagagtgtaatggtaatccaaacatgttacaattggagaaactctggtttattgatgcagcaaccatgctttacatgcttttggtgtaagcttggtttg

SEQ ID NO: 104718 - DNA, 248 bp, Glycine max
attccacaaggttatggattatccaacagaggaagagatcaaagacctttgcacctcatgtggtcttaccaattattcaagcaaaattcagtaggcttttattatgttcacagctcagaagccgtaaaattgggtctgatctatttataacattcattcttccctgcattttatcaattccttcagtatgtatgtataatgtattgtatcacttgtttcatctgtaaagaaattgtaaataaatgaga

SEQ ID NO: 104719 - DNA, 251 bp, Glycine max
ggcaattctcttttctgtgattcttgccaatgctattgtcatatgcaacatggcactggctctatctggcatggagggccatggtggatacttggcaattctgaaagcatgtcttctcctaaggggaaggacttcaatggctttgttcctggcacttcctgtcaatgtggccttggctgctattgaggccttgttccaattcagggttgtgaggccctatcatgttgctggaataacaaggccttgtgtgg

SEQ ID NO: 104720 - DNA, 252 bp, Glycine max
ggagacaattgtgagcatgattcctgctgatagagggtcagtttcagctggcttcttgtaaaggcttctcagcatttcaagccctcttggtgtctccccagtgaccaaaacagaactgataaagagagccagctacagtttgaggaggcaacagtgagtgacctcctttatccttcaacatcccctttggaccaaaacttttatgacacggagttagtcctagcagtgttggaaattacttgaagttttgga

SEQ ID NO: 104721 - DNA, 156 bp, Glycine max
ctcgagccgctcgagccgctcgagccgaatcggctcgagtttaatttgaatacttcttatgcaactatagtgaggctaagagattggtccataattattcaaaatgttggctatattccacaaagcttttgtgctccacctgaagagctcaacagc

SEQ ID NO: 104722 - DNA, 255 bp, Glycine max
ctactttgacgatgcccctaccagtcctcacacttctctttaatgagtactgccgaaaacgattcctgcccatatttgttgcatattctgcagagagtttgaaaaagagggataggcaagatcaaaatgatgctcaatgacacagttttatgagaatttggtaaatgcttataaagaccctgcattgcttccaattcagcattcattcgacaatgacaatcttcgcagtccccttatatctcaggcttaatgcta

SEQ ID NO: 104723 - DNA, 202 bp, Glycine max
actactactactactgcacacactctctctctctctctcattgtatggccgccaattcgagtagccgagggatcaccgccttggggaaccgattcgcaaaccgtctcgagttttcaaacccccttaaagctctgaagtctcgaagggggacaatagcaggtgcatacagtagcacggcgggtcagtgtatgacaagaacctg

SEQ ID NO: 104724 - DNA, 201 bp, Glycine max
ggccattgggtttctagaagccttgggcttggtttccggaatgtcagctgcagccgtacttcctggaccagtcatacccatattgaatcagacttttttggtttggcagctaatgttttctactcttctcgtgagaagaagatactcaatcaatcaattggttgggtgcttacttgtagctgttggtgttgtggtggctat

SEQ ID NO: 104725 - DNA, 201 bp, Glycine max
gctagtattgcctttggccccctggagatggtagaatgcaatcgaaagttgatgctttgggctggaaactgcaagtgattaggaacatgtagctatgtgcgttttagtggacaagtctggcaccatgtttggcatttcttttccctgtagagtttatacttgagctagaaaggcccatgaagacattggaatttcaattta

SEQ ID NO: 104726 - DNA, 171 bp, Glycine max
ctttgttcaagacaagaataaaggaagaatacaagtgatatcttcatttgttcaagacaagaataaaggaagatatcacttgtattacttcgattgggttgcttgatttcttttagagaggattctttgtgatgcttttgccaaaaaaaaaaaaaaaggggggcccgcgga

SEQ ID NO: 104727 - DNA, 109 bp, Glycine max
gttttgagttaacaaatgatttgcttgagtaggatcttttccatctaaagactacgctagtacatctgcgcagctgctcgtggagcttagggcattgcaaatggaactc

SEQ ID NO: 104728 - DNA, 259 bp, Glycine max
ggggaatgttggtttgagaagcagttctaaaagtggtaatcttgctgtacgtgttgcctcctgaagaatttacccacttccactttacaaattgaggaggcatttcaggttccagcataaaatgctgtggaatgaataccgccactacacagatattaaggcatattgcacattgaggtagtagcatttcttgtatttttttcatgatattcatttcatggtatagctgaggcaagttatagtacaacatgatccatgt

SEQ ID NO: 104729 - DNA, 222 bp, Glycine max
gtattattggtgccaaacatgtgctcacttacggtactagataacaatcaaacatgaccagtgtgggcttgaacatgtaatttcgtgaactccgagctgtctctagctattctacaaaataacatctttgtagcttgggtgaaataatttaaaaaaaaaaaaaaaaaaaaaaaaaaaaaaaaaaaaaaaaaaaaaaaaaaaaaaaaaaaataaaaataaaaa

SEQ ID NO: 104730 - DNA, 230 bp, Glycine max
ggcatagtttattttcttaaatgatgtgggtaaagctcgatgtttaatcctttgtcatatatgtacagtaacaacggattctccccactcccctttatttttttcttttcctttcatttatggaccgttgtactgtaattgtaaagcatattctcccccttgaatttcttttcatttagttgagaattcaaaattgttcccaaaaaaaaaaaaaaaaaaaaggggggccc

SEQ ID NO: 104731 - DNA, 243 bp, Glycine max
gtgataattgactttccaggtcgtattgtgataggtctttttggaaaggctgttccaaaaactgcagaaaactttcgagctctttgcactggtgagcttgtttcttctgcttctatgcattgttattttcatataattagagaacttctttcaatccttgtattgggtttcatcttcagctgtgttacagaaataagtgaataaatagattcactcaatgtaagaactgatgagtaacatttg

SEQ ID NO: 104732 - DNA, 272 bp, Glycine max
atttgaatagtgccttccaaatatacaggaatccaactttggatgagttgcttgccatctgcagacagatgcatctagcgtgggcagagttttggttcaataccaattttaatgcaccaccatgatgtctcctttccgagctttgtatgggcaggaccctctattatttaaaggaaccacagttctttccaagattgaggaaattgatcagctgactcaactaagagatagccttctgcaggagctgcatgagaatttactaagagtgtagg

SEQ ID NO: 104733 - DNA, 256 bp, Glycine max
cggctcgaggttgttacaaccaagtgggagacctttgatcatcctccatcctcaaccacgtgggaattattcgattgagtttgcttctccctcccccaatctttctcttttccccttctttaccccaatttcttctcctttgtctaacgtacaagcttcttgtttcggaactctgtcaataagtcttgctatcacactttttgtctaaaatacttcttcaaaatggaaattaaatagaagtcagaaatgttaatat

SEQ ID NO: 104734 - DNA, 164 bp, Glycine max
gtggatttgttttgttataccatgtaaacagtgaagagatgaattttgttgcatagagtgctctcttttagtaactatgtagatttcatgtaacatggaatacacactctgcgtgttgacaaatacgaagttttgcttattttggactccaattgaatgttgga

SEQ ID NO: 104735 - DNA, 137 bp, Glycine max
agactaaacagtaaacagccgtctacacgtagtacgatggaagtgctagaggctacaataaaggtagctcaaagacacttaaggcatctcgaacttgatgtgtgcgtcggtgggtacatttggattgtcatctatct

SEQ ID NO: 104736 - DNA, 189 bp, Glycine max
ctagttctagatcgcgagcggcgccctttttttttttttttgaaacaaggcttgggaggcgagagctttcaacgttacaaggggtaaaattcccatttggccctttttttatacaaaaacttgaaactctctctaggcttcatattcagatatctccataaataggcagggcttccagtgacgggtttt

SEQ ID NO: 104737 - DNA, 212 bp, Glycine max
ctcgtcttcaatcctttcgttattctcttattcatccttctcttctgaataatccagttctctttctgcccttttctccgtcacgctgtgcgtgtccggatctttatggatttgatccagatctacacgccgatggtgcttttggccgggtctttcatagatctggtgcgtagttgctcagatctactgtaccgcggtgcaacagagtatcg

SEQ ID NO: 104738 - DNA, 251 bp, Glycine max
tcgagcacttatctataatcccaatctctttctaatctccgtttgtgttcttgcagttgatgactccgattccatttcgcaaaatcccgaacccgacaacaccgtaatccatacttcccccatacacgagggtgaaaacgagatttcaactgtccccgaacctaaacctgaacccgaacctgaacaattccaattacaaccaccccaagcagaagatccgagccgtttcatcactcctagtgacttaacgc

SEQ ID NO: 104739 - DNA, 251 bp, Glycine max
ggtagatactgtatacctaacttgatggagctaaccccccaagttatcaaagcaattcaaaacattatgtatggtttatatatcaccactcaagtctcctcactcctgattttctttgtatggaggcattgctgtttcttttaattgttcctatgggatggtgtctaattattaactgtactcaacgacctgtttgattctaaccaataaagattgatgaactgttctaaaaaaaacaaataaaataaaaa

SEQ ID NO: 104740 - DNA, 247 bp, Glycine max
aaggaatcgttttgcctgacattatgcttgtggctttcatgatatcaaaattgcctccttcgtggactgattttgctcgaagcttgaaacataaacatgaaagttttacctttgatgatttgcttgtctgtctccgcattgaggataaacatcgttcatctcaaaaacacttgcaaaaatctgattctcactctaaggcctatcttgttgagagctctagcaaacctttctctaagtccttcaaaag

SEQ ID NO: 104741 - DNA, 248 bp, Glycine max
  unsure (1)..(248): unsure at all n locations
ctcgccttcgtcgtcgccgccgccggcgtcctcctctccacgctacgtgagcgggganngnngnggatgnggntctggctctgcggctacgccttcgagtgcgtgcttcacatggcgttcgtgtgcntcgaattccgaaccagaattggcgattcttctctcacactacctatagcgttntgangaggctagagcctatgagcactctggcaacatcggtttggtgggtgtttggattttattggatt

SEQ ID NO: 104742 - DNA, 200 bp, Glycine max
gcgttgacggtatgctgctcatcgtggatgcggcgaaaatttcgataagcctgtcacaaatctcgagccgttacgccatgtgtaggtcatatacgtatgaggtgatcgagatcggtcagttcctatagaatcagcgaggctgatggtctcaatcgatggcaaaggttggcgtgcccgatgcgcatcagcgtattcttccg

SEQ ID NO: 104743 - DNA, 201 bp, Glycine max
tgtcactcaaagcacataacatagagaggaaatccatgctgtggaagaagatacagaaagccatggatggtaataattcagatacccttcagcataaagcagcagttaaggtatcaatgcttgaaaagagtccaccaaatgagagagtgcatacaattcagatttgctagaaacacctaaagttaaggaccgtccgtaaaa

SEQ ID NO: 104744 - DNA, 174 bp, Glycine max
agaatcttctgtttttggatctatatactttggtttatgatgatggtgtgtttgaatcagaagagtggataggtttttggtttggaatttggattgggttggttttgttctcattctctgtctctccccaattggcccttttatttgatagtttgatggcacttgatctggttt

SEQ ID NO: 104745 - DNA, 115 bp, Glycine max
aaaatttggatcatcaatagtatctacaaaggtagaattagtttgggcctctaattgcaacctgtatgatgattgcctttcaataagtttcacgcagtttgctcatgtgaaagat

SEQ ID NO: 104746 - DNA, 188 bp, Glycine max
ctcacatctttcgggaagccaattggggatgttttatagccaaggaagcgtatgggatgtctgaagatttttctctcttctctgttattcccaatgtatttacctgattctgttagcagactctggggagtctcgttttgtaggaggtctagttggggctctcggcccttttgctcacataaatataa

SEQ ID NO: 104747 - DNA, 153 bp, Glycine max
gtttgcaatgaggatttgtattgtgagtttccacccgtaggaaacattgggaagagtaaaactggccaatcaagtaagtcaaatgctagaaaagagtccaaaaagacaagaggtcgcaactcgtgatccatcaaatagtgcctgttgagaaaa

SEQ ID NO: 104748 - DNA, 187 bp, Glycine max
cgtcgtctcctcattctgcggctcgtagtaggttgaacgatatggctgttgcaatgactctaatgtgttgtagcagcagtcatgttacatgtaccttcacggtagcacatggttgtggttagtgaaaggacttctggggactttgcaaacatgcttgctgcagctcatgcattttcatgatcccaca

SEQ ID NO: 104749 - DNA, 165 bp, Glycine max
ggaagagaagcgggatttgagcaaatttaaatgggacgaattcttggccatgactcgccaagcaatcacacgcaaaaaacacaagagaaggcttagtcccggaccaggtaatagtcatgatatgcttccactgtccaaagatgattgggacctaagcaaggagta

SEQ ID NO: 104750 - DNA, 153 bp, Glycine max
cttgaagtccaacaagttgtccccatcggaatctaggtcatggatgatgagggggatctaagaagggcttttgagatgtttgtgtgggagaaagaagggagtggttgcatcaccccgaaagggttgcaaaggatgttgcatcgccttggtgag

SEQ ID NO: 104751 - DNA, 185 bp, Glycine max
agggaagtgtcggaaaatttgcgtgtcacgtcgcgattttggttctacttttatcaattgtctcccgaagcattacctgtgccataattttaattcacgatgattgctctcttcctatatttaaattgataggatcgtgacggagagaaatccgatttttgcggtgttcgggaaaaaaaagattt

SEQ ID NO: 104752 - DNA, 255 bp, Glycine max
gttccgatagcagacacaaaacagtgtcctcaagtaggattaccctggtttacaagacatgccaatctcacatgagaggtatgtgacgaattgtggttttcattacacaccaatgcaatctaaacatgcagattgttatgtggagaatctcagaagaacccaaacttggacaatctttgtactagtgctgacactgccaaattcctgataagatcaatagtgtttgtagtgctttcatgttgccttaggctgtag

SEQ ID NO: 104753 - DNA, 267 bp, Glycine max
atacttactagtctttgaaataaaattggaatgaatgaagtatggtgcaatattgttgacttcaaaaaagatttgtagacaccttatatgctatttgacacagataaaaggaataatagaggtatgataaatgatatgatgtgataggaagagagaaaagataggtgttgatggagcattagtaattaaagggtgtctaactatcattgttcgattaacttggaagtgaatgtaagttggcactagttaaaaatctggtcagttcga

SEQ ID NO: 104754 - DNA, 264 bp, Glycine max
cgaaacaatcattaccagaaggaccgagccatgaagaagcatttctctggaatgagtggttattaagggtacaagagaatcattccatatttcttacttgctaagataccatacttcagaatcttctcggtaactatttggcttttgcctaagaccttatattttgcagggttaaggttcaatgaggtgcatagatatggtgttacatagctcatacatagtggcattatcgagtgcacaatcagctctttgataccaaaattc

SEQ ID NO: 104755 - DNA, 235 bp, Glycine max
gttttggagccttctcttttgggaatccagcctgagccaccaagctggccagagagagatgagaatttgagacttacctttgagaggaaagtgaacagtgtgggaattcccttgtccattaggatgatcaagaagaagctacaattggaagagggtctcaaagaggctggtgagttgaatgaattaaccaactgttctgtgaacaagaccttctcctctatgatgtgtataatgc

SEQ ID NO: 104756 - DNA, 228 bp, Glycine max
tgtgacatgacactttctgaataattgacttgatatgtttagactttatatatatgctaaatattaattttggtcttttctattttcatcttttacatcttagtcttttttaaaatttaaaattaactatccacaagtaaaaagtatttgacagtacacatctcatgtttaatacaaattcaacactccatatcgcagcagttcaaaaaaaaaaaaagggcggccgcc

SEQ ID NO: 104757 - DNA, 258 bp, Glycine max
ctctttcagaacactactgtactttgttgtgatcatggagaagagctattaacgttgtttttggacagtacttcggagcttccttaacttgtttgttaattggtttcagtatgacgacatagtgcaattagaatggctgtccaattttgtcgaggactctttctctggtgggagcatcaccatgaagaaagaggaggagccacaatgcaccaccaccaccaaagtggacgtagctcatgcccaatttcagacagcaag

SEQ ID NO: 104758 - DNA, 243 bp, Glycine max
cgactagttctagatcgcgagccgccgccctttttttttttccttctcgacaaatataaatatatatcataagccgttttgttttaccgcacctttttatttaacacgaccattgtgattttggggtttgggccactgtaaaattggttggtgccggattatggcctccaaaattcttagctttgggtcattattaaagagattggtaggttggccttcaaaaaaaaagaagggggggccccc

SEQ ID NO: 104759 - DNA, 242 bp, Glycine max
cggaatagataggaataaggtatcaggacaagcttctgctacaattcatgcatcaaagctctattatggtcctaattctagtgaaatatctgctaatggttcagttcaggcaacatccactgaaggtgacaaagaagacgttgaacaaaataattctcggttggacacgagggacctggacactaaatgtcacagtttggataatcaacatactcagactgtttcagatatgtctattaact

SEQ ID NO: 104760 - DNA, 245 bp, Glycine max
tttaaacatttgagtttgttattcttttctttctgtttcactacattaattcacttcactctgtacattgttttctccttccatggcttcttcaattcgtccctcactttcttccttcatgttaccctccctccgctcttgcaacccttctgaaaagctctctctttttcatctcggtagcggtattagactgtatcataagtttggcctgaaatcttctaggcttttaagacatgatgataata

SEQ ID NO: 104761 - DNA, 232 bp, Glycine max
agtctgttttaacaatcttgtgatcagtggtatgggcaggctgctctagtaggcgtcacttcagtatgttgttgtctgcatgggcagatatgtggagaatctgtgtgaatgaactatataagagtgaaaatatagaatctgaagtgcgtattgtgaataatatgtaccaagaagcgatagaatggaagatgaagagggtgaagatcgatgattaaccagtgtcgtgatggtg

SEQ ID NO: 104762 - DNA, 243 bp, Glycine max
gagaatttcacttcatcccttcatgattaaatcagctatggttcaaaaaggctcatcaaacataactgcttaagtattaggtggtgtgagtgatttgaaatagaaatttgaggttttgtcaagtttattgtctatcagaagctcacaagaccagcttatttgttaatgtcatacatttaaattgtattgtttttctttatgttcctgttctttgtatcaaatagtttgtatgtgattttgatt

SEQ ID NO: 104763 - DNA, 242 bp, Glycine max
cggctcgagcggctcgagatatatgtggcatcctatcctccatgttcccctttctcattcctgcgccaaatctatagaaaaaaaatattcttgtttttttagcctgacattctaaagtattgtaatgcatttgaaagatataaatgtatagcatatcgaactggtttcccctgccccagcagatgctgagatagcaaagtttgatgttcttggtcctgtctgtgagtctgcagatttctttg

SEQ ID NO: 104764 - DNA, 244 bp, Glycine max
attatgtaacatcacctggattgtctgttgtactctgttgtaactaggtaacccataagcaagtgttgtaggtgttggagcaaacctgctagagagttccatcagttaatttccttaaggtggagattgaagaccatccatacttggcaaaatcagttggtgtgaactgcatcccagcctttaagttatacaagaatggatcgaggattagagaaattccaggatacaaccacgatgtgtttgt

SEQ ID NO: 104765 - DNA, 220 bp, Glycine max
atcgtttcgttcaactttcaacgccagttcacactctctgcttcgcgtgtaccaacaagtgcaagttcgaatcaatggccagcgctcagctcacagtaatagcgtcatcgatctctacggcgtcgtttgtagggcttcgatcttccgtctgttcaatttgctatccacggcgcatggattacaatcttggcaagtctctgcctcaaagagtaccttccgg

SEQ ID NO: 104766 - DNA, 244 bp, Glycine max
aaagagtcccagaattagaagcggaaaagaaagttgctactactgcaagaaatttcaaggaggctgcacgaatagctactgaggcaaagtcactgtgtgttgaaaaagagagcatccaaataaacatggatatggctacattaaatcttgagaagcttgaagaagagatcaatgacacccttaataaattacaggagactgaggggatgattgtattgaaggagaaagagttggcaatggtcag

SEQ ID NO: 104767 - DNA, 236 bp, Glycine max
accatctatactcccagagactctcttgacaaaacaaaagctgaatctccagcactagcaccagacccagctcgagaaccagcatcagcagcaccagcaccagaaccaggcacagcaccaacaccagcaccctcagctgaacaagaaattgggtcaacaataccatctggaccagcaccagagcctgaatttgtcgacagtggagaggcttgtggcctctatgggagaggctctta

SEQ ID NO: 104768 - DNA, 287 bp, Glycine max
ctcgagtcttttttatttttgtcttactgttctgaaaaatatcactcagtataaactcattgcatgtttacattatttcatgagtaaggcatgtgctttattagaatggttagtcatccttctttaaaatacctttccttttgttatacacattgttttaaaggaacttctatctcttaaagatttgtggtagtttctttttagtgttcatcgatattcaatcatgtttaacatttttgttgccctcttgagccactaaggcttactattaatatcttattcgcctc

SEQ ID NO: 104769 - DNA, 288 bp, Glycine max
ggtatctatggacatgcctccacatggtcatgcacttgcttctgatggagaaatggaactgaactcaaacccaggccctacaattccacaggttgaatgtcttgtcactggacatgaatctgtctcacctcaagaaaaactgactcaacctccaagtcccttactgatggagcatagttctgatgataaaacacttcatgcactgtatcaccaatgtggtgtctatggacagttctaatagacactaagatacctctgatggagaactggaacagagttctaccccag

SEQ ID NO: 104770 - DNA, 285 bp, Glycine max
cttgtggtgcttaataattgtgacattattcagaaatatatgagctgcaagggatcttgcttggcaagtgtcggagcagatcaacccgctgaagttgtttatgatgccccagtgcatctgaatccaggatcatgtttgtacactgaaacacagtctatactttcttgtgatggtttacatcagcacacaaggagactgtgcccctgtgcataatgttagctgggtaagtcttggttacttttgacattgttgaattttgtgtacattatgtcaaacatcaaaata

SEQ ID NO: 104771 - DNA, 240 bp, Glycine max
cctcaactgccaaagacatcgtcgagcaggaattggcagccactgggtgactataacaacgaaaggacacgcacaacaggcaggccactgggatagtgaagatgataggcggcgagccagagagtacatctgggaaagatgtccagagtgtggggccaggacgccgagctcatgaggactttgggtcgtggcagatgcgagcgggcaagaggccaccagatttggcggtttgggagcaca

SEQ ID NO: 104772 - DNA, 155 bp, Glycine max
  unsure (1)..(155): unsure at all n locations
aaaatctgcagtttccccaaaccagcttcccggacaattcaattcaggaacttggagaaccattaagaatcagtcctcaggaaacctcttggatgagtccaaggaaagctctgcaccacacacagggcgaacacacatcncagagacacacagac

SEQ ID NO: 104773 - DNA, 274 bp, Glycine max
cactgaacccttcattgatgagttttgcttgactgatatggatgaaacactgagggaagctggttttgtgaacataacatcaattcttacgagtcccagacacgctacaattacagcaacagcgcctcaatgaaacattatcttgagattttgtattttattttttatttttcttcgtacgtaaacatcttcttgggtttggcatcaagctagttagcccttggtagatgtatgtccaattgaatagcgtggtccaaaatcgattaaattatgt

SEQ ID NO: 104774 - DNA, 277 bp, Glycine max
gctgaacacgtgttaacgtattcagtgcagaatttcattcaaggaaatgattggattccatctattggtagcccatcgtcgtaaattttgaggcatcagtagatggggagttttatttagggtacccccttgtaaattaccaataactaatgcaataccaatatatcaatccagattaggaagaaatttcaaatcaatttgagtcgtgctggtaaataccaagggttgatcacacttcactttattggggtgacacttgtttggataatttacaacg

SEQ ID NO: 104775 - DNA, 275 bp, Glycine max
cagtggcattcaaaacgcgaggctctcgccgtttcgggtaatgcgcctcgaaattctggaatcgggagcctcgcggcgggtttggatctggaattgggggagggggaattgaatccaattgaaccgttagggtttggggcgcgggtgaggggggttgcatttatgaaggaagcggtgttgttaggagataagaagagcgagaggaaaagaggaggagggagggtggtttgggaagggttgatgatgatggggttgaagggacaaagtaataataa

SEQ ID NO: 104776 - DNA, 274 bp, Glycine max
  unsure (1)..(274): unsure at all n locations
ttagtcttctcttctggatttccacacacactacgattttcaatgacaaagcttttcaatttcctcagaatcctcttcctcaacctcttcatccttacaatatcagactttgnancaccggcactancggganccaccaacatcacccaagggcatgagaaagcaggacaaggcacaacctacaacaaactcctcaaagctaggcaaatagctgaaagaatcaattcacagctaaacaactcaaaccaaggcctaaccgtgtttgcaccactga

SEQ ID NO: 104777 - DNA, 103 bp, Glycine max
cttttacagctttcggaacacttgaagaaataccttggtaccaaacatgaactagaagcaggattttcatggtgtctcattcatagattagagaaaccagagg

SEQ ID NO: 104778 - DNA, 274 bp, Glycine max
gtcctcttccatctcctccgccacgcccttcacctcttcaacgaatcgtagtcctccaaagacacgccgtggttttcgggtggagtcgttgaagcggagttcgaaaccagcgtctgcggagttggtgaaggaccccaataaggacttgtcccgcattctccgaaccgaagccgccatcagaggcgttcataacaaggccaagtcttcctcccacaaacagctcccgcccaaggcccttctcgaatccctcgacgacgccatcaaacgctgtcgt

SEQ ID NO: 104779 - DNA, 266 bp, Glycine max
ccagcggcaacatttgtgttgaataatttactttatttgtggtttgaggagtgagtgagtgagtgatgtctgagtgtggctgttccgagtcagacccttcgtgtggttgttggtcgagcagcagcagcagatctgtggcccaactgaactgaagctgtaccgagcattcatcttctgtgttcccatcttcttcactctcattctcctctttctcttctatctcttctacctccgaccgcgaactaggctccattggatttcacact

SEQ ID NO: 104780 - DNA, 265 bp, Glycine max
gaaacaaacaaaccaacgaggctctctctctcattcattattgatttcgagtgaagagagagattcgagatttgcgattccgcaatggcttcttcttccacgacaatgcggttatacgcggcctccaccggcgccgaggcgcgcttcctcgccggagctccgtcgccggattcatcggcgtcgcggccagatcctccgccaaatcgaggctccgcttcatcggaaggaacgcgaacttgagcctccggatgaggaggatgagctc

SEQ ID NO: 104781 - DNA, 252 bp, Glycine max
actcaacctcgatatgactaataccaaacaaattcaaaaagactatgttgcttctttatttttattttttgtgactatgttgcttctttatagtataccgtaggaagtattgtgaaacataataacaccgtgctttcttgtactcccttacagcttatgatacttttgatgacatgaaatttaaagctttacaattgtatgtaaaaaaaaaaaaaaaaaaaacaaaaaagaaagaaaagaaatgatagcagg

SEQ ID NO: 104782 - DNA, 259 bp, Glycine max
gccatatctagtttgcacaggagcaagattttaaggatcgagtggaatggatacccttccagtcactgaggaacttcggagacaagatgagatcaggcacttgttgtcctgtttctgcttccaaaagccttcatttctgtaattgtggacaaattttagaccagcgttttaacccttctgatattagtggggtgccaaagaagagaaggttggacatgattgtggatactacatctcttgtgaacaaggaatcaaggaa

SEQ ID NO: 104783 - DNA, 257 bp, Glycine max
ctcgaccgaatcggctcgagtttttttttttttttacgtttactactatggaaatttacctcacaaaccgcaattgcacagactcgctggagtgagaaaaagccagttggccagcggtaacgatcattttgaagaaactcagaggcagcacagcccgctataggaggatcacttggggtgcatacaagagccctttgctgtagatggctcagactctgttccagactgacttggcttgattcagccagcatcttctt

SEQ ID NO: 104784 - DNA, 255 bp, Glycine max
cgaaaacacttggttgatccaacactcctccgccttatcaagaaagttaatcaaaagaaaaagatgaaagtgaaagatcttcggcgttcccgcaaatgcttgaggaagagaaagttgaagggagaagaagagtggagattttgatggcactcatagacctcaaagtggtgtcaagggttttgagaatgagtgagttaagtgaggaacagttgcattggtgtgaagagaagatgagcaaagtgagggtattggacg

SEQ ID NO: 104785 - DNA, 261 bp, Glycine max
ggatccttggtttcaagttgggttcatgagaccaattgcgttttctattaaggagtctaacgttgttgaagacaacgaggggaaacctgcgaggccgttttacaatgcgtttgagataatctcgtccttgtcgcagggtttgatcttaggagtttgtttgagacgaggaagcggtcgccatcgatgtttatatctaaattctcggcttcgacggtgttggccaaggtggaggcggtggcgaagaaactgaactttagggtg

SEQ ID NO: 104786 - DNA, 238 bp, Glycine max
ataatgaaaataaaagaatgtcacagatcgaagtgaaagcaatatcttgtgggctatttcttgttttttgaggaaacttgtgattcatgtgttttcagttatgatactgtggccttttcatgtctttgagcagtgaatttgagtgatttgtgaaaatgggccacccggagaatataaatgcccttgcattttccagacaacataaaaattaaaaagttaaagtccacatgggtgacga

SEQ ID NO: 104787 - DNA, 255 bp, Glycine max
gttgtacctaaatagaatcttttcggttagactagaatgtcatgaaaggagagagggagtaattggtattttaagactatatttgatttttattttcaaaaaatatttttaatttttaaaatacaattaaagaggttgctcaaacatagttggtaggggtataaggcataaatgagagtttaaacaagaaaatggaaaaaacatctcttttgaattggttgttgagtaatataaaattattttttaaacaaaatt

SEQ ID NO: 104788 - DNA, 253 bp, Glycine max
gaaaatcatagagacatcaccaatgcaaacaccattgtctcaaggcccttcagttccattaatctttccttcatcacagggatcatcacttctaataagtgattccagttactatgatggagggctaaagaagcctcaagagaaattttcatgaccaagccagcattggaccctttgtcctactatgattttccaatgggtgttgcacagtctggttttaacttacctgttagtcagtatcagacaagcctta

SEQ ID NO: 104789 - DNA, 168 bp, Glycine max
cggctcgagctctcagtagttttgaattcaagtattgcaaaatatgatctccataatctcaagccttccagaactgaatagttggcaaaggattttactttgtttgttctttgaattctcctgaacagagatatgatctctttatataaactacaagtatacaacaga

SEQ ID NO: 104790 - DNA, 198 bp, Glycine max
cccatcacatcatcattgttttcatcactcccaacccaagggtctcacacacgcaaaacaattaaacaaagagcttccaccgtcgacttgcatctcttcaaaacgccaccgtactgctcacaagccaatgccttgctcttccatcacttccaccgccgatgacagcagcagcaacaacaacaacaagaagaaggatgg

SEQ ID NO: 104791 - DNA, 261 bp, Glycine max
gttagaccggttacccggaccggtcagaacggtgcgaaagttgttgtcaagcacaggagaggaaaattactggaaacagcatgctggatgcttggaacttttggacagcattctagattcgcctcttgtcaatgaagaagcccacgtttttgttgctagcaagatttctcaaagcaatgaaatccaatggaaatctcttcgatgtaaaaagtctaaagtgaaggccatctttgcttgaatgggatgtagccagctgctatg

SEQ ID NO: 104792 - DNA, 99 bp, Glycine max
cagcgtgttcatgggtcacactcacacccgcaacctaaagaaataagtcagtttcattgagaaggagcaattgttgcccaaaatgttcggtgtcccaat

SEQ ID NO: 104793 - DNA, 257 bp, Glycine max
atacattatagtatggcatgaaatcatcgttccatgctagttggatcttcctgacatagatgaaagtaatttatgacacgatgccattacagagatagggtgtactgtaccttattcttttcggcctgcttggctatgattcttgtttttttcgttgtagttgggtttttacaagagtactaggcattgtttgcctgttgcctctgtctcagacacgcctttatttatatcgtcatgtggttataacttgcgatttc

SEQ ID NO: 104794 - DNA, 258 bp, Glycine max
catggttgttgcatttactctcttccatcaaacattcaaaccagaaattggctcagtgagtcatatttggaagtggagtgagtaaacaggactatgtgattagtgcatacaatgtagtagtaatgtgcatggtgtaaagaaacagatttgatatgaacttggtggggtttctgtatgcggaaatgttgtgtagtcagacagtaacacagttttgttctgttaaatgattttttctttagttattattcacttttaact

SEQ ID NO: 104795 - DNA, 148 bp, Glycine max
atttttcccaccttaacttgaatctttagaatatccattccagtactgccattgatagacagatgagttaggatcctgtacaaattacttgcaacatatggaaatgatgcacatttttatgaaatgtgaaaatcagatatttgttgtt

SEQ ID NO: 104796 - DNA, 249 bp, Glycine max
gaagaagttgcaaatcgctcgatcgaaggccagagagcacttcgatcaatccccaagaccttaattcaaaactcacaaaagctgttcctaaagtacatgaggatttttctgagctttgacaagtttcttccccaacatgctccattcattagtcgagaggttggcccggcctggttcactgactattttcctgctgtcgatccggacaatgaagcagaagtgaccgaaatatggtcattttacttgaat

SEQ ID NO: 104797 - DNA, 164 bp, Glycine max
cctcgagccgattcggctcgaggaaaagcggccgaagcagctgctacctatgatttcttctgaccaacaatggaaagtttgtgcgaacgaacaggttcacttgacagtagctacaattctgttactgccaagatcagctcagcttattcagaagacacagatga

SEQ ID NO: 104798 - DNA, 265 bp, Glycine max
cggtaggacagtaggatatatacatggatgtatggttcgtgcctcaattcatccagaacagtatatttatcatacggaactcatcgatggtgtgaagtttgctgctcccgatgattggagttccattgcaatcgaaagtgattccaaaaaggtaggtaacattaatagaaatgtaacagattggtctgaactaggtgttatttatgagggcataagattagcagtcattgtttgatgaatgtatttccaactttgttcctaggaa

SEQ ID NO: 104799 - DNA, 260 bp, Glycine max
attttattctccaccacttttcttctcagtttttgtagccaagattgtttttccgttttcacaaagacccttgtagagagatccattttgaaagtgcattcattccgaatttgatgttgttggttaaagttgtcaagttggacttagtttccttaccaccacaaaattcattagcaagtgtaataatcctcctggaataatttttccatctgctattagttttccacccaaaaacaaatcaggttcaatatgtgatggaa

SEQ ID NO: 104800 - DNA, 257 bp, Glycine max
ctttgtttgaggaaattttcaagtgcagatgcatttgttgaagctcatcagtggggatgatggttctttgtgattgattggcttgccaatcttggagaaggctgtgctatgttaaaaattcaatagtacgatatgaagtgtgcatgacaccaatcaggtagactacttcactgatctgggataccacatgtggtcttgtgacatgccatggtatttgcatggtctatgtgtatagtgaaagttgaaacatttgttgc

SEQ ID NO: 104801 - DNA, 257 bp, Glycine max
tcaaactagtgatgcagttgatgtttactccgtgctacagcctggaattattgatccatatacagaagatcacaatcctggtggaaatccgaccttgggagtttttaataatcccagtgaagatgattttgggatgccccccctctggccattgcaatctggaactccggcagtctcaggattccaattattcagttctgaagtggaggatgtttcagatgcattgattgatttgcatcatggcaatattaattgtt

SEQ ID NO: 104802 - DNA, 279 bp, Glycine max
gtatccttgcgtccatctcaacatgtttgtcccagaaaaagatctgagttcagccatttagtgctgctgtcctcttctgcaaaggactaaccaggtccggcgggatatttggtggtgcgtctgtttttgtaattctttgattttgttaagttacttgttttatgtcagatgccatccttcttcggtggcgggtgtactatagtcctaaataggtctcaaatttcttagaaatctttgtgggagggagggatgtcatcaagtcgtttttagttgaccgtt

SEQ ID NO: 104803 - DNA, 285 bp, Glycine max
attcaaggtagggctaggaattgagcatcctcaagaactaataaacaacatacagtgacaagctgaaacaataaccttgtcctaaatctggagctgaagttcctttgaactttctagttttcctttctggcactaaataccagagagccttctttatggaatccgaaacctctaaatttaaatgatcttcacgttgcagaattgaccgtcagagaaaaccttgccttctcagcatgagtccatggagttggagctcgttatgacttgctagcggaattgccaaaa

SEQ ID NO: 104804 - DNA, 272 bp, Glycine max
atcgatttctctgcttctactcagtagttcgttgaattcaccggtttgttcaactcaaatcgtgcaatccttctttcaagctcgcgatttcctcttctggaattctcaaggtagttttagccttaggttccaagttccaagttgagggtggaatttgaaacactaaattggtgcattcaactatacaacacagaataacaattcctccactcctttactttccaaattgaaggatatgctgagtattggacaacacgatatgatttccttct

SEQ ID NO: 104805 - DNA, 249 bp, Glycine max
gttctacctcatcaccttcaccctcctctccctcctcttacccctctcgtttcttctcctagccaaattctccgatgcgcaatactatctccaaaccctcgcttggtaccattcaccacaacactttccatatgttttaactctcgcccttcacatcaaccctctcattctctacgttcttgtgtcattattagcatggcttccttaatccacggcttaacgggaaaaatcatcattttgagtgactcg

SEQ ID NO: 104806 - DNA, 243 bp, Glycine max
caagtactctgcagttgtcggcaatgatgatgcagattttagtcttttaccctttctttgatttcagccatgattgttccttgcatggtgctagttttgcctttcttggtcaagaacttcgcaagatatccaaagaggcacatgttagcattgctgctctctcagcttatctaaatgagttacttgaattttcaccagaaataatcttaaagtgcatgcattgtttgcccaatttgctattcg

SEQ ID NO: 104807 - DNA, 137 bp, Glycine max
ctttgaataatctatatttgtctcgcaccatttattcaaagtacgtgaaaggagttatagaaacacgccaccgtatatatactatacgtctatagatgatacttgaataaatggtgcgaaacaaatatagattattc

SEQ ID NO: 104808 - DNA, 241 bp, Glycine max
agaagaggaagacgaagtggaagagaaagagaagggtaagggtaagaagagtaagaaggatccagttacaccggcgccgagtgagaggcccacgagggagaggaaaacggtggagcgcttctctgtgccctcgccggctaagtctgcaaggtcctccgctagtaaaggtttgataattgaaaagggacgttgcacgcagctcaaggatatcccagacgtggctttcaagttgtcaaagaga

SEQ ID NO: 104809 - DNA, 266 bp, Glycine max
caattctcccgcttcctccgcaacccaaccctctatgctttcctgatcgacaacatgcactacagcgattcacgtaacccttcattttttcagatccacttcaccacgatcgcaatctccctccattttgtgctctcctttctgtcacgatcgttttatttttccagatccaccccacgacgaccgcaatcactccatctgtgctctcctctcctgttattgcgatctcccctccgttgctgcaactgcgaagccaaggcaaagct

SEQ ID NO: 104810 - DNA, 273 bp, Glycine max
cttgtgagggagcaaccataagcggtttatactgtataaagctactacttatggggtcatggggtcggtggatgatcaaattgacttcataatgggtgatttcttcctcttgacacataattaaaggtttaattgtaagattgaggaagaatgaaaaagtgacttgacaggtgtaaggtggttcatgcaatgagatactaattaagtgacaatatgtttttttaaactgttgtacattaaaaatggatctattatgaattatatagtatttgt

SEQ ID NO: 104811 - DNA, 200 bp, Glycine max
gagaactcagctactgattgctttactcactacgcttcagtgcaggcatgggaggcaggtgcatgtccaatcggcagtgcccagtccagtcacgcatctggtacacttctgcccttgacgacggtgcattgaccttaactcgctcaacccggatttgcctcggtccgtcatcaacggcattattacctcggagtccatct

SEQ ID NO: 104812 - DNA, 197 bp, Glycine max
caattcctacttttaaggaatatttcaaattcttttacacttattgggtttttaagtcatttttccttcagtttttttcccctttaaaaatagacttgcaaccaccatgatgtcatgaataatttaacaaaattaagcattttttcttataactgcactgctggtatctcttctggtatagcaaatattccacacaa

SEQ ID NO: 104813 - DNA, 136 bp, Glycine max
atcatgtggttgaagaagctggttcctcaggatcatcctctgacagtcagagattgacaaagacagtttcaccatcagtttcttccaaaaaatttggttccctttctgattggattccaggccaggctccatttca

SEQ ID NO: 104814 - DNA, 257 bp, Glycine max
atcaccttctccactcttcactaccctcaaaacccttttcctcttaccacttctcatgtggccaccgtggctcaactcaccgagcgggttccgcgacgagctccagccgtcctcggctgccgcagcaacctcgccctgccgcgcgtattcgtcggtggcatctacgttggcggactgacgacgtccgccagctccacgagagcggcgagctccaccggctcatcgaacgcctcccgcgctccaaccagaacaacgcc

SEQ ID NO: 104815 - DNA, 254 bp, Glycine max
aaagctactttatctaatttcactactggggtttgaaaattttgcaatttcatcatttaatttgatgctgttttctcatcattggcatttttttcctcccccaatcttttttggatgacaatacttgctcatgatgtattttcaaatgaaaaatctgattttaatttttgttttttgtttaaaatatatgatatatcctttttattgcagatgttgtatttggacaaagttttttactttttcatcaatttttt

SEQ ID NO: 104816 - DNA, 232 bp, Glycine max
ctgatactatcttagaatttgggctaaggacctaattcaatcccataaaactgacttgttaggtgagactattaagctttataagctctatataagccatatgtctagttgatataagactacacaccgctcttgaggttgtaattatggtagtcctcatagaagttgcaactatggcgggtgccttgcagcatcttacaataatttacagcttctgaaattatctttgagg

SEQ ID NO: 104817 - DNA, 229 bp, Glycine max
attttgtttctttgttttttagagcctccattgtgaagatttgatctcacttagtgtgtgtgtgtgtgatggggaattcatttgggtgttcggcttccggcgagaggttggtgtcggcggcgagggacggcgatttggttgaggcgaagatgcttctggaatgcaacccttgtcttgcaaagtactcaactttcgggggtctcaattcccctcttcattttgcagcttc

SEQ ID NO: 104818 - DNA, 155 bp, Glycine max
attaatttgaatttcagagatggaattcttaacctagaaactagaatgcgtattctcggatttgggggaaaatcgtaaaccctattttaggcttgaaattgaaagtgtcgtctcattataatgccttaatatagatataagactttgttttgtgc

SEQ ID NO: 104819 - DNA, 233 bp, Glycine max
accaccttaggatcctccatgttcttcacggatgataggtctaatgacccaagtatggttaattcctctatttgctgtacattgatatggggctgatgctattcctggggacccaccatgtcagcatgctggtccgcggtaagtcatgtgggccacaaagtaagaaaaaaaagctaatgaattcaaacttgaagttctaaaccaaaaaattcttgctgatgatgatgctttag

SEQ ID NO: 104820 - DNA, 255 bp, Glycine max
ggtaaatgatctgatacgtgtgatctgtatacacacatggttgtaggggaatattgaagtggagcttactatttcaatttcaagagtgatgttataatgatgatttgagattgcttcatttactgttgcaatctcttttgttttgactgcgcgacctaactatgttttaaaacgctcaaggtcccaacaataatcaactgggaaccttagttaaatgatcttattgatcaatcaagctggataatatacatatat

SEQ ID NO: 104821 - DNA, 257 bp, Glycine max
gagaaatgtgcaaaaccaggttcagttattgagaagaaagcatattttgaagctcatttcaagaggaagggcatgcttggttttattccatctacaggtcatgagggatcatcagatagagcaaccagtgaaaatgatggatcagagagaaatgccaagcaagaggattttgagtccaatgatggccattatgttcaatttgatgaaatgtcccaaaaggattttgagctagatgaaggtgaccattatattgaaat

SEQ ID NO: 104822 - DNA, 252 bp, Glycine max
ttcatagggtctctctctgttctttcagatccttttcacatcccccccccccccctcccctattttcagggaaaaaccgatgctgcccttttgcactgtgagcttgtgtgatggttttgatgaagttgggttgatcggcatttgcgattcataaagtttgaatttttgaaactcctagtctctggttggaagggtgtctttctggggaccccaaaaagggtggagtgttgaacttttgaaaaggtttgggtt

SEQ ID NO: 104823 - DNA, 122 bp, Glycine max
atcatattcctgagaaactggctcgctggcctattttggttgggggtatactcttaaccaacctcttgtgatgctcagtgattttttgggttatcaagtcagtttgtatacttttttagctc

SEQ ID NO: 104824 - DNA, 254 bp, Glycine max
ctcaattttgctcttcttccaattccatccaaacaattaaggataaaaataaaaataaaataagcagacatgtccacacttccctcctcaacctttccaaactccaacctctccctctctacctccttatcctcacaaaaactcccacttttccacacccttttccccagacccctcccttttcctcatctgcgaattcaaaccccaccaccattccttcccccgcttctctgcaagtcccccgagggcacgga

SEQ ID NO: 104825 - DNA, 253 bp, Glycine max
gtcacctggggcttcaatagccctattcagattcagttcctctttgcttctctctccaaacaaaacaacagaaccaaactcagaaccaaactcagaaccaaactcgccaaaactagggttttgcattgatggcactgtgcaaccgcgtcagatcgggaatctctctcttcaccaaatccacgttccttacttcccagcgatccagtctccaacgatccctcgttgcccctttcatttccctcgcctccagaaa

SEQ ID NO: 104826 - DNA, 248 bp, Glycine max
attttcctgtatttttactcacagaaagtggctcaaagactcttcaagagtttgtaacaaagaatgaggacacaaagaaatcttatacttctaatgtggctgagtttgacctggtgatgcagacagtgaaatctggaacacatgattcagagtcttgtttaaaagaagaaacttgccttcctttaggtggatacagtgtctggtcatctcttcctccgatcaacatttcatccttacaacggtctaag

SEQ ID NO: 104827 - DNA, 252 bp, Glycine max
caaaatatcatcactcttacaactcatatttctttatttcttcctattacatcatatcacatatcctacctatatttctctctcttttctttctctttcactaggtgtatactagcaatatttgggtgtcaaaatatttttttccttttgcaaattccttgcttcttttgtactcactgaggggtatttctatgcaggagttgtggctcgctagctacaattccaaaatcgaagagaaattttagcatttga

SEQ ID NO: 104828 - DNA, 250 bp, Glycine max
gattcattggtttactttaggtattcttggttggcagttgctacccaaaggggcgaaataagcataaataaagtgaagcttagtgcagagaaagcaagagttgttttggtgtttggtgtggtcttagggtatgaagttattgcagattcgagtgttcagttgttcatagattgttttattcgggctttattgttgggaaggttaactttcttagttggtaatggtgacgatgattgcatgtaatgaaata

SEQ ID NO: 104829 - DNA, 262 bp, Glycine max
cgacacatttgtggtcgtggcaaaatcatggtcatggacctgttttaaaaccttgggaataagactgaagctgtcaatcccacacttgtgatgatgatttacatcatataaatgacaaaggattcacctctgtctctctgttttagcttgcagagtcacagatagatagtgctttttctcatgccaacatgttccgtgatgacctctattagagttatgggccctttatattttgtttgaattctagttagaggacctcagt

SEQ ID NO: 104830 - DNA, 110 bp, Glycine max
gaccacgaaaaaaagcaactacatcagtccatggcaacccccaaccctaccagattctcccttgccatggagagaaccgggcaatgggttttctccccagaaatcccaac

SEQ ID NO: 104831 - DNA, 134 bp, Glycine max
tgttgatcctttctggaagctcaagaggtttcttaacattggttgtgaagctacccttaagagaaacgtgaaaataatagatgattttgtccatggagtaattaagacaagaaaggcacaattggcacttcagc

SEQ ID NO: 104832 - DNA, 265 bp, Glycine max
ctgagattgtatcatatgaggttgctgttggagtgtagattcatatatagccggagagtatttatataagaacataggactccatgttacctctatattcacaacagtaatgaaataactggtaacatggagtcctatgtgtatatataaatactctccggctatatatgaatctacactccatgttaccagtcatttcattattgttgtgaatatagaggatgcttcattttcattataaatcttgtattgcatttaaagatag

SEQ ID NO: 104833 - DNA, 259 bp, Glycine max
gggatttcagcatggatttgactaagtaacccaagtgttatctgtcaatggagatacttattaaatgaacagcatcaattatataacttgctgtaatatatttatagcgagattttgattcctaaattgcatagacataagttttaggcttactctataatttaatggtcctactctactccaaccttttactttgcacagaatttataccaatttgagtcgcaaacatggagtttcaatctcttcgttaagagtgtga

SEQ ID NO: 104834 - DNA, 262 bp, Glycine max
cactaacctcccttttgtgagttaattcttaaaggattactacttgagtgggtcttccttatctttgagttttggaccatttctttttttagcctaacgacaatggtacaatgttataagacagaatcttgaaaaatgcccttggaacatagatctaaatcactcgctacttaatgaggtttctaacatttgtgcgctatattgaccatgctatatacccaactttcttttcctcccgattataagattatactattctgtc

SEQ ID NO: 104835 - DNA, 255 bp, Glycine max
actccgtctccagagagagaaagtccgagatctgatcggaaccgaggtaacgctagctccaaacctactctatgctccctcgcgaacctcactttcttcttcttcgtcgattcgtttctattttctggatttaactcggtggaagttctaggttattattgttctttctccgtgcgcgagtcgttgttttccgtaaaaccttaggtttcggattctagggtttggtgaaggttttaggttgagggaaaacgaatt

SEQ ID NO: 104836 - DNA, 254 bp, Glycine max
gttactaaagctggttgatctacgttcatcttaatgagttacttatcacttaaacacagaacaattaacatgtttgttgtaattgttggatggatggcttgattgaagttgggacattggtgttatagatttgtgatttagataatgaatcacttaataaatttaaaagtaaattacataatagtgttgttatgttggaaaacacaaaacaattctactttaattatgattagaaagcccaatcaatattctaa

SEQ ID NO: 104837 - DNA, 253 bp, Glycine max
cgaggaatgggaggagttggtcttcttcatctttgtcggtgtcttcttctgttgggtctttggggggagttcttcggttatggaatggtccagtgcggaggagaatgagtttgtggttcctcttgggttttctttggttgtttatgcttggagaaggtgagcattaatttgggtggtttttttttcatttttcccccctttacagtaaaattttagggggaaaaaagaatgaaattagatattggcatgtgta

SEQ ID NO: 104838 - DNA, 101 bp, Glycine max
cgcggtgatgcttctgaatccgacaaagatttgcttggtagaggagagatggaaacacaacatgattattactctacgacaatgtcaatacgcagaagcag

SEQ ID NO: 104839 - DNA, 276 bp, Glycine max
tccaaattccggataacatgagactgaaagttgttcctagatcgcgtactaacttagatctacatgttcatctccaaccatagatgaacaacttacatgtgatgaccacagtttgatccgcggttaatcccactaataacctgaaattcaaaaccacgtcatcatccataaatcttcattcctttctcacgagaacaatcaatcacccgcataatttccagtggcacgaaataaacactaaccagcataggcttagaccacgaaaacaacgctcca

SEQ ID NO: 104840 - DNA, 268 bp, Glycine max
cagctgaacagaagttgcacaaatatgctgctgtagaaaaacttcgtgagcgcattggtgatgatgataaagtggtttcacaaattttgatgataagaatggtgcagaagtttttaatgatgaatatgaagactccaacataatctatcctagttcttggctacagaacctgcctgaatggtcaaacaaaaagcttgaatcatcggataagaaagatgactatgcatctgagagtaccattctgacaaggaatccgactgcaaggcgt

SEQ ID NO: 104841 - DNA, 248 bp, Glycine max
tagcgttctcggcgcgttgcatgcgttgatgcacgcgcttcgttccgagtccgagctgactctgcacgatccagcgctcgcgctgtatcatttgtcacttatacagagtaacagattgacattggttaaactcagggctgtccccacgctcctctcgatggtgcccgctaggaatatggcctgccggttgatgctgatgctctgcaacctcgccgagtgcttcgtcgcgcgcacttcgatgctggacg

SEQ ID NO: 104842 - DNA, 267 bp, Glycine max
ccttcacgtatgtctgatatttctgcgaaacctactttcaagcatattcctaagaaagggatgcttgttttcgatgcagctcagtttgacgggatccttaaaaagatttctgagttcaattgtgctttacagtctgaccaggaaaagcagaacttgtctttgactgagctcaatgtttccagactgggtgccattgttaaaattctgaaagatacttcacattatcattctagtaaatttgcagactctgatatagccttgttactg

SEQ ID NO: 104843 - DNA, 246 bp, Glycine max
aggtgctaactaatcaactgtctttagggtaccaattaaagattttaaaatatttttttctagaaaaatattcccaacatatctcaccatagtttttcatgattttttcattaattttttaactagtgttgttagaacacccaattacaggactcttttgttgatcattatccttaagaaaatgatttttttggcttgtaacatttaattgttactaattcattaaatatcatgatttaaaataac

SEQ ID NO: 104844 - DNA, 219 bp, Glycine max
gttagaatgaagctcctgcacaaacaagggaacaagcctcaacaagacaaaaacaacaactgctttcacacatattacaaaagacgttctctggttttctttctccctctatttcttcacttcctatctcatcactagcaaccccaacaacacaccaacctctgcagacacatcccatgtctcaaactccgaatccaacgttgtctctcctacccttgt

SEQ ID NO: 104845 - DNA, 237 bp, Glycine max
gtattacaacgcaccatgatggttatgaggcactaccttctggtcccgagctagcataaaacagaagaaggaagaacataactttgcccttctatgattttcatttgtgcaaatgtcgctgaaattttggcctttgtgggcatactacaaatttaatctttttagtttctagttttaagaatttttttcacagaaaaatggagttcgaagtattttcggaaaattagatatgatcat

SEQ ID NO: 104846 - DNA, 232 bp, Glycine max
caccaactattacccggagaagtcccccagcaccacttgctggcgatattgctacaaccgattcagaagagccacaatcaccagcaccaagtcccaatgcgaatgctgcacaatcatactataggcaagggaatatgtggccaactattggactcactgccattttgttatctgttatcgcttgacacgtgcaacatgattcactctaagcagtggtttggtttgcaaaaca

SEQ ID NO: 104847 - DNA, 216 bp, Glycine max
ctcgagccgttttgccctggctattagtttctaatgcttattggttggcattttattacgcactttaaggttttgtatgaattaaatccattattaacaaattatgacgtggagattcaatgataatgggtttaaaaaactcttagaatagagtgaactcaacttcaaaagttaactcaaaaaaaaaaaaaaaaaaaaaaaaaggaaacacgatta

SEQ ID NO: 104848 - DNA, 236 bp, Glycine max
ctcgagccgattggcttccggattttaaaactcgaagttgtataaaaaattaatcctcagaatttaatttctagaaatatatattttcagagttaatttcagaacataattttttctacatttagaaaccgagtttatcggatgatgtagacatgttgagattcaaattgattaatatttttaggacaaatatcacgataatcctttccttgccaacaaaggctttgaagtttcta

SEQ ID NO: 104849 - DNA, 207 bp, Glycine max
aaagctaggtgtcttcagaaacgtgatccaggttttattgttctatttcgctagtcatattactatttcattatttttttttcctttgataccagccaagagggttatttttgatcccttaaagctaatttctcattttcttttctgggactgtagatgttgtctctttgaaatctccttcatcctttcctggcttgttgaaaagtt

SEQ ID NO: 104850 - DNA, 268 bp, Glycine max
attgggaaccaaggagatcatggattgccattttagagctggattgtgtataaaggcaattggatctgaaaatcaccaccaatgagcaatagggactatctggatttgccaagccaataggatgcactatctggattctctggattttgtggtgctgtagggaagatttcttttctcccgataattggtgccttaatgtcacactgagatggtctattttcattacttttccatcaatgtctattttttttgtcttctctttgttagt

SEQ ID NO: 104851 - DNA, 264 bp, Glycine max
gataccccaaaatcgtagcaaactttatgctataaatctatttagatattgatttgagactttttcttcaaatcttatgcacaatttattatggacataaagacaagagtgaacttcctccctaccctctgtacccacgcaggcaagaagaacattacaccatctaaggggtgcagagaaattcgaagctttgattcaagaccacctggccagggagcaaacagcaactgcactaagctatatacattcatggagcagaataca

SEQ ID NO: 104852 - DNA, 267 bp, Glycine max
gtttggtttgattggcatgttatgattcttctttctttctttggttgaaccaacatgagcaacagaaaagacaagaatgatgatgagtctagtgagagagggcgtggggctggcatgggaggattgttggcagggggtgttgctgctgctgccgctgcctatggtgctcaccatatggctcatggatatcatcgttttggacacggagcctactatggtcatggaaagttcaagcatgggaaatatggcaagcgttggaagcatggc

SEQ ID NO: 104853 - DNA, 227 bp, Glycine max
cgttgttgttgttgaagaagaagaagaagaagaagaggaggaggaggaggaggaggaggaggagaatgagaatgaagacgacgatgttttggggttgtcgatggagatgagggttttcgctgagaggtttattgggatggagactttgaagatggagatgatgaaggagacggaacggtgtaggttggagatggagaagatgcggatccagatgattctggaatcac

SEQ ID NO: 104854 - DNA, 253 bp, Glycine max
ggttgaacaacttgaacttgctgagcagaatgttaaatttatagcagagttaattgatttgctattgacaactttgcttcctgattggaaaccttgtgtagcaattgatcatttagtttcttctaatggtaaactaactcattcaagtaaacagaaagactcagaattagcaaaatacaggcaaagctcagaagattctagccaaattgtggctgaaattgtaggtctctcaacctcgcctggaagaccggca

SEQ ID NO: 104855 - DNA, 255 bp, Glycine max
ggggcagaataagttgttgtaataattgaagaattatgcttagaattgtgggattaattaggcataacaaattgctgaatatatatagagaaagttaagttctttcgaattcctagactaaacaagagggagaaattgttgttagcacaagataaaggagctttattagtttcttgttgctatattgtgaatagagctggcactatgtaccttgatctcaagagataaaagattttaatttgagagaatcattga

SEQ ID NO: 104856 - DNA, 251 bp, Glycine max
gatgacagagacatgttcttcattgacattcctgacactctatgagccaatgcatgaaacaacaagccagtcccttcaagcatttggtgtggcaggatcaaagctcattcaccagcaacaaggtgtttgtgttggcaaggctgcaccacatatagaactaaagataagtgcagatgcttctggtcacattgggagaattctaactagaggaccacatataatgctaaggtattgggaccaaactctcacaa

SEQ ID NO: 104857 - DNA, 247 bp, Glycine max
atccaacaatgtctctcaccattccctccaacctctccaagcccgccgccctccgccccaaactaagcccaaagctaaggtccgccgccacaaccaccatcgtctgcagcaccaccaacaacaacaacaacaacaacgtgtcctccgacctgaaggcgttctccgccgcgctggccctctcctccatcctcctctccgcccctctccccgccggcgccgacatctcggggctcaccccatgcaagga

SEQ ID NO: 104858 - DNA, 176 bp, Glycine max
accaaatcaaaccaatccgtttgtgaaaaaaatcatccaaatacgaagtgaaacacttgattaatatacggtagaagctagcttaggttcagcatcatagctgacatcgagggagttgcaagatttgccagaaggatgcattgccacaatactgtcatacaacagtcctgtggatg

SEQ ID NO: 104859 - DNA, 129 bp, Glycine max
gcagtcttaacaacagcacaaagcgggttagtgtctgttcaagctaccatctctctctctctttcttagttgctccttgccataagttaaaatggcccaatacactttcctatacgcatctgaatcagt

SEQ ID NO: 104860 - DNA, 260 bp, Glycine max
gttgagaaataaggggaaaaaatggtgtcgctgaaactgcagaagcggctggccgcaagcgtgctgcaagtgtaggcagaggcaaaggatgtgagcttgagccccacatgcaagtgcaatcgaatatgctccatgagcacaattctgcgggcaaagacatgcaggaagttgggttcaaggcatgggtttatcatcagggaagccaacccaagattcacttcacgctcgcgtgcgtcgtaggattgaaggaggcaaagaag

SEQ ID NO: 104861 - DNA, 266 bp, Glycine max
cacacttcggctcgaggtccttgtggaaaagatggagattttcaccttagatttattttcttgcttacttcctgtgctcacaggcttgctggatagcaagatagaaagacatgtaaagctgtcactggatatgctgttaaagcttgtagcatttttggtccaacaatacgtgcaactgtttcagcacctccctctgttggtgtcgatctacatcaagaagaaaggcgggaatgctgcaacaagtgctttatggaactgcaaaagat

SEQ ID NO: 104862 - DNA, 239 bp, Glycine max
ttttgtttataaaattattgaccttgcattctaaggtgcagttctttttttcccttgggagaggggttaaaaatgtatttgtaaatttttttcgtttgagcatcataatttttattttaccataaattacgacttgcatgaaggattaattgaagcttttttacgcaagataaactacaaaaaaggtcggccactcctaacattgtccgtcgtccgggaattgaattccggccggttcc

SEQ ID NO: 104863 - DNA, 239 bp, Glycine max
cacttctttccttcaacttcagcctctacctcaaccttaacccccacttaacagttttcccaaattttcgtacttttttccttgccatgagtagatgcatctttttcaagctaccttaagcttgaactagctggtagggctttttaaatacgtcgataagttaacagtgttctgcttgtggcctctagtgtattttggttgcagattcaggtacaggtgtgtgacgagttgattgcttg

SEQ ID NO: 104864 - DNA, 236 bp, Glycine max
cttctgaactgcactctgcttcttcgtttctttgaattgtgcgttttgtgtatgcctgattctgaaattagctcttgttagaaagatggtcgattttctcagcatctcatgatgactccatggtttattattaccctgccaatggcatcttcttcagactcatgggtgaaggatataatgaagcactgaaacttgctgatgatatcagtggcatgatttctgagcagagttcattt

SEQ ID NO: 104865 - DNA, 264 bp, Glycine max
cgttatcctaaatgtgatctattgatgaataatttgagtgaagctttcaatagcactattttagtggcaagggagaaaccaataataacattatttgagtggattaggtcgtatttaatggctaggtttgttacacaataacaaaagctagcaaaatatagtggtgacattatgcctaaacccatgaagaggctagatggggaaattgagcttagtcgtaactggagttcaagtactcttataagatattagagattacccatg

SEQ ID NO: 104866 - DNA, 260 bp, Glycine max
aaaaaagcacaatcaatgtattaatttatatagtaatgcaaactggaagacttgttttcctctaacaatatctcacttcaacttgttgtcattattaaatgagtgcatagtgttggtgttctggagttggtcatggaatttattcaattcacatcccatttgctactatatatgctctcagtgccatattaaatgatgaaattcttattagtctagtttgattttactcgtaaaaacaattcatgcagacagagaaaata

SEQ ID NO: 104867 - DNA, 236 bp, Glycine max
ggtatgcgtgtcgagtttagattgagatataggattgtcttttggtaaaagtccaggtttggagccttttcccatcaattggctgatcaggattaaccataaatccctttgatcagaatttttagtattctgttgcactatatactacaagggaaatatttcagatatctgaaggttgaagtccttttacatccactgaaaactttcttcatgatgcatagtttatagtctccaaa

SEQ ID NO: 104868 - DNA, 198 bp, Glycine max
cggagctggccaagctcctctccgtggtgcactgccacctgcaccacaagaagagcaaatgagagcttcacagttgtataattttgctgaccttgatgttggattgcctaaagaagttgaaaccaaggagaaaattgttgaagctattgttgagcctccaccacaggtggatactaatgcagttccgaatttgtctgc

SEQ ID NO: 104869 - DNA, 252 bp, Glycine max
gtttggttccccaaacatggttgctttggctcaggagaaggtgatacagtccctcctttctctccatgaagaaaagcagttagaaattcatctgagagggagggatctacctcctgatttaatgaagcaattaataagaattttgggccagatctccatggattgaaagagaaggtacctggggtagatcttacactgaacatacgtcgccacataatgcatcttcatggtagcaaggagttgaaaccgaga

SEQ ID NO: 104870 - DNA, 251 bp, Glycine max
tttgaatttagcttatgccatgcattgcaatgaagaaataaggtattgttgcttttccattctatagttggcatgttattgtacttcaaagtcttttaggtttagttgcgtgcaacagaaattgaacttcaaacatttgatatgcccatggcttgtcggaaatcttcaataattcttctgtactttacactttttttcactttctttatcacaggttccgctgttgaacttttgtgcatcctcaattggtt

SEQ ID NO: 104871 - DNA, 106 bp, Glycine max
gatggcaggcagtggcaccctatattgatgaggatctcttcatcagagtcatcattcaaccagccactgttggaaacaaaactgagagaaccatcacaacatctta

SEQ ID NO: 104872 - DNA, 247 bp, Glycine max
tgaatttaaaaaactatggcatgctttctgtttgtcctttggttattctgattcaatttatttatccccttctatgattactggtcggattgataagtgtgaaactgagattttagacttaatagtggttttggcttttgtgtttttggcttgtgcttatgttgtaagcagttcttgtggttgtgaattggtttaaccaggtgtttgaagaaaccaggtccggtcataggcgttgcagctggactgg

SEQ ID NO: 104873 - DNA, 163 bp, Glycine max
gagccgtctttcaagtccaggaagcatggaaggctcagcgaaggggcgctgctgggagttattgttgctgctggtgttttagtcctcgtgtgttttgtttctttgatgtttgtgtgctgctcaagaagaggtgatgaagaataaggaaccattcagtggaaag

SEQ ID NO: 104874 - DNA, 259 bp, Glycine max
tctgaggctaagtgtttcaccaagagcattgagataattaaaaacaatccctcttcatctgttgctatgaataatgaaaaagagaaccttctaactaggggtaattcttcggcctccaagatagggcccaatgccacaatggaaggctatggattcaaggttcgagaccttggaaaatttttgcgtcttgcttgggctcaagaacaaggttacttggaagagttttgctgtgccaatgtgaaaaattgctgtggacaaa

SEQ ID NO: 104875 - DNA, 246 bp, Glycine max
gctatgggttagagataagggctcagggtcatgaaaatccgaagagacaaggaggtgttgctgattttccattccgtgcctattttgtcccttctttatcagcagttcagctgtttaagaaccatgaaaatttatgtgtaaataacggtgacaggctcccaaattctgaggtttcagaggcatgtgaaatggttgacatttcagcaaactcatctactgccagtcaacattcaatattttctgttc

SEQ ID NO: 104876 - DNA, 251 bp, Glycine max
gtgcagtggagaaacaagacaaagcaccacaagttaacataggttcacttatatattactatcaagtcttattattaatacttgtaaatagagcattatcaggtttcacctttcattggtagcaaagtgatcattcagagaatagaagcctgatcaggttgaatgtacactcatcagcaacatcaaggatagaacattcactcttcttccagaatgccaatcccttctgagaggcagatgttccttcaaac

SEQ ID NO: 104877 - DNA, 237 bp, Glycine max
gttctagatcgcgatctagaactagagataagatgatgctatcattcatatctttaatttattatagcttctgcattgcatatgtcagctaatgtaaaatagaattatgcgtgtcaatttactttcgattgttgtcagacattcaacatgaaaattatagtttgctgaactggttatgatttcatcaaggtttttgaaaaaattagcttcaaaaaaaaaaaaaaggggcggccgccg

SEQ ID NO: 104878 - DNA, 215 bp, Glycine max
gttctattgggctatgcaattggtgtcgcaacaaattttaccatcttgagtcagattatagcatatcaaaagcctcaggttggaaaggagaagaaaacaaagtaatcgaattacattgcgtcgtgtatatctcttcatcctggccaactctcagcagacacagaatttggtcagtcttcaatcgaactttaccttgtttcaagtttcaactactg

SEQ ID NO: 104879 - DNA, 245 bp, Glycine max
atgatatcaacaacacagtcccaggcaaaacaaaactaacacaaacaacattaacaaaaggaaaaagaaaaaaaaaaatctctctctgtctctctttctaaaacctcaccctctggctgtggtgcagatctcaagggggatctgaggtgaggttttgattggggaggaggggacaagacgcctcctttttagggttttctgcaatggccacgcactttccatttcccctctccgctgctcaggtt

SEQ ID NO: 104880 - DNA, 171 bp, Glycine max
caccaaacttttctccggcacgatgtgttagtcctgcaaagggatcaaagtcaccattcatcaacagtagcaaccttccccaaagaggggtaggagttagcaaagttttgactcattttggtggcattgagaggaaagagaagtttgttccaaccttgaaaacattggatg

SEQ ID NO: 104881 - DNA, 190 bp, Glycine max
acaataggacgaatgagccgagagctagtaaagggaaccagctcggtctcgaagtcatatatgcaccagctgaatagactttcaagcttgcggatgctggaatgcggacaccataaaggcgacttaaatggattcgtcacttacgtaatacgcggtcctggaattagagtacctccagctatagtcacgg

SEQ ID NO: 104882 - DNA, 251 bp, Glycine max
cttaactgccatatcagaacctccaaaactcatttgaatatatccattttgtttcctctcattaccttcttttttctaattagaaatgaagtttgttaagcttctgtaaagcagatatgtcagatcctcctcctcttcttcatcaagggtctggccatcctgccaccaagccataatcctctcttttagagtcaccaccaccaaaattatcaatgaggaagtctataacgacgacatcaacgtcgtcagcg

SEQ ID NO: 104883 - DNA, 145 bp, Glycine max
gttgcagctcctactgtctaacaactacgctgaagcagaaggtctagataaggagttcttctcttcaggcaaaaaaaaaaatggaggattcgttggagaattggatttcactgttggaaatggaagattatcatgatgggtcatt

SEQ ID NO: 104884 - DNA, 218 bp, Glycine max
tagatcgcgagcggcccccttttttttttttgggtcctcttctgagacacattggcttaatgtccatctttcctggtttaggacatcttgatggctaaaattataccaggaatttgttccatgggatgcctaatactttggagttttttaatggggcttggatccaatgtttaaaccggaaatggataccaatcaatgtgccatcccattgagctttt

SEQ ID NO: 104885 - DNA, 134 bp, Glycine max
gcctttgagggcctgtggaagaagtgtctgcttaagccatctcttgtcactcctgatcgaaaaaccaaaatcaaagttaggtcaacttaggtgaaccacatgtaatacaaaaaacttttgaccaagtatctaag

SEQ ID NO: 104886 - DNA, 266 bp, Glycine max
aagagtgtttcttggggggaattacattggtggagctgaggaaattcagaggctgcatgaggatgggaagcttgagaagcttttggtttgttgtgagaagattgaggacagtgttggaggtgatggaggagggggagtgtgtgaggcttgtggggatataaggtttgttccttgtgaaacatgttgtggaagctgtaaaatttactatacaggtgatgaagaagatgaagaagaatatgttgatggtgaagtgggggagtgtggat

SEQ ID NO: 104887 - DNA, 266 bp, Glycine max
gagaaaaagagagaggtagagaaaagcgaagagtctctctcttcctatctctctctttcaatgtcagggcacaaatcttccacctactacttcttcttcttcttccttctaacctatatcagaaggaaacgcgaaaaaagaaaaaaaaaaaagaggcagaaggttctagaagccgccaatttttatttcttttaatttgtctgagtcaaaaacgtccgggattataaccatggattcttcgtgtgtcccaaacggcgacgtttctg

SEQ ID NO: 104888 - DNA, 264 bp, Glycine max
gaacgaagaagaagaagcatcacagaaccgaacccattcagaagcaaatccgaaaacccctcacttaatattactggtattcagctgttcatgacaaaagcctgaaccaatcatgtcagaaggtgcagaaattgatgagcgtgtggaccttgatgaggaaaattatatggaagagatggatgatgatgttgaagaacaaatagacgatgatggagtggatggagttgaagaagaaaatgctgaaggtagttttgaagaagatga

SEQ ID NO: 104889 - DNA, 269 bp, Glycine max
ctcgagccgaatcggctcgagataaaattaatttgttttatgttagcattatttgtacgtgcagcacgagtactgaaagaaaaaagcaatatggtggatagcactagtagtgatgctagtacagctcatcatagtgatccgcatgatcacgtatttaagccaaaagaaggtaaatataatgcaaacgaagtgttctcaatggattacactccagccagaaggaagccgccgatccacaatttgaattgatggataaattttgtgccaca

SEQ ID NO: 104890 - DNA, 253 bp, Glycine max
aagaattgcagcagaatcgtggaggagttgtcttctaatatggaaaggcaagagcaatcataagaatctctagagaacaatgatgagaatattgaagaagactttaaggtatcagatgcatgcttctctttgatagattccctgaagtgagtaactgactgcacttcccaggcactattgatatcaaagatgggtacgtaaatgtaggggattttaatatctttgacaaggtagcaatatgtcactattttca

SEQ ID NO: 104891 - DNA, 261 bp, Glycine max
ggtggtggaaacaatcagaaccaaggtggaggtaacaaaaacaatggtggtaaaaatggaggtggtgcaccggagggtaaacatggtggtggtggtggaggaggaaacaagaatggtaacggtaacaatggagcgggtaacaacaataacaacgggggtaaaaaaggaaatccaatgggtggagttggtgttcaacctatgaacggtggatttcaaaacatgggtggtgatggtggtccccaggttatgatgtctgggcgt

SEQ ID NO: 104892 - DNA, 261 bp, Glycine max
gggatggagtgcactacacagaagctgcaaatcactggattgcaaatcgaatacttaatggttccttttcagatccaccactttccattgcacactcgtgccgtgcccaataactctcactagtactgttcaattaccacctttacaaaatctaatgcttggtgtttgcttaatcataaataatttaattcttttgcatttggcttttaccttggaccaattgagtcactttcgcccaagatttgttattgtgttcactat

SEQ ID NO: 104893 - DNA, 164 bp, Glycine max
cttaccaactttgagatagacgatggataactttatgagcttcataagtgactgataatgctgtgagttgagggtttagggacgagcatccagtgtgtattgtaggtctgcgataattagcctgctgaggatacggtaatattcgtcgaattcgtggacatatg

SEQ ID NO: 104894 - DNA, 246 bp, Glycine max
tggaaattcaaccacaaattctgagagaaaattgaacaaattccagtggctatggaagtttggccggaataatggcgagtttatgtcagagaaaggaggtgatacttctgaggctgcaaaacctgccaacaattgtaacaatcaaagtaacacaacaccctcttctacagccaacaattgtaataatcatagtaacacaataacctcttctacagccaaaaattgtaattatccaagttacattat

SEQ ID NO: 104895 - DNA, 256 bp, Glycine max
  unsure (1)..(256): unsure at all n locations
atagaatctcaactcaaccaatgtatttttggctttaattttttttggaccgatgtgtattaattacttgattgtagttatcgaatttcatcattctacagaatcaatggtttcccggttattgaaaaaaggcattaaagaaaagattcccttggatcattcatggcatcaagatcatatgttaatctactagacttagctggaggtttactggatattccacacaagatagncccctctcganggatgatgacag

SEQ ID NO: 104896 - DNA, 261 bp, Glycine max
gctaaatataggcaagctaagttcggataagagccattcaaattttcagtccagtgtattaacaataaggaaaatatgaggagctgcaacattagaaagcacctccacataatgcatgtgagcaattagtgacagcaagctaatttttggataagtccacaaatgatcaagcacacaacaaagcctacaaagagatattctgcttcaaggataggatttatatatatatatatatatatggcattgatcacgtatatatgt

SEQ ID NO: 104897 - DNA, 258 bp, Glycine max
gtcctttgtatgttgatcctttatgatgggtttagtaaaccaagtcgtcgatgttttgtgctgctttctttttttttttgcaattttaaggtgcttttgttgtctctacgaagacgtgttgagatgatgatgccctttaaattgttctcgcttctggagtccggggaagtagatagtggtaattaagtgccaccaccctgccgccaactactactctagaagatatcttatcatatttgtactcaaattaatatataa

SEQ ID NO: 104898 - DNA, 203 bp, Glycine max
gtgctagtgtgtgttgtcttcctttccattgattgtaatagagagtagtttcttttatgagacaaatattgttgagcaattttggtttcatttatttgagccaatactgtattttaagatctgtgtgccgaatttttttccttgtttttgtaccatcaggctagccaaatggtactatgctaataattttaagtttcttttcc

SEQ ID NO: 104899 - DNA, 273 bp, Glycine max
gttcgagggattgggcttgatactgcacttcattttgttaaagcttttagtgaagatgatatattgaatagattacatgagatcggcaaagggaatacttcacaaattcccatctgcattaaagttgaggacaatgtggatgggaactccccaaatagaaaactatctcattgttcattctgtgggcatccaggcagcaaaaaagatcatatgaaatttccctgtgaatattgtgtcacaaaggatgatgaaggttgccagagaaaaccagag

SEQ ID NO: 104900 - DNA, 245 bp, Glycine max
atcacaaccattggtaagggtatgcgttgggaatgccgtaaactcgatactgagaatggcagtggcattcagaagatattagtatgccagaacaagctatggtattcatccaaccgcagggttcaagatgataaactatggaactaaagcagtggtgaaatggtgtatgagaggcaaacgaaagcaaatgcagagtatgttgactcgaattctataatataatgagccatgaatcagccacgttc

SEQ ID NO: 104901 - DNA, 260 bp, Glycine max
gtcgagccgaatcggctcgagggctccggccatgccgcgagcttcgcgatcaactaggaggagggctaaatttcgaagagcagaagacaatcaaaagtgtgcatttgacttattggccaccgtagctggtaaactattgcaagagagagagaatccaaccatgtctagtgatacatcattagaaaaggatcagtgtggatttgtcaaagagtgccaagatgcaaataaaccatccaaatctgagatttctgatgaaggaa

SEQ ID NO: 104902 - DNA, 260 bp, Glycine max
gttgtactcacatcatatctgtgatagaatcattctgctgaaacgtaagggccactgagggggtgcaaatttcactgagacacaggttgaccagctggcattctgaaattcaagggaacactgttgaagaataagttatgttgaacttgttgcataatttatcttttgcacttgagttgtcaatttgtagatatgtgttcttatgttatcttgagaatatttggttttttccttccatgtttctctctgactttggcatg

SEQ ID NO: 104903 - DNA, 230 bp, Glycine max
aaatgtgttattgagaggatattgtttttaaacatatctgataaagtaagggtgttaaagcaatggcagagacgatatattggtgctgtgttgttgtgtttgtggaactagtgctagtgttgagcggctgcgagtcaagcacaaacgagttcagtgttccaatgttgatgcagatgaatatcaacaaagcgtgtgatgagatatacgtggttcgtgacggagagactctg

SEQ ID NO: 104904 - DNA, 259 bp, Glycine max
tgtttttccgttcgtcgttatcgcggacacattttcacccgttcttaaatcctcttccatttatgtgtacgtattccaccactgcgccacaacacgcgtgagattttcactcgccgcttccctctctagcctcttcgaaacatcaacacctcctcttcttctgattctgattctgattccgattccgtttcattccaaacaatggagagaccactcctcaagaatttcgagctcgagcacaaaaatccctccgtcgaag

SEQ ID NO: 104905 - DNA, 256 bp, Glycine max
gagtactctgaagtaactttgcaatttgctctagttctttgcttttgaggggatatttggattgtttatgattgaatttttcttcttaggagtttccttaagtaccacaagcagacaaaggacgtcgttactgtagaaaagtgaagtagaaattaatgcagaggaaaaaaaagaaagagccttactgtgcatagcttctgtgtgtctttggggctgtggctaagtagtaatttttactttcatgggtgaatttctt

SEQ ID NO: 104906 - DNA, 147 bp, Glycine max
ggaaaagagattagacagaggattttcccctatccgagttcatgagctccttgactcggtcaggcaactcggtggaactcagtaacccattatcgagttccaccgagttgggtgaccgagtcaaggagctcatgaactcgggtaggg

SEQ ID NO: 104907 - DNA, 254 bp, Glycine max
gtcaaactcaaacttcccaaaagatggatgatagatctgtccacatcattaaagaagagaacactaacacatgtgaggaggcaccaaagcagtctagtggtaaaccagaagatgcttcttcttatatgaagaatgcatctcaagtagatattccctttcctggaccattgcaagtttcaaaatcaagtggcttcgcatgggcaaaaaggcgtagagatgacacttcagttagatcccacagtcggtctatttct

SEQ ID NO: 104908 - DNA, 251 bp, Glycine max
agaggatattgcatcagatgaccaattggagggccattatcgtagatatcaaagaaagaatcctaaaggcagacaggccacatgtgtagcaggggaagatcaaatgtctgatgaccaattggagaatcattgtcagaagcagcaaacaagtttctataggaaaaggcaaaacaaaggcattgaaagagaggttaaaaatgaaatggctgatgaccacttggaggaccattttctgaagcagcagcaaagat

SEQ ID NO: 104909 - DNA, 248 bp, Glycine max
ctcatcgtcatcgtactactactacccacgttctgctcctttgcggatcgtgtccttgaacaatgctaactgatgtttttttgcactcatcattatcaaccctttcaatgactctgcgcatggttgttgttttttatcggggtgacggttttcttgtagattatttgtttattaaatcgactcccttgttcgcccatacaaaagatggcagacaatgaggatggaagggataagactactcgtgggaa

SEQ ID NO: 104910 - DNA, 244 bp, Glycine max
cattcccactctcactttctggttctctcccttcctcttctttttcattcttctatctccgcataccaccaattgtaaaattgaaattcaccctttcaaaattgtacccagattctccgcgtaaagtgcccccttatttgttggtccgatgttaagggaaacatctgagaggctacagattcactgcgtcgattccattctctttccctcttctcatatctttttaaaggtttcagttttcatc

SEQ ID NO: 104911 - DNA, 245 bp, Glycine max
gcagcagaggagaatgtaagaagtataagagcatatgtgacagaattgaaagaacgtgtagccaaactgcagtaccaaaagcagttacttgtttgccaggtgcttgaacttgaagcaaacgaagcaaatggccacacatagacaatgaagagtactcatgtgaaccggaggagccccagatttcgtggcaaatagcatttaaagagcagcggcagcagattcttgaattatgggatctatgttat

SEQ ID NO: 104912 - DNA, 255 bp, Glycine max
catattcaaatggaaacaattccagtgaaatatagtagaatgcaccctattttatttttgaatattctaagatacaatgtagcattgccgccacaaaggatactaccatgtaggcttaaattataagagatacagatactttatctcagttgatgctcaacattctcttgggatttcatgattcggttaactcatgttctattgtttggtaagtaattgtctatatgtgcatattgtgatagattatccatgtgg

SEQ ID NO: 104913 - DNA, 261 bp, Glycine max
atcgagcgattcggctcgagtgatttgtttccacatattctaagagaagagccagtggcaaggctttatgagcttgggcaggtacttaatctaaacacagctttacttttgtctgataattttttatttataatatatttctattcatagtcaaaatagttcgaatgaatctctgttcttgacctgaatgatccaaatccttccaggaaaatgcacataacttcatagtcaaaattcactgtgcttattattctcattcag

SEQ ID NO: 104914 - DNA, 256 bp, Glycine max
gtcttacttaaatcaataaaattgcagaatagatcactagagacccagccatatttaaatggacgctgcatttatcttgtctgaatgatgtgctctgggataacaacagaggggaagatacagtcgctactcttcgttattcattttgcgatagagggtactgaagtcatgtcatagatgtctgtgtgtgtgatcgtattcagttgatgacagcagggtgtgtctcagttaagcttgggaatttgatcgactctgc

SEQ ID NO: 104915 - DNA, 254 bp, Glycine max
atttaaacccttttcgatccaccattctcaccttgttgagctttgcctagctagctttgcttcccactcctcactagttaactcttttttattatttttctgacaccaagcttgatcaaaacgtacggttcaatggatcgcttttcttccagtaccattctccccttagcgtttcaaggtgccaaagatgacttcaccatgcagcttgcactggtgtggaaccaaatcaaagcgccactgattgtgccgttgct

SEQ ID NO: 104916 - DNA, 252 bp, Glycine max
ggtgtgaacatgaatattattttgattgcagttatcctaattcataaatcacattgacatattgttctttttgtcttagatgtgtatttaactcaaataacaagattttctcaggatattctcaaatggaaagggaatctctgatttcagtttattctttcagacctctaagaacaggaagtcatatgcttggattctgctttaactccagaagaactagtgcatcttgcgatagagtgcttacctacatct

SEQ ID NO: 104917 - DNA, 222 bp, Glycine max
aaagcctcttcttgctttcgtcaactccatcctcctccttttttcctttactttcttctggtattccccttagtgcgattcaacctccaccttctccctaaagacccatcaaactttacaaaaaaaaaaaaaaggaggaaaaaaacaaaaacaaacacaaagggattgaggcaccagggtttacccttctattccagtctattcagatccccccaattggca

SEQ ID NO: 104918 - DNA, 253 bp, Glycine max
tagccctgctctttttcttctctgttttctggggattctaccctctctacaatgctgttttcacatttccacaagagagaagaatgctgatcaaggaacgttcgtccggaatgtaccgtctttcttccactttctggccagaacagtaggagacttgccaatagagcttgcacttccaactgcatttgtcatcataatctattggatgggagggctcaagcctcatccagttaccttcctcctttccctcctt

SEQ ID NO: 104919 - DNA, 237 bp, Glycine max
tctaattgtagattaatgatgattgattacgatgtatttaggagttcatatacaagtgcataaattgaaaattcgtgaatgtttgtaatctctttcactctttgttttgctcggttcttgagattgcctaagcttcattacttcaagtcatccattttaaaaaaaaaaaaaaaaaaaaaaaaaaaaaaaaaaaaaaaaaaacaaaaaaaaaaaaaacaatcaaaaaaaaagaaaggg

SEQ ID NO: 104920 - DNA, 162 bp, Glycine max
aaaacttttaggaagacagtttgggaatgttggagagagagctcagtacaagggtggggaggctttgtattaaaagaaaaattgaagttgctgaaacagagattaaaagtgtggagctaagagcagttggggatattcagcagaagttaaagagggcagagc

SEQ ID NO: 104921 - DNA, 261 bp, Glycine max
caccaacccaaatggcgcgttgggctcattaaactacaagaaagaagacaggtgtgccttggccactaaatcccaggaagcacctccaaaatttggaactcctgaacgtcaaagactgattgatgagatacacgagtatatgctaagcaagtcatcccctcttccacaacttgccccctcacaagcttctgaagaacaatccaaaactgaggaggccaaggcccaggttaatttggaaaatcccgaggctttacccgtggg

SEQ ID NO: 104922 - DNA, 136 bp, Glycine max
ggcttctatgatgacacttggttttttgtaatgacaagctgtttttggtagggaagggttatgcttgtacaaaattaatacatgtacatgttacttctctatgtccaaataaacactgattttgccttgtgtgttc

SEQ ID NO: 104923 - DNA, 247 bp, Glycine max
caaggaacgatcctgttttcgcaatgcgtggatcaatgcattctattcagagagacatgatcatgctagaaaaccagcttcccttgtttgttctagacagactttgggaactcaattgggaaaaccagaatgaaaggactagtttcaagtctagtactcaggttctttgaccctttaatgccaacagatgaacccttgacgaaaagtgacagaaacaaattggaatcatcacttggaggcactaaca

SEQ ID NO: 104924 - DNA, 109 bp, Glycine max
gtatcagcagtctatggcttttgatactagtaacgcttcccaagacttatgctctagacgatggacacaagagctactcccaagaacaacttgtgtccattcgtctttg

SEQ ID NO: 104925 - DNA, 272 bp, Glycine max
ggcatctatctgtgacatatgatactcctgataccgaagctgatattaagttgctttgctcacaagttcaaagtgaccttaaacaagggattgcaggtgctgtgcctattccctctgatggtgcttgtaaaagagcagtcattgatgcattggtaactaatgtcgaagctatgattaaagcagatagaaagatcactgccttgaaagaattgcagggtcatatgtggcgcactggttatgagaataatgaattgaagggaatagtttttgat

SEQ ID NO: 104926 - DNA, 284 bp, Glycine max
caaaataataaaataatcaatgaattgctagatcatgttatgcatattgatgataaagagttgcgcaaatccatgcatgcattgcatgacttaaagccatttactgttcatcatatgatatgaatcggtggctggctgaattgtatctaattgtgtgattagagttgcaaatagtgtgactctaacaactaggaatttggggtaaactgcatgacagcaacctgtaatttccatttgataatattaaccaagtacagaacaagcatttgatttcttcgacaatc

SEQ ID NO: 104927 - DNA, 272 bp, Glycine max
gtgaaacgtggaacatgagccaccatcaagtccatgctcttcctcctcaactagcagcaacttttacagcaacaaacgttattgatactacgaattatctgccaccattgatagagaacgttgaaaacatggtgccaaatatggaagtacagtcttgtagtatagacgaggaaggagaaatggcactagagtgtttgcggagacaagatttgaatgagtgggtggagaatcaacaacaatgtcccagctttcttttctgggacaatattaat

SEQ ID NO: 104928 - DNA, 262 bp, Glycine max
cgaggagaaacgcgcttctgatgcaacagcgagaagaggcagctaactatgaaattcgcctccctcaagagtggacttactgacaaaagaaggcacaagttttctcctaaagaaatttgaagtagttttattttggttgttttgacagaagaagaaattggcagaatgtgtttggctaggttaggaagaaaggggttgcattgcagcttttgggacctggtttttagcggaaggaaatattgaaaggatagcagttttaggc

SEQ ID NO: 104929 - DNA, 259 bp, Glycine max
cgaagagagagaagactctgttatgcgtgatgatgggaaaagtattgaagtgggatctctgaaaggtgacagtgaggccaagtttctcaaagctggtggtaccttagcaaggacccctcttgagaaatcccaccttgatggtcaacctttcaatccctcaactcctgtaaaatgttgcgaggaagggggggagagaactgattccttggagcaaacaccaagcagctgtatctccaatgcgcaaagtactcaatgtgac

SEQ ID NO: 104930 - DNA, 261 bp, Glycine max
cctttagggagggaaaaaagaagaacggaagttggatgaatcaagcaagcaaaacccaaggtcccgattatattcatcatgctgttgcccaaatgaaggtttctgattcacaccattatgattcaactagccagaattgtgtggactcctctacatcaaaagagtttgttttgttttctgtaaagttaaagcagggagatgctcaggtcactgactacaaaccaaatgatgagcttgctgctattgttgtcaaatcagcta

SEQ ID NO: 104931 - DNA, 259 bp, Glycine max
aaaattgtaacaaacgaagactccatagccaactgcttcagctacgtttgcaatttggcgatgacatcatccgttctgaaacgcctcgtctattccaattccatttggcaacgcttcttaaggtcaccaatcaacatccctctttctctctctgttactgaatcgaatttaaacttcacagggagggttcaagtttctcgactttgatgcacacgcttgcttctccagaaactcacaggtggttgtttccccttaatga

SEQ ID NO: 104932 - DNA, 257 bp, Glycine max
gggcattcgtgggcgtctaagtacagcatgcaattttcttagtttcttttgtagagtttaagattggtgggctgtctcggttgaaagtaatgtccttggctaagaaattgtccatctgacagttagctatggtatggcctgcctccccacacagatcacaaatagggggtgatggagcaggctacatgagctgtgtctgagccttcatcagagtctctatctatttggccatgacatcgagcttgccggggcagtga

SEQ ID NO: 104933 - DNA, 183 bp, Glycine max
agattattaggacctaaattccctattagagtttaaagttgggggtcggggatgatggttctttgctttccatgaagtgctttgttgtttgcattcccttgttttgatttctgttacatttcgtcttgttctacaagatcatttaccaagtaattgccacattcccacttcgaagttttaacc

SEQ ID NO: 104934 - DNA, 263 bp, Glycine max
attttataagtacataaatttatgagaatctcaattatttttttagtataattataattacaccataaccacatccaaattcgatcaggacaaaaaaaattaataacacttgacctatcacatagaaattggtcaagtttatggactagatggtggttcgaacaacctaataatttctattcgacaagatggtggtaaaatatagtacacagtagacaatacaattccagcatgtgacatgttatgtagaataaacggtccca

SEQ ID NO: 104935 - DNA, 250 bp, Glycine max
ctcatttgtgcgatgatcttgaggcagctgaaaaataggggaaaagttggcgaggatataagatcagattcagatgatgactgaatagacgaagaagggttttgttgagttttctttgctcccgctagttggtggtggtagctctgatggatactgtttttgacttgtctatagatttctaggagttcagttggttaatacaaccagtggaggagatctgaattttcgttagtttcaaaattttcattga

SEQ ID NO: 104936 - DNA, 254 bp, Glycine max
gttttgtcctttcgtcttgaggatgagatgtttggagaggttatgctgcctgagagcttggctcatgtatcctcggttgcagttatggtgaaggttgtcagaggtgcaaacgggaagactctcactgtgtaccatggagagatctgtaagtaatcatggaggtgtttaggtagtcaagagactgatcctacaacattgagcaagctaatcagtttgatgggtggtgtcttggggcaacataattatttactgct

SEQ ID NO: 104937 - DNA, 214 bp, Glycine max
caggggtggtggagactctttgagtattgtgccgaatacgaggcttcaattgtactcctcgatggttccttgtgagtacccaaatcctataaaatccgatgataataaccatgcaaaatggagatgagtacatccgtccttgttccggccagttgccatacctggtcccaacccctttcatttttgaatttttctcggcgccaaaaacgcggtc

SEQ ID NO: 104938 - DNA, 228 bp, Glycine max
agataaggtagcgtctaccacctcagcgacaacccatgccaataccccatcacgctcttcctactccaggtgcaagtgcaactcattagaggaattaattctcacactccatgccaatttctaaccgccctctctctcaggctatcttttgccgtcaaaactcgggaaaccttcgtctcgaagtgggatctcttcttttaatcccaatatgcatttagagttatgatc

SEQ ID NO: 104939 - DNA, 252 bp, Glycine max
ggtatattggcatatgatttcccagccacatatgtcagcaatgatcatggagcatcagaaacatttcaggttgggttctctgtaaattttgtggaagctgttgagagccattctcattcaagaacatctactggtgtatcctggatcccatcgaatacagctactcatgaagaccagcctcttgagaaaatcgaagagtccagcattcctgataagacagcgcttgagtatttatcaacctcagtctctggt

SEQ ID NO: 104940 - DNA, 252 bp, Glycine max
ctcgagccgatcgagccgcacagagcgtattttgctgcaaagcctagcccccatttctggaagaacgtctccgtactggtatacatcatcctctctgtgtctgagtacaaaatgctgactttagctgcgaactaagtttgagtataatgtagttgtaatctaactgaaatttgcgagtatgggattcgattgtgcagatattcgaagatgtctgtcgaagtggttcgacatttacgagtctgacatggttga

SEQ ID NO: 104941 - DNA, 247 bp, Glycine max
cctaccctgacatacaatgggtaggtgtgtcttaatgtgttctctgtaccgaaatacaattcagattgtgtttggtgggttcatatctggatttgaggaggtttgaatctccttaagaaataaagttacgatgttctgatatgaatgtgaaataggttctacttgaaatgtgtttctcaattcttatttgttgagatctattcttccagtcgttatattctactaggggaacggagatccgtctctc

SEQ ID NO: 104942 - DNA, 135 bp, Glycine max
aacaaccaactgcagaagaaaacctgcaaaatttggcagctgacacaactgacacagatctgaaagaagaacaagatattaattttattaatggaaagagcgaatctgaacttagacaacccaaatacaccaacc

SEQ ID NO: 104943 - DNA, 278 bp, Glycine max
caatgacactggcaaccttgtgcttcttgatggtgcctccagcagtacttgggagagttttgatgattatagagacaccttgctgccttctcagactatggaaaggggtcagaagctttcttctaaacttaggaggaatgacttcaaattggcaggtttgagctctttttccaaaatgatggtaatcttgtgatgcactctataaatttgccatctgagtatgttaatgctaactactatgcaagtggaaccattgagtccaacacatcaagtgctgg

SEQ ID NO: 104944 - DNA, 130 bp, Glycine max
cttccaggtgcttattaaccgagtcaaggatgttgctcgaaccatgacagaagtcgatattgcggtgtacagaaaaggttaactgtataagctccaatttacatccaaggaacagacctagtggtgggta

SEQ ID NO: 104945 - DNA, 276 bp, Glycine max
ggtggccatatgctgaggcatttcttcgatgattggccacgatcactgcaagactctgacaacgttgaaaacaatgctgctggccctagcctctctatttcaatgcccggaaatgctgctgctgcttcctcggatgtgtcattgaaatgtccacgggctatggagaggacccaggcccaagaaatgagaatgtgggcctcgtggcagagcagctgcagttgaattgggccggaggatgggcctcgtctaatcaagtggcttccatgggaggaccac

SEQ ID NO: 104946 - DNA, 279 bp, Glycine max
  unsure (1)..(279): unsure at all n locations
acaaggattgagtgttggatctagtcatctagatactcgtactaccgatgatgatcattgagaaagtacgtgcaggttctgctgatctaaacatggtggtgctcacaagtgagtgcttccatcataatactgaggatggtgtggatatctggttgtgaggttagaatgtctggtggcatacgacccctcgnttgnganatcanttggggcgctggaggganaacgggtgatcttacattggaaattgncaacaagatgcagaacattgtctgtgtgaga

SEQ ID NO: 104947 - DNA, 277 bp, Glycine max
ctcttctctgttctccattattctatgtatgattggttgtttaaaaacccttctagcttattatacatgaatcatgaattgccacctaaatagatataattggatgtttcacagacaaaagatgtactcaaagacaagttctatacaagactaaagtaagtaacatggtatagtatatataccaaatagtatgtaaatttcgacagtatgtaaatttcttatttcaaatttggtgagccatttttctttatgtctaggcttcacgaaggtctccacc

SEQ ID NO: 104948 - DNA, 273 bp, Glycine max
atcaaatgcaaattcaaaacttttgttttgagctgtctctttattgaaatggtaaacatgaattagacgatcatgagaaccaagattgttctcttcttctggaatctcctctgctcgtagtgtccagtattgatcattaatgtttcaatcaagagacagctcaaaaccaaatgcaaattcaaaactttggggaacctttttttctggttatacatgaaggtgaaactcttgacgaaattaaagtgcgaatacaaaactaacttcaagttcctg

SEQ ID NO: 104949 - DNA, 263 bp, Glycine max
caaacctctttcgattgctgattgcaaagattgccaaaaatgagtgaagataagatgttatatatataaccaagcgtgatgtgtttattactttattgagtgttttgacatggaagagggaaaaaaaaaaaagaaggaataataataaaggcgattgtaacccgaaggaaagtttgattttgaagatatatatggaaagcatcttcaatttgcttgttttttgactgtatatttggtgggttttgaatgagaataaataatgg

SEQ ID NO: 104950 - DNA, 238 bp, Glycine max
attgattataaataaaggattacttgtgtgtcaacagatacaattaacaataaacacataatatagtacaattacttgtagattaattaaagggtatgggacaggattttctgtaaattaaaaagtgaatggttgttgtttaaggagagaaaagaataactgaagagcaaagaattcaattcaaagatttgcttgggtcaaaaactaaatttgtttaatgtgtctaattgtattggtg

SEQ ID NO: 104951 - DNA, 267 bp, Glycine max
gttctagatcgcgagctgccattcctttattttttttttctttttctttttcattttgggtttaccgtattctccaagcttcatttttttgctccgtcgacttgtgggggaaaacaaacaaaaacagcaccgatagcaaaatggttgatagtaagatctctgcagtatataatcaatttatgtacagggttttcgcttctattattagttagttagatatttattcacatattgtaacaattggatgtaattattaaatattatttt

SEQ ID NO: 104952 - DNA, 270 bp, Glycine max
gtgaatgaacagtggattcaagttcagcatcttgagcaggctcttcacattaccaaaatgaggactctaaaggctcaaaggctaacaagtgtaacaagatgcacattcatgaagtttatcaacgtccttcttgatgacttcgggcacttcattcatatgtatttggtgaaaggactatagtcagttcactcatctcacagactttggatcagttgaagagatgctcttcattgaccaaaaaatatcaccatcagcttcaaggttttatca

SEQ ID NO: 104953 - DNA, 131 bp, Glycine max
caatcttctcttctcacacaatctctgttgaacaacgctagagaataatatctcaagtatcatgtgatgagatgaaccaagcacaacaacttcaagaagcttgaagtttgaactgtctcaaacatgttctc

SEQ ID NO: 104954 - DNA, 220 bp, Glycine max
caaaaaacacagtaaatagtaaatataaataccaacgctggcgtgatggtagtttagggcggatgtactgctactctcgaggattggggtctcgagtctcgtatcactcttcagttctcgttgttatgcttcgcttgctgggactagggttttcagtttcgattcattcggtaataattagagatgtttgggagggcaccgaagaagagcgataatacga

SEQ ID NO: 104955 - DNA, 261 bp, Glycine max
cgcaagggagagatagaagaggcagaggaaattttgaggcagtccaaaactttggaagcccaaatagaagattttgctaaccagaacaagtacttgtcacttaatgtttccatggatgaacaatctgttctgtctaatcatcagtcttccaggaaaggcttgggagtttgggagttgctactgaagttgataatgcttcagcctcatctgtggtttggtcaagtaagaatagttctgaatcaacattggtttagaaagaat

SEQ ID NO: 104956 - DNA, 261 bp, Glycine max
  unsure (1)..(261): unsure at all n locations
ggagaacacacattctcagcagggttgttctcattcaaaccattacaaaagcccaacgtttgtaaccaaaatcaaaatgaattttctccaaatacatacccatcgaaacctaccccagataagactacagtgttcaaaccaatccaacaaccaaaagttcagacaactctaaatcagctaacaaaaatttagctgaagatttcttttttccaccaaacccagcttccacggcancattggtccccaacccatttcagcctc

SEQ ID NO: 104957 - DNA, 255 bp, Glycine max
caataccagcaagttatagaaagtgtttactcagtatttgaaaagaggttctgaatggcacaccctctgagttttgctcctatttgttccttcaaatcctcgtccacaccaggggcacttacagttaccggaattcagttgtttcggcttttattaggataaacgaagcatgtcacgattctaaagctcgaaactttcaatctttgaaggttaaggctgcggatgataatccaagcaccaaaacaaagagtattg

SEQ ID NO: 104958 - DNA, 251 bp, Glycine max
ctttaatatccattatgaaaaagcacttttttttagcaaagacgagtgctttttcataatggatattaaagaatcaaacagaaatgaaatagcacttttctttgctaaaaaaaaaaaaaaaaaaaaaccgaaaaagggggcccccccgcctaggggcccccccccccggggaattattccgggctcggccccggcgggggccccgcgttccccaaaggggggccgtttaaggcctggggggaaccggggcc

SEQ ID NO: 104959 - DNA, 247 bp, Glycine max
ttgtgaaccaattttctgtgggtggcttggctaggttctgcagagtaagtaattgtcttctatatcagtcctattggggcattttctctctctttcctttttgtcttttggtagctaatcatcagctcaatggcgcggtgatatacttgaaaactttgtgctgagatattctatatgttttagttttgataatatagacaaaatttttatgtaaatgattatgaaacgtggtgaaaattggggttgg

SEQ ID NO: 104960 - DNA, 248 bp, Glycine max
agcctatctaccatatcggttgtgcttctccttatgcgaaattaggattacgggtatcatctatctatgtatctatcttgttccacgcttcacagatgataatacatggctacacaaatacgcaccttgcgggttcccgaaccctatccttacagcagaggctacgtaaagtccgtgggcgaggccacggtgaacctggagaaggataacactttcttctccaagttggaccaagagtcgaagccggt

SEQ ID NO: 104961 - DNA, 245 bp, Glycine max
cacggctttggtgagagagagggtatattctgggtttcgatactctttggtaacgaaaatcgtcaccatttataaatcctttctgcttaactattgtgacgtacttctcttatatattcgttgctagttttgggtttgtttctcaccacgtcatcggctaaggtttctctgtagcctgtgaaccatactgggatttaccaatgcttgctgccagttgacaatatagtaaagggacaattccttgt

SEQ ID NO: 104962 - DNA, 246 bp, Glycine max
gctgtcaaaggcctgaaacactttatccgtgcatacttgcatgcttcagataataaaggtataagtgatgtgacagcaaagtacctcagtatgttgactgatccaaatgtagctgtaaggagaggatctgcattggcaataggtgttttgccatatgagttattagccagtcaatggagaaatgtgcttttgaagctttgtggctcttgtaaaattgaggaaaaccctgaagacagagatgctgaa

SEQ ID NO: 104963 - DNA, 244 bp, Glycine max
atcctcgatggtaaataatacttttctccacagcaatcaatttatatgagtattcaaagctagactgcgttcttggaacttcttatgggtatgtggaatataactagttactctgcagtgtaatggatcgggaaggaggatctatcgtcggatcttgatactactcggagctcgggattcgtaaggatggctcttactatgatattcgcactgactagcgcaaaatcgatatgaggtggtaccc

SEQ ID NO: 104964 - DNA, 243 bp, Glycine max
acttctgctttacatgaagtatccgcagaagctagagattccaaagaaaagctattggccaaccatgtggaacatgaaaactatgagacccagattgaagatttaaagttggtcttaaaggcactaatgaaaaatatgagtccatgcttaatgatgcacggcatgagattgacactcttacatgtagtgttgaaaattctaagagcaacatcgaaaactccaaggcagaatgggagcagagag

SEQ ID NO: 104965 - DNA, 201 bp, Glycine max
caaaagggcagttactaattttcacaactggattcaagctggtttctcttcctcttcttcatgttcatttattgaatcccaccccaaatttctaattctttctctttcactctcccacgtgcaccttcctcttccccgctctaaataattctccgttcccatcattctctctctctctctcccaatacattattattatat

SEQ ID NO: 104966 - DNA, 247 bp, Glycine max
gggtgttgtttgtatatgccggtgcctggtactagaaagtggctgctgtaattgacgagcttccccttggattacatgagagataccttttctgtatcagcccagctgacatggatgatgaaatttcatctcaaggcctagcacagtttgcagagaattatgcaaagcaaggtcttgtccggcttcgagagatatttacaccagggtcactcaaagtgcccatgacgccagctgctctgaaggagtt

SEQ ID NO: 104967 - DNA, 265 bp, Glycine max
  unsure (1)..(265): unsure at all n locations
actagttctagatcgcgagcggccgctcgcgatctagaactagtcattncttcccagttctcacctcaccgctgcatcttcacgtcgtctctaacgagggaacatgagtcgaggaggtgcagcagcagcgaagggaaagaagaagggtgctacattcaccaattgactgtgcaaagccagtagaagacaagatcatggacattgcttctctcgagaagtttcttcaagagaggatcaaggttggtggcaaagctggtgctcttgg

SEQ ID NO: 104968 - DNA, 258 bp, Glycine max
aagaaatgtcatgaagttgcaaaacaggaccaacaacactcaaacaaattactttttcagcagcttcagtcacattttaatcaacaacagcagcttcatgtttacactttattgtcaagacaacaggttattgacctaagagaggtaagaggtggtgatgaaatgacgataaattacctttgtgaaaagctaggagtgaaactgcgttgaagaaaaggattgggaatgaatgctgattcaatcattgattccattaaa

SEQ ID NO: 104969 - DNA, 255 bp, Glycine max
atttgctgagtcccagacagaatctggccatcctacaagccatccatcctcttcatcaaaaattaacagtgaccaggcaaatgtgcttaatttgaatacactatccagtggaatattgtctagtgcttttgactcaagcctttatacttgtatgcatctattaaactccgctgaaactcttgtagttggaactggaaatggttctctgaggttctttgatgttgctcgaggtcaaaagcttcatatctggagagg

SEQ ID NO: 104970 - DNA, 283 bp, Glycine max
gaaaataggaatccgattgtaaatggatcaaatgatagcagtaagttctgtgggtcacatgatcatacaaacaactgctacattcataatccagattttgcatccatagtcattaggaggaaagagcccaagctctacagaaatggttgcactcagagaatacatgcatttgaaaggagcctttttgatggaaatatgtctgtttcaggaaacttagataatgtacagaatgaaaatttagtcagtgtacatgaagaaggtaaaacaatgactgtatcaacta

SEQ ID NO: 104971 - DNA, 269 bp, Glycine max
ctccgatccgagacactcaactctcaagtctgaagatactcgctactcagagttgaattgttgacgagcattctccgatccagaatcgatggatttggaaatggaggttgaagttggaagggaaatttggagcaaaagcttcaagtgtgcaaggaaatgcattaaagatagttgctaagcctgaatttcaggctaagctaaaattcagacagagagcaaaagattcaagcctggctaagcaagaactggtggctgaggaagagttctgt

SEQ ID NO: 104972 - DNA, 118 bp, Glycine max
ggaagttgcagaaaacctagagagagtgaatgatgtctgggagcacaagaagggtggagttggtgctgaagaacaggttcctgagttacttgatctggcaatccatacattcctctct

SEQ ID NO: 104973 - DNA, 272 bp, Glycine max
gtgtgatagaagattcacatcactgcatacttgtgtttaaattaacttaatcaagcaatatggtcggttgtcattgtcggggtccatattgcgttgaaaatgtttggctccttggaagaatctggttctttgtaaagttagagatgaagggaaagctagaaatttatgttgaaggtacagtatttgtagctggaaatgctttacatataacatgtctatttgcttaggctcttcaaaaaaaaaaaaagaaaaaaaaaaaaaggggggccccc

SEQ ID NO: 104974 - DNA, 239 bp, Glycine max
tagctttttcttttcctaatttggctcttagcactttatgcagagtgataacagataatttagagatcgatacatgaagattctgatttagcccttgaggattggtctgataactagtaaaaaatgaagtttgtcagagtaaattgagagctacaccaggagccaaagtctgatgatgattaaaaagataattaagatagtgataactgtagtatatatttacatctactacatcacag

SEQ ID NO: 104975 - DNA, 257 bp, Glycine max
tgcttccaatctggactcttgtcattcattatacctctctacaaaaatgtaatgcactgaaaatggtctgaaagcaagtacataaatgcagtgccctgaaaatggtctgaaagcaagtacataaatgtagtgccctgaaaatggtctgaaagcaagaagagataaacagcatctgacattatgtatgtcctaaattcatagttcccttggtgttgttgagaggtataatgaatgacatgcttccaatctggactctt

SEQ ID NO: 104976 - DNA, 255 bp, Glycine max
tgaagacaatgctatgatgagacccttgaaaatcatcaagtgatgtttctcaacgaagccatagaatggaaacatgtgcagcaacttagttatactcaacgaaggaggatatgtggagataagtagataaatgttattataagctctgtcatttgtcagaacttcagatcgtggatgtgggatagagttgggtgggtgggtggtgtggtgttgggaagtagggaagggtgagtcgtggagtgggtgggggggggg

SEQ ID NO: 104977 - DNA, 242 bp, Glycine max
cccagttgagctgaaaaattgtggaacggaacatttaggggagaaacataactgaagggagacaagatccgagaagagaaaccgtgatcgaacacttgagttactgttaccgttatttgtagttatcatagtaaattgttgttccgaatttcgtttgtgctgtcaagaggcgtttgttgaaaagggacggttcccaaagactggaagataaagagggggccttagtgggtcttcctctgttg

SEQ ID NO: 104978 - DNA, 147 bp, Glycine max
  unsure (1)..(147): unsure at all n locations
ttagagcaatacttcaattcatatacaccaaacacatatactatcttcataagcacattactcaaactaatagttttctacaataaaatttaactattantcnnaatctacatctccataagattaacactatccgtactctcatca

SEQ ID NO: 104979 - DNA, 137 bp, Glycine max
gctttgccattcctcccaaccagcatctatcttcaggtagttggtattactagtgagtaaacctttgtattcttttgtagctgcttccaaagggttaataaccagctgcaaatcaattattgttgactatattattg

SEQ ID NO: 104980 - DNA, 249 bp, Glycine max
  unsure (1)..(249): unsure at all n locations
cttcatttttcaatcacacatggccatgccaaaacacaaacaccatgttcacaacactcccaacacattcaaatctaccaccaatcaacaacaacaaaaacaacaatatcaacaacttcaagctcatcaacaacaacaacaacaacaacacactcagcttcctctaaacctaccattcttcttctacccaacaataccatcaacctttnttntatctnatnctcttnaaccctattttcccatcatata

SEQ ID NO: 104981 - DNA, 260 bp, Glycine max
ggaccacctcaccctccccctccattactcccactgcatcttcttcaaattcctgtcctgaagatgacagcaaagtggtatctcattgtgtgtgttgtagcgatctgggccgttgatctgggttcatcatcacaccatgcccgtgccccagcaccagcaccgtcagtggagtgttcaaacctggtattgaccttatcggattgcctcaccttcgttagcaacggcagcaccgtcaccaagccacagggaacatgctgctc

SEQ ID NO: 104982 - DNA, 197 bp, Glycine max
agccttcaaacaattagagcatataacttggttgtggcaaattgtgaagcatgaggaccttacttgcagtactcttgtttttcttcatgatgacggtgaccatgctgcatgttggtgcagtcatcgtggagcatgagccaaaaacaaagacaaagcgcaatctactgagcgaaacttctcttggacgaaagggcatg

SEQ ID NO: 104983 - DNA, 196 bp, Glycine max
cttttatttgattccatctcaattagtaacacagacgccattcaagccaagtactgctggaattgaagcacttgatctgagcataccaaggaagcttctcttgtgggcctatgtgctatcccatggacgttgtgcaaatatctcaattgttgtaaagcattgtgaagaaatgtcgaactcaagtatgaaaagagga

SEQ ID NO: 104984 - DNA, 277 bp, Glycine max
cctttattgccaggatctttaaaagcatctcgggtgtttcctcgtctaatattcctgagcttgaaagtggtgggactagtccaaagtccattagatgtttggctgaacctagagttgtaaggaggatcagaattgttgctgaacaaactcccattcagcacatacttcaacccccaacaatcgcctctctattggccatcatcattggcacagtgcctcagctgaaagctgtgttctttggatatgatgctccgttatctttcattactgacagttt

SEQ ID NO: 104985 - DNA, 129 bp, Glycine max
gccaaagctgtccaagttgtttgaatcttatgcatctaacttgtgcgaatcttctgctgagttgagctcttctgatcccagatccgaagcttgatgtactgtttctttaatcatagttagatccaagtt

SEQ ID NO: 104986 - DNA, 273 bp, Glycine max
tctcgagccgaatcggctcgacggctcgaggaagttttgcccaaacacgccgtttgcacctgcaatttgaaccggtccggaccaatcccggttcactacaccaaaaacccagatgaatttgatgtggaggaatacacctatgtgacatgccacgtacctaacaaaacgttcactaaggtatactatgatggtggtgaaggtgaaattcggagacattacaacaacagcaacgttggagttctcagaagaaccgcaccacaacctttgattgtt

SEQ ID NO: 104987 - DNA, 129 bp, Glycine max
gctgatgttcatcactgcaaggtttccgcatttgggtttctctccgattgaaaaaactttttgaatttgatgcagcaaggaaatgatgatttcatccttttaagaggaatgtgacactaggataatgct

SEQ ID NO: 104988 - DNA, 269 bp, Glycine max
cttataacttccacttattgttcttttccaacccctattcaatatcaagtcgaccaagctatatggcatccatgtccaaggccatgaccccagaaatcaagacgcatatatgtcaaaagaaagacggtgttttgtatcattatgatcccacagcttgcgccgaaggagatgattataacgggaatataaattatgtttttgcatatatggaaggtgatgacgatgatgatggtggttatgattatgctcccgcagcataaattgggttt

SEQ ID NO: 104989 - DNA, 253 bp, Glycine max
gaacgccccacgtgatttccaatgtgcctaaatcatggcctatgctatgcacaagttgcttcaatacgtgtttgctagctagttctggctttctgttgtctcttttattttataaatttcattgctcatgagtcatgatgcgattcttgtacgtgcatggatggttaacttctcgttattctgtcgctttaattggtgtttgtttttatttaacaaagtgtaaattaaataaattcccgatgctttcttatgc

SEQ ID NO: 104990 - DNA, 258 bp, Glycine max
gccagtggaccttatttggctaaacaagtatttaaggttggattaaaaattaaaaaaatcaaaacaaccagttcataccctcagttttctgaaccagctggtctattgtttttaatctgtgcttctattggactcttccctgcagtgggcattcttccattttctccaattcccctcctgcttctcctttcttacatatgcagctcatcacttccattaggccatctttcttttggtagcataaacatgtgctatgag

SEQ ID NO: 104991 - DNA, 264 bp, Glycine max
gagttaacataactggaacacatgtagtagcagttgacccaagtacaaaacccttcttgtctcggcctgcggaattacccttaatttctctgtgttccttccaatcacatggcatagaatttaaggttttttaactagaagaagatctaattagctatctagctaggaagaagacgaagcaaattaaagactagttaattagtgagtcaaaagtgggaatggaaggagagagaggtggcgcacccaattatgagcttcaagttt

SEQ ID NO: 104992 - DNA, 256 bp, Glycine max
gcgtttcaagattcttggtaacacacaacggaacttgtgattaaacggtgcgttttagtaagaggaaggtcctcttcaatcctgtctttttcatcgtggatctgcgctagggctccgtaatcagacacctttttcctcttacttcatttaacctcacaacaatcaagtcttgcgttgaatctccgctgcttttttatgttttacttttcgattgatcattttttcatttgcgaaatgcggcttaagattttcattt

SEQ ID NO: 104993 - DNA, 259 bp, Glycine max
caccttttcggatacctaaggcgaagtatagctaaaaaatgggagggacacaagtggagagagaagagaaggtgtctttggaactcagcgaagaaattcttcagagtatggaagtgggaatgtccttcaaagactataacggtagaattagttcgttggattttcacagggcatccagttatctagtgaccgctagtgatgatgaatccattcgctgtatgatgttactggtggaacatgtttgaagacaattaatagc

SEQ ID NO: 104994 - DNA, 265 bp, Glycine max
cagagttttgcagagaaactagtgaaggaacgcccttcaccatcatttttaatggctgcttccaatggggcatttctgcacaccgatacaccagcacctgcatcatccttgcttccttctgggctttctaattctagtagtcctgccgctgatgggccaagttccctttcggtgacactaagtctttcttcctcaatggtgatcgcgcctccattttcaggttgccacccaagagaggaccagacaatgctccttttgttttggg

SEQ ID NO: 104995 - DNA, 258 bp, Glycine max
taaggatttgatctccacaacacacattatttgagagcaaggaggagtcttaagtgtcataaagtcacagtagaattatctacctacaaggaatgatttaatatatttatttcttttgttgattttcgtttggtttagagttttacagaatttttttaatggaattaattttgaattgttggatgtaattgcaagatatgtttaaattacttaagtcatatatttacattagtgccgggattaatttttcaaataaat

SEQ ID NO: 104996 - DNA, 268 bp, Glycine max
ctgaaatcccccctgtcaccataccctcaccaccaccaccaccacaaccacaaccacaactattccaccaagacaccttttttaacaacactaacggtagcagcagtaccacaaccaactgtggaagactcagtagaaaaagggtcttctgtgatggctctgatttgattaccgagaccaagtcccaaaggcttgtacttcactgacttattatcacaagtcagagattcacacagtaatttctactttatatatatccaagttctta

SEQ ID NO: 104997 - DNA, 244 bp, Glycine max
gttcataaatgctcgagttcgagtgtggaaaccaatggttgaggaaatacacacgcttgaaacaaaagcaacaggctccaaggacaattgtggtataaacgagggaacttcttctgccactggaggtgataccagccaccctagagctttgggcaatattggtctgaattcaatacctgaaacccaatttcagggtatagatatggggtcatccatagctgcaaatgctgaggaaagtgggtta

SEQ ID NO: 104998 - DNA, 261 bp, Glycine max
aagtagaaggcaggagggagcaatttctgagcacagtgctattcatggagggatccatcttgatgcgtcaaaatgctccctctccatccattttccagatctagcattcttctttggatcaaaatcagacaccatttttctctcttcactcttcactctcacctctgtccctattctgcttgttagctctctcttcccatttctttcacctaatgtgacttgctccatctttatgcaaacgttaaagttaaacttgttctc

SEQ ID NO: 104999 - DNA, 103 bp, Glycine max
cgaagaaccaaatttcagaagagaaaagagtcacttgaaggttcaatgggcgaggccgagatcaaattagaagacagcaaagaggagcacaactgaagcagag

SEQ ID NO: 105000 - DNA, 246 bp, Glycine max
cagtgactgacttttcgagaaagatacacacaaatgggtttccggcaatccaccatgaacgctctttccaatctccgcttcctcctcttcggttctgcattagattctgcggagaaaactggggatgttacgggtcctgcaaattgggttgaagtataacccggtttcatgggaagttccggaccccaaaggtgacggcttcaaagtacactatagggtgagtaatttcccaagtttgtcttggga

SEQ ID NO: 105001 - DNA, 258 bp, Glycine max
ggcctcacaagctctctctccctctcagccaatctgttctctctctcaaccactctcacgcacacgacgctagcgctctctctccctcccagtacactagctctctccgtagctctttccctctcagccactctcacgcaccacacgtagcgctttgtcacaacattagatgtcaattattcaagctcctcgacctttacacttgatggtgaatgtaaattaaggaatgaagaacattggtttttaatttcgttgagt

SEQ ID NO: 105002 - DNA, 163 bp, Glycine max
catggagctacatcatagctcaagagttggtagggtcgcttgtttcaattggctacatatgcggaataagtccttcaatgctagggctaacagttctggcttgggggaactcaattggggatttgatgacacatttaacaatggctttaaattggtggccagg

SEQ ID NO: 105003 - DNA, 103 bp, Glycine max
cgcataataggaaatcatggcagatgcgccttccgccagacgagttacggctgccaatgtctctggagctgatgagttgtcctggtataattgcttctgggca

SEQ ID NO: 105004 - DNA, 256 bp, Glycine max
gtggttctgtcaggagcaacatggcttgagcctgaccctataagccgatgcttcactgatggaaatctagttactggagctgcatggccagggcaccctgagttcattgctcagttgatagcactacttggtattcaagtatctttctagatgcactttgtgatgtaattaattatcaatgaataaagcttggcagtctccatatgcattttgtatcaaatattatatgtatgttaatgtatcttacagtcctgta

SEQ ID NO: 105005 - DNA, 252 bp, Glycine max
ctgaatagaaaaatgtacagaatacaattcttgatttggagaccattactgatctgtgctattttctttcacttttttggcgttgagttcgcatctactatacagcctaggaatttgggggaaaggaggacatggcatgtaacatttttgttttgtaatttgggattattttttcaatatcaaaaaaaaaaaaaaaaaaaagggggggcccccgactattgaccccttcgccccgggatttattccgggccg

SEQ ID NO: 105006 - DNA, 99 bp, Glycine max
gcgacacgtatcaacttcaataatcgcatcgcagaagcagtttccggtgcatctcatcgtctccgaaaatgaacgacgcagatgtctcgaagcaaatcc

SEQ ID NO: 105007 - DNA, 248 bp, Glycine max
ttaaattttgatcatcatggactgtgaaaatggcaaaaaaaggcacctattacttggcccaagggcaatgctcctgggtaaccctgacttttttccaaagggtgccggaagggagggtgccctttgcatgcgaccctaggaacgggctcacgagggggttcaagttctgcaacacgcacgtgccgatccacgtgagggtgcaggacctcatagcgaggctcacattgccggaaaaaattaggctcgtc

SEQ ID NO: 105008 - DNA, 249 bp, Glycine max
agaaactttggagtcggtggtctgcagataaccactttcatgatgctgttctagctgattacaaccctgctgatggccggcatgcattggtttatgatagtaatacagtaaatgagtcttgagaatgggtcgatctcaacgagatctcacctgaggatatagaatgggaaggtgaacatcctggcattctccatagaagtggacatggtggtcaatgtggtggtggtatgagattctttggtcatcgtg

SEQ ID NO: 105009 - DNA, 224 bp, Glycine max
gttgatttgaattgtgccaaattgcttgggttttgaccgaacttaaaggattgcctgacaacagcctaattagggaggaccgcctggtggaagggattttgatccaaaaggaaaaggtgccaatgagatcaggcgatttggccaaggtttcatgagggacatgtatcgctactgggggcctggcaaggaccttcggtctgaggaattggcagttggtactcggg

SEQ ID NO: 105010 - DNA, 105 bp, Glycine max
ggtatgtataccagtttgaggtatgtaacaaattaaggcacattgccatatctgttgttacatacctcaaactggtatacataccataacaacagcaatagatat

SEQ ID NO: 105011 - DNA, 170 bp, Glycine max
taaataaggtatgagtatattgcaatgtctgattacttgttaggtgcaggcacaaatagattataggctgtcaaactttataggaatagtgaatcttctgtttttgccgtcttgcttaatgagaaacaaaatagtactagcacacttgaaggccagtccaccagagggga

SEQ ID NO: 105012 - DNA, 142 bp, Glycine max
caggcagaaggccaaagctctgaagatgcttcatacaataaagatacggaggtagcagggattaccctgaggcctttgatcatggatgagttgcgcttggccatgtgactagttggctgtaagtttagcgtcggatggcacc

SEQ ID NO: 105013 - DNA, 172 bp, Glycine max
cagtagaaatgaaactcttggcagaagtggatcaaccgggaagcgttattgacagctatgtgctcactggatccatgattactgaaagagaatcctctcctgattggaatgcccgcggagtacttgcggtggagggagctcggatctgcgctcatatgggaagtagtgggga

SEQ ID NO: 105014 - DNA, 156 bp, Glycine max
gtaaaattacttacctatcacttgcaatcctcaaaagcactaggccttcagcagcaacttgcaattgcctagagatagctggaggatgtttggtgcgccctcttccgtttcatgtctttttgctccgtatagttaaccacaacattagcccaatca

SEQ ID NO: 105015 - DNA, 134 bp, Glycine max
ctatgctcacatagcattagagggttcttggatacaatggaatttgctacaatgcaaagctccactgttttcgagcattatagtatagcagcccgggcattcttcaatggctgattggggattgccctcacaca

SEQ ID NO: 105016 - DNA, 112 bp, Glycine max
actattacaataaaaacactctaaagaggtgcgaataatgatgacaaccatagtgtcactagttgatgggttaggtcaggctcgctcaatccggatagtcgctaatggtaag

SEQ ID NO: 105017 - DNA, 235 bp, Glycine max
  unsure (1)..(235): unsure at all n locations
atctctatctcatctcatagttgatttagtatttaattcctatgtagttgtttgtactttgttgtaatcatcaactcactcagttcccgtaggttgtcgtgattcatcacagcatattgtctctgaaattcagaaatgacatctgcaatgccaaggctgttgcggcgacgcantgccaacatacantcgntgagccgtgtatttggaacccaacaagccnctcaccagctaggaa

SEQ ID NO: 105018 - DNA, 214 bp, Glycine max
gtggtgcacatgctggcgcatgtgcgtcctttacgtctctatccacatcacttgccagtgcattgtctgatgtaaagatgttgtcgctcatcacccttattgcgtattcaggtctaccacaagcatttgtgtgggctgcattcacaaagtatgttgtaactcctgcaattggtatttctggtgtgggtagttcaatggcagcgtacggggcttt

SEQ ID NO: 105019 - DNA, 261 bp, Glycine max
tacggattctatgttaagcggagttacaccctgcgatgtcgatcaatgattatcatttatataatatgaccctcctcaagctacctatatcttgttttgtttctgtcttcaattcactgtaataatgtcctgctactcttactctctttaattttccttttctaatcagcatttatatttagacccataggagtttgagttttagaaaaggggtttgtttttccaattgaaagaatttccaagtcgcagtgtcaaaggttg

SEQ ID NO: 105020 - DNA, 224 bp, Glycine max
ctccaggttggcaccatttcagtagtccttcatggaatatggcatgaattccattgccaggaacttcctctcattacaatcagcacataccacacgacccgtttgcgcatcccgtctacaggtatcctggttatggtcacccacgagacttgtatgaaatgtactatcataatgcttatggtggtcagctgtttcggatctgctggtttccagcatattgccaa

SEQ ID NO: 105021 - DNA, 193 bp, Glycine max
ctttacctcaacatgaaagcttcagctatgagttttctgctgaaaagtttgaaataaccccaggtcatggacaagttagtgcttctggcatgtgcagtgtatgcagatcatcgtgcgtaacatgctggatgctatcagactcacgagcagatacacaagagactagaatatcagtcgtgaggccatgagcatg

SEQ ID NO: 105022 - DNA, 255 bp, Glycine max
gaacaatcctaaagcactggacaccgcatccaatgtcattgttggtgaatatttgctcaagctcaatgagaactgttgaggaggctctcaaatgagaagtttttgctcaaggtgtctcactttttgtgttaaaaattcactaaaacaaaaaggaagaaaactacacactactcatttgtgggtattcatggacctggaagggaatgatggggtaattccctcttattcactgtttaggaaggccagatatggtga

SEQ ID NO: 105023 - DNA, 124 bp, Glycine max
ctaggcagcagtgctgctggaactggaagtgcagtttcctttagtgatgatcagtatgccatgcgactatgtagttcacagccacttcgtagatgtcgcaaacgcgtctctagagcgtctcaaa

SEQ ID NO: 105024 - DNA, 246 bp, Glycine max
  unsure (1)..(246): unsure at all n locations
cagaaatccaccttgtgatggtgccctagatccatggcttctctgtccaacctttgcatgtgtttcactgttgctgagtttcaaggctaccgtttatcctctcttccctctctgggtcctgggaaaccctttggtgggtcccacattcacaactttgcaaactcacttccacacaacagcttatccaaatttnncanccttcnaatttccgaggtttggcttgtggatattcaggttgtaaactgt

SEQ ID NO: 105025 - DNA, 264 bp, Glycine max
tgtcaatgaacaccttgaaatctgtccatgtttcctcagaagccaatcaaacacaagtccccaccaattctttttccatgcaaacattagatgcatctgtccaaagtttagtgaaatcatggcagagaaggcaaagatggctgcatctattcaccaaatccagcccacaagatttgaatattaatagagcattatggcgtactcatttggccaattttctggattcaacatcggttcgcgtgtttacaatctcattgctcattg

SEQ ID NO: 105026 - DNA, 188 bp, Glycine max
ctagaacaagaacaacagccatgcggcggctgcagcggcgtacggactatccgacgtcgatcatgattcgcaagatcacagaggcagcacatgttagttcgaatcatggcatcgccattcagagcactggcgtcagcgcgtgccaagtacgtgcggtgattacgaactgcggtcagcacgtgagatac

SEQ ID NO: 105027 - DNA, 264 bp, Glycine max
gtgaaatagatgcagcggcttcaaaagttgaagacaaattttctaatgacggatttgataaagctgaagcacagagggaagacgccaaacttgagagctctagtaaatcaataatttcctgtaaaaacagcaatgggaatgatgaagatggtcctggtatgaggtcacatcttacagtatgctagattctgtaggtgaagaaaaaagactttctgctgaataccttcagaagtctgatgcaattgacataaatgcagagactac

SEQ ID NO: 105028 - DNA, 257 bp, Glycine max
gtgaattggcttttctgtgcccctatgcgcacccccacaatctaggtctaaccttgataaattcagttttttctatttcaaggatgtgagggtgttctagctgattatgcagaacatgaaattcctattctggctggagcagtttgatcaagtcaagcatgaagtgaagttgcctgttattaggtattctctctttctcataattgcccccagggatttggttggagatatgttatagttatactacacagatatac

SEQ ID NO: 105029 - DNA, 253 bp, Glycine max
gcaggatccacctacatcaaattagcgaattgcaatttaaaggttactaactaacttctgaatttttattttatttattttgtgttctttgatttgactatctccacctgttgtgatgaatcgtgttgttgtagttggaaagcaagcatgaagctgcacaagcttatgttgacgctgcgcattgctataaaaaaactaatataaatgagtctgtatcttgcttagacaatgctgtaaatatcttctgtggaga

SEQ ID NO: 105030 - DNA, 155 bp, Glycine max
cgggtagaggctttatggatgtcctttacatatccctttgcgatgttcatgaatgttactgtgacattcatgaacatcgcaaagggatatgtaaatgaatgtcacagtaacattcctccttgtttgtttgcatgcttggtgatctgtatgaatga

SEQ ID NO: 105031 - DNA, 260 bp, Glycine max
gatggatatgctgataaatagttttttaagactttatattatctcaactctcaagaaacattgatgcacaccaaacaaataactgtttgagtgcagtactgcagtaataagtaattatgtgcttgttgagcctgctgctaatttgctaggttgattcaaatacttggtttaagtggccaattcataatttatttttttaccatttcaagttgcactctctatctgttgcttctcatataattttttgttatagtggtgaa

SEQ ID NO: 105032 - DNA, 275 bp, Glycine max
ttcggctcgagaggataggaaataaagttcctctcattctaaaccatatcatttatttattgatttattttgctgattcctttgctcttaggaggaaccattaaaaaaaagatttttcaccgtttcataaagatccagtgcttctcactttattaataaatcctgtctgtattatatgatttttcatgttatgaagaaaatatatttggctgtttttgtgaatcccatatgtaaaacaatgaccttttggtatctaggagctctctgcttacatg

SEQ ID NO: 105033 - DNA, 256 bp, Glycine max
cacctcattgccataccccctttcaagcaggagaaaatctctcgctccctttctctttcttctcttcacgccgccatcaccatgccttcactctctctctcgaaactgacaccaccacccctaaacctatttccaacaaaaagaaaccaaagacccaatccctcactgatcccgacctcgatggggtttcggggaagaagacgaagaagcgcaaggcttcagatttattagaaccagaggccatgcccgccgctta

SEQ ID NO: 105034 - DNA, 100 bp, Glycine max
ggaggaggagggtggttttacgcgacttgcctcattcgtctgcgattgcgagcctttgacggaggatgatctggaagccatcgaagcctctctttccaat

SEQ ID NO: 105035 - DNA, 256 bp, Glycine max
cagctcgagcagctcgaggggctcgagcggctcgagctggaaaattgtagatagcaagagtgaccaaattcacttgcatacctgaaacaccaagagactaggatgtctttgcctttcatatataggctttaccaatttgttctccatgtattttcggtgctggctaaatggatgtctatgccttccgtgatagagccaaagtagtgttagtttctttagtccttacttttcccctgccttcatatgggcttgggtg

SEQ ID NO: 105036 - DNA, 250 bp, Glycine max
catatttgtaacactaggctaggctctagaaatttaccacaaccaatataattatctcacagtttttacccctgctgctccattaaaagccaatattctgtgtttcataaaaaattaccaaatggtacattcttttgggtgaatctaaggtatttgtttcaatttaattatttttcattagtattgatgaattaaatattttttttataaaaatagaggtaatatttttcatgtgaaaatcaatgactaa

SEQ ID NO: 105037 - DNA, 246 bp, Glycine max
ggaactcggacggaatctatcagggtgcttgtcaaaaagttgattggaatggcatgggtgaaccaaatacttcatacaactgtacttctcaagtaactgcaaacctgttgctgaaggtcaactagaaggacttcgggacttgaacaagcatgtcaaggtgacaacaacggaggcaaagttattgcctgatggatctctcacacctcagagattgcttccttatcgccattcacgcttcactgttaa

SEQ ID NO: 105038 - DNA, 252 bp, Glycine max
ccttgttagaagtttatgttgtgtttaaagtatatatatttgctgggcataactatggggaggttctatgttgcagtagcagagaccatattatgtggcagtggatgggttttcttgaatgcggcttttgagtcctattatttattgagtcagtagttgtattggtaatttatacagagtcggtatttgatttgagtgaatacagtatccagaaaccaattttatggtgtattcaaatgaaagaattagcgc

SEQ ID NO: 105039 - DNA, 193 bp, Glycine max
aattcaaaagttatggaaatgttgtcacccattatgctatgtatatgcctaaatcgtcctgtgtctgtgtcgtacttctccaaataccgtataccttcaagaatccgccacttccgccaggtcctagaggacttcccataatagggaatcttcatcaactagatagtccctagcttcatgagcagctatggca

SEQ ID NO: 105040 - DNA, 127 bp, Glycine max
ggaacttgcatgcaaataaaatagtggcgttttacaagctagtgatatctagtcactactgcgtatcgccacaaggatgtgcatattgtatgaaaaaattgcggagttattatcattgattaaaaag

SEQ ID NO: 105041 - DNA, 240 bp, Glycine max
tgcgattccgtggtggcgacatccgagccggcaatggcagccgtggccgctgccgacctttctcttagacggtatcctccaactggtgcctggacatcagccgctccgccgctctggcaggatcgcattcaccacctcctcggcgatctcttaggaatcgtcgccgccgtcgctctcggtcgattagtgcgaatctacatgagagtgccggctgtatcgatggaccacgcagaacgtctt

SEQ ID NO: 105042 - DNA, 259 bp, Glycine max
ccgtaatgaagatcagcgtagtcgtcagcactaggccgcacgagatccgatttcgcgccaactggggttaaatgatgaaggttataaggatgatcagtagagtacctagcatcaagagtttggcgattcgtacctgttatggctacgagtgtgacgcctaaaagagtatatttatcccggcatggtcctccaccgggctagatggtagcaaaatatcgacggctccccaatgatgagatccgacgtttggattccatca

SEQ ID NO: 105043 - DNA, 234 bp, Glycine max
ggagtggcaaggattgaattcataatcagttggagaacatatctaggactaactcattgttaaaacttaagctattaatggagtgtaggaatggtttatatctgtaacttattactgccaagtattgcagctaaattaatattctaacttatcggctgtgaaaaggcactgtaattgtagattagatttgggacaactgtgcactataaattctacatttgacatcgtggttct

SEQ ID NO: 105044 - DNA, 266 bp, Glycine max
ctcgagcgctcgagccgctgccttccattttccgtgattttctcatattctattccagttggtacccttgacctttttttagatctcgaattctcattttctgttgacacaagtaaatgagtaatctatcaaaagcttaaatatacaggcatgtgcactaaagtggctagtgttgcttgtgattgagaagatataactaggaccgttatatgttatctaggattctaggttaagtgaacctgccttccattttccgtgattttctc

SEQ ID NO: 105045 - DNA, 266 bp, Glycine max
ctcagaaacaggtcctccccgtctctctttctcccatgatctctctgaactacaagttttaccaatgaaacaaggtgttccttgtagtgacacactgttgcatgactcaaattctgactttgagttcagcacaagcacctgccttgagttcgaatcatcttcagcagatgaactcttctctaatggggtgatccttccaattcagatgcaagacaaaaccacagctagaaaactcactcatcatgtgaaatatcctcacacaaaac

SEQ ID NO: 105046 - DNA, 265 bp, Glycine max
ggtggcttatattgcatatgttatccggaatattgaaactttccaaacattgaacatgagaatggtgaacataatcatgaatatgctattgacaaatctgatggtggatgcaaagcaatttataatgatggtagtagtagcctgtcaaaggaagcaccggtggcttatattgcatatgttatccggaatattgaaactttcaactattttctctccctagggaaacaggctaaccttgatattgtggaccttactgattcattga

SEQ ID NO: 105047 - DNA, 259 bp, Glycine max
cttttgactccgaacgagcttgaccgcgaaaagattggtcattggtgatcgcagtgttcaattcaataagttctgggattgattcttttacaaagagaatattgccttttttgctctgagatttatccgttcatttcttttattccttttcttttaatggtgatgcttgaatatcagagcaagattctggtgttattatgtttagattaaagagttgtgaaggccctgtgcgctacttgtatcagcaaacttggcatca

SEQ ID NO: 105048 - DNA, 224 bp, Glycine max
ctcgagagaaacgttctccgagagctttactcagagtccgaggcgtagatacgacgctctcgggaccacccaactcatcatctgaagtcaagccatggctataattgcacctgagcggtcacagcacgatgctcgtcaatatcattctacaatgtgtgacggactgtcatctgatggacaggactcgcgtcacatcctatgacgacgtctatgatcagttttga

SEQ ID NO: 105049 - DNA, 261 bp, Glycine max
cctggaattattgatccatatagggaagatcacaatcctggagtttttaataatcccagtgaagatgattttggtatgccctccctctggccattgcaatctggaactccagcagtcccgggattccaattattcagttctgaagtggaggatgatgtgtcagacgcattgattgatttgcatcatggcaatattaattgctcctcgtcactgaatggttatacgttggctccagatactttgggatctggcactctcata

SEQ ID NO: 105050 - DNA, 217 bp, Glycine max
ggaaaaaggcaaaagattctatcttgggtgaaagcgaagatgacactgaagatagaatcaacaaccatatatcaaaatgaagagtgagagataaagtgaaagagggaagacaaatatcatggagaaaattgacataggaaaggaccaagtcgacgaaagggtaaggaaacagcgtggcaatcccagtggcggttgcaagtttgacccactgatgaag

SEQ ID NO: 105051 - DNA, 257 bp, Glycine max
gcaagaatgctgctttagaccctttgtcctactttgaattccaaatgggttacaacccaataagacaatttgatcagaaccatgtggggaccaactcaagctatggattctcctcattgccgtgtctgaatagttctctgatcacgggaacgtgtcggtggcggcggagttttcagataacaactcagcttcaaaaatcagttctttgatgaaggaaagttccagcaatagctcaagtatgagtgtttatccagctg

SEQ ID NO: 105052 - DNA, 204 bp, Glycine max
cgaactcattgacttcatctacttaatgtcattgatgtccgagatatgcagtatacatttctctataatctttgtgagcagctgaacttgggatatttatggaatattattctgatatgttctcctcaggatggttttgtccctatcagtactggtagaatttgagatcaatgccaagctccagtgcacgtgagcacttcaaca

SEQ ID NO: 105053 - DNA, 252 bp, Glycine max
ccccatacattttccgcccaaagatcacgtataacggcggcttgataaaaattttactaggtttctgaataagctggttaatgtttatggacaagtaaatgaatcattggctatttcaaatgttgtagagctattaaacttgtttttttaagcacctcaaccgatcctcaggcacccaaattaccagatgacattcttcggcgatactcacagcatgatctatttgctgcttttaactatctttaagagaaa

SEQ ID NO: 105054 - DNA, 246 bp, Glycine max
gttctagatcgcgagctgccgcctattattactttataccctcttcactatatctatatatagtttatcgctagatatatatataatagaacgttcaaaggaaatagaattttcctcagaaccaggatcctgcaatcatataaaaagtaaacggtctctttcctttgtggttaccatgggcccggacaccgtcgctgactcaatagcctctgtaagacatgctgccttctttttcaacggattggt

SEQ ID NO: 105055 - DNA, 251 bp, Glycine max
cttatatgctactaactctgtcattacgagcgattatcggcagcttgcgcggctttgtcatcgatatgtcgactaagtacctggaggtgaacagctattgaatgatattagtaactcatatgaggtgttatcgatgatgatcatcgatccatcctataactgatcatgataggctgtgcttatatggtcttgactggggttgcagggtttcagccttccatccagatctgtatgtgtctctgtatgagggc

SEQ ID NO: 105056 - DNA, 248 bp, Glycine max
tattcaccatgtcatgtataaatgaggtagtctggtttctaattgatatttctagactttgctgatctgaataataggactggactttgtgtattgtcaacataaatgatctatgttacttgtggggtttcttacaattgtttaatgatgcattacttctagagttaaacattttgacaacacctttttgattccatgattgatttctctatagtaaattagtaatattggtgctctctatgtagcat

SEQ ID NO: 105057 - DNA, 248 bp, Glycine max
cagataataagagtactaaagaatgaagtaaaggaaataaaaggagcaatgatagaggacaacggattctgcctctctgtacatttccggcaggtccaagaaaaggtaacctttaatttctaatttcttacattcttttctttcttggcatttctcttttcctcattgcttgacaatatttaatttagtgagcaatatttattctcctattttttttaaaagtatctctagatttaaaggtaatgaat

SEQ ID NO: 105058 - DNA, 247 bp, Glycine max
aagagctttgagctctattgaaggaatcggagaccaagtcttgtgaggtagatgatctgtctcgtctcccttgttaagcccctcagaatctggggtggtaaagaaactaaaaatgtgaacctctttactaattgtgatcatgctttgagctgaaacgagtgacccctgcaagctctgttgaagagaacagagaccaagctttgtcaagaagatgatttgtatggatcacaaaatggagaactgagca

SEQ ID NO: 105059 - DNA, 236 bp, Glycine max
attttacacgaaatagaagactcatcttgtatacttatttgcagaaaacctgggtggtccaaagtttaagattggaacctactattgtaaaggagcaatatctccaacggctgatgggagaagtggaggcaaagtcgaactttctagtgcaagatctgcttaatgtcaggacacatgtcaaagtgcgtactgtttgagcattcttcaagacacaaatgccccagactcgttgaaca

SEQ ID NO: 105060 - DNA, 225 bp, Glycine max
gtatataccaatgctgtctgtttcagtcgcacgctgtaatcctgatcttgtgtgcatttcaaaatctcattcatcatcatcttcttctgaaaagttaaaaggtgaagagagagagagagatatgagtagcgtgttgtagcattgtgtggtgggatggtgcaaatcagggccatgctatgctagaccactggaagccatgtctggtcgaagagtagtctcttattt

SEQ ID NO: 105061 - DNA, 258 bp, Glycine max
atctccgcattcggctcgacagaggtaaaacccttaggtataaactacaattttctatacttaataacaaaatgtgttatatcttgttgactcattcattgataattgcaataaagatttgtgtgggattatttctaccaaaaaaaaaaaaaaaaaaaaaaaacaaaggggtgcccccgtattagggctctcttggccccggagtttattgcggacggggtccctgagggggttcaagcttccccaaaggggggcggc

SEQ ID NO: 105062 - DNA, 233 bp, Glycine max
ccatcatttgctgacacatggggttgggttatggcttcggaccaaccactatcgatttgcgctgatgaaatggacagaagaatcgaagcaagaatagatggggaacttctctatctaaatggtgcttggttccattcatctacaactatgaacaaaactgtttaccaatcgctgcaaaatgaaactcacgtgtacacagaagaaaatgctagatttattcctggacatggcat

SEQ ID NO: 105063 - DNA, 235 bp, Glycine max
cagacatgaactccaatcacagtcacagcaacagcagcaatagcaatacttcatcccggcctacctctgcttccaaacatgatgatgatgttaatgaccgttccagcatgcttggcatgacaatggatgatgatgatgtacagtctttggaatcctatgccatggaactctctggtcctagataaacagttactggggtaacgaatacagctagatagattaaggcgaaagtaag

SEQ ID NO: 105064 - DNA, 288 bp, Glycine max
gtagaatgtgtacctttataaagtaaattgcaacaagaaaatcagaggaaaaatattctcaagtatcaaataatgatacaacaatagcttcttctaattatttgatggaatgtctatcccacatattaactcctttcttcatatgataattgaagaacattactctcgggaactgggaatttggaaaataagttggttgtgtaaagtagatagcttatggcttagtatccattgatgatatcagctaacaagctagagtagaatctcgcaattactactcttataagt

SEQ ID NO: 105065 - DNA, 295 bp, Glycine max
cggagaactaattttataagcttaagcttttctattgggggtaacgattgacatgtgatttggaaggattaagaatccaagaggatatacaaacttggcttactattgcataattggttggagaggtaagaggatggataatggtaaagtttttggttctgatggtattcttattaacgtttggaaatgtgtagaagaacagtgcatcatttgttttactgagttatttaatgagattttaaatctaagaaaatgtcaaatgagtgaaggagaaatactttggttcctaatattc

SEQ ID NO: 105066 - DNA, 164 bp, Glycine max
ccattttgctctacccagtcgctttgttcattgcgtttctgaacgatgtgtggcattagttgtgcagtcactctacgtggccaccatccattatgcggcagtcgtgattcattgagcaagacactcgatgagagtttggacacgatcaaacatcgaggaccaga

SEQ ID NO: 105067 - DNA, 159 bp, Glycine max
ctcgagaaaaccattggtggcactccctcactccatctgtgcattagcgaccacactcacactctcctcgccaacaaccaaaccccagaaagttaacccctttcccttttgctcgaaccataagacacgatttttaacgaaacaaacgcgacccagaag

SEQ ID NO: 105068 - DNA, 260 bp, Glycine max
cttctgtaaaagctcatggttcatctgcagcaatagttcctggtaacgatgaagtttctgagctgggaacaccacaacatggaatggataaccgttctgatcaaattatggataattcaacattggaacatggcttaattaatccaactgaaacggatgttcattatgccacatccagcgaaaacttcgtttataaggataatattacagacaaagtcactgggtatactgctgatgctatagctcttcacctagatgga

SEQ ID NO: 105069 - DNA, 159 bp, Glycine max
ctttttagtctacttttgactattatatatcaggtggtttagtgtttacttgcgactttctaagactcattgtttatgattgttcagcctttagagatgtttaatctttctatattagcttctctagattcttcaacatacacaaataacaactttatc

SEQ ID NO: 105070 - DNA, 279 bp, Glycine max
acgtttcgttagatgggtctcagacttcttttcttggggagatattgtcgaggtaaagaacaatatcgttgacttcgtcaacgccacccttgattacggatcatcgaacctcgattgggccgctaacaaggtcgattccaagtttgatgaatggaaggctacgttgaaaaagaagctcgctccaggaaatatcccagacaaagtggggaacaaaagcgcgggaccaaaggcccaaaatgatgtccccaaggatgcaatcaacacgatgaagcaagccga

SEQ ID NO: 105071 - DNA, 146 bp, Glycine max
tggtcacccttcgtgttcttgaggtacttttctcctttgccactgctatgatcagtattctaacttcaggatttagcaagtttctatggctaattcccgaagaggatgtggatgatacatcatgtcagtataattttggaatggtg

SEQ ID NO: 105072 - DNA, 279 bp, Glycine max
caagaatgcgcgaatatgcttagcttgcgatatggatgctacgttctctgctgtgttttctggtgatcgtgctccttatagccccgctaagtttttatacagttggtggcagcacgcagcaaaccttgccacttatgaacaacaggatgcgcatgagtttttcatttccatgcttgatggaatccatgagaaggtggagaagggtaggcgtaagcacatactgaaggcaatggtgactgttgtattgctcataaagtattctctggtattttgcgatca

SEQ ID NO: 105073 - DNA, 268 bp, Glycine max
atcaagttaaagatatagacatggatgaaaatgctgattcttttgtggatgaatctgttatggaaaaggttctccagaagaggagtttgaggatgcgtaacatgcaaagagcttggcaggaatctcctgagggcaggaagatgctggaattccggaagtctctaccatcattcaaggagaagcaaggtttacttgaagctatagcacataatcagggcattcaccggctttgctgatgactaatctttgtcggagaatcttgctggtc

SEQ ID NO: 105074 - DNA, 137 bp, Glycine max
aacagttaattcaaggtcgtttccagatcatcaacgtatggcggccacttgaaaaccctgcttccgaccaccctctcgcagtagtagactggcgcagacctcgccagacgattttattgccacagatctcatgtatc

SEQ ID NO: 105075 - DNA, 270 bp, Glycine max
aggcaaagctcatatgtttgctatggtaaagatgttgtggagcttcttgaggcctcacatttgagcttagaaggagaaaagatcttggatgaggccaaaaattgtgccataaattctctcaagtttggtttctctcccagttccatcaacatcaaccgagactccaatctggttgttgaaaaaatggtccatgccttggagcttccatcccattggagagtacagtggtttcaggtcaaatggcacgtggagcaatacaaacagcagaaa

SEQ ID NO: 105076 - DNA, 266 bp, Glycine max
caacgaagcagaagaagcatctcagaacagaaccaccgaacccactcagaagcaaatccgaaaacccctcatataatagtactggtattcagctgttcatgacaaaagcctgaaccgatcatgtcagaaggtgcagaaattgatgagcgtgtggaccttgacgaggaaaattatatggaagagatggatgatgatgttgaagaacaaatagatgatgatggagtggatggaggtgaagatgaaaatgctgaaggtagtgttgaaga

SEQ ID NO: 105077 - DNA, 262 bp, Glycine max
cgatgtactaattaagatttaaaataaaagacaagaaaactgataacataggatatactttgtatatgtggtccagaatattcacgatgagattttttggtgagtacaattcatgaatgagatgacttgtacaatagcatactttccaacaacgtaactcaagacacacacacacattacattaatattgatgtactaattaagatttaaaataaaagacaagaaaactgatatcataggatatactttgtatggtccagaa

SEQ ID NO: 105078 - DNA, 106 bp, Glycine max
ctttggcggatctccaatacttgtcgctcctttctaaggtttgcaccgagttggagtcccacaccggcaccgcgacaaaggtcctcgccgaattcatcaccgattt

SEQ ID NO: 105079 - DNA, 269 bp, Glycine max
cttttctcagttttctgcttcttcctcatagtctctcacagcaatctaatcactgatcatggcggctacgtttgatggattctccatcagggactacacatccaagatgaggtccagcgctgttttcaagtgctggcccttcgcatccacctcctcacgtgatacgtcacgtgaggaggttcagtcgtggcttccgcccatgaatccgtgccctagatccgacgatttcaacgacagccacgcccaaaatctggagaatccgccttctg

SEQ ID NO: 105080 - DNA, 251 bp, Glycine max
ttctgagaagagactcaacacaacaatgagtacaacttcttcttcttcttctattcagtgttcagtttgggttccttcccttctcaacactaacactaacactaacaccattcactttctttcacttaaaccaaactctattactttctcttcttccttttcttcttccctcaccagaatcagaatcagagcctcctcttcctccccaaccgttgaagaagccgctatgagcatcgacaacctccgacgtt

SEQ ID NO: 105081 - DNA, 260 bp, Glycine max
tctggaaccgtcaagctcccgaggatgccggctctcgatccgccgtcaaagactaccgaattcgaaagtctctcgaccacgacacgatccctcagaccggtgatgcccctgctaccgctatgagcgccgaaaaggccatgccccgcgccgagtcctcttccaacaactctgccatcgagaaccccgcccaggccaaggctgccgagctcttgcaggaacctcaccagcccgagtcgttgcccagggaatcggcgctcgag

SEQ ID NO: 105082 - DNA, 278 bp, Glycine max
caggtttttaggctgctatttgattttgctgtttcaccaaggtttttgagtggcaaaggtgggataatggaggagaatgttggggacattccttctgtttacaggtgggaattgaccaatagggctgttcatgctgctgctagaggaggaaatctgaagattttggaggagcttcttgccaattgctctgatgttttggcttatagagatgctgatggatctactgttttacatgcagctgctggcagagggcaagttgaggtaattaaatatcttac

SEQ ID NO: 105083 - DNA, 282 bp, Glycine max
attcccttacaaagctaacacctacacaaaaatgcttaaaatcaataaattcttttggttggccaacttttttattttaacgatacttccttgattcacttgcctgcggttgtaagatcgacttaatgattctggaaaggtttaacccttcataagttgctgttttttcattaccctactatttttttggtttgaattgacccttgattcttaagggagcctcttatttaagtgtcctttgtaccttgtgtgcttgaaagtccatgttaaggtttgaagggg

SEQ ID NO: 105084 - DNA, 270 bp, Glycine max
atagtttctctcattccttctgtcccttaattgcgaagaaatcattcttcttcccatggaaatggaaccgacgtgcgtcgacacttccctcaaccttaacgttattccttccccacacatcgaccatagaggcggttagtactatatatatacatatatatattcaactccaaaccattgtatatataatatattaatgaaccttaattcttttcatctcttatctcactaaatatggctaaaaggcatgaatataacttaatttgaatg

SEQ ID NO: 105085 - DNA, 149 bp, Glycine max
attgctttgtgcggggatcattcaaaatcagtctaaatcgtgaactcaggtctgatttcataaattcatctctgtgtcagattcacagcaaaagaatgttgacttgtggctggaccccaacaattaggtctcagctctcatgttttctc

SEQ ID NO: 105086 - DNA, 281 bp, Glycine max
caacaactaaacagctaaaagatgcaatagcaattgctggggaagaaactgccaaatgtaaagcagcaaaggaagtaataaagtcacttacagcccagttgaaggacatggctgacaggctacctgtaggagctgctaggactgtgaaatcaccgactcttactgcttcttttggttccaatccttgttccaatgatgttagctatgcttccattgatcggttaaatattcaagctacaagcccagaggcagatttaactggatcaaacaaccatttacat

SEQ ID NO: 105087 - DNA, 269 bp, Glycine max
ctgccgccatggccggcgccgtcgctgcccagatctcgggcatctcctcagcagtgcactgttcagctcggcctgctcgctgttggtgaccttggccagtgtctcgccctccagcaattgatccctcttgtcgttggccaaaacagcggatccgtggtcgagcccctcgacaactacctctcctccctgtgctccaacagcacagccaagtgctccaacgccaccctcacctcggcccagtccaccgtcgagtcggcgtgcgcgtccga

SEQ ID NO: 105088 - DNA, 264 bp, Glycine max
ctacaataatcttaccggaacagttcctctatctatgcaaaatcgtctttaacttgaggctttcattcaacaatttgaagggtcccattccatatggtttcagtgggagtgagctaatagggaacaagggtgtatgtagcgatgatttctattacatagctacacatcaattcaagcgttgttcagcccaagacaacttagtagtcatggccggcagcaacaaagtaaggcacaagcacaatcagctggtcatagttctcccta

SEQ ID NO: 105089 - DNA, 265 bp, Glycine max
cctggatttctctcttctaaatcaatcaatactgattttatttactcaatcaatcctccaatcagtgaatcaaaatgtccggagacgaaggccccaccaccgcctacacatggcaaatctccgcccaggaccagcagggcggtcccggtctcgacaaagacatgaaggagcaagccaactggacccagctcgagtactggggtgatgacggcaaaccctacctcaaagagtacgaaggccgcggcctcctcgagaacaaggccgt

SEQ ID NO: 105090 - DNA, 268 bp, Glycine max
cacgatggagcaagacttagatccctctgttccttgttgtcagcatctgctttctgcaatcttagcgatggaaccttccgagtgcttaatctcccacgccagggcgtgtggcggaggctctatcaccgaccaagttcaacaattcatctcggatcattgcctttccactcctggtgattttcatgctccttacttgaagacttttctcaagaaactcatcactcaagttgagttcgaccgtggctgtgtgttggaccacttgtacgaa

SEQ ID NO: 105091 - DNA, 240 bp, Glycine max
cgaaacagtatacctattttggcaaccaaaaaaatcctgagagagaaattccaaggcagaagatattgaaacatttgaaaatgggttatacaacaagagaaagaagggaagaggagaagggtaaataatgtaaatattgtatgcttctgaatcagttgcattttcacatattacattaaccagtcccattcgaaactgctcgaatgtttgtgattaacctcatctcactagatctagctt

SEQ ID NO: 105092 - DNA, 123 bp, Glycine max
cccctctttcctatcacactttctagctagctagccaaccagagtaagatctaaagatatttcttatatatcctatggtccgagagtgcccttgttctgcgccaaccctttcttccacacaac

SEQ ID NO: 105093 - DNA, 236 bp, Glycine max
gtgcttgcttctgttccttgtagttgaagtcgctccccctcattcttccttttctacttgccactgtttcctattcgtcattgccgcaaatgaattccgtcgcttctcatgcatgatcgcaccttcaactctcttcttcttcaccatggctttacttcaagtagcatcaccttatcatcagcttctgcttgctttcaccacaacggcctcatcttttggtgtgttccatgtcacaa

SEQ ID NO: 105094 - DNA, 234 bp, Glycine max
ccaatgtaccaaccgccaaattattttggaccaacaacaactacagtatcgtttatgtaacgaacaaaccaagaaaacttgaaagaacaactagtgggaggaacgagaggcagaagagcagagagagaagtgttcatggatctgcgttgtttgaaaaccttgacgagagcgcttctcgcacgtaacctgtgtttatggttctctgtgttttctgtcacttgttcatgtccattt

SEQ ID NO: 105095 - DNA, 235 bp, Glycine max
ccacatttccacacaagacgtcagccgcggtggtgtcgcagacactctcatcgacaccaacaccccagctatcaacgctgcgcccgtagagctagacggtgtacccatggcgggcatcaccaacccaggggatgacggggacaaggaaccgagatttctgagtggagaggcgagagtcggggcgggcgaggcacgttccatgcatcccgtgcacaccaaactcttcattatattg

SEQ ID NO: 105096 - DNA, 230 bp, Glycine max
cttccttgcaggcagaaaggaagaagcttcaagaagagctcacacaaggagcttcagccaagaaagaacttgaggtggctagaaacaagatcaaggagctacaaaggcagatacagcttgaggctaaccaaacgaaaggccagttgttgttgcttaaacaacaagtttctactctactggtgaaagaagaagaggctgccagaaaagatgctgaagttgaaaagaaattg

SEQ ID NO: 105097 - DNA, 260 bp, Glycine max
gcaaccatgcgctccaagaatgaagcgctgcagaccgcccacgcgcgcgcagaagccgacctcgccaactttgaggcccgtgaagctgtgctgaagaagaaggatgtcgaacgtaagacagttctggcagagaagcaaaaggccgagcgccagaaccgccagcagatgatgggcgagcgcgagaagaaccgacagcgcaagtgcaacgcgcaaggcggcagggagtgggattttgaaaaagaggagggcttctcaggtac

SEQ ID NO: 105098 - DNA, 124 bp, Glycine max
ccaaatgtgtcacaccctagtttactctaccaaaatgacgaactagatgcctctatttctatgggagggaagcttcttcacagtggacagatgaaatttttggacaaggcagcaatagttacag

SEQ ID NO: 105099 - DNA, 253 bp, Glycine max
caggaaagcaagctctcattatattcttgggtggagtgtttcagtgaatgggggaattgcccctccactaaatttttcactccttccaaagccaccaccaaaggagaaagatgcatcatcttttccttgggtcaaggttgcagttgccatgttgtctgctttgacatttaccttgttgtgcctgtcgtttattctgacacgctacaagagatacatgatatttgacacccttgaggactgggagcttgattgt

SEQ ID NO: 105100 - DNA, 253 bp, Glycine max
cctaaatgaaagaaattctataaattagcttataaataaactaattttttcctacaagtgtttattaagaagtttatgcttttcagttttcagttactggttaactctgaattctggataaagtggactcgtgtattgatacaattagtgggtgctttttaggttgaagctgcatacgacatgttgcttatgcagagcctaactcagcgtcgggcagggaaagtagtgaacagtagtgttcgttatgctgatg

SEQ ID NO: 105101 - DNA, 250 bp, Glycine max
ctcgagccgttttcaaaaaagggtgcattcccccctttttttggataaaattgaaaaacctttactcttttcttttgatagtttcaaatcaatgaaaatattttttatgttcaaaattcggatgcgaaaaaaggaagaatttgaaatttctagttatacagaggaaagggcaaaagaaagttcgaaaaaagaggaggaaaaaaaaaaggaaaatgaggaaagaaaacgtatagaaatagcagaagcctgg

SEQ ID NO: 105102 - DNA, 299 bp, Glycine max
acaatcaagaccagcttctaagaatcctatcgagttcctacagtcccacttgaaacctcccaaaaccaattgaaccaccatcatggtcgcccaacccatcggcaccaaaaaggccgttgcacgccccaaacccatgggtcccaaagccgtcggcccagcaaagaagccctccgtcggcgccgcccagaccaagacagttccgtacaagaagcccacgcccatcggcacaaagaaggcccctccgcccacaacagcagcaaagaaggtcggtcgcgctgcagtcaagaagccagtaggct

SEQ ID NO: 105103 - DNA, 229 bp, Glycine max
ccatttgaagtattcaaggaaaaaatagttgcacctcatcagaagcatgattaccatacagtctgtaatgacaagctagagcaggagacctcgggcaacaaggtttttcaaatatttcagtggcttttctcaccaaggaaaggtgataagtaccctaaaaatgaactttagtttgtttcctaggaaaggagcctcaaatcttacgctcttaataattcagacatgagcg

SEQ ID NO: 105104 - DNA, 247 bp, Glycine max
ctaacttggagctttggacggatgacaacggtcaagagcagctttcagttcgcgtccagcatgactacttgcgttcgatagaaaattatacgaaaaggatgaaacgtaccaagatgtttgtgaagaagcatttgcccaatgttggctgccatcctttcctggcagggcttcatgccgctttgcagtggaatctggaaagctcaacggttgtagcatggcaattgtcagactcggtattcgtcgaaag

SEQ ID NO: 105105 - DNA, 162 bp, Glycine max
caaaattcggcaacactgttcctcattgatccaataaccggtttcagtagggagcgggaaatttgaaatacaagaatctgattcgtttagatgcttctttgatgggtgaaatgagttcctgattggtcaattttgaatttcccgcttttcactaaaaccgtc

SEQ ID NO: 105106 - DNA, 255 bp, Glycine max
gttgacagtatggatgacgattggttagcgtgacaacaactacaaggatagattgttttctttaagtgaattcctatgttgctctcatttttatatttctttcggtaattgggattatcgggcactatcattgtaatcattttagtacccccctccccatttcactgctttatttatttttggataaataaataagggcttgcacaatatcagtagaggcaagaacccatcatcgagtgatgaacatttttgctc

SEQ ID NO: 105107 - DNA, 266 bp, Glycine max
ctttcctggaaagtggaacattgcataccacattgtaaattacaattgtagaaaggatgttaatttatcttcagtttcatgtatccttctttacttttatatttgtcttctttgatttaattcttttattactttacgtcaagcaatttggtattcatataacacatgcacggtttgtatgacacagggaggctgtcaaaaatgtttttactccttattttgataaaggtaagctattgttggatcaacgcttagcttgatagtga

SEQ ID NO: 105108 - DNA, 198 bp, Glycine max
cccggattgttgttttttggttttttacttctggccgtgctaaagttgcaagctttgaaggcttttctattttaatctgggcatgtgtgatgttgaattgatgtgttctgaaatgtgagtatgctgttacaggagaggttgtcacacttgcccagaatttgcaaaaggatttataggccaatccaggttctcacccat

SEQ ID NO: 105109 - DNA, 278 bp, Glycine max
atacaaggaaaaattccttcgggctatctcaacgctctttttgatttgggtggtgattggtttcgtgatgctcatgacataaaatgtcttgcttttgatggttatttcatttccctgtactatttgcacctcactgcttcacacctcatactgcaagaggaaataaagaagtctgttccagctcagtgggacccagcttcattaaccaggttcattcagacatatggcacacacataataataggtatggctgttggaggtcaagatgtaatttgtgt

SEQ ID NO: 105110 - DNA, 234 bp, Glycine max
  unsure (1)..(234): unsure at all n locations
ctagatctagggtttattttccttttcattttgaatttgaacaagttttgcgtcttcaaagaaataggatgggagaattgaaagacactgaggcttacgaggaagagctcatcgactacgaagaggaagaagaaaaagctcccgattctgctaaanccgttgctgaatctggcaagaagggttatgttggcatccatagttcgggatttcgagacttcctgttgaaaccagagc

SEQ ID NO: 105111 - DNA, 134 bp, Glycine max
tgctgcgaaaactgatggtgccgaagatattatgatgttgaacaatggctgcctttgctgcactgtcaggggtgaccttgtcagaatgatttccgaattagtcgcaaagaagaaagggacatttgaccatattg

SEQ ID NO: 105112 - DNA, 147 bp, Glycine max
ctatctgaattgtctatccattcttggtctccctggtcagtcctcctccgttgtgctgtcactggcagcttcggccatggctgcttcaacctgcacatgggcgtcatggaaacatgtcaagaacctcttcgtcttcggtgacagtta

SEQ ID NO: 105113 - DNA, 155 bp, Glycine max
atcactttcatttctacctccctggctctgttccgtcgatgacgatggcgtttacggtgcgaaacctgacctccgctttatcattcttctctctctcttgtccatcacttccgccaaggtcttcttcgaggagcgtttcgatgacggatggggaa

SEQ ID NO: 105114 - DNA, 266 bp, Glycine max
gacagagggagctcttcaaagaaagagagtcaaaggggggaaattgggttccaaaacacttcttggtgtcttatagcaaagaagggggttgggaatgttcaccaattcaaaagtcagtcccaaaagccccaatcgccaccttgtaagagcatgtttggtttacggttacaaaattatatttgaggcaaaagtaattttgctaacgaatgagaggaccctttcttttgtgttattttacttttatctattggatttgcattggaaca

SEQ ID NO: 105115 - DNA, 99 bp, Glycine max
cgccaagttgcggattcgatacccttttcatccaacaaggtggactttatattcaacaagttttctgtcaaacccgggtcagaggaggctcagatcatg

SEQ ID NO: 105116 - DNA, 100 bp, Glycine max
ggcttttgatgttttcacaagatctattaagttgcagttgcccagcctatcaggtcattctcacgttgatgcaggggtaaccagttctgaaagtgttgtg

SEQ ID NO: 105117 - DNA, 100 bp, Glycine max
agcttttgagttccctactatcttcctctgtgcgcttcgctatggacaaaacgcacagcggggaggagcaggatccgaatccgacgcacccgacccggaa

SEQ ID NO: 105118 - DNA, 99 bp, Glycine max
gttggaagagctcatctctgttttcttcgtcatcttccccaaccagagatgcgctccacaacagatacttactaaagctttcaactttccaacaccctt

SEQ ID NO: 105119 - DNA, 99 bp, Glycine max
ggcggagtaaacatggcggctagtggaagttccttttccaacatcactagcttccttcgcaaccaacaacgctcttcccaacctctcgattcttctctc

SEQ ID NO: 105120 - DNA, 270 bp, Glycine max
gtttcgaaagcttcccgaaagtcaattctcgcgcaacgccaaatcaacaaacaactcccgccaataccaagcgacatcagcccgcggagcctcttacgaaaacaactaagccaataccattacaaataagcaataatgggtctcatgtggactaaaggcttcggcggaaagcacgctggtaagacatcctcttccttcaatgcacaactgccatgtttaatggcgggcttgatgattgtgcctctcgactacatcacacgaacttttcca

SEQ ID NO: 105121 - DNA, 274 bp, Glycine max
caaagattggaaaaagagcccatcaacaatcatcattctctatctcgccctcttttcccgcctatctccctatttgatttgcccttctaactctctctctaatttcatttccgtcgtcttacctttacatttcctgtcctgttagtgctgaatgctatctgaatagttcattctcttaccacctctctagagctattctaactatttactcagttcactttcttttttaaatattacatctttaacagagcatgtttgatctgtcttccatttg

SEQ ID NO: 105122 - DNA, 275 bp, Glycine max
ctttgtaattgatttttctggtggttatagtcaattactcaagcactttgttttgctacatggctattcttaagattgaatgaagtagcagttatatatgttatgtatgaactaacatctattattgcaaatttgctttccattacttctatttatttgtatttagcaatgtgaaaatcgttagtgtattggatgatcggtagtaattactggagtctgtagtttagtttattgatggtaatatgttcattcttccaagtaaagatgtcttttga

SEQ ID NO: 105123 - DNA, 173 bp, Glycine max
aaacaataagcttccttcagcaatttttactgaattacaaagtactcaagcctccattaccacataaagatagagacttgagtactttgtaattcagtaaacaataagcacccttcagcaatttttattatagcccatagagttttattagttgattgttacccaatttgtct

SEQ ID NO: 105124 - DNA, 271 bp, Glycine max
gggaaacattccatcaccccatgtatccaaccttgatttgaataatgtatctcataagcttagccctctttaaatcaagggtgcatacacacctttattttctttatgcatttcatttgcttgagttaaatccttccaacatggtatattctgagatgtgtcatcagcaaaattgatggatattccgcatcaatgttatggtgacaaaaaaagttatattctgagatgttaacttggatgtaggattatgtagagcaagtcaagttgttga

SEQ ID NO: 105125 - DNA, 263 bp, Glycine max
cttctttcagtttgtattttctaagaagacaaagcaagccatctccatcttgaatcctccatcagatctccctgcgaatgctgctgcccaagaaaacaatccaaacccaaaacgcacccactgcgcagaaaacggcgtcgtatgcggggcccacatgaagtgcaagacacatagctcagaccttagcagcaccgttggcgtctgcgcctacgtgtctaagggaacgcctcatagccctcgtcgccgggcgagtcatctcacgc

SEQ ID NO: 105126 - DNA, 255 bp, Glycine max
ttcaatcatgaatggaaggggaggaatggcatctcttgcgcgagatcaagttatgaatcatcaacaggatctgtcaagccaactacttagtgggctaggaggagtaaatggctttagtaatcttcaatttgattggaaaccgtctccatgagagcctttgtaatcttatttcttgagccgctgcttgtgcagcatgagaaatgctagaattgcctttggccccctggagatggcagaatgcaatcggttagtgat

SEQ ID NO: 105127 - DNA, 103 bp, Glycine max
cttctctctcttcgccgttggtttcactcagctctcactctcatcgccatcccaaaccctagcctcgctatttttcatgattcctctcgatctcttccactga

SEQ ID NO: 105128 - DNA, 115 bp, Glycine max
ggtaaatttaattagtaatactatagtaccatcatatctcttcactgtgaataaaatcaaattgagtcttgataaagatttatatatgcatcaagacacaagaccaagttaattt

SEQ ID NO: 105129 - DNA, 148 bp, Glycine max
  unsure (1)..(148): unsure at all n locations
cctcgagccgattcggctcgagctttcttatgcggatgggaaggagacagtggncaaagcagcacacttgatttttgtggagcacttgaaacgacataaattgggtggagaactagatctaatcttgttagaacctcaattgaatgaa

SEQ ID NO: 105130 - DNA, 130 bp, Glycine max
tggattctaaatggtacactcaattcagaaatgtatccaatccttggatggcaagatatgtgtatggcttgattttcctcctaattcaactaataagcataatcagcttcattaactggttgactgattg

SEQ ID NO: 105131 - DNA, 265 bp, Glycine max
ggtagctacggttcgtaaagggaaagaaaaaagaagaggaaatcgagaatcccttgcaataggccaaattcgagaatcaaaactgaagccaaagacgagaaatcaagaaaggagaccacgaaacacatattccttctccgaagccaattgaaccaaaagaaacttggagtgaagagccatgagttggagatcgagaaaaagaattgaaatcgaaaaaaaaaaggaataaccaaccgatttgtgttttgattttcttgggagcgag

SEQ ID NO: 105132 - DNA, 141 bp, Glycine max
gatgcaacaaaccggcttctccgggcaggcctttaaccagcagacaccgcaattcactggacaaactcaatcgcatcaacaatcaccccagcagcaatcttttcaagggccgcaggcgcaccagcagccaccccaacaaca

SEQ ID NO: 105133 - DNA, 274 bp, Glycine max
atcggcctcctgaacaatagatcatttaagcataatagtaagtttagtctcaattgagaaaaactaaaacagtcgttttctttccattttaaaccattacttaaaacctacctcaggtataaggagaggttaataatcacatatagttaaaccttttccattgtgcatatgtgacgacggattcagtagttggtcgtaaatctgacaggcaacccttgaagatgtttgccttctggccatctgttctacagcagcctgattgcgacttgttaag

SEQ ID NO: 105134 - DNA, 265 bp, Glycine max
attagtatgggtgacaggggaacataattgtgtctcacgtccttcaaatggctacataattaatgtatgttaggataggcgacacgggaacataatcatgtctcacttccttcaagtggctacataattaagaagttattagctacagctacgtgctgtagatgtgagctagtccttatgtgacaattacttgccattgtattttagataaaggggggtaaacaccattaagtgctactgcttattcaataagactgattcatag

SEQ ID NO: 105135 - DNA, 191 bp, Glycine max
gggaactatgagacgttagaaagctgaaacatgtctctgacattggttagcactggtcattgacaaccttggtggcaattggcattggaattttgtacataaaaagttgcttttgtgtgataactttgtattatgttttcggtgtgaaccatgcatgaatttgttaatggaagtaattatattttttatgg

SEQ ID NO: 105136 - DNA, 265 bp, Glycine max
caaacttatcgggacacacggcctagcacgaaaactggcagacggtgtccaagcgttgggaggcaaatttgtctatcctacagagaccaacatggtctgggtcgaccttgcaagcctggggatcccgctaaaagatctccaagagccggcgaggctctcgaacagccgctcgtaattcgcggcgcacggttcgtggtgcatcaccaaataaccgagcaggccatcgacgaccttctcattctcttcaaagaattgcaagacaaac

SEQ ID NO: 105137 - DNA, 269 bp, Glycine max
tccttccttaccatggcttctcaatctcacaacatcaaaatccacgaccactttagcgtttcccctccctcagcaacagcgacatccctctctctcaaattcttcgaccttttctggctcaggttccaccccgtggaacgcatctcttctacacgcttccaacaccccaatcagacccatccattttctattccaaaatcgttccaaagctcaaaacctctctctctcacaccctccaacactttccccctctcgccggcaacgtggtt

SEQ ID NO: 105138 - DNA, 265 bp, Glycine max
ggttctgatcccaattgctgcttccttgggaggtgctctttttatttctatgttgtgtgttgggattgttttcttttgctacaagagaaagtcaagaactcgaagacagaaaagttcaattaaaagaccaaatccattttcaattggtactttaatgggagagttgtgtatggagacataatcgaagctaccaagaactttgacaaccagtattgcattggggaaggagcgttgggaaaagtttataaagcagagatgaaaggag

SEQ ID NO: 105139 - DNA, 267 bp, Glycine max
ctcgtgaagaagacagtagtggagattttcactacgacaagagtacaaaggtcgtggttctctctgacctattctattctcatctgtctacaaccatgtcccgtccactaacagctaaaaacagtcaagagacatcccgtatgataatgaaagaactccgctactcaacagaccagaagatagacctttaccaatgggtcagatgtatctcttatgctttgcgcgtatggtcgagccatgggccttcttttcgatcttcccgtttat

SEQ ID NO: 105140 - DNA, 176 bp, Glycine max
gttcattggtagtccaattaacttttagacatgttttctttagtgtgtttcgtatattggggagtaattggcacacatggcttgaacatgctataaaagttcattggtagtccaattagcgggagtttgcagcctcgaatatccaaacacactaaagaaaacatgtctaaaggagg

SEQ ID NO: 105141 - DNA, 182 bp, Glycine max
gcaagctaggggttttcccctttcttctggttttgtatatattaaacttttggctatttgaagccattgttgaagcgttcctgccatttgtttaaacatttataatgccatgtattctatttttattttaattttaattttagtaatatacaagtttagaagttcttgatctcggacaagta

SEQ ID NO: 105142 - DNA, 198 bp, Glycine max
aacaaacactacgagtctggaataaatccttggaatcagcatcgcggtttacttgctgtttaaaacgacaacaagatctagaggaatcgaaagagaatacgcagccatgctatacacctccctcgccgtcctcgctaccagcgcgctcattggcaccggcgcggctctgcccgtcgcgaaggcagacctcgtcttcgg

SEQ ID NO: 105143 - DNA, 188 bp, Glycine max
ggtacaaggctcacgatcattcaacgaggcattcgcattgcatttgacaaaaccttgtggaggaggcaaccactcttcttggttcatgactctaatacttgtttttgctatccttaaaatttgttttgccacaaaccaatccttctgcaccattttggctttggtcccaatctgagtcccagattaaa

SEQ ID NO: 105144 - DNA, 212 bp, Glycine max
gtccgctgagagtaccgcagagacgtatgaggacagtgaggtgcaaattgcaggtcaattgcaacttcttgggagtcctgagagattgaggaggacggtttgctctgcggagaaagtaggacaggtccgatccttgcgtctccaagaacttccacgactatcatggcgcacgcggcggcagacttagaagatgccggacggtccgcggtcat

SEQ ID NO: 105145 - DNA, 236 bp, Glycine max
ctggtttttgaatttgcaactaataatactaattaagtgatcacctaaatgacttgatgcagaggctccccagaagtcaaatctaatgaagaaactccaacctcatgtcgacctaaaaccattcttccccctttgatgcctcttcctacaaatgaatagacagctattcttgttacatacgaataccacttgtacaaaggctagctatatacatcatcagaggcatttgacggtga

SEQ ID NO: 105146 - DNA, 140 bp, Glycine max
tacctgtcaattcccacgcctcaattttcctggcttcattgtcaaccatacccatcactatggctaccgctgcagagggtgtcttgcccaagggtgatcgccattcagacaagtctgtgccgcattcgtcaaacgatgtc

SEQ ID NO: 105147 - DNA, 153 bp, Glycine max
ttttgcttcagattctggtatgtttttcacaatgagactaattgtgtttgccctaaattcttgaaatgaaatgagtaatctctgtacattttccccctctcacaattatgtttcctccaactttggtttggccaattttgaagtattatgttt

SEQ ID NO: 105148 - DNA, 115 bp, Glycine max
cggaaatctggttgcactagtaggttacagatgcattacgttagcgattctgataaagtactgtgttattatgttagtcacaagatgtatttgcacccattcatatttttaaccg

SEQ ID NO: 105149 - DNA, 228 bp, Glycine max
gcagaatgtgccgtggtcgcttttggatgcaacgacgacgggcagttaggcacgggtgcgaatcgccgaaagacgctggctatcgacgatgtgtcggcttccaatttccccaagctggtcgacggcctgctggacgaggaaatcgtcgctgtctcttgtggctctcgccatacaatggcgctcaatgcaaacggtgccgtgtactcatggggatggggatcgatggga

SEQ ID NO: 105150 - DNA, 233 bp, Glycine max
caagaaggttcagtaatcaagaaccacaccctttgtggtggagaagaaacaaaaaatgatgaagcaaagttagcaagagaaaaaaagattgaaaaggttatggaggaagaagttgatccatcgataaagagggagaagcacaagaaaagcggagtgacgaatgtgggctgcaaagacgattttcttgataacccaattacagatttgatcaagaaggaagtcgaagctggtga

SEQ ID NO: 105151 - DNA, 196 bp, Glycine max
taatccgaaaacaaaagagttaagtgaattaaaaacccaagggacgttcatcgccaaacgtaaagatatccgagtaattgttattttggaatgtacccgttgattccttattaacactctttttatcacaaccggtacattccaaaataacaattactcggatatctttacctttggccatgaaccggttgtgata

SEQ ID NO: 105152 - DNA, 201 bp, Glycine max
tggagatcccacatcaaccagtgatactaccaaaataatatatataagccaggcacaacattcgtctagtgagctagcttgtgaggttgagttaggttcaaagacgaatgttaggaattctactatcactaatattggtgatggggttgttgcgtcggagagaaacctttcgaggtcgaactcgacggggcattcccttgt

SEQ ID NO: 105153 - DNA, 255 bp, Glycine max
ccccagtccacccttttcacgcggcctgcccctccctcgcttgcaccattggtgctttgctcgcaacaacacactcgtcggtcaacatactacgagcacagcatagcattgctggacatccttcaccgcccgctccttatcgcacagagaaaccgacgatcggccgccaagatctgcgcctgcgccccctgaaatcacctcgagccaagttagctacacccctatcccaccaacccaagcaccatggtcgtcgcg

SEQ ID NO: 105154 - DNA, 254 bp, Glycine max
tcaagccagtcaattggcaagcctgatcttgataaatttggctagttgtattgtatgcaccaatctactacttactgcctttccttttccttgaggccatttcacctgggcttgatgcaggcagcaggctcaactaattatctttactactgtttgggaacgtgcgatcttataaaggagaggtttattccttatacaggatttgtccttgttgttttgtgagatgtcaatattatgttcagagctaaaatgag

SEQ ID NO: 105155 - DNA, 263 bp, Glycine max
tggtgatctttcaactttagttcgtattcgtacagatcattggccgagcttggcctacattgatgattatttagaagctttgtatctgtcataagagctttcgtttcacctccattgatgactgcagaaagatgacgttacgtttcgttttcgttttttcatgggaaacgacattatagagtttttagatcatgtggaatcgttagctgtacgtgtacatgatcctgttaaggctaccagtattttgggaatgcaaaggattg

SEQ ID NO: 105156 - DNA, 245 bp, Glycine max
catataagcaaaaattagaactagagaacttttgtcatataagacaccatttactctggtgttactaaatgatgcaggccacagcaagcaccactgagcagcagttcagcacctaaaacatacaaaatagcaaggtcattatagactctacaaccttggttttgagttacatatcgcccttaaggaataaagaggttatcagattggagaggaaactcgtttcacgtgtatagagttattttttt

SEQ ID NO: 105157 - DNA, 258 bp, Glycine max
caaacacagatagaaagaaaagaaatttcaccgtaccagagaaccaggaaggatagaagaaagtgaaagaaaatggcgttgtacatggacgaagaagagatttggaagtgtccgaagcatccatcaaagagaagaagaagcggaatttgccctacttgccttcgagaccgtctcgtaactctttgccctgactgtgctaacgtgcgcccctgttcctgctacgcaaccagctcctcctcctcttcctcgtcttcctcc

SEQ ID NO: 105158 - DNA, 252 bp, Glycine max
cttgagaccaccaagacacccaaatagagtcttattcttgagaaccagttttcttcttctgggtcattgagattttcttcattctccaaaaaaatcatgtctggaattgtggttgtcttcgactttgacaagaccattgtcgatgtcgacagtgacaactgggtcatcgacgaattgggtttcaccgatttgttcaaccagcttcttcccaccatgccttggaactctctcatggacaagatgatgatggag

SEQ ID NO: 105159 - DNA, 127 bp, Glycine max
ctctctctctccaagttgtttttggtatgatctttcaagttcaatggctggtgacgtaggaagagccttgcctcctcctgattcagaagaattctcaaccttgttcagccaactcctccacaattct

SEQ ID NO: 105160 - DNA, 243 bp, Glycine max
cttccaactccatttacgatttcactgtcaaggttcgttttttacgtcatacccaactgttgtttctctctaattacttgaaaagattgtggcttgctcatgcccaactgtgtttgcactcgaattgtttgatgagtgtgtgaagataatctaagaagtatcagggtacactatgatgacaaaattatatttagtaggttctgattttatatttgttgtatttcaacttttatggagatcaat

SEQ ID NO: 105161 - DNA, 167 bp, Glycine max
ccattcttaggcaacccaagactttgcaggagcgatgacatgaaaactaggactatcgcctctcattgctgatcataaattctacagtgatttgtaaaaggtaactgaaactgtaactattttttggtacaagtactagtttattatttatctttactttgttgatc

SEQ ID NO: 105162 - DNA, 144 bp, Glycine max
cttcattctacattaacgatgtaaccaaatgattctttaccatgatctttattcactcaagtaaaattttcttgcagctttaattatgttatgggcatggaaaattttgttgacagtgccactgtttattgtgattttgacgtg

SEQ ID NO: 105163 - DNA, 252 bp, Glycine max
cccacaacccccattctccctcgaggcatcccaatgggctctcccaagtgatgcctcggcgacaccccaataatattcaataatattcttcaaccttacaaccaccacacgatgcctccgcatctgcatccgcggtcgcgtatgaccacctcgctctttaccaccactctcatggtctcattccttgtcgtcgcggcgccacatctgataccctgccccgtcgacccacgcacactcgccgatgctccagac

SEQ ID NO: 105164 - DNA, 235 bp, Glycine max
gagccgctcgaagagagaagattgatgaaaggcgtccaagcaagccatgcgtctacttactcaagcctctaacaagaaaaatccaaaaggaaaggttgttcctagtccatttgttgaaaccatacgagcagatatatcagagaagccggggattgtcgattacaagacacaaagtagtgatacctcgctaactgagtatatttcgctgacacatcaaaagagagtaactagaact

SEQ ID NO: 105165 - DNA, 138 bp, Glycine max
caacattaaagactctcctgttcgtaatttatatgtatcattattagcaatgtagtatttaaaatacaagtgatataaacttaattgtctgttatttacaggcaatctgtgcgaagttccatttaatcaaatataatg

SEQ ID NO: 105166 - DNA, 241 bp, Glycine max
ctaaacataaacacagcatgttaatttataggtgatgcccatacacttgactacttgtagaacagatagaactatgctcattaagtcttgcaaactttcttttgaacctttttttttttacccttttaattttaagaggaataaaagaatatggttactatagtttgccatgtggactatgggtatccctgactacaatggtgagaacttttgtttcttctttgagcatgaaactaatttc

SEQ ID NO: 105167 - DNA, 241 bp, Glycine max
cgaaaataaatccactaagaccatacaacattcggatactatagaaactgattcagaaaatcctgattgtactcctcagaggccaataactcgttctttgagcagaaagagaacgtctcccaaaaagcaactgggacaagataaaagtggcccatcttcaaaaaacacagagaagcatggagagaaaactatattctcttttgaagaaaaatggactggaaggcaagatgcttttccaaat

SEQ ID NO: 105168 - DNA, 238 bp, Glycine max
atccttgctctactcagcgtgtcttcgtctatcacgtgaagtcaattctgaaaccagaaaggatagcttataaagtcctatactaactgatcataagtccaagagttatttatctttgctgttggatctgaaatgattacagatgttcattgaggaggttatggagctggtagagttgaacttactgagggaagctttggttggtttacctggtgtgagtggtctctccactgaacag

SEQ ID NO: 105169 - DNA, 248 bp, Glycine max
agtacaataagctaagtcattgagaaaagcattcaacaccccatcaggtggcactacataaatgcccaaagtgttatttgctcctaaagctgcaagttgatcagttacggtattcctttcacgcggtgcatgatagatggtaagctcccaaggcctcctcatctgctccttgatttacattcagcttgacatagggtgtatcaggctaagaagcacggacgcggctcatcaccggcgtgttccgcgtc

SEQ ID NO: 105170 - DNA, 259 bp, Glycine max
ccagacaggttgaaatgaaggtagctcccatcgtggttttcttgttcagacacacagagggtttcgcctccgccatctcacaagctctccatgccaacccttcctcctccttcacccgccagtaacttcttctcattcactttttggtcactcaactcaacggtctcgttcattgttcattgatgccttttggcgttgcagagaggacttcttcgagctctcattggaggcttatggaatcaaacatctcaaaacatct

SEQ ID NO: 105171 - DNA, 136 bp, Glycine max
aaaatgcccactttttttcttccaacgctcctcctccttctcatagccttcgccacctctgtctccggccgccgtgacctcgtcggagactttctccggctgccctccgaaactgataacgacgacaacttcaagg

SEQ ID NO: 105172 - DNA, 250 bp, Glycine max
cagatggatgcctctcccccaagtatgaaacttcttaaattccttttactttgcttgctatgtacaatgttgttctactctgtcatgtgcagttccaagattcattgcaatgagaaggacatgaacacactcctacgcttcaaaacaggagtcacagatccttcaggtgtgctctcctcatggtttccttaattagattgttgtcaatggactggagtcaagtgtgataacatcactggaagagttacac

SEQ ID NO: 105173 - DNA, 241 bp, Glycine max
gtttcctttggctgtatggttaagaaatgttaatgaaacgaaaagaattgtggtgatgctaagcctaagggtgggtcccatgttgagatgtgaatagaaggaaatatgggattgggttcacatcaccatttttgtaccacttgaaagatttgtcgtcaaacttgggtggggctcatcaaagcactactccttcccacgtaacttcacttcacatttctctcctgcaacatttttctttttt

SEQ ID NO: 105174 - DNA, 248 bp, Glycine max
gagccgatccgaagttgaagatattctccacctgggtgtctgctgtgtgctgttactgtagctcctattcaatctctcttagttcaaccttcctgttgcatggctacggttttggttgggaaagttattcggagttaaattcgttgtcattagcatattgctgatttagcttagcgaatgaccttgggtgggagacaggtcttctagattcgtctttcgtattaaggatttttctctgaaggctgtga

SEQ ID NO: 105175 - DNA, 246 bp, Glycine max
cttttaggtaaaaaggaaaatcatttttatgaagtggctgaaaacaagaggataagtggtgatggaaaatgagttcatgaaatgtttttagcgctgattttttcttgtgaagtgcttctcgagtaccactacttatcttctacattgtcctcgcttctcactgaatcaggctgaagagtgtgatctataacttcagaggaaatagagaatttcctaggctgagaattgggattgggagtcctcctg

SEQ ID NO: 105176 - DNA, 152 bp, Glycine max
cctcctttcgtcttggagactcaacctcttcctcttctctctctctctatccgctggtgttattcttcagctgtagctgcaaggtctcaaggaagcttataaacagagagcacatctgtcttattcagttccgatggcagggttaaattttg

SEQ ID NO: 105177 - DNA, 245 bp, Glycine max
accctctgcagatgaagaaggtggatcaatgacttgcatggagttattcttcatcaacccagatttaattgattcaccctctgcagatgaagaagacgaagaacctctgcctcaagagtttgttcttgtggaaaagacagaacccgatggtacaattgagcacataatattctcttcaggtggagatgttgatgtttatgatcttcaagccctctgtgacaaggtagggtggccacgtagaccat

SEQ ID NO: 105178 - DNA, 201 bp, Glycine max
gcatttttcgtgatgtcctataatcaaatcatctacccttggattctataactattatcattagattactgttattttttcatttttgtataccagttatttgtgtaagatggaaaaatggatcacaaagaaatagagggataagatattttccttgcacaaagcagcataaatgaaaattttcaaacacggattctttaa

SEQ ID NO: 105179 - DNA, 184 bp, Glycine max
ccacaacctggaaaaaattccgaccccagcccttcactcttctctctgcagcggaggacttctagcatactgttgtttgattaaccaagttcttccatattggttgaggaagcctcgagtcaatatttagtttttgctaccatctgtgggtttctgatggatgatgctgggcatcgtgagaatg

SEQ ID NO: 105180 - DNA, 273 bp, Glycine max
atcatcttggtactcttattccacttttttaaagtgggttcatgatattagctttataatttatgtatgcatggtttaaaactatttttcaggatggtagcacaacacggtgaagagttgatgtagttaagaggagcttactatcatagaatctgaatatccaatgactgaaagaagcatcctgtctctgccccctcttctctctgccaacatgttatgtgctaggtgaagaaacaacctttccttcagctcttgcatttcacatacatctgg

SEQ ID NO: 105181 - DNA, 265 bp, Glycine max
aattgttaaaaccacaccaattttggggttctggaagaagcttcatttgagagccaaattattgaaatctgtttccactggtggaatgaattcagtgtcttcctttatgcctttaaaactcaccaattttgttttattaattgatgtatgtctgccttactagcattgtgttactgtccaatatgagaatcggcttaatttggactccattgctacagttatatgctcatgccaacctaatccaattttcctggaaactatttct

SEQ ID NO: 105182 - DNA, 269 bp, Glycine max
gagccgctttttcaaaattgtttcttttatgtaaatcaattattcccccccccggatcaacatttatggaagttacagggaaataataatgagtcataactaaattcttattactcctctatatataattgagtactttcttttataataaatagctgcagctgaaggactgtgaagatgttggagaaagttgaagaatttaacacggagaggatgatggaggaatttgagagggtgacaaaggatgctgagaggattcaaagggaaac

SEQ ID NO: 105183 - DNA, 172 bp, Glycine max
cagcagtacatattcctctctcacatccacgcctcacaagaaactgtagtccatcaccagaaccgtaacagcaatatccgcgaccatgacccaaatcaaagactcccccgaagtcaaggccatcaaagccctcatccaagccttcttcgacgccatcaatggccgccgatat

SEQ ID NO: 105184 - DNA, 267 bp, Glycine max
gctacgcacgccaaacccggttctccaccttccgaatcccactcagaccagttacaccatgctccatcatcgtcaatcaagcagcaactggctacatggcacgtcaacaggggcaacaagtctttcttgagggctatgattccgacatggtacaccccccctacagaggaggctacaaccaagaacccattcaagctgttggggatggttggacctatgggatgggctttgttcttctcgggatggttcgcgtggacatgtgacggg

SEQ ID NO: 105185 - DNA, 266 bp, Glycine max
agaaaaagttagaggatgctgctaacagtttgaatgagaagcttgctgagaaagaaaacctattggaaattttgagggatgatttaaatctcacacaagataaattgcaaagcactgaaagtcagctccgggctgctgaattgagagagagtgaaataattgagaaacttaaatcttctgaagaaaatcttgtcgtaagaggaagagatatagaggagactgctacaagacactcagaacttcaattgttgcacgagtctctgacg

SEQ ID NO: 105186 - DNA, 248 bp, Glycine max
ctcgagcgagacagtgcttccaagattatttggagtttgaaaattccaccaagagcaactgcgtttgcttggagaatcttcaagaacagattatctaccaaggataatctaaggaggagacatgtggagttgccttcttataattgtcctctctgcgatatggaagaggaatctgttggtcatgtcatgtattcatgtataaaaactaggaatctttggtgggagattttgagttgggtcaatagagt

SEQ ID NO: 105187 - DNA, 126 bp, Glycine max
gtcgcagaaacaaagcgcggcgggactctgaaatctctcactctcctctcttacaagcttgatgtagaaagagaataagatagtcttctatctccataagccacgaaccatgattctcaatcgggg

SEQ ID NO: 105188 - DNA, 214 bp, Glycine max
aatccgtatacaatcacatggtttatgatctttcattgcttctcgatcctcgatagaatctctattttaacaacattgaggagtgtcgaaaaaagtgttaaaatgctagtgtttcttgtgcatagaaataaccaaaaattaagagacaagaggtataaatggaaacattcttgtgtcaagttgcttgtaagacaacctagctgcatttacagat

SEQ ID NO: 105189 - DNA, 195 bp, Glycine max
gtcatcacggacacgtgcatgagacatctgctgcaagatcatgacggggacactgcgacgatcctgacagcaccacaagtggtcaacattcgcaaaggaggtcaggccaagaagttcaactggcggagacgcggcgacaaggtcgcaggaaacgtgaccaacggcatcaagggtgcctttgtcggcaatgagact

SEQ ID NO: 105190 - DNA, 221 bp, Glycine max
catgaactgtggcgccctcggcaagacctgtgccaaaggcccggcaaactcactggcaacatgcagcgccggcgtctgtggcttctcatgcaatgagttctacggtgtttcgactgacaagacgcgctgtgtctatctgctgaccagcttcttgaactgtggatctgttggcaacgtctgcacgcatccgaccagtggacagtctgcatgcaacaacggtg

SEQ ID NO: 105191 - DNA, 214 bp, Glycine max
gagatcgacacagaagagttgttttcatattgttgggggttcggcttttacggtcacctgcgcacattgacaaaggcaagaaacaggtattacaagttaataaatgaccttagggcctcttcattgttggttgaagaccctgaatgcattcgaatgcatgatgttgtgtgtgacgtggctaaatcaattgcatctaggtttcttccgacttatg

SEQ ID NO: 105192 - DNA, 236 bp, Glycine max
ctggactggaatctcttgatgagtatcttggcaaactaaatcgtggagcaaaccaagaacctcatgtgccatcgtatgtcgagaatcgtagtgaagaaaatttagcaccaaaacgatctcttaccaaagacattgaaagatcaaactttaggaaacgaaatgcttatgtggatataggaagactaaaaggtgtgcatggtccaaggtctgctatagattcacagcagcatgttgaa

SEQ ID NO: 105193 - DNA, 99 bp, Glycine max
ggaagagttatcttgcttcctgatgcagagctacagacttcaggtgcaaaagctgctgcatgtggtcacttatcatcattgtctgcagtttctgataaa

SEQ ID NO: 105194 - DNA, 213 bp, Glycine max
cctacgaccgaatcggctcgagctggacaaatgctcacttccgcaaaaatcaagttacaacttcttccaattaatgaaggaacacggataggacttgaaaaggatgggcataatccttatttagaactcacacttagaggtcgaaagaaaatatgttcaatactaaaacaccttggaaagaagtggggaagttcaagtatagccaaaggggag

SEQ ID NO: 105195 - DNA, 210 bp, Glycine max
cgagaagcacaacggcggtctagtcgatagagcagtcgatgccgtaggtagtcaagctgtcggaacttctggaaataaagaagaacccaatatcgtccttgccaacttgatcagagttgttcgacctactggaggtcttggtattccaggactctacgtcccttctgacccaggagcgcccgattccgccgctgcccaaggaaatttggt

SEQ ID NO: 105196 - DNA, 210 bp, Glycine max
cactgtttcaatttcattttcaattttcacattatctatatgtctggactgaattttctaacaaccagaattttccatgaaggtaactagagtttggtctttaccattaaccatttcataactctcaaccaatgaccatatgacaaaaaaatactatgctacctgtttcagcttttctgaaaagatgaagcagaactgaagtttgtagtg

SEQ ID NO: 105197 - DNA, 277 bp, Glycine max
cggtccagctttccaacaatgcagctcactaccttcatttccgtcgcctcggccgtggtcgcaaccgcttctgctgacagcttgaggagcgccgtcaccctgaacaaggactgcgacacgaaccagccccacgctcgcatcgtcaaccgttgcgactacgatgtcaatctttggtccgtctacaagggcgacggttgcccttcatccggcatggtcactttgaagaccggcgagagctacgccgagaactacgctaccgctgaggacggcaagactg

SEQ ID NO: 105198 - DNA, 278 bp, Glycine max
gttcgtacatcaacaccactttccgcgtgctcgcccgttgaagtttgcccctcccactcccgagccggaagtcgcctagctctcgcgtcattctattcggcgtccagacctagttgaacaggtgccttgcctgcagcctgtcctgtatccgagggtacctatcgtttggtgtaagtctgcgcaaacaaatgtcgctccgtcgcccccaattaactctgcccttcagatccgccattccctccacgtctgtcacgtactacgcgccgacactattcctg

SEQ ID NO: 105199 - DNA, 277 bp, Glycine max
aaaagaaagtggctagtgcctaaaaatgcttgatttgatgacttgatgagtctgtaggtttggctagactatttttatttgattggaaatgtgttacttggtgataatggttatctatcagtttttaagtgaaatcaatggggtaaagtgtaatttttctttataattaaataacaataatagtggtaatggtaatacaatattgatggcactctgctctaccttccaaacattttatagagaagacatggtttctgattttcaagttttgttcccc

SEQ ID NO: 105200 - DNA, 270 bp, Glycine max
gaggaatctgcttgtctagggaccagaaaacgggtcagaactattccgtgtgttgatgacactgaagggattgataataacatgagtgatgatcagaaaaatgacaggagtattctttcaaaaactccacggtttttgaataatttacagaaactagagtcagcatactttttgacacgatgcaaatcagcctattcctcagggaaacttgcggttcaacattcacctattggtactgatgaaaggagtcgtgtcaataaagtagcatta

SEQ ID NO: 105201 - DNA, 125 bp, Glycine max
agcacatgagaggactgttcacactgatgtcttgatgggcttgctaaaaaatgtacaacgtgctcggtcaagttctgtaagtggtggtcagggccttatttttggacaaagagtatgaataagtt

SEQ ID NO: 105202 - DNA, 146 bp, Glycine max
cttgcactcaaagttgaagctgagacaatgctactactagtactaactcacgtcaagaatcattggttaatcataggagttatcatcatcatcatcatcatcatcatcatcaaggtttcactccgcaattgtggttctcaggttct

SEQ ID NO: 105203 - DNA, 271 bp, Glycine max
ttaaaaccagccaaggagggcataagccgaaagtgcggactgctctgttcgctttaaaatcacctgataggccatcattatgaggatctatgatgaatttaaagagatagtgaagattcagaagttccgaagattggtgtcgtacagtgggttctactgcttcgctacgctcataagctacttttacgtcaacaacacgactagggctggtttctctagagccgatcaattctacgcctcctaccctgctggtaccgagcttctaaccgac

SEQ ID NO: 105204 - DNA, 100 bp, Glycine max
gccactttctgagtacaatacaacactgccatggctgcctcagtctccactacttggagctgtcaacagatgctccactcgagcttgaaccagctctgaa

SEQ ID NO: 105205 - DNA, 243 bp, Glycine max
ctgaacttgacatcatcaaatagaatcacatctaacattgcatctgaatatcaaaagtctgttaagaagggatcactctcttttgcttcagttgatctaagccgatttacgcagattgatcaaataaactgttttcctgtatcatggtttaatcgttctaagactaaattgctttgccgtaaatgtggggttcatattggttatggttatggtggagaatcacatgttctttgtggatttgag

SEQ ID NO: 105206 - DNA, 267 bp, Glycine max
ctcagctaatgttgggaaatctgctttcatcaatgctttactaagtaagttatatttccatgcaatcctaaatataaggacttggcttgtctgtcttctatgattgacaattgctgtgagtgctaaatatatattgcttttatatgttgaattcctgtgttgtcttgtacagaagttggtattagtttctgcttttatggtcatagtttgcattgtgcttgaacactttcattctttcgatgctgaacatgccccattcaatccata

SEQ ID NO: 105207 - DNA, 240 bp, Glycine max
tcgtggatacaatgaatctgacattttcatgctttcatctttttctgtgattgttttgcaggaaagcaactaatggtaaaggttgcagagatggtacctaggcatcatggaaggaccaagaagcaggatcctgcatcaacatcaactgctggaccttccaccaaatctgggaagggtggaaaaaagaggagataattttgtgtttgaacattgtcttacatgtgtgatttcgagtgttgt

SEQ ID NO: 105208 - DNA, 271 bp, Glycine max
gtttcaattatctcaatgagagcataatggaacttgtgggcgttctcccatctgtcaagaatttaattcttgctgctaattttatcagaggaccctttttgaaagaattatcacttttaccaaacttggaagtgttggatttgcatatgaatatgctcggcaatggcagccactttgcaactgaagattataaaaacaagtcaacattgaaaaagttgaagacattagatctcagtatcaataatctcaacgagagcataatggatttgtt

SEQ ID NO: 105209 - DNA, 271 bp, Glycine max
cggtgcttaagaatatttcagtgtcttttaggaacattgtcaacttatacgtagagacaagtggtagcattgtgcttttaacctgtgatttcttgtcccaaatacagaaaacattacaggtttttggtggaactctacttagtttggatgttatgacttcatacattagtattaacgtccatgatttgtttttatttcgtcagcactatgtacatttagaaactctaaatatttcttctcggttaatgtccctacattgccagattaacaa

SEQ ID NO: 105210 - DNA, 263 bp, Glycine max
tgtttattattactacttgaatatctcagtctttcacattttcccatcatctgctaggtgaaagaaggaatcacttctaccttgtatggatcaagaaatcttattagttacttttttggtcctttattgtagaattaaattgatatatttttcaggtgtaattataagaactatagattcattttcaaatattaatggttattttttgtatattattaatttactatgaagtctattaataagatactcactcattttatata

SEQ ID NO: 105211 - DNA, 280 bp, Glycine max
gtcttggcaatttgacatcacttcactctcttgatctctgctttaacttcttaagtgggaacccggcaccttttattgggcaccttgtctctatcgagaatctttgcatatctttcaatgaatttgagggcatattctcattaagcatttttagcaaccattcaaggctcaagagtttgctaattggcaatatgaaagttgacactgaaaatccgccttggatcgcaccatttcagttggagcaactagcaattacctcttgcaagttaaacttacccac

SEQ ID NO: 105212 - DNA, 177 bp, Glycine max
actgattatatttatggttttttgttctgtttatggtttcatttattgctagttactgaatatttatgaattatatatgggtatctcattaaacctgttaatgtctggtaaacagtgctaatgactcttgtgtatatggatttgggaaccctttgtgccctatatattactacatat

SEQ ID NO: 105213 - DNA, 230 bp, Glycine max
atgataataaatgctgctaagttgctgaaagttattgtgccacacattgatgcaaaggttgcttcaactcatgttttgcctgcccttgttactcttggatctgaccaaaacctgactgtaaagtctggtagcatagatgcacttggtgctgtggctcaacacttcaaaactgagatgattgttgacaagatacgtgttcaaatggatgcttttcttgaagatggttccca

SEQ ID NO: 105214 - DNA, 130 bp, Glycine max
cctggttcttcaattcccacctctgtgccctcttctaagggaacaaaaaggaagtgggatttaattgatggatgtatgggtcaaagagttgactcttctttgtacattgggcttgggcgttcaagcagtt

SEQ ID NO: 105215 - DNA, 189 bp, Glycine max
atactccactaaacaccaccagcatgtcccacttagactccaacacactgcacaccgcgccactacggccggaccagatggcatcccagccctcgcggttagcaacaacgcaggcggtttgaccacggacgacattgtctccccggcctcgaacaaccccttcctcgctcagaacggtggtgaggtagt

SEQ ID NO: 105216 - DNA, 149 bp, Glycine max
gtaggactgtggtatcagaattcagaatgataaacagacgaattttgaaggattgctctgcttcaaatccctttgtcaaagtcaatgtcacctcaaattctagcttgtcagatgacgagttcgtgacggtcacagttactggggtttcc

SEQ ID NO: 105217 - DNA, 99 bp, Glycine max
gtttactgctgagtggtgttacaatgttgcgccatttggacctccatgacaaagcagaacagattcagaaagctatcctcaacacgattgcagaaggga

SEQ ID NO: 105218 - DNA, 247 bp, Glycine max
cttcgagttgtttaataatagtagcaattaatttttttaaatgcttagtagctgtgttgtatgtttacttgtatctccccattgtcgggtttcatatatgttttcttgaatgattttcttccctgtatttccacctccttcctggattggagaggatttgggattagtggttggtggtgatactgttaagtgttttatctactcgtgaaatactgttttttatgcagctttgctaaagcacctgaag

SEQ ID NO: 105219 - DNA, 206 bp, Glycine max
tagaacttttcaagatggtttgtgaagaaaatgaaactgatgttgatattggaatacctgcggtcatgcttccacaagatgctggattgaccttggaaaggcatatagaaaataaatccaatgtgtcaatccagttatactctccactgcgtccattggttgatgttgcggaagtgtttttgtggcttatggctgttggtaccatt

SEQ ID NO: 105220 - DNA, 284 bp, Glycine max
ctaatctacgtgtttaatgatttcaacatcttttaaatttttgtgcagtatattcgtcctaaactcggttgtcatccctgcattgtggtggatattacctgaccaaagctcacagtttgtttctcataaactctgtgacttaggtggcactttgaaattttattctttcgtacgtcttgcactcattcagctcttttatgtaagtatggatatactattttttaaagtgcacattgactgtaaaaagtactttgttgcattgctctccaagttcattttgtttg

SEQ ID NO: 105221 - DNA, 279 bp, Glycine max
atatctacaaactttaaaatgattaatttttgtcgactttcacttcctgttttttttatccagactcaaacctaaatcttatttaagagattcacattataaccaataactctgttggttacactgtcaccttataatcattaaacgcttactatattcttatatgtttattttatccttgcctgtcgtactgtggttttgaaaagcacatgcagtgggcacgccttggtcacagcctcattggagaaattagcataatcactgatacaccgcgttgat

SEQ ID NO: 105222 - DNA, 211 bp, Glycine max
attggtgattgcatatacgagctatatgcccgtaggcactttttattccctccccttagtattgaagaatacaatgatcgtgttatggcagttgttcgacgcgaactcctgatgcattgctgcagaaacttcttgagagtagcttcttatcagatcacgatacggatgttcttcgatggggaaataacattgtttccagcaaactaagacg

SEQ ID NO: 105223 - DNA, 271 bp, Glycine max
cccttgtgggttgaattttttgataacccttgttgatgggttgactcactttttttctcttgggctgctctgctgttcttccacttgcactcaaatactacttgaggtgagtgggactcttgcacatgccagcaacactcttcagcccctctcaatatcacttggacattttcttgttctgccttttgtttctcactctctgtgtgtgtattggctcgggagtctcattaattttccttccctggttatcttgtatgatagtagatgtata

SEQ ID NO: 105224 - DNA, 154 bp, Glycine max
  unsure (1)..(154): unsure at all n locations
nataacacttcagcctgatccatgtttaaaatcaacatgtgtgcatggcactaaagctttgctgttgtacgcttcaatatacttgctagcacttggtggtggtggaatcagaggctgtgtacctgctctcggagctgatcaatttgatgaaaac

SEQ ID NO: 105225 - DNA, 264 bp, Glycine max
ggtgcactgtgtctgtgtgtacgtatgactttttttttgggtgaatgtgtgtatgagtgtatgactatgttttacgtaaaatacgttaattccttaaccttcatcatgtcactctggttctgcaacttgctgaatttgggaacctttttctttcttggataagaagacttcttggttttcggaattgctattaagggataacaaataaagtttccatatacggccaagaattaattttacaaaacagctgctaccactccttcg

SEQ ID NO: 105226 - DNA, 148 bp, Glycine max
ggaagaggagttgaactccacgcgaaccgcgcatttggaagcagaagaacaaagattaggagttgttgatcaagattctcacaatttaaagttggaacttgaacgagtagaaaaggagctccaaagagtaaatgagcaagttttgtca

SEQ ID NO: 105227 - DNA, 256 bp, Glycine max
gctttttgtgtcttcgcaaactgagactaaatctcttcctctcccaaactttcttctttaccaaaacagtttaaccaatatagatttgagtgattggaagttggaaggagaatttcctctttggttgttggaaaacaacacaaaaatgaccgaagctttgtttaggaattgctctttcaccggtacttttcagctaccatgagtcctcttcctaacatacaagcaattgatgtgtctgacaataccataaatggcc

SEQ ID NO: 105228 - DNA, 274 bp, Glycine max
taaaatttgatttaatatacaaattttaaaagcatgcaaaatctcatgaatttttttttaaaaaaaattcaaatattataattaaaatttcaaagttcaattttatttttaaacgccaactctaaatttaatctcatgcattaaacaaatacttcaaaactttcaaacgcttacttactttttgattattggtgtgaataatatttattatttttttcaacaaaaattctttgcttaaaaattgattggatcacctttaataaatttttatttc

SEQ ID NO: 105229 - DNA, 283 bp, Glycine max
tcggctcgagtatccaccgagttgccttagatccccaagattgcaggatagggaatcctcaacaaaagtaacactaaatggagaataaaaagagacagaaaggaatctccctgaatcttgtttaatagttgtaaggaaggaataaccaaaccattacatcatacaaacagttttcatggggaagccgacagggaaaaagaaagatccttcgactcctcagaaggcgaacggccaccaccacaacccgtcgaaatccttggatgacagcaacaacaacaaacgc

SEQ ID NO: 105230 - DNA, 174 bp, Glycine max
attttgtgctctcctttgattttttctgagagaagtttgatgaggtaatgcttcccgagtgtttggctcgttcctcctctgattgcgtcttgctttgtgtcgtcaaaggtggtagccaccgccctgctgtgagcccttttcttatagtctgccacttccctcggatgaatggga

SEQ ID NO: 105231 - DNA, 271 bp, Glycine max
cagaattggattgaagatttatattggaagcagcatgatataaattatccaggcatggatgatgcaatggtacaccgtggtttttataccgcgtaccacaatacaacaatacgtcctgcaattttagatgctgttgaaagagcaaagagttttatggagatattgaaattatagcaacagggcattcaatgggaggggcaatggcttcattttgtggacttgatttaacggtaattataattttagctgtcttggcatgactgggcattat

SEQ ID NO: 105232 - DNA, 263 bp, Glycine max
ggaggagttcacaaggtgcgccaaactgaactgattttccattgagatattgctgcactacaagccaagaatgagcttacttttaagaataagacattatttacccaagggtttatgtagacaacctcttcatccaacagtagtcggcttaacgctagtaacttaaatgtattttcaagacattttggtcaacctgcgaggaaagaggaggaggatgatgtagaggaagtggaaattgatcaaaaatgtctcccagctgattt

SEQ ID NO: 105233 - DNA, 201 bp, Glycine max
cgacgaggttacaagaccaccatcattatgggtctctgcctctactcgcttggtgctatcctcttctggccagtcgccaaattcaccggtaaatcccccaaccaggccatctttggtggtttcgtcgtctgcaccgccgtcatcgctgtggtttggcctcgctcgaagtcgccgccaactcgtacatctcggtcatcccac

SEQ ID NO: 105234 - DNA, 271 bp, Glycine max
gttgtaagcatgggaaaaatgatgcagagcattgactattctagacttttctggctattttttgggatcttctctcacgtaaatcatgaaggaaagcctaggatataggataataccatattgaaattttgttctgctttcattttttcccttcttgttcgactctgcagtctgcacaattaagttgcagcgtaaaaaaattatagtgtttcaataaatataagaggtggttgcgaagttggtgcatataaatacgaatcaaacatgggag

SEQ ID NO: 105235 - DNA, 276 bp, Glycine max
cttgttttggtatctgttttagtgttttttcaatctttgcttacaggcagtagattactttattaactgtgtattaacaagtcatcgtttggaggctatagatggcgatgcaaaccgtttacctgaaagaacatgaaggacttgtctacattctgttggacagttgtcatctgtaacttcagctccatggtggagtgccttaggatctcaaccagtttatggggagtattgtggtcaaatcaaacccttttcgttggagatttccaactacgtcga

SEQ ID NO: 105236 - DNA, 263 bp, Glycine max
cctaaaaatgagatgcagtggccttggtgctgaatggggaaaggtatcattgtatattttaacttattattgcctatttatctagtagtttgtgtatggtgaccaatgggggcaagtttatcaatgagctccttagctgcagtgttgtgtgttagttttcatagttctggggcaagtttatcaatgagctccttagctgcagtgttgtgtgttagttttcatagttctctgcactgtatctctttgtctctctcttttctgtt

SEQ ID NO: 105237 - DNA, 260 bp, Glycine max
gggacatgcccatcaaaagaaaaggttctcccatcaagatcttaatgttgtggcctgatgctagcttgaaagaatctgccactattgcctttcagtctcactcaacttttgaacacattgacattccctcagtggcaaaacagaccccagaatcttgaattctgcagatgtggcaatatttttggcgcctgagagttcccaattggcacccataagaagagtgagtgatgccttttatccaaagccagtggttttgttta

SEQ ID NO: 105238 - DNA, 265 bp, Glycine max
gaaaaagatgtaggaaatccaaaaatacaatgactgcccccatttactttctcgtgggggatatgatttgcttgaaaagaagctattggacgagaaaatgaagaaaagataacatgacgcaatgatgactaagaatacaccacacattgaggatcctttatctcccattgaaagacatgttaagtggaagttggcacgcacaaagcgatatgagcagatgacatttcaggcggcacaagaaatatctgataaaattggagattct

SEQ ID NO: 105239 - DNA, 141 bp, Glycine max
ggctcgaggattaaattatgtatccacgtgcatcgatcttttattatacacttattagttttgtagataatcccaagatctggtgcaacaataattagacatggcaatggggtgggatagagtgaatattatttttctaaa

SEQ ID NO: 105240 - DNA, 232 bp, Glycine max
gtaatattgggttgttccggcaaccgtcgtcggtatctcggtggtagtagctttcttatacttacgtaagaagtagcactacacaagtctgcaattcaatttttttgtcattgttacaacaaactttgtattgctatgaaggataatttggcttatttcaaaacagtaatgattgattatatgcatgatattacattggaggtttgataattaaaaaaaggtctttaggatc

SEQ ID NO: 105241 - DNA, 253 bp, Glycine max
ggagagtacaacatgtcccagcagtttatatctcctattggagggatgggggttgggatgtctactcattagagacattaggagagagagagagtgattccagttctggtactgcaaagagaagtcttgaatttgtacactctggaaggtttaactttgattttttcttttaacatacttgcatgtgtgagtgatgacaattttttgttgtacatcagcttgcatatgcaagtgaatgtagtattttgttttt

SEQ ID NO: 105242 - DNA, 236 bp, Glycine max
caggctttttctgtatatactggattcaacatggtcaaaatgcgttccagaggaggaatgcctgttgcatttgttgattttgaggaaactgaccaagctgctaaagttgtggaggagcttcagggaagcttgctgccacatcagatcggggtggcatgcacattgaatatgcaaggtctaaaatgaggaagcgttaggagaaacgggagctagacagtttccggataatttggttg

SEQ ID NO: 105243 - DNA, 121 bp, Glycine max
cggcttctggttgacgctcaatgccccgggcgtgatcaagagcgtcctctcgggcggcggcttcaactgggtcctcatcgacgcggaacacggccagatcactgactcggactactatgtg

SEQ ID NO: 105244 - DNA, 147 bp, Glycine max
cgacatttggggtatgttaagtctatacgaggcatcatatttaggtgcaaaacgtgaagaagtactacaacacgccatggacttctccaaggctcatctacaccagtcactgccacacctaagtcctgaactacgaaagcttgttgc

SEQ ID NO: 105245 - DNA, 169 bp, Glycine max
caacaacctcgtttcaacgttttcactttcatctctcatcatccaaccacaccctcaggcccaccagaatagtttctagtgctcaacaaaatgctaaagtaacccagagagtgtccatggccaaggcacaggccaaggttctcacggaacttcaagtggaagacgtgga

SEQ ID NO: 105246 - DNA, 163 bp, Glycine max
ccaggtctttaaacctcagatagagacaacaagactggagtatattaaacatgatgacttaatattaagactttttcaacgtgttgaaaaacaaactctgcaaaagatcctcaccgacgatgggactcccaatgtagctgcaataagtgggttgtatcatgaa

SEQ ID NO: 105247 - DNA, 161 bp, Glycine max
  unsure (1)..(161): unsure at all n locations
agataacacaattagagattcatatcacactttaaaactttgattgaatcttggttctactttacagataatactgcataattgnaacactttgcgagagcttagataacttggatgatccagaagccaaggcatcaatgatctggataattggtgaatat

SEQ ID NO: 105248 - DNA, 130 bp, Glycine max
gctgttttatgtggaaagacgtcttggggcatggggtagcaattgttttagctgcaagtttagcatctcagtacacatccctggtgatgattggtaatcttctggaaatggtaaatgtttctcaaaattt

SEQ ID NO: 105249 - DNA, 165 bp, Glycine max
ccggtcttccaaaatgctgttgccaaaggagttagcaatatcagctttggagaccttttaggaaacttaggaaccaccatgtataaattcaaatttaggataccatcatacttctctctggtcattagaagccttgctgtactggaaggacttgcaatcagcttt

SEQ ID NO: 105250 - DNA, 196 bp, Glycine max
gtttgcaagcaatacaacgttcctcccctgttggacagcattttcctgtttcttttgtaaactggactactaataagtttgacaacttttaagcctattttatatattccagttgtgtctagatgttaccaagtgtaacatgtcattggttaatgcagaaacaaatgtgcagctgtttttgtattcgaataacact

SEQ ID NO: 105251 - DNA, 160 bp, Glycine max
ctcaacgttccttctcagttatccgccgtcatggctgcccgccacgtggagcgtcgctcgcccaaacacgacgacgccgttcatgtcgttttgccggacggggaatcgtggtgtgctcaagggaggattgtcgaggacttcgtcatggaacagtccgtgc

SEQ ID NO: 105252 - DNA, 175 bp, Glycine max
actgccttagttgcaatcacccctagcccatcttaattgcagcttctttgggctgcgtaacagtctcaagcaccttcattgtactgggtgtgagtggtcctgttttgtcccacatttcctagtaatatggcccaattgtagtcctcaccttacaagctggttttgtgggggtgag

SEQ ID NO: 105253 - DNA, 195 bp, Glycine max
taaaaatgtatttcttccttttgtatttataacattttgctttttgaaattgaaatctcatctcttgataggtaatcaagaaaatgaactatgttgcagagaaaggggactaaggtaatatcattgccattatacttagacagaagcactgagtatcacttatatggctctgcatttccaaattggagtttggtg

SEQ ID NO: 105254 - DNA, 254 bp, Glycine max
tgacttttgataagatggattgcattgattgtggaacagtttggtaagacctataaggccttaactatacatagttgccctgtcacatgaaagtagcccttagtagtcaattgtgcatggtagcactgctaggctttttgcgaccctctgccatttctgtgtggctcattgcggatcagttttgtgtagctttgcaaattgcaactgtttttgtgtgaaattgtggccatcttggcacttattctttccacaag

SEQ ID NO: 105255 - DNA, 166 bp, Glycine max
tgattgtctatgctatatgttttccgaatttagttacgattcctgatttaatctttctgctcattaaagtaaggctttgtggtttaattttcttaattgaggtattagggcttgtagtttaatttcttcttctcttcttcttccatatttgaggtattgcggtttg

SEQ ID NO: 105256 - DNA, 189 bp, Glycine max
cacaaactcagggtagggcagagagagagagagagagagagagagagagagagaatgggagggtgggctatcgcggtgcatggtggcgctggtgtcgaccctaatctcacactcgagcgccaagaagaagcacacaacttctcacgcgctgtctcaatcttggaatctctgctctaaattctaatcttc

SEQ ID NO: 105257 - DNA, 154 bp, Glycine max
gctgtatcaagaagcgaggtgcattgtgtccttgactttgtatctacacattcatatgtctagttttgtgtgagatggaattatatctctgaagaatgaatgaataattcttgtatttcctggaatgtagttagtaacgcgtacttataagatt

SEQ ID NO: 105258 - DNA, 151 bp, Glycine max
gtcgaagatgcgacggcggcgcaggcggcgcatacttccagaccgacgacggcgtcgcatgaggctgtcgttgcgccgccggaaggcgagatgcaggcgcaagggcatgctgcgtcgtcaaattcgcatagtcgatgtcgtttccaccaca

SEQ ID NO: 105259 - DNA, 233 bp, Glycine max
tcacacactctcgttgtcgcgaataccagcatcaacagtcttgcttacttgtatatttgaagtgactgatacctcgctcctcagtctcctccgcgtcgttacttattctcgctgtcaagtacgcccaatacataataccgacaaaaccacttccgaaaatgaagtccttcgttgctgctggcctcgtggccgctgttgctgcctaccctcaggcctcttccgatggtgggtgt

SEQ ID NO: 105260 - DNA, 249 bp, Glycine max
tgcagatatatgtgtagcactggatatctgtcatttgatgggcattttgcttgaaccatccgttgccattgaaggcattcaaatggttttgagctcgccgaactttagtgctttatcttatgaagcaggcagcttgcatggatgcaacgctttgtatcccaggtagatctactaccacagggagagtcaggtggcctttcatgcagagagcatcagaaggtattgactcgtttgtttcgcaagtacata

SEQ ID NO: 105261 - DNA, 184 bp, Glycine max
atttctcctaagaaggagttgtcttcaatcacttctctgtctgtgtcgaatcctaatccatctgatgtggaagcagcgggaaataagaaaaaacggatatttgatatgaacttgccttgtgatgctgtgtcgttgagttggacaaagaagcattcactgaaactgctgttggtaagacaaggtc

SEQ ID NO: 105262 - DNA, 236 bp, Glycine max
  unsure (1)..(236): unsure at all n locations
ggctaagcgactactgacagattcaaatccagctctacgtgaacgtctcatacaggttagtaattctgttcaaaatgcataagcttttttgcatataaattttattctgtataatctacattcctcaattaaaagaggtcacatnttttgtgatatatatttaaaatttggaatcaacgtcaagaagtatcatatgtcgggtaagaacttttacaatggcaggttttccttgttga

SEQ ID NO: 105263 - DNA, 202 bp, Glycine max
gtgtgttttcttcgttttcagttttttttttaaaaagttcagttttaagactatacaataccataacagaaaactcaacagcacagttctgttaacactaaacagaagtatcttcagtttgtttggcaaagaaaggacggggattggcctaattagtctcgaatgatggttatgtgagtgaaaacaaagaaataggtgaggt

SEQ ID NO: 105264 - DNA, 209 bp, Glycine max
aaaaagcccgtcatgtccgaaatcaacgtcgcccgtctcgtcaagctagacgaacccctcgaactcggcaaggtcgccaagcctactccgggcccgaccgacgtcctggtcaaggtcgaggcctgttgctcgtcccaaactcttataatctcgtcactggcaaggccaaactgcctattcctgagctgccttgcatcttcggactggac

SEQ ID NO: 105265 - DNA, 248 bp, Glycine max
tctaaatgtctttatgtttttatgatgttctactaccgctattatgctgagctgattatctgatttttttgtagcgtttatctcacttgaaatcacagggcatcaaataattcagcagatcatactctgttgttgactttagttgttttgaatacattgcattactggttgtgctgaaaagtgatgttactctagattttctctttcaaattggtgaggttagactccaagcaactgttgttaagatc

SEQ ID NO: 105266 - DNA, 240 bp, Glycine max
atttaagctgttttctagtttgttgacacaaaaatatttttacagtaaaagtgtagcaaaattaaactcaattcttttacttttatagacgataatggagagtgtttcagtgagtggagaagttggtggtgctggtggagcatactcatatgaagcttgaaaagattagaccagctatggtcaagcatatgctcctctcaagaagttgtgcaagagcctcagcaagttgtctctaccatc

SEQ ID NO: 105267 - DNA, 220 bp, Glycine max
ccaactctcactgctgtaagaattcccactttccaccaacgccatctcacacaacacttcacggcaccctcttcctcttccttacgcctcctcaatctcgcaaaggtaacaactaacaacacattacaccacaatcttgtcttcttctttttttttttttccctttccctttccagcataggtccatgtcaaaaccacacatttgccctcttatttattt

SEQ ID NO: 105268 - DNA, 179 bp, Glycine max
caatttatgttcaggtttaagtagcgtgacatgtgagaaactatgtattttccaccatttttatagcatcatgttgactccaccttatgaagatatatatgccccccagcatatcgataacttttttactttggccataaattattttgtgagaatcaactaaggtaagaatgtaggag

SEQ ID NO: 105269 - DNA, 107 bp, Glycine max
ctgcagcaggggacaatcaatttccttttggtttcgtaacaagttcccagtgatatctctctgtcttgctggactcatgcataagcacccttttggacttaaaccta

SEQ ID NO: 105270 - DNA, 266 bp, Glycine max
cagaatacgagttatatctcaaacatctagtaagttcgagtttcatatctttgtgagtattattttttaagtctcaaaacctacctagttcatctaaacttttgtaccataataacaaaaaactagtacttgaatgagaaaaagaaaaggtgagtgactgagtgtagctgaagccttttaacattgatgttaaaattgacatttgggtggtttttccccacagttcccctccagtcccacagagagaaccaaggtgagtgataatc

SEQ ID NO: 105271 - DNA, 270 bp, Glycine max
gttcacacagtctgagaagtcgcggaaaggcatccatgtcttgcgtctccctcgcatcgcctggctcgccgtatggaaactcgttcggcagttcctattcgtcagaactgtcgaatggttactctacggcaccaacatcagtagccaacagcccgcccggcactcctttctgggatgagaggacccgcctacgcatgacgacaccagacgttccatcctcagtacctctcccttcggcacgacgacccttcccccgggatggcaccgagg

SEQ ID NO: 105272 - DNA, 248 bp, Glycine max
cgccagagggttgcatgagagttctccagtagttaccaggtatgagaggagaaaagtgaggcatgatagttatgaactttgaaagggttttctacaagcttaagcccttttaaacccaaaatacctccataaaattcccctttaacattaatatttgaccgcattctcaggatttttgacaccataagcatagcagtgctaatgtctcaatgaaatgcccccattgcagccactactgtgaagtgtga

SEQ ID NO: 105273 - DNA, 280 bp, Glycine max
cgcccattgacatcgctgctcctgcgcgccgggcattcagcacgacgacatgcacacctgagagcgccagccgcagcagcgaggccagcaaccgccctacaccctccatcgagcttcactcgccatcgcacactctgcagtcggcagcctctgccgtcctcgtccgataccgcacaatctttaccctcgtcttccacgctgggagcaccaccacgcttcccatccctgcccactccgtcgacacgcacagcgccctcgccctcctccgctcacagccctc

SEQ ID NO: 105274 - DNA, 264 bp, Glycine max
taatgaaatttcaatctctataagtagagtttatgatgtactcattttaccttgaagttagaagtgattgcctcatgttagaggatgggttgtccaaatcctgtcattttactgaaatgatggtgcctacatggaagtggcattttatttacagttttacttaaacatatttttgttcacccttactatacatgtttacatgtgctgctcttacactggtaattgtacattatatttttcctgtatatgcagaaatattgtttt

SEQ ID NO: 105275 - DNA, 231 bp, Glycine max
gaaactcatctgctgaagcagcgtgtatgggctggccgtatccccgtcgtgttctgtctcgacccgaatgaggtcactacacttcatgccccacgtccattctacgcgatgataccccgtatgagctatttagtgtcccagactcgcgatgtggtcgagtattttcgagacggcattccacctatgtccactatgcaaggtgcatccatctggtttgaagcaaatggggtc

SEQ ID NO: 105276 - DNA, 261 bp, Glycine max
atctgatataaaagttaaaaatgaataaatagaataaatgttactagaattccgataaagataaatttagaaagatatggaaaacatttatgctctggcaccacttggcattgcaagaaaacacaacggtaatgcattttctttgaatggtgtaaaaagatcagtgtggggcatattccaacatcagatttgttatgaattgtggattgttaaaaacagtagtctattttgttttgatgattgaactatagcataatgaca

SEQ ID NO: 105277 - DNA, 264 bp, Glycine max
cagtgtcaaaggttacctcaatgaagcgattatcttctaaagcatgggataaattattgtctaagtatggtgggggaccaactctttctcatgaagactgttgttgggattgtctgattgatggggctcagaatgtcgtgtcagctgacacttatcgggatcaaagagaatcattgaagcgacttgcacgggatattctcgatggaaattgtgaagacggaatgtactatgtgtctagaccatggttgcagcaatggtggaaaa

SEQ ID NO: 105278 - DNA, 253 bp, Glycine max
ggcacgtacaaacgtatcagccacgtgctagccaagaatggcgcgtcaaagcaatagccacacacatcaacgttgtacaaatctagatgccacaacctcggtgaccttagccgcaatgtccaatgtcaaaaactgttgctttcgtctggatcagaccaatgcctcgcctgctgtttactgcgaaggctacgcgcgcattaagcgccgcaacgtattgacctggaacacacgctttctagtactaagtaacaca

SEQ ID NO: 105279 - DNA, 258 bp, Glycine max
agaaggcagaatgggtaggaaccgatagagtgattggttgtggatttgatcctaggcagaagaaggttttcttcacattagactcagagctaatgcatgtcattcactgtcagacagaggaatttggtacaccactctttccaatcttggctgcaaacatagacattctggtgttagttaattttggacaaagtgcatttaaatatgcacctgcaaatgcccagagaacaccaaatccatgcttcatagccccacttg

SEQ ID NO: 105280 - DNA, 218 bp, Glycine max
ttcttcttcttgtttatatctctcttttgttctctctctctctgtttcttcttcttctactcttgtccctgctcaaaatccaaccacacactgcacgcaaccgacacttcagcttcccttttcttttctcaaagtcttgttctttgtgtagctatcaacagaaaatttcttgaccgtctctgattttttttcaccacatggagaggcccttttttggc

SEQ ID NO: 105281 - DNA, 250 bp, Glycine max
cagccacgcggtagttttcggcacggataggacgacaagggatagtcgtgaaactggttctttatagagtaaaagaagagcgtatctgctgccaatttaaagtatgcggatgagcatctgacaataaattttacagatcatccactgtaaactcatatatcaggaaacttggctacggatagaatctgattccgaggaatttgttgctaaggatacaggaattgcatatgacatatcatgagctggtgtg

SEQ ID NO: 105282 - DNA, 208 bp, Glycine max
gcaaaaacagaagacaaaggcaaaaactagtaatatttgacatctcacaatcttgatagtcacaaatcactgacacatatttcagccatggcagttcggagaaagttcttcgcgaattagtacatatgtctcccttccttttgtaaatgaatttaggagctcatggttttctaaatctaaatgcatgggtcattctacaatttttatt

SEQ ID NO: 105283 - DNA, 256 bp, Glycine max
cgaagtacagaaagcgtgaaagatgatttgaatggtcttgataaggctgtcagtgctgtcctaggagaaagaaccattgagcgcaacctcttgttggttaaggttgcaaaaagcaaactggcaaatcgtcatgatgataaaaatgaaaaactcaccaaacctgaagagcttgttcgcttatatgatctcttgctacagaatacagctgatctatctgatttagtcaattctggacaggataaaaagccagaagaag

SEQ ID NO: 105284 - DNA, 255 bp, Glycine max
gaaaaaatattcatggaaaaagaaaagtgaatcgcacaaagacattacaaaatgaagactttaatctcttattcttctctctaacgcttgacaattctatcaaagcaaatcagaggaaaagctcgagggatctcaggaaattgctagagatgtcattatcactgtcagaatacacacgtaagcctgcttcgaggagggagaggccctgacggattctttgaagtgtaggccttagagatgattaaatgaatgact

SEQ ID NO: 105285 - DNA, 259 bp, Glycine max
ggaactggtgaaagtctttctgattgtgataaagatgaagaggaatgtcaagaggaatgtacaaagtctgatgaagaaagtgaagatgggttctttgtaccagatggatatctttctgaggatgagggtgcacaagtggacagaatggaaatagatgatgacattgacggggctgatagctcccctagctgtaagaatgacatagagagcgaggacttttgtgctttacttcggcagcagaaatatctaaataatttga

SEQ ID NO: 105286 - DNA, 254 bp, Glycine max
cttgccttccacactctgtgcgactccccaagacattgctacagtcgctactttattgtatacactcttggcacaccatgtctggaaccaaggtcttttcgctggagggcaagggcctcaagctcaccaccgctgaggacatcgagccgcacattcaggatctcaagagcaatgatcaggtagaggagatcaagttcctaggcaatacgctcggtattggagccagtgaggctcttgccaaggttctggaagga

SEQ ID NO: 105287 - DNA, 140 bp, Glycine max
aaggcggcttcggaatcacaggctacgatgcggttgcccatatgattgaagagatcccaaatgcgtcagtcgaaggacccaagattatgatctactgtgtcatgatcggcactgtgaccgggtttctctttctcatgatt

SEQ ID NO: 105288 - DNA, 131 bp, Glycine max
aaaacatcaaccgaagggtcatttctcccaatccgctagcttctgctttctgtcttccaggcatattttgacacaccagtgcgtgaaggatacgatgaacatcatgtctacccaccagtgtagttggcctg

SEQ ID NO: 105289 - DNA, 119 bp, Glycine max
caataaggttttcaagccgtttccactggaaaaggccatctttgaatagaaccttattgttcttgcaaaggaaaatgtggccaagatgagcaacaatccagcattgcaagtgaaaaaca

SEQ ID NO: 105290 - DNA, 146 bp, Glycine max
tatcatcgcaccctagaagctggaactctgttgactcttgcgataccgtgctttacacaactaaacctttcagctatcaaccccacttccaccgcaaacctctaccgaccacttttcaccccaaagtttttctccaacaccagcag

SEQ ID NO: 105291 - DNA, 263 bp, Glycine max
cgacatggaggccttgaaagagaaaatggccaaatgatggaggccatgatgagcataaaggagataatggaggtcaatgcggcttaccgaacccgtgctagagctagagtaatgggtgaagtagaggaggtgcaagagcagatgaaggccgacatgaaggccatgaaagagaaaatcgccacaatggtggaggccatgatgagcatgaagaagataatggaagccaatatggttgcagttgccgctaccagcgctgttgctaa

SEQ ID NO: 105292 - DNA, 115 bp, Glycine max
ccaccccaaaccttcaaaataacacatctttctccaaactctttcacaagcccatatgctacgcacatgtaaaggtgtctatgttatccttggcttcgtccatattcaaatcata

SEQ ID NO: 105293 - DNA, 198 bp, Glycine max
aattaaacagaaacaaaaagtggcattgagaagaacagaacatcatcaacacaaacacaacaaaaacacccaaagaggaataccacaacggaacttcctcgttttggcctttaccctcttttttctctccttgcttttacccttaaacaacggagcgagtgtttttcctctatcgatctggtttcgttggatttggat

SEQ ID NO: 105294 - DNA, 268 bp, Glycine max
caattctgtctaatttagcccctttatgtatatctactccttttgattgggtcattgatgatagtttaaatagtgacttgcttccgtatttaaatttcagaagccatggacttcagagtttggcgtgagaatgaatgtgcgaggctcattgggacaaaagatacaagtttccttgagttttgcttgaagcagacaagatctgaagcagagatatttctcacagaaaacctgggactatatgaccatgatcatgaattcattgataaat

SEQ ID NO: 105295 - DNA, 269 bp, Glycine max
gctcaaaggggcctgtgggacggcgggaagcgggaggaaggggcggtgtttcaagttggcagggtgtgggaggtgctggagatactactcgagaccgagacgctgctcatcacgaccctcttcccccagcctccctcgtcactcctcgcctcgaccctctcatcgtccctctcgctcgccacttccccctttgcgggcatcgtcagcaacatcacacgcgccgtatcgtcccgcgccttcctctccctgggattgtaccgcttcctcgt

SEQ ID NO: 105296 - DNA, 267 bp, Glycine max
ccaaaatcacacctttgggttgttgtccttggtcagccttcaccataaggcaagtcgtactttttttatgttttctttccttttatgtctaattttatcacaatacgtgctcttttcctatatgatttccctgagaaacaaatcgcacctttgggttgttgtcgctggccatcctccaccataagagaatcgtggattgacagaataggaaaaagtttcaaaagaatttttggtaggctgtaaagattgatgtcaacgaatattcta

SEQ ID NO: 105297 - DNA, 265 bp, Glycine max
cttagatctgaatttcctactcaagtcaatttattaactgagtatctaaagatccagaacgattacagggcactaaacatagatcactggagaaatttttatcggttttttaaggaggtaacccttattgatcttcgaagttatgactccagtcaggcatggccagtgatcctcgacaattttgttgattggtaaaagaaaaagaagagaaaatatagttctcatatttctcaagtttaagttcaattttaatctgctgctgact

SEQ ID NO: 105298 - DNA, 259 bp, Glycine max
gctttaggcaagactcatcttgacgaaatcattcatgtgaacttgtttccattccccaaatgatcctaacttatatgcagagtggaattagcaggaatggaaacaagttcacatgaatgatttcgtcaagatgactgatggctttaggcaagagttggagttaccagaatcaaagccaagagtgcagattatgaaaccttctacaagcaagactacgataagccacttgaaccttgatgtttgcagtttgtaaaaattc

SEQ ID NO: 105299 - DNA, 264 bp, Glycine max
cgctgagagacatactgcactcctttcccaacttggccatgaccacagatttgtccaactcaactgctttacacacagctgcaactacgagtcatattgatgtggttaagctccttctggaatcagattctaaccttgctaaaatagccaggaataatggtaaaactgtccttcactctgcggctagaatggggcatttggaagttctgaaagccttactaaacaaggatccaagcactggatttaggactgataagaaaggtc

SEQ ID NO: 105300 - DNA, 260 bp, Glycine max
caacatcagtagctctttttctcatagaaacatagaggttaagaaatctattagagatgtttatgagaagaaaatagggtgccctataagtattagtgagttggcttttctaactgctacaaatgcaataatgagtatgatttggggtgagactttgcaaggggaagaaggggctgctatttacggtaatttagagcatttgtgtcagaacttatggtgttagtagggaagccgaatgtttcggatctttaccccgcact

SEQ ID NO: 105301 - DNA, 265 bp, Glycine max
ctcgagtttgacacgcccggcctcaccatgggtttctctttccagggtctgactaccactgctctggtcaagggcgctgtccctgaccagcatgctaccgagaaggatgttgcagatggtcctggtgctgccgatggctcccgtcttcctgatgagaagaatatcggcgctcctaggacaccgtcctccattcgagtgacgcagcgtacgacgaggagatcaacagggtcgacaccaatgccgagcagggtgtccaggctatcca

SEQ ID NO: 105302 - DNA, 264 bp, Glycine max
attaaataacaaaataacagaagcaaaataaatttaattgacaacacatgaataatggattataacatacaataagcacaaggaaaaaataaattagagaaagacagatatagcctgggttgaagcgcgtaaacgctatccttagagagaaaaatgttttagagagaaaatgttttagactttcttcttgcatagtcttttctacagtaacatgatgttgtatcaaaatatctataatggatatgattgagttccttttaagta

SEQ ID NO: 105303 - DNA, 255 bp, Glycine max
cgcttagacccctctcttctaaaaccagggtcccctcaaccaaaatcttcttcttcttctgttgttcatatgctgtattttatgataacaacatacatacatagaagcttgttcttctgatctgatttgatgagatcaagtgttggttctttgttcatctaatattattattctttccctgaactatattctaaactaattcacaggctcttgatccgtttattttgaagaagatcatcggctgttttactagct

SEQ ID NO: 105304 - DNA, 254 bp, Glycine max
ctgacatacaaattttcctttgtatttctatattgtttctgtcattctgtttccatttaagcatttttgttcttgaagagagagaatgctcatattagcagtaacatatggcatgatcttatgcatagactagttacacatttgtttcttcactcaatgattgatctaaatttcaagtatattagttgagccttaatatctttcttttattatgtgtcccttgattttctaattttcaacgcagcttaaaattg

SEQ ID NO: 105305 - DNA, 285 bp, Glycine max
ctgtgattggtccctatttctaactacaatcctattatctcaatgccttcatcatctcacaatgctttggtgaattgaatcgatggaacttggactcagaagctttgtccatttcactcccatgcccaccatcaccatacacatacaccaccaccaacaacaacactttttcaccatttctccaataattctcttctcttccctgcatgtctcaccctcttaaacactacttcttcctctttcatggctacccatttgcaggatcagaaggtgcacccactgaag

SEQ ID NO: 105306 - DNA, 274 bp, Glycine max
tgaattaccactaatctgcgttttggttccggtgattaaatttttttgccctcatttttatttttgaaagagaacataattcaaccccaaggggttggttgagcggactaagacagggatttaggtttcaaccctctctcttctcctcgaggttaaataaacggaagtcactttgtaagtgttctttaaacccggagacttttcctctcttggattgaagcgccatgccgcatctcctttccgtaaatttatctaccaaaagcaaatttcagtt

SEQ ID NO: 105307 - DNA, 137 bp, Glycine max
gtttccccaagaggaatctttgaacttggtttcttcaatcttggaaatccaaacaaaagctacctaccaattcggtacaagagctatccggatcaaacatttgtttgggttgcaaacggtgccaaccaatcaatgac

SEQ ID NO: 105308 - DNA, 268 bp, Glycine max
gtactggataaggaaatcaattttaagagtggtgctgcgatatgctcgaggaattgtaattcctgtatgttcctgatacaaccatgggtgaagaattacgtgagcctttagtaacgaaggcaaccaaggaaggtgggggcgtgtttacgtgaggaaaggacattagaagggtgatttggtcataattgttagtgaaggggtattttggggtgtggagttagatattttgccttttgttatctttacggttattagtaacagattgggg

SEQ ID NO: 105309 - DNA, 188 bp, Glycine max
gctgacaagatgggtggaggaaggtgctgaacttccagctgaagaagctgctcgtctgccaccacctccaacaactgctgcttttcagcatggttcaactgcatacaacttgagatctgcatgaagactgacagttctcctcctattgacggctctaacataagaactgctagccctgaactcagtcc

SEQ ID NO: 105310 - DNA, 263 bp, Glycine max
aacgttctctcaacatccacaataacaatgagctccgatgatgatagattggagagtgatgaggagttcattgaagagcttgtagctattgctccagtattaggtagcactagtgtaatgttacaacaaagcaaggacagatagagattaaagaaaagaagacgggaatagtgaaagctaaatggaagtgtaggtgggtgatgataataaaaggttcaattcatatattcaagaactttgagaaaactggcctatagtactat

SEQ ID NO: 105311 - DNA, 164 bp, Glycine max
acaactataacctatggggttccatatttgatcagtctgcgtcgaatatcatgacatcaactacacacaccccatctagtaacatggggtgtgtcatcggtcatcgacgcagattggtttccacaggcctaatcatttgtcattgagcctttccacacaacata

SEQ ID NO: 105312 - DNA, 199 bp, Glycine max
aaacttgaataaagccagacaattataccataaaactttatcaattgatcaaacagtgaaactgctgccagatgtctccaggcttggggtgttctggagcatagggttggcaatctttcagctgctcgtcgattatttaaatcatcgttgaatataaattctcagagttacgtgacatggatgacttgggcctcagtgg

SEQ ID NO: 105313 - DNA, 169 bp, Glycine max
ggtgggggagattgacaaggaagcttgctagtggtatcatgaaagggttgttcacatcctctaagtgctgtgagtctagtgtgaacatcattgaagagggaatcaacataagaatgttgatcctcctttgccaccatcttctaacaatgtgggtggttcgtggagttcc

SEQ ID NO: 105314 - DNA, 275 bp, Glycine max
cacaaagggcgcctatacaactggatgtgtttttccctttcatttttggctcttggactgtttctggcattaataggaattcctctaaataaatcgctgtaccagtcagttatatgctactaacttctgcagcttctggtctcacattcattgctttatattttctggtagatgttcatggtcacaggcgtttgacagcgttgttggagtggatgggaaaacactccttgagtatatttgtcatcgtatcttcaaacttggccgtgattgctgtt

SEQ ID NO: 105315 - DNA, 126 bp, Glycine max
ctgaaaagagttaatcatagtagcagtagagctcgagcaatagcaagcgaacacgaggctaccggtattcctcaactggatttctgctgcagaatacttgccttgcaaaaactggagttggtaaaa

SEQ ID NO: 105316 - DNA, 194 bp, Glycine max
ctttgctgttcaagctttgcttgccactaacataattgaagaaactggtcctacgttttcacaaggacatgatttcatcaagaagtctcaggtttgcttaatatgtttataagtatataaaagaatcccagatcttcttccttctagttatggagcagaaattccctaatacacctaggtttatccagattgta

SEQ ID NO: 105317 - DNA, 200 bp, Glycine max
gaggaattgattgcctgccagcctggtagcccactgctgctaggtgttaaagaattggcagaaaataaagaacatggttcagcatttgaggataacaaattcctatcaaaagatggaaagcccagccaattgtctttgtccagtgatgccatgctgtggttgagcatacaaagaaagtgctagttattgaggatggtgaa

SEQ ID NO: 105318 - DNA, 192 bp, Glycine max
gattggtgggtggtgatcaaattgagattttgcaaaatgttgtctgaattgggaagaagacctatgcttgggagtaacgagggttcttttggtgatgaattggagaaggagatcgggatgttgcttcgtgagcaacgcagacaagaggctgatgatcgtgaacgagagcttaatatttataggagtggatca

SEQ ID NO: 105319 - DNA, 138 bp, Glycine max
ggattctgctcgagcctatggttaacacggtcgctaccgacaaccacataactgtcagaggtagcgactggtacttcgctgtcactgcagtcatggctgtcagcaccatcgtcttcatgggtctgtcattcaagaagg

SEQ ID NO: 105320 - DNA, 213 bp, Glycine max
ggatataatcatcacttcagtcattggtcagtctggacaagttgatccaaaattaccaaactgtcaacttggattgtttcctgctacaggggttacttctgatcacaagtctaaaggaaatggaaatgtcttcccttctaagctttatgcaaaatcaggtgtccatcccatatcgactccaaaatcagtgtgccagcaagagagttctccatt

SEQ ID NO: 105321 - DNA, 125 bp, Glycine max
catgaacagcatgggaggttcggggaaggactttgtgtccatgaacatggattagttgctgaagaacatctggaccgcggaggaggttcagacaatggcgtcggcgggagtcgccgccgatgacg

SEQ ID NO: 105322 - DNA, 263 bp, Glycine max
ctcattctcattctaacattaccagacagccatgtacgcagagaagcagatgggcgaggagctggccccagtggtcacctccagctgtggcgatgtcgaggacttgaagcctacgacagaggtcgacgctgtcttcggcgaatcaacgaggatggcccaaactacaaggatgtcggccagactggcaccgtcatcttgatgatgaagacgcaaatcggactgggagtcttgggtatccccgctgccctgcacacccttggtat

SEQ ID NO: 105323 - DNA, 117 bp, Glycine max
aagaagttcctcgcgatcgtcccttctattcgaaatcgcatggaatatattttacggcgatccttcgcggccagtttggactacgtccgggagaaagccgttattctcgacgagaag

SEQ ID NO: 105324 - DNA, 125 bp, Glycine max
atgaaaaaaggagatatttttcattagcaccggttgtgttaattgtgtatgtgggggcactttacgttatggattgcttgtgctcaatttatgtaacgaaggctttgaatgttatttagtttgcg

SEQ ID NO: 105325 - DNA, 283 bp, Glycine max
tctttttaaagctcagcagaccaacaatgaaaaactgttagagaatccttaccttcaaatgtgtggcatacttcaattggcaaatgatcttggatttgacttgtgatgttaaactcttggcttttcggggtgcgatattggtttggagtagattcatgttggtctaaggtgtcattgcaactgattctgaggatcattcatcatctatccttcaaatgactaagattgccacattagctgggacatattctttgaaagcttccttacaggaacaaagttgtga

SEQ ID NO: 105326 - DNA, 111 bp, Glycine max
ctcagaattcaatcagggttgctcaggtatgcactttcttttatatgttgtaagctgagtctggagtagttgtgttacttgtgtagttaattatttgccttcacttcataa

SEQ ID NO: 105327 - DNA, 105 bp, Glycine max
ccacccttagtctggaggccggcccggcccaagcgagcccactccgaaaaatgtttgccgtggcgtccatcgcgccggcatacagttcgggtgggctctccagct

SEQ ID NO: 105328 - DNA, 119 bp, Glycine max
aaacccttgaatgatagagtcctcataaaggtttaagatccttgatgtcatcagtttcgaggataccaacaatgtcatcaaggatcttaaactacgaatgatagatctcataaaggttg

SEQ ID NO: 105329 - DNA, 234 bp, Glycine max
agttactggatgaggagagtttgaggaaggacacagcacttccttcacctgaatggtcctcagatcacatagctctcttagccgaatttcgctgctgcaagaataaatctaggcgttgacagttaaggtaggcaccatcctccaacccccccacccacatatagcttgtttgagaattattattggaaaagatcaacggaagtgaactttcttttggtgctggttcctttaaaa

SEQ ID NO: 105330 - DNA, 241 bp, Glycine max
ctttctacctcatcataatcctcgtcgtcaccatcttcttctttaccttcatcctctggctgcacaaagtgaagcttcaacctcccatcttccctgtgagcatgcagaaactcctgaatgggtgtccttacttccttaaggacaaaccttccattatccctataagacatgaagctaacacaaggcttcccactcctccctatgctcgaaatcggaggagggtattccaccccattattat

SEQ ID NO: 105331 - DNA, 280 bp, Glycine max
ttcacaatgccgttcctcagcgtctttgcgtccgcgggctcgctgctcttcgcactcctttgtactggcccggctactacgaaagccacgagcatcaacttgccttcatacccactcgcggtcaaacatccatacctctcgacatgggtgccagaaaaccagctgggcgatatcgcaactgcgaggccacaattctgggctggccaaaacttgtcatggccggtggtggctcgtatcgatggctctgcttatgctctctttggagtgccgaatcccatta

SEQ ID NO: 105332 - DNA, 265 bp, Glycine max
aaagacaagaccgagcgagacgatggtatgagccgcgagagcattcccaccacctgcacgcgcccccacgcggaggacgaggacgacgtgatccttctcgaagcggttgacggggtgattttgcgagtggagaggtgtcatgttgcgtcgcagctgtgagtggggtctgtgctgtccatatgcatgacgatcctcgatagatcgtttgtgcggcggggccaactggcggatggggtgcacgaatcttagtcagccattcgtcgat

SEQ ID NO: 105333 - DNA, 259 bp, Glycine max
ctaatttgttcatcttgaaaatggtggatccatcctatagagtccctctttgacgtggattctccaagaatcagtagtggccggtggcttcaattttcactttttggcataaatgctccagtttgtctgtctaaaatttccgccagtttatgctttctttctgttgtatcattgtatattttttttcagttacaaccatttacataaatttaattaacacaacttctttgacgtgaaaaaaaaaaaaaagggggggccg

SEQ ID NO: 105334 - DNA, 139 bp, Glycine max
  unsure (1)..(139): unsure at all n locations
cttttgtggatccatcactgcagcacaccagaaatataggtattggccattctgctggatncagactctctcactgtggtgaaagatactagaaggaatgtttgttagatcagtaaaccatcttgtgcctgaactaaca

SEQ ID NO: 105335 - DNA, 243 bp, Glycine max
cgagaagcgagctgctcctagtgctacaaattcaattaagttactataaactggtaatgaatcgaatgtttggagcacccggacaaaactagacgtgtttcaagccatagatttgttgttgttgtaatgttgaaaagaattgttcttggcatggtcagaaatatttaattctatgtattgtagaaagaaaggtttaatattgagcggtgattttgaatgtataaagtcataggcagctagatt

SEQ ID NO: 105336 - DNA, 271 bp, Glycine max
caagaataaaaagttgaggataaggaatataattatgtctaaaaattatttttcctcaaaaatatattatttgaattattgattcttgtttgttgtgtacgcgaatctccgtttatgataagaaaaataaaagagattattttcttcagcatgattcgaatgtaggtggatgatgttttccgttatgggtgatttttggtcggaaagtcaatatgaatgaatgagaagaaaaacccaatacgaattcttcctctgttccacacctcgtcac

SEQ ID NO: 105337 - DNA, 122 bp, Glycine max
cttatgcatcaaacatggagagttctaatggtcattctttggaacctgcggccttgaaaacaaatgcctatagataaaagtagtatcattgctgttatggaaccctgttaagtagtaatttc

SEQ ID NO: 105338 - DNA, 265 bp, Glycine max
cagaacttcagtatgagctctcgcacgctcagtcacgccctccgtggcggcctcagcgttaatgtgcgtcgccagacctcgatcactcgtggtggccacgcgcatcgtccacctcctccaccttttgcacgtatcaaggcacaggaacagccgctacacgaggaggcggactggtctggaatgacggcgtctcccccgacacgctcatcgactttgacgcgccgcatattcccaagtatcaggcgttgcgacatcggctttgtgg

SEQ ID NO: 105339 - DNA, 242 bp, Glycine max
cagcattttggggcatctggattccaaccttatcatttatcagaacttgcacagccaaaataacactctcatatgtcactgaaatgccttgagaagtgtattccaagttgcacattgtatgttcatttcagaatcttaatttaacaaaacatccacatttgacttgtccaatatcaacaaatatctgctactttaattgtatctgatgaattaatgtgaagagctaaagtacacctatttat

SEQ ID NO: 105340 - DNA, 264 bp, Glycine max
taagcatgttgcaattttctttttttatctttttgtggaattgggagttaaatagtgaaactagatcaaatatttcatctgggtgttgctcacttcttcttcttctattgtgatttctgatgtttttccatagggatgttgcaattttgtagctttttatgaaattaggagtgaattaattcatctgctattgtgatttctaatgtttttttcattagggtatgcaaaattttgagtttttattcttctgaaattaggagtgaa

SEQ ID NO: 105341 - DNA, 204 bp, Glycine max
caactacaaaggttgctgtaggagataagatattgaagtagtgctcaagtgcctaacacctgcactgaacaatggcctctgcatcagcatctcttctcaagtcttcacttgttcttgacaagtctgagtgggtgaagggacaaacacttcggcaaccttctgctgcatcagttgtgagatgcaaccccaccacgccatcaggcc

SEQ ID NO: 105342 - DNA, 261 bp, Glycine max
ttcggagttaacgttcaacattagcctcagctccactctcctgaagtctttatcagaacccttagccagctttcgaagcaacttcatggtctcgtcctttcctcgagccgttttgaagagaaagatctaactggagatatctctggtcttggaccgtttgagcttgaggccttgcaagactgggaatacaaatttatgggcaagtatgtaaaagttggaaccgtaacaaagacagttccagtaactgaaccagaatccact

SEQ ID NO: 105343 - DNA, 271 bp, Glycine max
cttcttcattttaagttacgattttcaggatggttttgtttacagactggttgttttagggagtcatgaggtatcattgatttgtattatttaattgtagtagacgcaaaatctataatatttagaagagcagtctcaagatgttgattgtgtgcttgttaatcccttggcatttgtatggaaatgttaatccaaaatgtaacatagttttgtattaagccaaggattagtggggcattggctcaaactctaattgtccttagggtggaag

SEQ ID NO: 105344 - DNA, 142 bp, Glycine max
attttgcagcacagttggacacgagtgacaggttcaaactggccaagtccatcaccgcagatcagattctcccgccaggaaacgcactgcccactacaatgcaagacaaagttcgatattatcctggcaaccgcgttgccgt

SEQ ID NO: 105345 - DNA, 162 bp, Glycine max
attagtgggagcaatacatatcattcattcagaggcaacataggagttgtaaattaagagcatggctgagaagctcttgtatcatcatcatctctacttctcagccgaggctacaagacaaagtcttggaccaagatcactcaatctcattggcttctcaag

SEQ ID NO: 105346 - DNA, 197 bp, Glycine max
ccgcctccgccaccaacaacaacctccacgctctctaccgaacccaacaacaacaacaacaacaacaacaacagaacctccccgcaatgtttctagatccttcctcgcagatcgcccaacggcaaacaccaaccctaatcggtaaacgtaccctaaacgaattccaagcctacaaccaaaccaacaacaacccaaac

SEQ ID NO: 105347 - DNA, 244 bp, Glycine max
acaaatgtaacagaaggttaaagcagtgaaacaacataaactatagcgatatatgttttcccggatattaatgatacaagatctaatatccgggaaaacatatatcgctatagttttcccggatattatttcttgtatcattaatatttttctttaattgtgtaaagacttcttgtgtatttacacagagacttcgatctattgtcaactatttcataaaaaaaaaaaaaaaaaaaaagggggg

SEQ ID NO: 105348 - DNA, 273 bp, Glycine max
cgatcaaaccctgcaatggttgaaaataaaataagaaggtaacaagagaatgatctatcttggtgatggtagtggtgactattgcccaagcttgaggctcaaagagagaaactttatgatgccaaggaagaactttccagtgtgggacttgatttgcaaagaccctttgcttgttaaggctgaaatccatggctggagtgatggagaagagttggagcaagttttattgcatttaatcaacaaaatttcaatggaggaaaatgttcatgagca

SEQ ID NO: 105349 - DNA, 169 bp, Glycine max
gcaaactaaagttgctttagcctttaggctactcacagaaaaaaagacagtcctcttatatcatactctattatttttcagatccatattgaactgtgggatcatgacttttttgaaaatgcggaaatttcatgtaattactgttagcagtataaatggacaaggtagt

SEQ ID NO: 105350 - DNA, 266 bp, Glycine max
cgtaaagtacttcttcacttcttctcctccttctcgctagctcatcactttcctctttgtctctcattcagaatgaccaagacggtgctatgcatgaaccctggccccatcgagtttgagccacgtgtactcaagtcctttgccatggagggcatttctcacgtggacaagacggtgattgagatttttggacaatgtcttgagaagacgcgcaaggttttcttggctccagacgggcaaccacttgtggtggcaggctctggcac

SEQ ID NO: 105351 - DNA, 132 bp, Glycine max
cctgcacaaacttttgctcacgttaacttaacaggaacggccattaaagaattgcctttttcatttggcaatttggttcatcttcaaaccttgcgcctgaacatgtgcactgatctcgagtcacttccacac

SEQ ID NO: 105352 - DNA, 238 bp, Glycine max
caggtaatctcaattattcaatcttcttctttttcttcttcagttttcaccatgtttctcttcgtttttgtttaatctcactttttttccctttcatttccttttgattcgatttatctgtttactttttttcgtgtagatcaaatatattgctaggtatggtattatacgcgtttttcttttccgttttcaaccggcgaacttgttttcttcggtgatcgtgaaatctgcttgaaat

SEQ ID NO: 105353 - DNA, 266 bp, Glycine max
ccaaacaaaacaagcaatggctgcttctacttctccaaacttcacaacatctttgcataagaactcccacaaaacaaagtatataactgtaccagggaagaaaactctgcacaccaaacttagtttctcattttcttttccgttcaataaatcgatacgtgtgaaatccattggcacggcgaagtatgatgaagttgtggtggatgaagagttggacaagattagaaggctgcagaatggttcagatgttagaggagtggcttgga

SEQ ID NO: 105354 - DNA, 268 bp, Glycine max
ctcatttagtttaaataaatttaattttcacaaaaaaatttactatgtctgttgcttagcaacagttctgtattggaaacctgaaattttgttactttgaagaatagatacaaaaacaatactgtatattattgattgggcgtaggtgatggtgttgagggccctaatcttaggtgataaggttaggtgagagctggatggatccagcagatccctcttgttggttgaggagatgcccctttggttgtctggtagttgtcttgagatg

SEQ ID NO: 105355 - DNA, 260 bp, Glycine max
ctttttaaaatatgtgtaaaatcagtgaaaaacagataataataaaaccttgtttttaattaaggtggtattttttaaaaaattataagtgaaaaaaatgaaaacaaatatttcgcagaaatatatacctctccttcttaatcattaatcgtacttgccatttagtcacttgctgacttatggtgtgcttggagattttactgtgtccatgtttgatgatttggcatttcatcttcgctggctaataaattggaatgtat

SEQ ID NO: 105356 - DNA, 265 bp, Glycine max
caaacacctaccaccaaaatggccttcaaaatgaacctatggagcttgactcttctcccaggggagaagtaccctatgtacattcgacgggactttgtcctcaccaacgctgctctcggcgaagagctcaggagcaaggacggacgatccgtcgtcaaggtcacccatcagcccttgctgccctctcaattcggggatgacagcgactctgagttcgatagcgacctcgacatcagcgacgaggagggagatgaggatagtacga

SEQ ID NO: 105357 - DNA, 204 bp, Glycine max
  unsure (1)..(204): unsure at all n locations
ctgtgctgtgttgctggccactgcttaccctaaaataaatgactttactaaaatagagacacacatacacacaaacacaacgtacacaaagcacatcggtcatttggcattntatcgtacccacataggtaatctaggttgtgttttgcttaagaatgaccactatatctcaccaaacataaaagatggatgatccaaagggta

SEQ ID NO: 105358 - DNA, 267 bp, Glycine max
aaaaaaaagagtatctcgtagcctatcaaatttcatgcctcgtgcttcttctcaagggcattgcatacccatggaactgccactacagccttcagagttagcacaaccatgtgcgcctcctgttgtccttgatccatcatcaattcctgtaattcaagatccggtttcatcatctgatccatcatcaattcctgtaaatcaagatccggcttcaccatctgatccatcatcaattcctgcaaatcaagatctggcttcaccatctga

SEQ ID NO: 105359 - DNA, 173 bp, Glycine max
cacagaagctcctacttctccacctcccccaaagcaacctcgaccctcgcgtcctatactcgaccagtcttcccgtcgcccccctcttacacttcttcccaaaccagttaccatggccggtggtgctgtcgtcgccggaggttcccgaggaaaccccctcaagactggtttca

SEQ ID NO: 105360 - DNA, 199 bp, Glycine max
cgcggcaacaaggaactgccgccgagtcggtaccagtatcgctcgcccaagtactatcgcggccctctgcacccgcaccagccgcctccagcgtccgatccgtcgtcgcgcctcttccagcctggcccattcagcctgccccgcatcgagcagacgtaccagagcaccatagcaggtgatctgctcgccctcacatacc

SEQ ID NO: 105361 - DNA, 103 bp, Glycine max
tacaattgaaaggggagacaaaattgccattattggtccaaatggatgtggcaagagtactttactgaaattgattatgggtttggaaaagccaactgggggt

SEQ ID NO: 105362 - DNA, 192 bp, Glycine max
gtttcatttacacccttctttcgttgaaattgaaagtcatcagaaccttgcctgtaaacaaattattatttatcattttttctctatgaacttcagattcaataattttccagacacaaaactgttcctctcttcacattccctccctgtcaatttttccctgtctttctttgttcgtgcgaaacttagtga

SEQ ID NO: 105363 - DNA, 147 bp, Glycine max
ccaaaatatattccttttggcacatttcctaggccacaaattttataacacaccaaattgttcttgtcaggtatccctgaactcgctggtagcacaaggcaatgttgtgccaattccaggagccaagacagcagaacaagctgagga

SEQ ID NO: 105364 - DNA, 136 bp, Glycine max
gaaattattacactaactagtgatttggaagggaaaattgctggcataggttttcccgccaactcaaggttctttgttgtatactctaaatgctataacattctcttcctaaattgattctggacacggaaatgct

SEQ ID NO: 105365 - DNA, 281 bp, Glycine max
aaaaaaagaaattaaaaaaatgtttttaaaaattttgtcaatttacttggcaaagttttttttaaaaaaaaattttgattgggatatcctgccaataaaaattgtccatactttggtccctcagaattgatttgccatgggatcttttagtggggatgtaaacaaaattaaatgatagaactagaaactttcttaatgtaagagaaaattagaaaactactccatcgtaaagtttcctttttcaattttgatcaatggtggagtcaattgtatagatttca

SEQ ID NO: 105366 - DNA, 279 bp, Glycine max
atccgaacctattcgtttccgtccaccgcaaacacgccatcaacgacctcgccatccacccctccggcgaggtagccctcaccatctcacaagacaagtgtttcgccgttgttgatctcatgcatggcctcgtcgtggactgccggagcttctgccgcccgctcggcaaacaagagagtttgagtttggtgaagttcaatgctgccggcgacaggtttttcgtcgccgcactggagaaggtctccgtctacgtcaccaagactgagcggtttttgttag

SEQ ID NO: 105367 - DNA, 271 bp, Glycine max
  unsure (1)..(271): unsure at all n locations
caagtctgtggttatctacctagctattgttcttgcaagttctgttgttgtatcaattgctgatagttttgcagctagtgaaatatcaaccaggcttaaaatatcanaagcaaaagtaatatttactcaggatcttattatgcgtggtgacaaaagtatccccctttacagtagagttgtggatgcacagtcacctatggcagtagttatccctaccaaaggatctgaatttagcatgaaactgcgtaatggtgacgtctcttggcatgat

SEQ ID NO: 105368 - DNA, 222 bp, Glycine max
cttccaaataggggaggaagtgaagatgaatatgacaatagaagacgcattcagataatcaatagagactgtagttgattggactgccaataaagtagacatgaacaaaacttatgtcctttttcgaacttattcccctgtccatttcaggggtggtaactggaatactggtggtggttgtcacttggaaacattacctgatttaggctccttgccaccagt

SEQ ID NO: 105369 - DNA, 159 bp, Glycine max
cttctcttcgagggtttgggtttctcttcctcccttggagaaaaagaagagccaccgctgcgacgccgttcgtgcatttttgaggtgccgctgtcatgtttgggcgtggtggaccaaggaggagtgatacatccaaatattatgatattctcgggattt

SEQ ID NO: 105370 - DNA, 147 bp, Glycine max
catccataatatctaatccatgtaatggagactttgcggttatctcgaacactgagagaacaaatcacccatcgataatccaggttatatgggataacaaggaacacatagcagatgggttgaccatttgatttacatatctagaga

SEQ ID NO: 105371 - DNA, 99 bp, Glycine max
ctccgttgcaaactctccgctcactccaccgccgcatccacacttacatcgtacgccacttcatggctgcggcggagccataataagctcatccaacac

SEQ ID NO: 105372 - DNA, 172 bp, Glycine max
ctcagatctcatacgatcccatactagggtttcacattgggaattttcccgccaattcggtgtttctgaaccgagcataatctccgacgcatcgaattcaataagaaaattcccccatgcatcgtgacgggagctccatgtccatataaatggagacgcagcgaattatcga

SEQ ID NO: 105373 - DNA, 191 bp, Glycine max
tatagataaagtatgaagtagatattattttcttttgtttatcaataaatgttaatcattaatgttattagtttttattagtaaaggattgtaaattctgtgatctgttcttattgtattactagatcaatcttatatttctagatagatacttctagtacatttgagtatcttaaatagatatttcaacc

SEQ ID NO: 105374 - DNA, 123 bp, Glycine max
ccagctgccctgctgcaagctcgagcctccttccgtacctatactgtcgcatacattactagccgtccacagatgtactacgagattcaaggtaaactcgctgagatcactggtccattcctc

SEQ ID NO: 105375 - DNA, 192 bp, Glycine max
caatgagattatatgatatttatatttataaagtaacagatgaccttttgcatagacagcaacaatactcttgcatgcagatgtgtgcctttgaaaaacaaggctctttgtgttagaatctattggctctgtacgtgctcatgtgtctgccatagcctatctaatggaacttcctaagtttatttgtcgtca

SEQ ID NO: 105376 - DNA, 256 bp, Glycine max
tattaaacgagatataaggaaaatgattacaaggataaaattaaaagaaatacttgtggacaaaaaaaaaagacttatacctgatcataaaaatagattagttcatttaatgagaaacaactatttcatagttagaaaattaaatatggctttttttaagccagtaaatcgtttaacaaaacattcatttatcaattttagagaaaaatattttaagtcatacaaaatacctagttatgacattatacttttaaaa

SEQ ID NO: 105377 - DNA, 248 bp, Glycine max
cactgacgttcgtgctcaggttgaggctgaggagaagttcaagctcatctctcgtttgaaggaaaagtttgggatgacttcatgtcactaaatgctaccaactgataaatttggttgttggtattttgtgttttaactgaagtgcttttacctcataatagctcatttgttggtattcttatcttcactgtatctattagtctcccctccttttctcccaaaatttacagcagataataggttaatgg

SEQ ID NO: 105378 - DNA, 252 bp, Glycine max
tctggatatagcagcagataaagcgtcagacttaaaacacaaacgaggtttttatattgttccattccacctaattcattctgccacgccttctttaatttctctgatttgattcatggctttagcactttcctccactgcattgtcaagccttccaaacagagaaattcgtcaaaagggtttcccagacagaacacccacatgcttgagtttgaccagaagaacagttgcatatgctacaaaaggggtctc

SEQ ID NO: 105379 - DNA, 201 bp, Glycine max
gacggccaagatggtaccgtgtttgtgtagtttgtagctctttgcaggccaaaaggtcgtataaacttacatggaatgttgtctcttattgctaagcagaagctatacacatatcctggaaactaccgcgtctttaaggtgctcattgctgccgaatttaacggcattgacattgagttgccggaatttgactttgccaag

SEQ ID NO: 105380 - DNA, 243 bp, Glycine max
gcttttgttcctctcgtcaattgcttgaggcttttggtcaatggtctctcactggcttctgatgagggactcatcaaatccgtcaccagagaaggagatccactagaattgctaaggggtcccctttattatgttctgatactgattttatctgctcttgtgttctggcgtgagtctccaattggtgtgatctccttggcaatgatgtgtgcaggggatggcatagctgatatcattggtaga

SEQ ID NO: 105381 - DNA, 251 bp, Glycine max
ctcacacacaaggatatagcagcaagagttattgccaaagagattaatcttgaagagacaccagtttccaaagttatgactaggaatccggtatttgtcctttctgaaactctagctgcagaagccctccaaaagatggtgcaagggctgctgagaaaggataagcaattgcagcagctgttgaaggagttgacaaacactggggaacatcagactccaatacatcattcattgagtctcttcggtagcaa

SEQ ID NO: 105382 - DNA, 245 bp, Glycine max
tgcactccctgttattactcacttgactactatgacctagtttccttcttaaatacttgtgtattgtgttctccagaagagctctgtgtctgcagatcctttgtcagattttgacagaattgaccactatgatgataatactattgttgaaatttctgctctatttgggcatcaactgcaagagctcatgttggaggtcagttctcttaaggaaagaataaacatgcactcaagtttgacacagg

SEQ ID NO: 105383 - DNA, 200 bp, Glycine max
caccaggtgaagaagatgtcaaaatagtcatgccaatcgctgaagaagcagtatctgctcacgatacggatccatatactgcttttacaaaccgtgtaaacgagcttgactatggaaactcttatttcttccggcctattagaaaaagtgacttacaaaaggttgatccacggaaagctcgtgaattcttcagtacatgt

SEQ ID NO: 105384 - DNA, 267 bp, Glycine max
ccaattcgcttcaatggcgttccctctctctccctccttcaacccctccatcgctcgaaaccgaatcgcgtgcttctcgaagacacagcaccgccacgtcatcacaaaggatacggaagtcgtggtggtagacagagacacggcgcgtgccacgtcagcgggcgcgatgctggagaggataatgaagcggttgaggagtgtggcggtggttccgatcgtgattgcctcggttcagataagcgcgttggtggcgccgttagttgatta

SEQ ID NO: 105385 - DNA, 263 bp, Glycine max
atctatgaatttttcaccctcattttctgtggcaataccaactgactaccaactcttaatattatatgaaactctttgcattacatatttatatatgagcacaagtggagtcaagtttactggtgagacactaccagtctgttttgtactatgattgaagatacaacttttgacagcttggatatagcttctgtgtggttacaaattatttttatgacatgtcaaaagttacaaatgcgtcaagtaagctcttgtacacccct

SEQ ID NO: 105386 - DNA, 266 bp, Glycine max
ctgttattccagtttggagaattagcagagatataatgagttcttggattgaagttgggagagttaaaaagtatttttactctaaaaacaacaaaccttttcttcttaataatggtcttaatcctaaaaaaaaaattaatattattgaaacttgcagttttatattgtaatttgtagaaatactttcataattttaaatcaaacaaaggcatagtctgtctagaaggcatagtctgtctaggagccattgactctggttgtgaatt

SEQ ID NO: 105387 - DNA, 266 bp, Glycine max
attgacgtcagtatgcatcacgtttgtaaaaagtattataggtagctaattcatcacttatttacttttttttttacattttttctaatttattttattatcattcataataaataaggtaaaaatatacaaagtggtctgacaagaacttatgacctaactttgacatctttaataaatagatcaaaccaaactagaccttatttatattagatggtaggtatttgacaaaccacctaactatcttatttttatgcttatttact

SEQ ID NO: 105388 - DNA, 261 bp, Glycine max
ggaaactccaattctgataaaatcaccatctaagttttgtctttaatatttttttggttattcttgatggatgttatgtcactcaagtttaattacactaaaaatttgtcatgaatttcagcctcatgttggcaagcagccaatagcaaggtggtatttcccaccagaagttgattacagattagaagcgttgccaccaaatgccaaaggattggtagtgtggataattgaagccaaggtgtgaggattataacattattt

SEQ ID NO: 105389 - DNA, 261 bp, Glycine max
ctccatgctccgccgcactttcacctctccaccactcctccgccgagcgccacctacctccctccgctcactcctccgacctctgtaccgccctccgcctcctcctctcccacccccccacctcctcctcccgcctcgccggcctcctctccaatcgccacatcctcacctccctctctgtccacgacgacgtttcggagagaatcagcatcggtgccggcgccatggcagaagcgatcgcgaacagcgcggcatccccaa

SEQ ID NO: 105390 - DNA, 267 bp, Glycine max
agcaaacaccttcatgcactctacaaaaacaatctacaagcaactccctcgatctcttcgcacaccttcaactactctaaagatctctcgacctatcaccaccacagccagaatgtctttcttccctcgatcctactttgctcccgagtcctccttcacccctctcttccgcctcctggacgactacgacaactactcccgggaagtctccagccagcaaggacagagccagaggcccgctgggcgccgcactgcctctctccccgc

SEQ ID NO: 105391 - DNA, 150 bp, Glycine max
gagccgattcggctcgagccagaacatttgatactctgctgactagtaataagtagaacagaaaaggacatctccaccgcttcagcttttactgggttctagtcttaggattactttccataaagctcttacatcttttagtacaaaatg

SEQ ID NO: 105392 - DNA, 217 bp, Glycine max
gatggatcaatcaaagaaataacaactccaaatacaaatgataactttgaacgtccaaataataataataatggaaattttggtgattcggagaagataaataataataggccgatgattcataaactatcagaaaatcttacacctccattaatagatagaccaatgtcaagaccatcaaatgcatatcaaaggccacctcaatatttccacacaa

SEQ ID NO: 105393 - DNA, 253 bp, Glycine max
gtctggcagtccagctccacagcttccgtctatagctgcagagttcgtcgtcaatgagagacacgacagaactgccgacccgaaagcaattcaaatcttcctgggaagtgatgcgctgcgcgcccacaatgcagatctgctattctcttccaaccagctgaccttatatgacgacgatcgctgcaaactccaaattcctttgtgcgacccgaagacgagcgcaccttaaacgtggcgatatagcacggtcttc

SEQ ID NO: 105394 - DNA, 220 bp, Glycine max
accaaacatgccaattgtcttaagatacaagcccctaaaaaaacatgatggaatctggtcgttagctgatggctgaattgttgtgacttgtagttggtaatgagtaaggaacttgtgttctacaagataagtgttgaattgtataatttagagtatctagtgttcagttatgtataaattacttagcatttaacaacaatagggggtactacttattttt

SEQ ID NO: 105395 - DNA, 158 bp, Glycine max
cgagtccttacgcgttgtttgtgtttgcgtcggaaggaagagaagatgagtgagaatttgatggagaaagtgagcgcactgggagagcgcctgaaaatcggaggcgtggaagtggggagaaagatgagcgaggggatgagctccatgagtttcaagct

SEQ ID NO: 105396 - DNA, 259 bp, Glycine max
  unsure (1)..(259): unsure at all n locations
ttttgaggttgattatgtcttaaaagactttaattgaagtcataaattatgtgaaaataagatgtataataactatattctactgcagatggacaattgatgtgggatggaccagtgcatgggtcagaatagtanatgaatggttggcagtttgtgtctactgtaagttaattactgtattttcctaccccttaaactaggcttagcatgaagatttgaattttatctaaagcttcatgagacaagaggaacttcacaa

SEQ ID NO: 105397 - DNA, 242 bp, Glycine max
cttctgctcagtacatattaattatatataggcagcatacaaagacgctgaaatacagatgcaggaatgaaaataatctaactcagctactactgcattgccaactcagcactcctctaacagaattggttagacaaaatcttctagatgctttgatggtactagaagcaagctactagactggaagaagcgtttcaacataatagaaggaatttctcaaggattactctatcttcacaagt

SEQ ID NO: 105398 - DNA, 197 bp, Glycine max
tgaggtttcctaacttattccaaagggatgagatggtattgtaaattgagtttagtataatgttttcagttatttcagtgtattacagtgcaaaacatcaacctcttcaaggacctttgaatggaatattgatattcttctgtctcctctcatttctatattttaatataattgttaatattatagagttctttttt

SEQ ID NO: 105399 - DNA, 244 bp, Glycine max
caatccttttgtgtcagtctccttcctaatcgctgctcagccatcaccgtcgcgactcgcgaggagacacgttccatcttctggcaccccctcttccgattccggcgttccctcttctagttctggagtttactcgacgtccttcatcaaagtttccggggtctgttcgaggtggatgaaaagctttaccaaaattaagaactttccgaatacatggatgagaaagccaagaaaaaggggagaa

SEQ ID NO: 105400 - DNA, 217 bp, Glycine max
tgatgattttggtataaacccagttagaacaggatctacacatacagatggcacgttccagacgaaaagcccatttgcttttgatgattcagtgcctgcaactccagtttccaaatttgcttttgatgattcagtgcctgcaactccagtttccaagttcgaaaactctccaaggtacagtgaggcaggggatcacttctttgacatgtcaaggttt

SEQ ID NO: 105401 - DNA, 252 bp, Glycine max
gtctttgctgattgtctttgtttttgttgaagtaaaaacattgttttcatgtcggactagaggcttggcaaaaccctaaattagttgtcacttgattgattggactttatatgttggggtttgaaaagcatatctgagctacattctattgtcatttgtcgctaatgtccaaacttctggaatgtgaatgattggtagcatagtcactaaatatttatctgagaattttaacaaaggtgacttggtcataac

SEQ ID NO: 105402 - DNA, 146 bp, Glycine max
cttagatgctgtgttcgtggagatctctgggaagagttagaagaaatcttaaatcagaccatgccaaatgccactctttataacgcagctgttcaagggctgtgcttacgtaaaaatggtgacatggcaaataagatctacacaaa

SEQ ID NO: 105403 - DNA, 183 bp, Glycine max
caaaccctctgcgaagtctaagcaagaaactccaaaaagtggaaagtctaagcaagaaactccaaaaagtggaaagtttaagcaagagactccaaaaagtggaaagtccaagcaagaaaccctgaagactgccctttcgacagtaaaacctctcaaaagtggtggaaagactgatgttaatgg

SEQ ID NO: 105404 - DNA, 152 bp, Glycine max
cctgacgaagaacttgtccaaaaggtgcttgcttattcttactttctgacattgggagtaatctgtaccagtcctttgtgtctgaagccattgttgatttagagagtacaaagttgtgttttgactcctgaaactaatattatggttgtgag

SEQ ID NO: 105405 - DNA, 219 bp, Glycine max
  unsure (1)..(219): unsure at all n locations
ttcaaatcctatccgaagttccttataccgtgtttacagtcataggattagaatgcaatatataataactcagtagctactagttgtagttcaacctccttcctccatatacgtttaattaatctcnatttcctattacagtatctttacctcaatggcaccaagttctgcagtgccagatgaacaggttgttgttggagaggagattgagcatgtaag

SEQ ID NO: 105406 - DNA, 126 bp, Glycine max
caaatgcataatagtcccgtggcttccaagtaccctcaacagatgcatggcaaccaattcggaggatatggctatagtcagcaatcaggagttcaatatcttgagtagcaaatgtatggtttatct

SEQ ID NO: 105407 - DNA, 284 bp, Glycine max
cgagagcacacaaattaattccttatttttggagggcgtattactaattaccattaattactattaataaagaaaaaacgcataaccatttctgtcctccttggtcgttgaatcgaaaaaaccagaatggcggattctgagcgaatccaaaatccgtggatggcttcggagcaaactgcaattgaaatgaacgccgattcagggaatgctcttctcttcctcatccgccgccgctaaaattatctaattctgatcaattgggaatcggagcacgagctttctcc

SEQ ID NO: 105408 - DNA, 236 bp, Glycine max
gttgactttgattggtacgtgtctcttcttggagaaatggcgatgattcctaattgatagaagggggaggagattgagactcagattgttgatattggtatgagagttaaggatgctagaatgcagcttgttcgggttgggagtgatctgttgattgatcctgaattactgggtaatgtgcacttgcataggatattgtgtgctgctgcttggattgctggagagtatgttgaggt

SEQ ID NO: 105409 - DNA, 289 bp, Glycine max
ctcgagccgaatctagttctagatcgcgaacaccgccacgtcacggctcagaagaaatcgcgcatgtgttcccctacgacgcatcccggttcgttccgatgcagcctccacaaaaacagccacagcgcgcaaaccggttcgtttccgtcgaaccggctcaacatgcgccggtccgcaatgaagaactcgctcgtgagaatcggtggcgtcccagcgagtgggtgaaacgtgctctcaccgcgctgattcgtccttccaccgcatcaacagcggagaagaacggcgtttg

SEQ ID NO: 105410 - DNA, 291 bp, Glycine max
agcggcaagacctggaagttcgtctcgcacatcgccagtcgcggcgaacgcgccccaacaacggcctgacccccgtctgggagcccttcctcatgctctacaagaacaagctcatctgcttctactccgaccagcgcgatcccaagtacggccagaagatggtccaccagaccaccaccgacctcaagacctggggcccggttgttgatgatgtcaagtacccgacctacaccgaccgccccggcatgccgaccgtcgccctgctgcccaacggcaagtacatcatgtcgt

SEQ ID NO: 105411 - DNA, 292 bp, Glycine max
gatgcttgagagggtaaataataaatgccagtcttaaatgattttgctgacaaacggtttttgaacttctataccccactgttttcaaattatatttgtttgactatgtttacatttggattttgttcattttttccccaaatctgtaaggtttacttcagtgtaacgcatgattgaacatccaaggctttgttgtccactttgagtttattgggactttattcgttggatcttactgtgaaagctgcttgtgatatctactgattgagtgtttatgcaggcattcatacta

SEQ ID NO: 105412 - DNA, 270 bp, Glycine max
  unsure (1)..(270): unsure at all n locations
caattgacagaagtgtcnaacaaggttcccaatgcagaactgaaattgtttttggaagtggagctggggatggattcacgtcccatcgcaccacctgacaagaccaaggatgatatattacttttcttcaagctatatgatcctgaaaaagaggagctgcgttatgttggaaggctctttgtgaagtgtactggcaagccattggaaatcttaacgaggttaaatgacatggctggttatgaccctgaagaagatattgcactttatgag

SEQ ID NO: 105413 - DNA, 253 bp, Glycine max
ccagaaggaagacgcaacaagacaagggcaaaagcgagccagtgtcgctgtcccttcctcccctccccctctccccctccagccgacagcgggttacgcttgagctccgctcgcgttcctagcttcgtgcacacacaaaacagcgacactttcaagcgaccaaaatcctcacgccctcgtctttttgcgacctccttatcctcccctggttcaagtctggcgagcgagcgagctggcgtgatcgagaaactct

SEQ ID NO: 105414 - DNA, 271 bp, Glycine max
ctaaaatccccgttcgatctcacggagacggacctctctctcgcgcggacgcgttgctgtagctcgctcactctcagactctcgcgcaacccccctctcgtggacgcgttgttgcagatcctcgttcgttctcgctctctcgcgtgagtttttgaatttgttggtctatgtgcaggaccagccccgaactcctgctcaatccctgtggatcagcttgcatcgatttatcccctggagaaagtaaacaacatcctgtagaatagctctttgt

SEQ ID NO: 105415 - DNA, 276 bp, Glycine max
gttcgatggagcaaagggtgccaatgcaaaaaatatgacgtattacttttcagattggttttccatggtgaaggagctgcagagttccatcaacatcttctctgatgcaggtcctgatgttaggtgggtgggagatgaaacaggttctgcagggtatacatgttggtctaccattaatcgaacctctctatccattggaagtccagacatcattcagtatataaacactggtgatccaaaagggacagattggctaccggcggaatgtgatgtatc

SEQ ID NO: 105416 - DNA, 267 bp, Glycine max
cgcagaactgtttggataggtattcaaactgtgttgaaggaagaaatggtctttaccgttaacaatggagacctctctactttgtccttgttcaagttttgttgctgctgtgtttttgttctctaaattatttttgctgataagtttgtcatttgtgttttatacaagcattttttttattgtacagttctgtcttcgtttttatattcctttttttttaaattgcatgatcatatatttccctactgttactgcacatgaatttag

SEQ ID NO: 105417 - DNA, 245 bp, Glycine max
ccgacttttacattaattgcacaataattcgccgatagattgatgtctaaaaaaaacaatcataacttactatatacagttatacacctttttcattaattctgtaacataattttccaactgatgttgatgctgatgtgttttatttcttatcttttctttaaataaccttgcagcttcgctttaaaaaatttatatattaattaatttttttattaaaaaaatggcgttataactttccatgc

SEQ ID NO: 105418 - DNA, 251 bp, Glycine max
cgagccgaatcggctcgaggcttcgtcgccttccctcgcaagactgctaactcatctcactcgcacccccgccgcatgacgtggtgccacctccaaacatttcctcgtcctcaggcagttcagctccgccgccgccgccgccgtttcctctgtgtctgattccgacccaacacttccctcttcttccgaatcacagagtatgtgctgattcctgttccttcgatcgattctccatctgggttaatgttggt

SEQ ID NO: 105419 - DNA, 278 bp, Glycine max
tgctttgaggacaataactggtcaagattcagctgttgtttctggattgtcccctgcttatgaatccattccacaggctgatacaagattagtagttgaggccatccataaatggaatatatgtcagagtcatagtcggagagagcgagaagataatgtagacatatatggtgagaatggaatttcagacgtcaataaaatatatccagaggaagtgggggaggagaaaaacactagcccgaaaatcaagaatggagttatgaaagtgaatctctgtc

SEQ ID NO: 105420 - DNA, 207 bp, Glycine max
aaaagatgagaattcgaggatacctgggctgccggagaagcgtacaacagtgctctgttccgcgactatgaaaatggacgtggagaggcttggacagataagtttgaaagacgcagtacacattcgagccgctccgtcagaaaagggacaggaaacggtcgacgccaaagacgatcaatctttctttgcaccggcgcaactgaagca

SEQ ID NO: 105421 - DNA, 273 bp, Glycine max
atgtcagcaaaaaggttgctgcattgtgaccagttgagactgttctggttgtttaaacagtctcttctatcttggagtatggattcacacatttgacttactccacatcgctcaatgttgggagcttaaaccttgtcactggtccaccctttatggaattctggctgaaattaaatgttaaagttttttatgaggctaccaattcttgtagtgcttgaatacttgaatactttgccgcatgtggttgatttgtaaactgttgggatattcatg

SEQ ID NO: 105422 - DNA, 273 bp, Glycine max
cgctcgatagacactccatactagagctgagctccttctactagataatccgccatccaacatggctcgccaacccatctccgcgcaggcgtggttcagactcgcttcatcaacctgccgaacctcaacgtctcccgtttctcccttcgtacaagcccgattcgcgccactgctgagcagaacacttcgcaactcactcgcaccactagctccttacgtgactcgacctgaacaactcagactcttgaccacttcccgacctttcctcgctcc

SEQ ID NO: 105423 - DNA, 245 bp, Glycine max
tatgaaaacaatagtgacagcagtgatgagaatgactatggaagcagaggcttgagcattcgtgatggaagtgacaatggaagtggcactcagttggttgatgcccctgatagcacatgtgcccaagtgatgcaaacaaagactgacaaagttagtagtagatgggtgcatgcgacggaaaaagagtgccatgaacttattcatcttgatgatgttgcaagggttaacgacttggctatgggaat

SEQ ID NO: 105424 - DNA, 267 bp, Glycine max
gttacacaaaagttggccttgatcattgcagtaattttagtaaatagacattgagcatacataaactaaactggcagcatgggacatacttcgtccatacaagacgataagatgaaaaagcgcattcgtcaagctatgggcacgttcatggactttggcacacacttgaaaaacgcgaacgagtgggcccaactctgtgcgacaccaaataactgctacctgtcgttccgcatcgtgattgatccgaaaacgtcggctgagctgctg

SEQ ID NO: 105425 - DNA, 296 bp, Glycine max
tttttatatatgatctcatttacaaaaagaagccaacatagtttagtgtcacaacattttacgtcttcttcatcagcatatgcatttgtttaccgttttcaaaagttttgctgcatagcatctggcataaaaatgggagtgtaaataaaataattttgtattcaagttatttcatattatttcaccctgtagtctccattagtccattaagtcttagcagactcttcaagattgtacgagttacatgacaccagcatctatgctttggtacttattttgcaaatacatatatataa

SEQ ID NO: 105426 - DNA, 283 bp, Glycine max
gtgaagacacgtaagacgtccaagacgctctccaccggcgccattgttgcaatcgttgtggggtccgttcttggcttggcgttgttgctgctgctgctgttgctgtgtctccggcggcggcgaagacagcccgcgaaccgccgaaggcataggaggaggagcatagcgtgccggcggaggcggggacgtcgtcgtcgaaggatgatatcaccgggggttcggcggaggtggagaggaacaagcttgtgttcttcgaagggggaatttacagtttcgctttgga

SEQ ID NO: 105427 - DNA, 289 bp, Glycine max
cttcaattttgcctttctctgcctaaaaggtgaacttcttctctgcttcttccgtgagtcgcgcgttatgatttgaattttgtactttcaatcttttttgtggatggggttgttttcatttttgtgttttgctttctgagatcagctcaaaattttcattttttttttttgtggggggtttgatttttctttgcagttttttataatttggggaacttttaggtttcttggatccgaagttttggttgataattccggtttcactgtttctgacttttagggttccgtt

SEQ ID NO: 105428 - DNA, 289 bp, Glycine max
caaatgcataatagtcccgtggcttccatgtatcctcaacagatgcatggcaaccaattcggaggatatggctatggtcagcaaccaggagttcaatatcttgagcagcaaatgtatggtttatctgtgagagatgacggtgctccgaaaaattcttaccaggtttcttctccatcctatgtgccaccggggaagccttccaagccagaagataagttatttggggaccttgttaatatggcaaaagtgaaaccaaaacctactcctgaccaaactggtagcatgtaaa

SEQ ID NO: 105429 - DNA, 291 bp, Glycine max
cgaagtaatagatctagttccattccaaaggatcttcttcaactgtatagaagatgccaccagattggtaaagacttgttagctgcaaactgtaacgtgtgtcgcagatcatcaaatttggcaacatgccttgattgtagtattgtcctttgtgatggggcaggccacttgattgagcatataagaacacacccttcccatcaaaaatattattcacacaagcttaaacgtctggttaaatgctgcaagtcaacatgcaaggtcactgacatcaaggatctcttggtttgt

SEQ ID NO: 105430 - DNA, 276 bp, Glycine max
gtgatccaaagcttaacggtagccccagccatggaggaggaagtgtagtagttgatggcaaaatttcacatgatgcatcgcatcaagaaattgacatggtcaaaaataaaaatcttgagaaagatgacgaatctgatcttccaaacagcaaaagaaagaatgatcaatccaaccttttagaacctgaattgggtgttggcagagctctctctgatggaccgtttcctgtcattcctagtttgtctgaaacacttgatgcaaaatggactggtgaaa

SEQ ID NO: 105431 - DNA, 274 bp, Glycine max
gccaaatgggttaatcatcctgtgctacagtgtgcgcactgcgacacagtaaactttcctggcacggatgcaggcattgtggtcatggatggagaccgcatggtttcgcggtcgggccggcgcatgtttgagagagactatcgtgctgtaaccaagcatgtgtcgcctctctgcgagggcaccccgttgaatgtgatggtatctgcgattactcgaagtgaagtggacatattggtaaagaacctcgcaaagagtccagaagtgctggagtcgg

SEQ ID NO: 105432 - DNA, 231 bp, Glycine max
gcagtatgatggcacactgccaaaattgaatgaatattcaatgaagtaattgcctttgcttctcaataatggcaatcttatgatgatacaatttatgatccaagaattagctttctgctttgctgtttagtgtttaatagtaatttcatttgatcacgttttatcctcacagtttttatgctgtttgtcccaatttagatgcattggaaattaattttatgatgtctcgtt

SEQ ID NO: 105433 - DNA, 270 bp, Glycine max
  unsure (1)..(270): unsure at all n locations
attgcagcccctctgcttcttccaccataatccattgcatctcaaccctttgcaacccaccacactcgacccccaaacagccctcaacatgtctgtccaggatagagnccaggcccagctgtcgcagctcgacaaggagctgtccaagtaccccgcactcaacaactttgagaagcaaacgtcggttcccaaggtctacatggtcctcggtctagccggcctttacttcttcctcatcttcttcaacattgctggagaattcctcgtcaa

SEQ ID NO: 105434 - DNA, 265 bp, Glycine max
tgcattttcatattagttagagagattgggaactgttaaaattcaaaaggtaaagtggttaaaattagaaccaatttatttttgtgattaaaattattgccaatttatttttctgtgtaaaattagtactaatttaatttttcttttatctttatatttttttacattctttttttaaaaataattatcttatgggagtactacttatttttttatgggaaaaaataattacttgacatattaagtaaaaaacaaaattactttg

SEQ ID NO: 105435 - DNA, 259 bp, Glycine max
cttctaataatgaacctctcttttctttcttgggtcaattgaacatctaattttagattcctgtaaaaaaaacttgaatggttttaattatattatactccttagaaagaagacaatattttttatttttttcactaaattttcattaagttaagctgtataagtttcttctctcattcatattgcacatttgcagctttagtttgcaagattgaagtgaagacacagtgaatatgtggctgtgtgctaccaaaagatg

SEQ ID NO: 105436 - DNA, 268 bp, Glycine max
gaacacgtggtggtggcggcgctacagcagagtaataataacatgaatagttataacaactctgcttctcgtaatttctaccaaagctcctcctccaaacctcccttgccgaacccgaacccgaacctgtcctcaggtatggaacaaggatcgttttcaatgggactcaggcatagtggaaataactctaccttatcaggcatagcagctcacccgcaggactattttcccaaattaacattgaaaatgtgtatgctggtgtgagagg

SEQ ID NO: 105437 - DNA, 138 bp, Glycine max
gcttttcacaaacaagaattaaatctcaaccattttcgagcacatccacgttcaccgtgcccgaaaccctaacgcaaaacgatatcaactcgaagaccgacccttcggtcggaaagcagtacgacaatgagacaccaa

SEQ ID NO: 105438 - DNA, 177 bp, Glycine max
tgatattgaatgaggaaaagtagtgagatgaatgtgattagtagcagctctgccattggatatcaaaactgacaaaaaaaagacaattgagaaggctattctgttcaaccccacagttttcagtttcagtttttctgtgttgttttgtgagcgtgtgtgtaacaaacagttacaagt

SEQ ID NO: 105439 - DNA, 221 bp, Glycine max
ctcgagccgggaaacgttacctgtacatggaaacgtacatgcaccttcccctcctagaatgtcgaggggtagtcccaatattggagacagatacaggtttatatccagggaaatgctatacagtactcgtgacaatcacttgggttctttgtggttggttgaagctaaccaaaacaatcatccttatctcttgattggcactatacatcccgatctcatga

SEQ ID NO: 105440 - DNA, 265 bp, Glycine max
  unsure (1)..(265): unsure at all n locations
tatcgagccgattcggctcgagattcaatctacatgaatgctttttaaaacacttacttnttactcctaatatttgaggcagacatgttgaacaaaagaaatcatgataggcagtctttatattgttcatgattttttttgtcattctatttatataattagaaaccaaaaaggtagtagttaaaagggaaagtgtcagaaaataaaggaaatgattaatataataatacaacaccatgatgctgaattgcgggtgttttctatg

SEQ ID NO: 105441 - DNA, 253 bp, Glycine max
gcgcactttatttcctttaactatatatattgatgtgtggatagttgatgttagctaccaaaatcacgtaagacttgtatagtcaaatttatcaacccagaaactgtgtaactctcttaacctctcaagtttatattttcagacatgcccttcatacttgttacttcaatactttacattgtattttagtctcccaataaaatgttgcacttgcatgcttgatttatgatgctatacatataatagagatttg

SEQ ID NO: 105442 - DNA, 187 bp, Glycine max
cttttgaacaagagagatgtggtatttcgatcatttctggaattgaattacaaaatgccctgttgtatcagctcaagttttatagctgcactatcttttgggaggtttctgatatatgtctctatttaagatggaggattggaggtttttattcatcaatataagtctgcaggttcatcgagtcagt

SEQ ID NO: 105443 - DNA, 171 bp, Glycine max
ccttcttcgaggacacaaccaaaacggcaagcagcacgctccgagagcgctctcgtgtcccgcttatctaccaccccctttgagcaactctcaatcaagcaatatatcgctcgagcagcgctagacgccgtcgagctcccccgagtcgatctcgaacctctcacacacagg

SEQ ID NO: 105444 - DNA, 296 bp, Glycine max
ccatgactccctacatttttggcgtcgtcgtccctctcttagtcactctcatcatccgcaacaactccaacccccaaacgacgtcgcggcgtcccggtcgaagtcgggggcgaacccggtctagcaatccggaaccgccggttcgaggccccggtccagagcgcgtgggagggggtcgccacgctggcggagctcttcgaagaagcctgcaagacgcacgcggagaggctcctgctcggcacgcgcggggtgctgcagagggaagtggagaccggccaagacggcaggtcgtttga

SEQ ID NO: 105445 - DNA, 292 bp, Glycine max
ccagttgccagcattgaaaagcttgcatcttgagcatgtcactctaactgcaggtgaaggtgactgtgacggagccttttcaacttgtcacatgttgaatactttggtcattgaccggtgtaacttgcatcatggtgcaaaattcctctgcatatgtaattccaacctttctactttgaccataggtagtaccattcaagaaacaccctacaaatttatactttctactccaaatcttagatctctttccgtgatgcgtgatcctattcaccaactctctgcttgcaatctt

SEQ ID NO: 105446 - DNA, 291 bp, Glycine max
ccgcattctttgagtgattcttttgctcaggatttgacagggggtgcattggtgccagtagaaggacctgattatcctctttttgctcttgaaataaaccctgagaagtctagggaagagtttcgaaatgccgcccagaaaaatggtggaactggagtcaaagacttcatggatggcatgggtcttggaatgattgcagaccagttgggagaactaaaactgggagaattactggattctcctcctcctggactggatgaagctattgcgatctccaaggttatgcaattt

SEQ ID NO: 105447 - DNA, 291 bp, Glycine max
gtcttcttcttgatacccattacacggttgtcgcttttgaatagcgctcgtcctctgtcgtcatatcgaaaagccgaggttttgaccacgcgctgtagctcccatttcaaaactagggtaaagctcaggattgctccttcagcgtcataacttcgtgtaaccccacgtgctcaagttctcggtcctcttggtctccatctcgcgcaactccgatcttcctgatctcttgagctacaacactacacagcatgtctgcaaagtcggtgcaagggcctggcggcaagaagcccg

SEQ ID NO: 105448 - DNA, 286 bp, Glycine max
aaaaaactccgccgccatgacgatcactcctctgccacacatgttcgtgatcaaggacctggttatggacatgacgaacttctacacaaatttaagagccgttatgatatgtgctaccatacttgtttattgtagttatagatggtttcacattcctggaattgtaataagatttttcttaacttttaatttgtcttctctttgctgatgtgtattgtgttccttctgtaggtcctccataaaattaatcactcaaatatcataaagttgaaagaggtcttagaga

SEQ ID NO: 105449 - DNA, 264 bp, Glycine max
caaaattcaagtgtcatcctcaaatttgtagatatggtgaaggattttccattatgggcaaacagtttcaaggacagcatggtacataccaatttgcaaattcatgtacagcagtattcttaaactgaaagggtttgggaggtgagtgtggaatatctttctgatgtaattacttcttatgtcaacacaaactgttcatttttgttaacaaaatactccttttatttttcatgtaataaaaaattaaaaggcttgttttttaaa

SEQ ID NO: 105450 - DNA, 268 bp, Glycine max
aaatagagtacactacttgtaataaatattgttagagaaaaaaataagtggaaagaaatagatcaatacattgcttaaaggtattttgtatatatagattgattagatattaatttattccatttccttcaaaaacatatcttactaactttcatgatctggttggaataagagatgattaagataatagctacaagtacaactttaatatctccaatatagattcttaaatttaaacaaaagaactgttccaaaggacacattagaa

SEQ ID NO: 105451 - DNA, 273 bp, Glycine max
ctttgctctcctttattgctatcctcatcaaacgcaggaagaatgtcgctgtcaatgaaagttcaaataaaaaagagggaacttctcgggacaatggctcactatctgtaccaacgggcctctgccgccacttctcaatcaagaaatgagaactgccaccaacaactttgatgaactcttcgtggttggcgtgggaggcttcggcaatgtgtacaaaggccacatcgacaatggttcaactacagtcgcaatcaaaaggctcaaacagggttc

SEQ ID NO: 105452 - DNA, 273 bp, Glycine max
ctacacttaaaaaacgattattttttctaattgatgaatcttgtcgttttaaaatatagagattaagagcaattttgacccaaaattgagggatgtaaaacacattctgccgtgttgttatttaagagcatgtttggtataattgccttttgagaaataattgtttattctgttacaaggttagaaaaaagcagttattcctccttgaatcctacacacactaagatgatattgttaagcagtcattcgtttggatggaatatagacatcgca

SEQ ID NO: 105453 - DNA, 279 bp, Glycine max
gaaagaaatctggtacgatttcaacggctgcttataaaaaatgggagaaggctgcaattgctggtgtttctttagttgcagatgctgctgagcatttggagcgagctgcaactgttaaagaaattgaacaagaccaggagaatcaggagaaagatgttctgatcccgctgattatgtcctgccctctttagccaaatgtccacaaaagcaatttgttgataacaatgtgaacaatattatgaaacttaagctccagttatttccaattgatgaacctac

SEQ ID NO: 105454 - DNA, 276 bp, Glycine max
caactctgctgaacaagcagctgggaaggttatgaaacaattgctccagcaagatccttcaacatcagataaagattcaatggaggaatctgaactaaaagattttcagtttgtagcagcaagacttggtattacatcccaacggccatcttaatagagagacgatctattcagaagttgttagaaaaactcaaaccaaatgaccagacaaaagagatcatcttgaaaaatcttttgtttcccctgtgattgattttcggtgctttatcaggagaa

SEQ ID NO: 105455 - DNA, 270 bp, Glycine max
gaaactccaaattcccccaaacccccccttccccgaattatcgcggtggccttggagccgcaacaggacttccccagcgggaacagtccccagcgtctcctcaaggaactcgccgaacgcaagacagcaacttccccaagaagggtccccaaggaggttcattctaaggcccccaatagacgataacaaattagcagaacggtttctcaacagcccacaactttctctcaaatcgttccctttattaagttcgtgcttgccttcgtcgcg

SEQ ID NO: 105456 - DNA, 269 bp, Glycine max
ctttatgattgattagtgtttgcatattcttagttagcgcctctcacatgataaattcacttatttcagactggctattcggttgtctcagcatgtgttgtcgttcttcgctggaaggataagacaaatagtcaagtgcatcttctgctgagcgggaaggcataatttgcctcattgctgttgctctttgtggatttgctagtgggctcttgtaccgatatgatgcttcatttatttttctgattctggctttagttattgcagttggt

SEQ ID NO: 105457 - DNA, 272 bp, Glycine max
gggatcgactttccattaggaccaacaggaagatttaccaatggcagaacagaaattgacataattagtaacatttctttacccctattaagacctctaatctatgtgctgcaatcaaagatttcaaattcatgtctggttatgaattttaggtgtcaaatttatgagttggtgtggactaccttctgttaaccgaataaatttttttgatagtgctgaaagaatgaaaacaatattggtatatttatagagctaagtgtcttttctcttgc

SEQ ID NO: 105458 - DNA, 113 bp, Glycine max
ccgctcgtgctcacacatacaatcgcctcaagttttcagctaatctcttatcaagttgtgctcattactgactacagcgttcaccaactgggtctgttttggttacatcaatc

SEQ ID NO: 105459 - DNA, 294 bp, Glycine max
atcgcctctcggtgcagcttgtatagctagcagacgcaacaacacacactctctacagccgtacggtagaaaacacttacgaaaaacaatcagccatgtctattaaccgcgcactcatcaagaagtgggttcccaccgaaacctggcccatctttgcatcgttggcatcgcttgcggtggcgcagggtactacttgtacaagcttgctatgggccccgaggtcgtctgggaccgcaaggtgactggaggccgtgggacaaggtcaagcacgaccagaacctcaagttcctctcg

SEQ ID NO: 105460 - DNA, 288 bp, Glycine max
ctcatcaccaacctttgcacccccttctcataaccccgcctgcgattactattattctctcagatttttcgggaaaagcctatgctcgaaatctgctgaggaaatccaacgtggatgctggaattgccacactgtccctcactcggaacctttctcgtttgcgagttgtgccagtgcattcagcccgtggatagctccattgactattttgacatatttggggtggagaggaagtatgacatagagggtgagaatttggagggcaagtacaaagattggcaaaagaaa

SEQ ID NO: 105461 - DNA, 171 bp, Glycine max
tctcccctaccataagggtgctcctcctctcacgccaacccccagactctcgttaccaccgagagccaccaagcagacatacaaggtagccttttgctcacctgcctgcttacgaccaacacccgaggagccaacttcgcggcaaaacactcctacttcccacacaagatg

SEQ ID NO: 105462 - DNA, 292 bp, Glycine max
gtaaataccttatcatatcaagtattatcctctaagattagttttcacatttcctctttatttcttagaattcaacaccatatttctttaacttatcaggatttgttttttcttaattatcctggattatgactggtataaataagggttacactataggttctatgaatatatcaaattatcgaatatattgatatgtcgtaataaatcttagttaatatcagtgtagtatttgtcttattctcttcatctatctaaaacccaaaatttttaaagtagtcaagcatttgat

SEQ ID NO: 105463 - DNA, 243 bp, Glycine max
tagactccttcaccaaagccgccgtgcgcggctccgccctcgccatggtcgacgccggcctcatctactgggagcgaggcgagaagccgaaggccatggagttgtatcttaaggccgcggaactcggaaatccttctgctcagtgcaatttgggactttcctatctccaagctgaacctccgaacactgagaaagctgtgaaatggttacgtaaagcttctgtttgtgcggatgttcgtgctc

SEQ ID NO: 105464 - DNA, 232 bp, Glycine max
cataaacttcagatggaagcagtttatgtggaccaataccagttttattgggaactggaccaatcttatgacattgtgagtatacatttagacccatgcattacttctaacttataagtgcaggttgagggacgattctttgctctctgtcaccttccctccagtgttgaatgaagctattgaagttatgaagagggctgcacctctggtgatcttttaattaaaatatttg

SEQ ID NO: 105465 - DNA, 287 bp, Glycine max
gttttgatttccccaaagaacataaaatatggccacgggcaccgttgacaacaaagcggcgaaatcgaaacctccaaggccgaagcgaatatgtttctcattcgcagcgtacgccggcgacctccttaattgcctcaaagcctcgaaggtcgcaatcgacgaaggactctccgacgcagaattatcaaacatagaatccaaattgaaattctcgttcccaccggacttacgcgcgatcctccaacaaggccttcccgtatcccagggcttccccaattggcgttctt

SEQ ID NO: 105466 - DNA, 225 bp, Glycine max
gtcagcaaagtccccaaatgtcaactgttagctcatttactggattgagtagtgcaagctcctttactactttacaccgaggtgcatggtgcacaccccctcgcctgttgcttcaagatcagtttgatgtggtgcccccagaaacagcattgtaagttcagtggggaagaagacaatgagccaagatccattaaagaaaaagaatcctggaacagtcaaaattag

SEQ ID NO: 105467 - DNA, 130 bp, Glycine max
atctgttttcggctcaaaaaggaagatatacagtacacctcattaacatgtacaattgtttatcatctgaatgaggtgtactgtatatctgtttttggggatacgtatcaaatatcttcctttttgaggc

SEQ ID NO: 105468 - DNA, 265 bp, Glycine max
ctctggttgggtatctgaatattacacaggtcatagacttttaacaataatttacgttgacaattgtcaagaacaaacttcattttttgggtaaatgtctgcatatttcattattttttcattgaaacgaagtacaatttctatctttagaagactagactagatgacaattctcccaatccgtatctattctacatctttaacgggaaactaaaatattttacactagaagcctgcaaaaacttgtataacactataggcagca

SEQ ID NO: 105469 - DNA, 254 bp, Glycine max
cagtcacccgcagcgttcagctcggcgatgttgtgcggcctgtcgtatactggagcagattcgcatcgccctctcggcctgctgctggaaacgccgtctgcaaagcggggcctcatcacgacctcaaacacaacaacaggaagtggaagcggttggataccgggctgatagaagctctgcctgtatctccatgaaagcagacggcggatgcgtctgcacgtctgattggaccatggaccggtgagctgcacagc

SEQ ID NO: 105470 - DNA, 257 bp, Glycine max
ggcaattagcagaggagagcttaggattggaaccacttggtcctgaggttgttgcttattttggagagagattgatatcagagaaaaccctgagcagaaatgctgtaagacaattgtctaacaataagactgtcattgcttttacttataaacaaaatgggttgcttgttggttgcaagtacagaacaatggagaaaagattttggcagggaaaaggcgcggacaagatactgtatggaatagatgacattagtcaa

SEQ ID NO: 105471 - DNA, 186 bp, Glycine max
aagggtggtgcggtgacgtggtgtggcaggcagcacggataaaggccgaggcgatggcccaagtttcaaagtttggaaaaagcacgacgccaaagccaatggaagtgaaggaggagtcttctagcttcaacaagagaagggcccacggcagagacaaaaacgacatctccaagaagaaccttctac

SEQ ID NO: 105472 - DNA, 129 bp, Glycine max
ctcgagccgatgacatcatcctcaacaataacacatcctgcatactcgactcggaatggtcacaatacgattgacatagtactgtgctcaagacaaaactttgtaaccatagaatttaaaattcctctg

SEQ ID NO: 105473 - DNA, 252 bp, Glycine max
  unsure (1)..(252): unsure at all n locations
ctcaaactttgtaacttcaaaacatactcctctgttctctctgtttctcttcaatcttcctgaaaaaaacaataacacgatnaatcatccacactctcacattctctctctctctcctttcaactaatatggcaattgaacaccaagacaacactgtcagatgaatcatgccanagatcaggangctcatgggtgctggaggcctgatgatgacgacataggtggcaccgtggttgacgcactgctgaagag

SEQ ID NO: 105474 - DNA, 240 bp, Glycine max
gttgagaagaatgcggatttccaaagctaataaaggaaacatcccttggaacaaaggaagaaagcacactcccgagacattgcagaaaatcaaagaaagaacaaggctcgcaatgcagaatcctaaggtcaaaatgaagctcgttaatcttgggcatgcacaaacttcagaaacaagaaagaagattggcgctggagtgagaagacgatgggaaaagaggcgtggacagaagatggtgca

SEQ ID NO: 105475 - DNA, 183 bp, Glycine max
ctctctcttacggtctttactcttttaccattctcattttatcgactacgtacgtaatcaaacacacaataatataaagcgctggatctgaattttccgttgcataatctctgtttctccctgtccaataaatttgtgatttggaactgagaagagatggatcgagaaaatggcgacggcgac

SEQ ID NO: 105476 - DNA, 237 bp, Glycine max
caacaccttactttcacgtacacacatacaataattatgtctcacgctgcacaccccgctagtgctttccaagttcgaattagagttttggaagctcatggattagctaaggctgacaagacctcgcaatctgatcccttcgtttatgccaagctcaagggattgaagactatgatgactcacgttcaaacctctgttatcaacaacaaccccaaccctgtatggaatcaagaactc

SEQ ID NO: 105477 - DNA, 221 bp, Glycine max
gcgcgcgctttcaagcgaagccacggcgccatcagaggatgccgctacaactcttccgcctctgcctctgcctcgaccagcccgacacaacatgccttgacgctcagaacgctggacaggctcgtgacgtccatctcgaaaacgtcgaaccagactgtctcgcctctggcaatgcgcaccctaccgtcaccttggctttctagctcatcgcccaacctcgc

SEQ ID NO: 105478 - DNA, 233 bp, Glycine max
gtaagaaactccatagcgaaaaagaaaattcacgttatattgttagtttattcgtcatttctttctttgagtagtaatggcaagcctcaaggttgcatttgtggttgctgtgctatacatggttgtggtgagtgcacacatggcacatgctaggatcaactgcagccgtgtcgcggtcgcggtgtctccgtgccttggctaccttcgtcgcggtggaaggccacaggcgaggt

SEQ ID NO: 105479 - DNA, 141 bp, Glycine max
tgctcattgagttgttaatcagctttcctttcgaagctatggtaaagtatgctgaaatgatgcccatgctagtatcagtattcatcttgaacattataataatttatgtattttttaggcagcagcaatttacagtatagt

SEQ ID NO: 105480 - DNA, 188 bp, Glycine max
cttctctctgatatttctacttctgtccaggttgcagcccttggacgccatcagcaatatagtggttgactttatgccacataaatcaacattcatacaatgtgggggcattaaagagcttgtgcaattgacgagtcgatggattcatctttaaggcttaatgctgtatgggccttgaggaacatggt

SEQ ID NO: 105481 - DNA, 153 bp, Glycine max
gcaaaaggtcgacccgatcccaggagagttgacgagcgacgggagcgccgtggcgagatattcgagctactatggcatcacgctcattggtgagacggtcggctggtccgcgttcatctggttcttgatctggatcagcatccttcggggtgt

SEQ ID NO: 105482 - DNA, 185 bp, Glycine max
cgtagacgtgtattttgacaagtaatgtactaattgatactccttcctgttcttattataagattcattcttattataagattgaacttaaaagtataatttaatcctttttataataagattcaatttacaatttcttatatattaattattttttcacaaaaatacctttaattaacatgagt

SEQ ID NO: 105483 - DNA, 148 bp, Glycine max
ctgaaacagatactatggacgtcaatgctttacataagaataatcttcctggtgatgttccattgcacacaaataagtagtccaaggatagtcaaaactcgcgtacgtctcaaggtgcaacaatttctgctagagagaaaactatagc

SEQ ID NO: 105484 - DNA, 172 bp, Glycine max
ggaagggcaagagtaggagtaggaacaaccgtgggaacatggattggtggatggatgggttgagtggtgagttatggagagggaggaggaataatagctttgattctgctagtggggagattccaaagagtggtggtgtgagtagtactcctagtatgaggggaactgtgtg

SEQ ID NO: 105485 - DNA, 111 bp, Glycine max
  unsure (1)..(111): unsure at all n locations
cactcgagccgcaaaaccaaagatatgggacataganccatagagtctcctgtttttgtaagtactctcacaaaatgttagtagtcactcagggacttaatagccatgctt

SEQ ID NO: 105486 - DNA, 104 bp, Glycine max
ggcttattgactttagaaatcctttggtgattcatatttcattttgatgtatttcttggatttgatttttaacagtactgaaatgcaagtcttgatgaataatt

SEQ ID NO: 105487 - DNA, 171 bp, Glycine max
cttcggcgagttgacatcgtgcagcaagagactttgttgcagcactgagatcttgaaaagttcttaaaagttcaaaatgatggcggtccatgaaactgtcgaaattatttctgggtcaccaccagacaagccaaaactcataaagggtggaaattacatcaaaaccggacg

SEQ ID NO: 105488 - DNA, 164 bp, Glycine max
tgcagattgatttgggagatattctacttgcaaataattcaacaggtcctcttacatttctattcatcatgttgcttaaatctgcaacgttttttcattgtttcttatagctgtgactgaatatgatgtatgaagagattaaaattgctaggcattgcattata

SEQ ID NO: 105489 - DNA, 165 bp, Glycine max
tttacaatcaggagaatctgtaatgaaagaaagtagtccagagcatagtgaagatggtgggaaaatagttagagctggtgatgaaaacggagatgatcttttatctgtaagcaaaattggcacaagcaactccagcatagtctctggtcgacgttgtgatgaaag

SEQ ID NO: 105490 - DNA, 199 bp, Glycine max
atacgccgtaacttgtttgttgggaacttgacctatccaagacacgaatatcaaccaaacccatttttttcatttttaggaatataaggaatccccttcttccccgttgcgcttatggttttgtgagcaaccctaatccaccccaacccaaccctattgaattgaattgggggaagaagaacatagaaagaagacgaaa

SEQ ID NO: 105491 - DNA, 204 bp, Glycine max
ctaatccggaaacccgaattagcctggagtccctgtttgggaacgcgtggtttaagaaatcactaaacccggaaacggcggaagaaaacgcgttggggctgagttatgtgaagagtagttataattacgaagggagtaaaaaaagttcgggagtgacagcgtttgacataatatcgatgtcttcgggtttggatttgacgaggt

SEQ ID NO: 105492 - DNA, 140 bp, Glycine max
aaaggattcagaaccttttaagaggaattatgcttcagtactaaagcaattaactgaagcaaatgaacaggtttcttctgccttgttttgcttgaggcaacgcaacacatatcaagcaagctcctctgttttgtcattaa

SEQ ID NO: 105493 - DNA, 191 bp, Glycine max
gccacaacacgggttgcctcactttactctgccgcagatgtttatgttataaactctcaggggctgggagaaacatttggacgtgtgactatagaagcaatggcgtttggtcttccggttcttgggacggacgctggaggaacacaggagattgttgagcacaatgttacaggtcttcttcatcctgttgg

SEQ ID NO: 105494 - DNA, 113 bp, Glycine max
ggaatatatagcagtgattaaacctgacaatattctttgatatcaggaattatctgtattttgcaatttgcaatgatatttggctttacattgtgtctatctggctaaaataa

SEQ ID NO: 105495 - DNA, 278 bp, Glycine max
acggtgatgatggcaacatctcatcacatataactgaaagattcatcaaagtcttgcttaccatcattgaggcctctgatgacgctgaagcgatggttactgctatgggtatcatctctaaactaccacaggagtctcacatgactcagtggcttctagattctggggcacttaaaactattttgacttgtcttaccgaccaacataagcatgtctcacacaaaaaacaagtcatagagaattctgttcaagctctttgtcgttttactgtctcaaca

SEQ ID NO: 105496 - DNA, 121 bp, Glycine max
taagtgtcggtgatcccctttctccttccttctctgagagacaatgacaatgacgtgggcgcgattcgattcgtggcagcagcaatactataccacaagcggcgtggtggtaggttacgca

SEQ ID NO: 105497 - DNA, 267 bp, Glycine max
gcgaaaaggaaaagaagggtttcctttctcgaattgcttcttgtttcttcttcttcaccagacgatccagactgacagataagaacaggtcaggtacactgtgtgattgagtgagtggtcaatgaactaccgcagcaacattctcatccaattgttttcctcgcctcctgcatgggcaactctaatcgcagctgcatttctcctcctaactctagccctctccatgtatcttctcttcgagcatctttccgcttacaagaaccccga

SEQ ID NO: 105498 - DNA, 250 bp, Glycine max
tctgatggtaaatgatctgcccactgaaaatgttcagtcagaccatcaagctgtgtattctgctccttctgttgatagtgctgaaaatgctgatcgtgttcttacttgtccagcctcaagtcagatttgttctccatcaaggggtctttcagatttggaagagcccccgttgagttctcattcttatccaatgcaaataaaatccaatgaagtacaattgacgcaaattgccatggtcaccaatgctgag

SEQ ID NO: 105499 - DNA, 266 bp, Glycine max
ggtaacaacacttgatccaatacttctggaagcctttgtacttcaggaaactgaggtttctgctgttaaatatatctcttatgaagagtataaaaggttactggccaaagaagattcaggctatgtcccttatgatgttaatggacaatatggtcaactctttcatataattgaaaagatgtacaaggcaaatactgtagcccgcagtttgactctacagaagcaaataagtcgttatgctcctatttccctcagtgctgagttga

SEQ ID NO: 105500 - DNA, 260 bp, Glycine max
ggtacaaagaggaggatactcaacaaaatcttggtgaggatgaagcacgagcaggattaagcaagacattatgggtaaacaactgtggctcctgaccgttcatttgcttgcgtaatttcgccagttctattacaccccattgcattttctctatgtttagtttcatatctctcctctcttcggagaagctttctctgttggcttcattggacgaaactaattgggagtgcttcatccttggactctcagttactatgtca

SEQ ID NO: 105501 - DNA, 252 bp, Glycine max
gtctcgatgtgccccttcgtttcgtcggcatgatcgcagccagcgctcttttcggcgctgtccttgtcttctaagcgtaacgtgtgagcatgcgtatcgaaaagatgtagagcacttgttttctggtttctggagtttttttgactgccgtcgtcggcattacatatatacctgattcgtcattgcaggcgcagggccttttgtatagtaatacatatacgacaaaaaaaaaaaaaaaaaaaagggggggcc

SEQ ID NO: 105502 - DNA, 262 bp, Glycine max
tctaaattgtgtacatccatcttcttctcaaagaagttatgacagcacattacttgcttgacattccctaattcatttgttcatgtttgaaagttgcactttaattaagaagataacaataaagtgtttttttgccctttaacccaaagtagcttattcttttggatgaggtgaaattgtgggaaatgtatggctttttcagtgatttgttcttgtgttagagcattataacataatgatctatattctttaatgggatgca

SEQ ID NO: 105503 - DNA, 263 bp, Glycine max
tgacatcctccatgtctgattacaagaagagattagatgttgcaggttacgtacccatacagacaagatctaaagccaatcagcaagaagatagagatttccaagccaaatacaatctaccggacaccgaattcgtcatcacttattacggctgttcttccagcagtctggtggcgggttacatctacatcacacctagatatgtcatttttgacgcttatgttggagcactgagtgtacctgtcgtcatagcaatcaccgac

SEQ ID NO: 105504 - DNA, 223 bp, Glycine max
gaagagatggacaacaaggcaagaaggtcattgtcggttttgaggtttatgcaaagagcatcgaggctggtaacagacatgctcaaggcatacctgtttccatcaccgacgtcagcaacggcatggaattgactatgcgcaaaaacggtactgctgccgctgctgcttcttactactcctccgactcgacctaccacccggcgaccatcgacgacgttgatga

SEQ ID NO: 105505 - DNA, 171 bp, Glycine max
agaccaattttaaaaaccatttgtttacaacaaccacgagacttctctcaactgatgccgcaaaacttacaaatagagaaacaagcaaagctgggcctcttgttgagtatgaacgaaggattactaatggtgaacttgtagaaggtgatgcttgccaggtagacactctga

SEQ ID NO: 105506 - DNA, 162 bp, Glycine max
ctattgcctcatttcttctcagacatccataaaggcacacagattcctttgaaaagcactattgtcactggtgtctttgcagctactcttgcattctttatggacgtttctcaattagcagggatggttagtgtgggaacactgcttgcatttaccactgtt

SEQ ID NO: 105507 - DNA, 241 bp, Glycine max
caaaagtattttgttcgcttattaccacaaaacacgagtgcaacaaggtgcctgcgtgcacatacgtagcgctagatcttgcacagttgtataaaactcaaacagctttcaacatttgcctcgacaagcgttttatgctcgactcgcttaaagcggccacaaacccagccagctacacgtcaacacccgacagcgcactcgcgactgcagctggcgttgatcccaaagtcgacttcacaag

SEQ ID NO: 105508 - DNA, 251 bp, Glycine max
cttcacttttcacaaaacgacgtacagtcatatcctaaatcaccgacgagattatataggtagtcttgccacttttaccgaccgaccttgataatcgggtgcgcacacggcgtcgtaccacacaccagcctcggcaacaaccgcacgaacaacgcaaacacgaatcatggaggaagagcgtctctggaagttccgcaagcccgagtggctcaatagcgtctgggctagaaactctggcgtgtacgcctctg

SEQ ID NO: 105509 - DNA, 271 bp, Glycine max
cattgctcttataatcacctgtcactactcaccaccaccaccaccaaccaacatacctcagttaaacgcctttatttcaaagcgacaaccccttagtgccaagcaattacggaaccggcgacttttcgacggaccagcctactagtttcaccgcagccgctccggttgaaaacaaataataaactcggtcgctcgagcagttctgtcgactctttcatcgtcttctgcacctctctacacgacagacaagcacagcacgatggtgtctcca

SEQ ID NO: 105510 - DNA, 259 bp, Glycine max
tacttagcctctccttctccctcttcagttgcttgttacaattacaatgctattactattcccacctctgtctcagttagcttcacaaactcgcttgcctttgccttttcccgtgaaagccaaagtcaaactgaaggttgtgtccgaagctgatgccttcccttcatttcttcccaaagaagttcacagaatcaaagacccttttgctcgaaaccttgccatgcggattcacagacttccagtttctgttaggttctct

SEQ ID NO: 105511 - DNA, 185 bp, Glycine max
cgaatctgagaccgacgttctatgttaagaatctcaactcaagagatgtcgttgatcgagattatgatcatgttggaagaatgactgtccctaaattggcgcatacgcaacgaggagatttgtttctggatgatgagaagacgaagtattttgtttgtgggccggaggggtttatgggggatgtg

SEQ ID NO: 105512 - DNA, 173 bp, Glycine max
ctttgtaagatcactgcgctgccattgccaaacattcattcattcatttccataacttcagagagaccacgccatggtggcggaaatcgtcggccaaatcagagaggctgcatacgaagccgaagacatcatcgacacctatgtggcggacatgattcgacgtcgaaagatga

SEQ ID NO: 105513 - DNA, 251 bp, Glycine max
atcaattatgaattatgacatgtggtattagttcttctctggaggctactgttgcatccctgccaagttggtatttaattagagtggctagtaaaagatgctttatccttttcttgaccctatttcatactgtctcttatattgattgctagtctttcacataataatatatgtggtttctgtaatttataagctttttatacaagaattttaataataattgaagatgttgctcagtgacacttggatat

SEQ ID NO: 105514 - DNA, 116 bp, Glycine max
tataagacctgcttttattgatgaacattctacaatacagaagcatccatctgccaatcaatccagtgatactgacaaaagtaaatctatagaaagtacaggggaaaatattggtg

SEQ ID NO: 105515 - DNA, 132 bp, Glycine max
tcgccgctgcgggaatcgaactgcgactgcgtcctggaaacagacgacgacctccggctctcggccggactcctcggcggcggcgcgctgtcgaagccgccgttgcggacgcggctgaaccgcggatgcatc

SEQ ID NO: 105516 - DNA, 224 bp, Glycine max
cgttacttcctttattagcttctgcccttgaatttggttcagctgctgcctcagctttgactgcattgttgaaaatgggttcctggctttcagctgaggagtttaatgtcaaggtacttccaacaattgtaaaactctttgcctccaatgatcgagctatacgagttgcccttcttcaacatattgatccatatggagagtcgttatcagcgcaactgttgatg

SEQ ID NO: 105517 - DNA, 260 bp, Glycine max
ccgtgatgaaacaatgtatgattcatatgcagggccaggtgtaccgccatttgcctctgatatacctcctccaccagtgttgatgcctgtccctggtgctgggcctttgggaccctttgttcctgctcccccagaagttgcaatgcagatgttaagagatcaaggaggatcatcatacgatgcctctggcagaaagatgcactctggccctcctatgggtggaggatcatcaataattgctgttcctccaacttttagac

SEQ ID NO: 105518 - DNA, 235 bp, Glycine max
aatcttctgatggaccattgagagtttgcttgatggatggagatacaacactttcaattgatcaagttacctcacaaagtggagctcccgctgaggaaataaagttgagtgctgacaacattaatgagcaaagatttatgactacatcttctgcagtagacattccttcggagcatcttgaaacagatggtagacagctagatcatactgggattacaagaaataatctgtattg

SEQ ID NO: 105519 - DNA, 267 bp, Glycine max
ctcatacaccatgcagggtccacgcttcccatctcacaagtcgagcacggccataacactacaccgtccagaccaatttcccaaaaaggaacgacacgaacgcaacaaggacgaggatggtggtggtggtggtggtgatcgcaaccgcgaccaagatgaagagcaacaacagcagcagcgttcaccagaggactcaggagatcagagaccacctgatacaccacctcctctgtcacaagatgtgatagagctgatagacattgctgg

SEQ ID NO: 105520 - DNA, 224 bp, Glycine max
tattacttgttttagatgctttatgaagattagtctcttctctgcacacattgaatgctgtttggtgaaccttcctgtaagcttaaatgatggttaaaggagcatgagtgtcaaattccttaacatttagaaccaattatcccaaaggcttaagcagttcaataacatgaatgattttattacatctcttaacatttactatacaaacccaggctgcagtttac

SEQ ID NO: 105521 - DNA, 233 bp, Glycine max
cctttttgtctcttgtgcgcatttgcctcggcaccagccacacaccgccacctccccccaacacccaatactctctagcccatcatggccaacgacgccctcctcatcaaccccgaccggtactcgcagctcggcatcactgtccgtgcctcggactggctgtgggcggttttcgctctgatgacttttgccgatctggtcgttatcgcatggcactttaccattccccgcgg

SEQ ID NO: 105522 - DNA, 260 bp, Glycine max
ttagaacatgtaaaattgcacctatagtggcatgtcagtacaagtgctcatttgcttactaaaggacaacatataccatagcaaattattctagaactattcgtaagagtctgttgcttgtgtagaatccaagactctgaggatgtgaagactgaagtccacaaaatatcatggagagcaacctctgaagagcttgcctatagatctttctgctgctcttgatatctgtggttgatcacattcttactcacatttgagta

SEQ ID NO: 105523 - DNA, 264 bp, Glycine max
gtacaatcaaaatcaaccatattatggatatgattcaagtttatattatgctcctaattcccctgctgagacttaccaaacccaaaccacatcttactcagccacaacgtatagtgacccaaaatctgttgtgtatgttcccaataacggtatgagtcagcttgtgatatcttattctaaagcggaattcaatgtgcctgaatttgatgactatgatccaacaccttatggtgggagtggctatggaggagatgttgtttatgg

SEQ ID NO: 105524 - DNA, 252 bp, Glycine max
ccaaaatctggaaaagtcgaatccaaacacaaccacaatacttgagttttttcacaaaaaccctccagtgaaaatcaaaaacctcaatttctttcttctcaacatttccaaaatttctgcccttcgaacttcgttcttccgaaaccagtgtacactttggcggcgtggcgaggcataaatggcatgcccgaaaccagcgatggtcctagatctgaagccttcgtcggaggcaccgccattcctcccgttgac

SEQ ID NO: 105525 - DNA, 248 bp, Glycine max
cactgatgtggagaaggttcctccatttgaggtgggccaagaaattcatctgatgccatctgttactcagccacggcttgggtggtcaaatgaatcagcagctactgttggaaaaatagtgagaattgacatggatggtgctctcaatgtgagggtcactggtaggcagagcttgtggaaagtttcacctggagatgcagaacggcttccaggatttgaagttggggattgggtacgatcaaaaccaa

SEQ ID NO: 105526 - DNA, 262 bp, Glycine max
gggttcgtcaattggagatccgagcactatacaagctgaagaagtgccttgtcaaacaaggacttgatgcttatgtagacttgcttctatagatgagtagacaccaaggttatgtacttcatttcgctgagactttttctggttacaatctgaacagcggtaccaggatcgaacttttgaaggcaagtttaacaataaatactgttattgaggacaaatcagagaacctggctgccacaagaaattgaagtgtgtattaaga

SEQ ID NO: 105527 - DNA, 246 bp, Glycine max
caaccacagttgctgactggttgtctaaatatgcgcataatattgcatttggtcttcatgtgcttgatgttcctcagcatggttgtgtaaaatacttaactgatgtctctgctggagtttataaactccgtactgtacgtgttaatgactcatgagggacatgttcctctagagagtgtgaaaaactaatatggccatttatagatggttaagattagtttcaaatcaattttgattattcatgtt

SEQ ID NO: 105528 - DNA, 259 bp, Glycine max
atactctctgttcagtagtagtatatccatccacgatgccaaatcattatattaatcttgcagcatgagagaaacagttgaaaacatctccaggttgctacaaagagctgagacctacctcaataattcatcataggaacctaatgcttcaagaatgctttggcatcgtggatggatatactctctgttcagtagtagtatttttaaagatacatttagcttcaataaagtaaggagagtgtagtgtatattaggaaat

SEQ ID NO: 105529 - DNA, 251 bp, Glycine max
gaaagtttcagtccccctaataaaaggttggattgccttctatccttgtctttaaggactgacatgctttccttccctgaaaatgtagtagatgttgaaaaattggtgctgggctgtcctttcctccgaaaattgcaggtcgaagggcggatggaaaggctgccagcagcctcactgtttcctccacagctttcaaagttgactttatggggctgtagacttgtggaagacccaatggtaacattagagaa

SEQ ID NO: 105530 - DNA, 198 bp, Glycine max
gtttttgcgagcgtaaggttgaggtgtggagaaagcgcgaaagggtgggtggtgaagaagagatgatggtgagagcacggccaagggacatagatcacttgcccaagaacgccgccaactacacagcgttaacgccgttgtggtttctagaaagagctgctacggtgcaccccaccagaaactccctcatccatggat

SEQ ID NO: 105531 - DNA, 269 bp, Glycine max
aagtaatgcccctcctacttatcctaaagtagatcatggagttagtagatcagcaccattcagtgggtcttctggtggtcagaacacaggtttccgcaatccccaatttgcggcgtcaaggcccttgcaaaactcatatgctcgtccacctcagcagcctatgtaccgtcagccatctccaatgtacactaacaagcgccaatgggaagaaatgaagctgcccccaggataattccaatagcagcattgaatccataccagagtatgtg

SEQ ID NO: 105532 - DNA, 266 bp, Glycine max
gtgtttatgagtaagtcaacatgatatgaattgtaaatatattaagaaaatattagaacctagttaatgattctcagttgttatttgtatgattctcagttgcgtacaagattttggatcattgataggattcctttaccattaaaaattgaaaatctagttaatgccttaatggtcaagacttcgacttctgtattggcagaattcgagatcttcaattggaggtctgtctgtttcaacatcatcaaattatatgccagttggtc

SEQ ID NO: 105533 - DNA, 265 bp, Glycine max
caaatttcgattcagtaaaatttcagttcctaacgcactcgctcgcaggttcattacttggccagacagacagacaaaaaaatgttacgataacgtgttgcgcttgttgtgggtttggaattggattcattcaaacgagttaacaacatgctcagatcactgccgaagctctcactcctcttttcctcagtaggaatccccattatctggcaagtgttcagcgtttcatatctgtagggagaagagcagcttcaagaggtagtca

SEQ ID NO: 105534 - DNA, 263 bp, Glycine max
catatactagttttctctggaatattgaagatgatgagaatgaagatagaaaacatgaaattcagagtgacatggaaatacaaaagactgaacctgtaaagccctccaaagaagaaagtggacaagtgattgatgcagcaaatgttacaacagctaattttggtgaagaaagcaatgttgaagattatttgagaagatggttgatgaaaatccaagcaatcctctgtttctgaaaaagtatgctcagtttctgttacagtcca

SEQ ID NO: 105535 - DNA, 279 bp, Glycine max
tcggctcgagcttcctccctctttctcttctgagtaaccaaccaaccaagagagtcagggagcaatggagaagatggcagcactcactactaatattatccacacccctctcttacccaacaataccactcttccaaagacttcatcttttcaacccttcttctctaaccaactacttggcctccccttatcttcttcttcttcttaaccgtcgctaaacggttctcttgcaggcccatcaagtgttctgtttctgaagccacagagcccaaaacagag

SEQ ID NO: 105536 - DNA, 100 bp, Glycine max
ggcagttgtgatattagaacttgttcttgctaatcttcttcattcctttgattgggaattgccacaagggatgataaaggaagacattgatgatcaagta

SEQ ID NO: 105537 - DNA, 263 bp, Glycine max
ggcagactatatactcataaggagttaggacatttttctttgccatttgcttttattaatttttttcaattcatgacttatgtgtgttttactctttgtaatttacagaaagcagtacaggctagtcctaaaaataggtatgcttggcatgtatggggcgtttttgaagctaacatgggcaacattgacatgggaagaaaacttttaaagataggtcataatctaaacccaagggatgctgttctacttcaatctcttgcttt

SEQ ID NO: 105538 - DNA, 259 bp, Glycine max
agctcttggtacgcaggtagtatatacatgttgatatgtaagtatgcttgtgcgtggagtgattatgtatgagtttgttgagcagtacttgcaattgcaagattataaggttcaaatctgacttcacagaagtaatgatcgggctttccccctaactgaactggtttaatctaatgaaaaaggaatatgaggccatgttcatcaatctcactctatctatactggtggctcatattgttgatttacctagtgtgtgttg

SEQ ID NO: 105539 - DNA, 175 bp, Glycine max
gtacattgcaacttctccgaagtgaaagatcaacattccaaagcattagacttgaggaacactagaaacgagaagcagtgtgactattctaggctcaaccagaatttggaaaatcgctctactctgaagttggtagagaaaaggcaaagtagggatacatgtgagaagatgatac

SEQ ID NO: 105540 - DNA, 243 bp, Glycine max
tgaggatgatcctaaagaaaagcacagaaggcatgacgatggccttggagactatcgtatgggaagaaagcatgcaagggatgaggatgatcttggagaacgaaagcatgcaagggatgaggatgattccaaagaagggaagcacagaaggtatgatgatggccgtggagagagaaagaacttgagggatgaagatgaccgtgcagagagaaagcgtggaagggatgaagattaccgaactgg

SEQ ID NO: 105541 - DNA, 182 bp, Glycine max
gagagagagatatttataaaacaacactttagagagagatacacaaacctaaaaaactctccaaaaaccatcgtcaccagaactcactcgggttttctgtatttcaattcaatccaatttcgaaacacaaaacgcgtttggtcgtgtgtgttcgctcgcaccactctcatgccactggttaa

SEQ ID NO: 105542 - DNA, 141 bp, Glycine max
ctaacacatattcattctcctcacataccaaaattaaattatttttcttgttattttccctttgctaacggaaagccatgaaattcgggaagagcctgagcagccagatcgagaaaaccctgccagagtggcgcgacaagt

SEQ ID NO: 105543 - DNA, 134 bp, Glycine max
agcttttcgagtattcagtcttctaccatcatcaatcagcccatcccatctcttgtactcagaaacaacaacacccgcaattaatcaatatgtctgatacatacaagcccaccgagcacgacggcctcaagcag

SEQ ID NO: 105544 - DNA, 247 bp, Glycine max
tgattagtaccttataacaccgtggggtttgcgtcaagagttgaataaattcaagctcctttatgggaatcctcctatatttattcatgaaaatggtctctctctctctctctctctcattttctctctctctctatagatatatatatatatatatatatgtgtgtgcgtgggtttgttttcccctcctatgaccccctcccaaatgacagtgttacataatgacaaaagtgagtaacagttgaag

SEQ ID NO: 105545 - DNA, 230 bp, Glycine max
gttcctggagagagaactagagttcctatgtataaacagagatagtttagaagggtctaatgggtctagtctacttccaaaaaatgtaaaaagtcaccacaaagtggaggtaaaaatgagtttcggatgaacaatattttaggcaataataggtcataatatctaaaaaataatgtccaaatgtcaagtataattgtaaaatcttatgacatgtccaaacacttttatcc

SEQ ID NO: 105546 - DNA, 143 bp, Glycine max
cggagtagtcggaggaaaaacttgaggaatttcagggaaccgctagagatgccgctatcgttgtcgaaagacatgtgagtccgctcagaggttttagtgcatgctgctgatattttcacccatctaccagttttcggaaagtt

SEQ ID NO: 105547 - DNA, 183 bp, Glycine max
ctggcaggtggttctattcagcaatcaaactctcttcttcgaccacaatctacttctgatgtaggaatacaatccggaatgggatatatgactgctcaagtttcaaggccatccaacatgtcatctctaaagagagctgcttcccaaccactgtcatccattgtccagaatcaacacaggaag

SEQ ID NO: 105548 - DNA, 130 bp, Glycine max
caaatttcgatatgcaagaatgatcttgtccctggaatcgaaaaaatctgattacctctatgacatgaaattctatattcatcatttgcaaaaaatttcgatatgcacgaatgaccctgtccctgaaatc

SEQ ID NO: 105549 - DNA, 193 bp, Glycine max
aagattgcacaccggttcatattctttcgagccaaagaagaaaccgtttcccgtgattccattgtttcattgaactaaaatttgaaaaacaaaacaaaagagaatttcaatggcggatgatagtaaccgcctcgtgaggctgctatgccgcccgaagccactcaacaccaaaggatccgacccgggaatccat

SEQ ID NO: 105550 - DNA, 221 bp, Glycine max
cacatttgctaacgtgtttcatgtctgattcccgttccttcaaagccgttgtgcttcacgatgttttcttatttgaatgtttggtttgcgcactgttgccacaaagcgcaaacatgctgctttcaaaccatgttacttgacaactcttttctctaccggctggaccgaagttaatattcattccttaaacaattgtacccatcagtctcgtacaccggact

SEQ ID NO: 105551 - DNA, 232 bp, Glycine max
atgagcctgagcctcaaccacaacaacagaactcacttttcaccaacccctccatgtcctactcatcatcttccgcaaactatgggatatgttccaatgaactgtcaccaacttggtccaaagtttcttcccttcccaaaccctcaatgccaaagcaacagctcagtggattgcacttttccaacaacactgctttctggaattcttcagccgaagcacttaatgacataag

SEQ ID NO: 105552 - DNA, 238 bp, Glycine max
ataatatatttttccgtaatctgaggtgcaacaaagacgatattagttgttgaatatggcaaaagcacacgtgctgatcttccctcttccattgccaggccatttaggctccatgctcaagctcgccgagcttcttgccctagacaatatccacgtcacctttgtcgataccgagaacatccacattcgcctcactcgtttcggggacattcaagaactctcagaatgctcaccccac

SEQ ID NO: 105553 - DNA, 228 bp, Glycine max
gtctctagcagttattccgtggatttgaagaaagaccttttcctccaattgcagagtcaaagtttaaggcctaagttctctcagctctcattcaacccacttccatcatcaacttcttccttttcttcaccccgtacattcacaactctggccctcttcaaatctaagaccaaagccgctcctgctaagactaaggttacaaagccaaagcaaaaggttgaagatggt

SEQ ID NO: 105554 - DNA, 184 bp, Glycine max
ctcgcaccagaacatgtccgagcaaccacaggttatcatcactccctacccgacagcgactgacaccgtcgaccgccggccatcgtacccagacgacatgaccaccactagcagctcatcgtcagtgagcgacaggatcgccaagagcgccccagctgcaggctcgacccgtcttgggagcaga

SEQ ID NO: 105555 - DNA, 235 bp, Glycine max
atcactttccatagccacaaaatcacttcctcacttcattctttttcatcatcatcatcatcttcttcttcttcagtcacaagttcccttttacatgttctacctcaatttgacacccaaagtttctgtctttgaattgaggtaccatacccttttagttccatttagccagaagtattagtatcactcttattttgtcactttcgattgaaatttggtttctgggtaggttgag

SEQ ID NO: 105556 - DNA, 227 bp, Glycine max
gttcaaacccaacacaaacccgagcacagattctctttgtattcccttttgcttctttcttctcccccctgttcattttttcaaacactgaaaacgcatcaccagcaccagcagcaagcacgtaaggacgtcgtcgagagaagctcgtttctctcactcgctacaaccctcgaatatctctgggatatgtgaaacttggcaacaagcagtatgggaaacaacgtatt

SEQ ID NO: 105557 - DNA, 236 bp, Glycine max
aaattatcatcttaaagttggtttgtttttctatgtatttttttttattcatgttcttccttgtgcttttacaattttttaccacttctattttctaaaaatcagtttttgaaaaatatttttaatttaattgtactcagactaactggggaaagcatatttccttgcttatattgttaatacactttcgggcattgttagaaagagcagagacccttcaggcttcagtcctcaag

SEQ ID NO: 105558 - DNA, 262 bp, Glycine max
cacatacttctatggattgtttgccctattatagtttggtacatgttttaaataatactactgtaatactacatttctatgttgaatttaatttgaaagtgatgacttctacctttgcattgtattaaaaattaaactaaaaatacttctatcttttcaccttaattggcaaggaagttctgggaatggataaaaattatgtcaatgcttggggggaagtttcctattcaataaataatatcatcaaaccttttgaaacagt

SEQ ID NO: 105559 - DNA, 261 bp, Glycine max
accgcgttggcgcccccggagagaggcgccggaggaaactccgcaatctgccgccgagaaagccgcctcctagcccttacgcgcgtccgccggaggccacgcgccgccgttggatttcgaagcttgtcgatcctgcctaccgcctcatcaccggcggagcactcgtattctcccctcatttttctctgccaccgcagccgcgcctcctccctctcttctcccttgccctacctctgccgccggagatcaagataaatggca

SEQ ID NO: 105560 - DNA, 261 bp, Glycine max
gatgattatgctttctgatcttgccttgcatgcccatctacactccataccggagacaaaagccaatgtaattttctgcacattgattatatatagtgtacctcagttaaatgaaaatattcatcatcaaattttgaactggacagcattgcaatgttattatcagtgtctgctgccatttgaactcgagctgaccacaatattttgcgcatgttggagctaaatatggaaatcaggatgtgtagattccaggtcaaatgc

SEQ ID NO: 105561 - DNA, 261 bp, Glycine max
gtggttgagttgtgccttgggattgaatttttccttttgaatgtgttgcgttgtttcaattatcttggagcaaaagcttcattcctttgcttcttatattatatatgacaagttctatgttgttgaaagttgaaactctatatcaggagtattggaccatccattttttttttttggctcagcatattggaccatccatgtttgaagcagaggctcttggtttaggagccatgtatgaaaccgggactatccgtgtaccta

SEQ ID NO: 105562 - DNA, 265 bp, Glycine max
attggtttcgttagcctgtaggcaatatagcccccacatggagaagtaggaatttatacaagggcaatctgtgctctatgtaattttaatgtagagaccatgcgctgctaaacatgttgagacactttatatattacctagggaagacttttttctgtgtttttaaggatctctcgattcattgctttgttgtctttccaggtcagctgtaagttgtatcattctatcattctgtttgaccttaagccatgtgttctaaattatt

SEQ ID NO: 105563 - DNA, 257 bp, Glycine max
aagcgcacagcaagccagccctcagcaaatgagtcaacgaacccctatgagtccacagatgagctcaggtgcgattcatgccatgaatgctggtaatcctgaagcttgtccagccagtccacagttgagctctcagacccttggctctgttagtagcataacaaactcccctatggacatgcaaggtgtcaacaagagcaactctaatgcacaatgaagctacaaaacgtaaaatgtccaaatcagtgcccctgcca

SEQ ID NO: 105564 - DNA, 261 bp, Glycine max
tttgggagctactatgcctgtgggaatggattttcctcctccgtttactatgttagaggacaaagacagtgcatttgtggtggatgatcagaaatcaggggatataaaaccaatgacaaagggtaagcctccacgccatgcttcgggtttgaggcacagcgttagcaccaccagattgctggctgtagcagatttgagtttggatgtgggggttactgggagcaagtcatcttctgaagaaaagacggagtttctaccaat

SEQ ID NO: 105565 - DNA, 223 bp, Glycine max
gtgcggacaaagtggcctgacgacaataacttctatgaagctgttatcacgaactacaatccagctgatggacgacataatctggtctatgacatggggagtgcaaatgaaacatgggaatgggttaatctatcagagatatctcctgaagatattcagtgggtaggtgaggatcctggaatcaatcatcgtgggggttttgggggccctggtcatgggatga

SEQ ID NO: 105566 - DNA, 229 bp, Glycine max
cgaggatctaacacaaatagtagaaataataaccacccctcattgaattatgcaatggagcctggggctgctcctgttgttgatgatgcgcagggcttttatggggaggaacttgttttccgtatactctgtccaattgagaaagttgatcgtattattggggaatcagaaggaattgtagagttccttcagaatgaagttggcgtagatgttaaggtcactgatcctg

SEQ ID NO: 105567 - DNA, 223 bp, Glycine max
caaagcgccaaacgctcccagtactctctgctccacttctcgtttcttcaactgcaccacctcaaaagatccatgttttctctactcttctccctacccacatcatttttcgctctctttcttctcctccttttatcttacaacgctttcaccgtcttctctgtccatgtccctaaatccccaaccaccaccaccctctccaactccaagttctcttcttccc

SEQ ID NO: 105568 - DNA, 232 bp, Glycine max
gatttgagggtccagttgtctcattctcattgtttgtaatattattttcaaatggctcaagactacaaacctttcctgaggctttagaatgaacatctccaacaaagccttgttctttttgcctgtccttgcctcggtctacgcgcttgattactcctggccaagggccctcattaggtacttgttcatgatccccaatatgctctattgcatccttctgaggtggtttctc

SEQ ID NO: 105569 - DNA, 227 bp, Glycine max
gccgtgtttgcacttctttcatggccttcaagcctggaccgaaccacacacttgctctgattcaaagcatgtttgatgttttgcctggtgacatcacagttgaaggcaccggttggggttacatgttcatcaggaagaactgttcttgtgctgctggcataaaaaattacgtgtccaacaccactttcactgtgaaatccaatgaggggttgctgtatgacatggtg

SEQ ID NO: 105570 - DNA, 235 bp, Glycine max
cggccttacatagcattcaaatagaatcacaacttgactggtatttttgcacaatgtacagcttcaggggtttgaaaaaggttgatattgaagccatggttcttgactccattctgacttctcctcgactcaagtctccatctttcaggaggcagtctacaatggatgaactgggtagttggtccacactttctcagaggcatcgcttcctcttatctgcacttgtactgctaac

SEQ ID NO: 105571 - DNA, 230 bp, Glycine max
ggaggcctggttctacccctcttcctgaatcatggactcgaggtgtgtgcatatttcccaatcaagaggtggccgcagatcgggaaggattctttgaacaacacattacaaatgacccgcttggtgcatcacaatcttcaattgatgcaatgccaactattaagatcacacatgaacacctctactcaaatccaaagtgttcagtttgtatagaaagcatgggaagcgga

SEQ ID NO: 105572 - DNA, 224 bp, Glycine max
gttgatggatcccaagggctcaaagcagcagcagccacaggaggtggtaccaaaattcctcagcctcgcccaacaccactaccatcaacaagggaattcgaagaataacaacatgggtgagatcaaaccatcagaggtgaaggatttccagatagtggtagctgctgagaaggacgagagcactgaagctgcaacagttggcaccaaagaggagttcgaacaag

SEQ ID NO: 105573 - DNA, 220 bp, Glycine max
cctgcttatagactctctccctcaaaacgcttgtacaccaggcttcctaagcgctgcatatacacacggcgtatcctcctcgagcaccaccctagcccttgttcgcccttcgccaaagtcgtcaaattaggcaaaatggccaatctcggtgtgccggtcaagctgttgcacgagtcgttgggacacatcatcacggtagatcaaaagactggcgagatgt

SEQ ID NO: 105574 - DNA, 218 bp, Glycine max
cagatatcttgtcaagatcctgcttaccttgttttagttcatcatggagacagggcggcaaacgaatatacggggatttctggtgaggcaacataacaatggtgttcatgaaccaaaggcaagtaagaagctcatgtggcatgttcttgcaaatctgtctgtggattgcttataaggcttatgatctggcatttactaatggacgatagttgcaggaa

SEQ ID NO: 105575 - DNA, 195 bp, Glycine max
gtgacaagtaagttatactgagaagtggtttaaaaggcaattcgtgtgtgcctaatgcaaatgcttactagtgaactacatactgacaaatactcatttgttacggccaattttgtgtaatctcattcccaacattaaactacaagctcagaataagtgacctattcgtcgtttggaatctgaacattttctgtt

SEQ ID NO: 105576 - DNA, 222 bp, Glycine max
gaatctgtgtccattgatgataccaatgtaagaagtggacaaggtacatgtactacaaatggtgtggaacattctctatctaggcctttacttgattttccaagttatgataatgttaatcctgcacttgagaaagaaagtaaaagacactccaaatgcaataatgttatgtcacatagtcatgcagagcctacacaaccaccacctcctcctccacctctt

SEQ ID NO: 105577 - DNA, 260 bp, Glycine max
gtcttgatatgaatgcccagtttaagtatttggttttgtatttttgtttgagtttcactgggttttagattttgctgaatctgaatatttacatttacatcttatacacaagcaaggaatgcataaagcactatgaatagggtctgtttggttctcattctaaaacttttcagcgtgttttgaacttttggaaacgaattgcttttgctctttgtttcgaccgtaataatgtaatttgataacaattaacaagtacatcg

SEQ ID NO: 105578 - DNA, 248 bp, Glycine max
tcttcatgagttggaattttgagactttaacctgaaattctgtttttgtggctccttgtctggtgaaaaaatgggattttttttcatctgggtcgttttatctgccacatagggctgaatgtctgatatgtttgtggataagtggggtgattttttagtattctggtgttttacttgtttggtttagttctgccccttgtttggggacttagtttttttttaataaattttttttagaggctaatatg

SEQ ID NO: 105579 - DNA, 242 bp, Glycine max
aatcgacgttgtgaatgtagttcctggagccatcacttccaatattgcaaataatgcccttgccaattacaatcgaatgcctgaatggaagttattcaagccttttgaagcagcaatccgagacagagcttctttgtctcaggggtccaagtcgaccccttcggaggagtttgctaaaaacacagtagcagctgttcttaagaagaatccacctgcatggttctcctatggccattactcta

SEQ ID NO: 105580 - DNA, 250 bp, Glycine max
aaatagtttaagttaaccatatggcaaggtgcatcacaatattattcttcgttatttatgttcttctcttcacagttgttggtggcaggtccttgttcatgatcaacaccaatattagtccagattctgttccgcacagaccagtttcttcttcccatgtaacaacagcaccacttgaaaagacacgattcaatgatgatggtggtgcttgcaaggggctagacaggactgagtgtgtggctaaaacaac

SEQ ID NO: 105581 - DNA, 239 bp, Glycine max
cttgacacatcagcggtaggctcttgcattttatagaactcagctagccttgatggaggagaatatatatcaagggattttctccctcaattacgtgacgcaagtcacttcagcaaacattcttagatgctttcctaaagaagccaattcaagaaaaatgaagcccctccaacttgttcatacttggcattgaagagaggaagggaattaaacttccattgttgattgcaagatactat

SEQ ID NO: 105582 - DNA, 235 bp, Glycine max
gaggaggaaacctggggaacaggtacacgttatgtactcattggaagagttgatgccatcagttggtacctctgtcccttctccttcaatactctcggtccttttatgccaatcagattccatacttcagaacatagacaagaattattctgatgtaccaagttctccttaccttcgtgaggattttgagaatccttttgatttttgttatgagtctaatattgtttccaagata

SEQ ID NO: 105583 - DNA, 199 bp, Glycine max
gcattatgtttttccggtgccctctccagtcatcatgggctcatggctgttcgtcacgctgacggactagttgggttttttcttctatttttcgttcttttcatgtactgtattaaataaatactgatatttttgtaacaaaaaaatactcaatttttgttggaatttttcttgttctttatatatccacttaagaaaa

SEQ ID NO: 105584 - DNA, 252 bp, Glycine max
atctaacaacattctatatatagctttcctttattatgaagatatggcatagcagtaaggttttaaattgcgatcacaattaccttgagtagtggtaatttaaattagtagagatgagtttggtcactacgcttaatgctcggtaacaaaaaattcaaaacaacttaactgctgaggcatgaagactactcagggaaaggtttgctaccgagcacttgcagggtggtgatgatcgagcttaattattatatc

SEQ ID NO: 105585 - DNA, 251 bp, Glycine max
ctcgagcgtgggttttgtgtggaaaatttactctgacggaaatgtgtctttaagctatacgagtaaaactgtatttaccttttgatttaaattttattatttcatgattttaacttaattttgagaaggataaattattttaaaaaaaggcttatttgtcaagggaaggtttactaagtactaacccacgaaggaatgagggaagtgaggatggtaacatgtcaaataaatttggaatttagttcccgaaa

SEQ ID NO: 105586 - DNA, 254 bp, Glycine max
ctctctctctctctctctcaccatttttaattaacaacatggcttcaggaacttcagcaccgcgattgattcccgagaggggtcaggttctaaagagggtcctcaaaatggtgttttcttgtttcatgtgtgctggttcttccaattcacatcatcccaaaaacatcacttcttcttcagtgtttccagcaccttcgcgtatctgaatttgttcttgtattgacctttgaccactcgtcaaattggacactgcg

SEQ ID NO: 105587 - DNA, 246 bp, Glycine max
ctcgagcggttttggaatttgagattttccaaatattatttatgttgtagaatttttcattttcttttcaagagattttgttttttttttttcagcaagaaaagattattggattggcaatttcccacgaaagacgaagtgtcttttgcaatgatttcgcaaattgactcttgctcaattgaatggtcttgctggctgtatctcttgttagaaatgtgagctgtcatcattcatcaatgtgatctc

SEQ ID NO: 105588 - DNA, 240 bp, Glycine max
atgctctctgtagttatgactattctggatatgggcagtcgtctggaaaggtaagcatatttgttttttttttatttctgttgagtgatggtgctgattatgattatatttagcattttagtttgtgtattctacaagatgaatgtttatttttatataattaaataaaacttataataaataaatattgttaatatagaaatatcatagttaaaattcatattaattatcggtaaatat

SEQ ID NO: 105589 - DNA, 100 bp, Glycine max
tggaaatttgcctcctggttttgatccaagtacttgccgcagtgtgtatgttgggaacatccatacacaggtaactgagccgcttttgcaagaagttttc

SEQ ID NO: 105590 - DNA, 111 bp, Glycine max
aacgacaattacatgtataatggcactgttcaaagtagtgccattcaggacttgactagtttggagaaaattgaagaaggtttagcgcaacacgggcctcaattcaggaat

SEQ ID NO: 105591 - DNA, 252 bp, Glycine max
cttcccgcctcgcactagcttccccacttcgtacatagacaaagcctgcacaatggctacgaaagcgatagagcagcccgccggcgtcggcttcgacttctccaactatgcgaggaaccagttcctcggtgaccggttgaatggtcaacccaaagctacctcaaccggtaccacgattgtcggcctgaagtttggcggcggtaattctggcgaggaggagggtatctgtctcggtgccgacacgagggctac

SEQ ID NO: 105592 - DNA, 154 bp, Glycine max
ggaaattgaaggtgttggcatgtggttgataatgatactaatgatggatacggtgactgttggaagagtcactcagaagaatttgcttacaattcttagttagttgaattcaatggtgttcattataagtcaagttcttagttaatttaattcc

SEQ ID NO: 105593 - DNA, 173 bp, Glycine max
acttgcatgtttttacttttttgggtactaaacttccatgttcttatttagtttataaggaggcttatgtaggacatgttttaattgatatctatgtttaccattgctaattagaatgctaaaaaaaaaaaaaaaaaaaaaaaaaagggggggcccccgcctagtggcccccc

SEQ ID NO: 105594 - DNA, 251 bp, Glycine max
ctcgagccgctgatcttggttctatgctaggtacaagagccaaagcgcacccacctagctccaagattcccttgtgctaggcaaactacatatttacacaaggaatcttgcaaagaaaatgtgttggttttgggtccaaaattattgaagttgatcaataagggatatagaaaggctaatgagaccatgaagtcttaataaacttgcatgctgaaacgaaaatctttccattttgtcatctagagtcactg

SEQ ID NO: 105595 - DNA, 252 bp, Glycine max
ccaaacagccgaagagatcgttccgcgatgcgtctaagcagaaggtcatggccgagaagctggatacgcgcaaggacagtccaatgatggatggtggctcaccagcgctcacctcttccatcgtgacagtcatcgttggttccgaccagcgactgttcgccgcgcatgaagatgtattaagtcactctccgtcttttgctgaactgctgcggggccagttcttcgagtccgctaatcgccgcatcgatctgc

SEQ ID NO: 105596 - DNA, 251 bp, Glycine max
cctcgagccgattcggctcgagatttcttttgagtccaattcgcaggtggcaaaggcgaaagcgattgtggcgccaccttcgagtttggtgtcggttcctgatttgaatgtgatgccaattgcagattcggatttggtttatggggggaggagtaaaagggtttcgggcactgatggtgattattctggtttgcaattgcagcaaccggttagaatgtcttcggttgttgttgtggatttaaataggtcgc

SEQ ID NO: 105597 - DNA, 208 bp, Glycine max
tgactatttagtttatacgatcgaaggggaaaaagatgaaaaaaaatactatgtcaatttataatttgctttccatattctcatcatgttaaattctgaacaatgttataacgatcaatgttgtaattaagtttctgtccggaaaagcaaatgatcattgatcaaaagttttgagttgatcataaatgccgaaaaggtgattccacac

SEQ ID NO: 105598 - DNA, 235 bp, Glycine max
cctaacgccgcgagccaaggcaacattcatccgaagttctgcatcaaacactgcttgaactttgaaaaatggaaacgccaaatgtaacgatacctaaagttggacctaaaccgtcgaggaaagtgaagcttccgacgccgaaggagctgatatcacactatgaatctaagggtatggactcgcaaaatgcgccgttgaaggcattgaggatctctcagaaggctctgtttagagt

SEQ ID NO: 105599 - DNA, 238 bp, Glycine max
gtaaaggtaacgttctctctctgtttttcaatcactcatataaataccaaatccactaatgacagtcaccgcttccttacaccgtctttctcgtctccgattcatcgccaaaccccaacctttcctatctcctcattcaatcccctcccatttctctctcacccccacaacgcacgcgaacaagcgcggctctagggtttggctcggaaccttcgacaccgccgtcgaagccgccaag

SEQ ID NO: 105600 - DNA, 268 bp, Glycine max
gtagtttcaataaattttaaccaattagagagagtgtgttcctagcacttctcatatttacatatggcattgtaatacttgttaggtgctgaaagtgatattcagatggatggaattggaaaatggttcttctgatgacttttgaagcacattttgtatgaatactttaatccaagagattggggtgaaagtatgtccacacacaatcacaagtcacaagaacaaaggatgtttatcaaatatttatttacaagaataaaaaatagag

SEQ ID NO: 105601 - DNA, 259 bp, Glycine max
ttttgttgttcagcaaattgggtttgtaaatattgagtttgaatcaaatccatgatttgggttggctgactttgttgacttggtcctgtcagttctgaaaaatcattttaaacctagaattgcgttgtgtacttcaaagcaagcaaatgcacaaaatttgatgttaaaagttgatataagacttagaaatgcccatgtttttttaaagggaagtatcgagtgggatgtttcagtatgagagctaagagtttgataagta

SEQ ID NO: 105602 - DNA, 245 bp, Glycine max
aaaggcttgcattacttatttattttttgtagttagttcttttatatgtagtggaattcccacatcagaaggatgtcagttaagagtagtgtaggagctttataaataagcatcctcttttatgtatgtagtcaattcagtttcagattgctgaatagttttgttctgattcacaaaaaaaaaaaaaaaaaaaaataaaaaaaaaaaaaaaaaaaaaaaaaaagaaaaaagagagagagtaaaaa

SEQ ID NO: 105603 - DNA, 262 bp, Glycine max
ggaaaatacacatgtgcgatctttgtctaacctttctcatattatgtatcactactttgcacttagtttattgatttaaattagattcttctttgacttctgcttgcagaggcttggaggttgagatcatgatctctggatttgtctttgaggatgacgattttataaggccgtgggaaggactggatgacaacttggagagttaggtatgcactgaagtgggagtccaagaatctatttgccctgagcactgcaattcagg

SEQ ID NO: 105604 - DNA, 248 bp, Glycine max
gcagctgcaagaggatgcggatcggagtgaaaatgctgatattgttacagatgaaagcaatgaaataaaaagaggaaattagtggctgtatgtttagtattggagagcataactattgttgcaaggatagtgatttgtgagactgctttctgcgaaattatatattgacccaaagttctggaaatgcaggcaaaacaattaaatttgaaggcaagttgcttccatcactagcaaatgaagacaagtgc

SEQ ID NO: 105605 - DNA, 256 bp, Glycine max
atttttgcactgccacgtgagtgccgtgtggcgaaagagtaaacaaaaccgttactccctgccgatggcgatctccgatgtgcctgcagccgctggcacgaccgccactaccaccagcgactcagatctccgacagccttctctgcggcgcaggtcctccgccggagtcctcttcgacgctgccagagattccggctccgacaattccctgaccggcaaaatcaccgacgacgacaacatcaaagatcacaagccg

SEQ ID NO: 105606 - DNA, 235 bp, Glycine max
attgggagtttgtcccggaggaaatcaatggtgaatcaagctgaattgttcttgctaacttacctttatgcttgaattaaacgtagttggtgtgttagggcgagaaacttatttagatggatttgccatgacaaaaatctttactctctataccactagtgttatgtgcattctacttttaagtaggaacattgcgtatcatgtataattcccataatcatactgtttgtgttac

SEQ ID NO: 105607 - DNA, 165 bp, Glycine max
ctccaactttctctcgctctttgcgaacacagcacggtgttacgaagataagtcgcatcacgaaccttcttagaaacctcgcggattcttcacgatcccgcgcttcacgcctctttctcccttcctttttggaatgggattgaaatcctcctcgctcttcgattt

SEQ ID NO: 105608 - DNA, 253 bp, Glycine max
caactgctatgtaacttgttatttgcctgcaataccatctctgctataagtggaattttggcccccatcctgctgttggaatttgtgtgcaaattaccattttttgtctggttatttccacatgtgaatattactcagaatcacagcaagcatagcattttgtatcttattgttaaattgtgctggtgtattcaagggaaaatttcttggtttattattgacaaaactggaataaacattagaagtgactggt

SEQ ID NO: 105609 - DNA, 239 bp, Glycine max
aaaaaaaattatgcaatgacggctgaaaaatatcagtctgggatacatcacgaccgatgtcgcctattgagttttctattcaatcccgtaatgaaatatgcatgatgtcgataaggaaatgttcgaaaggcgtcatgcggtgatgcttcttttttacacctcgaacggtcatctttcctggccgacgtcgactgtcattttttttcgatcaatatcgatgaaaaatattttttgccgag

SEQ ID NO: 105610 - DNA, 230 bp, Glycine max
caaaattattttccgatcacgaagaacgagaaattcagaggttatgtgctaatatagttaatcatcagctgaaaagattggaattgaagctgaaacagtttgcagaaattgaaacattgttgatgaaagaatgtgaacaactggagagaacaaaacaaaggatagctgctgatcggtcccgcatgatgtcagcacgtcttggaactgtgggagccacacccacaatgaat

SEQ ID NO: 105611 - DNA, 222 bp, Glycine max
gcaccaactaccgtctcgtcctcaaagccaaggatggatccgccacggccagttacgaagccatcgtctgggagaagccttggctccatttcatgaatctcacttccttcaaaccccttcattaatcttagacccatacttttcttcactttctctcttatcatcatgcacatcgggtacctccagaacggaggaatgccgccgtcgggatgctgcaacgga

SEQ ID NO: 105612 - DNA, 223 bp, Glycine max
gccgtccgggaacgaaatccaacgagcctgggcggacttcaccagcgggggtgacgccatcttcgagatcctgacgtcatctccacgcagagtgccttcgctgtcggcgagaggaagccgccagagatcatgtcctggaactccgacgagtagaaccagacgtcgatgatccagtctgcaacactcccacaaagtactgagaacgatatacaattaagttaat

SEQ ID NO: 105613 - DNA, 235 bp, Glycine max
cttctagatcacgagctcgccgcgaacgtgttcgaggaattgcttcacagagatccgttccacgtggaggcctatcgcggcctcttaatgctgacttcagagacaaacaagccaccggaggaactattgaagagaatcgaagaggccgccgcgaaggtttacgaggaacaagagagggcattccgatgtgagggaccttaagccgttgattgcgcagatacaggttatcaagggg

SEQ ID NO: 105614 - DNA, 230 bp, Glycine max
caggaattggaaacaaaattagcagccaaagaagtctcactaccaccagaaccatcctcagatgatgataatgctgtaaacttgatggtaaaaatgccagatggcaatcgtcgtggacgtcgattcctaagatctgataggctacaggtaaaatggcctgttaaaaagtatgctttcccccgttttcttttggtgcataataatgctaatgcttctgcaaattttcagtc

SEQ ID NO: 105615 - DNA, 223 bp, Glycine max
gcttagcatgataatgaagacctaacacttaatgagagcaagacaaaagaataatgagctatcgacaagaaacatattctcttaaggttatgagtggcagctagaagatctctcatggctccttcatcttccttcttcctttcatcaccttttttagctctacacatgtttatggagagctaaactcactattgttagacttggatgtactaagctaaatttc

SEQ ID NO: 105616 - DNA, 225 bp, Glycine max
gggatggcttctgttcccggtacacccgtaaacatgaaatgccatgaatcactattgtatgtggctgctggttcctctgtcactgcatttgatttaaggacaatgcagaaagttatcaccgcagctgtacatcaaccaaagctgtgttcatttgatgccatcccttcaaaatatttaatacgcacaggcggtgatggcagggcaatgctctgggatgttaggaga

SEQ ID NO: 105617 - DNA, 258 bp, Glycine max
gtgataacagaaaggctacactaaaaagtagcataaagaagccacaaaatagaaaatccgttcctgttgaggttgctaatgaacatgaagcatcaagtggacaggggatttgtactcctggaggtcaacccgaaagaaggaaagtgcagtggacagataattgtggtagtgagcttgtggaaattcgagaatttgagcccagtgaagtggatggatcagatgatgaatttgatagtggaaatgacagaacttgttcct

SEQ ID NO: 105618 - DNA, 265 bp, Glycine max
gtcggttgggttgagagacatacatggtctctaacctaagtaaaaaaaatataaactaattcactcttattattaacgttagtttcagttctagtcttagagccttgtaggagggtcaatgtataatgtaaggtactaaggtcaccctcaactttttcccccctacccacacattgcattaactctcttgtgctattccaacacttgtttaaaaccagaccttctctcccaattctctctcagaacacagaatctctttctcttc

SEQ ID NO: 105619 - DNA, 257 bp, Glycine max
gtctcgagttccaggcgaagaagtcttcctctttcctcgacttcatcaggtcgaagggcaacaggtacaggcttatgctcatcatctctctcggtctcttctcccagtggtctggcaacgctctcttctcctactacgccaacaaggtctacacagctgccggtgtcagcggctccaaggccggtctcggtcttgcacggcggcacaaggtcctatcctgatcgtctcatctcctgtgcctgctctgtgaccgcatc

SEQ ID NO: 105620 - DNA, 239 bp, Glycine max
atctgctattcatggtgctgctgcatataggagatgaaattgatggttgagagatgtgatgctgtgattgtgctaatttttttttctcgtcttttcttacctatgatttattcttttttttttttggtccaatatagtcttcccatttacaaacaggtgtgatttattacatggttggatttgtattgattaggaataagttgtatacaaaaatattaccaaataatatcttctgaagc

SEQ ID NO: 105621 - DNA, 100 bp, Glycine max
tttcaagaggctgttagcagcttctaaaatgaggttcggtatgcgccttgtgaacacaagccagccaactggacaatgttactaaccagagctggccatt

SEQ ID NO: 105622 - DNA, 269 bp, Glycine max
ccaaaaccatgtggtagaagcaacatggaagcctatgggcaaggtgagagtgaaaccttgaggttgctaagccaaactcaccttcaatccccaaccactaaagaaatgcacagatatggtccgtataggtcgccagcagagccacaaatgcctcacaatttcgcacatcatcttcaccaaccaagttttcatgttcctagcagcagcagcaaccgaggccgtattggaagctatctttcgttatcaatgttcgatcaacaacaatggca

SEQ ID NO: 105623 - DNA, 265 bp, Glycine max
ttcaaatttggctttaagggaggttttgctttcatatgttactaaaggggatgatgtactagtttggggttctttgagtgttcttgccactctactgcaaactaaagaacttgatgaatcaatgctagataggcttggaattcttccacaacgcaaacagcacaagaaacagttattgcaagctttggttggtgaggcttcagaagaagatatacctgagggctcatcatttgctgctggagaaaaaatgcatgaactagtgaag

SEQ ID NO: 105624 - DNA, 264 bp, Glycine max
ggcttcccctacggacgctaatcacagccatattcagatgaaggcctttactggcacccaggcttgaatcttttttttttcgctcattatttatttatttatttagaatttttgttatctatcgttagtatttgatcagaatgtagggacattagtattcctgtttagtgagtgagagagatgaatacgtgtgtagttccaattttgttttgttatgatatagaacttttcactgctttgcataaaaaaaaaaaaaaagggggg

SEQ ID NO: 105625 - DNA, 262 bp, Glycine max
atcgcaatagacaatagtagctgttgctgtgcagttcttcagtcactatgatttcaagtggtctgaaactgaagcacttccgcaatgttgattcgctcttccattttcccaaatccaaacccccaattttactcccatgctgcccaaccatctcttctccatgctccattcgtttcaattcgcatttcccatgtaatctactctctctctcattttgcacttccgaccatcttaacttagtttctatgtgtgttctgttttc

SEQ ID NO: 105626 - DNA, 252 bp, Glycine max
aatcaatccacctcgcccacttcaaatcacatcaaccctccaccgcaaacatggtcgtctactactctctccccgccatcggcaaggtcggctctcactaccttgcgatcggtgtcctcagcaccatgttcggcggtgtcttcctcctttccggcggcagctccaaggccgtccagcagtctcctcccatcaaggcctccagcaggggcgaggaggacttcatccagaaattcttgaaggatgccgagaagg

SEQ ID NO: 105627 - DNA, 232 bp, Glycine max
ttacataggaatagacacattaaacattaaaatttctagttttattcaggattagtattttcaggtctttcaatgctagagctgaacaaagtggatatggagtaatattggtcatttgtatgtcgtgtttctcttagtaatattggagtaatatggaatttgcgtattggactaatatggaattgacgtattgttggagtaatatggaattgaacatcaaattacaattaac

SEQ ID NO: 105628 - DNA, 259 bp, Glycine max
ttctaaaggtgccaagcctcggattcaatcaccaagtggatatctcgataactataggtgccaagcctcggattcgagatatccacttggtgattgaattctaatttgctgttttcggaactactaatacatatgctctcaaagtctcacagggagtcattcatccggattgattacctgtggaaactacggcaagatgatgtaaaggagttccttctgagagcatatgatctcactcaagggaggcttagtgggggct

SEQ ID NO: 105629 - DNA, 252 bp, Glycine max
tctcgagccgaatcggctcgagcaacatcataatgatgtgaaaaaagggaatgctttaagaagttcagttatgcatcaatcatggcagctacttcttctgacctcgtaatattttgtggggaaaaatctgttttgaatctttttttgttattcactacatttttcaaccccaagtcaagcctaactcagattcattacagaatgccagaactgagcaagcaacttaaattggagacactcaatatttttctt

SEQ ID NO: 105630 - DNA, 252 bp, Glycine max
attttgagatgtgaggatacatcaaagattgatgtcattccagtgtagttgcactctccagacacctcttaggtattcttctttaaagaagtattttcttacctcatttaaaaaaatggtggttgatgtttgtattttgtaagtgttattggtaagcgtgatgagtctacaactgacatcagtgattttctttttcctactctcaacccctagtttgttgtatagctaatgagaattcttattcgtttatta

SEQ ID NO: 105631 - DNA, 226 bp, Glycine max
agttcctcaagtacctcaattcaggagttcaactaccctgaatgcttcagctaatacccaaaaaaactctagtatctccaactcatccactgagaatgttgtgagcagagaggtgaacaaggaagtgaagggcaaagatgaaaaggcagcatcaccttctgcaaagccagcaggggaaccccagaagtcatcaccaaatggggtcacagcagatcctcttggagat

SEQ ID NO: 105632 - DNA, 224 bp, Glycine max
cgaagcaagtaaggtagagaagtcgtggtggggcccagggattatggagcccaccgtgacttggatcgagccttcgttggaaaagaaagagtttttttagtaccagatatcacgggaacattaattctgcttgccgtatatatggtgttgttagggcatggattggagcatctgggagtacggaatagaaggagattacaaggatgtcaggttacaacttacaa

SEQ ID NO: 105633 - DNA, 228 bp, Glycine max
cagaattggagtgtccaatacctagaaccttgctactgttcatattgaagggaaacaattttattcatcgggacttgtctcatcctttccttgccaaggcaatccaaggttctgtatgatgtgggaagtttgaagtctccttgccattcccttcaaaaggttaaaggtggattgtttggattttcaaagggatgtttacacatgaaaaggtgggatgagctgaatcag

SEQ ID NO: 105634 - DNA, 227 bp, Glycine max
ttcaaacaagatttaattatttgtagttcctattatggtggttgaatactggtgttaagttttttttccctttgttgctgaggaatacaattcatgagtgggttcttttgaataccagacagagtcaggtgtcttccgtgtttggaaatttggtagagactgttacatgtctggtacacaatagccttagagtgtgtctgataaatatgggattcccatgttgtcct

SEQ ID NO: 105635 - DNA, 226 bp, Glycine max
gagagatgatgtttcagctgcaatgcctgttgcagctgtgcttgctggtgttggggagccttgggttagagctttggtgattatttcatacactgccttagccatatatcagtattccaaaacgtccacaggagggaaagaagttggagaagttgaaacaagacagatgaggcttccaattccacttcttcttgcatcttttgctattggtttgcgggttgctgct

SEQ ID NO: 105636 - DNA, 225 bp, Glycine max
aaaccagtggatgatagcatggtttcgggttgggtctgatttcccgtagtcttttgtggttgttagtcctgtgtaggttagccaaccatgttagttaggactatttatactgttgttaatctagcagtgttgtttttacattgtaaattatgttttagtgaaactctcttctttcagatgttatgaccatgtacttgtttatattgcagcatgagtcttaattcc

SEQ ID NO: 105637 - DNA, 269 bp, Glycine max
ggcacaatctttcttgcgtttgctctgcttctttagcctttgctgagaattcttcaaatacctctcgctcgagcatcttccaatcttaaacctctcccgctttagtaggttaagcgaactctccttatccttcttactcttaattgtttagtcgagtcaggagtcgttcagagagcgatttgcctgagaaagcaggcctaattggatagtccatgcgagaagtccccaggaaagcaggggtttattactacaataaaaagatgggcatt

SEQ ID NO: 105638 - DNA, 264 bp, Glycine max
tctcgagccgattcggctcgagggttatgcggaaatgtgaattgtagccatatgatagattagtcttaccgtgttgttagcagtgaattggaatagattttttgcttgttgtttgatccctttttcttatgtttttagaatctcatgtaaattctttcataggttgaagcattcaatttgtgtatttagagttccaatcaatgtattgtttagtttgatttggtatgcttttgcatttgtaataggtttagcaatagttggtaa

SEQ ID NO: 105639 - DNA, 260 bp, Glycine max
tgaagtcacagtctctagagttgtacatccaatgttggattggaattttactgtctgcctttgttgtcatcttttgtggtgctttatttgattgaaagagttctgggaattattatgcattgtggaaaccatcatgctgagaatgcttttacaggaagctccagtgcttgggaagccaacaatttttaccagtgatagtgtgggtgaaaagatccagtgggctcaatgtgaagattgtttcaagtggcgcaaattgccag

SEQ ID NO: 105640 - DNA, 229 bp, Glycine max
gtcattatgtacaacaacacaatgattagcttcaacatgattgaggctgccaggattaacggcattaagaggtttttttatgcctctagtgcttgtatctaccctgaatttaaacagttggaaactaatgtgagcttgaagagtccgatgcatggccagctgagcctcaagatgcatatgggctagaggaattgagtgccgcattgggaggttccacaacatatacggt

SEQ ID NO: 105641 - DNA, 245 bp, Glycine max
ggaagaccagaaatttgagctttttcagggcagcaacaagacctgcaagatatggtggaaaagattatgattttgtcgtggcaatggttgtctacaaaaggtgtcatttcatattcattagcttgttggtggaaaggtctagatagtgtttatatgcgacctgggatggcataattgtggtacgtactggtttttgtttattgcacagacgctcaataagtttcaagattgtgaatgttttccaa

SEQ ID NO: 105642 - DNA, 218 bp, Glycine max
caagaccgaacaggaaattgcactcctgcgacagttcgaccaggcgtggaatgttttcggtgttctcaacttcctccaggcgctggtggagaagagtgctattattcagattctggagcaggagaaggggggcttgagcagtttaccgcgactgatgggtatgattacaacggggggagtaatgtgctaaaggtgttagggtattttagtatggtggg

SEQ ID NO: 105643 - DNA, 112 bp, Glycine max
gtaatacagagaaatgaggaaatatattactacttaatcattgcagtccttaccaagattgtgaattgttgtacaagtttatgacagcaacaaataaaattttttgctttgt

SEQ ID NO: 105644 - DNA, 241 bp, Glycine max
gagaattgatcatgaatcaaatgtgtttgattagatgttgtgtattcatatttatatccatttttgcctcaaatacccaaaagaacataaaagttagtcattgatgctttagcattatccagtttcattgttcatggcatataaccaaacacatgataggtaaatcaaatttacctaatttaatcaattaacaagctttttaagaattataggttaaaaaatattctcaagttttttgttg

SEQ ID NO: 105645 - DNA, 238 bp, Glycine max
tcaggttcaggaaaggctttctaaacttcccagtggcagtgcattgttcgtaggagctatgacatctcagcaacttatgctttccattctagaggaggatttcatagaattggatgatattgcatgaattgattggttttaagagattttgtgaattctaatactgctctgaggagtaattatcacctgaaacaattgtattcagaatggattattgacccagctaaaggggagaaag

SEQ ID NO: 105646 - DNA, 234 bp, Glycine max
gctgatcctcctttaattagtggaatttaataattttaatagttgatcacttcactgatctatttgtatcataatttggcagcagtttactggttttgggaggtcctattgaattgctactttggtctaattgcatttatccaaactgattgggttggatcatttttcagaactcaagtcaagagcagctggggcattgtgttgatttttatttttttagttaaataactcaca

SEQ ID NO: 105647 - DNA, 239 bp, Glycine max
cggctcgagattaagctttcaagagacaaactgttttgaaaaatgggatccaaggttgttgcatccgttgcccttctcctctccatcaacatccttttcatttccatggttagctccagcagccactacgatccaccgcccccaccttgttacgtccctgctcctttaacaccattcactgtcaggacctagttgtcctcatcatagctggattttgacgatagggtcatgccgtgggt

SEQ ID NO: 105648 - DNA, 174 bp, Glycine max
ccgctcgagccgagacaaactgctttgaaaaatgggatccaaggttgttgcatccgttgcccattctcctctccatcaacattcttttcatttccatggttagctccagcagccactacgatccacagccccaaccttctcacgtcactgctcttgttacacgacctagttgtc

SEQ ID NO: 105649 - DNA, 230 bp, Glycine max
tgaatctctgtgattttgatcactcgaagctttgatattttgtatggttttgaatgatttcatgcttcagggtttagtgtagtagggcttgattgtgttgaatatatgacatggcttggacaaccctcaaaggttctcccagaatgtcttctcatccaaggcctctttcttggattgtgattatggtgggagcactggcatttttcttaatttatgcttcctgggttctt

SEQ ID NO: 105650 - DNA, 229 bp, Glycine max
gattcctcaagaagaaagaatcaaatgaagtcactgtgccactacaacattaaaggatatatcaatatcaatttatacgtatatatgatatttttcaactaacagagctacagctattcatcatattatgtccttgcgtgcgtcaagggatgctacggtttatccaaaggatgccagtaaccttgacacctaacttttctaacctcggatactgtcatagaagtttaca

SEQ ID NO: 105651 - DNA, 230 bp, Glycine max
atggtgaattgaggtaaacaacatctctttgcacataacgttcaatagttggataatttatttctttcaaccttttaaattgttaagattaagcatagatgacataactgtaactgtgatgtgatgctagttttcatttttaattattctatcatagactgattttctatcttatctctgaactttaatttcttactctcaccccatttttcttaagttcatccccattt

SEQ ID NO: 105652 - DNA, 133 bp, Glycine max
gtcagaagagggccatttggtccatctgttggtgttgtagacattggtattagtaaagtggcatatctattccgagtttccttgccaggggtcaagaaagatttcacaggtcagttcagttgtgatattgaat

SEQ ID NO: 105653 - DNA, 193 bp, Glycine max
cggctcgagcttactttgagtatctatcattctaccattcactcagctcaaagagcttattagacttcgtgaggagtcctatgttttgatacctagtgtcctttgttctcgtactaaatctggaggctgttattattgagtcaacggtatggcatgcttagcctgctaagcaatatattaattcatgttatcc

SEQ ID NO: 105654 - DNA, 277 bp, Glycine max
acaaatcaaagccatggccacctccaacttctctattgttctctccgtctccctagccttctttttggtgctacttaccaaggcacactcgaccgataccgtttctttcaccttcaacaagttcaacccagtccaaccaaacattatgctccaaaaaagatgctagtatttcatcctctggggtgttacaaatcaacaaaatttggaagcaacggcgtgcccacctcgggatctctcggtcgtgccctttacgctgccccaatccagatttgggaca

SEQ ID NO: 105655 - DNA, 272 bp, Glycine max
attgtgattcatactaacatatattgcatagctagcatatccatcagggaaagcaaaatcccccatggcctctccctcaatcttcaattcagaatccgatgaagattcctgggtcatccaaatcaaccagttggtgagtgaaaccaacctctcaatcttgaacaaaatgcctgtgtgcatataccaagtccctaaatcattgagttgtgccaagccagaagccttttccccacaacttatagctcttggtccttatactcactttcatccag

SEQ ID NO: 105656 - DNA, 195 bp, Glycine max
ctctcacatcatttcccaattccggggtttccttaatcatatcctaattccgccatgtcccatttgaacggagcctactatggcccctccatcccgcggccgaaaacttcctacaaccgcccagggcgcggcggaggctgctgctgcggttgcttcttcagcttcatcttcaggttcatcttaacggggttattc

SEQ ID NO: 105657 - DNA, 191 bp, Glycine max
cacgtcctgcacaaggcaccacacagaaagtaggcagcataaactggagtgaaggttcaacgaagatgattgcacatattccgttttacattctaggggaacaagaagggccaccttttcatgatttctcattctcagatatcattccaagcatatgattgaagctgaaattgtaccaggtggtcatcttg

SEQ ID NO: 105658 - DNA, 171 bp, Glycine max
ctcgagccgggctcttttctagttgattgtgactgagacgctgtgattgcttttagcttccttgcttacaaggatcttccacgtccaaacggaatgttttccagaaattataacgactataatgagtagagtgctcaagagggacaaaaaaaaaaaaaaagggaattccct

SEQ ID NO: 105659 - DNA, 267 bp, Glycine max
tgacttttcaagacatgtcagttggtctaacctacaagaaaaagcatatctttcagtgtgcatttgttcaaggccgtgtaataggtaccatctatcctgctccctgtgagaaccttgatcggtacaatgagcaaggacagttggttaagcattctgcgtcccagaatgtaacagatatagattatgatatttgaggtcattgttccttttacttgggcctcaatttatgtccgtattagatcaaatttttttgtggaggttggagaa

SEQ ID NO: 105660 - DNA, 164 bp, Glycine max
atcttatttttgttttattttatgttgatgtgatttctccttttggtaggagattgcgcgaatcaagggcaaaattactagtttacatatggtgcgtggaaatgatgattattattataactttggtgtctctaattatgtttattggagtggaattttcatct

SEQ ID NO: 105661 - DNA, 260 bp, Glycine max
ggaaggagactattgatttttcttcttatttttatcttgaagcctctggtgactctgaagaagctgattttgatcacacctttgcttgtgaaatggccaaagcagatggtggtggcgaagttgttgatgataatgatgatgctctatcttgcaatggatctggtgcttgtaatgttgctgaatccgatgggtgtgacgagtcttgtgatgagcatgatggtgggattgagaagaaggaggaggaggatggtgtttatgga

SEQ ID NO: 105662 - DNA, 127 bp, Glycine max
gcaagtacaatgggcacctcattcccattttctacactaggcatggagctgtcactgtttttcacaggactgcttcagtttctatttaagcatctccatatgttggtgtgttggaaaatgaattcat

SEQ ID NO: 105663 - DNA, 266 bp, Glycine max
cttctggctcatggtattcaagctcctatcagatatgcagaagcaggtatatcctctgatttttcttcaattttggctctgtcgaatggacgcttgtgatgcttgaaattcaatagatatggacctggtgatgcaggattttgttagtgactgcatggtgattctgcattttgtaagtgctttgtgatcctggattttactaatatgtgcaatgcaccataatactggatatacttgtattttttagaactcagcactatagcaga

SEQ ID NO: 105664 - DNA, 260 bp, Glycine max
gcagtttgctggacaacaatgatcatctttgtggtttctctcctgaaattaatgaattgaagatgctttctgaatatcaagtagatgaaaaccaactaatccgtgcagaaaaagtgccagcttgtagaagatccatcaaacagcaatcaaggcatgttggccaaaataaaaatggtgttcagaggctactgcaaactcgtactcacgaaggtggaagtccttttaatcgtgtttttcctgttagtcctgctccatttcct

SEQ ID NO: 105665 - DNA, 257 bp, Glycine max
aacaaccacatcgtttcatgccaaaaaggtttcacttttaaggtgaggaatttgggcttcaacgtggacaagagcttttggtcaaaccatgtttcctatgtagcacaaaagagaaagggtaatggtagctttgtggtgggatgtgcaagttggagtttggtgagagagttggagaaagagttggaagctgagatgaacacacatgaagagactggaatggcaaagtttaagcacaaatgtggagaaggaaaaggggt

SEQ ID NO: 105666 - DNA, 199 bp, Glycine max
ctcgagccgcgagaaggaagggtaatggactgtattgacagagacattgcaggtggggaagaatcctccaaagagatggatgaactgcttgcaatatctctcaggtgtattctccctgtaaatgagaggcctaacatcagacaagtttttgacgatctgtgttcaatatcggtttgaaatttttgtaaatgcgtctggg

SEQ ID NO: 105667 - DNA, 253 bp, Glycine max
tctagttttccttctttaactgatacatctctttttagtccccatggtaaaggacaaacaatgtgattatctacattttacgtagagttctactcaattatgtactttaagatatttgtttattttatcatcccatgatgtcttataattgtagacagaaagttcttgatgatgagttatcccaatacacgaagtttgtattctaattctgccccccattggcattcattttttgggttcatcatataatgta

SEQ ID NO: 105668 - DNA, 252 bp, Glycine max
ggagcagaaggaccagtaaagaaatttatgatggaatcattggtcaaggttcctgcaaataccgaaccttgcaccatgcctgcccctttcgatcctccatctttgaacgctcaattacagagaaaggaaagttcaattcaacaagttgattcatgggagaaaagttactgggagaaccaaaccataacatcttggtaaatatatatatctttttccatattcaagtagacaaattcagtcgtagaatattta

SEQ ID NO: 105669 - DNA, 191 bp, Glycine max
caaggtgtttgcaaatgagatagtgaataaccttctaaccattttctggcctcaaaaccagaccaaaggtgttgttcttcaacttgttagcacacagcttgatcccaggagaatggaagcaaagttgagcaagaaaaccgttttggagttatccgaagaccataaagttgatgagaagggaagaatcagca

SEQ ID NO: 105670 - DNA, 246 bp, Glycine max
gttcgagagcgagatagatatgactgactcattcctaagagatgtcgaatgctgcattattcaaccccagaacagtgatcagtgggtgtggctggcagatacggctggtcaatattcagccaaaagtgcttatagtgtgctgaggggggagtcacccgaggaggtccaagttgaagcttttcaggaattgtggaaattgaaggccccaaacaaaatctcagcttttgcatggaggctattaaacga

SEQ ID NO: 105671 - DNA, 245 bp, Glycine max
agttattccaagtacacccataatagtatcaaccaagaggcagcgaagatcgaaaccctgtactgatgttgccattttaaatgagcccatgaaccggaagattattactagaagagcagtgcaacccgacaagcatgaaactgaaggtcgtgctcttgttccttatgatagcaacttctctgaattacaaaagagaagaaaagctttaaagttgccaatcactgtggacatggaacaaattcaga

SEQ ID NO: 105672 - DNA, 247 bp, Glycine max
caacaacaaagtcccagtcactcaccaatcatcattgctaacactaccactccaattagtaaatacactccctcaaacaatggaaatggaagcaagcccaaagcaaatagtggcaaggaagctatggaacataggacgcatagtgttcctgatgttgagaaagagcaaactcgccgctgacttcaacctcaacttgttgctcaaacgcggcaagctcgccgccacaaaggccatgccaacaccatcc

SEQ ID NO: 105673 - DNA, 203 bp, Glycine max
cttagctgagtggtgaacaatcaattcagataaggttatgaggctttgttggataaattacacatatactggccttgatgtcatcaggaaggttgtggtgattgtttagccatactgtatgcatacgtgcttctcaccatataggatctgacttttcaccctgtagtattcaatataagatatgatagtagagaatttcaacc

SEQ ID NO: 105674 - DNA, 260 bp, Glycine max
gaaaaagtctgtgaggtgtgctacatcatgctcaagaaatgtgctgtttataattctacattttctggtggagtgaaaattggaaataacagtgacataaagatgttattgagctcggaaatgaagttgagacatttgcttccagtttgcaatgccaggattcagtatttgatttgaatttgtaaaatcagccgactccatatgtctccattaaatctattatgataagtattggcttaccacatattgtgtggtaagcc

SEQ ID NO: 105675 - DNA, 254 bp, Glycine max
  unsure (1)..(254): unsure at all n locations
ctcgagccgctcgagccgctcgagccgattcggctcgagntcatatttagctggaggtatactttgggtacccttttggccatactatcgcaaatcacacacttcaactttacagggtagacacattggctgctgaggccaagtttctggactggtggaataagaagactggagggtattaaaactgttggcttatgggaattaatgctacatttgttatcgtttctgaaaaatgaagaataatttttggtgtt

SEQ ID NO: 105676 - DNA, 255 bp, Glycine max
cctacttccgcctgcccgagcccaagggccgaacctacggtgaactcgacattctcttcgaggaccgcatccccgcccgcaagtttgccacgaccaaggtcgacgagtttgccgcggccgagcgcgacgccgcgcagggcggcggtggcggtctcgtccactagacgatgaaagtgggtggtggaagtagtgtggcgcatcgtaggatttctacctcgctctcgctctctctctcttctgtggcgtctgcccggg

SEQ ID NO: 105677 - DNA, 264 bp, Glycine max
agcatactcaattgccaaatgtgcgccatttatgacgcttgtgggttaagttaattgaaaagtacaatttctggggaatttgatcttttagaaaatggtattctaatatcatggttaacattttctaggaagttttgttgaggtgatttttgctgttattgccagcatttttgttccgtataggtataatttgagtgacagcaattgtaacaacttcgaatattaggttgaaaccattatgtagttgatgattttgtcaacaaa

SEQ ID NO: 105678 - DNA, 236 bp, Glycine max
ctcgagccgaatcggctcgagcggctcgagcggctcgagaacaaggtaaagcaaatatatcatgttgctttctgaaagcgagagtcaattgatttgttgtaagttgaattgatatatagacggtagatttaaatgtaaatccaccgtctatatatcaattcaacttacaacaaatcaattgatatatagacggtggatttacatttaaatctaaaaaaaaaaaaaaaggggggccg

SEQ ID NO: 105679 - DNA, 276 bp, Glycine max
aaaactactccttcacatgcatctcctccatcagtttctgaaactcctcctaaacctccttcctctgatgttccccctccatccacattgccttcaactcctccttcagacccttcaggatcttcacctccagcttctttgcctgatcccccaactaataaaacagtggtggggggtccgaaggtgtcgctaccctctcttccaactgagaaacccactgctagacctactaatgatggtactaacagtatgtcttcaaacaacacaccttcacat

SEQ ID NO: 105680 - DNA, 261 bp, Glycine max
ctctatggttaatttgagaagctataagaggtcattccatcaagatgattactgtggtctgtggatagtgtagaatgtgaagttgtcttgtgttctttgaatgttgctatttgctttcgtttggctggtttggacggctaattttgaaagatgttgaattatggttttgtccacaaaaaaaaaaaaaaaaaaaaaaaaaaaaaaaaaaaaaaaaaaggggggccccctcttatagcgacccggcccccggggatttttttc

SEQ ID NO: 105681 - DNA, 266 bp, Glycine max
caacaggaaaatcttgatggtcagagtattctacttgatatcaacaatttgctggacaatcatgttgagtctcctgatttgcacattggggtaattaaacataggaaattatccactggagcagagaagccaatgccaagaacttgtatttcatatcatggagttgtgggaggtgatgaagagtatctatatgttgacggcattggcataaaaacaggagatttctttcagttctactattcagatccaaatattgccttagcttc

SEQ ID NO: 105682 - DNA, 250 bp, Glycine max
gtggtattactattaggcggaagagtactttaatccttttgctatggctccttgtggatatgtttgcatattggagtcgtccaattttggtattgaacagattttgttgatgtatatagatccttgatctgcacccatttagatagaaagagttatgcattttgtaattgaccatctggacctcggctttgttgttcctgcgggtcctctattatttgtaggatctaggttctcaataaaatattccttg

SEQ ID NO: 105683 - DNA, 242 bp, Glycine max
ctagtatttatacaattactttgttatctcaaaatttctaatactgaggaactattcatataatttcccatacttttggcactgtttatacaaaagtaatagtttagggaccacattgatagtcattcagattatcattgtaaaccaaaaaaacaacaaaattagaacaaaaactgaaagtattaaagctatcaggatgtccaaaaaagctgaatggcgtgtcatagcgagtcacagaaatg

SEQ ID NO: 105684 - DNA, 259 bp, Glycine max
ttccagtattagtctagtactagtaccttagctaagcacgagtttacaataagtcaataattttttaattgggatacagaacttagcattagcatctttttgaactgaatccttttaagctcgtttgaggcttgtttgttaattaacaaaatcacctttctttaaatcatgagtgttggttgttgcagccaaatccagttcttaaccagtggtggaggttcaaaggcatggaaaggagacatggataaagataagacag

SEQ ID NO: 105685 - DNA, 250 bp, Glycine max
agtggacactctcattgacaaggcccttgagaaaattggcaccccagatgctcttaatctacgtgggaaggtaactgtttattgttttccaaactaatttctattcttggctttggatttattacactttcaaatgtcaaatatgctcttcggattgcatattgaattttacaggcagcagtagcccaagcagcattggcttaccagctctaccaaaggaaattttctggtcaaagtgggaactctaagt

SEQ ID NO: 105686 - DNA, 255 bp, Glycine max
catttggtactacttgagagctgctaaaagtgtcccttcagccatggaaatgaacaatgattcatcctcagatgatgaggcacctccactctcttctacgaagcctgtaacacagcctagaccaatcccccgttctgtccctgcaagctatggaacttttctagcagcatctatgaacttgccccggcagggtaatgctttgatggagggatacaaaagattcaatggaagacagctactctcgcaggagcacaa

SEQ ID NO: 105687 - DNA, 259 bp, Glycine max
cccagagaagcctgattttcattgagtgtttctctcggttctgtttccattatgaagttttgattgttaggaaatcttttgttgtattttgatagttgcagcataacagctgcatttggatttttcaatcccgactggggaaaacgaggaaagagtttcagtgaaaggaaacaaataattgatctgttatattctagtactattattagaggcttagagcatcgtttcatatttttgctgagtttgttattgagtcttt

SEQ ID NO: 105688 - DNA, 262 bp, Glycine max
ctcgagccggcttcaaacagtttctattgtattgtaatattttatcagcatgttccaaatgacctacctgtcattatcttatttgcatctttgcaggcaaagagaaatcgtggcaggactccaactcctggcaaatactgtggtccaagagataagcggggacagggagggagacgatctcatagttactcacctaagcgatttcatgatagaggttaccattcaagggaccggcgaggacgatctcgttctccatatcata

SEQ ID NO: 105689 - DNA, 252 bp, Glycine max
ctcacacggagaacaaaatcttaatttctgcttcaatctaaaaagtttggctaagctgcactagtattttctgttaatcatcttaatcataattatgtttagttattgtcttctctatttttgtataatattcttgtttgtgttcactttggtttttaatattgccaagtggtgtcatgtaatctatgtaattcacctagtgaaataagactttgttgttgtattcttgtttgtgttcttcatttggttttt

SEQ ID NO: 105690 - DNA, 254 bp, Glycine max
gccggaggaagttttctctgatgctggcgaagaaggagattgaggaggattttatgaggatggtgggccaccggcctccccgcaggcccaagaagaggcccagaaatgtgcagaagcaattggatacccttttccctggccagtggttgtcggaggtttgtgccgattcctacaaggttcccgatgatgctgagactcgcaagaggtagcgttgagattggggagaggcattctgttgttggctgcttaggata

SEQ ID NO: 105691 - DNA, 259 bp, Glycine max
caagaaggttccaattcagattcgttgcctgactcctctgctgctggaaatgagtaccgcgcattgaggaggaagtatatgctgctggaggatgagagctttgcattagggaaagaggttagagaggtcgaagatgaggtaaaaacccttgaagatgaaaagattgcactgttggatcagcttgttgtaatggaaggccttgttaatccagcggagaagcactcatagtgtttgcaactatgctaacactctgtatgtc

SEQ ID NO: 105692 - DNA, 99 bp, Glycine max
gggcttcggctcgagcgcaacaatgctgcgctcggaggactaccacgcccacatatcaaaagttcataggacacagagtgttctcacagatgtccctcg

SEQ ID NO: 105693 - DNA, 263 bp, Glycine max
aaatcatttgtcacatagaggtatcatagaaattataaacttattttacagtatatgttgatgtttatctgtaaaataagtttggaattgggatgttcattctccttgagctgaatcacattacaaaatcgtactgtaaatcatttgtcacatagaggtatcctagaaattatgctcttggtgatgcaccctaccaacgccaagatggttcttaatcagtcgctggttccttcaccgccaccggcgtgatttctcagccgtcg

SEQ ID NO: 105694 - DNA, 261 bp, Glycine max
cttaattttaaattcaaaattaacatagacagtttaaacttgacgaaccaacagtaatagttagaactgtctatgttaattacgaattcaaaattttctttacaggaaagctgcaacacctaggcctctttggaatgcagcatctcagcttctaacgacggtaggttacatactcctggccatggctatgccaggttccctatacattgggtctattttagttggcatgtgttatggagtgaggctgccattacagtccct

SEQ ID NO: 105695 - DNA, 256 bp, Glycine max
caaccaaggaagatgaaaatggaagagttttcagaagaggaggatgatgatgtggggtttttgaatggaagtgaaagtgagcttggagaagaaagtgaagggttaatagatgagttagattgggattctgatgatttggaagatgagttattgggtgaagatgataatgagaagttggaattggatgggtttacacctgctggagttgggtatggtaacataactgaggagtatttggagagggtgaagaagaaga

SEQ ID NO: 105696 - DNA, 255 bp, Glycine max
tcaatatctgtggtccaaagaatgtgagcgcgtgacagagttagaatcacgtgaaaaggaaaatgatgaattggctcttgtgccttgggtaccttcaccttcttaccactaccagttctcccctgttgatgattctgacaacacaaatgcggagttgatggaagctgatgaaacgggatccatgatgatggatattgaacaagaacatgacactgacattgacgctaaaatttcaacatcaagcattcactatcc

SEQ ID NO: 105697 - DNA, 142 bp, Glycine max
ctcgagcgcatctgctgtaatgggagttgctggtatgcagcataaacagatggtgttgtcggttggtgcagacaggagaatatttgggtatgatgtacgtgctggaagagcagatttcaagcatcaggttgacagtaaatgc

SEQ ID NO: 105698 - DNA, 255 bp, Glycine max
tgaacccaaaaatcctgctgcgggttgtactgatgatacaaattcaaatggtgaagctactaattctactgattaatcatactgatgattaggatgttcttcaggaaagtgtagccaatgtgaatagcactttgttaatatggtttgttgggaggctcatgtacttgttgatgatgtggagacttgtgagttgtgatagggtttatatcttgtgtcctgtgaatttctctcatgcactagcggatagttttgtaa

SEQ ID NO: 105699 - DNA, 195 bp, Glycine max
gaaccggattcccaagtttttgggatactttgagagggtgctcaaggggaatgagaacggcgagggtaagttccttgtaggggataagttgagttatgcggatacgacgctgaggaacgtgttgagtgggttgactgtttgcgtttcctaaggagatggaggcgaggaagggtgattacgagctgctgttcggga

SEQ ID NO: 105700 - DNA, 132 bp, Glycine max
aggttactgtccatcaaatggaatctgctatttgcctacgccattgcccctttccctatggttccaaaggatttcaaggtgcaaggcctagcagatttcatcatcttaagattaaccatgccacccctcttt

SEQ ID NO: 105701 - DNA, 244 bp, Glycine max
aaggatttgatggagatgatgcacattcaactaatattgaaacattcaagcaagtttgctgttccgtttgctcgacagaggttggtgtcattgaccaagacgagatttatcatttcttcaatgttctcccgagtgaatcctaactgattcagatgtatctgcccagcagtgtataaactatgttggtctctgaatttcactaccgtgcaaaattccaactcaggactagttgatcttagtttct

SEQ ID NO: 105702 - DNA, 186 bp, Glycine max
tggttacgcagatacgttgctggccttgttcaccacgccggacacggtcgtgtaggaggcactagcttactctccgacatctcatctcgtaacgggcttcgcagtcaccatgctgctttcagtcgctgccgatgcgtgatcactggagtgtgcgccagctgcaatcgattttcgcttgggagagcc

SEQ ID NO: 105703 - DNA, 212 bp, Glycine max
ccaaagaggaatgaggcatgtagaaagtacaagagcatatacaactagatggggggccccctgtctctggggttggagaccgccggttttatccgtggtggtctcgagggggaggaacagttttcccccaaggagggcggtataagcctggggggaataggggggcaagtgtcttcccgtgtgaaattggtctccccccagtgttccaaaaa

SEQ ID NO: 105704 - DNA, 206 bp, Glycine max
tctttgtcagctttttcttgcttccgtagttcatatggcgtgtgttcaagtcatcacagtttttctctttgcattggctctagctataatttacccctcaagatgtcacgtggtgcagggttaagtctcctgcggtgattggagtctcaagtatagctagtgtgatagtgaggtctcggtgtggtgtggcggtgtgatggtactgg

SEQ ID NO: 105705 - DNA, 239 bp, Glycine max
tagggctgatgatgtggacaattaggcgattggatataagcatacccctgtcagatcttcgaattgcgattgacttgtcgtgcttccggcgtggacttggacatgtctacgactcctggtcttgctgctaatggtaaatatccgctttatacagtagcgactgcatatgatagaacttagtatgtcatgatcatgaatagatgtcatgagcaataagtgtgtgtgtcagaatattatag

SEQ ID NO: 105706 - DNA, 269 bp, Glycine max
cccaaaacccgatgaataagaacgccattgcttgatttgtgatgagtggtgaccgaaaattggcgaaagcgaataggttttatgcttgcagttgcagggtttgaatattcctttttggttgtgggtggaggtggaggtggagatgataacccgttctaaaattgtggagcagctccgagattaccagattcgtcacaaacgcaaccactctgctcctgttttgttctcggccaagccccatatacaaaccaggtttgatgttgctgtgg

SEQ ID NO: 105707 - DNA, 263 bp, Glycine max
ctcgagccgatttttttttatagttttgttggaaaattaaaagagaagtgtttttccctatgaaaagtatttatatggctatttccttcaggtgtggtgagggagtgatgggtagatattgtttagaattttttacctttcctgagcccgaagtgggacggaggattttaaactttgagaaaaattgtaggaaaatggaaggaggaggaattttgattggtcttaggttttgttgatttccctattttctgtgtttttttttt

SEQ ID NO: 105708 - DNA, 199 bp, Glycine max
ctaatttcttcacttggaactttgatgctttacatgttcataaacatatgaacttagttattgtagttttgatacaaatttcttttgtttttgacttgggttgtaaatagattgttaaatcagctgatcataaactgagtcgaaatgtttgtgccaaaaaaaaaaaaaaaaaaaaaaaaaaaaaaaaaaaaaaagataa

SEQ ID NO: 105709 - DNA, 129 bp, Glycine max
gattgatataggaaagagttggaaattttgtactcacaatcactcaaaccttacacatttgtccactaggatacagaggcgctcagaagagcaatgtatgaacttccaacgagaaagtaaaattgttca

SEQ ID NO: 105710 - DNA, 135 bp, Glycine max
ctcagttgcttgtggttcggtaactgcttttcacctgggaattctctcgctttgtattgcatgtctatttacgattgttataattgaacaataagggaatattgacatagaaattatgatgcgattcgtttatca

SEQ ID NO: 105711 - DNA, 249 bp, Glycine max
tggcacctgccgtggtgcacctatacaattcggtggccaagaacgcgagagcgttcaaggccgcctggaaacatgctgcgaaactcgtacagaaacgactaccagaatccgcacaacctacagatgcggtactgcaacccatcctcgctcgaaatgctccgaagcaccctctccaccgtattgcctacctcaagcaaagcaagggccgttggtacaccacccatagccagatcagcgtgccgttcgacg

SEQ ID NO: 105712 - DNA, 142 bp, Glycine max
caaagttgcaacttgtttcaagattgtggaacagcagtggaagtttcacggggccgaacagcgcttacactcctgtatcttcatctgcaatttgtattttgagaacgatttgatcgaataatattgtatgaatttaggacgt

SEQ ID NO: 105713 - DNA, 274 bp, Glycine max
gccacctgtcctgcaaaacctgtcacagttaactgctggagtacatacctccaacaaagatgttggctgttcatgcaacttgcttatgctcatcttcttgatgttggctgaaatcatggttttctgtcagagaactcagcaaggttcgatataaaaggcatgatcttggcaactaggttgctccatttgttggaatagtctaattggattgcaattttctcattccaactatgtctatggctgctattgtgtaagttagtggagttggaggctt

SEQ ID NO: 105714 - DNA, 267 bp, Glycine max
aaaaaatggaaaacaatttgaggctgttctggcagaacaggatcgacctcatggaaggttcccgtttcttctgccatctaatcgatatcatacttactatctgaaagttcttcaaactgctgaagagtctaagttactaggcaagggccaccagaagcacaatccagcaggtcgtacaggggacaataatactgctgtacatgaagatagagacaatctttcacatggatctatggcttctgatctaccatatgacatggaccgaaa

SEQ ID NO: 105715 - DNA, 260 bp, Glycine max
atcatgtggtgtctatggatacccttatgatgaagctgctacagtggcaatttctaccatcaaagaatttccaaatgactttaaggaggtccactttgttctattctcccctgatatttatgacatttggtcaaacaaggtggaggagttgttgaaagattaatatgctgacgcattaaggagcttctggtatgggataatgcggtgtagaagtctggtttgtgcagtatatggaatattatgcagcaattttgtttttt

SEQ ID NO: 105716 - DNA, 263 bp, Glycine max
  unsure (1)..(263): unsure at all n locations
atatttcaaacaattcttgcttagctctcacaagcaagctttgacaacgatgaaggtcagaacaaaactctcatgagatgtaacattaatgttttttgagttttctcagagctctagactattttagttgcgctagggcttgtatatagttgtattaacttttcctttcatgttaattagaagtaagtaatcctcgttgagtcttaacttgacagcttttttgatttcttgtgaatcagaaagtagtgctanaggtggagttg

SEQ ID NO: 105717 - DNA, 252 bp, Glycine max
cagagatgctctgtatggtattggctatgctgtaccgggctcggttctacaacttctgctttccaaatacggtgatggaagtggtaggagggttgaacttggttttgacagttttgtcgagtaagattttttatctgggtctttgaagagagtaaattttcattttggtagttgagagattttttaatcattaatttggtcctcgaaatgttattacatcaatcttgtcctcaaatgatgtttttctttttt

SEQ ID NO: 105718 - DNA, 255 bp, Glycine max
ctcgagccgtgaactctttctctctctcagtctcaactctgaaattctgaactaggatttggatgcttccattccctctctctctttctgttcccaaaattctcattccacattccaaattcgcccttcatggggaaaggagccggctgccttcatagcaagaagaagcccccgccggtcgccgacgatgctcccgctcccaccgttgccgatggggtactgtttgggtttccgacgaggtacgggtcgatggcg

SEQ ID NO: 105719 - DNA, 253 bp, Glycine max
tgatgatgagttcggttttctggattcatacattgatcctatgaataatgaaagtttctggaaagagctaactctggatgacatttcctttaataatgtaccaatagtttcagaagataccaatggctgttttcaaagtacaagttctagcaatagcaacacccttgattctctgcataaatcaaccagcgaaagtattgttgcggataatgactttggcggctttttcgatgcatacgcagaagcaaccgtt

SEQ ID NO: 105720 - DNA, 248 bp, Glycine max
gttggccaaagtgctttccgatggcaccgaggtggctttaccgcgattgtccccacgtttaggagtggagctcctccagaacacaaacacacatgttctgaatcaacaataaaacccgtttcagtccgaaattttgttttgtaaccatagtaccttacatttaacactattttttgtatattgacaaagcttgggaaattaatgtgcgtgttttgcagtttgcacctacaataggagatattgcttgc

SEQ ID NO: 105721 - DNA, 207 bp, Glycine max
gttcaaaattggtaggaagtagggttaatttatctatgcattgtttatctaaacttaatgtgaaaactttaaagaaaaataaaggtttcacattaagtttagataaacaatgcatagataaattaaccctagttcaaaattggtaggaagtagaaaatcttggagttatttcgtgtccttttcgctcgaaagcaacattctatattt

SEQ ID NO: 105722 - DNA, 264 bp, Glycine max
ctattcttgtgtgaaaatagaggctgatgtggctgaaattgagactgagcatcaaaaactaatttttgatgtgaagtacggcttgttgcagaagataatctcagaaaatagttccccaaatactgtaaatgaggaaattggtatgtattctagttctggtggggcatacttgttcacgccccatggcgatgcccagtccattattgaagaaggtggccagttgttggtgtcagagggtcctttgatgcaggaagtatactctta

SEQ ID NO: 105723 - DNA, 261 bp, Glycine max
cgttgaaaattcagtatcttgtatggaagatttcaataaagactcataaattcatcatcatctcccagctagaaagaaagataatcgcaaaggcagagcaagaacacaacacaagacatcgaagcagaagacgacatggggatgcagtggctgattctcatctacgtggtcgcagccgaagctgcggtggcaattctgctaactcttccaacggccaactctgaagaacgattcgctctctcgttcctcattttcaaccgg

SEQ ID NO: 105724 - DNA, 252 bp, Glycine max
aaagttatgtagtaggtttaagaaatagtgcctatgtttatggatgagctttaagcttttcataaaagttgaaatattctacttcagttgtattcctacttgttaacaattttttatttattgatgtgttcttgttaacttaatatcactaattatgtttttaggagttctagtcttccagacaagtccatcagccctttttattaagcttcccataagcagaaatgtaaacacttgaaataaccattacat

SEQ ID NO: 105725 - DNA, 99 bp, Glycine max
atcaagaacctggtattgaggttcttccagatgaatgcctctttgagatctgcagacgccgtcctagtggcaaagagcgaagtcatggtgcctgtgtat

SEQ ID NO: 105726 - DNA, 275 bp, Glycine max
gttctcagtctgccgtgcagattcttttgcatcctattgttggacaaaatagtctatcctcaaatttgtcacttttgtagccatcccaaatgtactgagctcgtcattttgcaagccgcaagattctaatttattaattgcatgggaaagctcgtccttttctattcatttaaaaacagaaagggcccctcctagttaggtcactgacgcacaggtttgaaccccaagattcatcttgcggctgttataaaaatccccattgtttttttgtttca

SEQ ID NO: 105727 - DNA, 268 bp, Glycine max
gaactctctatggtttgtcttaaatgttctacgtgttatataactgtccaccgtttatcctctcaaagcaacccacttgtttcttttgtcagcttttgcttctgtgcctggtaaagaaattatgagtccaaagaaatggtttaaggcgattattagattgaggaaaccgaaggaagataaatcgaaactagcaaaggtgcaatctacccctgaaaaatcaaatgagtcctccgaggagaaacaagaagacactcttgaagaggcactt

SEQ ID NO: 105728 - DNA, 267 bp, Glycine max
ttttcccggaattgaatccggtgagattttgtaagaataccggcacaggatttttctctctgttgttcttgctagacagggagagaaagatgagggttagtcggtgatgatttttccttttttcttttcttttttttcccctttgagctatcaaacatgttatgatggtgtgacatgaatgatgaaatattaaataacttaatagatagttcttttatattcatcgatacttttaacagagtaaaaaaaaaaaaaaaaaaacaagaa

SEQ ID NO: 105729 - DNA, 266 bp, Glycine max
atttgacttggcttacaatctaaactttatagatggttccattattttatgagtttaatggttttcatgcactaaccgtgtaaaactttcattcaattacaaatcattctttatatgacttttaagataattattatgatggtttatgattagatgtcagtgtaaaactatttgacagttgacactgttagcgcatagtcttttttctcttatttgatttgtatgattattggtgtaaagtggacactcatgagcattttatgtca

SEQ ID NO: 105730 - DNA, 259 bp, Glycine max
cattatttgatctgcatccattccaatgcctagtgctgtagcttccacgtttttatctttgattggacgtggaaatcttgttttacgtgcatctttgacacctgcccaaacacacttgttaaatagatgtgtagttgagcaaactggtataatttatgtttttgtttcctgacatgaggacaaggaaaattgtaacctgcaccagcttgaacagtggatactgagaaatgatagcatgtcatatttaatgcagaaaagg

SEQ ID NO: 105731 - DNA, 127 bp, Glycine max
gccagcgttcggccttctgttcagcaccagcagaaagatgccaacgttgtcaaagtgattgataaggcctttgacatgaaaaatgagcggttgtatgttaggcgaagagctagcatcgtatcgtatt

SEQ ID NO: 105732 - DNA, 257 bp, Glycine max
gttcagaaagaagtggcagtactaactgaaaagaacaccagttcaacaaacaagaagagatgacatgctggcttccttaaccagtgctttgctctaaccaaaagatcgtccattaacatgtatcgtgatctaggctattactggttacgccttgccatttatattgcattggctataagtttagccactattttctatgatctgggtactagttatcgctcaattcaggatagaggttcatttcttatgtttgtgtc

SEQ ID NO: 105733 - DNA, 254 bp, Glycine max
ctatctcatcgctcatggatacggctgcttcgcataggcacattgacttctcactgagcagtcctcttagtggtagtactccaagacgcgcgatgcggtacaaccaaaggtctgctgctacgtacgctgctgctggccactgtgatgaggaggatggtgactatcttactcatggcgtctgctatgtatagaccttgtgctcgattgtacatcggagacggcagacatcttagaggctcgagatggtctgaccg

SEQ ID NO: 105734 - DNA, 252 bp, Glycine max
cgacaatggaaaaaaaaaagtcttgaatttctcacttctagttctagtattgttgttgttgttgttatatgatgtatggttgaataaatgtgatttggtgtttgtactttgtagagttaaaaaaaaaaaaaaaaaaaaaggacaccccccaaaaaaaaacccccccaccccgagaaataaaccccgacccggaccccccaggcgacccaacttcccctagggccccccccactccaaccttgccccccccag

SEQ ID NO: 105735 - DNA, 175 bp, Glycine max
gttttatgagtagaagaatcattgatgtcacagacagaacaattccatcaaccgagtattatttttccaagtgtttacaaaagcattagtaaatcatgagtcatgcccttattgaaggttgaactaaaatcattttgcagattggttaatatgagttggcaacttggtcctactt

SEQ ID NO: 105736 - DNA, 208 bp, Glycine max
  unsure (1)..(208): unsure at all n locations
aaagaaaatcctcacccattttcttcgtagccaaacactctgaaattctcagttatgtcgtggcaagcgtatgtggatgatcacctactgtgtgaaatcgaaggtagaccaccttacactcacgaccgacncagtcgatcgagccaagaacgaggtaagcgtntnntggggctcagagcaccaacttccctcagttcaaactgaggaa

SEQ ID NO: 105737 - DNA, 125 bp, Glycine max
tcgagcgattcggctcgaggttggagacttgtgaatgagacaggtggacttaaaatccaatgcttgtggaagttacgagattttaaatgtggggttgaactcattaacaggatctctaaggttgt

SEQ ID NO: 105738 - DNA, 203 bp, Glycine max
  unsure (1)..(203): unsure at all n locations
gacatttcagccctaccctcggctgctccatgaacttccacatctacttccctccatctccttctccctctcacaaattcccagtcttgtactttctctctaggctcttacactgcacgagactgagaactttcatgtttcgtagntcggagtggctacacacggcgctcgcttccgctgagggagtggccttggttgcccga

SEQ ID NO: 105739 - DNA, 222 bp, Glycine max
  unsure (1)..(222): unsure at all n locations
gctttttctttctatttcttgagaactatggagtgaggtagttggaagctgcttttgcggttctcatcgctgttatgggtctttcttttgcctgagatgttacggtagatgactctaacgcataatagtaacaaggagacttttgtacatcggggtaatnttctcgcggttacgccagtactcaagactacgaaaacaattcgtcaggctgtgggtgttgtg

SEQ ID NO: 105740 - DNA, 153 bp, Glycine max
ctcgagcgattcggctcgagtcttgatttagagctgacaaactatcaatgccatcaattgaatgagtccgaatcgtgagcttcagaagatacattgttcaggaagtaatcaaagaaatggctaagaacagaccaattgatactaaggggaaga

SEQ ID NO: 105741 - DNA, 105 bp, Glycine max
gggggagaggcaacaaccttcaatttggtctggagacgccgagatcgtcgaggcgttctacgatttctccgccaaggttcgacagatgagagaagggtccattga

SEQ ID NO: 105742 - DNA, 207 bp, Glycine max
gtcaccttttattttacttacacaaaaaagactaggataagaacgaaaaaaaaagtgatcccccttttcttgtttgtcttatatccatatttatgcgagatacgaattacatcgtgcatcattgtaaacaacatgacacatgtaataacattacgttttctgcgtgaactcgaaaatgatgagggagttattgataatttgaaaaga

SEQ ID NO: 105743 - DNA, 212 bp, Glycine max
caaagaggagcaaccaaaaatggttctcacatccactgccacacacccagatgaatgaagaccagagcctaaactagatgtttgcttccagcatatgatgcgtgcaagcctattaccaataggttccaagtatggccaggcagaggatacgcatgaacctcaacatgattgctcgcttgactcagataataaacgatgagttgatgttggat

SEQ ID NO: 105744 - DNA, 183 bp, Glycine max
tctcgagccgattcggctcgaggtgaaagtttcttcaactttttcactcctcccgaggtccatgaggatgatgatgatattgctgaggatgctgttgaagaactccagaatttgatggaacgtgaattatgacatgtggtatctacaatccgggacaaaattattcctcatgctttcatggtc

SEQ ID NO: 105745 - DNA, 110 bp, Glycine max
ctcgagtcgctcgagccgctcgcgggtggacaacgacatttctcagccaaagaacaaggatccgaatcgactaatcaagttgaggcagatgagcactatgtctaccggag

SEQ ID NO: 105746 - DNA, 201 bp, Glycine max
  unsure (1)..(201): unsure at all n locations
gaataccatagtgtagagagtctctgccaggaaaaataagaggcagggaaggagtgatgaggtggcagagagagataggggtgagcaaattgtagtgatggtgataacttcagagattgacacatagatgattgcaggatgtattgatgctgttgcanagtgtgtgagcatcctttgcatgtgaccgataactcagaatat

SEQ ID NO: 105747 - DNA, 247 bp, Glycine max
cacgcttcccccgtgcgatcctcccactcgacgctgttctacgcgctcaccccatccgagttcagcttctccctcgacgcgctgcacctgaaatggcactacgcgccctccccgcgcgtgcgagttcaggacgatccgctcgcggtggagatgtacgacgtaaatagccaagcctgggaggcgtgtccctccatgccggcgctgctgaaaagctcgacggcgtcctcgtggctgtcggtggcagtcg

SEQ ID NO: 105748 - DNA, 247 bp, Glycine max
ctttgcagacggcatggaaagtacatggaaagaatgcattgtctctgagattcctcgtctgattggggatatttttttccaagtagagttgagtggtccatcttccaagttagtgaaagaaatttcaatgcatctttttctattaaaaagactttggtggaggttcttcttccaagtttagctatggctgatataccaggctttttgactgtgattgaaagccaaatttggtccactgcatctgatt

SEQ ID NO: 105749 - DNA, 245 bp, Glycine max
ggcagtggcatgaccaactcaaattatgtggagttgaatcaactattcgagaaatacaaagacaaaggttgactctttatgctttgggcttgcgttattatacttatcttacctcaaaggggagaacctggttttggagtttgatattgtgatgttttactctgtgaagcacggtatttctttttattattttccaaaagcttgattttgattaatacaaatgagtgagtttaatggcttcatta

SEQ ID NO: 105750 - DNA, 246 bp, Glycine max
ggagcaacatggatgacggcggaggcccgtccatctccgtcgtctacttcgacggccacacggaggccaccgtcggcgaggtcaccgttgattcgtctttcaatttcaaaaagttcgtctcctttccagtcagaagatcggaatctccccgcacaagctttccgtctacctcgccaccttcggcaccgaccggagaatcccaatctccggaaaagtcaacttcgccgccgtagcgcgcgacaacgc

SEQ ID NO: 105751 - DNA, 245 bp, Glycine max
aaattgtttgcgcgtataatattagaaactccccaccttttcattttggttcgaattaaacaaactaattcattccatgcacacaaaattagttttacatgaccagttttatttgtttaatagcagaccatgacgaaaattagctttgatgcacctttttaatttctgtgatgagtttatgtttttttgagctgtgccaccgcagaaagttctacttattattttgataaggagttatagtccat

SEQ ID NO: 105752 - DNA, 243 bp, Glycine max
ctcttttgctccggcgacagggcttccgccgccgtaggagagaagcttccggcaaccgctccccgttcaaccccgccgaccacgacggcgtcagcacgttcgagctcttctacgacgacggcgacgcaccggcctccgccctcttcctcccaccatgtcggagttgctcctcggctctggctttgacagacttctcgaacagttcgcgcagatcgagatgaacggattcgggcggccggagaa

SEQ ID NO: 105753 - DNA, 239 bp, Glycine max
cgacgccgccctcatagaaaagaaattaattgtattgatactgtatttgagaagatgaagaatcttcgaattcttatcgttcgtaacacaagcttttcacatgagcctcgttatctcccaaaaacttaaggctacttgattggaagaactaaccttcaaagtctttgccatcagaatttaatcccactaaaatcagtgccttcaatggaagtcctcaactcttactggaaaagccaatt

SEQ ID NO: 105754 - DNA, 245 bp, Glycine max
tgcatggctaaccagtagggattatttaaatcgaaccttagagcgttatgataacttgggggtaatatataccttcgagcgaacttggatctttagttatagcgtccgccccctgcaagatgaaaaggggcgtgttataataatataataactaaaggtaaagcagaagaaaagcagaaaaatgaaccccaaaaacaaggggagggggattcatttgttaattaaatcggttgatatggtttcta

SEQ ID NO: 105755 - DNA, 244 bp, Glycine max
tatgaatgtatgtaaggaatgagttgaggttaaggttgtgccacagttctgccagttcacgcgaggtagctttttggtttagcttctttaagtctttacttaggtgagctgcgtagtggctggcaaattgtaagtaagaaagtgtaagggtagagtagcggtgtatcttattattatgtaatgtatatttataattaataagccaaaaaaaaaaaaaaaaaaaaaaaaaaaaaaaggggggggg

SEQ ID NO: 105756 - DNA, 245 bp, Glycine max
ctcgagccggttacatatttaactcgatgaccaaaatgctttacggtatctagtatgagagaatacaatgctagtttatgataactgttgtgtcaagtgtattcttttatgcttgaataacttttctctgcataaaattgtgtttcctgtagcctttatcatacatcggattgacattgttacatggcacaaattgagacgtgtcatattgaacatatacatgactattcggcatgtaacgcaga

SEQ ID NO: 105757 - DNA, 239 bp, Glycine max
tatgtgttaaacaataatgtatcaaatttcatttgagcccaaaactgaatttgatatttttagaagaacggcaagaaaatgcaaatattggaggagatgaggtggttttggacactcccaaattacacgcacaacccaccttttaattctccgcaccaatcttttagaagataaaaagcgaaaagaggttcgtttccatttcccgcttcttcttttttccctcacttttccccggcgag

SEQ ID NO: 105758 - DNA, 161 bp, Glycine max
gtttaattacataataataataacaatggtttctattcgctaaagatcagcgacacattcacccgcacagcaaagtacatcacagtgcaggggctcaattatggagatagcagttcagagccagagagttctgcgtgtacatcttcaaccgatatcttcga

SEQ ID NO: 105759 - DNA, 242 bp, Glycine max
gtactccgcatcaaccattaaatccgtgtacaagcctccgttgcccagatctccaattcgccttcgaccctctcatgctgctcattcatcaaactctattgctcttcaaacgccaccaggttcattcttcttcttcaagccctaatctctttttattcttttttatttatctttgtgtttttgaaacaggttccttgaccaaatctcagataccggttctctccccgaacattcgacccgat

SEQ ID NO: 105760 - DNA, 269 bp, Glycine max
ggagcttagagctataaaatatctggaatggatggtgtggatttcaatgaagcaagagaacttttgttaactatttgtttattacatggaagttcttctaacctagagacatttactataaagtgcaatagcatggcagtggagctacaacagattttggatgtgtttgactatagtaactgttactttaatctgcttcaagatgtgaaaatcacagttaaaacttcctataagcctgcacttgatttgatacggcttgtgcttgcaag

SEQ ID NO: 105761 - DNA, 266 bp, Glycine max
ccgaatctccgtgaacgtccatcttcgccgcaaccacgaatcctcaggaactcagcaagttcaagtgccatgagaggaggacaaagcaacgggggtgttaggggaattgcctccccggacaggggtgcgcacgataagagaggggcccataacaacctccttaatgacaataacaagtccgcagcctcgtcggatactgcgcacgatagcaagaagggagggtcgccgtccggcagcggagacgcggctgctccgccggtctggcc

SEQ ID NO: 105762 - DNA, 247 bp, Glycine max
tggtgattggcctagtatgaaaatagagattatatggaaggccctcgacaacattaataatttttctttcactacagagtagagactacagcacattgctgtccccttcagcaaatttggggttgcatcccctccgccgaaagctataggaacatgttagaaacgcggtgttagaattagatgcggctttatgtagaacagatgcagagtgttcttttcaattttcctttaaatgtcagtattttag

SEQ ID NO: 105763 - DNA, 263 bp, Glycine max
cttgactgtaactctctgatttttttaattttatttcttgatttattttaaaaataatttggataaatgttttttggttagatttcagtactacccatgatgttgtctttcattgtttgttgtaactctctttgattaacattaaaattttgatatttttttgtcgtatttttttaatgtcttgtgtgtatttttatatgtataagtacatgttttctgggtagttttcgcttttcagtactataaatgatgttgttgccttt

SEQ ID NO: 105764 - DNA, 256 bp, Glycine max
atgcttgtcgaatgtttcttacacctgatccagacaatgaatctcttcctaaagacctaacctatgcagaggttagccctttaggaagagattcattgtctggatcaggtgtaagaaaccttcctaaagggctaacctctgcataggttaggtcttaattttgtgctattcctgtctatatgtattttaatatttaacattactcattaaatttcataattgaatgaaatcatatgtatattgtttcagtaaagtg

SEQ ID NO: 105765 - DNA, 260 bp, Glycine max
gcgttgactccgagagtgagaactcaaggaacaaggtgcaacaacatcagcagcatcatggttttgctcatgctaacaaggaacaccctcaagagaaaaaaccgagttttgatgagtttcggtcaacaacaccctcaaagtttgccacttctgggatgcaagaattgaccctcagctatctctgtgagaatccaaaattgggtcttgctgagagagaggttggtgatagaagcttggtgaagggcaaagaagttgttgtt

SEQ ID NO: 105766 - DNA, 266 bp, Glycine max
cttaagttccccccttagaactgtgcagggtagaatgtggtgagcgtttttttgtcatgaatggcaagtagaaaattgcaacgtcatactactccatattatataatggttgaaaaggtttacctagctgtgtgtctgattttacaagagaatcagtttaacctccagtgttgttcaattctaatctacaattaattaaccatgtccaattttatattattttatgacatcgtttagtgtatcaaaaaaaaaaaaaaaaggggggg

SEQ ID NO: 105767 - DNA, 105 bp, Glycine max
taggcaaaggattctacacgccgctcgatgggaattgcgcatcaaggcgtctcgtagggctaatccgcctcacgagggtcaccaacggcgcgtgcctttgggggg

SEQ ID NO: 105768 - DNA, 267 bp, Glycine max
gtggatggtgaaggtttgatcacagtgatgccttcctcagtgggaggactttcgagaacagtgatggtgatgcttcctgaggaagaactcgctgaactaagcaaagacgatggaatattggagttggagccagcgatgcttcttgctggttgtgtggaccattagacttgtgcaaaaatttaatttttcggcttcttgtctctctctctctctctcccgctatgtaatgcaatgctggcaacctttacttacacatgggaccagaga

SEQ ID NO: 105769 - DNA, 263 bp, Glycine max
ctgatgtggaaggatcaggagcatgcatctaccttagaagttttagccccttcatatcttgttatattgcggtaatgccatgtagcattgtgataaattggcagtcaggccctctgtgtattatgatagacttggcttgatttgttcctcttgtcctgtctttttttcttttgacaggggagcttagtgttgctcagtttgtggtttctagagcaaactagtgggtagtatgtccaaggtttaggtgttcaagttggattccc

SEQ ID NO: 105770 - DNA, 267 bp, Glycine max
ctcgagccgcgcgcttgagacacgtgaggaactcccgagaagtataaagagcaacttaacttttcactagcaacattatttggtcatcacatcaaattctatgatcatgccatttgaactgcaaacttttcttggaattgattttcatctgtggtatttgcaggctgattgagcatgttcaccttcactccatggtggaaatttagaggtaaaagttgtaacgactggtaaaagatggcatttattttatgatgcgttttcctgtat

SEQ ID NO: 105771 - DNA, 264 bp, Glycine max
  unsure (1)..(264): unsure at all n locations
ctcatatatcccattctttctcattcacacagcatcatgggtgtcaaaggttttgttgaaggaggcatcgcttccatcatcgcaggatgttccacacaacatacgagttgtacncgagntgnagccanngatgcttcntgntggttgtgtggaccattagacttgtgcaaaaatttaatttttcggcttcttgtctctctctctctctctcccgctatgtaatgcaatgctggcaacctttacttacacatgggaccagagacg

SEQ ID NO: 105772 - DNA, 151 bp, Glycine max
agggaatccaaaccaaaacgagagaaaagtagcaatacaattcttatctttgttgtgataggtccatggctctcttcttttctcatcatcctcttgcttcatgtggaacaaattgacttttacgctctggcagtgcactaacgcatgaact

SEQ ID NO: 105773 - DNA, 233 bp, Glycine max
ctcgagcgattcggctcgaggtcgtacccgacccgaaactgcgagaggaaataaaagcttcaatagcttcgaaattagttccaagtcatagggaactctttgagaagtatcaggtcgggtcagaaaccgtgttcgggcttacacccgatgatttggagcatagtctttctgacattttatcgggtagcgtttcgtcgtcgcattctccttcacctccacatcgcttcaaacgc

SEQ ID NO: 105774 - DNA, 264 bp, Glycine max
cgcgagggccccctttttttttttttcctcaagggaaattgttgcttgcatggtgatactagtagttgccctcaaatgggtcaaaggatgatgttccaagttaggtagggtttgtgtttgatttccaaaatgggttgtattccggtatgtaaaggatcagaaatatgccaaactggttaaaattaattaaattggtgggggatttcaaaaaaaaaaaaaaaaaaaaaaaaaaagaaaaaaaaaaaaaaaaaaaaaagaaaaagg

SEQ ID NO: 105775 - DNA, 266 bp, Glycine max
cagcatttccgacccagactccttcacagtctactacctcatcacccactgcggcttctctccgaacaccgccatcagcacctcccgcaagctccgcctcgacacccccaactccgtccttgccttcctcgccacgctgctctcctccgacttacccgacacgcttcaggaactcaagcatttagggatgtgacggttagggtttacaagaagtgggggtggtcccacgaacacgttcttctcgcgtttaagaattgtccttattg

SEQ ID NO: 105776 - DNA, 199 bp, Glycine max
ctgctctatgctggaagttttttgagcgttgcccttataatatgtctaatatccataactttccacgtctcttactctgtgtgtttctctcctcttcctcctattttgttatttgtatgttcttttgtaattttttacgtgatcaactaaaaacatgtactctctgtttgtatgtatgccctaccaatgtgtctcttat

SEQ ID NO: 105777 - DNA, 263 bp, Glycine max
tctcgagccgattcggctcgaggggaataatcacaggcaaaatactacaatcaacaattgacgaatgtcgagatgcttatgcgacatggataaacatggtattcttgtgtctgtgcttgtattatacgtattttgttttgctgtggttcaagtttccttttaaatgtccgtttgaaaatgtatggaatttcaggcacatgaaatgttgaagcagaagaaccttgaaaaacaagctcaaaatggtgaaatcaatttagatagag

SEQ ID NO: 105778 - DNA, 262 bp, Glycine max
cagaaattgaactgaaaaggatcaagaggctcaaagagaaatttagaatgatacatgagcagctaattcaaaatcaaaccatgtgaatatgtgagctgctggaactgctgagtataattttcaaatgaaaaaggcatgaggtttatagatttatgatttttcattttcctatattcgtgcttacataatggcttattgtagaagaaggatgactagatgttcattatgaggactctttgctgtagttaactgaatatttttt

SEQ ID NO: 105779 - DNA, 256 bp, Glycine max
cttcaatccatgctgttgtgatggctaatagtaataattctaatggcaatggtgcgaggaaggagagtgaagacgaggaaaaacagatgcagagtaggatgcagcatcccttgggtgataggtctacaaatcagatgcatagagtggtcacaagtaccatggcaatgcatgctgccaacaagaagcagcaacaggttaatggtggtaatgggaagcaaagctattcgtattccgggattaacatgaaggggaggga

SEQ ID NO: 105780 - DNA, 245 bp, Glycine max
agattcgtatgtttatattaagcatacagatcaagttgatccgtataagccttacgaatcaagttgatatgtaagacttatacggattttgaatttgtaacatttatttaagtttataatttttgtaattattactttgtttgtattgtcattttaaaaataatttaattgtttataagtgtaattgattaaaaaatataaacaaacaaatcaatagaatcaacgaacaaaaacatgataccccg

SEQ ID NO: 105781 - DNA, 192 bp, Glycine max
tctcgagcgattcggctgagacgtgtatttctaatggctcaaggttaacttggaacaagaggaaactctactaagtttggttagtttagtgtgtagaagcatgatgggttataggaatcgagtaggaattcatctgatgccttctttgagcctcgattcaccggcaagctttgctctcctgcatgggatatt

SEQ ID NO: 105782 - DNA, 272 bp, Glycine max
ggctatgacctacatactagttctatgctctatctccttctcctgtggatggtaaagcctcatctccattgggaaaataagggcacaggtagtgggatggccaccaatttgatcttttggaaagaacacgttggcctctaatttacaaagaatgatgatgaagcagaatttaaatcagggtgtctatatgtaaaggatgttcaccatttcatgtcacctgtcggtgactaaggataatgacaggttctgagactattggaggggctaaagac

SEQ ID NO: 105783 - DNA, 269 bp, Glycine max
cgggaacaatcaggcgtgcgtgagtttcaagtccaactaatcataaaaaaatatctctagttttatggtgttttctctgatttaccaacgagactaatcatggattagtcactgccttatttttctatgcatataaatataaataaggattgctaatgtttatttactttttttaaaaaaatatttttgcatagacatatgtcgagtgtattttaagaaatttgaaattatttttcttttcgctgaagacaatgtgaaattatatttta

SEQ ID NO: 105784 - DNA, 287 bp, Glycine max
tcggcacgcggcgcgagcttgcgtgcagcacgtcggtaccgtcgggcatgccacgaacgaggactccgaaggggaccgtcatcatggaactccacatgctgctaaaacgccgcggcaagctcgccggcaaagccattgccaacttaatgtcgtcccaccaccaccacaaccgcggtgggtcccacaactctcaccaccttaagttctctgccccaagggagtacgagttcagctgcagcaacacgccccacaacttcttcttccccacaggagggaagcaccaccgc

SEQ ID NO: 105785 - DNA, 264 bp, Glycine max
gttgttattcatttaacatgattactttctcgttagttgttcttttcaaatgttggatttcttaaggaatattttccatctcttatagatcgttttatcggcctgatctttactttatattcagtttttcgttcaatgaagattttgaattttgagtgtttctactaaaaaaaaaaaaaaaaaaaaaaaaaaaaaaaaaaaaaaaaaaaaaaaaaaaaaaaaaaaaaaaaaaaaaaaaaaaaaaaaaaaaaagaaggtgggggg

SEQ ID NO: 105786 - DNA, 260 bp, Glycine max
cctcaatccaattagttgccaactgttctttattgattttagtctctaattaggtgcttatatctaagagaaatattgtttgttttgtgaatttaatttcagtggctactgaagaggttttggttgatgaaatcacttaccctaccaagatcactactaccaagcccctatctttgcttggccatggaatcaccgacatggagattcacttcatccatgtgaaattctattcaatcggggtttatttggagccagaagta

SEQ ID NO: 105787 - DNA, 244 bp, Glycine max
ttcattttttgcaaacttcaaggttattctgcgagctggcaggcttctttattggttatgaggtgttgttggaggtgaaatgggaggcacttatcgatctctttttttgacttatgttgctttctagtttccatgtagagtagttttcctgcagcatatagtgcgtatagttatacatcttcaacagaataggttatatagttacttctactgtagctgttactctgttttttttttttacttc

SEQ ID NO: 105788 - DNA, 264 bp, Glycine max
cgaggatgttgtaattgaagaagagtgccacacacccacatcaccctctcaaaaattacccactaacccattggtgtgccctccagctcccaagaaaccacgagtagtgcctcgaagacttaagaatttagacccaccatcacaagaagggttcttccaagtgccccacgatctggcttcagtcttcgtcctacgctcacccagccttccaagaagaacagcaaagcaagcttttttctaggcacttccacatattctataata

SEQ ID NO: 105789 - DNA, 250 bp, Glycine max
ctcgagcgttggtgttgaagatagaacatcagcggctgaagatcaacactggtctggtcaggagggtgtcacgcgagtaaactcactggttcaacttcctagattttctgaggaaaggccaaactcttgagttttgttggttcagtgggattgtaatacctgttgctacacagtcaattcaacaaagaaaatcttcctataaaaagggtgctgaaatgggtgtgcacgctgagaacgatggctgcaaatg

SEQ ID NO: 105790 - DNA, 251 bp, Glycine max
ctggaattttaaacatttatctgccacaaaattagataaagtttacaattgggcgcaacactcaaacaatctgaaaaaaaaaaaacccgacgataacgatattctttttctgggtggaaacacccgccacacgtacgtacacaggtcacgcgacggaagaagagatgatagagagaacgagccagagtaagaaaggagtgtcattcatggcgattgaggcatggttgatggacgatagcaatgaagatcca

SEQ ID NO: 105791 - DNA, 192 bp, Glycine max
gaactccgggagtggttttgcagagcatgattggaagaattatcgtatgattgtaaaatgataatgtcacatgttttctgtaaagaggcaaggattttagagttagattgtaggtggtgattatccatatgaatgctgcatcctatgtctattatctttcttctctacatcaattttaaaatattgaatgtc

SEQ ID NO: 105792 - DNA, 257 bp, Glycine max
ggaaaatctctggtgatggtggcagccacaagccgatggttccgctgtgctattatgagaagacggcatatggagattagtgtctgcgtgatcttcaggtcccacccccggaacgcgtggcattcaggtggtgcaagctctacacgtcaagctttgatggaagtcactcctacatgttccctcaacaacagaaacacattgattggatgcgtattggtgccttttcatttgattcttctgtagccgtcctggcagag

SEQ ID NO: 105793 - DNA, 104 bp, Glycine max
tgttgaattctagttagggaaatcaagattttacttacattgatgttgatcatgtggtggattgtcttttaaagtggtgatctgatgtccatctgatgttcgtt

SEQ ID NO: 105794 - DNA, 253 bp, Glycine max
caaacacaacacaacacagcataccgtgtttcattttctctcacacacaaacctccttcgttttcatttacttctcaggaggtataactactatcttgcgcatggttctcataaacgagatcgattaaatcttttgccacggggacccagactttgcgagctcaggactgcctggcagaaggaatcagggctcctccggctgacttttcccggcgtaggacttacgggacttactgcaattattgttacgaca

SEQ ID NO: 105795 - DNA, 156 bp, Glycine max
accatgttctcattgataccatgattttaaatagtgttctgcaatcaattgcggccacaatgtcaaggaattttgactcaccgcaatacaattgcaactgtatcaacagcattttcccgcaattacctgtaacatagaagtttttttactcaccgc

SEQ ID NO: 105796 - DNA, 275 bp, Glycine max
cgggagcaccatgttcttgactaggaaggatcagcaatgtgttgaggtgtggcagagttcttctagggaattttgatgactttgttattttcttcaatttttttaagaaagatggttggttgcattctgtaaatgaatttggcccgcctgtagattttttgaaaagtttggtgaggtaccaactaccaactttgacattattttccttttgtttgacaaattgttttaatctttttctaagatatcaattacactgcagtctatcatgattcatg

SEQ ID NO: 105797 - DNA, 250 bp, Glycine max
ccaagttcagctaagtggtgtgaagctatccaaggatgccatcataagggacatcatcatggtggagaaccaaattccaacctacatcttagtgaggatcttggtgcttgaaagctccaaacctgctgattcagttctagagttcttgggttcaatgctcttgtcattctgcaagaaacactctccactcaaggtaactcacatccccacagattctgaagctgtctctaggcattaccatatcttggat

SEQ ID NO: 105798 - DNA, 232 bp, Glycine max
atctaaacacatattctttggattaaatatccttaattcttttcattcatatgaatcagttgcaagtatggtgtcacttgccgctacaatcatcctgacaggaatggtatgtataatatattgatattgattgttcttacattttcctgtttcctaaacaattattttgcattatcattcctttgatgcagcaatcaatccacccattgctggattaggcgcctctattttt

SEQ ID NO: 105799 - DNA, 266 bp, Glycine max
tctcgagccgattcggctcgagggtttcgtaatttgttaacactacataacttgaagtttgatgtatctcttaaaatgtaacccatagaaatttccaattaaggagcgtcacccaggaactttcttttcgttattgagcatactgattcctttgtaatcacaaccagccgtgatccatgtgttgtcttacataattccacaaccatgtgttgtctttttaaaaaaaatgaactcgaaaaaacgtgggtccttgcgggcccataaag

SEQ ID NO: 105800 - DNA, 106 bp, Glycine max
  unsure (1)..(106): unsure at all n locations
cacccccaaaagtggcgaacgacacagacccagaacgaagtgncgtttagcaactaaacccagaaccctattgttgagtgtggttctctcttctctgcacgatcga

SEQ ID NO: 105801 - DNA, 267 bp, Glycine max
ggcagattgctattgagaaacttatggatgcggaatctgaacatgaaagtgtggaatgtcctgaccagtaccagtttgtggaaaacctagttggaagactagaccatgaagtgataatggtgagaattacagagagagtagtcagcacttactttgccagattataccttagtcagccagggaaaactgatcttatcagtgtggatgcccgtccctcagatgccattaatgttgcaaatagatgcaaggctgcaatatatgtaagta

SEQ ID NO: 105802 - DNA, 120 bp, Glycine max
tatgttgcagatcattagcaatggaaggttggttggtgctgaacaccgtgttgtcacaaattcaggcattgggaggaccactgttgcatatttcatccgtccaacaaataaacagattat

SEQ ID NO: 105803 - DNA, 268 bp, Glycine max
gaaactcactaaaacaaaaagaaatccaattacgaagaataaggggtttgagtagcagtgggagttcgagagtttgccaaattggttctcttccatcatctccgtgcagtgcagttctgtgcaggttttggggtttgaacaaaaatggaatcggtgccaaacccaaacggggaggaacccacttcgtgggatgagctatacaacatcaatttaatgccttcagagttatttctcaagttccgaaaagaacttcagggcattcgagttg

SEQ ID NO: 105804 - DNA, 262 bp, Glycine max
ctgagacggcgtgttttgagcaacatcgttgaaaggagtagtatttgtgaagtgtaatagagactgagagagaaaggggggaaatgggtatgtgatgagagtgagattggcgtcgttcttcaccggggctgcagcggcgtcgtttctggggctctacaccctccacaaggattacaaggtcccgcaccaatcctttactcaacaggtttttgaaggaaacaccaagtgaaaacatgattcttctcaaagacattgtgcctgc

SEQ ID NO: 105805 - DNA, 265 bp, Glycine max
cagcagcattggaggccgaattgggagtgatctttcattatcaatgactgatcaacaacagtggcaaaccgggccttcacattatttagcaactgctgcagcatcatcaagtttccaacaacagataagaccctcttctcaaggttggctgcagaaaaatgggttccacattctcatgagaccctcatgatccctattatatatagagaattttctgcctcgccaagtactagttacattcaaataatcattaatctgctcctca

SEQ ID NO: 105806 - DNA, 269 bp, Glycine max
cctgaaactgcagataatatcttgctgccaatgtgcactgtttccgcattcaccattcacttattcattccacattcagtgttgaattgaaaaaaaaaaagcattttggaattaccaacccatttggtaaaagaccccatctttgattgaaagaatgggaagtagcaaacccaaatcctccattctcatgtttgttgtgttcctttgtgtttttgcaacagcacaacgacagcaacctataaaaaccgttgttgttttgggcatggaga

SEQ ID NO: 105807 - DNA, 250 bp, Glycine max
gttctagatcgctggcggccgcccttttcttttgctgttcctctcagctgtcatacaattttgcaatttatccaaacctatgtatttcaaggcaattttatgattttatgaacacgaggttaaattaactattcaataattttgtacataaccttataattataagatgtataatttatactttcaaaaaaacaaaaaaggggagtccgccttttagcaatgtggttacccggtgaactctttcggaggc

SEQ ID NO: 105808 - DNA, 179 bp, Glycine max
acaaaagggcatgagctatcgtcctcatatgtatagctatagctctcactttgggttgttttgttattttattttatttttttgctaattcctgtcaaattcagttattggtttgactgtggatttatatgtattatacatatataaagaaatttatttgtacatgaaattcatttgtc

SEQ ID NO: 105809 - DNA, 196 bp, Glycine max
atttcattgttattataaggtgggtaatacctcagcaaggctattcacagaagcaaagaatcatgcttgtccaattttccatggaggcaatgtttctcatctgcataaactgctttccattgaatcaagttcacaggctctctgatgtaggggatctcattatggagatatactacgcagtaaataggttcctgga

SEQ ID NO: 105810 - DNA, 251 bp, Glycine max
ctcgagccggtttcggatgcgaacaacaacggcgtgtacgcgggatcggcgttcgtttcgtcgccgcacccgagttctgttccggtgccgggatttctagtgcggaacggcgccgccaccagcaatcttcgacggttgctgcgactcgatttggaatgatgattaattcgattatatgatttcggtgtttgcagattatattgtgtactttgcaatgaataggggttgatggatgatgatgatgatgattg

SEQ ID NO: 105811 - DNA, 172 bp, Glycine max
catcatattcggtggggggaaaaaggcgaaaagtctagaaaataacggagaagtctaggggtttccctctgttcaccgggaaacgtcgagaagaattccgacacatcttctcctctatcaaatactacgtctttcctatcacactacacattcatgcccttaaccaaaccaa

SEQ ID NO: 105812 - DNA, 247 bp, Glycine max
gcactatttcttggttggatgaatcaagttcttattgcatcttgtgcttggagctaacagttcgttttttgttactccaggcttctagttaggttatgtatcatccttaacttctttatacaatttctcctcacttcatagtcaaattactgttttgtaagagagcttccttaatcattatgtcagcaatgcaagtaatatcaagaaagactatatatcctgaaattttctgaggtgtattttagaa

SEQ ID NO: 105813 - DNA, 181 bp, Glycine max
cagtggggagtttccaaaccagcttggtgtttgcaagaagctgcattttgttgatttaagctctaacaatcttacaggggagctttctgaggaactccgagttccctgtatgagtgtgtttgatgttagtgggaacatgttatctggttcagttcctgatttctccaacaatgtttgtccc

SEQ ID NO: 105814 - DNA, 277 bp, Glycine max
  unsure (1)..(277): unsure at all n locations
tacactcaccaatnggacgactgctgcacaacaggatagcgtactttcggccaaccaacttccccccacaagcgacccctccgaacttttggttcttaactccttcggacactcaacccatttgattggcccaagtttaaactctccggcgtcgacccggaccttctcaacatgctcaatgatgcggagaaggtaacggaccgtgaccctacaatgaagggccttgactcggtaattaagagttccgaggaagaatctttctccggttccgaacccg

SEQ ID NO: 105815 - DNA, 235 bp, Glycine max
gctatatgtagtctatcagtattacatcgcttggataaaatcaatgtggagacggctgtgcagtacagtacttgctgggcctgcgaaccccattgcccataggctctacgctacgcgaagggatagggaaaggatgtctcatatagcctaacccttgcagatcacaaaaggcggtctccggacccggacccatgaccaagaggtcaccatggcacaaagtcaccgctgcaccagg

SEQ ID NO: 105816 - DNA, 161 bp, Glycine max
gtcacaactaagctttggatttttagaggatttagtaaattcagcaaccactgctgtgtgcatgtatcaaagaacctcgaggctttgcatttgtgcagtgtgtggatccttatgatgcctcagaggcacagtaccatctgaacatacagagttatgctgga

SEQ ID NO: 105817 - DNA, 261 bp, Glycine max
ggtgcgttggatagttcctccatttgctgcaagaggatgcagatctttgagaagaagggtttcaccttgggggttgtgcttcttgtggttcaatctgggcatgataagttggtgaggaccagggttgaaagtgctttgaagtttgccatgaagaggccgaaaaccggtgctgtcaagcttccctttgggctttgtgggtgccaagaggagaattctaaagggggagaccttgtggagattgaagaagaaatcagtgatggt

SEQ ID NO: 105818 - DNA, 150 bp, Glycine max
tgtatccgtcgttaaatggcttgacaatttcaatcttgatgcaaataacaaacaaaattcagtttagttaaatgatgtgttggttttcttagttgtagagaaccctgaatagtattattgaaatattacgaattcagtttgatcctggaa

SEQ ID NO: 105819 - DNA, 263 bp, Glycine max
ctagttctagatcgcgatctagaactagtcgaggcttgatcttgcatgctccagcggctcctatcgacccatcagactcgtaatctcttggccgccaccagatcccttccctttcgcccaagcagatccttcagccggatggccaccagcccgatcgtcaaaagaatgatgtccaccaagactatcggcacccactcgggcaccttccactgtgatgaggctctggctgtcttcatgctccgtcagaccgaggagttcaaggt

SEQ ID NO: 105820 - DNA, 244 bp, Glycine max
gtattttgtcatgctgattcgattagatatgagaatatgggtcgctctttagtcacagtctagtttggtaaaaacagctagctagtaattttagggtgatgatatgtgatgccaacagaagaaattctcgctgaactttttaatatgcatttattataaactttattaaattaataatgggtttaataagctttaagtttttttatttttgatgagtctatgtcacgtatagtactcatttagt

SEQ ID NO: 105821 - DNA, 245 bp, Glycine max
tacgaattgtctccattctcttcagatcatacggtttcgttgataataaaaaaataacttagtatggttcttgatatcttggagattatgcatataatttgagcacatgatggagaagtgataccatgaatttgattgcaaagatgtcatgtttattctttttagcttatatttttatttaattgatataacagtgaaacaacttgtgtttccaggtttgtttacattttcaatgaggtgcatgg

SEQ ID NO: 105822 - DNA, 263 bp, Glycine max
cggaattgcatccaccaaggaaaggaaattgaaaacaaattttaaacggagagagaggaatatagttgcgttacgtagacgcgcgtgagttgtgaaatgttcccaggctcacactccatccactctgcaactataaatacgcttcgaacgtaacgctgatcacaacatcatcatcaacaacaagcagatcaatctctctctctctctcaaccataatatcatgggtttgaaggaggattttgagcagtatgctgagaaagcaa

SEQ ID NO: 105823 - DNA, 260 bp, Glycine max
caagaggattttttttttctctcccttcaacgcaaaaacacacacaacccttagtaatcatcatgtcctctcctctcttcttgccctcatcattagaccctcgctttcatcatcaccaccgcatcttttacctcccaccaaccgcaccaaagccatcatcctcctccgcctctaacatcaccaccacaacaacaagaacaagaagaaagagaagcaggagagagagaagggttagaagggtgaagaagcatgtcttcact

SEQ ID NO: 105824 - DNA, 257 bp, Glycine max
gtggaaggatttttcgccagtcaagaatgtttatgttaataggtttcaattgctttcggattctgatgatttggatgttgatgttggtgctgccaacaaagctaaccttgacagtaatttagaaaaaaataagaaaacattgcttgatgaggatctatggaaggatttttcgccagtgaagaatgtttctgtcccaactccggccttcaatggatgtgtgaagagtactttcgttctgcctattgcaaggaagtggg

SEQ ID NO: 105825 - DNA, 242 bp, Glycine max
gaaaaaagtactaattgctcctttaatttgctgatattgtctttttgctgtttttggttttggtgagtttctatttgggccaacccttattatgaactataactcgtgaatatgtcggttgtgtggtgtctgtgggtttcgtgaatatgaggaaagagaagagaacatgaacagtatgttttgtgggtacaaattatttttctttcaagaattgttaacaactttacattttgaaaatggat

SEQ ID NO: 105826 - DNA, 245 bp, Glycine max
gctgggaacgggctgaaactgacgattctaagaccaagtcagagactactggacgtctataagagcgactctcaacgaggacgttgagactttttgaaaaaaaaaaagattttttttggcttaatccgcctttactaaagatcaaggagtacacttgtttgtattccggctaataagggaaaggtttttttttcaaatccaagtttgactctgattagatccttagcgcaaggctaagtaagccc

SEQ ID NO: 105827 - DNA, 244 bp, Glycine max
gtattcggccataattataaaagaatgttgattgaagagaatgaatgcgagataagagaggtaactaccatgacatctaggacatgtatttctccagaaactggtattagctcattgctttttgactcctcctttgtcttttcagaataatttgataatggcgatgaagcatcagagagataaatagccccaatttttaagggtggaacactgtcaagaacggggagttctggcttagaaccaa

SEQ ID NO: 105828 - DNA, 237 bp, Glycine max
catggttgttgccttcttacatcaattgccattgttcgccgcatccttatggcaacatctgtcctgaaagttgctgcaaaagtgataggagaagttcaagccctcattattttccctctcataccatatactgtccttgcagtcttttacatgttctggatttcagctgctctccatttgttcagctctggccaggttgttcagaataattgcaatctaactgctgcacatatgatc

SEQ ID NO: 105829 - DNA, 235 bp, Glycine max
aaatgatgttacgacgggtggtgttgacttgagataatctaatcaatgtgattcatggcctatgataactgtctgtctcttaccatggccttgtatctaaaaaggagatagaaccaaaagttattaaacaattatcagagtaagttgcatatgaaattactttaatcaaggttttaaaccctctttgtaacttaaaataatgaaaactgaaataaagttatttaacagactaaga

SEQ ID NO: 105830 - DNA, 238 bp, Glycine max
gcaagcatgttctctgtgggagaagtttgatgtccaagtggttctgcgcaagtttgatagtggagtcatggtaatacagacgaagtcccacagtgatgaggaggttttcaataaagtcaagatgcttgttttgaaacctgacgcccttcgagctggaataagtgctagtgatgctgcaaggacactaggggttgctccagcaatggcaaaggagcatctcttgtctgcagagagcaaa

SEQ ID NO: 105831 - DNA, 257 bp, Glycine max
cggctcgagctcggtgctttggaccccactggagagaatctcccgacagctcagaaacaagaagcggcaaaacattgtaattgcacgattgctgatgtggaggatgcacttgccaagtttacttgggccaaggaagcacagaagaagatacagaagctaaaagaagaaggaaaaccaatgcccaaaagctttgctgaagtaatgcttctcattgttactttaattcctaactacctagttgggttcaatttatcatg

SEQ ID NO: 105832 - DNA, 258 bp, Glycine max
tctcgagccgattcggctcgagcaacttttaggttatggtacagtacttattgcagggctgtactgcattattagagttggagcagacattacagttaattggtgcatttggcctcggtttgaccatctatttgcgggtttcttcatatgaaaactcagaagatctaaaacaagatgtgaggttgttgctttctcctgttagacttggagcacaagcattttcatgggctgctggaaaattagaatcaaatggattag

SEQ ID NO: 105833 - DNA, 260 bp, Glycine max
attatattgcgattattgttgagctgattaatcatttgactcgcatatcaaaaggcttgtggaaattaagtatggagagatgatgcgaaactctgatgtatatttttgcttgtttatataaatatgcgtctgtaaaatctgatatgttttccgtatttgttctgatcctgtttacgttgcaaataatcaaatttagtccatatacgatgtttaaattaatgtgctgttggatcaatcataacgtactctctatcctttgt

SEQ ID NO: 105834 - DNA, 100 bp, Glycine max
cggaaaaggccacaacagaagatgttactccaaaagatgttcagcaacaagatgatcttctagagaagccaacagttacagtgactaaacctaaatatag

SEQ ID NO: 105835 - DNA, 251 bp, Glycine max
ctccattagattaccaagctctgcaactttgcttctcaacatggagtatcgtctcctacccatttttactttactcaatattgcactggtggcaacccatgctgctttaccccctgaagtttactggaagtcggtgcttcctactacgccaatgccaaaagccatcactgatatcctttacacgatgaccccaacgtggcactcttcttcttggaaaaggacttgcattctggaacaaagttggacttgca

SEQ ID NO: 105836 - DNA, 250 bp, Glycine max
attttcagtatggaggagcaagtaattagtcgtgctcatcgtatgggtgcttctcgtcctatttatgtggaaacattagcaatgcgtggtacaattgaagagcaaatgctagactttttacaggatgctgataactttagaagatcaccaattaaggatgctaccgaatctgttgatgatagtgggggacgaggatatagatcattgcatgattttgctgagagtagttatctactgaaacttagatctg

SEQ ID NO: 105837 - DNA, 137 bp, Glycine max
ctcgagccgctgtggcatccttctatcaagtgcctgccccaaatgtgagacaagccactcaccgacctcattattacttgatgcccacccctttgcccaatccacaagctgtgaaccagcttcctcagaatcagtat

SEQ ID NO: 105838 - DNA, 217 bp, Glycine max
gttgcaataattttttttaccgtttctagattttgattataaaaaccttactgtgaggaggagttttgtgtattcttacgattaatatatgtcattagttgttaaaacgcgggttgttgagtgtaatttacctgctacttggtagaatgattctatttcagcaaaaaaaaaaaaaaaaaaaaaataaaaaaaaaaaaaaaaaaggaatcaaagaaaa

SEQ ID NO: 105839 - DNA, 244 bp, Glycine max
cttgcccagctcttgcatgtcattcctgcacatggctgtagtgaatgctcagaagttcatgtagcccaaactggtcaccacattcgggattgttctggcactaatggtcggcagcgtcgtagttctcatgcatgggtaaagggttcagtcaatgatatacttgtccctattgagtcttatcatctttttgacccctttggtaggcgtattaaacatgatacacggtttgaatatgaccggattc

SEQ ID NO: 105840 - DNA, 242 bp, Glycine max
actcgagccgaatcggctcgagcgtgctcgagaaaaaaaaaaaaacacaaaaaaaaaaaaaatcaaaaattaaaaatgaaaaggctggaaggagaggacatatgaaatttcgtgaccagggttatttattacgacgaggattggggatagaccaaacgtctcattaagatgctcgtaatcgtcgccgggaagtctctattaggtattacttcgaggtgccttattttcaccctaacaaagta

SEQ ID NO: 105841 - DNA, 189 bp, Glycine max
attccccgtcataatcatcgacagggaagcttcatgttgaaaccaaacatatttttattactccagtcattctacgaacgattttcttaacatttagatgctactatgttagacttgtgcgctgtacttgttccatcaagagagtgcgttgtggttgtttgtagtatttttttctaatattaattattt

SEQ ID NO: 105842 - DNA, 245 bp, Glycine max
cagtctgatgctgtcaatgctgcagttgctgatgtagatggtggaaatgatgatggtgaagagaaggatgaagttgatgacgacgatgaggatgatgttcaggtgttgcctcctcctgaatcttcccaccttaagaggaagagggatgatgatgaagaggacgaggacagtgacaatgatgatgatgaagatgtggtagcattcacgaagtcacccaagaagcatcattgacgacgtgttctaat

SEQ ID NO: 105843 - DNA, 247 bp, Glycine max
gagaaggtgtcttcgtgtttcacaagtttaaaattcatttgttttactgagctatctcttgcacattaattatcaatgattgggattgccttccttttactattaaaaaaaaaaaaaaaaaaaaaaaaaaaaaaaaaaaaaaaaaagaaaaaaaaaaaggggggggccccgcgatagaagcccccggcacccgggagaaattttcggggggggattcaggggggggaaagttttccccaaaaggggg

SEQ ID NO: 105844 - DNA, 244 bp, Glycine max
gaatattttagggaaataatcttttcattttttcaaaagctctagatagagaaaacaagtgtttctttaaaataagttgaatcaaacacaatacaagaaaaaaaaaaatcttgcaaaacaaaatccccgttcaatctttgatagatctgggttttctttagtgtcttgctaataatttagatatcagaggaaattgattttccaatttgcaaaagtgcaattaatgtgacctttttcttaagtt

SEQ ID NO: 105845 - DNA, 255 bp, Glycine max
aaaaatatttttaaaatagtaatattgaataaggttaattaaatcttttggagatgatttgttatttaatgagggatgttgtgttgttggctcgttgtttcctgtactaaattactttctttacattttcttttactttcagaatggccaatctaaaagctaaaaacattccaaaaaagaatacaggaagtaatttggaagtgcaggaagaacaacctttgttgtttgctcacaagttcgagaaaagcaacggtg

SEQ ID NO: 105846 - DNA, 234 bp, Glycine max
gagagagagcataaaacaatatctacaagaagttgtagaatcttgatacaacatatagttttgattttgcatttgtgtatgtgagtgtagctaagatatggttaagcaattgatgtaggtcaagtttttgcatgtgtgtacgtcccaggggatttatagttttgtttttgccggtgtcaaggaccacaaaatggtttagatttttcttttccaatgagaaattattaccccttc

SEQ ID NO: 105847 - DNA, 248 bp, Glycine max
ggcgttactattacgtctgtgattagatgacaagtgtggcacagttctttccttttactattgctggtgcattttctcttcagaataatcagcattgctgaaaagtggaaccgttcagaagaagctccccagggccaaatgctgttctaattgcacgtaataggaaagctgctacctctttgattcagaggttgctttactacttcctccaaattcagatgacctcagcagttacattattggggaca

SEQ ID NO: 105848 - DNA, 254 bp, Glycine max
gtaatatgattttgccttttagcaataagatttagagttagttgtttgattggctatatcctgtatatgtacattatgtgattgaggtgtgcattgtatgtaagatattttccctttgccttttcttcttttcatattttttgcatcaatggctttgtttcatatataggcacgagggagttttgtgtgaaggcatggtgtaggaattttggagtgatcgatgtaattggtatgtaagggatttaaggggttga

SEQ ID NO: 105849 - DNA, 133 bp, Glycine max
actggttagtctgtgtagactgaaatttccttagtgagggattctatgacgcccaagcctgggggcagagacaacactcggtgaccttctctagaaaaaggcaaatgccgcggttcaaggtattgatgcttgt

SEQ ID NO: 105850 - DNA, 264 bp, Glycine max
ctcgagccgctcgagccgcgcagtggctcacgactcaccatggaggttgccacaacagcttcgagcatcgagctcaacaagcccatgctggcattgccctcttcgtctcgaaccgcaacccctatcagagccatgaactcctccacctcctccgtcaggacctctctctcctccaacttcgtcgctccttacactggaatcaacagcgcctatagcctcttctccggccacaagctccgactctcctccctcaatccggggtcg

SEQ ID NO: 105851 - DNA, 261 bp, Glycine max
gttcttcagcaatttctgggcagcagggaggagggaacaatatgtcacaaagtagtggcaacctgggatatggaggtggtgacaacaattatggtttggggactggagggtatggaagaagctctggtgccatttttgcaccaacatcttcatactctgcatcaaatggcggtgttgatggggcttttgcagacttttacaataatagttcagtttatggggaccccacttggcgatcttcaaattctgagagagatggat

SEQ ID NO: 105852 - DNA, 263 bp, Glycine max
gttctagcacttatgctctcgaatttgtctaattagctccaatggtccattttacagcttctcccacttgaaagaatatgattcatttcaaaagaaatcacatagttccctactactttgttaatctctctatatatccaatttttccacccagtttaccatcatccaaagtccaaaacatttaaagaaaccttggactccccagccagaagaagaaccaacatggcacccacaatctataatttttcgtattctaaaaggtt

SEQ ID NO: 105853 - DNA, 261 bp, Glycine max
ctcgagccgaatcggctcgacggctcgagcggctcgagctcgagccggctcgagattgccagccatccctgcaggaccctagctaggagagtttgttctctggaaaggagagcgcgaaccaccaagcccatctccttctccagcatggtctactgattctggcagggttccaaaaccaacttcattaagggacattctgaaggagcaggagcgaaaaggctcttctgcacttcctgtgactgtgcagcccaatgcctcccc

SEQ ID NO: 105854 - DNA, 245 bp, Glycine max
tctacacctgtgatacccaagcgttatcttttcttatgacggtatctcggcaatcctgagtttgcggatcgacacatgagcaagcgtcaccggcgtcatcggggaacgtccgggcgatcctcaattctagcgttccgtttagcagagctcgcgcgaaattcggcacacgagtgtcccgctcagcaattgccgctcagactactacttttggccagattttcggagaactgcaggctcgcaatcta

SEQ ID NO: 105855 - DNA, 117 bp, Glycine max
gccaatccgtttctgctgaatcttctcgtcgaccccatttgctagatctgcgtggttcttccatcatcaactaatcatggttcttcacagagaactcgatcagctgcgtgcatcccc

SEQ ID NO: 105856 - DNA, 280 bp, Glycine max
ctcgagccgatttcttctcatcttctttttcttccctttaaaattattattccgtgcaaacacaacaacaacttcatcaccaacacgaagaacaagattagcgttatgggtctcttcctttctaggaatttggcttgcaaattcatatacccttttcttttttccaataaggtttcaaaggatttgttccccaagcagttggagaacatgatgtctctggtctctcctcgtactggcaggcatttgcagcgctatgacaaaggctgtcgccaagttgtgg

SEQ ID NO: 105857 - DNA, 204 bp, Glycine max
cgagggttttacaggaagtgtggctggatagagtcaccgggaaggtttgcatgtccatttcggcgaaggcgatgacaattaacggaattgatgaccggagatactggaattggattcctactgaagaatctagcaaatatggtggtttgaagtggatggggaggtaacgttcccatttcctgctgatatttatactctctcctt

SEQ ID NO: 105858 - DNA, 108 bp, Glycine max
gactttcattacattatgaagatgtcccaagtcttgaggattatccactcatcttgaaactgacacagaggtcatcagcctagtgattgctggcctcgtcaggcacat

SEQ ID NO: 105859 - DNA, 265 bp, Glycine max
cggctcgagcggctcgagcggctcgagctcgagccgaatcggctcgagaaattttagtggctcagctgagagactgtcgtgactgatgaccctggggcttgaatgttcggcttgaggaactcgtggctcggctcagttttgactccatcatcggctttctgtgtttgatacttattacacgagatcagaaccgttttgttgttttttaattactttttttcttttttggtaatttgggttattgttaacccttcctttatttttt

SEQ ID NO: 105860 - DNA, 166 bp, Glycine max
gcagattgtgcaatgtgccatcactggagcagctatctccactgctgcaaatcttctcactggaattttctaaatggatgccctgttcttattggcttttagtgacctttttctcttctgaactgtgacagttatttatagatatttaagatggacttgcaagcat

SEQ ID NO: 105861 - DNA, 208 bp, Glycine max
cacactccttcagaggatgggaattggcatttttctctctgcattgtgcatgctagtagctggtgtagttgaagagcatagaagaagtttggctctgaccaaccctataggagtgcaaccaagaaaaggtgctatttcatcaatgtcaggtctatggttaattcctcaattagcacttgccggtctatctgaatctttcactgctgtt

SEQ ID NO: 105862 - DNA, 107 bp, Glycine max
atgacatagagagaaatcaaagggggcgtacccttggaccttggattttggagtggacctcaactcaactcctctcaacttcattcacacaaacttcacaccctacc

SEQ ID NO: 105863 - DNA, 266 bp, Glycine max
gtcggatccatctccgtaattctagatcgcgagcggccgcgcgcgatgctatgtggtcaactctcttagcttagacgacgttgaccctaggcttttatctctgtgtggcaaggcctaagccaatgtcaaggtcacttccgccgccgagcaggactaccgcaaaaaagttctccgcgaactcaactccgtgttctccggctcctcctcctcctccgccgcctccgacgacgtcgacgaggaggtcaccgacaccgagtggttcttcc

SEQ ID NO: 105864 - DNA, 122 bp, Glycine max
ccgcaaatgatcgacgagaggaatagtgagcggttgcctgcggtgcgtgtcttgactcgaaaatccatgatcccgacgctgaacaacctggctaactttaggtttatggctccattatctcc

SEQ ID NO: 105865 - DNA, 201 bp, Glycine max
gcagaactttgtttcccaacctccattgcctccgcttctacctcgctaccatgatcattcctgagaagaaccgcaagatgtcctgcgggtacaccttcatgacccaactttggttcttgaagcaggagatccttcaggggaaactcctaaagagggaattgccaaatctgaaggcgattaacctgatgcgggtttcaagtc

SEQ ID NO: 105866 - DNA, 260 bp, Glycine max
cactgttctctctctgagcaaaaccgaggatccctcatagtattggcaggtcaaatatggcgaatgagggagtggtgatcctaggaggtggtgttgccggtgccaaccttgcaaaaactatacaacgtcaagccaacgtcacccttattgatccgaaggaatattttgagattccatgggcaagtttgaggggattggttgagccaacttttgctgaaaggatagtgatcaaccatagagagtacttcaaaaagggtaac

SEQ ID NO: 105867 - DNA, 258 bp, Glycine max
gctgaacgcaatgactttaggtggaagtcacgaacgataagaagatcaggatttcctctagaaatgaatgtgacctcagctccgtagctggaaataaatcaaactcaaacaaagaactccaactcacttcacttgagctagggcaacattaggaagatatattccggggaggcaatatagtttccgggtcccctacgggcaatccgggttttcctcctcccgctctgcttctgcttcctttttcctttcgcaagccag

SEQ ID NO: 105868 - DNA, 294 bp, Glycine max
aggttatggaggcctcggcatccatttgcaacaacagacccttcatcttctcttcctctcgtgccataacacaaaaatcttgcactctctcatcacctatgcttgtcaaatccatggccactcccaagcctcttccctcggtctctagaactgtaggctctagaaagtgttatgattatccaaaaatgaatatgctccattacgaaagaaaggaaatgcaaaaaatcataagggtaagatgatgttagcttcgtgagagacaatagaaaattctaaatatagtgtatgggtacc

SEQ ID NO: 105869 - DNA, 292 bp, Glycine max
cagaaaacttaggagtatggctaatggtagccccactgggagcctgaaagaagctagttctgccatagtggattcgaaagagcgactaggttcatcttcctgttatgcaaacttgttggtatcagagatagaccaatgctgcaggttagagggagcaattgttactttagagtggtcttctccaaaagaatggcttttcactgtaaagaaagatggattaacaagatgcacattcagagcagaaaaagtgatgcggcccttttcaacaaatcgattcacccatgcagtagtg

SEQ ID NO: 105870 - DNA, 281 bp, Glycine max
cgtggttcctacagaggccccactccatacccttcgtcctcgccttcttcctcttcctcgcgtggatctcactcgccctccagcgcgcgtcctactcctacgcgccgcctcactcctcccacacagacatcagggtcaacctcgtcaggttcgacgcttccgaggtcgcaaaggacaagcgcggttggatcttcgaccccatcgctctcgccctcgcttccggcatctcaggtggagcagtgacgtgtgcgtcgcttcacgtgggagacattagggctggg

SEQ ID NO: 105871 - DNA, 146 bp, Glycine max
caaagaagacagcagaagcgagtccgtggtgacatctgagtgccaggatggccatcaagccaacacggaggctgggtgtgccactccgtcgtccaagccagtctcaaggaagagatagtgcgttgaacgaagccccgactgcattg

SEQ ID NO: 105872 - DNA, 262 bp, Glycine max
ggagaaagtctgcaacaattgaaaatcttgagcttgcgagttaataacttctttggaagtattcctttacatctctgatatttgagccaaattcatctcttggatctctcaaggaatcacttgtcaggagggattacactcctgtccgtcattgcagtaaaatttctcagacatgttggaattcctcctgacaagtgattccttgagagatccaagagatgaattccaacatgtctgagcaattttactgcaatgacggaca

SEQ ID NO: 105873 - DNA, 159 bp, Glycine max
ggagaatgttatgatccctagcatacgccggttttgtaccgtgtccttgtcccatgaaaaaagccctaatgtgatccacttgctggatgaacatgccagtgtatgaagctgattttggttggggaaagcctatgcaattcactttagcacatgtgtttc

SEQ ID NO: 105874 - DNA, 283 bp, Glycine max
tgacattataacccataaggtagggtgcaatgcatcattcaagaaataccgtggtttgagttcagaggaaaacaaattcagagaaaatcctacattatctccatccaaattggctgaaaggcagatttcacaggtgccaaaggaaatatttgaagcagtaaaaaagcttcaattgtcccgcaccgacatcttgaaaatgtcctttacgtcagatggatcaatactcgtgggtcaatctctcaacttgatggttttttcctacgcctgcggctcggaaagtggg

SEQ ID NO: 105875 - DNA, 274 bp, Glycine max
ctcgagccgctatctttatgtccgtattcacagggtgttcatgacatgctgttaagatttcgattgctattgtaacatgatgacattttttactttggcctgaggtcaatttactggaagatcgttatctagaagaagatggcagctgagctagtcaacggtgcaacaagtgagaaactggctgaaactgattggacaaaaaatattgaaatttgtgaactagttgctcatgataaaaggcaagcaagagatgctgttaaagctataaaaaaga

SEQ ID NO: 105876 - DNA, 281 bp, Glycine max
ctgaagaatgttgagtttgggattcaattggtttctggtggggccctgtttatgcagatgcattgcatgtctgcataacacaaaagtggtttaggcaaataaaattgcaagttgcagtgatgtcgactagttttggcacacatacctctgttgggatgtatagcattttaaaatttataatacaactcagggttttaataggagcaggttctggcgagggataatgatgacaaatgcatttagtgtaacaggatgacttagaagagcccagagtgtttggt

SEQ ID NO: 105877 - DNA, 272 bp, Glycine max
aaaagaaccgtgtgctctgctcgactcaacagcttttctccattcctcaaggctgcaggggtcggaggcagtgatgggatcagtcagtactttactgacactgcttggtgcaccatgcatgagaactttgatgtctcatgtagtagtcatgtctgcttcgccttgtaaataattctatgcttcagttcggatgccaggatgtaatacgatctatggtctatgcgacaacataagggtgtgtctcaaacattagcccgtaaattgttctgtcc

SEQ ID NO: 105878 - DNA, 255 bp, Glycine max
attttcgtagaaaaataaaataaaatgattgctttttttgtttggttgtttttttttcaatgagagggtggacaattggtgtttttgttggcaactgctagcatcttttgaaaatgtatttgtgggttcatcaatcttgtaaaatgtaaaggggtagctatataaagtatgtccactcggctcgaggatacgctgctagtctgcgcttcgcttcaagtgtttgaatcccatatttctgacatattttagaagttg

SEQ ID NO: 105879 - DNA, 206 bp, Glycine max
gaaattgaagagctgtgaaaatggtcactaaaccttttattttcctttcaacttaacttcagattttttatgttcatgtatggagattttcacttttattgctttgatgtatttactaattaatttaagtgagttttcaggcagaggctttaccctgcaaatgttaatagctttcttcttcagagacctttttttatgaaaaaata

SEQ ID NO: 105880 - DNA, 285 bp, Glycine max
gcagaaattgtacagcgtgctgttctactcagaatgcattcactgcagcttttgaattgatgagtttagtagtagagagatgtatgcagctgtgggatccttcttgtagttatctcttaccaggcattttggtttttgttgagtggttggcatgttatccatatcttgctgcaggcaatgatgtggatgagaatcaggcaactgtcagatcaaaattttggaatcattgtatatccttcttgaacaagctactttcagtttggctcatgtctattgaagatgatg

SEQ ID NO: 105881 - DNA, 216 bp, Glycine max
attgtatccaaaatttttggaagcttaagattttgtggtcctgacttttacaaattagaaatagacagatggtacgtacatgttcaacttagagggttttattcctaaattatgtcaactggctcaagaagagggggaagatgaacgagctctgcggctacgttcagctggactacaagctctatcctatatggttcatttcatgggcgagcattc

SEQ ID NO: 105882 - DNA, 184 bp, Glycine max
  unsure (1)..(184): unsure at all n locations
ctggttctaagaattctaagaagggttctgnatcggnacctccgtccgatgaaaagatcatgagcattggtctcatatatgtgaacgagcactactctggatggaaagagcagtgcttgagggtgctgcagtccaagttcgacagctcaaagccgctccttctcacccgatcaggaaatagcag

SEQ ID NO: 105883 - DNA, 149 bp, Glycine max
  unsure (1)..(149): unsure at all n locations
gcgtgcggttccacgtgctggagnatactgccccgcgtgcagctcgtacaacacccgggagacgaaggctatgtgccccaggatctgaggcgaaccagatgctatgtcaaaatgccagggagataccgtccaacgactggtggagatca

SEQ ID NO: 105884 - DNA, 247 bp, Glycine max
gttgcaattagcaaaagtggcacaaaggaagaaaaaagaagaaattctgaagcaggcccaatccaataggggcgctaagcgcgcatcaggcgctaagcgagcaactaactgcaggcgctgagcgtggcgttaacacgaaggtggaaaccgttacgcgcgctaagcccagtaggcgcccagcgcacgatccaacagaagcacaggcccagcgtgcatggtgcgcccagcgacgatctgaacgcgctaa

SEQ ID NO: 105885 - DNA, 261 bp, Glycine max
gtttctttgtttcatgacttttgagtagcaaagctgatgcttagggacagagctgaataagtgaaaacattgcaatattctactattatcttttttggagattaattaaagtagttccaaatatcattgagttcaagtagtacataatgcccaccaagcttcaatcaggtttttcatttcatgattaattagttcaagtagtacataatgcccaacaagcttctagatgagaaaactactgttattacataaactttactt

SEQ ID NO: 105886 - DNA, 255 bp, Glycine max
gcggattcgacaagtacgatgcttcttctggtgagtaaatctctcttttttcggtataaccatgagcagcttcttgttaacttcccttacttccctaacgacgcttcgtggcagcatgagttctctcaccagtcttgctccactcgaagcagtgctctttgatgttgatggaactctctgtgattctgatccactccactattacgttgcgctgaaattgctccaagagcttggttttaatggaggtgctcctat

SEQ ID NO: 105887 - DNA, 256 bp, Glycine max
gtttagttgctgaaagggctgtgctgcaaactttagaaacgtctcctggaaattatttgcaggctttgaaaagtattccaaggctctgagaatgttgtatgttcatagttaccaaagctatttatggaaccatgctagcaagtaagagggtgcaaaaatatggaactgagaatgtagtattaggggacttggtatattgtaaagaaattctactggtacggtacagatttggtgggatctgatatgctgaagactg

SEQ ID NO: 105888 - DNA, 262 bp, Glycine max
agaaaccttctctgatcagggacaaagggaacaggtggagtcaaatctactgaggtgaatggttctgctgagaaggcaaagggaattcaggaagaaaagttgtgggagataaggtttctcttgatgactacccagtaaaagaaaatctcaaggagataaaaatttcaactcaatgatagttgaatctaatgtttccaaagttaggacagaaccaaacactgaagagctgcctaagaaggctaatcaggaggtaactctctga

SEQ ID NO: 105889 - DNA, 164 bp, Glycine max
aacaaaatcatatcgagaaatttgttacacagattcctcgtaaggtgaggattaccacaactagaacagttctatgtggtaatctcaacttacgaggaatctgtgtaacaaaatcagtatcgagaaattgttaaaggggatgaaagaaagctgtgtttgataac

SEQ ID NO: 105890 - DNA, 198 bp, Glycine max
ctacgaccaggaatgaaatcctcaaaacggcggcgtttgaacgaaacgcatgatcgcattcgcaggtcacttcgcttccgccttctcctcatctcgtcgttgcctgagaacactgcggtaccttttctcgttttgttaggtaagtttcttcacattcgttatcgtatcttttcgaatttcaatcttaagcgattagtc

SEQ ID NO: 105891 - DNA, 262 bp, Glycine max
gagtcccttgggtatctcaggtttggctcatttgtttggcatcttagccttcatcctcttgctcgtttggttgttgcattaccgtgaaggaattgactatgattcagacaatggatttcgcgtcttcaatgctcaccctttattgatgtactcgtgcttcattttccttgctggagaagtggctttttggtttcgttgtgttcatgcttcaaggagcttcagctactacaagagctaaagtgctaccatggcacaaagttgg

SEQ ID NO: 105892 - DNA, 265 bp, Glycine max
tgatgtacactcccaacgccgattccggcacggcgccgcatccgcgccccaccatcacgctccctccgcgtccctccgccgaggccttcttctctgccgccggcggcgccagccccggccccatgaccctcgtctccagcttcttcggctccgatgccgctgccgactgccgctccttctcgcagctcctcgccggcgctatggcctccccaatggccttctccgccgccgcagcatccgccgccgacaactccggcaaggacga

SEQ ID NO: 105893 - DNA, 267 bp, Glycine max
atgcataatgaatcattaataatagagacagacccggcatcggtggcacacaatacgtgagttctggtccctcttcttctagtaaacctcatccatcatcatccatataaactcacactcctaccaccacctctatcacaatctctctgttcatcaccaagaacaaaacaaaaaagaagaagaaagaaatatggctggaggatcatacgaggaagccattgcagcgttgacgaagcttctcagcgagaaagccgacctgggtggtgt

SEQ ID NO: 105894 - DNA, 261 bp, Glycine max
gccggatcctcatcgaaccaacgctcttctcaattttggtgcctatagggacgccaggttgaactgtcttggaaattgaggacgaagtgaatgcgatagaggcgcaacgaacagagttggaggagaataggatgttgcaggatgatgagaaagggaaatcatagatggtgcttgaaattattggctgacaaaaaacaagtggttgcaacatgcctgagaatatacatgatgaaatgaggcctaatttattgatgcgacaca

SEQ ID NO: 105895 - DNA, 265 bp, Glycine max
tttatttggttgcaaaataagctgaacttgcattaaatatatattaatgttatctttaattggctggtagcaatattatattaatcaatgtttggcttttatagggctttacttgtcttggtgtatcgacaaggtcactgatcatttgagatctcagccactgccttcaagtattggtgggaaaagttatagctaaaggcacagtgagtgccaccttctattttgtcgttgttgagattaagatgaatttacctatgtgagtgtg

SEQ ID NO: 105896 - DNA, 260 bp, Glycine max
aaaatccctttgtttgctcacataagatttgggtttcttcaaaattatctttttttttctctcctaaaaaaaaaagagaaaactttgtttgattctttgaaggaggtttgaagaaagcaaaaggtgtagttttgttttaagtttctttgaaatggttttcatgtctgagatattgttccccgaagaaaaaattgaggaaggagagtgggagaaggagagataagaagaagagaagaatacctacccagcaagcagaatta

SEQ ID NO: 105897 - DNA, 260 bp, Glycine max
tgctcactggctcatcagaaaccacaaatcctcaacagcaactacaagatccagttcaaccacaatcatcatcatccaagaacttcaacatccctccaatgaaaacaacgccaaagaagcagcaagggttcaagctctatgagaggaggaacaacaacaaccatctcaagaacaccctcatgatcaacaccttggtccccaattttgcacacagctcaggattctcctcctcctcatcatcaccctgcaacaagccagag

SEQ ID NO: 105898 - DNA, 259 bp, Glycine max
ctattccataacttttatagcacactttcacactggaagaattttctaatttcagtttatattgagtgttatattgctattgggaaagtaatggtgatctcataggtgcaatcaatctattaagtgacagagctagaggagaatattctttgggggtaggtcatgcttgagaaatgaaaaacaataaaaattatcttttattcacttttaaacctttaaaaaaggggctaaacttttattatctattaactattatgcc

SEQ ID NO: 105899 - DNA, 263 bp, Glycine max
gtcataatttgattatatgaatggatttatttcataacaaatataagattttcttctgctttgctttttcagttactagggagtctgaattgatataggttgaaaatcaaaagcataatctgcagaaatctttgtccagagttagttatttagtttctgaactaaaactgaagtgaaattttgatgggctaattgcttcatactttatatcacacatctcatagcatgttgtaaagtccggatttgttttgcaaaatgatttt

SEQ ID NO: 105900 - DNA, 186 bp, Glycine max
  unsure (1)..(186): unsure at all n locations
gtctggtgccagtttctagtacatttccagtgactcacgaacccacagttgagtattggacaccaacatttggaggaacttacagatagctagcttcattaattaattataatgggtggcaaaaagtggcacggaaggagtactctcagcgaacancacacaagnncaacaacgaacatttgcatg

SEQ ID NO: 105901 - DNA, 251 bp, Glycine max
  unsure (1)..(251): unsure at all n locations
aaattaaccaaagcaatgaagaaactaaaacactactattcacaccaccaccacaactcctccgaacaacaacaatcaaagtgtattttcccattaataaccattatctctcttttctctctcttcttcctcctcctctttgctctcacgctaacccctctctccgccacacgcgtcttcccattctctatctccaccgccactcctccggggncctggtcgttcgtcgagtccaagctttttcctctccc

SEQ ID NO: 105902 - DNA, 257 bp, Glycine max
cggctcgagcggctcgagcggctcgagactcaattgctttacaatgtgttgcaccccaccatccgccattgcttagagttagaagcctcttatccactaaccacttatgacccatttgagtactgattgccaggtagaaaggagggtagaaaaagaagataaattggggatggaagtgggggaaaagagggtaggggttagagggagtgtggttgcagcagggtcagtgtgggacagcaggatgaagagtgatgaag

SEQ ID NO: 105903 - DNA, 194 bp, Glycine max
aaagataataagatgtttagtttattcatcatatatatatatatatatatatatatacacacttgcgattttgtacatgctttagtatggattacagtttaaaagttgtatcagaacaggtaggctctctattctgtaaattgtgctaggttttataatttataatatagagtttaaatgccttttaactatcc

SEQ ID NO: 105904 - DNA, 292 bp, Glycine max
ggttatgcatttggtgaaagcctttgagaagcttctcactatagctcagagttcatcgggatacagatccccaggaggagcatgatcatgagcatgaagagcaacagaatacgagccaggtgatgccatgggcattgccagggttgcaattccaacaacatcctaagcctaagacacttgcagctactactgatcatgcttctgcctcgggatcttctggagtgggtggtactgtcagattcggacatgacatccgagaaccgtcgtatcgggcaagagctttcagtttctt

SEQ ID NO: 105905 - DNA, 283 bp, Glycine max
gcagagctatatggacaaattggtgagagaagcatatgctagatggaatgacttggaagaacttgatgcggctctgttaacccaaggtatgttctagttagtcagtgtgtagcaaaattattttacaatcacaaatcctttcactttaaaattcaccgtgacatgaacatatttcattcagtggcagtaattgctttatatgactcaaactctataggtgagaccttggaggcatttccgaacaatcatcaggcatcgctaatagcatatgatcagtgtgact

SEQ ID NO: 105906 - DNA, 280 bp, Glycine max
ctcgagccggctcgagactcatgtcagtgtgacatcttttggctgcatcttctgttaggaacgaacctggaaccaggcgattctgacgggtctgggggtgcatgtatggtctggcccatttttgttttctcttgtcaaattgtaaaaatccttgtaaaaggtttgagttataaatatattatagattatatatagagtagaagattttctttggggaaataagcttcgccttatatgaattggagctttccacgttaaggtttgttgtgtacaaagctat

SEQ ID NO: 105907 - DNA, 279 bp, Glycine max
aaaatgcatagtttggttttcttgtgatggggcacgagtttgaccactatcccaaggggatgattcggaatgcgaagaattggaagtggttccttcaggaacctaggaaggatagtgaggatgaggaagatgttgagaaggagaggaggaaaatgacgggaaagcaaaaaaatgggtaaggtgaatgaagatgacgagtggactggtgaaagtgatcataagaaccttgttgccaatatgcggaaaggtaagctgcccaggtactccacaaggtcaaaa

SEQ ID NO: 105908 - DNA, 283 bp, Glycine max
gaagggaggatgcagattacaaacgcagaagggatgatggagattacagacatgagagagggaagagcgtggacacgacaggagatgattattggtgtcactatatcctaatgctaagcacagaacctttgaacggctatcttgtatgtcccttttgcttcaatttttctggtggagcaagatattgatatgttttagaacaaggtttttgaagtattctacatttactacttagaacatatttaattatttgtacatagcttcagaaaacttgttttcatat

SEQ ID NO: 105909 - DNA, 281 bp, Glycine max
gggttggtagatggaggcactagtggaagtgtgttaactcgcagatgttcggattgaggtcgcactgaagtgcaaatgtctaggcacgggtcggattcggacgctaacccagaccacaccagttggcttcaagatctgaacctcatcagcgaacgaattcctagtcaactcgcccagtggactcatgctacctctatcctccgccagcttccaagtcattctaaagccacagtccgacctgcctcactgctaccctcgctccccctcggatcgtttcctag

SEQ ID NO: 105910 - DNA, 268 bp, Glycine max
attaagaagcgaaattcagcactttcgcaacacgatgatgaccttgaagtggacattgatagtgtggatactgagactctctgggagcttgatagatttgtgcccaactataagaacagtttgagcaaaaacaagaggaaggctgagcttgctattcaagcgagagcgacaagctgatgcgaatgcccagcagaatagtcaggcaccagttgaagttgagattccgacagcaacaccagcaggtgacagacatgttcccccgtcgttg

SEQ ID NO: 105911 - DNA, 271 bp, Glycine max
gccagcttttatagcttggttgaagtacattactttcagccactactgctataagctactagtaggagtacagtattcagtagatgaggtatacgaatgtggaccagggctgcattgtagggtaagagattttcctgccataaagtgtatggtgcattatgatactatgtggggagatgtggctgcattgactgtaatgttgattggatacatagttgtggcatatctagccttgaggattgggcagcctcactgactaagacttgacaaa

SEQ ID NO: 105912 - DNA, 271 bp, Glycine max
attttggaattgtatttccatctgaaaaaatgtcacaagtggctctacaaggaggcaatgttaaaggatgagcttcgcagtatggaaagatcaaagaaaagggaaggtgttgatatgacatatttgaaaaatgttatcttaaagctgcttgagactggtgaagttgaggtattgctaccagttattggaatgctgcttcagtttagtccagaagagatacagaagtgtcaacaggcatatcacaactccacagatgttccaccaccaaatc

SEQ ID NO: 105913 - DNA, 272 bp, Glycine max
cgaagagggacctcgtcttagaatgtatttgaaactcttcccttcctataatgattccggttctagtatgttcaatgaaagtgaggtccatcgcattaaaggcatatattcatcatggcactttcctcgcactgattttttggaccatatgaactgctgaacttcactcttcttggaccttatgcaaatttaaatgttgattcaaagaagaaaaagaataatgtgggcataaaaatttctgctgtgatagcagctgttgcttgtgctttagc

SEQ ID NO: 105914 - DNA, 267 bp, Glycine max
ctcaaagtacacttttggtgaaacgaaggggaaaagggcagcactgcaattctggtattgtacacttcccttccgactcgcattgcagattgaaattgattttctttcatgagaaaaatggcttcggaagattcaagccggtggtgaagaaagaggtggattccaacaacaagagttccgtttccaaaaaggtcacaaaattcaagaaagaagagcccgaagccgttaagaagggtcctaaagtcaagaaggaagaaaatgacgacg

SEQ ID NO: 105915 - DNA, 272 bp, Glycine max
attttgatattttggtgcgttaaagtcaagttatccaatgtcgtgttgcgagaacgccgtggcaatgacttgaacgctgctttgtttaccatatatttccaatcctcactgcgcgccttgcatgtgtagtccttaaagcatatcaacacagagactgttgacacctcactcctcagcttggacccttctgtgcaataagtttataacctcaggcagtgccttatgttccatggtgcagctaaagaacgagaagaaaaatagtcttttactat

SEQ ID NO: 105916 - DNA, 272 bp, Glycine max
tttctctatcagacttccaacttttgcccttcattcagcttgttctttttctcaaaaattaagtgaaacatccaaatgtctccacaaacgccaactatcccacttttcattgtcctcgcttcattagtcttatgtaatgctattacttagaggaatcattttataaaacaaatgctaaacactaccctgtgcatgatgggagattgatcaagacaaaacacgagcattttggtctaataacaagggctaatagagctagccatcttacttct

SEQ ID NO: 105917 - DNA, 279 bp, Glycine max
cctcgagccgattcggctcgagggttttgaaattacttggggaggaccaacttctggtgtgttgtttgtatttctttcagtggatgaggtcgcaggaaccttcacttgttacacctcgggcttgcactgtgttgtttccatgttggggaaagccatgatgggtgataagttgatgcttttgttcacaaatttgccatccggcagggagttcagagatgttcatgtttacaatgccgcaatttcaggccttctttctagtggcaggtgtgaagatgcttg

SEQ ID NO: 105918 - DNA, 264 bp, Glycine max
gttgttcttacatcattttttcgatctaatttgcgtttcatggtaaagcatagtcgaacatcacaggcttcttatgcgaaagattttcatgaattgattcaagtatatggtagaaagcaaaatatgactggaatgaaaagtatttcatctcagatgattcagatcatgtttctaatagctctgatgccagtagtatctctgatacagacagtgtttcacctgatgacaaccaagatgattatgcttataaagatattaatataa

SEQ ID NO: 105919 - DNA, 263 bp, Glycine max
tcgagcgaattggtgcattggttctttacatttttgttgtgacatttgcttgtagaggagtctatgtaacaattcaagcacctttcctaagtcgccagaaaaaagagttgacagaagcttacatggaaggttaattcctgaaccatcccctaccaacattaaaagatttaaaaagggtatgtggaagaagacaatgccgaaaggcctgaaaatgaaaaagcttattgaaagacctgatggaacacttgttcatgatacttctt

SEQ ID NO: 105920 - DNA, 222 bp, Glycine max
gcgatgcaattattcctgggtattgctagaagcttaaaagagagagagcataggagatctctgatttccaagacagaaaattaagtggaagcagtgcttccgggatttgccataaagctaattaccacaacctataggtctctctcactctctatctctacgtctctctgtttatatggcataaacatttgagagtgatgtagatgctagttactttggaga

SEQ ID NO: 105921 - DNA, 281 bp, Glycine max
taccaagaaaagcactaagttccaatataaccgcgacccatttctctcctcgttactccaagaaaaacccacaaagcaaaatcgcaacttgaatatcattagggacatggttgaaaagaacaagagatcatcatggttctccaagaggctgaagagagagtcgcagaggtggaaatacctgggcgctgcaatattcaagtggaagagcctttcttctttccctgtttccttcttcaaccacgtcgctttcaagattctctctctctttgaagccattttcc

SEQ ID NO: 105922 - DNA, 280 bp, Glycine max
gttttcagaggcaattaggattctttacatattttggtctatacttgcaagtgttcataggtggggttggaaattgagatgctggtttttgttgacattgtaaatttgattttgtttttctcagaccattcattagatcctttaatgtccattttgcagctttattgctcttatggtatacacttttacttgtgctgtaggagttgttttctttgtttactgcatatgctagaatttgtgacctaagatgcaccaaaacagggatggggacatatacgga

SEQ ID NO: 105923 - DNA, 280 bp, Glycine max
acgtcgactcgagcgtttgatgaacatgtgtatgttgtaccttatgaatatcattagaaatgatatgagatgttaaattgtgggtatgatatttggttgtgaataagtggatctttttaacacttaatgttacaataatggtattgtgagctgtgaattatacaataactcgaccagtgtttatgcgcagtgttaaatagaaagtgtaagttcctagttaggaaccagtgttaaattatagcgcaatgtgttaaacgtgtttggcacatgagtgtgaggt

SEQ ID NO: 105924 - DNA, 263 bp, Glycine max
gttggacacacgaacctggacaaaagatgcagtctcccaatgcatatggttcacctaggcctttagagtcacagggaaatcttagaggggacctaaatcaaaacattgatcattttcagcagccagaaaatgttcattacaaagggagtcatgaaatgcgtcaacagtacccaggttctggacagtttcagcagagtctaaaagatggtcgatatttgccaaacttgaatattgcacacagataaggggttggctcccatcta

SEQ ID NO: 105925 - DNA, 275 bp, Glycine max
gttttcataaaaccgctttgttgtttttattctctcactttctctctcttctcttttatcgggtagtgtagtgaccctctctctcattctatcgttcctgcttcttcgctgcctcgacttcttctctcgcggtgctgaaggagctcacgcatggcgactcaacttcttcatcgctaccccttgcacttgatttggatgctaattttttcatcagccagaaatgcttggagagagcccattgcaactctgcatttgctacaccatgaaagtgtgag

SEQ ID NO: 105926 - DNA, 193 bp, Glycine max
gttttaggaagttattacttattagatagttattttcatattaatttcagattgggcagtcatcagttattatgtgatagttaatagtaatatataagttgtgttacagacttgtaaaagggaattaagttgtcagattgttattccctatgttttgtaggaggtaactcttagttcaaggtaaaccctgtgt

SEQ ID NO: 105927 - DNA, 257 bp, Glycine max
atttttgcttcttagaacagaaccctgactcggtgattaattgttgttttcgttatgaaacgctccgaatttgagtttcccgcaattgatgtatccagtgcggttcccaacaacgtcgttttatttggcatagtcataacgcgccgaaccgaaccggccggtccagcgtcggaaagcgaaaaccgggttctgtcgaaatccaggtcttcttcgggtcggaccaacgggttcgtgtcgtggctccggtcgccgtccgg

SEQ ID NO: 105928 - DNA, 254 bp, Glycine max
ttgacgacttaaagatccacaaagcaccaagtatttcaatgatgaggacctgccactcacaaaggccatattaagctgcattgaagatgcatcttgttcatgctcaaaactatggagctgcatgtaatgcaattatcaactagtgtttcacttcttattcatcttggcattgcttcttccaggctgagggcactgtcttatgctgaacaagttgtgaagctgatggatagtttggtcatggcagggaaagccac

SEQ ID NO: 105929 - DNA, 133 bp, Glycine max
caagattccataatttcaaagactttgtgtgcaccacaccaccatggggaatgaaaccagaaaactctcagatgagtatgaagtttcagaagtcctaggaagaggtggattttctgttgtcagaaaaggcacc

SEQ ID NO: 105930 - DNA, 255 bp, Glycine max
gtagagatacacatgtgccaccaagagttgctcctagatttatacggccacctccacctccacctcctaattctgctcagttttttcatccatcaccaatgcggccttttggtagtcccattggtttccatgaactagcacctcctctggtatttgttgcagctccacctccacccccggattcactgagaggtgttccttttgtgcctcctatgccacatcatcccctgttctttacaggtccagaccctcagt

SEQ ID NO: 105931 - DNA, 247 bp, Glycine max
aagagagcactccctctgctgatagctgatatatacattaagctttaaaaattaaaaatagtaagaaaagaaatatcttaaagcaattggtttgtgtgtactgcagtgagtacagtctttgacttgacgaattctcacgtgaagttccgtttgaaacagaacacaccagaagagaaggccaaggccggcacactgtaagtttcgatttcaattccgcacccgattcttccttccttcttgatccgca

SEQ ID NO: 105932 - DNA, 251 bp, Glycine max
tttcagttgatgacatgaccaggtagacacaatgtcctatattaggagtcacatttattgcacaatgtctcagacctattgtgcataaatgtatctctttaaatgacaaggccatggaggctagaatgagaatattcaaatctgtgtatattgttggttctgtaatttcggtattgcaaaatataagtgcctcgctgaatagatctcactgaaaacagaataggcagctttaaggcacttcatatgtggtg

SEQ ID NO: 105933 - DNA, 253 bp, Glycine max
gaaaaagagagagaaaagaaaaacaaaaaagttaaaagtcttcgcttcattcgaagtgaatggttgacggcggaaaaggagagggaggaggagagcaagcatcgccaccctcgacggcggcgcgtcacggaaccactctccggccacgcgcctccgtggagagtgttttcagcggcgggtatagccccggtcccatggctctgctttccaatttctacggcgacggcgatgagtgcaagtcgttctcggagct

SEQ ID NO: 105934 - DNA, 259 bp, Glycine max
gataatggaatatatagacttaccctttccacagctagcaattcttacttcagcacggcttctgacttaatataggatctagaatcaaccaggaagtcatatgtttcactgctaattctagatcctatattaagtcagaagccgtgctgaagataatggaatatatagacttaccctttccacagctagcaattcttcttcaatttgtgcctctgtttatcagagattttgtttatgacaatgttgcaaacaatcggta

SEQ ID NO: 105935 - DNA, 286 bp, Glycine max
cctcgagcgaatcggctcgagtggagctccttccaacttgtaaaacccttcaaactgcaaacggttttcgcttttccgagtcggaatgtccgctctcacatctctctcactctctcttcgcacactctccctccgtcccaaaccaaccactctttccgcttcactctctgcaatcccaggaagtagcgatggatctaaaaccaaggtacctccccgcaaaagcagaacgggcagaatagaaggccctagataaagcatggcagattctgttcaacgcaagatggag

SEQ ID NO: 105936 - DNA, 237 bp, Glycine max
aaaatcttcaacaaaaaggaagaaaaaaacgccaaaaataaacagaaatcgcgtgtttgtgctgctgagctgtgagcacatgaaaaaccccatttgcttccattgagctaaagctatccaattgctggaagtgttggttgcctttggacaggaattgaaagacggacaaattcaagaatggcaaggatattacataaactacaacctcatgagaagcgagtccagagtatgcccaac

SEQ ID NO: 105937 - DNA, 286 bp, Glycine max
accaggagcaacctaaggactaaggaggagttgaacgctgtttatttgttgagttgatatggtaattgggcagtgacggttgttcagtaattttagcacaaatgggtcaagaattgtggtcaatatttcagctggaaagaacgagattgttttggctaatcggcattacagttgcaatcatattagcattccaatatttggacacttccttatggtggcgttcaacccattgtattctctgccgaaaacacaccaacatcggatagcattagattccaagctgcag

SEQ ID NO: 105938 - DNA, 280 bp, Glycine max
acaagaaggaggaggagcacaagggtgagcagcaccatggtggagaatacaaaggggagcatcatggtgaacacagtactgaatacaaaggagagcatcatgttggtgagcacaagccggagcaccatggaggagaagagcacaaagaggggttcctagacaagatcaaggacaagatccacggcgaggagggtggcaccgctgagggcgagaagaagaagaagaagaaggagaagaagaagcatgaacatggccatgacagcagcagcagcagtgacag

SEQ ID NO: 105939 - DNA, 278 bp, Glycine max
caaaaatcaaattcacagtcttctgtatctctggatagcttatttgatgataaggatcctccagagatttccaatgtcaatcaagcctaggaggagcctgatgaacttagtggagtcgttgatgatacaagaggttccttactgatgatgaatttctctgtggaggaagttgaatttgcaatccacaagcttggtgatggagcatcaattcctgagcctggggacttcatctgtgctttgcagattgctaaaaaactgaaaaaggagccagatgatat

SEQ ID NO: 105940 - DNA, 257 bp, Glycine max
cttaattggataacccaatttagatcctcacctaacaaacaaaacacacgcagcacaccccacaatccttaaccatgagccttttttttccactgcctctggttttcctcacaaactaaactagtgtatgtgttttccattgtctcaatctcacactatatattaacaacaacctgcaacccattcattcatcttcaacttatattctccataaacacatcaaactattagcaatttagcaccttctactactttgc

SEQ ID NO: 105941 - DNA, 161 bp, Glycine max
ctctaaccactttgcttcagctatggagtttcgttgccttccattgcgttttctctctcaatctgatcctgctcgacagctacatgctcgccatcacctaccagaacgtttcactcgggcaaaggactgctgtccacaataaccaccaatgcctgcaaagc

SEQ ID NO: 105942 - DNA, 281 bp, Glycine max
caaattaacacaaaaacccctactttctctctgtaagctctttcttctgttcttgtctctcgcctgcaccgccattgccgacgatggcgtgttcatgtcgaagctcgcgaaggcgctgatcccgtcgccgtccgggtggacggggagcagcttctgccaatggacaggcgtgaagtgcagcgccaaccgcgtcaccataatcaaaatcgcttctcagtcactcggcggaactcttcctccggatctgaactcgctctcccaactcacctcgctctctctcc

SEQ ID NO: 105943 - DNA, 288 bp, Glycine max
gccgtgtttgatttgctaaaatcataacgaaaaatatacttgagttaattctgaattgaaactctcttgttagttttaaaaactcaaaactcgattggtataaacagttggcaacaatacacgtttctagatattgttttcaagttgatcttaactggctctagattctgggaaagtattctttgctatttttatttaattataaagatggctgctaacgtgactcaacatgtccacgagtcatgaattgatcctataacaatatatggagtgctgcctcctgatttt

SEQ ID NO: 105944 - DNA, 288 bp, Glycine max
ctaaatcttaccctttatcccaaactaacaaaacaaaatccaacaacccccacttctagttctttcttcctccaaaaaccccacctttccccttcaaactccccccaaaaaaacccaaataaaaaaaaaaatctttgttctattttagttcccattttcaatgttgcaaccttggaacaaacctcgttcttctccattctcatgttcttccttcaaagacattcaaaccctcttcttagatgaacccaccaccaccaaacccaaaccctctatcttccaccgagtcac

SEQ ID NO: 105945 - DNA, 283 bp, Glycine max
caaatgtcgaaccatttgatttgtctggagaaacacatattcttcgctgcgttgttaaatagggttttggtgattcctagctccaaggtggattaccagtacgatagggttgtggacattgatcacattaacaagtgcttggggaagaaagtggtggtttcgtttgacgtgttttcgaatttgaagaaggggcatttgcacatcgataagttcttgtgctacttttcgcagcctcagccttgttacttggatgatgaacggttgaagaagttgggtgcgttgg

SEQ ID NO: 105946 - DNA, 277 bp, Glycine max
cctaatttcaacccgttcttcctcaacgtgcgtcgtcagcgacttaagggttcctttggaaataaaagggttttattgtgttctggtgacacattgaagcagagatagacaaaacgatggagggttcacgacggctacatggacagtctgtaggggttttcaatgaagggatttgtttagttttatctcgctggtctgctcttcgatcggccgtcgagaacgaatggggtggccgtgagtcccgccttaaagccgatcaacttgccagtggcattct

SEQ ID NO: 105947 - DNA, 293 bp, Glycine max
taagctccactcattatttagagtgtttccgcttcgctgcggcctcgctctctctctctctccggccacttcatcctcacaccgaagcagcaccttcaccaatccctaacagacgcaaccttctctcttcagctcctcttttcaacctctgccggaatccaccaattaggttccaatcaacctctcacaagttagaggggaaggggctgtaagtgaggatgaacttgcaacaagctgggcagcctaaatcctccaatggatatggccaccgaaaatctgaaagagaaggggca

SEQ ID NO: 105948 - DNA, 234 bp, Glycine max
atcgagccgcaaaaatggatatgcaatttaaatacaaatcaagcaatgtgacaccacagactacaagcaatgacagcaattcaggagtggaggacagtgaagaagaaggaaatgatttgggtgtgcaaagtactaatttggatgtccatgattttaggtttctggacaacattgctccacctagttactattctccctttgagatggctgaagagatggcggagcagctgtgga

SEQ ID NO: 105949 - DNA, 274 bp, Glycine max
tgaccttgaccattcctctctttctcgcttctctgcaagttcttcctcctcggcattcttgggtttgtgtgtgtctatgtaattaattgattgcattatataccttttttttccaattactttataaggaaagataatcaccatacacaaaaatgtaagattgttgttcatcggagatttgcagcttaactgtcatgcagaattgtgttttcaccgccattgactacagctctgccactcttggatccactacgagcaatttgtctccagcaat

SEQ ID NO: 105950 - DNA, 268 bp, Glycine max
gcagtatgtctatgggaagcagactctgaattggaaagcctttggacttcctgttgtagataggctttatagtgttacaaatggatctgatctccgcaatttgtatctaaagtggttctatccatttcaaaatccaattgaagaggccttagaaaattgtctcgtgtctaaggaaactgaagaagatgcagaaacggaggtcacaactcctagtttaggttcaaatgtgaatgagttagacactccttcagatggaggaatggagttt

SEQ ID NO: 105951 - DNA, 244 bp, Glycine max
cacaaacacactggaacagaaggaaaaagagagagtgttaagagcagaagagtggaagagacaagaatctgtaaggttggagagggaacacaaatattaggctaaagagagagcatggattgaagcaagggatgctgctttaatggaggctatgcacaaattaacacgaaatgagataatgaagagtactcattctcacgagggtctaatggtaactggaattcaaatccacagtgaaaaccag

SEQ ID NO: 105952 - DNA, 289 bp, Glycine max
ccgcgtgtctgagcctgagcggtagaaacttgttgtctcgagcccctggagaaacagagaggttctgcaagcacttctctggtggtggaaaaagcactattctggggagtaggtattgttagtggttacaaacagactttaggatttgagaactagcgcataccgagctcgctaaggttagttactgctatcatttctccctgtcacagcatcttcatttgattgatctttgaacgaatttgaacgcatgaacgactttgagaagagaaaagcttcaaggaatagtcag

SEQ ID NO: 105953 - DNA, 256 bp, Glycine max
gccgccctttttttttttttttgatggggggaccgaaattgtttcgacctgttccacccagtctttcttgggatttctactgaaggggtcggtcctcccatcgggtttgttttagaacgtttacctagggtttctttatcaagagttccccggggatgtcagaggccgtaccccgcttgttttggaggggcacctttttttttcagaataggccttggacgattttccctcccctgggtagtttaggtgtttacgt

SEQ ID NO: 105954 - DNA, 288 bp, Glycine max
gactcacttcttctctttaaacagcacgacccttcttccaaaagtccccaactttgccacggattgttgacggtcttgctgaaatcgggtcgtgccggcaatgcactccacgtgctcgacgaaacgccccaagcgaattccgggttttccgtgacgggggacactgcatttggggagttggtcaggagtgtaagacattcacctgatggggaggttatcgggcaggatgccaagctaggcgagcgcggagtcttccctgatggggttcagcatactcagtcagtgggt

SEQ ID NO: 105955 - DNA, 283 bp, Glycine max
ctaagaccccaggactagcaatatctagaaattttgtgacagagatggggtatgaacattatttcttttccacatgtctttttaatcatacaatagctccttttattgtcagttttctgacaaagccaaaatgcaaaagcgtataaaaaatatgtaattgtttcatgtaaagaccaacttattttgtttttgtcttttcttcttctaatttttaatgtgctagttgtgctcaagtaagtgtccacaagttgtgtttatcgtatcacatttaggttaagtatcc

SEQ ID NO: 105956 - DNA, 279 bp, Glycine max
cagatatatataattttgaagttaataatacagagcatttcatcattcttggctgtgatggtttgtggggggtatttggtcccagtgatgctgttgattttgttcagaagttattgaatgaggggctacctgttgccacagtgagccgtcgtcttgtaagggaggctgttcgtgagcgtcgctgtaaagataactgctctgccattatcattgtattcaagcacaattaatccctgaggcaccatctccatgtgtgtgtaataccaggtggggtaccaa

SEQ ID NO: 105957 - DNA, 274 bp, Glycine max
ctcgagccgttcgcctttgcgtttgttttcttccgagctcacatgtcctgcgagtgaatccatgcaatacacgaattcgtcattaagggtttcttgtttcattaagaaaggtggtggtgttcgagtaagtaatcgcaatggaaggaacgcgaaggcggtggtttgttgccaattgatgcatagccacaaggaggaggagtcgaatgaaagaaagagaaagctgcaggagcctgcgcttatgcctgtgcagaaggcagattttgtgaggacattg

SEQ ID NO: 105958 - DNA, 171 bp, Glycine max
cggctcgagctcgagccgtccgagccaattcggctcgaggtacacttaaggacaagttactccttcctttgaattcgatgtttcttaactgtgaacgtagaatatcgaagtcttgtgtgttatattttgcttttatctctcttctctgagaaccttgtcatcattggcatt

SEQ ID NO: 105959 - DNA, 226 bp, Glycine max
cacatatacaaattctctgtgttgtgttgtgtacttgtgctaattgtgttgttgctgtaggaactttaagtgcagagagaatgatgatgaagtctgctatgtgtgattgcgtgcttgtggcactggttgtggtctgaagtggggcccatggctgaggctgcggtgactttcaacccagcacagttgactccttgtcttccggcaatcaattcaggttctgcacctt

SEQ ID NO: 105960 - DNA, 230 bp, Glycine max
ccatatcatacacatataccttgcaattttctcttaaagaaactcagacccttatcatattgtgtgagggacaccccaggttaattatactaagtagcttgagatggaatggctaatgaaaacggtttccaacttagtgtgaagctaagtgaaccaactctagttcctcctgctgaagatacaaagaagggtatgtatttcctatctaaccttgaccagaacattgccgt

SEQ ID NO: 105961 - DNA, 223 bp, Glycine max
acctgtctgagttttatgcctgtgaacaatatgaggtcccttcatttgatggagttttgattcctttgactattgtttttgcacgtaacaataagatagaagtaaaacaacctgggatattgcatggacatggagcttatggtgaattacttgacaaacggtggctcagtgaactaaaaagcctcctggatcgaggttgggttgttgcctatgccgatgttag

SEQ ID NO: 105962 - DNA, 223 bp, Glycine max
gagaaatgctttaggtgtaatatgtgataatgtgtgtactgaacacaaaagaaagttgtaacagacaaattatatgactgttatgcttgagggtgggagggaatgtttggcagtaaagtagtgacaagactagaagacaagtgcagcagtgatgagaaattgagaatgctgaggtggtttattcactggagagaaagataagtgctcacagtgatagccatgg

SEQ ID NO: 105963 - DNA, 223 bp, Glycine max
gaagtttctagttaaaataatactaaaaaaatgataataataaaaggtttagaatgaattgagttatgtaagagcatgatcaatctatagataagaaagaaaaaaggtcatggtttttggttccttttgcgttttttcccttcaaagttttgtcccaatgcatgtacagaacaatggtgaattaatgaatcagccaaaagtgtttgagtttagactcattgta

SEQ ID NO: 105964 - DNA, 223 bp, Glycine max
cagggcatttgccaccgtattcagcgcaggaccagaactcaagcaataaagcaaaaggaagattgggatgacagcacagtaagtagctatgtttcaaaaatgaggatgcagaatagaatggaggcttcaaccaggagggaaagagcactggcttatgctttctcacaacagctaagaatctgttcaaagaggaaatctccaaaatttaacagcatggagtcaa

SEQ ID NO: 105965 - DNA, 228 bp, Glycine max
aagagaggagaggagaggataggggctgggtgagttgttgtctatctcttcttctctttgtgttttggctgtggacgtaaaataatggctctgtcttttggttttgggctcttgtcttcttcttcttcttcttcttctttatgtgttctccctccatcagaaacccacactttcatgatgaggccttctgcttcttctggtttgcgcatgatgcgtaccagtcgcatt

SEQ ID NO: 105966 - DNA, 220 bp, Glycine max
gagctggttccgctgattgtttcagccagatgatgtcgtcgatgccgggttttcgcttccatcccacggatgaggagttggtgatgtactatctgaagcggagatttgtgggaagaggctgaagctcgacgtgattcatgaaaccgatgtgtataagtgggatcccgaggatttgcctggttagggtaccaatcgttgacttgggtttgcttcaataagg

SEQ ID NO: 105967 - DNA, 223 bp, Glycine max
gctttgcatggagaaactatcactcttatcacaccaacgaaaaaccaaacaaaaaacttactgggcctatgggctggcccatacttgggtctctgcctctcagggctctttagcccaccaaaaactcgctgccttagccgcgacgttaaacgcgaagaggttaatggcactgagtctgggacccactcccgttgttataagcagccaccccgagaccgccaga

SEQ ID NO: 105968 - DNA, 255 bp, Glycine max
cgccgtggctccgctccgtccagaacaccatttcccggcacggcggctaagtcatgcgcgccaccattacctcttcgaagcgttgtctcctgaagcgactacctcaccgcttaaacacaaccctctccttcgcgtcggaaacttggccggctccggcggcgtccgtcgacgatggattcccgtactccgacgtgccgtcgcctaagcggagaaactcggagaggaagccgtacgtgacgccgatgaaggctctga

SEQ ID NO: 105969 - DNA, 253 bp, Glycine max
aaatgatactaccattatgcaattaaaaaaatctaagtatactcgtagtatacttttgtacagaatcatcgtatgacaacaaaaaaggtttggtacttttcattagagtctcagtttagtttccagaaaacaaagacactccgataaagagagagaaaagaaaaacaaaaaagttaaaagtcttcgcttcattcgaagtgaatggttgacggcggaaaaggagagggaggaggagagcaagcatcgccaccct

SEQ ID NO: 105970 - DNA, 256 bp, Glycine max
catttattgagcaaaagataattgtcagtactactgtatatgcttatcttgtgaattctgaatccatttaagtatgttactatgtagcatgatacatgaactaaattgattttcttgatgaactgagttttgttttgctccattctttactttgaaaatttggtactgtttgtgtgattggttcttaaaatatattctgcttagcatatatagttgcaatggctcgattttcattggatgagatatcagacactgg

SEQ ID NO: 105971 - DNA, 253 bp, Glycine max
ggataactggttatgggggagccaaccctcgaagaaggatgcctcccttggaaagacagtggcccactgtagtcctccaaaagccaggccctcttcaaactatatttgatcttcatcccgacgaggtggttaacccatttgaagatatagatgagatacgaaggagtcaacatgcatttattaatcctgctataacaattattcttcgcatgggtgctggtggacatggtgtccctcctttgggaagtcctga

SEQ ID NO: 105972 - DNA, 123 bp, Glycine max
gcacggaaggtgcttgaacgcatggatgctgagaacctgagtttggttaaaaaagatggtaatctaaacgttgtcaaggagaacaagtgtacggagaaaacaaatctctgatatagcacctgt

SEQ ID NO: 105973 - DNA, 252 bp, Glycine max
tgtaaattccctctgctgcttaacaacatcgatcttctccaaacacgacgacaaagacatatctagaatctggaacttacgctgatctataatttgttgcttttcttccttcggacaatgtcagaactttaggatcagctttttgcctttccttcttactaactcagataactaccgccaccatgactgccatatctagagccaatctatctgataattccattaatggatcgatggcaactcctagagcga

SEQ ID NO: 105974 - DNA, 251 bp, Glycine max
cctccaccgattcggctcaggaccaatactattactactacacctactatccctttctcgctaactagcactgttgcactcttcttctgttgggggcatttactaagttcaattgagagagcagtgatgagcacttccacaagggcaacttccaacatccttctctctctgccactgccctctcctaaggcggcgcctccttcgtgcccagatttgtatggcaagcgtcgcgaaatggccaagattcagat

SEQ ID NO: 105975 - DNA, 253 bp, Glycine max
ttcgaagcgtattgaagagaagaaaaatgagcttgattcacttgaacttcaaatatctgatgaaaacttctctcaattagatgaaagagaaagaaatttggaaaatgaggttaagaggaaggcaagccaactcgacgaaagacaatttgaaccaacataaatgtgaagtggaaaaggagatatatagtgtagatcaaaagattaaggctgtcagtcgagagaaggatatcatggtttctgattcacaggacag

SEQ ID NO: 105976 - DNA, 256 bp, Glycine max
gaaaaagaactgtgacagctgaagaaagagagagggtcatcaacgaagcaaaagcatttgaaccatctaatcctttctgtcgagttgtcctgcggccctcatatttatataggggatgcatacatgtatctgccatcatgctttgcagagaagcatttgaatggagtttcagggtttattaaacttcagatctctaatggtagacagtggacggttcgctgcctttataaaggaggtagagccaagttaagccagg

SEQ ID NO: 105977 - DNA, 100 bp, Glycine max
cttcatgcatcactggccactggctatctatatcagcaggacgtagccaaggtagtcgggaaatatcatgatcaattataagtgttaacaattgttaaaa

SEQ ID NO: 105978 - DNA, 251 bp, Glycine max
caaatcttctccctcaggccaccaccgctaacagtaacacctccgattcaactcagttatgcccaccttctccactccgagtcccacttcactccctccccgccgttgattttatccctccccccgtagatctgatctggaccgtccctggcgtcgctgatgtcgctgctcgccgcttccacctctttatctggtggattgacatggtggcttgtgttgttatcttgcatggtttggtttgtggttgatta

SEQ ID NO: 105979 - DNA, 252 bp, Glycine max
gagaatcatcaaagcataagccttctataaattggagctagccatccaaagagaaaaccaggccttaatcccataaccattaattcctctagcaacaaccccttatgatattgatatatagccaactgaaataaccctaaacccccataatatagagggttccactttccaccatggattctccaaagaaacctaacaagatcagagatattgtgaggcttcaacagatccttaagaaatggagaagggtag

SEQ ID NO: 105980 - DNA, 122 bp, Glycine max
gcaaaacacaacacttaaagctttagccaaaggtttgtttggttgcacatacaaggaaatatatatcacaaaggtgaaagaggaacagtatatgggaaaggatattagatatttcatttcct

SEQ ID NO: 105981 - DNA, 251 bp, Glycine max
tctcaatcctcttcctcttaattatactctattcatctttttcctcataacctcaaacacaaaacccaagcattgcaattcccaatctcacagaaacaccagaattaataaaacacataacaaaaaaaaaagtgaaaaatggcgagctcagtggagaaggagggtggtgcgagcgaggaaactttctctttggagcttcctgctccacctggttggaagaagaagttcatcccaaagaaagctggtacccc

SEQ ID NO: 105982 - DNA, 242 bp, Glycine max
gtggcccatagactcaggtggactgggcatgtagagagaagaccggtagactctgtagtgatgagcatcgcccagagtggtgtagacgacaagattgcccagtcggtctcgttccatgatgagaccaacgtggttcgcgacctccccgaggcgcagacgacagcctttgatgagttcaagacgcttgttcaagaagcgctcaacaaccatgagctaactgctcccaagccataaccggtgaa

SEQ ID NO: 105983 - DNA, 270 bp, Glycine max
cggctcgaggcgtttcctcattcccatgttatcgtcatgatgtgtttgctgttggcaaacattctatctctgtctttcgatactcaagcacgcatggagccaacccgctttaaaacgctccccacctacacctagggacagccatacatgcacagccgttggtgataatctgtttgtgtttgggggtacagatggaatgaaccctctcaaggatttgcacatattagacacttctttgcaaacatgggtttctccaaccataagacgaga

SEQ ID NO: 105984 - DNA, 272 bp, Glycine max
agccaaggtccgggcttatattttgatattggaaagaaggccagagatgttcttcacaaggactatgctcaacaatcaccaatccactttaactacagattcttgaactggaatttagatctctcctgtcaagaagaactggtgcatggactaaggggccttttcacatgtaacatacctgactctgggaagttggaaattcaacacttgagtagattcagtggatttagtgcaagcattggattatcgggagaggcagaaaaaggatataa

SEQ ID NO: 105985 - DNA, 272 bp, Glycine max
acagagagtaagagagagagatttttctctttctctctttctcttctttttcctctcgtttcgtttctttgttaatatctccccgtcaaccatggactctccgaggtaccaccaagagcaccaccaccaccgcggcggcgtgagtcttgttccttcgccacgccacagtttgagttcttcaaacagcagcagcaccagcagcactagcagcaacaacaatggactccaccacacccaattgctgtcacctctgactccgaccgcggcggctg

SEQ ID NO: 105986 - DNA, 256 bp, Glycine max
tcgagcaagacatgatgaccttcttgctagcacagtcacaatgaccaccactcgattcgaccatcaagaagcagaggaggaagaggagcctgaacagttactccgaagattacgggagggaaaggcttgtacaaggcctgaagatgacgagactgacaccaacatccctcgcttgggtttacttggagacagactcaaccgtccacgctcaatagagtcaccttctcgagaattgatactcgttctccaccagttg

SEQ ID NO: 105987 - DNA, 267 bp, Glycine max
gaacgctttgcagttaaaaaacaaaaatggagcagttaccggcgaaccggagcgaacaaaaccgccgccaccgcaagtgcttcaccagagcgatgtggacgaggatgacgagaacgtgaagcagctcgatgaatgctcttctctctatcgcttcatgcaggattgcgctgttcgaacaaacaggaattggaaagaatgccagacagaagtatatgctttgaaggaatgctttgaaaagagaaagaacgtgcaaggaaagtagatttt

SEQ ID NO: 105988 - DNA, 265 bp, Glycine max
gagcgcagcaatttccctcaaggacaaggttcatttcatttacatatgcgtaacactgtaacagattatagatagatctagaagctgttatagtgttgattgttgaacataaacctgctttaaattaaaatattggcacaggtggtggaggagacttggaaccggagagatcaagtggttgatccgacggtgtacacgggactgttgggcactgcctttacttgcttgcggtcctaccaggttaccggttgccggaacgacttaa

SEQ ID NO: 105989 - DNA, 244 bp, Glycine max
ccaattttgttccccaattcttaaatagatagcactgcaaaccgaaatgaagggcaacggagtagtgagtttcttgctctggttttatggattgttgttttgttttccacacatcattcctgaaattcacatccactaaactttgcttgctgtggaaatagaactacaattttgatgtaatatgtttagctatgagaagctcattattttaaggcatccagcggatgcatctttttggacattg

SEQ ID NO: 105990 - DNA, 132 bp, Glycine max
ctcgagccgttccaaggtaaaatcctgataatggtttaaagaactattggggtttctttgcacaagtaattagtaagagaatatgaagaatttgctgatattaaatggtttataatttccacgcaacatacg

SEQ ID NO: 105991 - DNA, 248 bp, Glycine max
cggctcgagatttggagtacagcctggtttgaactttcgcttgcaacagcaaaccaccccattcgccattactcccataccccaaacagtttcctcctcacccctctcccatcgccaacggtcacgaggctacaacagtcaatttgacctcacacctcaaaaccaccacggttaactgtagcaaaaaaccacaacgcggaccaaacccatatatcttctctctctctccccacattctctctctaaac

SEQ ID NO: 105992 - DNA, 261 bp, Glycine max
cttttcagtttgtgcaggacggggaagtacagtctgtgctacatgcaatgcagaccaagaacctggattttataaggacaatcagatgactcagtgtgcaacttgttatggaaggggtttaatcgctcataaagatggttctgacactgtgtaagtagtttgtttgtttatataatagtggatgttgaattcaagcttaagtcacaaatgtcttggcctcattgctttctgtcaaggtggaagtttatactttatacttgt

SEQ ID NO: 105993 - DNA, 261 bp, Glycine max
ggtacatccagtatttagcccaaaaggacctttctattggactcatagtaatgaatgccgtcactcaagctatgaatatgcctgaggaacaagctggcgggcaacctggtgctccaatacagcagcagccaggatctgcagtacagcgtggaccaagttctggtggtgtgcgtagaagatgataagtttgcttcctctacctcgcaagcacattatttgagggcattggtaatcaatgtactcttaggttgaccttttatg

SEQ ID NO: 105994 - DNA, 258 bp, Glycine max
ctctggccctttgcttcgaaacagttacatccacaattctgcaatactattatagtaccaatccaataataaacctcagaagctcttttgaggactctttttcacactattacaatctctgactctgtcccattaatcaaaatgtcttttttggagttttggcttcattaatccttaatccccgttgaatttcggtactgggtgtctttcctattcccctttcttcccttgttccgtgtgggtcctttgaccaatgca

SEQ ID NO: 105995 - DNA, 261 bp, Glycine max
  unsure (1)..(261): unsure at all n locations
ccgtcgaaaaacatgcatcggtttcggttactagttttacataaatattagtatgtatatattccgagnccaaactgtgagagtcgcatacatagagactagagtagaaggatggcatgaacaaaatttaaattgatcgaattacgcgatgatactgacatgattaccacacccaaaaagatccggaaaatatggacatgattaggcttttgtttgtttgtttatcgaggttatttttgggcatggcctaaggtcttttag

SEQ ID NO: 105996 - DNA, 259 bp, Glycine max
cagaaagctaacaacgctaacacgcacgtatatgtatctatctatgtgtgtgttagtgtgtattgtgtaatgtgtattcaatcactctaagtttcaaactttcaaatgtcagagagacagaagatggtgccaaccagacatgaactccaaccgagagcaccttgcaaccttgtactgttcctctctgctcctccaactacacttccactttctgatactacccctgtgaaaccaagctcaaataatatatcagaaatgg

SEQ ID NO: 105997 - DNA, 272 bp, Glycine max
gctggttttctttcaagtctttttttttaccattggctctgactcaacaagtctgacacaagggtgggagtgagtgcaatttctgggttcaaagcaggtgggaaatggtactgttcttggacttggttgatgaggttcctcttttgatgtaaaacatgacatgcagtgtaacaaaaacaaaccaagttggatttggtggtgctagctgaatcattcaaaacctgctccttacttgcctcctcttaaagatacaacttgattcacttttgttg

SEQ ID NO: 105998 - DNA, 268 bp, Glycine max
gttttcccaccatggacaacttggaagggatctttgcagacattccctctcgctgcaatcaatgagcaaatgcaaaatcttaggcatgatgcagtctctgagggggcttatccaccatggattgcagggtccgatgaagaaaactatcccttgactagaaaagtgcagcgtgacatatggatccatcagcatcctttaaactgtagtatcccggatgtcaagttccttgtcactgactgggagacattacctggatttggtattgggg

SEQ ID NO: 105999 - DNA, 279 bp, Glycine max
ctgagtgttgttgacttcacattgacgatcctttttttttcctgtctgtttgcttccaatttctcataccttcaatcttcaatcttggaagattggagaacagcattgattgagttttaccacacgatcgtagagaccctgatatttttcgaagaggtgagcacatatgaatatttttatgtctaacaattactttgttgggcaggtttttacgaactacatgggttattctttccatggtttctttgactaggacgtctttttgggaagaaaatgtaa

SEQ ID NO: 106000 - DNA, 220 bp, Glycine max
ctcgagccgttcggggcttgtgatgcttgttttcccaggttttacgagctccagaccttcacatccacctcattcgtctccagatcttccttccttgcacttgtttgtttgtcctacgaaatggagactaaaccgagttcggtgatggtcacgctcagttacggcgcgttgacgtgcgccgcggaagttctcgcgactttgctagcttctgctgtcgtca

SEQ ID NO: 106001 - DNA, 277 bp, Glycine max
  unsure (1)..(277): unsure at all n locations
cttctctgctcctcgtttttctcacttctcaacttccatgctctctctctgcaacgccggcgaacacgcagcaccgccacctgctaacgcgcgccggcggagcaatgtcgcgagcaagatcacgctcacgctcaccctcaccgtcaccgtgctgcggtgacagtcacttagtgctgctgctgcctgtgatgctcgctgttttcttcaactcactccttctgcttcctcgttcctcgctcgccattcgacctnacgagtcggtccggatcgaactcgc

SEQ ID NO: 106002 - DNA, 278 bp, Glycine max
atcaacacatgggaactaatcgaacgacttgaagacacaacaagccctttcagatcaccaaagcacttcaagagcttctcttttgatgtcaatgtcaacaggcatgttgatgttgctgatgttgatccacccttaattcagaatggcaatgattcagccaaaccaatatcggtttcagattctgatgatgagcctcaagagaatcaagagagcatggacagaaaaaggttcttctctattgaggaagagatgatcagtgatgatgttgtttcttcatt

SEQ ID NO: 106003 - DNA, 143 bp, Glycine max
gacatgtagctctatcttctactatatagtcagcaaataaactcttagcaatgccaaaaccccaacccatatgatatgtagatcaaatacgaattcccaaataggagtaacttgcaatgccaattcgacacgattattattgt

SEQ ID NO: 106004 - DNA, 277 bp, Glycine max
aaaagatatgcatgacgcccttgtgcatagttaaactcataagtcttagctactttaagttgataataggtagtaccgtagtagtgtaatggggaaacaagggtctcataaaagtatgcgtccagagtttcagggttggcattccaaaactttgttgcttcatggcctgaagagtgattcttcaacatgcagttactgtagggggctctatgtagggaaaaagcacatcagggccattgttgtgatgtttggattgttgggttgcctttttcttctt

SEQ ID NO: 106005 - DNA, 147 bp, Glycine max
catgttttaaaataaagtgattgtatgaacatatccagtggattcaagttcaaatcttgagtaagtgggtgccttaaatattcaaaagagttttatcatctaaaatgattctatctaactcagtaaaattatgtctagagaagtaaa

SEQ ID NO: 106006 - DNA, 277 bp, Glycine max
cgcatccggcatctgatttttcctgcaatggcataggcattagtgaatctttccggttccagaaggtcttgcaaggtcaagaaattcttccaagccaaccatatggcagagccttatctattgaggaggctcgagcaaatggtcgctatggattttatgatggctgtcagttacttaactccagaaatggatggtctgcacagatgcatgacaatgcttcacatttgcatgcatctgttacacctgcgcaagtgtcatctccatcatctgtgttaat

SEQ ID NO: 106007 - DNA, 276 bp, Glycine max
gggagacaagtggagataactgacccaatgtgcccgctttgcaataactccgaggaggacgcagcacacctcttcttcaactgcagcaaggtcctccccttgtggtgggagtcactttcatgggttaagtcagtgggtgctttccccaaagaacccaaagaccattttatgcagcataccgtaccgagcgctacacgatcaaaggatattagatggagctgctggtgggtagccctcacaaggaccatatggcaacacagaaacaagttggtattt

SEQ ID NO: 106008 - DNA, 123 bp, Glycine max
cagtatggcaaatgagggatcatcaaatcctctctagcactgattctggatggaaatattgtactcgaggacaaggaaatagttgtgtatgcaatttctgtggcaaggttacaaaaggtggaa

SEQ ID NO: 106009 - DNA, 273 bp, Glycine max
agaagctctgtaaggactcaaatttcgacctagggccaactaatgtgcaggcaagtgcaaactgcccttcagtcataagttccgctgcacatttatcatcagcggaggatcagccaactggttttcaagttaagcatgaaattcaaatggttaaagatcctaccatgccttcagtcttatttgatagagtagccaaagatagcacacataaaaacttaggtattaatagtgtaaatgatagttgctcctcttcaaagccaaatatggaaactg

SEQ ID NO: 106010 - DNA, 266 bp, Glycine max
ctggaggcttcactaactgggaatcccttgatcagcttgtggcatcacaactgaatggacaaactccgacatattgcagtgatttgcaattccccgcatttctatcatcctcatacattgctacaacaacacacattgctcccacaatacaggattaccccagctacgacattgacctgtggaaccactgtgcttcgcgcgtgtccaacactccaaatgtaacactctaatcaaatccttcttttaatttcttcccatgtcagatt

SEQ ID NO: 106011 - DNA, 266 bp, Glycine max
gaacaatacatgctattcaaaagctaagattaactagcataatgaaacaagaaaatactaaaaatgacttctttttgagctttgtcaactcaagtagcaagataaaaatatgataaaaacaaagcaaagaaaatctaaaacatgcttctgagttcaccataacactgacctgatctaggtctttcataattattcatctatttaaatttccaccacccaaacagagctcccagcttgggtttaatgtttctctttttattcagacc

SEQ ID NO: 106012 - DNA, 265 bp, Glycine max
caggtatcgctggtatatgtcctttaggattattgctcataatgagtgtctcagataataatggtaagatctctgtggttcatgatgatgggcttagattgtagcagtgtatgtcaaatgccttgcaccaggcctgtacatttcagtttcttgatcagcttcaagatgctccgcattcaaggtcctggcttctctaattgttggagctctacagagagcaaagggtgctcaaaagttggttctaatgtcaggactgggacttgtg

SEQ ID NO: 106013 - DNA, 257 bp, Glycine max
tagatcgcgacccgccgccctttttttttttttttcaaaatatcgaatctttttctcagtaataccaatgcaggttgtccatgtgcatgctctccctagtatccaaagcaaaaatacatgcaaatctgagggtcgcgttcgctggtgttggttcagccctgggttattttctgggtggagatcagcctgcagtcttcgattcttccgcgctggtccccgtatctgtggctcgtgcatttgcactgtttgtaggtctc

SEQ ID NO: 106014 - DNA, 258 bp, Glycine max
ctgggatgaggtagttgaaaaacttctaaagaagaagagtgaaacgcgagaacaaaacctggaaagggatacgaatgtcacacaataacgtctttttctctcttgtttaaaactctagatatccacacccattcatatatttggttcttgagtttgttaattcgtgatgtaaaaagatagttacaattgcttggacccccaggcgtataccagaggagtgctatttgttttaaaaaaaaaaaaaaaagggcggccgcc

SEQ ID NO: 106015 - DNA, 258 bp, Glycine max
ctaacaagtcttcaccatcattatggttgccttgttttcccctccagtgttctcaaccaagggatggctcttagaagaggatccattaagctatgatgtgtcctctgagtactcatttccctatcaattttattcaccacagacacagattcagctcgacattgaaaggtccacttctccatcccctgaagaccctgccatggtcaaaaagcttagccacaacgctagtgaacgtgatcgccgcaagaaggtcaatca

SEQ ID NO: 106016 - DNA, 124 bp, Glycine max
gttttcatcttgattcaccaggttaaaaacaaactagataaattgctatactttaaccctttatgcataaaatgttaaagtatagcaatttatctagtttgttttcatcttgattcaccaggtt

SEQ ID NO: 106017 - DNA, 268 bp, Glycine max
cagatgcttcctattccttgcaagatccatcagaggcaagtgctatatattcaatatccaccacaatttattataataatttaaatgtttaattcacgcatcaatcttgtatatatttattgtgaatggtgaatctaagaaatatataatgtaattaacaaatatcttaatggtcacatttacaggttgagcaattcttgcggcgtttggtggagtggaaaagatcgagtactgtgactcccgcaagtgtatagagtttgtaggatgg

SEQ ID NO: 106018 - DNA, 244 bp, Glycine max
  unsure (1)..(244): unsure at all n locations
ccctcgagccctcgagccctcgacggctcgagctcatgcgagaagccaatttgagaagacgcaatcgnacactcttgatcactttcgaacgtcatcggatctttctgcggccaccgtctatcgcacttcgttgccgtcatcggcgccggaattctgaatcttaatgaagttgtgaagtgatgatgagtggaagagctatccaataacatgacatgaattccaaaattttctatacttgaaaatt

SEQ ID NO: 106019 - DNA, 248 bp, Glycine max
gcctaacacctcatatgcatttgccactttctgaatgatagatttatcccgaggttttcgatcaaaagcttccagtcccttgaaaagcttttaaatcaaaagcaaagcaacatgaagagaaggttaacagtgtgtaaatttaactataagtgtatgttatgtaactgtcgaacaaaaagtaaggatgctggatgcaagcccaatagtacctaaagaatttcgacaataggaaagcttacaactttcct

SEQ ID NO: 106020 - DNA, 212 bp, Glycine max
caaattctctgtgatgtgttgtagccttgtgcaaattgtgatgttgttgtaggaaatttaagtgcagagatgaatgatagatgaagtctgctatgtgtgcattactgcttgtggcactggttgttgttgaagtggggtccatagtctgagtctacggtcacttgcaatgcatcacagtgaactcctggttctatggcaatctgttcaggttc

SEQ ID NO: 106021 - DNA, 246 bp, Glycine max
ctccatacaatccttacattcctggtgctatgattggtcctgatggctcatttggagtaggacaacattattataccctccccaattatcaaagtccagtttctgcacctggttatattccccttgttcaacctgacaatttttctgatagttctgcggattccttttttggagccagtgcttctgtcagtaaacctgatggaagaggtttgaaacctaagttcaattcagcttctggtaactttt

SEQ ID NO: 106022 - DNA, 254 bp, Glycine max
cgttgatgtggatgtagatgggagaagtgatgcttcatgagacggcagtgttcagtatgcgtgaagtgtgggacactacgaagaggcagtgatggcatgacttgctggccatagatgggctgctgcatgagtcactgcggatgtagggaatgcttccttgtgaggaagtacacgggatcaataccttaaaatggtccggtcaccatagttgaagattgtatcagcaatcgtgagcgatgctctcttgagcttag

SEQ ID NO: 106023 - DNA, 261 bp, Glycine max
ctcacattggtctccaaagagaagacgcgaattagagccaagggtctttgcatggactgaagcacattgagccattcattcaaattccctttgctctaattcccctcctcacattggtctccaaagagaagatcatggggacctttagggttgggcctgttcttgagatttcttcgtttctgaggcgcaagggcatcttgcttggtctttaagcctgctcctgcacaacagcctatattgcatccatggaaaatttggttc

SEQ ID NO: 106024 - DNA, 257 bp, Glycine max
ctcgccccctccatcagtcacgctgtctatcaccgtgtatattcgcggcttgtttgggtgccctaattagggtttagaatgcttagtatttgggaacgtaccacgaatggtttatttggcattgagattctgtgagcaatgtcaacatagaccatttcgtggactttgagttgctgtacacattgctacacaccctaatgccattagggtaacttgtatgttcctgcgatgaagttttgtttaaccagattctttga

SEQ ID NO: 106025 - DNA, 254 bp, Glycine max
tgggcgtgcaccgctaaacaatacataaagctttgctaagaaagtttcttcctttttcaactctgctgtctgaatgcgaagacacggcacagtgatgaagtgaagtggtgcatcaacctcaatctcaggtttctattgtctcagcaaaggttggatttcgaaggaattcttggttgatggttgatgctatatctcatcagtgtgttctataagaaattgggattttcccattgctttgtatgtggcaagtcatt

SEQ ID NO: 106026 - DNA, 250 bp, Glycine max
aagcaaaaatttcttctaagcattatacaatcaaggtttttaattcaaaaatcattatatcataaagtgcatcaagccacaaatgaattgaaagtgcaccaaacccaaacatatatatttagactcacaatgagaaccaaaattaaaagtcctctaaatcacaacaaacttagattaacaaaaccaatagggtcttaaaatagaccgtacttagacaaaaccaacaccagaacatatagatataataaca

SEQ ID NO: 106027 - DNA, 240 bp, Glycine max
actcgagccgattcggctcgagtttcacgaagccatggctcaaacacgtgttgttcttgtcttctagcactgtccctggctctgctaactattccatagatctgaagaaagactctttgatccatcttcagaatcaaggattaaggcccaaaatttctcatctcttcttcattccactaccttcagcttcttattcattttcttcttcttcatctcgcacatttattacagctttggcct

SEQ ID NO: 106028 - DNA, 247 bp, Glycine max
ctgccattgcagacattataaagtcccgaactgaggcacttttgaagaaaaccaagacagcagtttctcctaagccaattgtaatgagagctgagtatgcacattgtcctaaccttactattattgacacacctgggtttgttcttaaggcaaagaagggtgaaccagaaaacacgccggatgaaatcctttctatggtgaagtccttggctagtcctcctcaccgcatacttttgttccttcagca

SEQ ID NO: 106029 - DNA, 246 bp, Glycine max
aaaagattttttttttttaaattattccctggttttctttccccatgtttgtctttcgtttcttttagttttagcgtgtctttgtttctggccttcgttgtgtcggtttaaggttaaagcgtcagcgggttgggaagtacattaagtatacaccagaggatctagagacctatctattagatttatttgaaggatccccggctgtattgcatcacataaggaggaaaagtacatagtatatcataa

SEQ ID NO: 106030 - DNA, 244 bp, Glycine max
attatatgttcgaattcgtgatgctctatataacactagtggatcaaaggctatgaatggtgaagagcttcggcaagttgcaagtgttctccctgctgaagatcttgttgaaagtgagcagggtggggaaaaagatgcatctaaggaagatatgagtaatcaatatgcaaatgatgtcatgccaatggcaatgaatatagaagtacaagatagtagcaaaacatttaatgagattgtagaagta

SEQ ID NO: 106031 - DNA, 247 bp, Glycine max
ctaacttgaacactggaagtgtgctggagtatgcacttgctttcactagtgctgcgttggacaagtattgtaataaatggagtgctgcacccaaaacaggcttcattgacattacaatttctaaagatttctatcgaatttacagtggtctccaaattatcctcaatatcgcagaagtggaggctgcatctgttatgcaaacacataagaactcacaattttctgtgaagggatgggaagccttatt

SEQ ID NO: 106032 - DNA, 246 bp, Glycine max
gcgattcggagtctccaaccaactgccctgcgggcgtgttgtgcggcaccgattcggggacgaatttcaccggcagcagtagcggcggtagcagcagtagcagcagcagcagcagttccagcagcggcgggtgctgttccgggaacgtcaccgaggtggaggaagaagaggaaggtgatgacgatgacgatgatgatgatggatgtttggatgattgggaggctatggctgatgctctagcagccg

SEQ ID NO: 106033 - DNA, 236 bp, Glycine max
gttctctctcacatatccatctttgttgcttttgactgtcttttcttctccgaaatattcatgcatggctactaccgctcactgggcaaacatggtgttcgattttcttctcttgtcttttctttgatgcacaaattccgagctgttcattctgagctggtgagatccatggaagatataggtccgaattcatgcacaaggccagtgacagagaagaaagcaagaccccaagaaca

SEQ ID NO: 106034 - DNA, 235 bp, Glycine max
tatctgtcaaatctttgttttattttctcagatctacaatcctagatctaattgttttttgcttagggtttcaaattcaatgctaatcaagtgaattagaggatataaagagctaggtaatagtctaggatctatatatctctattttcgcactgtgaatcttggaggacccagagaatgttcttgaataggttttcatttctagaaatagcaaagacctttgtggattccgagc

SEQ ID NO: 106035 - DNA, 276 bp, Glycine max
cgggtgtaccaaaggtgctgaaggcagcatgcgattgtgtaatgcacatggtggggggaagcgctgccttttcaatggaggtggcatttgcccaataagtgtgcatggaggcaccaccaatggcactccatgatctatccttcacagccatgaccaccatttccctcttcatcatgctactctctctatgttccaccccttcgcattctgggctcacttgtgcttcgcagaagctcaaccgcacctacgtcaactgcatcaagcttctcattctcg

SEQ ID NO: 106036 - DNA, 281 bp, Glycine max
gctatctcatggtaaaaactccaaactgcagtacagatgtcatgaaatttactgttgtggacacaagtttggccagtgaacagatgactaaagtggcagaactgagaagcttgccatttgaagttttaaaagcttgtacttttgacaatgactcagatgatgagaatacttctgcagagcaaacaaatgaatccgagtctgtcaataccacatgcttggaaagggggaagaatggcattactaaagccaataataccacatgcttggaaagggggaagaat

SEQ ID NO: 106037 - DNA, 285 bp, Glycine max
tgaatttgtccatggatggggtcttgattttgcttttagaaaatgtgttgagcctgcccatgagaagattggagttgttgatactcagtggattgtgcaccaaggtattccctcactagggaatcagggagaaacacaaacaactggaaaacctgcatggcgagcggtgaaggagaggtgtggcatggagtggaggatgttccagggtaggttgactaacgcggaaaagggttattacaagtccaagggaattgatttttctaatttgctcgttcatacttaggg

SEQ ID NO: 106038 - DNA, 120 bp, Glycine max
gatttgtgtaacaagtaagtcttaataggcaaaaacatatgccatacttctatatgatcctcctttcgtgactatgcaatttagcaagtttgcacattctgttttttctcgtttacaccg

SEQ ID NO: 106039 - DNA, 279 bp, Glycine max
cagccacaacataacacaatatgtcacttgcatttttaccgcatttaatcttcctgttctctataattagtaaaatactaccattctctctctgcctctttatttttcccatcaaaataagatttttgtctggcattcccttgcatttttttaaaatgtattttcatttattgttttaagtgtgggccacttattagctactgtcgtgccactaaatcttttgcagcatctggcgtttgctgtagggtatgtgtgttgctcatcctcaggtattctttg

SEQ ID NO: 106040 - DNA, 280 bp, Glycine max
cttgcactgtggacgcagcctccgccggcgggcattaccgccattgaagctcattcaagctttttttcaccgttcctcacaagactagaaacacaaatgttatcattggacattagcacttctttgttagtgaaagactagagcaggatcaaaatgctcagacgaaggctatctgttctctcaacgtcaatcatcagaaggtcaaatcttagcaaacccattctcagatacccatctatccaatctcacccctttcagctccgtcactctcccagtgctt

SEQ ID NO: 106041 - DNA, 281 bp, Glycine max
gaatgaccatattcaggaagtggattcacctgaagatcgagttcgggatcaaaacagcgaaaggaacaatgaggaggcaaaagaggaatattatgcctccagtgaaggtttgaacaagacaaaacaatctgacaagagagaaaacaatgaatttgagttggagtctcaaacaaatggtaccgaagtggctcatgttcatgagaatgagagggtcttaaatgtaacacaacgaaaagctacacaagtgactaattctgttgtcacaaatataaccaaccaag

SEQ ID NO: 106042 - DNA, 268 bp, Glycine max
tgagcgcttgaatctggtttggccaatctgtctctgaatgattattccatttggagcaacagctacagctccaagacgcctgatcagaggaggaactttgatgtcaagggcagtgatttcaacaacaacaacaactcatcaaaggcttttgatgatgatttcaatgatgggtgcaagatcaccaattccaatggaccccttttctctatgcctcacaacaacaacaacaacactcttgaagttggaggcttcaacaagggaggaggaa

SEQ ID NO: 106043 - DNA, 264 bp, Glycine max
atttcttactaagccttttttgttgtgattcagtatcatcatcatggcaatgtccgtgataagaacaaaaggaggcctagttaagccagcagaggagactcccttgagcacagttctggacctatcagccatcgatagattacctgttctaagatgcaatgcgagaaccttgcacgtgttcaaacacggtggtcctgaagcgccaagggtcataagagaggccttgtccaaagcactggttccgtattaccctcttgcaggaag

SEQ ID NO: 106044 - DNA, 267 bp, Glycine max
acacaacccaccgtgtgttctgagctagagtactaaatggatgaggaagaatgtcttagaagtaccagtattggaggatatccatgctttgaaagatgaagctgttatgtaccaaaagaaagaacgaggatattcgcatgacatagctaggctttcattgcaaacctagttccaagcttgaaggctgaggcaactagcaagtatcatttttacatcagatcctatgatgtaacacttgaatttaccatctttcccaagatttgctct

SEQ ID NO: 106045 - DNA, 269 bp, Glycine max
tcgcgagcggcccctttttttttttttttgaagaaaacacagtaatcattttacaaaattgtgtgaactgtacctgaaaacgatggaaagattaaaagggaaaaagaaagaaagaaaaggtgttaagggtggattaaaacccattgtaaaaatctcatccacgggaggggaactcaaatgggaactcggtttcctaaattgaacaaaatccttaacgaattcccccattctcatagagtgaattcgtttcccggtcgctgaaaattttc

SEQ ID NO: 106046 - DNA, 263 bp, Glycine max
gcctttgaagaaacccaagtctgataagaaggattacgacgagattgatgtggctaccgttcagaccgacgcctacttccggatccaaagaatctcgctcaggcaatatggaaaagctacgaatcagggttgaccctggtctgataacggggattactacgagattgatgtggctaacgttcactagagaaaggaagaggagaaggagctaaaggagtttaaagccaaggcgcaacagaagggaagctttggacgttctgggc

SEQ ID NO: 106047 - DNA, 261 bp, Glycine max
cgtcgctccctatctatataatgtaatatgcgactccgtcggtctctataggggtttcgaagtcgtaagctgccgtcggtcatactcgtagcgaggatgatgtctagtaaatcatcgacagctagactaccgtgagtccagacactgacgatgagataggtgacaacgatgagctcatatcacaggcattagcagtagctcgtgcagctcggaggcttctcactcggagtctgtgatgacctaactctcgcgttaaacgac

SEQ ID NO: 106048 - DNA, 106 bp, Glycine max
ctcacttcacacctttcatggatgcaactggaaccgcgtggagcacacaggtactatcccgaaatccagtacgaatattctgcagcacatgggcaacagagaggtg

SEQ ID NO: 106049 - DNA, 256 bp, Glycine max
gttcaatacattggccacaaagcacagaactctgtttagtacctgaataaacatagttcaatacgttcgccacaaagcgcggtcatctggatagtgcctgaataaacgtgcgttcctatggtctcatccatatgcgatcagctgggttttgattgaatatctggttcgcaaaaatagtgtaactaccataacatttggtgggtaaataatgttgaacttgactgtacttttaataccggaaagaaaagggcggccg

SEQ ID NO: 106050 - DNA, 258 bp, Glycine max
ctcgagccgattcggctcgagctttccactttgactgtaccagactcacgcttgatccctctctcaaccgcttccatctgtgctctctctatctctctctctatggacacacatacttggtcttgtctacgaatgcgggtgatggagtagtgattgaggcgttgtatatcacctagtcgataaggatccaacaccgtgtggttcacagcaacatctataacactatgtataccgcaggctgcaacaacggaatctgaa

SEQ ID NO: 106051 - DNA, 270 bp, Glycine max
atccactccctccctatcctctctctctccttcacattttctctctcatccatttcaatggcttctgcttccatttctgatgcttctctctccaccaagaagaaaaggggtttgaatttgtattggcatagttgcgggttcagattcacatagaaggcattggtcatcagttggaaaagcaactaataacaaggtcaacacctagcaacaaaggagcgacaagaatgagaagatcacaatctatcattactacttaaaagaaagaaagaa

SEQ ID NO: 106052 - DNA, 267 bp, Glycine max
attaaatctcaatttattctgtcaacttgaaaaaaaaaaaaagaaccaaaagaggaaaaaaatcaggaacacgacgtcggatgcagaagccagtgtattgattttgttacagcaactgaagcgagaaaaaagcaaagagttcccactctgtactatcccttaccgttcccaacaacatacgaacaacaacaacgccatgtagagacacaacggcttcctttttctccttcggaaacgcttctctttctcactttccttggcttttaa

SEQ ID NO: 106053 - DNA, 160 bp, Glycine max
cttggcttcttcccctggattcactctcaactgagaactgggtccttgaattggagttgaattttggggatttgatatggttgccgctgaaagattgaagctttttctgtgtaagacgaggaaagggcttggaattttgttgagtgcatttggtggtgtg

SEQ ID NO: 106054 - DNA, 234 bp, Glycine max
cattcatcttctctggtttcgattccaattcgctgggggacagaattcgatacagcgttttcgtaattgtgtagtggaatttcggggatctgaagattgatgacaaatagtctggtttgggtaccagtaacaaaaatcaaggaaataatggaagcacatcctactttctcgcattgaaagatcaaagcaactcaataacatggggatgtctggagcaatttattgcatccttgt

SEQ ID NO: 106055 - DNA, 259 bp, Glycine max
ataacgcggatagttctgcaacaaacccctctacaagctcgtcttcatccaggatcctcgaccccgtctctctgcttagcatgtcctctttcatgtgctccaatgattgttgacctgaatacaggagacacaactttacttaaagtttctgtctcagagacatgcaatggaccaacccctccttcacgtaataaatgttctgatggaattacctccttcacaccaactgctgcttgttttaataagtatgggactctgg

SEQ ID NO: 106056 - DNA, 256 bp, Glycine max
gcatactgaggatggcaaatcagaaactcctgcagttaaaagcgatgaaaccccttcaaatgttgatgccgatatagagtaatggttgagttgtgccacaaatatccctgcggaaaatgaagaaaaaaagcacttcatagtaatacatgagcaaaaatgtaaggcaagttttcgaagatagtctgggccaactcttctgcaccgtgcctttgcttgaataatgaattgtcaggggtaaatttatgtgtggatccat

SEQ ID NO: 106057 - DNA, 260 bp, Glycine max
cctagagccgaatcggctcgaggcctgttcctctgcttcaggcaactactcctgcaggttacatggcaaggatcaaacctcacggctctgctacagcaaagcaaaaggaagaagggtccttcaaggataagcgccgcgactgttatattttatttcttgattcttgccttgcttgggtttttcctgtttgcttcgtacagacattggtccagcaggtcaagattgcaatcagaagatcacttgtcagtctccgagggtga

SEQ ID NO: 106058 - DNA, 226 bp, Glycine max
cggctcgagatcttgtgttagatatcccaccatagtatacccaaatagtaccacattgtagccaacatagtgtgtgtgtgcgtgtgctacacattagaaagaccttaatgagaagctggttgcaatgtggtactatttttctatactatggtgggatatctatcttgtgttagatttcgtgatctatttttattttctggcctaaaaaaaaacaaaaaaaaacaaa

SEQ ID NO: 106059 - DNA, 258 bp, Glycine max
tcctctccctcgagcggctcccatggctcgagcggctcgtgcggctcgatggtaaatcatctcaatctggttcctttaagagaagtctgttaagaccaacttctcccaagtcccctgttgcaagtgccagtgcctttgaaagtgtagaaggatcagacgatgaagataacattgcaggcgaacttaaactggatactacgtatctgcacacaaatgggactgttgtgccagaaggtaaaatcccatttgagactttac

SEQ ID NO: 106060 - DNA, 267 bp, Glycine max
ccattttcaaaggcagcgaaagacactccaatcaatggctcttcctcctctctgtactcttcttttcctcgtctttctgttatcagcaacatcaacacaacaagaagaagagttcacggaggagttgctgctgaagcccttgcccgatcgcaaggctctcgcgcatttccacttccaaagcgattctactcctctcgccgccgctgatgcgtcctcctccttcgatcgtcaccaccacctctttcccaaatctatttctcagctggt

SEQ ID NO: 106061 - DNA, 264 bp, Glycine max
atcagcttagggttaaggatgaaataaggaacaagatctcggcattggagacagctctggtgaatgaaactcagaattctacttcttcctttcttcgggttgagaaatataaagaaacaaggctggacttggataaaaagtttgacactcaatatcagcgtcggattgcagaagcacttgataatcacttgacagctgttcaacgggaccgtgaacttagatcacaaatagaagacaggaaaataagaagtgatgcagcttatg

SEQ ID NO: 106062 - DNA, 259 bp, Glycine max
ctaaaagttactccattcaagtaaaagcacaatactatatatatatatattgtatctatatacaatcttcacccgcggttaagccttgcaattttcttttttcaatgaatggttttcgtttgaattgaaaaacccgcaaagaaagcatcgattttccactccggcagggtaccccagaagcaagttcaagaccgtgtgtgtcttctgtggcagcaacagtggcaaccgacaagtcttcagtgacgctgggattcaattg

SEQ ID NO: 106063 - DNA, 220 bp, Glycine max
gatattctggatattcacaagacaccttgtatcctacggtagctgttaatgtaataaagtctccacaagcacaacaattacattaactacttattttcctttattgttattgtataaactatttttctcttgtgtgtaaaacctttggcagagttattataatgtctatggagttcagcagttttcttcaccttactacccatctgctggagcttctggg

SEQ ID NO: 106064 - DNA, 264 bp, Glycine max
ccctcgagccgctcgagccgctcgagccgctactactgcacacacactttcgctctctctcacattgtatacccgccaatccgagccgccgagggatcaccgccttggggaagcgagtcgccaaccagatctggacttccaaccccccctcagctcctctcacttccaggaggggagcaatagcagctgcctacagtagcagcggcgggtcagtgtatgacaagaaccctgatgatcagatccactctggggcggtcccagacg

SEQ ID NO: 106065 - DNA, 256 bp, Glycine max
gcccttttcaatagtcaactcaaaaagcattggctatatatccctatgtggatatgaaggatttgcacgacatgtttttccttctatcattcggtcttggatgtcaccaacattgaatcccctatcttatattagtccgttttgtagcacatcgtcatatctagtttccctggatatgcaaagttataattcgggtgaccttgggccaatgcttagaagcctttcaaatcttcgaagtattttggtgcgatgtgac

SEQ ID NO: 106066 - DNA, 266 bp, Glycine max
attatttcaagtggagtggttctcataaaaaataaaataaaatcaagtaaagtggtcagatatatagacatatagtttgtcttcacgttaatcggatcgaagtaatctatttacgtcgtcgagttgcaagtgcaggtaggtacagtagtattgttgaaaattgtcgaatatatacacatgggaaacgctcctggcagctttcgtcttctgggaaatggaaccagttcttaccattttcaactgggccaattggcctccattagcat

SEQ ID NO: 106067 - DNA, 269 bp, Glycine max
ggagtctacagtgagtactaatcaacagccacccttgaagagtgtagctgcctcagcagaagcttctcagggtactaaagtaaaaaaacttgctataatagctaacagatgcttggtcaaaaacccaaagaatcgcccgaagatgagtgaagtgttggatatggtgactcaggttgtggagtctacagtgagtactaatcaacagccacccttgaagagtgtagctgcctcagcagaagcttctcagggtactaaagtaaagaacaaaa

SEQ ID NO: 106068 - DNA, 264 bp, Glycine max
cttattttcagatgttttgtataaaattcgaaaataacaaaatgttacatttttcatgtacaagtatttaagaataaaataaaaaataatgtgatatttttataattaaaaaataaaacaagaaaacatctttccaaaccgaataatcctattactaactcaaaatattaaagataaaaagtttataaataaaaatttgaagaaaataatacaagtgcatgtttgttgtttcgttggaaacttcaaactgatgttgaattaaaa

SEQ ID NO: 106069 - DNA, 265 bp, Glycine max
aaaagaagaggcagaagcaccattacgaacgttggaaccctcaaacagattcacgctttaatgatcgttaacggtttaacttccaacgttggtttcctccgaaaactcgtcctcaccaccgccatgtcaatggtgggtcccaatgcaacctccgccgtgatacgatatgcactccaaatgttcgctcaaattccccaaccagacaccttcatgtggaaccatacatcagaggctcttctcagagccatgatccagtgcacgcggt

SEQ ID NO: 106070 - DNA, 185 bp, Glycine max
tgtggaagcttggactgattgatggggactttgtcgttcgaggaacgaggataagggctacatgggagtacgtgagctcagttggaggtgggcaacaagggatggtgggtttgtacgtgatttgtggatgcggagaactcgttttgcaccatcgcccgaccgccgtctagttccacacgacatac

SEQ ID NO: 106071 - DNA, 259 bp, Glycine max
tttacattttttccccaaacttatccgatacaatcgagcaaatgcaacaaacgaaaccagagattcataattgcacgttctcttttgttgtctccagctcatagaatattacattaactctgattcattcagaatttcagattcaccttttcttcttctcttttttttttcctctgaaagctttttgcagaaagttgtgatttttccttgaaagatggcatctttgagcatgacccagatcagaactgggaattgtgca

SEQ ID NO: 106072 - DNA, 277 bp, Glycine max
ctgatatcagtgcacctcacacgcctctgttgtgtcatcctgtcaccgacattgttgcacctccgattgtaccatcttgtgaccgacgttgtcgcgcctccgttgtgagcccacaccgccaacgtcgtttgaattgtcactccaatttagaattgggattttcacaataacacgttttgacctcttgcttagaaagagaagtgcgctaagcgcaattccgattcgagagaggcttgcgctgagcgcgaattgtcgcactgagtgtcacaagtggact

SEQ ID NO: 106073 - DNA, 274 bp, Glycine max
gttgttaataataacagtctctggttgctcaacatttttccttcgtctctaattacgtctttttggcggttggtatattgtgtggatcttgttacattggtaccgtccttttgaattctgatagttggcatgtttttcggatcttgttacattggtctaactttcatacacgtgaaaaatatgcaagacatttctttttgtggttgaaaagctgtgtggactgtatagtggcatttgtggaggtgaataaaagtaaattcttaaaatttcattt

SEQ ID NO: 106074 - DNA, 273 bp, Glycine max
ctcgagccgaaaggattcaacctttcccaatctagcacaaggttgcactgtgcacttgaaggcaagtatctggtacatgctagttgtcatgatttgataggtggagctgatgcacccattcagcatctaagcttctcttgtcaaataccaagtgtaactgggagggggtttattgaggtagtatcaattcatcatactccaaaagtattctgagcatttgttctttgggtttttcatttcagcaaagtgaaacatggtttaatttcattttgt

SEQ ID NO: 106075 - DNA, 278 bp, Glycine max
ctcgagccgatgagcttaagtgcagccatttttattcaacactcattggagtaaggataaccttttcaaaaccttaactaaactcttaacagaaggagtctctagatttcactttggtgaagctttattgtcatgcagtaatgtaatatattctgtctgtttctttattggatcaaagcataatgccctggatttgagcatataatctaataatactaacaggatagtaaaagttgctggatattaattttgtggaagattacacacttgtacatatg

SEQ ID NO: 106076 - DNA, 266 bp, Glycine max
  unsure (1)..(266): unsure at all n locations
ctttgttgcattccacacaacatactcacccaggngcgagnagagacgngngggtgttggtttgattctgnagntactcncnatgatctcagagtggaggtgaatgaagatgtgagatgtggatgtgatgtgagaaatattgaagggtaagatagatacctcgaaagtctcatgctccactaacgccgccgcccccgncttcctcctcgagaatcgcgacttcctcatgctcctcaccactccgtcgncgtcctcatcggctgcgt

SEQ ID NO: 106077 - DNA, 108 bp, Glycine max
gagtctctctcgtctatatggcagggcacgtatcttttagctcttgttctgtcttatgatccatttcagaaggaacgagcataacatagaggcagcaggttctagaag

SEQ ID NO: 106078 - DNA, 146 bp, Glycine max
agaaactggagatgggcaagaaaggcccaattgcttattgcttctgctcttctcttactgcaagactctctggtcaactctgctgaagcaagctctgtgcacattgtatacatggcagataagatatatcacaatccacacaacat

SEQ ID NO: 106079 - DNA, 171 bp, Glycine max
caagacctagctctaggcctcaattagttattatattaatttggcctacgtagttgttatcacttgtgtagtagttctactccaatggctgatttaggttcagcctctaccaagagaatgtggtgcaccgttccagaaagaatgcagctccacttggccatgttggccttg

SEQ ID NO: 106080 - DNA, 273 bp, Glycine max
atcgatgcatcacttcgcttcactaatacatcctgagcagacgtgactcagaacacgtatgtgtgctcagacgttggggtcaaggatcgtcgtgaatgggacttacacggtatcgttgtggttgttagggacttctcttatcctcatgaggacgtcatcggcattgagtttcacgacgtcagtgtctcagaccaaggtgggctgcagtatagactcttcgacacgcttcagcgatctgtcagcaggtcatgctcgtcagtagacgtgctggca

SEQ ID NO: 106081 - DNA, 153 bp, Glycine max
gttgtaacaatggttcttcctccacactattacaatttacgaggattccgcagtactagttagggagtagtcaaaataaagcggatcctagctttgcattatgccataatgcaaagtgagaaatgtcaactatgatgataattaccatcatgt

SEQ ID NO: 106082 - DNA, 199 bp, Glycine max
gtcggaaggaagagaagagtgtgtgtgttgtgtgtgagaaagaacctctctctctcatttgtttcggtttggtcgtgcccactgtcctgtttgtttcggtttctgttttcctttgaaagcagaagaatcaaatcagacccatccttcagcgttcgttcattcgttcaattcaattgaattcctttccttcggttagtct

SEQ ID NO: 106083 - DNA, 272 bp, Glycine max
tcaaatttaactagagtgactctgataaatatatttttttatatatctgtttagatattaaatgcagacaacagaagccactccaaaatatgttgcttaccacaacctttttattgtacctgaaattgaagaagtctcagtattccttgactatgggcactacatttatccttttttggtcatgagcttcaaagtttagattagtttcttgtttatcatttaatgcatatggtcactataacactgataatagatgatgattcattgttttt

SEQ ID NO: 106084 - DNA, 290 bp, Glycine max
cccaacttgtaagttactccatctaacgcaccgctttgaccctttcttcccgtcgccggttgccggcataacatgttttgacggcgcatgaattccatcgaatcatgcggcgcttccgtaccagagatccggtcgttctccgcactttcagatgattctgtctctgaagccggaaatcagataacgagaaattccttattcttctggtattgccggaatttcaaatctttgttcctgattctactgcaattggtgccataactctatttgttgtatctctcttttttatg

SEQ ID NO: 106085 - DNA, 287 bp, Glycine max
aagctctactcagtggactactggtattgctgaggttcagcttccaatcgaatatacattaaaaaatatcgaagaaacagaagccgccaaaaagcttctacaggaaaagaggcttatgggtcgaacaaaatcagatttcagcattccatcaagttacagtgctgattatttccagcgtggcagggattatgcggaaaaacttagaagagaacatccagagttgtacaaagatagaaatcaccaggatgatagttctggatccaagaaaaatgattccagcactgatg

SEQ ID NO: 106086 - DNA, 290 bp, Glycine max
cttcggctctacaattctcccagtctctccatctgtattttatatcctgtaaattttatggctgccgtggaactacaagaaatagaccacatggatattcacccgacaaacatttagcaacatgtatttgagaaagctacccctctatctatgtttcgagaatttcaattctcaacgagtgacaaggatagaatggaaatagatgataacgactttcaactgtttctggcggataaaccatatgtttcagatttaaatgaaggatattttgcagtgctcatgaacgactt

SEQ ID NO: 106087 - DNA, 267 bp, Glycine max
caaacagtgagctgagcgcaaccagtggagagtcaaaagtattcaaaatgcgtagaatttaaggaaattatgaggaggtgctgaacagtcttagactgttgattgtaaaatttggacagaatgtaggacatttgatgttataatattataaggcaatttatgctggccgcttcagggattttttaaaaaaaaaaaaacaaaaaaaaaaaataaaactataaaaaaataatagaaatacctgaacataaagattaaagaggggggggg

SEQ ID NO: 106088 - DNA, 273 bp, Glycine max
gttttctgtgtctacccaatgaatccctgaaccggaagaaaaatacattcttagcgcctgatcagctggtttgcatttgactacaaagatcagaactaacaaaacaaactccctcatttcagaaatgcaagttaaaagtggaacaaattcacatccacattcaaagctaccaatcgcagccagatctcggagcgccccttctctcacgggtttcggagaggggaaaggggaagaaatcagaaaagatcgcaacatctcttcgattcgccatcg

SEQ ID NO: 106089 - DNA, 168 bp, Glycine max
acgcgtggcgcctcgcaaccgcgctgcgtgacgtccacgcgcaaggcttcgtccactgcgacgtgaaagggaggaacgtgcttctctccggcgacggcgaaatggcgaagctcaccgacttcggcgcggcggatggaaattcgaactcctctaccgcgcgatgttcgc

SEQ ID NO: 106090 - DNA, 277 bp, Glycine max
ctcaattttgctttgtaaaccaactcacacacgcagatccaccgattcgtcaacgcgtaatttttggaaggaaaagcccacccccacccaggtgaggtgagatgagatgagatcccttattattgtatgatctgatctgaataaaatgaattgaatgttaattgtgttgagcagtgatgtgcaatgcagagatcacgtgacgctcttctacatagaagaagagccaaaactgggtctggctataaactctctctctcattgctttttcttttgtggc

SEQ ID NO: 106091 - DNA, 289 bp, Glycine max
gtggaggcatgtgcagaatatgaatctgaggttagcagccaggttgcttccaatgtatctattcaagaaacctctataggtccgtgtagtgatagcctcaccaacatttccaacatcacaaatccaatagggattcatcctaattctgatgctatttcacttgacttaagtctcaacttcaagaatagtgagccagggggaagagattcaataggattctcattctcaagcactagtgagagcagcaatgaacctgcctctcaaactacagcagcaaccattccacgag

SEQ ID NO: 106092 - DNA, 140 bp, Glycine max
cttgggttttgcagtgatggagatgggaatttatagaagccattactgtattctcaggggtgttaggtcatatattattcaagaaagtgttgcactagcaattattgttgatctactgaatcacgtggtttgattttatc

SEQ ID NO: 106093 - DNA, 214 bp, Glycine max
caaagattacattgtctatatatatcaacaacagaggatatgtgacttatttctggtgtctttgtaccttttttgttgaaatatttgtagccagtaaggatagtaaggatagcttactaattactatcaataataagttagtttgggtggtactgagttcaaatccgctcgaatatatgtcatgaatgaaaaaaaatggttgacggactttttt

SEQ ID NO: 106094 - DNA, 280 bp, Glycine max
ctgttactggtgtttcaaggagccaagaagcatgtgaaaggcagtttagcaatactggatctacactgaagagcaacttatttgatttgaattctgaatgtgcctctgatgatgaaggacaggttaattgtgatgggcttgcttcaagtgatcaagattgtggtcttattgcttcaaatgatcaagattgtggtcttactgcttcaaatgagaaagatataattaatgaaagagaaaagcttaaggagactgatgaatataaacaagcaatggaagagga

SEQ ID NO: 106095 - DNA, 279 bp, Glycine max
ctcctatgtagattgccatatgcatctcagcacttttcaatgaaggtttctggtattggaattggccggcatgaaaaattatcgaatgaacgaaacattgatggaagattttggttggagaaattttttgtagatggaacataagatttttggttgacaaggtaagttttagttagtccttttgcaactatttgcttttaaattgtgaagtaagacgtggaatttttatacatgtgatgctgtaagcaagcgtgaacagctcaagtaaaaaaaaatacg

SEQ ID NO: 106096 - DNA, 180 bp, Glycine max
ctcccaactaccaaaacgcgcaacacgttgtaattagaacgacacctgaactaatgggcgtatcagcgtaaacccgactccggacccggttgtgatccgccaggtttgggcttcaagtctcgagtccgaattgcggctcaaccgcgaagtcatcgaccactatccttttatgacgatgga

SEQ ID NO: 106097 - DNA, 281 bp, Glycine max
caacattgattttcttgtcaacaactgagataatttactttatccttagaggagctggatcccctccctcactttagaggagctggatcccccactccctcttactttcaagaaggagacttgtgcaatgaaaagattgcttcactattttttggcaagaatatgaagattcgtcacatccttttggtgtggcttgtaagactaatctctaaagtgaattgctcactttagaggagctggatcccctactccctcttactttcaagagggagacttgtgca

SEQ ID NO: 106098 - DNA, 154 bp, Glycine max
ctaatatgcaaattaacttatcatcaaggctagtacagatacaaagtcctggactcaatcccatgttcaattcccatcttaggtagttctcaaaccctgttatcatcacaagtcacagctgcaaagaaagtactagtaaccattctgtctctct

SEQ ID NO: 106099 - DNA, 102 bp, Glycine max
cgactaacagcgaaaagcgataccaacttctatactggtatgctacgcttcttcttctgcctagaaacacactgagagagtagttcactttctgtattgggt

SEQ ID NO: 106100 - DNA, 272 bp, Glycine max
cttcagtattcacacatgatgcgaacatttcactttcaaggctagtgatgctaataggctcctccaaatgattgtcaccagaatttctcagagtaacttcaagatcattaaatgtgtccaaccttctaagtagagaagatctttcttgaaacattttcactaagttacaatgtcttttcttctccataagtttttgagagtgtcttgcatttgcatcgttaatgctctatttttggttctggtttcaggtgcactggccactgtctatagtg

SEQ ID NO: 106101 - DNA, 269 bp, Glycine max
atagaagttccatccaattatcaacatcctctgtatacgaaatgctaatgctgcctttctatattttctcctcttggaaacaagtagattcactgggtttgttggttccttatttatctcgtttcccacgtttgtctgttcttgatctgagcttctgcaatctacttcaaatcccagatgctattgggaacttacattctttagtaatattaaatttggggggaaacaaatttgtgatactacctaataccattaagcaactttccgaa

SEQ ID NO: 106102 - DNA, 277 bp, Glycine max
tggggttgtaagaagaaaaaattgttggaggaaatactctatcatgacgaactgtaacacgactatcatgaagaactgtaacaccatatgtggaaagtttccaattgtaatgctatggtcatataaaaccatgcatggataaatatgtgattcgccaaaaaaaaaaaaaaaaaaaaaaaaaaaaaaaaggggggccccccaaatatgtcccccttccccccgggaatttattcggggcgggacctcggggggggaaaatttttccccaaaggggggg

SEQ ID NO: 106103 - DNA, 274 bp, Glycine max
ggcatgtccaacttcttacagctatgcttatgatgatccaactagtattttcacttgttctgggacggattatgtggtagccttctgtgtttccaggaaacaacaggtatgctcttatcatagtaacaagcttcactgcattggatcactagggttgaaatcgctaactggaaggtggtggatcgtgatgatgataacagtgttttcggtgcttagtttgtggattggattctaggtctagaccatgatcaaagttgattccactataagagcc

SEQ ID NO: 106104 - DNA, 269 bp, Glycine max
ctcgagcgaatcggctcgaggttcaacagaagaggtccttctcttcatcagtttgcatatgatcatcatggttcatcacctgaccatcttaggatcatatctgaatcccttgttggaccggtggttcaacccggttcagcagtaccctttggcctccaaaccgagttggctaagatgactgctcaagaaatcatggaggctaaggcccttgcagcttcgaagagtcacagtgaagctgaaaggagacgcagggagagaatcaataacca

SEQ ID NO: 106105 - DNA, 281 bp, Glycine max
gttcctgtcttcctgacgctgattatgtttggtgacagatctccctgactgcgcaacctcgtttcgttcccatggcttcaacccttcagaaactgcttcgaaaaccattaccactaccacccttcagattcatcactgccctcaaccctccgcaaccccaaaaccaaaaccccgttctcactctcactctcaaccctccccaacaatgtcaccctcaacccttcgatgattcccccaccgtgatctttcccagtttcccctttgggttctccccaaaaccg

SEQ ID NO: 106106 - DNA, 269 bp, Glycine max
ttgtgtatgattggaaatctttaaattcacttgatgctgtggtaaacccgaatttaaagatttccaatcatacacaatattgcaacaacaaaaagaatttaaattcgggttttccaccccatcaattcaatttaaagatatgtcctcttccattcaaaaaaaaaaaagaaaaaaaaaaaaaaaaaaagaaaaaaaaaaaacaaaaaaaacaaaaaaaaaactccaaaaaaaaaaggaaaataaaaaaagaggggggcgccgcttttttt

SEQ ID NO: 106107 - DNA, 259 bp, Glycine max
cggctcgagggtgcttcagatgaggatgtggtggtgcagatcactggagagtacagatgtgttcaaaatgccctatataaaattacttctagaatcagggataatctttcacccaatgaggtggttgctgaagcaagcccaaaatccaattggaaagtgaataaggatcctgtaaagggtaaaccttttgcccgtggaaaatctgcttttccttctggaaggtttctgccacggaatgcaggggtgcatgctgaaacaa

SEQ ID NO: 106108 - DNA, 267 bp, Glycine max
gcctaacatcacttgttttgggcttggatggcttaacattttcagccattgtcagttatcaagttgaatggttgaactatgttgattgatttgaacatcattaggtttcaattgattgcactggactagacttgacatttgtgatgcataaaaagtccctaatcattacagagaccagtacaaaagctgacaagcctctctttgaggtttgggaacgatctaatagactgtcgtttaactttatgaacacaacattagttgaaaatg

SEQ ID NO: 106109 - DNA, 214 bp, Glycine max
caacttcacaggtgctacatggcttctttgcaagtcacaagacaagctttggcatctgagtctcagagaacaccaccctcagtgcaaaatgcaacaacctccacaaccacaccaattagcaacaacttctccccgaagagtgagcaaactcatgcagtgttgccacataagacaccagacgaggaacaagactcagaggcaaataagggtgtga

SEQ ID NO: 106110 - DNA, 259 bp, Glycine max
cgagcgaatcggctcgagcggctcgagctcgaccatgccactgtctccaccaacacaaacagcctcagaaccagctggaatacaaccacaacagttataattcaccaagctccatatcctttgccagcaatgccacacatggctccacttccaaactcgtccctcgattccgacgccaacaatcatgcatcattgaattcaatttcggcaagaaaagagaagcaacagagccagtcttggattcacttgagagcatgga

SEQ ID NO: 106111 - DNA, 262 bp, Glycine max
acctttggattgtggttgccgaagtccgctacgatatccaaaacacgtcctgcatttgtgcaagaacatgaaggaccctccggtcctcaaacttacaagacgcgtgtgggatatatttcttaccctcgatgactctaagatgatgactgcaattagagaaccatctcaagtaacatttattgccgcagaagttggcaatttcgagtttctatctgtgattatgagcacttatccggatttgatttgggaattgaatacgatg

SEQ ID NO: 106112 - DNA, 259 bp, Glycine max
tgcgaaactccttcaaggattccctcaaagctcttgaagctgacattcagttcgcgaatactctgtacaattctcattgctctttacactctgcaatatctaccaatattttttatttttgaatttttaattttacaatggcttttaatgttgaattattttgattttgattagtttcagacattctgggatatatttgggtggaaatggtaattctatatgttattttttaggaatggagtttctgtttgttataaaa

SEQ ID NO: 106113 - DNA, 261 bp, Glycine max
actggtagtaacgaaagacgagtcgtgactcgcagaaagcctttttccgatcgcaccaacacttgttctccctcccttgttcccctcacacctcacaaaaccataaccaacccttcttcttccgcacccgctaaatgcaacaccgctgctactatcaccaccaccaccaccactaccaccaatctccataattccccaaaccctccctctccctctccctctcccctcggtactttcatcactcccccattcaattctcaa

SEQ ID NO: 106114 - DNA, 201 bp, Glycine max
cttatagatcgcgatctagatgcggtggatcacgtccacaacggcgctatgtatacgtatgttcaggtgagcaacgggagctccgtgatgttctaccatgaagcacagtgtagctagtctggtgaagggaagttgccggatattaagttggacatatggcaatggttatgctaacgagacatgttgggaggatatctgttg

SEQ ID NO: 106115 - DNA, 254 bp, Glycine max
gctaattgaagactacttgtgactgcaaagaagagtgcttttatcttttttcgcaaaaggctctacatctctccctgtgattcatctttttaataagtcttgacttagagcatcactgtatgccccccttgtatccagtcctaatttctgcaattcaatgttttattaaattttattagttgtatagtttagatgcatttccagattgttacacattgctaaacaacttttctcccaaatttgctgtgtgtatg

SEQ ID NO: 106116 - DNA, 251 bp, Glycine max
tttctctgcaatgtaggtaggatgcaggaaagagagaagcacaaataatgtggtatacgtggcaagatctgtattgttcattttcatctacggttcatgtttatttaactctccaattttttaccaatggagaggatccatttcccttgttctcacttttgagggttaagtgcttcaagggttataagaatatgactatgtctattaaatatgattcaattagagatatttctcttgtgaaagataactcg

SEQ ID NO: 106117 - DNA, 251 bp, Glycine max
atcctattgtaaaaaaattgttctcaattttgtttaaagtctttcttgtatgtaattttgtggggggaaattttttcatgcttggtattcaggacttttgtgggtgtacaatttgttaatcctgctatctgtaatgttaaagcggttcattattctgtcttgatcataaaaatgttcatttctttaccttttaagagagacattaatgctgttttaatcaaattaattgccctatagtgttaaagtctagc

SEQ ID NO: 106118 - DNA, 265 bp, Glycine max
ataactcatggattgatgagatggaatcacagttactcaattgccgacacccaagtccaatctctgttcttgagccttctttttcaatggaaagctgtgaatcttcattgagcacagatattactagtacagaaggaagcaagttaagctcatctgttcaagctcacgaagttcatggtttgaatttttcacggaagttctatccttgtgaatctgatactgagttatctgattcagcttcttccacatcagctgggaacccgat

SEQ ID NO: 106119 - DNA, 264 bp, Glycine max
tgagtgcttagttactaaaaagaaaagaaaaacaagaatcaagacatcacacactacgtatcttgaagcaggatctttggtctaagtaacgattctaccgaagacgaaattagtaaaaagaagtatataaaaaatttccaaaaccctaaaccctgaaccggcgcaagccagaacgcggtttggaacttggaaccattacagagtccagagcaatgtgtaccctcgaacccgacgtcatcggcatccgcggcttcgagctacgcc

SEQ ID NO: 106120 - DNA, 262 bp, Glycine max
gttttccttgaatctaaagactcatttgcatcctactgcttgtctatgggcttgacgaggaactaaggacgttatattgtagcattactttgcagattctcatactctaattgcaaggctgcttgccaaatgccaatagggatccgtaagggcttgtatcattgtttttggttttgcatattctagatttggagcgggtatgtgtatgggaagtgtttggttgtctaaatacagggcaaattttgtaggttggaatgggtgt

SEQ ID NO: 106121 - DNA, 147 bp, Glycine max
caacaacaacgtgcaagtgtgggtgtacacgacagcataagcatgttctgtcggtccctcgttggagactcaagaaaaccgaggctattgcattcgcagattcttctcgctcaaacgatgtgcgactggtagcagtccctcttctga

SEQ ID NO: 106122 - DNA, 211 bp, Glycine max
gagaatttcttccgaagctagccaacctcacttcacagtccgtacatgctcgtctccttccgctttggtaaccaaaacacacaccgcataagacacaatactacaagaaaacgaggagagagagaaaagtgaatggttgtcttctttacaactaatatacatttatactttagttgttcagtacttctctattttctgtgcttccacacaa

SEQ ID NO: 106123 - DNA, 268 bp, Glycine max
aagttcagagttctggttcgttctcgtttcctcaaattttgaccactcactatcaccgcgttttacaatccgacattcggccgtgcccaacgattcaaccgaagatcaaaattcttccgcgttctcgattcggttacggttcgacgtggacaattgcttatggcttcatcctcgataatcactcccgaagatgtattggagtcgctaatgaacgacggcacaattgatgccctcagattgaagatcatcaaccagctcaaagccaatg

SEQ ID NO: 106124 - DNA, 266 bp, Glycine max
cgaggagtgagtgagtgaggcgagggttgtttcatttcattgctggcagaacaaaaagttatttgtattgttttgcttgcgagtgtattcgagagcggaaccttgattgaacctgttgcgttgcgttgcgtcgcgtttcatttaaaagcggtgtcgtttctctctctctctctctctcttctgtgttgcgcccacaaatattccaaaaccccctccctctcgcaagcaccgcacaaacccagttcgcgtggctggaatccggtgac

SEQ ID NO: 106125 - DNA, 130 bp, Glycine max
cgagctgaatgccaaactgaaaggtgcatacttgtttcattttgtaatcatcaacctgtttgcttgattattggaaccaactgattttcataattcttcgattttatcaatgaattggtgcttagcagat

SEQ ID NO: 106126 - DNA, 268 bp, Glycine max
ttccatttcaaagatatctctgcatcggtaccatattttggctgcttttcaacaaatatcagatacatatatacatgagtcagaggtattagctgcagatattagcagtcataaatctcaagaaaagcagttgaagcatatctatccttctgcaaaggtagaaaatctcttgacaaatatcttgttactgctgcctttaaatgttaacagtaattgttttgcccttattcttaaagatagagttaatgcagctattaattaataatgt

SEQ ID NO: 106127 - DNA, 143 bp, Glycine max
cacgagagaaagagaaggaaaaagaaaaagaaagactttctcttaatcatcatgaccatgaaagactccatagttctatattcagctttgggaagaggacaccttgtttcaatggtggactaggtaaactcatactaagccac

SEQ ID NO: 106128 - DNA, 264 bp, Glycine max
aacattctttacttattgtaccctccattatatgagtatatttattaaaactttgggtctcgggatgtagatgtttggaaatattccaaagaagtcatggttagtaatcactgaacatccaaagcctgcgtgatagatgattaccagctttacagctatcattcacaagaactgcaaataggcttgctattcaattccatctacatccttgtgggagtgacatttgattggcaaaattattactcaccagatactctcacccca

SEQ ID NO: 106129 - DNA, 268 bp, Glycine max
tatgaatgtatgtaaggaatgagttgaggttaaggttgtgccacagttctgccagttcacgcgaggtagctttttggtttagcttctttaagtctttacttaggtgagctgcgtagtggcggcaaattgtaagtaagaaagtgtaagggtagagtagcggtgtatcttattattatgtaatgtatatttataattaataagccattctgcgtttgttggtagtgttcatttctcctcataaattaagttttagcttgttcaataaaaa

SEQ ID NO: 106130 - DNA, 266 bp, Glycine max
tgggaactcacacacacaaacgaagaaagagtgaaaaaaaaaaacatcaaccaacgacatcgtcttcttcttcttcttcttctttgttcagcttccctaacgttaacgtcgtcgtcgttatcccaaaacaaaacgatggacttcaccacttttgcaaattccatatcctcttctcatgcaattcctccaatacacacttatcgccttcaaccctctccttttcctttccacctcccattttcgaatttaaagcgttcaggtttggt

SEQ ID NO: 106131 - DNA, 265 bp, Glycine max
cccaaacatcagtcatctccttcacatgaacccttaatctgaaactaccttgactccgctctgccacggctgagaaaatagcgaaacacgctcgtcttcacgatcctgcgatccagccggcgtgtccaacgattccgctctccgacgagtctgtgcagggcgaagaattgcgcgattcgtctggaaatcgcgattcaagcacgattcatccccgatacagagattcaattacgattcaggaacaaaaacgagacaacctcctatt

SEQ ID NO: 106132 - DNA, 166 bp, Glycine max
ccgacactcaaattacatggtcatagtgtatacctagttaggcaaatacattatacatctaatatcaaactagttggctcaattctcttcgaatggctttggaggctttgaattcaccaactgcagccaccactccgttccgtggctaccaagaagattaggagga

SEQ ID NO: 106133 - DNA, 271 bp, Glycine max
cttcttcttcttcttctttttcttttcctctctctttgcaagaaggcagattcagattcagatatcactatcttctaatctttttcttccttctttctttctttctttctttctttctttctgcaactcaaaattgttagtcgttcaatcctcacaatatggctgccaataataatattcatgggaacactgaatctgctcaatccaacattgctcctcccgctaagcagcctctacatcctgctaaggctgttgattctcaatctgtact

SEQ ID NO: 106134 - DNA, 262 bp, Glycine max
gagattaattgtgattttgtgagtgagtcaagttcttttattacatagaatcgttttgtgattttgcattccttaaaaacccgtggtttgttaaaagagaaacgttcccgtcatcccctgcgacaagtccccaatttaattaggaatgaatctctaatggcatcggaattgaaggagaagttgcgcgaattggtgaaggccatcgtggactccgacgactactctcttcaagccgccgacgaacccatcgccacactttcgt

SEQ ID NO: 106135 - DNA, 269 bp, Glycine max
  unsure (1)..(269): unsure at all n locations
caaaaattacttacctatcacttgcaatcctcaaaagcactaagccttcaacagcaacttgtcattgcctagagaaaaatgaaggatgttttgttctccctcttacttttcatgtctttttgctccgtatatttaaccacaacattagcccaagcacctgatacagccccatcaaaaccaattgtccaaacactaccccagtcancctcttcagatacctctgattcttcccctgatgacatcatcagaatattaaggaaggccaaatc

SEQ ID NO: 106136 - DNA, 266 bp, Glycine max
tgatgaagaagaggctgagaatgatggtgacacagataaagatgatgatggtgatgatgatgatgatgcatgattttagttgggcaaataatatttgacctgtgcagaaattagaggcatgtgggcatctaatggctaggttttatcttcattattctccggataagttaaggtagatatttggtttgagttgtgaccatcattatagatactcttaattaggtttgtattttgtaccatattagatttaacccgctcccctgtat

SEQ ID NO: 106137 - DNA, 270 bp, Glycine max
cctttttcctcagtggaacaaacctcagaaaaaggtcttctcttctacctttccctcactctcagaatctcacgattttacaaattaaatattgtttaaaagaaagatgtcaagtggagcaacacactggtgttatgcatgcagacagccaattgtgcttgatgggagagatcctgtttgcccttactgtgatggaggatttgtgcaagaacttgacgagttgcgaggaattgcacccaaccataaccataccttttcgtcacagtcagg

SEQ ID NO: 106138 - DNA, 264 bp, Glycine max
gcaacgcctactgtctatcaactacgcttaagcagaaggtccagtcaaggagttcttctctccaggcaatataaatggaggattcattggagaattggatttcacagttggaaatggaggaatatgatgatgtgttgaatgaaagtcatcatggctcatttgatgagcaagagttcctaagagagatccttgaggagcagccagaaaacttgtcacctcaaagagaaaacatactacagcacagccccaccaacagcactgtgt

SEQ ID NO: 106139 - DNA, 262 bp, Glycine max
gttttcaccctgaagctttaggcagtggtgatgcttctaaaccatctggtacatataaaaatgccattccctcagtctctggttcatttgttcagcaaatgcaactcaatgttgcagctgttggaattccagaacattctggttatgcatctcagcatgtaaatgcatcctttgtgaccggttcatcacctgatagaagatcaattgtttctgctagtgttaatgaagctcctggtagtaaaccgttaccattgttgtcatc

SEQ ID NO: 106140 - DNA, 245 bp, Glycine max
taagatatgaaatagattcaatgtgcaactgtgatggaaacgagcaaaccacgacgtgtcaataagtaaaaagaagtaaccgagtctctttccgtcagtgtcagatagcaaacgtgggagtgggaggccttatattcattcttttcaattcgttcatttttcgaaaccctaacgagatgaacccctacgacaatagatattccgacgccgcttcttttcgcggccgtcgcagtgatttcgttgga

SEQ ID NO: 106141 - DNA, 232 bp, Glycine max
agaatattaacaggggctgctcagtgctcacttctaaaaactgcaactgcaaaattctctgtaactaagccaaattgtgttttcaatttcgtgaattcaggttcttttctctaaaggctaaagtgatttaagttcaaatggagcagtatgacattctagaacagatcggcaaaggtgcatttggttctgcccttcttgtgagcgcaaagcacgaaaagaaaaagtatgttct

SEQ ID NO: 106142 - DNA, 228 bp, Glycine max
tgaactccccgtgtttggtgctgttcttcatcatcatcaccatcatcatgtttaacataccttcatctctttctgaaatctgcctcacccactttcgccttgcaatctccaccgcggatccatggcccttctcatgaatctcaccacacgctaccgaaaacctgcaataaaaacctttttccactcttttttatactcctgaaaagtcccacattgtttagaaaactc

SEQ ID NO: 106143 - DNA, 228 bp, Glycine max
atttctgcactttgttgaatatgcaggggcaaggtttgatttgtcataatgtgtactgctgtttagttagacttgaggtttacaagctctttctactagttcatgtcttatttgtatgggtttatattggtctagattgtagcttgttggttgggtaaaatgtagttttgactttaggtatcttattggaagtagaattataggataggcagttaacttattttttat

SEQ ID NO: 106144 - DNA, 201 bp, Glycine max
ttatgttggttgctctacttaagtgccccccttttccctcatagcatttctttcttgtcacacaccctttgcttcaccccttttttcagtttttagagagaaggagcataaggaggagaaaaaaaagaacaacaacacatacatatattggtcaagaagaatgggagataacaaggaccatgatttcttttcccacaaatt

SEQ ID NO: 106145 - DNA, 310 bp, Glycine max
gcaagtgactgcaaagaagcagaagagagatgaggttgcagaggagcaaaggattatggatgaaattgtttcagatgattccttcgcagattttgaaccaattaagaattctgaagctaaaaaagactccctcagtaaacaggagaagaaaggaaaacctgatagtgctaactgttccagttctttggagtcattggctgatggttctgaggaggatgcagggaatatggatattgatgagggttataattctgaagaatgtagtgaaggaacacaagagaagatgcaagttttgcctgtaaaaagttca

SEQ ID NO: 106146 - DNA, 169 bp, Glycine max
atcgtatttaaagtgtatcagtgtgtgttgggtgagtgaatagaaattgaaaatcttgatgattttgttgaaccccagattttggcatggaaatagccttatcgcttcctcttgagcgttgccatgttcatgttgggacaagttttgggtcgataaccccaacgttgtc

SEQ ID NO: 106147 - DNA, 318 bp, Glycine max
gggttttgaaagggttaccgatcagcgaacggatcaaggaggatgaagatagcggtggaatggtgcatgtcacggggatttagattatgtcgattagaattaatctataatatatagtgtgcttacaattgtatagaaccagctcctttgaaaagcattatctaattggtttactgcagtcagtggaaaaacaaaacttgtcagagcttggcatctacgtgcatcccgtttttggtaggatgggaaatggattgagtatcccaaagttggagccggtgacagttctacccatgagggtgatacacctcatgaaaaacg

SEQ ID NO: 106148 - DNA, 300 bp, Glycine max
caagcagtggaactgttctttttggaactaagcatagagtgaaaattccacctttgccactgccaccaccttcatttgaatccaaaacatgtgcttctgattgtgctgccaaaaccaatgattcgcaaaattttgcaacaggtcttatgactttgagtgagatggagctttccgaggagtacacgtgtgtgatagcacatggacctaatcctagaacaacacacatattcgaaaattgtattgtggaaagttactgttccctgcccaatacccccaactctccttcactcaatttcctta

SEQ ID NO: 106149 - DNA, 141 bp, Glycine max
ccggtgccgccgccgccaccagcacgaccatttgtgtcactctccgaatggcagccattctatctccaatccgaaccctcaaattccgtgctcccaatcccaaacctctcttctctgccaaaccgcctcccatctccacac

SEQ ID NO: 106150 - DNA, 252 bp, Glycine max
tctgctataaagaagctcattagttctgttagtcctaattcacttaaatctattcttgagtatgctcattcttggtatttgggtggcaagcagcaactatggggtgcagctgctcaggttctggggctgctgattgaagtaaaaaagaaaggatttcaggaacatataaattgtattttgcctgtgactaaacacatcttgcattctgccgtagatgcagttactaacaggcaagagggcttttctgctgaa

SEQ ID NO: 106151 - DNA, 258 bp, Glycine max
gcaggctgccacacccagtcacctcaccactggtatgaatcccaaatcctaatgccgagacagccaaagtaaaataaatcagtaaacttcgagatcctaatcatcctctatttaatttttggactctgcatctgtggcagcaggaggcaatgggtttatggactctgaggagtcagtaagatcatccaaggtcttgcaaggtcaagaaaatacgggttttatgtcactatattatggatgtgacaaagtaactaagca

SEQ ID NO: 106152 - DNA, 260 bp, Glycine max
caacaccaccaacggggtctaccacacggattgctatgatatcaataatcataataatcataacaattactacaataataacaataatatcatgaatcccatgcacatggcatatcttaaccaaccaattgtggccactgcagacaacatgtttctgtggtgaacaaattaagatttcgtgctagtgtgtggttctgatgggagctgcgtcacggtggaatcatgcatgagtcatagtaacgtcaatattagtcgtacct

SEQ ID NO: 106153 - DNA, 243 bp, Glycine max
ggagtcatcacacggagtccgtctaatatccgcattctctgaggtgtaagaatgtggctatgagaaactacgtcagcataagctgctctcagccatcatgcagatggaatcagtgtatctgtcgacaggatcagcaccttgttcgggactgtaaaggttcaagtggatacctattggcaactctggtatggtagacttgctgagaagtaaaatcttggcgctgtgataggctatgcagcaggc

SEQ ID NO: 106154 - DNA, 260 bp, Glycine max
tcaatagcaagttcagacactgtcagattgtcatgcaaagtgtacgagttcacacgtgatgcatcaataacggaataaacgggagattggtcgacttagcttgtgtatctatatcccgttgaaattggaaagcttgagttcaatgctccagaagcaaccaatcaatgcttgctattgggaaaacgtgtgtataggacttttcccatacacttagtcgctgtactgattagtactaatttgagtgcgaagcagactctaga

SEQ ID NO: 106155 - DNA, 233 bp, Glycine max
cttttgccaacttggagacatatcgtgattcgtggaatgatgatattgatgagaagcttcaggaggcccttcgaagtccttacttcactcaacttgaacaactttctctgtaaaactcgaattaattagtaatatctcgtggggttgtgtaacttattcttaataaaaatggagtacatacaaaattgtgatatggattgctaatttaatcttatttttatttgagataagtt

SEQ ID NO: 106156 - DNA, 243 bp, Glycine max
gttcaattaaaaacaatgatgaagaattttgcctactacttcagtcaaaaacaacaacatcaacgtttttgtaggtttttcccacacagccttggattcttggttcgttttctagccttccatgtccaccccttctttattcaactttgttattttgtgattctttctctgcttggttacctcggtctcaaggcctccaagccaaggaccccccttagaccaaatgacttggacctcttttac

SEQ ID NO: 106157 - DNA, 245 bp, Glycine max
caatagagatgaattaagcaagtctgatttccggtggaggatggcatctcaggagactgtgcacggcggctgagattcccgctagaaggctaaacctctatcgtatcttataggcgctggacatcaccggacgtaacgtggcgctaacgctggaccaatatatagtggaaggcaaagtcatcagagaaccagtagtcgagcggtgcgtcgagcagatcagaaagtatcgtcgattcaagcaagga

SEQ ID NO: 106158 - DNA, 227 bp, Glycine max
atctcttctcatcttctcgattctgacctttaagattagcattccgtgtcaattgagcaacaatttcatcaccagtgcgatattttagattagcattatgggtcccttcattgctaagaatttggcttgctagttcatatacccgtatctcgtttccaagaaggtgtcatcagagttgttgaccaagcagttggatatcatggtatctctggtctctcgtcgtactg

SEQ ID NO: 106159 - DNA, 222 bp, Glycine max
cttgacgcgtcattgacaatttaggatgttaaggaattaggttcgtcttcagcgtctgcattccatgatgacgcatttccatgtcaagtctatgttctgacctttcagaccagcttctacgttaagtgtccagcatgatgatgctcatgtgcttacgcagttgcgtcgctaaagtgaccatcacggcttaattcttggatattggtcgggtcatgctggttg

SEQ ID NO: 106160 - DNA, 223 bp, Glycine max
atcgagccggaatgtctgagttcttagtctgacacctggtttagagaacctttgtatcatcgctgctttctgacactaagttctttgttggtggtgatgtctcgtctgaggccaggaatgaagctccaactggctcagaacgcttggcagtgggtcttcaacaaagtgcaatcataagtccagaaactcaacattctctgagccatcacagccagcttcaaac

SEQ ID NO: 106161 - DNA, 249 bp, Glycine max
tgaatctctctcacatattattacatcaaggatattgctcattcatcattgcttgcgtgctcagcgcaaggacgacgaagaagcatttaaaacgtatcgtcgtctaccctcctccgggtaacatcgggaacaaccctccaccaacctactatggaggccatcagtcagaaaggcacgtgtccgatgtcttcaattacagcaactactccgcttacacgtctccaccagcttttcataatcactagcatg

SEQ ID NO: 106162 - DNA, 267 bp, Glycine max
aaaaaaacagatgaactcgtttgctgcttaggatcatcaaattttctatagtgttctctgctaaaaacatatgtgaatacgtgatcaaggttaatgataaggataacgaaggaaaaacaaagatcaggtcaaatattggctaatgtggatggggcattcatctatgtacaagcgcactaccttcgagagataattcaaacatggaggacgtggcagaaaactcagatcttttagacatctgcctggagaatggatcctcaaatcctt

SEQ ID NO: 106163 - DNA, 261 bp, Glycine max
tctcgagccgcggctcgagggaagacttattatcccatgcaggcttggttctcattgcattctttgtcacctgctgaactagtccctgccctggttgacaattcctacttccactttgtccttgcctcagacaatgtgctggctgcatctgtggttgcaacatcgcttgttcacaactttttgagacctcagaaggttgttctgcacataattacagataggaagacttattatcccatgcaggcttggttctcattgcat

SEQ ID NO: 106164 - DNA, 261 bp, Glycine max
ctcgagccgctccagccggaagatgcatggctgcttcctggcgcattagatcttcccggatccagcatcgactctcactgacacggccgacgacactacatcggcagatgattctcagcctttccctgtttaggtgcaacaccttcctgatgatgatcagggcattcgtgttggacatagcactagcggcgcatgtccttctgcccgctcggtcccttatccaccgatgctctcagcagcgactgtcccttgtgctacgat

SEQ ID NO: 106165 - DNA, 169 bp, Glycine max
gacaaacacatggctttgtacaatcagcaaaccgtcgattacaccagcttcaatcgcgtcatcgtcgatgactgtggcacaggatagactacctacgtgtaaaggcatctcactggtggattctcgtacaactgatggaccgtaccactggtgtggtggttcatccgtt

SEQ ID NO: 106166 - DNA, 201 bp, Glycine max
gtggttcaacggattctctgtctgcttcttcactctctctcgcttcaatcgacaccagaacgcatccatgcgcagaacatccttcgtcagtggccactggacatgcaatgggaccactccagcggtatcataagattgtaactactcttactgatgctacagtccctgcgacgacatgtcgtagcaagttgctgtgagccc

SEQ ID NO: 106167 - DNA, 180 bp, Glycine max
tgcgtatatttgagatgaaagtctatccgcaatttcgaggtcttgcactctatcacagtgtccggaacaattctacgaatgatgaccaataatgctcggtgtatagtcgagccctcatgagcagaagatacacggatctacatactaagggtgatgttcaacagctttgccacaaagcag

SEQ ID NO: 106168 - DNA, 262 bp, Glycine max
catttctgtactactgaaaaggtcaagcagtagcaaaggacatgttattcagggcaggacttttactgccacgacgctatcttatgatgatctgtcttttgcaagaagcagcattaacagtattagaagctcaactggacgtagcagtcattctaccacttcatctgccgatttcagctcagcaagacattctgattttcgtgtccaaaggcagtcaagtggcaggacattggatgtagactatggatatgatgttacgatc

SEQ ID NO: 106169 - DNA, 251 bp, Glycine max
tgctttccctctaaatacacattgtcccttcctctcgtcatgtcatatacaaactcacaacacactttgcatgctccgtcactcttccctgtctctcacatggcttcccggacgctaactttcatgtccctcgtctctctgcgcaatctagtacccggtaacagggtctcccagccaagcgcagtttccctctcaattaaggacggaaggatttcccatccgatagatggctgaccaggtgatgtcagctt

SEQ ID NO: 106170 - DNA, 233 bp, Glycine max
atgaaaatgagtttcatgaataatatgaataatagaatcagaacatgacattagatgtttagatttttggttgattatgagctcattgtttacattagttgatttgcataatttccatttaaatgagttcaataaaacaaatttgacatcttgaatcattacactaatgtctaccatggtgtcaaacgaataactgcaggggaacgggcatttacgcattgggtaggcccggg

SEQ ID NO: 106171 - DNA, 186 bp, Glycine max
acgctccgatcgcatctgtaacaatggaagcgtgtcatgcaactcttggtcgacgagacgctgaacgcaattcggcaaaactaggccgcggagacattgagtaaagactcttcgggatcagatctcacgcagggtcacagcaccaccgagattgcgggaatgagcaagttcgagagcgcaaatgag

SEQ ID NO: 106172 - DNA, 216 bp, Glycine max
acaatgtggcagaggaagttattgtgaaacataattacactacaacttgttcagcgttatattggataatcaatctactacaggtccctatcactataggcagcaactttttatgaagtcgtgcttctatactaaggtcagagtgtgatctcatcaaacggtgatcagcaagcacgttggcatgtacaccaattgattctatattgcatgtatggc

SEQ ID NO: 106173 - DNA, 178 bp, Glycine max
ctctgcaactataaatacgcttcgaacgtaacgctgatcacaacatcatcatcaacaacaagcagatcaatctctctctctctctcaaccataacagtcatgggtttgcaggaggcttttgacccgtctgctgagacagcaaaaactgtgccaccgactcaatcacacgacgccttgc

SEQ ID NO: 106174 - DNA, 221 bp, Glycine max
cttcatccatgggaggatttgagtgtcattaggtgcacaggtttatgtgaggtttactcattaatctggctactgtatcaattctcaaaagaaggtatataatgaatggttctaagaaatactcctatgaaggttgctaaacctaactccgatgaatcttggacggatccatttgattctaattctgacggaatggatgccaaaaagtatcattcctctag

SEQ ID NO: 106175 - DNA, 261 bp, Glycine max
ataacatttctctcttcttctctcacttccttttctgattctctctctcaccctttgaaattctatcaattctattttagattctcaattctcattctcaatttgttgttgtttttggttcactgggttcaaattcaagcccaattttggttctcacttctaggttttccaattggagtgatttcaatttggaggggaattttttggtttcaggaaaattttgggttttcgattctcgggacgtcaagttgcagttgtaaa

SEQ ID NO: 106176 - DNA, 162 bp, Glycine max
ttcggctcgtgcgcttattagatctcttcttccaattcgcttctgttcatgtcattatcctaggctgcagatggctgcaggtaccagcatgcatacacttcactattgtgaacgcacatggttccctgaggggcaaagtaggagatctcgacttcctacaat

SEQ ID NO: 106177 - DNA, 181 bp, Glycine max
gtttgcttctttgaaaagactgaacaatatttgtgtgtaaaacggttgaccgaactggatcgaaatgaaccgatccaaaataaaaatcaaactgttttggaaaaaattaaaccgaactatctttcaaaaaacagttctgttcgaatcaaatcatataattcgatccggtttgattttttga

SEQ ID NO: 106178 - DNA, 202 bp, Glycine max
ctggaattttcgtcattcttactttaccttccttcctcaccttctaattctgcaacaagttccaaactttctaatctcaccgctccaaaaattcttttatggttacccatttggctttagcctctgcaacagagtctcagatctctgcattccagttcccatggctggtcgctatgccaataaccccttcgttgaggaaaaa

SEQ ID NO: 106179 - DNA, 176 bp, Glycine max
ctttagggcttgctgctatagatggggttaggaggtgctgagcatggaaaagtaatggtggagtctcaggatgtgtgtaaatcaaaggggaggaagcagaggaagaaagaggatggggacgttgaagtggaacaagagactgggtgtaggtttaggttaaagttcattgggagctg

SEQ ID NO: 106180 - DNA, 182 bp, Glycine max
aagtggctcgaggaaaaagcttctcaatagagtttgagggagaaagattcattcatgatcattgtatccttttgcccttcgtaaccatcaagtttctgattctgtcttttcacttcctttcgctatcgtcattcttctggctcttgtcaactatgggctgtacatttttaacggagtagctc

SEQ ID NO: 106181 - DNA, 261 bp, Glycine max
tatcacagaagccatatgtgtatgccagaatattagacttttgcgtaccctcagcgaagtacaatggtcgatatgatgaacacagagaaacatgtgcactagatcatgggattgctggtcactacgaaatcgatgcatcgtcaatctcgtacgcccgtgaacgaggaatcatcgtagaagctgaacgtccagatggcgatcgagattgccatcgtgaacgagcgctcgaatctaggcggcaacgagatccgtacgagcacg

SEQ ID NO: 106182 - DNA, 273 bp, Glycine max
aagaaaatgaggtgggaaaaggttgaggtgaaggcgataggcacaacaacagagggtggtggcggtggagggccagggaagaggtggggtcacacctgcaacgccgtcaaaggtggcagacttgtctatgtcttcggtggttacggcaaagataactgccagaccaaccaagttcatgtcttcgacactgtgaaacagacatggagccaacctgctttaaaaggctccccaccaactcctagggacagccatacaagcacagccgttggtgat

SEQ ID NO: 106183 - DNA, 269 bp, Glycine max
  unsure (1)..(269): unsure at all n locations
cgaatgctgccatccagaataagcaagaggaattacccacatctgagtctacaactgcagcaggcaacatctgcacccatcagttcagctacaaacgactccagcattaattcacatggnaaaatcaccagtcttgtctggtgagccaactgtagagacacttaagaattctggcaaagagcctattctgaatcatcaagcagtagccctgcaccaggatattaataatgctgatgctactaatgtgcataacaatgtcccctcaaagc

SEQ ID NO: 106184 - DNA, 240 bp, Glycine max
tgtaaatcacatcgacactgtgccagcctatgctgcgggggcaaccaaggttggggatatgtctccaagacgagacgatctcagagggctcaggaaatcactttcggcttctgctctactttgggcatcagtccttccagctcatggtcattcttggaatgccaacgttgtcaacgaccatgctgcagggatacattggtgaacatagtggagactagaccgagacagcctgcactgggc

SEQ ID NO: 106185 - DNA, 270 bp, Glycine max
aaacgaatcgagcgaatcggtgagtcggagttttcattttgatttagggtcgtgacaatcagtttgtagcccatgagaaattaaatgagtgaacatttacattttggaatctggaatgaactttccaaaatataatggaaggtgtaagatgcaacaatggaggtgcagggtacaattccgttagttcccattttgatgttagttatgcgttcacgagccattcgtccaagtttgaaataaaaaaaggcgcatcttatttttgttctgtga

SEQ ID NO: 106186 - DNA, 254 bp, Glycine max
aaatatttgtaaagataaaaatacccaaactcgtgaagtttctctttatgtttctgaatgtgtgcactgaaacatgattgatttttcttggtgctttggcaatgacatggaatttatcaaggtattgaaaggctttattatgtaattgtcagatttgaaatgttgatacccttgagttctctttgtaaaaatcagtaaattgaggtgacttccagaaaaaaaagacaagaagaaaaaagagggggccccccgat

SEQ ID NO: 106187 - DNA, 179 bp, Glycine max
aggctcgaggtcacaatgcaatcacttcttactcagtggctattcttcttgtcatcctatcaatcatagcattagtagatatatatggtccaatgattacgtttgtgatatgatattgatatatataacttcacaatctctaggtattcattctcatagaggattgttttggggattgg

SEQ ID NO: 106188 - DNA, 248 bp, Glycine max
  unsure (1)..(248): unsure at all n locations
cggctcgagcaagcacacaataataatatctaccttaatgacggtctctgcaatgtgcactgtggtaccaaccaacaccattcacaagatcacaccatgaggaacaacaagccacagttatggctttctctttctctcatcatcacatgcttctcgttccacacaacatacgaggggnccnngatnagctgagncnnagnaanncataaatgtggnttgttgttattaatggtgtgatgttggtgatg

SEQ ID NO: 106189 - DNA, 180 bp, Glycine max
  unsure (1)..(180): unsure at all n locations
agagagtcgcggtccacacaacatacacatactnnnngtngngntngtcngnntgggngagngcggangggngccccctnnnagnnaatctcctctcgntctcgccccaaatataaaaccccaacacacagagacaaatgcctcaatatcttttgtgtcgcgtcattttgctctttcttc

SEQ ID NO: 106190 - DNA, 108 bp, Glycine max
atatatcactacttcatatcaccctttcacgcagcatgttttaatctatttcgacctgattttaatttttaacagtataaatttgagaattgttaaactcctaccgct

SEQ ID NO: 106191 - DNA, 289 bp, Glycine max
atttgaaatgataaaaaaaatcaagcatccactatgtgacatgaacttcaacatcttttgttcctttcctctattttgcattaaagattccaatagatacaatttcagataaagtgagtaacaagggttttactgctcctctttacctttccttgtcaaaaagttagtcctctcaggtctgaagagttaaatacatggcgagatccatcatttagaggatctctacaggcagaagcagaattcaggtctgtcttattcttgccccttggggccttgctgttgttgtgaa

SEQ ID NO: 106192 - DNA, 215 bp, Glycine max
cgtcgagccgaatcggctcgagaaaataatgtagcaaattttacgactatggctctgaatgacgaccattatcctttcactacctcactgtaagaaatttaagtcatatatgagtatagaacacggaaatatatcacaaaaaaattctaaatttataaaaaccaaaaaaaaagaggaagccgagaaaaaagaagttaataaaaccggaaataaat

SEQ ID NO: 106193 - DNA, 134 bp, Glycine max
caaagactattcttggagagtggttatatatattactacttcatgttgtgctttcatggaccatgttttaagctatttcgacctgattttaatttttaacagtataaatttagaattgttaaactaatactgtt

SEQ ID NO: 106194 - DNA, 237 bp, Glycine max
  unsure (1)..(237): unsure at all n locations
cacaaggacagtcggataagggggaagcgagcaatactctcgaatgtcacagataagcattctgctacacataaccaacactgccttctcgtttgagcattatataaactcagtcggtgctcataacttttccacacaacatacgagccttgcntgagtatatataatgctcaaacgagaaggcagtgttggttatgtgtagcagaatgcttatctgtgacattcgagagtgttgct

SEQ ID NO: 106195 - DNA, 291 bp, Glycine max
caagattctcagccagtgttactccacgcaccatccctgataactcctacatcatatcacgttttatttactcttcatctcaatcatcataaggtatcttcaagattaagatacataaagttttggtgagttcggtctagggaaagaggagaacattcctcaaggttataagagcgcttacaaaaatacttagatgtcgtccaccaacaaaaaggttcgaactcccacagtcgtttccacctttctgcgccggcaacagtaaacgccgttcagttttaattccttttgttg

SEQ ID NO: 106196 - DNA, 223 bp, Glycine max
  unsure (1)..(223): unsure at all n locations
cagtgatactctcaaacaaagttttttgtcagcctttgagatactactcgatattatatttgacaattgcttgctgcaggtcttcatgcttccatacaatttaaaaaataaaaatncntncactgtgctngatcttgcannnaagncgcaaccgtancgcctggcattacggtggtatcattttatggagttagcagattctgtatttttgtttatcctgtct

SEQ ID NO: 106197 - DNA, 280 bp, Glycine max
gtcatagactaggtaaccaatatgcagctgagacaattgcaaaactgcaagcagaaataaggcgcatgcgtgctgttaggtcaaccacactcaagaatgttgaagttggaaacatggtttctatcaacaagagtgtccgtgctaatctcaaggcagagattacccgaaacaattcacaaggaagcaccattgctaatcttgaacagcagcttgacaatgttcaaaggcccatagacaagttggtgatgtctctcccgaactattcctacactcacccagt

SEQ ID NO: 106198 - DNA, 242 bp, Glycine max
  unsure (1)..(242): unsure at all n locations
atttatcattctcttttcagcaaccatgaaatcttcaggagcattagctacccttgtgcttctgatcctacttctcgacacaacataagtgacggaaaaantcaggaantgatgtgatgaaggagttgaggcaatgtgtgggttactgggtgtgtcggtgttgacaggcagcggttgattgttgctggtgagctgctagtcgttggtctgatgttgatgcttagaggatacgaaaggtgttt

SEQ ID NO: 106199 - DNA, 295 bp, Glycine max
attttgagaaagtggtctttaattcagcccaatggtgccatgctatccacgtagctcaaccttactttgtgggataagactttgttgttgttgcttttaagtgtcatgttcaattaaggttttgtggtactgccataccttctgtgatgtgctgctgctactgtttctcaaatctcaatagtagacatttcaattgatatgctccttttgatcatgtattagttgtagttgtaagtttgtattcttaactatattacactcctcaaattcttgtaacttgcaagtcatgtcttct

SEQ ID NO: 106200 - DNA, 291 bp, Glycine max
attagggtgttgtgtggtgtcgatcatgaagatttggagcaacttgttcgtgtctcaaaaactgttagagaagcggtaagttctggggtaatattcagcactgtggtccatttttgtttcaaaatacgatttggttgttctgaatttttgtttcaagttcgattgattgttctgattttggaagtgttgggttttgctattgcaggctgagattgctaggagaatgcattttgagtatagcactccaaagaagaaaacttttgctcttcctaaacgtttgatatagagggt

SEQ ID NO: 106201 - DNA, 162 bp, Glycine max
  unsure (1)..(162): unsure at all n locations
ctacttgtaaaccttcatcaaacattactatcttactccaggaacaccaataaggatatancatangagttatttgattcttgttaattcacacaacataggaggtagagaaaggggaaagggggggtgggtgttaagatattagatgtgtgtaaggtgttt

SEQ ID NO: 106202 - DNA, 266 bp, Glycine max
gccaaacgtatagcccaagttgtttctttctcttatcccggagtatcctatgctcaacttcgaactaacaactgctatatacgtctttgtaaggatctttcttctatcctttgtttatttttcttattttattaatattcaagtctcatgaaaggcatcatagtaagttgcacttattgcttgcactgctatcttgacatggtttgcaggtatctcatcgactttttgaattaacaaatacacttaagacagtgttcatacctaca

SEQ ID NO: 106203 - DNA, 264 bp, Glycine max
gaaggatctgcgggttgtctttggtcctgagcagcagagttacttggagtcacaattacagagatacaggaaggttgtgtgtccattgctatccgagcgaatcgtctattcgctcggataatataaatattagtacttgagtagttgagtttaataagatgctactgctaatcttcccagaaaaaaaaaaaaaaaaaaccctgcaaataagattcatgtattctcctgttggatggcctgatgttggcaatagcacttgtgtga

SEQ ID NO: 106204 - DNA, 274 bp, Glycine max
gttaattgttcaagacgcggcagtctgtctctctcggtttcaactgtgagttggtaatggttgcataaatctcattgacgtgagactgcatccatggcttcggagaagatttgctcgattctcttgttttctcgctgtaattttgcttctccgtgatgctccttctgccatagctggggacatagttcacgacgacgattcaactcccaagaagccgcgttgcgacaaccagttcgttctggtaaaagtgcaaacatgggtcaatggtgtagag

SEQ ID NO: 106205 - DNA, 99 bp, Glycine max
cacattatgatcaaccttataatcttcctcgttagcaccagtcgtgactacctggtttctcaggctctcgcttctcatctcatgccacgtcctcactgc

SEQ ID NO: 106206 - DNA, 274 bp, Glycine max
  unsure (1)..(274): unsure at all n locations
ggtttgtccaatccctccaactctctaacggaaaacactttcccatcttcccccaccatatattccatatnctgtgtctctttgtatactcccttgtctttattgttagtttcttatctctattattcctctctctctctctctctctctctctctcttatagctttaatattctttactcatgatagcttagggaagggaagataaatagatcaagcacaagagggaaaaatatataccctattcttgaattagggttttttttttctttctt

SEQ ID NO: 106207 - DNA, 275 bp, Glycine max
caaacatagtaatcaagcacaggcaatctgactactcaaaacaaatagaaatactatatttagatagagagagagagagagagagagagagaaaaagagataagtgcaataatggagtgttgtaagagggtatatgagtggttatgcaattcacaatcatatttgataatattgagcttgcaatttggctcagccggcatgtatcttatcaccatggatgctctcaataagggcatgagtcattatgtgtttgtcgtttaccggaacgtcatcgc

SEQ ID NO: 106208 - DNA, 269 bp, Glycine max
  unsure (1)..(269): unsure at all n locations
aagccttctcggtgcatacaacttcttgtgggataggatgagagcacttccaatggatcccagaatccagcacattttcaatcaaaggcccacncctatgctggaacagatcataaaattacatatcattgcaatccatgaattacgtgaatacaccaaaggagaaggattttccgagggctttgatgctcatctcactattcaacagatgaacaaaacttcagttgctctgttccagatgtatgctgcctctagaaagaaaggaatca

SEQ ID NO: 106209 - DNA, 281 bp, Glycine max
cttcaacgctcttggtctctgcatccaaaagagaattagggggacaactcatgcctaatttttagtgggtttacctgatgcgtcggatgaaaaactgtgtctcaaacctctgtcaactcaggatcaggatatggaaagtaaagatgatgttatatccgcctgcgaccgtaataccccagcttataatggaaatattacgattgctagttcttcacgtctgggagaagtaaaaatatctttgaattgtgactctgcgttgggacaaccaaacttcagtattc

SEQ ID NO: 106210 - DNA, 272 bp, Glycine max
cggactcggatacgcatcgtgattctaacgttaacatataacaatccctttttcccatttccattttctatgctgcgatgcgaatatgcttcctcctatccttccttctacaaatgctatgtgattttcaaatctagaatctccagtgtggaatgcaccacaatattcatgccaattaattgcttttcagttgctgacagatgctgagtaccgatccattttctctcctttttcgcagtcaccattagaaggaagccatggaatctgagagg

SEQ ID NO: 106211 - DNA, 264 bp, Glycine max
cggaattctgatcgagcgagttgaatcgcgagaagtagttccgattccgaagatgaagaccgaatcgcgttcgaaagaagaaacaaaaacgtatcaggaatggttcgatttggcagattcagatggagatggacgaatctctggaaacgatgccacaaatttcttcgctctctccaacttgtcgcgctctcaactgaagcaactctgggctctcgccgatgtcaaacgacaagggtttttgggcttcacggagtttgtaactgc

SEQ ID NO: 106212 - DNA, 162 bp, Glycine max
cggctcgaggtcgataagtttagcaatttaattgggtcagtgtattatcctgatggtgaatcagcacaggacctggcattggcgcttgtagaaaacggttatgcaaaacacgttgattggagtgcaaatatgatggaagaagaggcaaagcaaaagctgaag

SEQ ID NO: 106213 - DNA, 248 bp, Glycine max
cgaaaaataatggttaagccaaaaaaagtcataggtcctgtgtttggttgagaggaagatgtcataattactgacaagtgagggggataacaacacaagtcagaagagaaaaagaaacagaagctgctggctgcagctggaacaaaaagaagagaaggagaacaaagagaaagagacctgagaggtgcttcctgggctcgtaggagaacaaagagaaagctgagaaagaaaaatagagggagtggaat

SEQ ID NO: 106214 - DNA, 149 bp, Glycine max
tgcttttgctttggttggaagaccaaaacgggaagaaagattacagcgataagatactgctagatctcactcactttgctgaccaggggcagcctttgttcatctgaccggaacgaaacgacctgcccgttgcccccttcatgtttgcc

SEQ ID NO: 106215 - DNA, 188 bp, Glycine max
aaagcattcactgtgtcggaaaaagaagaagagaaaaaagatgagcgacggaggaaaacgacaaggtggaagagcgttgccgccgccgccaagaggccctccgcctcctcccccctctcgccctcgcctcgaacccgtcgatcgcgaaaagacatgtccgttactgctgcgagtgttcactaagattg

SEQ ID NO: 106216 - DNA, 239 bp, Glycine max
cgaaaagagaatggagaagcccactaccacagctgtaacatcaactgtaactatgggtaaagctatgggatcgggttcaggtatgggtcggtctggtgctggttctctaaggcctcctcaaaacccaatgatgggttctggcatgggcaatggtcctggtgttggtatgggtatgggaggctatggaggaggcatgaatgcatcaatgggtatgggaatgggggggatgggggaattgg

SEQ ID NO: 106217 - DNA, 156 bp, Glycine max
gttagagtatggggctatggccaagtaaggcacagaacagaagcactcatagcttgtttggtctcatgtttggaacgtgatttttagaaagtaatagttataacttccacgtctcaaatgtgacacttctataatcaacgagtttccaaacatgct

SEQ ID NO: 106218 - DNA, 239 bp, Glycine max
ccggcacttacttgtgagctctttgattctatcaaagttgacattgacttgacttgttctatatgcttggacaccgtgtttgatccagtttctctgacttgcggccatatattctgctatatttgtgcatgctcagctgcatcagtatctattgttaacggacttaagtctgcagatcctaaaatgaagtgtcctctatgtcgtgagggagcagtttatgaaggtgctgtgcacttgga

SEQ ID NO: 106219 - DNA, 125 bp, Glycine max
agttttcctcaatatcagatgtgaatcaatatcagggtgctcaatttcatgtcactcgtagttcacttctcgtgatgtccgaatctgagcgccaaatcgttatgacgttggtatatataagatat

SEQ ID NO: 106220 - DNA, 277 bp, Glycine max
tcgagctgagttagttctatttattctccatcagagttttttctccaaggccctgcaatcttttgttcatatatacattgctacataaaccatgcaggccagggagatcacaggactcaattatttactcccttcagaccctagcccttaccctggtcactacagcatggttcagaacaccatccccacatttcaactccacaaactctcaaaccccttctatggtttgcagaatcctcctaaagtgcttgcagacttcagcccccctcagtcctca

SEQ ID NO: 106221 - DNA, 135 bp, Glycine max
ctgcttttagtcagcaaaggttgagacttttaacacataacaacaatgtcttcttctggttatgctacaagcagtgctttgttttttctgtatctggctgtgtttgctgcaaaagttagcttttgcttttccaca

SEQ ID NO: 106222 - DNA, 271 bp, Glycine max
gatcagtccatgtccatctaatggaggagaaacagaagaagcacttagcaatgcaggaacgcctttccagacgcactcaaatccgttcacaaaaccccgaatcttcctccatacttccaagcgtctgccatctaaaaacctcgatagagtcccaactcgcacaatcccaatccatttcctcagaaccttacaacctcaaactccacatcaatcaaatctcgcaatctatctccgatttagaataactcgacgcagaaaactcctactccct

SEQ ID NO: 106223 - DNA, 277 bp, Glycine max
gcatttaacttgctgctggatgcactgtgcaagtgttgcttggttgaggatgctgaaactctgtataagaaaatgaggaaaacagtcaagcctaatgcggaaacgtataatatataccgtttttgggtggtgtagggttagaaacccgactagagggatgaaattactggaagacatggttgaactgggtcataggcctgacaattttgcgtacaacactgccattgatacatactgcaaagcaggtatggtaacagaggctgtagatctttttgag

SEQ ID NO: 106224 - DNA, 273 bp, Glycine max
gaagagaaaaaaaccgaagagaagaaatcggaagataaaaaggcagaagagaaagctccgaaagacgtgcgtagtttcgaattttctcaccttcgtcaataagcagaacgcgaattaattgaaacttaaattttaccgtgttgatcgagttattttagttaattaattagactgacttgttcaatttttatattaattaattttggttgattcagagcacggtggtgttgaagatcagattgcactgtgacggttgcgttcagaagattcgaa

SEQ ID NO: 106225 - DNA, 149 bp, Glycine max
tggggagcatgactgataaagttggcaatccatttgtagatgtggggcaaaataagatatcgagtccagtcgaacatgccaatgatatgcgtcgatcaggtgtgtctatggtccagcaggtgttaacgtcatcaaatcaagcacaaggg

SEQ ID NO: 106226 - DNA, 275 bp, Glycine max
gagacgcctgctgctgctcctggaatatttttcacttaccgtactctttctttttctacttttctgtatacaaattttgatacatgtttcttcatgttgaatttcgtttcaaattacaaagggggtcgcatgctttgtttatctttttcagccccttaattaagcttttaataaataagaaccatatctgattttgtgattttgattcttattttgctgtggataatttaaagtacataataattacatcatagttgtgatctatacaaccctgt

SEQ ID NO: 106227 - DNA, 149 bp, Glycine max
aataataatatctaccttaatgagcttctctgcaatttgcactgtggtaccaaccaacaccattcaccacatcacatcatgaggaacaacaagccacagttatggctttctctttctctcatcatcacatgcttctcgttccacacaac

SEQ ID NO: 106228 - DNA, 147 bp, Glycine max
ctcttgaatacaagtactataaaataagcaaaattagtgattcaattgaattcgagtttcctatttaatcagctggtttgagtcttgaaggagatccaatccaagtgcattgaatgctgttcacctgaagttccgccagatctctcc

SEQ ID NO: 106229 - DNA, 147 bp, Glycine max
gtcctctttggctagaagaactacatgttctctggatccttcatgctttacactgtggctggctcctgttgttcactcactttttctcctctctgggggttcagtttaagttagctcaagataaagacatggattttcagaggtttc

SEQ ID NO: 106230 - DNA, 147 bp, Glycine max
gcgagtcatttgataacaacctagtaccatgtaactttttatgaatgatcaatgcacattcaactaggaatctcgaaaaacatgtattgtgaggatgatgaaatctgtataaatgtcacagtgcttcatgtaattaagtttttctga

SEQ ID NO: 106231 - DNA, 147 bp, Glycine max
ctaagaaagaggcccattaaaatcaaggtcaagcaatcttctgccaccagtagggctgatactgataatcaagtacttgaatgttctctaggtggtcgtaatgaaatggatcatggagctagtagttcagtttctgtagatgcaccc

SEQ ID NO: 106232 - DNA, 138 bp, Glycine max
agctttatcatttccctgtaggcgatattgtcatctaactatagtactatatactatattgcatattgatcacttattgattgcatagtaatagaatggcatcacgtgggtatttctttgttgttctccatgccttag

SEQ ID NO: 106233 - DNA, 263 bp, Glycine max
atctctttcagatcatgttggccatggaaacaagaaaaagatagcaggaatcactgttggtgtgactatcgttggattaatcatcacaagtatatgcatattgatgattaagaatccaagggttgcaaggaaattttcaaacaagcattacaaaaataaacagggaatagaagacatcgagttgccaacttttgatttgtcagttttagcaaatgccactgaaaactattcaaccaaaaacaagcttggagaaggtggctttg

SEQ ID NO: 106234 - DNA, 133 bp, Glycine max
cttttcttcaaattattattgttacgactctttgacttctccttcatctctttggctggagaaaacccttttcgccggaaaacccaccgcaaccttcgcgattcgcgattccgattccggttccaccgtgctc

SEQ ID NO: 106235 - DNA, 268 bp, Glycine max
acacaacacagcataccgtgtttcattttctctcacacacaaacctcctactgttttcatttacttctcaggaggtataactactatttttcgctttttttttaaaaaaaaattgattaaatcttttgccatgggaacccagattttgcgacctcaggactgcttggtagaacgaatcagggctcctccggctgacttttcccggcggaggagttccggtaattactgtaattattattactacaacaacaacaacaaccatgtcgcc

SEQ ID NO: 106236 - DNA, 261 bp, Glycine max
ctgagagtgagtcagagcagaagaaggaacgtagcaacaatgggtccagcggcaaagacgacgacgatgcgttcgatctctcaagaagcgttcgaagaactggtgaatgagaacatcgacgacctcggcatggaccccaccgaggccctccaagacgcaatccaaaccctgcactctccaaggcgtcgatctctcaggtcaagttcttcttctcttctcttcttcgctctcactctctctttctcctaatctcaaaacgcc

SEQ ID NO: 106237 - DNA, 264 bp, Glycine max
gtgaccagcaagatccttccagaaccatctgttcttgagattgtttttatgcaacattaaacttttgctttcattgtaatggaatttgtccagctaacattttgttaacttgagtttcaacaactgcactttatccctgtagctgggcaagaggtgtaagtccacccatcctaatattttgtagcttgagtttaattcttcataatataataaacaggcacgacaagcctaccttattggcaacaaggcccttgcaaaggagct

SEQ ID NO: 106238 - DNA, 251 bp, Glycine max
ggagaatgttcctctgaatccgaagcccgtgctctgcccagcgacttagccataaggtgcaactgaacaaagagcataaaatcctttagagtgtcagtaatcaagaatgcatacaggaatggcttcattaactcaactccattataaagtacatatctctactttcagaagggtgcattctagaagccaaggattattgaaatctgcaaaactatcccaacttcaaggatccgcctttcctagtattcaca

SEQ ID NO: 106239 - DNA, 258 bp, Glycine max
ctgagaagtgggtcgttgaattggagttgaattttggggatttcatatggttgccgctgaaagattcaagctttttagtatctgttcttatagttgtactattgacttgctattttccctgtaatggttactgcagctttgattcatgacatggagaaacattgtaatattgaaattgctgctcagatttcacacttgccatcacaaaataacgaaggtgaacatgatcattttcatctagaagggttaatggagagt

SEQ ID NO: 106240 - DNA, 260 bp, Glycine max
caaaagggatcattcctgtctccatccaactcatcttcatctaccttccacactcatcaattggctgatgcagataaagtctcatcttgtgtaagtatgctaaagggtacattacaacgcaagacgctcggcaaccaagttgagattgagagagaagctgcatcagatagcttaaatgcgatttttggtcctcaagaacctattttccaaaatggttttcatgaaggcctagaaaattggagtcatcaaaagccaataaa

SEQ ID NO: 106241 - DNA, 248 bp, Glycine max
ctgtagtgcatgttctttatcaggagtacaaagagctggaagaaaaatacctgatggaagtttgatccctaaacctacaacatggggaggatatagactaacaccacaacttttcgagttttgacaaggacagaaatctcgcttgcatgactggtggttgctaccccgtttgtgataggtttcttgttttcattttcttttaatggatgaagccaaacaatatgcacataatattcttgtctacatta

SEQ ID NO: 106242 - DNA, 253 bp, Glycine max
ggaatcttttgcaaaaatgaatatgcatgatgagccaaaacctactccagaaccaaatatccaagcaactgttgttgattctgaataccctcctgttggaaaccacgatcagtttgtgccacacctctctgctgcaacacaaactcagtatccttctgctgaaagtcatgatcagttcaatcaggaaacaacatccacaaatatcaacagaaacctggtaaatcccacagaaactggacaaactttcaacacc

SEQ ID NO: 106243 - DNA, 250 bp, Glycine max
ggggtgaagcatggcctcatggccacccaaacctacagagattttttgtgtgcatgcgagggagaaagcgatggcctcatcgccacgtgattgctggccccatctctctcctccttcttccattgagcatgtctggaacgacatcaaactcgactctctctccaattcccctgttgacatagacttcaacaacaaccactctgtctctgattcttcttttcttaacctcacttccacttcctcttctgtc

SEQ ID NO: 106244 - DNA, 277 bp, Glycine max
cttggcgttgtgattgcatggtacacttccaacataggggttcttcttctgaacaagtacttgctaagcaactacggctttacgttccccgtgttcctcaccacgtgtcacgcgctggtgtgctcgctcttcagctacgttattgtttccgttacggaagctgttccgctgcagcgcgtgccgtccaggagccagttttggaggatcgtggcgctcggcgtcgttttctgcttctccgtcgattgcgggaacgtgacgctcaagtacattccggtgt

SEQ ID NO: 106245 - DNA, 140 bp, Glycine max
cggcactagaaactgggagtgtcgaactgtgacaggtggtttacgatgtctaccgtgtcctagtatctggtcgtgtcgcacgctacccgtgtgagctgccagctcaggtatcacctttaacgtcgatgccgattagtgag

SEQ ID NO: 106246 - DNA, 225 bp, Glycine max
aaaagaattccttttattggagaaaagtatttacattcagcaaactacaacttctttattgagtgtttgacaacaatccaaagtaaattgacacgcatggttctattttgcattaactgacatatgcaatgcaagctacttcaatgcctccaaactctcctaaaaataatcaggaatgtgattgaacaccctgaggtggaaaaatacaagagattacggaaggct

SEQ ID NO: 106247 - DNA, 280 bp, Glycine max
gttgtgagtgaagtgttggttggctagatttgcaattaagtcgcatgtagatcttgaagctgatcagaatcgcaccattagtagaggtgaaagttcaggtggtggacagagctcgttggggtacctatttgggtcagaagagaagccaaatcagcctctgcccacaaagacagctccattaccaccctgtggcattgacatcgacaacgccgcgccccctcacgctgttgctccttctgacacccaacttgttgtctcaaataaccgatctcaaggtcac

SEQ ID NO: 106248 - DNA, 105 bp, Glycine max
ctcaagatctcattcagaatttcaggcgaggagacagatggacggtaacgagcaggatgtgtcgttgggatcgaacaagttccccgatagacagccaattgggac

SEQ ID NO: 106249 - DNA, 263 bp, Glycine max
aaagaagcccaagactaaatagtgctgagtagtctaatggtggacaagatgagtgtgctggtattcaagtcccttcaggtttgtttggtgctagttttctctatcagaaacaccacagcagaaaagaaaacccatcacacaaaacacacgtacgtggttcgactggacaagttcaacatgccagagagttttgacgaccatgtcgtgtggtttggttcgtcagtggaatcagtatcagactcagcagagatgtctgcgcatgt

SEQ ID NO: 106250 - DNA, 191 bp, Glycine max
ctcggatccacacgcacaacatcatggaagatgggtttgagtttcgatgttagagacgaacttgtgagtttacaaatttctttagagtcacaagaaagatgaattgtattggttctgaaattgtatttggattaattctgttagtgtttatttggattgttgaataatgaatgattgttgaaagttgaaat

SEQ ID NO: 106251 - DNA, 282 bp, Glycine max
gcgggttgcatatctctagttgtgttctccacttagctgaatggcacccattggaatagcaacgttgagtacggcttgaagccctgtttttacttcctctatcaaatttttcatcttttagggtgagagatacgtcaattacatttaggattcaatctccagatgctcaataagactctttcttttgcgatggggtgctgtagttgctttgggttcatcaggacacctaaccgtcatagtcaaaggtctaagcctactactaacaataatctctgccaggag

SEQ ID NO: 106252 - DNA, 290 bp, Glycine max
ggcaatgttaagttttaacatgtctaatttatctcctcaatattctttctttgcatgtcgtggtgacctcatctatacaatttcatttcctttggagtggatttcaacttttatttgctatttatgatttagacaatatttgaccattcctattaggcattagttatcccaaaattgataattgcaatagagaaacctttgtttccccctatctaatctcttttggcaggataacattcggatgctgttagatgttgcttctgagcaggtaaatagggagttactgctgc

SEQ ID NO: 106253 - DNA, 282 bp, Glycine max
gtgattgagaaagagaaagaacgcgccacaacataacacactcgcacacagtcagaagagagagagagagagagaatgtttaggttgcataagcacaggattgcgaagtcaggggacaaaattgagctcagaatttctcatctcaaggcgcttcaggtacccaaggggtgggacaacctgtttgtttctgttgtctcggtagaaactggtaaaacaattgcaaagtcgagcaaagtgtcagtgcgtactggaggttctcaatggtcagatacattttcagac

SEQ ID NO: 106254 - DNA, 272 bp, Glycine max
actcgagccgattcggctcgagtttgttcataagctcaaataagtcacagtttcatgacatctgattgtgtctcgatttgacttaattggaaaagtgatgtttccacttagaatcaaactccagaagagtcaatctgacttttgaagggcataagatgagaaaaagctgtacttaattggggtcaaaatgtaatatatattatttattggttttggttttttggattgagaaacatatattaattataaaaccatgctctatatatgtcatt

SEQ ID NO: 106255 - DNA, 266 bp, Glycine max
tttcaatatgaggaaccccactcatcagtcccctgaggttgaaaatcatggtgattttaaagttcatctgttctcttcatcatccgagttgcttgaaaagcttcatgaaaaatggagttcagtggagaaaccaccatacccagctatgtattctagtatttatggaggtatcatacttgatccagcaatgatggtaatccccattgatggtcaaatggtcaaagagggcaatgtgtggtttatacagctattggtctaggtgggta

SEQ ID NO: 106256 - DNA, 224 bp, Glycine max
ggaacaatgctaatagactaatagtaaaatttgtgctgctcaaaaatagggagtcgtcctggttcctctacccaggttgaggaagcaggacgattccctatttatgggcatattgtatagaaggtatatatattactgatttctactgtcaatatgtgttctttttagtatatttgaggaacaatgctaatagactaatagtaaactttgtgctgctcagaaaa

SEQ ID NO: 106257 - DNA, 273 bp, Glycine max
gcggattggaggaggagatctgcgacgccgagcctgatctagggttttcgaatctagggttttgaggaggaggaggaggaggaggaggcgtgccaatttcgatttcgaattgatgtttcttttcagggacgaggctcggatcgactcggaagatggcggattatgcatgggtgcggtcgtgaccagtcgaaacacaatcggcacatgtggcctgtacctgctaacgcgaccactgatggacgcaagattcgcgctggtgattgtgcacttttc

SEQ ID NO: 106258 - DNA, 272 bp, Glycine max
ctggaaaagaaagaaggattctgttggaccttggtgatttcactcatgtgtatgtggaatatagctacattgaaggggaaattgatgaatgtgttaggaggacaggggaaactgttgtaggtgttggagaacataaagatgatgttttagaaaatggtgaggaaacagtgagggatatgaacacaggtggtggtaggagtagcagtgttgaaagctgggactttcatgatccttacatggccagaagatgggccaagcatttgcatggttat

SEQ ID NO: 106259 - DNA, 270 bp, Glycine max
cagctcgagccgctcgagccgctcgagcggctcgagggggtagtgtcggttgtgaagtaactagactaaatatacttacaacaccaacttccatgttcttcatgtttcacttctgctttaagtttgtggctttctactttctctttctagagtaggactaaactcatacactgatcatgggagtggatttaagacaagtggtggcgggtgtcctcaccctcacaatgttcgtcatgcttatacacatgatcaaaagagaccattttgatg

SEQ ID NO: 106260 - DNA, 238 bp, Glycine max
gctatccaaggctggctttgcaaatcttgaagttttattaattcatttatgaatgttgtaaatatctacatatctattttttttgcttgattacattgcctttctttgttgctttctagctcaaatcaatcaccatagtgtttgatgatagaggattagttgatttctattgtttatgctatcctgaatgagtcttgtacgttctgactgacctattgtacattcaaaattacaactt

SEQ ID NO: 106261 - DNA, 263 bp, Glycine max
gcgtagtaggtcggaattcgcgtgactcgcgcgaatcggctcagtgttctcgcaaaccatcctgatacacatccggattgctagttcgttgcatgcaaccatagttttattaggattttttcttctttgttttcaattaggtttttttgttgctctccttcaaactccatctttccatatcctctctttgcgcttgtgttttgatctgcttcctactgcgatagtttctctactgttacatggccatggcggtttccgcaatt

SEQ ID NO: 106262 - DNA, 233 bp, Glycine max
  unsure (1)..(233): unsure at all n locations
aagcaatgnccttcattttgacgacacaccttcacgtgcacaaccacagggaataatttccaccccagggcgtgtacaaatatacacagaagtaagaaagaacataataaatccaaatcgtcagggagtggagctgatgcagcatttcctcgagatcgaaggtgggaaatgatctagaaaccgatgaatccgtaacagcgagagaacgacatggtatctcagtgcaagagtgt

SEQ ID NO: 106263 - DNA, 236 bp, Glycine max
caaaaaaatcctgttgaatttaatcttatttgctctgttttttcctctgtttctcacaagacataatggagtacaaagtgaaaaccacaacctcaacaccttctccaccaatcccaatccatcttcccactatgctctcaaactctcccccatcttcatcttcttcacctccttcacaatctcccactcctttcccttcaccctctcagggctctccctctgctgctccaccgtct

SEQ ID NO: 106264 - DNA, 186 bp, Glycine max
cttctctttacacccccctctctattttgcgttcattctgtattccagttgaagtcttatcctctagccacatggccactcgatcgttatgacccgggcttcacagtactcacgtgagcaggcattgattgaaaacccttcacttgcacaatcatggcaacgatacatttatgagaccctatactg

SEQ ID NO: 106265 - DNA, 243 bp, Glycine max
cacaacgcgatcctctctctctctctctcagaatctagcttgcaatccttactcgccacaaaatcaaaggcttccttccactgagagagaacacactcgttcgaatcaaaatcaaaacgagaccaagaaaatgtcggtgactctgcacacaaacctaggcgacatcaaatgcgaaatcctctgcgacgaggtccccaaatacctccgagcaattatgttagcactatgtgcacagtgcgttac

SEQ ID NO: 106266 - DNA, 113 bp, Glycine max
ccagcatagtcctcattcaacagatatcaacatttcattatacataaaaatgccatcattaaatgaagaaatgaacaatagacaacctgagccaaagacggatgagcatcagc

SEQ ID NO: 106267 - DNA, 118 bp, Glycine max
ggaacaggcggtggagaggccaactatgcgcgaagttgttcaaattctcgaccgagctatccaaagaccaccatagctcaaacacaacggagacttcaacaactcacagcaactcctc

SEQ ID NO: 106268 - DNA, 236 bp, Glycine max
ccaaagtcccaccaaaaacatcaaaatctccaaatacttgatcataagtttctccattgtagcaaccgctttcattgtcctcagcttctacgccatctacgccatatttttctctcctcggaacaggtcaatacgaagaacactatcacgcccagaaacagaacaagatttcttggacgaggaagaacaacaacaacatggtcctgtcgttgaccaccccatctggtcacatccgc

SEQ ID NO: 106269 - DNA, 231 bp, Glycine max
  unsure (1)..(231): unsure at all n locations
cctcgagcggnttcggctcagaagagattactgttgagaagactgacaaaggctgttggaaggagggtagtatgctaaaaccgattggacatccatctcagcagaaaacagtggaacaatttgaaggtggttccaagctgcagtatagccaggggaatatcacccctccgagagccaaccagggtagtatgctaaaactgtttggacatccatctcagcagaaaaatgtgg

SEQ ID NO: 106270 - DNA, 240 bp, Glycine max
tccaactccaattaacctcactctccttcttctcattctctctcactccctgtacggtgccattgctctttgcttatgctcgccatcgccattcaccaaacaacaatgctatcccaggactcagagtaagagttattgaagccgcagtgagtcagtgatctttcgctctagcctttgtcctcaaacactgaccgtggagtagtgaagaggcaagacattgaaggggatgttgatgatgag

SEQ ID NO: 106271 - DNA, 260 bp, Glycine max
ctagaagcagctcacgagagggaaaaggagttacttcatgagataacagagttgcagtggaggcttatctgtacccaggaggagcttcaaaaattgaaaacagaaaacgcccaggtgtgattgccttgtggaatggatgctttcaagtggatggcttggatactcaattttaagttcttcacggacacttgaaaaattgaagtgcagaaagaaactagaataacgaccatacaaaatatctagactagatatgaagcggt

SEQ ID NO: 106272 - DNA, 260 bp, Glycine max
caccaacttcatatacacaaacaactaccaccacgacaacaaaagtcacattttcatctccacaacaagaggctaaatttgacgatgatagtgcaataacaaagggcatgactagggaggagttaacggcttataaggaggaaaagaagaacaaggcaattcaggctcagttggcatttgcaaacaagatctgggctgatgaaaataagaataaagaagagaaggagaaggcttatgaagagcttgaggataatatcaag

SEQ ID NO: 106273 - DNA, 256 bp, Glycine max
ccaagcttggtcggtatttgttttcttttgatggtagaaaaaaaaaaagaaccatgcagattatttattgggcgtgtgtatcgaaatcatttgttgtctattctttccattaataaatgggaagtatcagttttgattaatgttagttttcatgtcttactttaatacttggtattctagtgttatgaactcgtttatatttgaaaaaaaaaaaaaaaaaaaaaaaaaaaaaaaaagggggggcccccagtttttt

SEQ ID NO: 106274 - DNA, 187 bp, Glycine max
acatattccgtagcatctacccagtcagtactcaccaatggcaataggccaatagctataattgcccaaacccaactcataatcttcaaattttgctcaatactttatctacagctgtaacattgattaaacacaaacacaaatcacctcttgttggttcttaatttctttcttccacacaacatac

SEQ ID NO: 106275 - DNA, 265 bp, Glycine max
  unsure (1)..(265): unsure at all n locations
acaaaatgctgatgcatctgaaagaaggaactccccttaatttgtaaatgctacaggattagctaacaacatgctccaatttccaaagccagaccaggacagaatgaagaaaagttacgctcagaaactggaactatcacttaccttgattttgcaccaaaatatacccatgaagttgcagttctctattgttgcacttgttctattaggctccacactgtccttctgtcanctgatagtagctgacttgaactctgaccaacat

SEQ ID NO: 106276 - DNA, 132 bp, Glycine max
tgaagcacaagtgagatttaattgtactattgtatcctctgacggttctcggtcctcccctcaccgcactctcacgcggatccaccgtaagccggaggataccaccgcacaccagatcctttcctctctctg

SEQ ID NO: 106277 - DNA, 260 bp, Glycine max
cctggcttatatgttttgggttctgggttataaacttaacgaggctcatacactacttcagagcaaaaggtcgtgctttccaaaactggatgccattaaaagtgcaacagctgatattgtaagtcaatttgtttttatatatttattgtggtttacaatttgagtggtagctgtttttgttattccattacaggtgtgatcttcctgataagtctttttcgccttgaaagctgacataatttattgtgaaatttcaagat

SEQ ID NO: 106278 - DNA, 266 bp, Glycine max
gctgcacaaggatatgtcaacagtgcaagttttagacaatgcagggcccgggtggactgtcgaggaatgtgtgtggctccaaggtcagatggcagttgtcggtgatgcactttatgtgatgagccatggattaatcttcaagcaggacaaagaagtgagaaaggttgtaggttcagcatctgagtttcgaaagagaattggctttgcaatgactggactaggtgatgacttatacgtgattggaggcttcattggaccagatagat

SEQ ID NO: 106279 - DNA, 260 bp, Glycine max
cttttctccggattctgtgtcttcacgcagaaaaaaataaaagccatttttttttatctttcttttaatttttcaattcaaagtgagaaagaaactctgctgctaaagttttctgtgttctctcttatcatcatctgaggcttgttctgcagttcgtgcacttcacaatcactctttgatttggctcttacgagggcgatctgtgtgcaattttggggctggaaatcttgctcgcgtttcatgcttttgtgaatttccct

SEQ ID NO: 106280 - DNA, 258 bp, Glycine max
cgaagatgataagcaccaggcaatgatccctgcacactctgaggaagcaatatccaatgttgtaaccccggttgtgtgccgtagtgacagatatgatgcttgtcatgcaccaaatcaaattgtattaccaactgcggaggttagatggaataactgagttattattatcactggtttgtcgtggtaatatgtgcaatattttagtgtttttactcattcctatctaaacatagtccttcaaggagaaaataatgcgta

SEQ ID NO: 106281 - DNA, 259 bp, Glycine max
ctaccgccctcaatagtttgtgttctcattctcgttgcctttgactccatggaattggacattggagtcactcactcagatctgactcttgatgctattgcaggttggggtatttggtgcaagcaacacaacataccatcctattctcaagatcaaaagaaaagccaatatttggctgatcaggaggacttattgccaacattttcttcaacttcccaaatccttcatgaccataaaaacttcagcactgccactaggg

SEQ ID NO: 106282 - DNA, 262 bp, Glycine max
actcgagccgatgtcggctcgagatttatatgatgtggtgataagatgaatttttatgaatgcctctgtaaaagttatataacattgacattatataaatttaaattaaactattaaaaggagacatgtgacaaaattacaatgaagattgtatcaatacgcacactcacactgcaatattgctggttctatcttttcttttgtttgagggaatgttggagttctttgttacggatgatgggtttgactgttgaggaaattt

SEQ ID NO: 106283 - DNA, 257 bp, Glycine max
gtgaacaaaaagtggttgctgctgatgtggggtatatggatgccttggttggaggggtaatgagtcaagcacaacctggatctgacatcagttcacgtctgcacttatccgttgtcatgagctatggcaatgtcttagaggctgatgattctaagttttctgtgttaaagagggtagatgagaagaactctcatctttcaatgctttatcctctccaaagttacactatgaagggaggaattcctcgaaaggatgta

SEQ ID NO: 106284 - DNA, 259 bp, Glycine max
cttcttcaattcatatcatatcaattagatttagagctaaacataaaattgttttcacataccatggacaacaacaatgacttttggaaattcagtgaccagttgaggcttgaatctggtttggccaatctgtctctgaatgattattccatttggagcaacagctacagctccaagaggcctgatcagaggaggaactttgatgtcaagggcagtgatttcaacaacaacaacaactcatcaaaggcttttgatgatg

SEQ ID NO: 106285 - DNA, 256 bp, Glycine max
gcaaattctgatatgcctgtatctgttgagcaaagtggtgaaactgagatgatggaggaagacagaaataagagggaagatgcaaagccttcccaagttagaacattggcaaatggactagttattcaagaactagaaaaggggaggcaagatggaaaaatagctgctttggggaaaaagatcagcatctattacaccggcaagatgaaggaagatggagtagtatttgcatcaaatgctggccaagctccttaca

SEQ ID NO: 106286 - DNA, 253 bp, Glycine max
attcactcgccgctttttcaattaaccaattgtcgtattgcaccttactactgctgctggccttttgcagttcaatgctgtacgtggaggggaacctcgagaccaaatgcttcaccgatccgataaccggcattgcccgccgaattcgagaaattgctgttcgacgaaatggtcgcattgtatttttaggtgaaggcggtgatgctgagctgcagacactgccaaaagacctgagagctgttggctattacta

SEQ ID NO: 106287 - DNA, 252 bp, Glycine max
gttactgtcacatgccaaggctgttgaattataccgcaagcactttcaggcaaagcaagggggaaccattggcattgttgcattttccttcatgtatgacccacttagagatgaagaatgtgataggcaagcagtgagtaggggcttggcttttgacatagcctggtaagttgttaagaaccaagaagcagcagttaacacctgcaacaaaatcattggaaaaaaaatgtgaagagttttgcttatgacaat

SEQ ID NO: 106288 - DNA, 251 bp, Glycine max
aatctaccttctttaaagtaaccatcatttaatttctcttatttcctttttgtggattaaagcctcattttccttcttggcagcttataatattcccctagcccaagattgcttcaaagtacacactaagagaagtaaaaggttaattattttatctttagatggcatcatcttggacgccaaggcaaaacaaactatttgaagaggcccttgctatacatgatagggaaactcctgacaggtggcagaat

SEQ ID NO: 106289 - DNA, 247 bp, Glycine max
  unsure (1)..(247): unsure at all n locations
ctcgnagcgttttttcaacgttctagtaatctaacttggggcaattattttgtaatgcatgacctcgtgcatgatctagcattataccttggtggagaattctatttcagatcagaagaacttggaaaagaaaccaagattggtataaagactcgtcatttgtcagttacagagttcagtgatccaatctcagatattgacgtttttgacagactacaatttttgagaactctattggcaatcgatt

SEQ ID NO: 106290 - DNA, 251 bp, Glycine max
cttacacatagaagttcctcatctatactcctgatccttatcagataatcccaaatcacgctgccataatcgcttatctcaccgatgaatggcatcactctgatggcgtgcgtgtcacggacgtaggaatgcagcgcaacgattcagggttcgtgcaaactcggttatgagagcacggtctcgctgcacagatgactactacgtggtacttgacttagacaaggatcataggtacgcagctggacatgcaa

SEQ ID NO: 106291 - DNA, 242 bp, Glycine max
aggtggtcaccgaagctaccctctcctcgactatccctcccacgcgcagcctcacctccacgctcccacgcgccaccacttcctttcctcctcctcctccagtcccaccactctccccgccgccgacatcgccaccgccgactactacccacacgcatcctccttctccgacgactccgccaaatccaactccaaacgcgcctccgactgcggcagcccctactacaacaagaagctcaaat

SEQ ID NO: 106292 - DNA, 188 bp, Glycine max
aagcttcctagtccaggatacaaacatttccttgcgtcagggccggcaaaggcgaaccgctttcaaagccaacagacccagtttacgtaccaaactttcacggattccggggagcgcactcagttctgactgaaccaggtccaagacccaactatggtgctcgatggaaaatgagtccctcaacgtga

SEQ ID NO: 106293 - DNA, 244 bp, Glycine max
cacgaatccagctaaatgcgcgtttaaaccgaggcagacgaggtgacaactgctaacaggtggcatgatcaaattctggatgcaatgtattgagggcatggtatcgtctcctgatatgttaaggattcgaggattatgcgtttgggtgtttccgtgagctgaagtgcgaatgatcattagctgtacatcagatagctctcatagtattggtgaccgtagtagtcaccactctatagtcatcctt

SEQ ID NO: 106294 - DNA, 252 bp, Glycine max
cggctcgagtgtgactgaccaacgaaacggcacaaaaacgccaccgtcggtggtgcgtcaaaaccttcaccactaagcatcaaacttttaaatacactcttcccttcaaaatctcctcatattatctctctgtctttatcttcactctctctctaatgggttgatggctgaactcggaaacaacaaccatggtgtcaacacgacgtcgtctaggttctcctttctcaaacgctccctccaccgcgggagcca

SEQ ID NO: 106295 - DNA, 246 bp, Glycine max
ttctaagttctaaatactcattccattacactgtgcacttccttcctctctctctctctctgagtgatttggtggtggccatagtgagtagccaaagtgcaagagaacaaaagggtgatgtttcgtttgttttgtgagtgttgagagtgtgagacatggaagaagcagagaaggagttagagagaaggagcaagtttctgaacagtttgatacaacagaagaagaaagccgccatagagtcagagc

SEQ ID NO: 106296 - DNA, 250 bp, Glycine max
gaaaaaataaaaaataaaaacagtagctagcgtacacacagaaaaaaaaaaaaaaaatgttagtgtgacgaagttgagtaaggggactagccaggacagaacgagtggattctctcaaaggcctttcatcgaaaacctatccatctccaaaaacgtgccaatccaccaacaacccaggcacgcgcccttccaagccgaagcctactgaaactggcttgtgttgtgccgtttagcttcttcttcaccaaat

SEQ ID NO: 106297 - DNA, 241 bp, Glycine max
ataagcagaagaggagagggaatatgatgatgacgacaatggacgggatgatggacaagggggtgatggattatggtttcagaaggcttcatgctggtactgttcgggaaataggtgaatttgcacgtgagtcatgacatacggagaatagtgcgtcaagacgtggttcgatggccgatctcactgacgccgattcgacctacgtgcccgcatgtagatctgcggtaatatacatggccaa

SEQ ID NO: 106298 - DNA, 239 bp, Glycine max
gtttgttgtgacaactgtaggttggttttccaacggtcatatttctaccggtcatattttgttgttgcaaaatgcctatatatatctctttcctcttttctagaaatgacagactgagagctctagtttctttctgccaaaaatttatctctttctttttcctatacaaaacttaatttttgtgagagtaagagcattggtgttcataaggttcggggatcctttcgctgcacacgatc

SEQ ID NO: 106299 - DNA, 266 bp, Glycine max
cactcgagccgaatcggctcgagcgccaatgccggacatcaccgtcgctttccgcgctccgcacccctctccggtggcctcagcgcggagatccaccgtcaccaacgacgacgttttgacggagtttttagaggcctcgctccgcgtccccgatctcgtcttgcctgacaagatcttccccaaacagaagcagacagaagcgcctaccgaggttgacttcgtctccctctgcttccactgcgacgacgctcctcgtgacgtcgttt

SEQ ID NO: 106300 - DNA, 259 bp, Glycine max
ttcgagtgggacaggagctgagtatgttctggcttgcctcttccaatgctcaggggcttcactctcagcttgatagcctgttctgctcttcttggtggagaaagcaggaaacatgaggcaggacttagctcctacactgcactagagagatggtaagtatgcagcaacaatggtgatggttatgatgaagacgtggatgtggatttgactctaagcataggcggaggaagccaggttaatgatgtgaggagtagtagta

SEQ ID NO: 106301 - DNA, 260 bp, Glycine max
cacaagctctaagaagaagaagctattgtaccgcttgaagaccaagccttccctctctgactaaaatcattattgttatgtgtatgtgcaagtgggaagaggaagatcactacctgaattggttgcttacgttcctgcatcaactttcctgctgttcatatatgaatataaagtttttctttttttttgccattttgtttcaatgattattatgttttctaccatattatataattttatatatacctctttctgtgttt

SEQ ID NO: 106302 - DNA, 257 bp, Glycine max
ctcaggctcagctctaaaaacctgtctttattattctgttttcttgattgtcttgttttttttatcagtctttggttttccagatccagatggaggaaagcaggaacaacccttctcaagttgacagcttccaggtggatgaaatgcacaatcttagcattgttgaatggaaaaagaaaagaaaattacagagtgatcagttggatttgcttagacctaaacatagatgctgggttggaagtttctcctctgcacat

SEQ ID NO: 106303 - DNA, 250 bp, Glycine max
gctgattgcaatatggaacatccacaaattaacaaggttcataagcttcttctcacagcatttgttctcgttcttccttgcaagtttgggtttgtctttccctttagagcctccaggaaataataggcaatggcacatgacttcagatgttaagcaagtggcaggaaaatcttatgactatattatagtcgggggaggcacttgtggttgtccattagctgctacactatcacaagatttctctgtgcta

SEQ ID NO: 106304 - DNA, 248 bp, Glycine max
tgctattttgtttggaacactgcgtcttcaacccgaacgctgcgccaccacctcagcctccatcgtccacgaattggctaagaataccaatggcataccgacggtgcctcttgataagagggaacctcgtggatcggaggtgccatccgtctttcagttatgttctccacagtgaccaggggaagcacgaaaacaccaatgaaaaatcatcttcaggaggggatggtgattttacccaaacaaggtcc

SEQ ID NO: 106305 - DNA, 246 bp, Glycine max
cggctcgagaaggattgttagttctgagctatctgtctttcaaacaaaatgaaggattggtaattcaggtaagaaggtataatgaagtaatgaaccatacttgtaaattgtcaatgaatccggaacaacgatatgtccattttgtgtggaatattataaatctgcctccaaaggtacctgataaataatatctctgaatatttgttctttaaccgtgtcaaatagcgtcacatggtctgatccatg

SEQ ID NO: 106306 - DNA, 183 bp, Glycine max
ttccttctctacaacacaacacaacacaacgctctcttctcttctcttgcaaccaaattacaacttgttccactctctactactcaaaggattgattggcattgaggatcaaaataactattctccaacccgtcatgagtgtccaaacatcgttgctgattgctgcacgatgattgagcttca

SEQ ID NO: 106307 - DNA, 239 bp, Glycine max
ctttccagcatttcgttgcaatactctcttgtcctttcttagttcaacattgatattcctctccaatggctaccatcattttgaggtctaatgtagtggttcatgccttgggcttgttttgcatcttgctgttggtgcacaagggtgatgcctatgaatttgtagttggagggcaaaagggttggagtatcccaagtgaccccaattccaacccttacagtcaatgggcacaaaagagc

SEQ ID NO: 106308 - DNA, 243 bp, Glycine max
aacatgtgtgtgtatttatttaatgtggaaatgtgtggatattagaccgatacaaagaaataataaaaaaatgcacacacattttagttttttcatgtacccattcgcgtgcgcatagaattttctagagcgagagatttcggcgtaatgggtccaaacgcgcgcggcggcgaaacaagcggagaaactccgaattgacggcaacacttacttcaaaaaagaccgtttcggtgccgccatcga

SEQ ID NO: 106309 - DNA, 238 bp, Glycine max
ctcgagccggaaaggagtggaagctgttctggagagcccataaaaaggcaaaggggtttcgacctagaaaggcctgctgagagagacatttttggtggcggctgtgatgaacatgaggcaggacttagctcctacactgcactagagagatgcaaaataagcagcaacaatgatgatggttatgatgaagacatggaagtggatctgactctaagcataggaggaggaagccaagtta

SEQ ID NO: 106310 - DNA, 235 bp, Glycine max
  unsure (1)..(235): unsure at all n locations
ttttgatatagagattaattatcaataatccagatctttataaaataattcgttcggaggattatttgatttcttgtcgtctgatgatatagcatttctctgatgaagtgcgtttcttggtgcttggtataaagcgcaagcgcnttttgggttcgggaaaagaatgaatgaagagaagggtctagaacaacacaacactacggattgaatattgaattaaacgacgctcatggct

SEQ ID NO: 106311 - DNA, 237 bp, Glycine max
gagtttccttacaatggaggacctgactgattgttcaagattcttcggaagaagggttgttagagagaccagaaattgctgaaaatgtcaaagatacagatacagatggtgatattactgcggaagctgttgaggaatcaagcagtgctgatgatgatagactaaacgaggaatccccaaaaccagcctccgctgaagaagtggtcgctgttcctgcggagaacccaccatctgaag

SEQ ID NO: 106312 - DNA, 239 bp, Glycine max
acaaaacacaaaccagtgttcagtgttcagtgttcagtgttcagtgttacacttcacacagacaagaatccaagacaacaagggaaaccagacacatcattaacacacgacacaaacatcctcactactcttccatcttcattaagttaaggttattataatatagcacatggcaaacaaagatcttccacttcattaaagcccctcttgatcattaccgggtgctgttaacctgaaag

SEQ ID NO: 106313 - DNA, 241 bp, Glycine max
acaaaacaaacaaacatcttcaaacacaaacgacttttgagttctgtttgacacatcgaaactaaagtgcccgaatcagattcatcaaacaccgaatagccaaacactcccccgtgctggccactgcacttgccaccgtattcataaaaaaaattaatttctcaaaaaaaaaaaagaagaaaaggggaagagtgtgactattgattattcgtttcactattattatggtaaccgtttgaat

SEQ ID NO: 106314 - DNA, 234 bp, Glycine max
ctagatattgcctacttgacatatataattattgtttcgttgtaccttgaatggtaatttctatgcaggtacactacatcgtcagagtagtggaattgaaaattccagcaatcctccaaagctccgtaggaatgcctctactgcatgtgatacaattagcactccccaatatggtccttcagatccagctcctttgaagtgcacaagcggcttctgttttgatgaaaagctctt

SEQ ID NO: 106315 - DNA, 235 bp, Glycine max
gttggtctttcatgtgttccaatggatcaactgggaacccaaagagaagatcaaacaaattttaatccaagacaacaagggcaaccagacacatcaatcacatgcgaacccaacaagcgatctatgatgcaatcataggattggccgagtcagtcgcgtgttccgtggccgttgaattcgtgacaaatgaacggtggcgatgaggtagtggcagctccggcggctccaccgcacc

SEQ ID NO: 106316 - DNA, 267 bp, Glycine max
cgacctccgttctctcccctttgaagccttcccagcgttgatgaagactcggtttctttcggacggtcgaggaccagcgtggcggtggaggtgtacgatagccccggtgtggagtacctcatcgaaggttgcttcccgcagcgctgctgtaaggttttcaatgccgctaaggaacttgtggctgagattcgtcgcaaagtggaccccaccaccagcgttatgctcggaaggaagtcttttggctctgcgtgaagcctggtttcgatg

SEQ ID NO: 106317 - DNA, 268 bp, Glycine max
  unsure (1)..(268): unsure at all n locations
ctttgttttttcaattcattcttttaatccctctagtcactttaccttccctatttctaccaactaccacggcccanggattctcaattgaagaggcaactgtctatgatctccaacttgctttccgtagaaaccaattaacctctaggcaactagttgagttctaccacaaacaaatacaaacccaaaacccagttctgagaggggtgttggagttaaacccagatgactagcacaagctgacaaagctgaccatgagagaaaggct

SEQ ID NO: 106318 - DNA, 269 bp, Glycine max
cctcgagccgattcggctcgagaaacaacaaaacactttctcagactcatatcccatcttcacttctccctcttcttaaaaccagggagggagagggagagagagagagagaacgtgcttaacatagcaatggcaatggccaacaaggagagggagaagaagttcttctttgtagggtcactagtaaactacgcagctgaactaaagcttcttctcgcaactctctccttctttgtggtgttgccactctccttcaattcctcccttcg

SEQ ID NO: 106319 - DNA, 193 bp, Glycine max
gacatgaagccctattccgtagagctgagttgacaacactcgtaaatttgcatggtaatgaggtctgtatcagagcaatgtgatgtttttagttgaagtaatggcatctatctttattgtataatgcttttttatcgctattactttgctcttgtagttgagctaaacctttgttatgtattccacacaacat

SEQ ID NO: 106320 - DNA, 265 bp, Glycine max
actcgagccgattcggctcgaggtaatctgaaaattatttgattacctgtctaaggatttacccacttgtttaggtcttgactgaattatgagttgaatctggttgaatgtttgctttgtagtttaacagagttatctatgtggcaaatcttgtttgagactttgctatttttgttgcaagtggaggaagtatatgcaaagaaaatgaaaatattttccccaatattcatgtaagtgaaaaattggggaaaatattttcacttac

SEQ ID NO: 106321 - DNA, 266 bp, Glycine max
cctccacctgttgcggcgaagaatgcattttttccaaaccagggtgtttctcagacaaggcctagtttccatgctaaagggatttttgaagagaacaagttatttgaaaagccaaaagcaaaaacacataccccaatcactcagttgtggcatgcgaatggtagatgccctaaggacacaatccctatgcctaggccaaggaagaggatgttctaagagcaagttagtcaaaaggtatggtaggaagaagcacagaacaatcccta

SEQ ID NO: 106322 - DNA, 260 bp, Glycine max
gccgcttccttttcttttttcttcctctctctctctgtttcgattggcaagaacaaaaccctacccatcatttcccccccgcagtgttagcctcaagttttgttttttcggcgttgtggttgtgttttgtcttgtgcgtcggttcccttttgggttttgggtgcaatggtccctggttccagaacggagggtggcactggtacccacttgctctctgcggagtgcgcaaaaccattcaatccatcaaggaaatcgtgggg

SEQ ID NO: 106323 - DNA, 255 bp, Glycine max
cggctcgagtgattaattatctcagacgttccaaagaaattgcagacacagaagtctcattgctacaacaagacacgctgcgactacagtcacagcatgagagtgctttgaaggcagcagagtctgcacatgcatcactagaaactgagcgtgcaaaatcacgatcatttttgttctaccgaagaggagttcaaagcattgcagcttcaggtcagagaattgaattacttcgtgagagtaccatgcagctcaggg

SEQ ID NO: 106324 - DNA, 176 bp, Glycine max
cagcatatgtctcaaaggcccacggttcctcactcctcttccatagcctgcggccttcactctcatctcctggtctccagtgagatgaaccctagctccaattggtccctcttaatcaattacctcttaattagtaattacttaatctgcattagcctttcactcttccacacaac

SEQ ID NO: 106325 - DNA, 262 bp, Glycine max
atacaagataagtagtcagtttgaacagtcttgcaacagaaggcttttagtttcaacagaccttatgctgatttattaactagttgtcatgcatgaacttgaaaaatcagtaaccaagaaatgaagcagtctagctagttagctaggcagaatagaattcatgcttgccttgaatttgatgggtaaattatgtttcaaggctcaagtatcttttttagatcttcatatttgttcgtgttgcttattagcccactaaggacta

SEQ ID NO: 106326 - DNA, 277 bp, Glycine max
tctcgagccgaatcggctcgagtagaaatgaatgaataaataacaactgctttctggttccatcgttcctccaactttccctttgtcagttttcttttctcttctccttttcagttcatgtagaccagctgttcttgtatccccaatttccttgtgggtgaaaaaaagggagatttttatgtatgtacaattgattaaattgtcagtttatatttacctttaagatagatagacaaaagggagaggaggttggtccgctgccagaggaggattctgt

SEQ ID NO: 106327 - DNA, 136 bp, Glycine max
ttctgctgctggttggggccggattgatgatgctggtgtggtcaaggtttatgagatgctaactggcgttagagttgagggaaaactccaggctcaaaggaaagatgtcatgttacaatctcttccacacaacata

SEQ ID NO: 106328 - DNA, 273 bp, Glycine max
gcattggcattttttacaaggctctccagaaagaataatgggagctggtgattgttcacatttttgagaatcggttttctatataatcgtgtatatgaccttatcttttttggttagtcagatatttttgtcatcaatcgacaattatgtagttcgagagtttttttttcttttttattggggtgaattgctttttggaagtaatagctggtcaggtcatattagctatgtgaatttgcaagcaatttctgtacaaacataaattggtgatga

SEQ ID NO: 106329 - DNA, 271 bp, Glycine max
cgagtccagtgtctgtgctagacgagttcactcgttcgccactcagtccgagttgccactcgggacggcattcatttccgcgaatacagcaccagaagcagcagttgctaaagaagccaggagaggaagacatcagcagcacatacatctacgagagaatggcatacgagtcagtgaataggaaagtcaacgacgaagatcatttggttatgtggagtagcaaagccatgataaaaagtgtggatgaagtgtgcagggacgttgcatgggg

SEQ ID NO: 106330 - DNA, 232 bp, Glycine max
atcgatccttcttcgttaaggaagagccagaggggtctgattctgatcgaaacccgcgccatggccatgttcgattccatcttcaacaaaggccttaaggctgccaaatgtaaaacactgctgaagttgacaattccacgtataaagcttctcagaaacagaagagagattcagttgaaaaacatgcggcgtgagattgccaagctgcttgagactggccaagaagccacgg

SEQ ID NO: 106331 - DNA, 233 bp, Glycine max
caaaggtaaaaatgaagatagggagagttgctctgatgaggacagtgaagatgaagaaaaacagacagtatgtatatcagacaggcatagaccgcggaagaaacagaagaataataagagtggcaagggaaaggaatggttactaaggaagaaagagcagatgagaagaagaggaaatgttgttcctccaaataccaagtacacgggtcggaaacggaaggatcgcttttgat

SEQ ID NO: 106332 - DNA, 232 bp, Glycine max
cggaaaactactactagggcctgattctgattccctgtgatgtttgaattgcaagacaatgagggaaaatgtggttgtggcaagtgagggaatgtgaggaggaggaggcggaggaggaagaggaaaaagaagaagaaggtaagaaggggttgagtaaatgagtattttgagaaatggggtgtgtgtttgggaaagaagcatcaaagaagaaagaggaagtggaagttgcaag

SEQ ID NO: 106333 - DNA, 233 bp, Glycine max
caacgatgcaccgttctgaataaaaaggaggaaaaggataaagacttctcaaccagtttttctagatttccaattctaatttctaaataaatggaagaaaaggatagtaaagcttaaatctcaagcagtattgtcattaaggagaaagcttaaatttcaagcagttattgtcagcaacgaaaaggtttaaatagtgacagaacatactagagcttcatccgttgctagttgca

SEQ ID NO: 106334 - DNA, 224 bp, Glycine max
ccacaacacaccctttttcataaatattaatattaaaataccaacaaaaagagggtggtgggaggaagaaaactagaaaagtagcaggggcttacactgtaccattaccaaagccactttttgtctcttgaatttcttttccttttttcctttttgatttgtcattgacatgttgagggggtcttcttaatcaagctgtagaaacataaatggttgctgtctag

SEQ ID NO: 106335 - DNA, 230 bp, Glycine max
gtacaacctttctaataggctcaaatcattacagggactttgcaagcaacacttcatggaagaggattcagaattacttccaataatggaagcagtggggttgagcaaagaggaggaggaggatgcattagagcattgttttgttgtgatgcaaggaacacatggccggttgttaaagttccttcttgaggggctcccacctaatgattctatgaagtacttggacttga

SEQ ID NO: 106336 - DNA, 232 bp, Glycine max
caagagtcagaggaattgaagaaggtacatgaaggtggtatcgctcacaagcaagtgccagaatgaggtttgtggcaattgcattagttttgatgctagcatgctgctgctgctgtatgggttcagataggtggaggaactgctagaagacctacgtggccatacatcgaagataaatcctatctctggacatggctgtttctggtacccttggttgcttacactttgtggc

SEQ ID NO: 106337 - DNA, 228 bp, Glycine max
ctcaacgccgtcgacgcccgaaccgccgcctccgccatcgacaaccccaacgacgattccgcctccgccgtcgattgcatgaatgaatcgcataggagctgtttgccgcttcacagtgtggaggtagacgaggatcgcgctagtctagacactaacgagtcctctagaactacctcttatgatatcttgaccgctgaggatatttcgccaattgaatcagcaagggca

SEQ ID NO: 106338 - DNA, 274 bp, Glycine max
ctcgagccgtaactgaccaatttgatccctttcccttgttgtccaacaaccgttacgacatgaccggcgcaaccgatttccttgacaacatggctgcatgcttaacccaagttggcatggtagatcatgatcatggggttgttcatgatggttatgggacattggagcctaacaaaacgggtttagaaagtgacttttcccttcctccactagaaagtagaagcattgacgacaatagtagtaccccaattgatcatgtgaaaagccataacaa

SEQ ID NO: 106339 - DNA, 272 bp, Glycine max
ccaactttggaacggctcgaggtgggatgactccattcgactctcgtggtggtggtggtgacccgtgggatactggtcctcgtggtggctctggtggtcgtggaggtggcatgagggatggcagttttcgtggacgtggcagtggctttgggggacgtggtggcggcattagggatggtggttttggtggacgtggcggtggctttggtggtcgtggtggcaccccggatggaggtagtgggcaaggtgggcgaggtgatttctttcctggt

SEQ ID NO: 106340 - DNA, 271 bp, Glycine max
gtgggcactactgcatccttcattcccagaacaccattttccctcttaaaggcggcgacgctttcattccatgtctccactctcttcatctatcaatttggaaccctttttttcattcttcttcttctctttcctattccattcagtttgatgtccccttcccccaattccctcgccacgggactcacttctcttcccaaccctctcatttcccaatcctctcactccgccatttcgtcgaacatgtggcggcacgcgccaaacacgtctg

SEQ ID NO: 106341 - DNA, 274 bp, Glycine max
cttttcttctcttcttcttcttcttctacccttcaatattaatattccgtgcaaaaaccaccaacaacaacatcaccaccaacaagaagaacaagattggcgttatgggtctcttcctttctaggaatttggcttgcaaattcatatacccttttcttttctccaagaaggtttccaaggatttgtttcccaagcagttggagaacatgatgtctctgatctctcctcgtactggcaggcatttgcagcgctatgacaatggctgtcgccaagt

SEQ ID NO: 106342 - DNA, 266 bp, Glycine max
tcaataatcaacacggattgaatgcacttccaaagcttctctcttctcatacacattggagcacagaaagagccatcacacgggccacctgatacacaaaaacaacaacatatgatggctcaattaaggaatgtggcaattcttgtcgtagtcgttgtggctgcagtgttactacagagcacagaagctaaagattacgaggtgggaggtgccacaggttggactagttttcctcctggtggtgcttctttctattccaaatgggc

SEQ ID NO: 106343 - DNA, 261 bp, Glycine max
  unsure (1)..(261): unsure at all n locations
gggaaaggagtgagcggaagattaactttgagcttggacaaatngggtgaggagagatctggttcacagaacaaaagagtgaagatctatggagaagttctattgggatttataattatgttaatctgcacagtccagttttcacttgcagacactgatcccattgatgttgctgcaattaatagattgtatactgcattgggaaacctgttcttcctggatgggtttctagtgcgggagaccgtgcggagaagggtggca

SEQ ID NO: 106344 - DNA, 121 bp, Glycine max
gcttccacaaccctatcgcacatctttctcagttctacgatggagttttggggctgctcttggtgacgcaaagaaagataagcctgacccggtggttctctacatgatagttggtgatcag

SEQ ID NO: 106345 - DNA, 256 bp, Glycine max
attcatgccgagagcaaaaatagcagatgaatatcatggctgcactcaatctcttttgttttccagagtctatatatatcccctcacttgactttgttgtgttaacaattcccctcgtttcgcaagttcaaggagaatggaagcttttgtgtttgtatttgtagtccttgtcatgtacggttgtactgctggtaaggagtgcacaaacattcctacacaatcacacacgctaaggtaccagctattgagtctccag

SEQ ID NO: 106346 - DNA, 259 bp, Glycine max
atttggcagaatgaagagtgttattaatcacttcaaagggaatactgttttccccgtttaagaattggcattgggcgacctcctgggaaaatggaccctgtagcttttgttcttcacaccttcactaaacagaaaggcaagagttgaattttacattacgagatggattagaagctgtgcggattcttttgcttgagggatttgataaaagtgcaacatttgttaatagtgccaaaaagatagagcaaacaggttgagg

SEQ ID NO: 106347 - DNA, 253 bp, Glycine max
ggtattgctggcttcaatcaagaatctgaaattgaacaagcatcggtatgcgtcatggatggtgcaccttggtggcgagagcctgattactggagttgctgatagaattggtgtgggagtgcatttcaacccttttgttacttggaatggaaaggtattgatagcttataactcactcggtggtgtggtgtgtgaataagacccttaatttagttttagcaaactcaccttccagaacattttatttagaatg

SEQ ID NO: 106348 - DNA, 239 bp, Glycine max
tcttttgataacataacataagatattctaaatggcctcaactcaacccaacaatgtctactttccaaatttccctcctccatcaccgtcacaccccttcaatcctccaccaccaccccctcactcattttctcctcctcctccaccatttgcaacaccaccaccaccacttcgtccaatttctcctccacccccaaaggtgctcccaccaccgccacctcgtcctgttcttccttctc

SEQ ID NO: 106349 - DNA, 231 bp, Glycine max
tgcaagatgtgttcctgcgattgagttgttacacgaatctctgttgtggaaggtttatatggaaattggtactatgtgagttcattttccttttttcataaacttaatgaaaactgtaccatttttaccaaaaaaaaaaataaaaaaaaaaaaaaataaaaaaaaggggggcctcccataattaaaccttacctcccgggaatttattccgggacgggccctgagggggaa

SEQ ID NO: 106350 - DNA, 235 bp, Glycine max
gaattgaaggtttttaaccctcctctctctctcttgcatcttttgttagaacttcgaagttgctccattgtacctgctggtactccttgtgctgtattgtgcttgtgatctaggctatgtactcacctagggtgttttatttgggtggaggttttggaatgaaaattacgttatacttgcttgttttgacataagcatgagaaggtggaaattaatatgtgtttcatttttgctc

SEQ ID NO: 106351 - DNA, 231 bp, Glycine max
ggaaatggcgagttttgagtttttgcaagtgtcccaacattccacgaacaccactttttactgcctttgatttatgacttgacctgttcactacttcacttgtctggtctgtgccttttccacttccttctccaaccctctttcctttacacagaaacatagagcgttacggttacattacatagattgtcattaaaaaaccaaaaaattcaggacttgttgaatcctaag

SEQ ID NO: 106352 - DNA, 195 bp, Glycine max
ctctctcttatctctcagaatccaaaccctagaaaatttacccttccgacagaacccttgatttcctctctcaaatctctcatagcgtctacatcatcggtattcggtgtacagatcgcagattccgttaattttctttttctgcatccctcgatcgggtttggtttctgcagatgaatacttaattccgcacaa

SEQ ID NO: 106353 - DNA, 271 bp, Glycine max
gaatgcttgccatgttaagcattggaggatttgccataaatatgaatgcgttgagaaagaagggtcacaagatcagcaggaatcaccgtttcatggaacccattgccttatcatggagcctgaaaatggtaagttctcattcagtgaagttattgagcagagatcatataagggagatgtttactatgtcgaaggaggagaaaacagtgctgaggtcagtgatgaaacagctctaaagtgtaacgatggctgtgcagtgtgtggcaatcca

SEQ ID NO: 106354 - DNA, 119 bp, Glycine max
gcaactccaactgtgacaacaacaatacactctgccacagtgtagagttagcgtacttagctgatgaatggtgaaggtacccttctggagttctcaccaacgaccacagttggccaaaa

SEQ ID NO: 106355 - DNA, 243 bp, Glycine max
ctcgagccgctcagttttcatttgtagtcatggtcctattgactattgactaattagcaacacaaactagtgcacaagtggcaagcatgtaggtgctgatatgttcatcataaatacatgaaactttgaaacggtttatatgcatcaaccgcttcatataaaagttgatgcacatttcatttttcatcttaactgcaaaactcaagggaaatcctctttctctacttctctgattttataagt

SEQ ID NO: 106356 - DNA, 131 bp, Glycine max
ctcgagccgctatcctatctctttgcatattcttgcttatcatcagcggcttctctcttgcctccagaattgaaaagttcttccgctgcccataggctttgacacccttttccaatctctagtttttgtat

SEQ ID NO: 106357 - DNA, 157 bp, Glycine max
gcataaagcgggttactgtctgttcatgctaccatctctctctctcttacttagtgcgtccttgccagaagttacaatggcccaagcaacttgcctagtcacatctgaatcagtggacgaggggcacctggcaagctctgggagcagatctccgatg

SEQ ID NO: 106358 - DNA, 257 bp, Glycine max
gttccaatatgcttcattattcatgtgtcttaaaaggttaaaaaaaggacaaaactttggttcattgcttttgtgtatgtgtagtttttttaattgaaattataattttacttgaataattagtacttaatcaccacctttgcaaaattttacccagataactagtgcttaatggtgattttttgttacttcaattatgtgtacaaaaagagtttacattaaaaattaacataggttattaaggtgaaattctatta

SEQ ID NO: 106359 - DNA, 263 bp, Glycine max
agaactctagttccaatattcgtcttttgggctttccttacaataatcacccctacactcattctcttgtcagagaattcaaaggttgacctcgatccaaatggaaatataactgaaggagtgaagcttggacgaatgatcgggtacactcatacttatagcataaaaacagcatcaccgctagccaagtctgaagaggaactggcctcggcaccagccccagaaccattaccaacctcatcatctggaactagtactaatag

SEQ ID NO: 106360 - DNA, 262 bp, Glycine max
ttttaaatgtttgtttgaatagctcccctaagctcaccgaaaaagaaaaccttgttaatttagttattatatagaagtgataatagactgttaatgttattaatggcgtgggcttttaaattagccgtttgtaacatgtctcaatattgaatgtgttatgtcaaaagagtgctttgccgcttttattctgatcgtagatacaaagcggcaaagcactcttttgacataacacattcaatattgagacatgttacaagagtgc

SEQ ID NO: 106361 - DNA, 267 bp, Glycine max
ggcgaccaggacaagagtgttgggaagcggattaagagcgcgttgttgtggatggtgaccactgccattgtgtgcgctcttgttttggggattttgtatggacttattgggaaggtggactttactgttaggcatctctcttcttccacaagccaattcctagcacatgggacttcaatagtggtcaacaatgtattggaaacacccatcagtgttctgcattcactgccagtccttcatcagaaaaaacatggaccatgcgtgcta

SEQ ID NO: 106362 - DNA, 111 bp, Glycine max
ctggccatgatcatcaggcactatgagaatctgcagacacaggagaggaatggatctcctgcgcatattattcccgagattgctcagttattgcagttccacacaacatac

SEQ ID NO: 106363 - DNA, 267 bp, Glycine max
ggaatttatgattgttatttgatggaattaaataaaaaatttagctgtaatacttttgtctaagataattttcttgcaatgagaattgaggtcaatctagaaattagatgcatgcaattcaatgtgttttaacaaaggtagcttgtcagtaaacttgagatacaaatgaactatgactcttttgccagatcagatatgctatcttttaattgtatgtgacagacttgcaagtgctaagaaaaaatagtgtagttattattatttttt

SEQ ID NO: 106364 - DNA, 280 bp, Glycine max
cgcaacctcagcgatcaaaacgacgccgttctggtgctcttcactaaagacgacgagaaccaatccgatctcgcatccgacttcaacctcgccacgctcgccaacgccgcccccaccgtcgattcggattcccagtccgactccgaatctgaatccgattccgactccgactccggctccgaaagaaatggatctagaaagaggagaaagaagaaccctgaggatgatgatgaagatccaattaagctctaccggaagctgaagaaaggctattaccgat

SEQ ID NO: 106365 - DNA, 276 bp, Glycine max
agaaaagagaaactctgccctagttggctctgaagaaaagacaatagacacgtgaaatgtgctgagtagttgagaattgtgggtgtagacagtgatacacctcagtggtgtagtactagttattagtttggagcctacgttatatctctccagaagtagtagagtgtttggattggaatatccactatccaaatcctaccctggaattaacaaaccgttgactcttgactcttcttcacttgctcgctctctgtccttccatctccgacaattcag

SEQ ID NO: 106366 - DNA, 275 bp, Glycine max
tgttagcaagcatattcatagttcaattacagggaaagactgggcactggagtaaggtcattgatcatggtgtggttaataccatgcagctctgttctactgctcaaaagatgatactatccttgacataagtgagacctgtgctgtttcatatacagattcatttcaatctccagaaatccaatcatttatgctgttaagtaatgaagaaattttgtctattatttttgtatacagatattttgatcatttttttgttgttgcaacgaatagtg

SEQ ID NO: 106367 - DNA, 281 bp, Glycine max
gagcatatcataagaagcaaggttcaaaatacgtctggtcaatttgtattgaacaggtatatgtgaaaataatgctaaactagtgcgactattctaagatgtaacattatttaaccgatgttaggggccaaatggccaaaatttaatgagtaaattagctgattaactgtcgtgtttgaaattcacgccttgaatactggattgcacgttaatacttgcagtccctggggatgaattttgtggctaaattgtgcaaaggttatttgcaaagcattttaagg

SEQ ID NO: 106368 - DNA, 157 bp, Glycine max
tcgacaggttagcaaagaaaagctggggcaccgcatcactgctcttcagcaattggtttcacctttcggaaaggtatttctttttttgtatgttctttgtttcactttattgttgccccttcacagcagctttgacaatgatatggtagaatttaaa

SEQ ID NO: 106369 - DNA, 259 bp, Glycine max
gttctttttcctgaatttcacaaattatttggaggatgctaagaatgcaaggcaccttgctgaaattcgggtataaccaaccaaatcacaaattgtcagattgatgagatggcttgtgataatggaggggataattttgattggataaataattaatttgtacatatttttcttttttgaaatgaattgcattgattctttagcatattatttctagtgagcttctctgggttagctcaggcgtaataaaatgttccta

SEQ ID NO: 106370 - DNA, 149 bp, Glycine max
ggtggtgtagttgtcctccatgtacactctgtcgttgccagccaagattgttgttagggctttacttttgttaatgctgatgcatccatcttcttgagaactgaatattgacctacggaggaattcttgtatacactcatgacccaaat

SEQ ID NO: 106371 - DNA, 293 bp, Glycine max
cctgaagactttgaaatcccagttaggccattattgcaacgttgggttgccgaaggatttatacaagaacaagggaatagagacccagatgatgtggcagaagactaacttgtacgagctcattgatcgtagtttagtccaagtagcaagagtgaggctagtggaggtgtcaaatgtgtcgcatacatgatcttctccgagatctttgtatatcagagagcaaagaggacaaagtgtttgaagtttgcacagataacaacattctaatctcaacaaaactcgtagactgtcca

SEQ ID NO: 106372 - DNA, 287 bp, Glycine max
ctcgagccgaatcggctcgagaaaacttagcacatgtcgtgttcacctcaaactctactaacctgtcacagtacagtagtacgtatatatgtaaatataccaatagtttcacacccaagagcttttggggaatagctactgtttctctactgcaaagcaagtagatttcatgtctcactgacattgaagcagcgcctcgttagcccggaggattacaatagttaactatggtcactgttagtaacaagcagcagagtctttattatctcaacttttgtctctgtaag

SEQ ID NO: 106373 - DNA, 287 bp, Glycine max
ctctttgaaaacacttgtcgttgcgcagagttggttctttctttccccaatttgtgagtgttactattgaatcgattggcttgacatggcgagcgcgatggttgaggacgccaacttcgaagatgaccagctcgccaatatgaccacgacgacgtcgtcagagcttctcgtcttctcgacaacgagattcgcatcctcaaagtacaatctttttgttttttcttctgcttctgtaaccctaaccctaatcctatcgattacactatcttttttgctgcttccgtctt

SEQ ID NO: 106374 - DNA, 286 bp, Glycine max
gttacactggggtcaccacctcgagctgtgctctctctcttctgtcaaatcaaacatggggttctagaaacccagcaccaagtcttgggttgaataacatggtaaatttccacgggacgcccatgacacagcctgctgcatcatctcatggtgcatcaatccatcaacttccaaataccccgtggtgtttcaagggcattgattctggtaactgttcgcccgagggggtccctgatctaggtctcggtcagatttcgcagcctctcagtagccaacttcacggtga

SEQ ID NO: 106375 - DNA, 263 bp, Glycine max
  unsure (1)..(263): unsure at all n locations
gtggggaaattggtctttgtgagtggtgccagaaggagaaagagggagtcggacttctcagaatcgtgatctgttggtgcgaatcgatagtcacagaccaagaggtcagggtnctgtgagtctgtagagagtgcgattttgttgtctctaaaatattcaatcactcaaaggaaacgacacaacgtattagacgaagctcgacacgaggaacacatgatagtaggcgaatcttgctttaacctttatgcttagctggttggtgt

SEQ ID NO: 106376 - DNA, 276 bp, Glycine max
gtgatactctcaagtttttttttcagagcttcattgccttgtaagcaagtcaattttcaaggcatttgaatcttctgtgatgttctattgatctgggtattatgaataagttctattgattttgagggaaatattgttttgtccttgcattgaagtgaattttattttatgtgatgtttcttttgccaaaaagattcaactgcatctgcaccagacctgttgccatatgatcatgtagccgaataggtgaagttactggggattaatatccaacgg

SEQ ID NO: 106377 - DNA, 276 bp, Glycine max
cttcctctctcttcattcttcttcttctcctttctccgctcttcaattgtttcgttttcttctccgatttttcctttcgataagagtatctattcttttttccttttcccttttccgattccctgaacaaccatcctacgtagggttgcaactatttgttatccatcgctgctgtttgtggcttgccttttcaattattcactcaaacaatgttatatttgtctgcgacaatgaaattagcttgtagctgaagttcttgagaggtgctgaaattgg

SEQ ID NO: 106378 - DNA, 276 bp, Glycine max
  unsure (1)..(276): unsure at all n locations
ggccatactattggggatgattcagcgactccgagatgatttcaagtccaatcaggagcaactgatcacagttcttaatacttcttctgtactgttgcaaaatcagagagaacagacgtgctttactaaagctcaggagcttaggtttgcttcttgaggctgcaaggcgagctttcacagttgatgccatggagccagctgaagccnatattttgattgttgaaagtctgactttagaggcgaatgaacatgacaatataagcatcacacacagtg

SEQ ID NO: 106379 - DNA, 312 bp, Glycine max
taaaagctcaaatccaaaccctaaaataccaccgccgttctcatctctcttcccagccctcacctcaacgctgcatcttcacgtcgtctcacgaggtgcatatagtagagagggaaaatgagtcgaggaggcgcagtagcagcagcgaagggaaagaagaagggtgctacattcaccattgactgtgcaaagccagtggaagataagatcatggacattgcttctctcgaaaagtttcttcaagagaggatcaaggtatttgaagtacttgacgaagaagtacttgaagaaacacaatgtgcgagactggct

SEQ ID NO: 106380 - DNA, 133 bp, Glycine max
aagaaaataaaggtctgggatgctgttagcggcgtcagatgttatacttttgaaggtcacgatgctcctgtttgttctatttgtcctcatgtgaagcaacatgttgattttattttttcaacttcaaccgacg

SEQ ID NO: 106381 - DNA, 307 bp, Glycine max
  unsure (1)..(307): unsure at all n locations
actcgagccgcggctcgagccaagtttcaacaaacaaaaaagcctaggtagctgatatggaactactatcaaacaagtgtcatggaattggcaatggagaagacaactctttgtttgggaacatgaactcctaaatgagttggaagaaattttgcagggcgcctgtgttgtatttgtagaacaagactcatggatttggctactggatccaatctctggcttttcggttgcagcaacatataaattggtgcanaatgctttggcacaagaacataatccaacacaacatggatctacatacaacaag

SEQ ID NO: 106382 - DNA, 293 bp, Glycine max
tctcttcattatactatctttgataaccaaagggactttcacttataccaaactattaattgcttcttcagtgatcatggccaaatttcaggttttgcacaaatattttttcatttttctagcactagttgtgtgccatggttcccttgtagcacatggcaggaaaataaatgtaaagccattgaaccagcaacattattcattaaacacaaaaactgtagctaataataatccttacccttcccttccatcacttaaaactaaagttgaatcaccacagtatgaggaagcta

SEQ ID NO: 106383 - DNA, 280 bp, Glycine max
taataggtatttactggtcaattattagagttccatactgtgccacgtactagtactaagtgcaacgagtcttcaagccaataaaaacagaaaaaagatgaaaaggaaaatgaaacagagaagagagtgcccttgtaatggtccttgcatggaaaacatgcttcagttctatttttttttttttaaatttgtctatttgttcaatttccggaggaagttaattattttgagttgtgtatacaatgatgaattttttccttgatgaatcaaaaaaaaagga

SEQ ID NO: 106384 - DNA, 305 bp, Glycine max
atggagggaagggttaatgagccaatcttatgagctggatgagtttgactgctgtagatgcttgtcagatgaagaagaagaaattgccaatgaatctggtaccaataggttttcaggtcctcaagtcaacattgaaacaaatgatggtaaaaaattgaacagtgatgttggaatcactgaaactgaggatactgaacaggaaattcacggccttgacaaagaaaaaattccagctttgatgtcatgttcaggtgctgagtccataagcactgatggtggtggtctagttgcttcaggggattcag

SEQ ID NO: 106385 - DNA, 292 bp, Glycine max
caaattcatagtaaagcaagtcttagttgcttctaatttttcaattatccaccgcaatctttgaagctggaatcaattcaactatgtatccaaaagtgcactacgtaaacttagaatcaataatgaatccagaactaattctttaaaatgaaactaaaattgtgaaaatttattcaaaatcatgttgagtaatctttcaaaataattttaaagaattttagatgaaactaaacactctcaatatgcacacccaacggatggaacagattatggctacttggcttagtatgac

SEQ ID NO: 106386 - DNA, 293 bp, Glycine max
taatgatgatgggcatgatcatgacaatggagatgatgtttttgatttggactgtagctatgccaatgtacaaagaactaagcagcacctactagacaggctttgtagattcgagaaacttgctgagctagatccggtagaacttgagaagagaatgctggatcatgaagatcgcgagtacgaaacatttactgaagaggatgatgatcatgaagacgtggacagcgaaacagcatgcgaagaaaacattctcagaggagaaatgtttgaagtcctctgctgccgttcaagtg

SEQ ID NO: 106387 - DNA, 300 bp, Glycine max
gcctcaacgccagttcatttccgtttccttattttcagcaccaaaaccaaagtactgcgcatattctccctctttgccatttctctctcactctgcactttcttcttgaaatttcatctcacttctcgcatctttcaacatttttctctctcaatctgctgtttcttcttcaacatagagatggtatgtgctagctctagtctctttgctttaattggttttcttatatgcacatgtctcttccgcgttcatatgttaaattatcctcgctgggtatatctacaatacacgtttttgtaa

SEQ ID NO: 106388 - DNA, 281 bp, Glycine max
caagtttctatctctataaaaccacacatacccacttcactacctcatcataaggtgcctctaccaccgtactagctagagagaattgaattgaagtagtaacacctactaccaacaatggtgtctgagtcagagaataacaagtgtagtgatgatcatgtgctgacaaagctctctttcttaatctcacgcccgaccatgccgccggaaactctcatgtcgccgccgcagaacacgatctcggttcccttcaagtgggaggaagcaccggggaagcctag

SEQ ID NO: 106389 - DNA, 272 bp, Glycine max
ctcgagccgtttgaatcaacaggtctcttctttcaatttcaaccaacaagagtgttcatggatcaggtgggaaggaaggagagtgagtatcaaattaagggaggaggagataatgaagacagcatgagcatgagcgtggcatgtggtgtgatcaacactgtagactggagaggcagaccctccaatcccaacgtgcatggtggaaccagagcttctgcttttgttcttgggcttcaagcatgtgaaataatggcaatagctgcagtgggaaa

SEQ ID NO: 106390 - DNA, 227 bp, Glycine max
cagattagtaccacaaaaatggagaccaagaataactgaatatcgtacagctcaaaataacgatttaaccaaatgcaagtcatctgagcaaagccaattaattctttacaaagatctacaagtacacgcattagagagaaaaatttgcagacaatatagataaggtgtattcacctataattttatcaataacgccggtaggaaagactcctatatatagggataca

SEQ ID NO: 106391 - DNA, 146 bp, Glycine max
gtttggctttcccatgtctctaccttctttagattatctttcatgtaagattagtccctcccagaaagccaattataaacaccctttatttgtgttatatgaagatatttaaacgtttcattgaaagtaagatagttttgagtaat

SEQ ID NO: 106392 - DNA, 270 bp, Glycine max
cgcagagcgtcgtgtccagccttgtcagtgttagaagaagagatagagaagcaaacaaaccctagcgcagagaagagatattcttcttcgcagaatcattgcagttgcgagcaggccgaagaaacctaacctgcattcgaaaatcagcccccttggaaatcccaacactagtgtggtacctgtgctcgacgattgggcgttcaaggggaattagcttcgtctcgcagaacttcaacgcatcattcgtgaccttcgcaaacgcggtgtttg

SEQ ID NO: 106393 - DNA, 256 bp, Glycine max
gtgagatagtattacaacagacaggaagtgactgtaagtctcccagtgatatggctgaagaagtgatatcctccttggaggagaacggatacctgcgggcttgacttcatttttaaagcctttctttgttaattgctttaaagggccctttcttgtaacctgtagttatgttgtgtgaaatgtaatttttggcacataaaaacttgctccctccatatttatcattctttacgtgacacagtcgagtttttcaatt

SEQ ID NO: 106394 - DNA, 245 bp, Glycine max
agtaataataatatcctcctttaagttaaaagtagattaatgatattgtctcgtaagattagctagtcgacccatgagtgtctttaggataatgatacgagacactttgaatctgctaagacgtactattgcttcaatatactcttgtctggccttaaattctacgaactcgcccagtacatacttgttgtcgttaagctgacacctatagacaatctcctttgtcagtgaaaaactatgatttg

SEQ ID NO: 106395 - DNA, 221 bp, Glycine max
  unsure (1)..(221): unsure at all n locations
atcaaatttgttagagataaaaatgctttcttgaaaactttgtcaaaaatttcttataaccaaattctaatatactgatttgatagaatatataaaatgaagnaatnttttggtcaagaatatgattaaagaaggttaattatttatagaggttgtggatctgagtagtattaattttgtgtcgaggtgggggtagattgattgaggtagatctaaggaaa

SEQ ID NO: 106396 - DNA, 231 bp, Glycine max
  unsure (1)..(231): unsure at all n locations
ctcgagccgcgaaacgtcggaacataaggcggggaagagttagtttcttctctcttcgatgcaagcggggagaggtctccttcggcaccgcactccgcgcacggaatccacgcttcgctctccgtcgtgatcttgtcggtgtccgattcgctgtgctcggcgacgtcgtagcaactgaaatcancgctgattcagacgaaacacgatcagacatgacatgagatgacctcg

SEQ ID NO: 106397 - DNA, 277 bp, Glycine max
ctctctctctctctctctctcattcacacgaatcacactctccacagtgcgattcattcaccaatggatcgcaacggtgttctctctcttgcattcatcggcatctcctaccaccacccccgccgcgcctgctccagcgaccaagccacctgcagcctctcctcctccggcgccggttcccgtgagctctccccccgctcccgtgccggtgagttctccacccgctcccgttccggtggcggcgccgaccacccctgtggctcacgctccggctccg

SEQ ID NO: 106398 - DNA, 269 bp, Glycine max
tggaattttgagcctttccctcgaaatcaatgcatgtaaagactcaagctttgatgccgcatattggtttctcatttgcacattcatgtgggtcattgtgtgcttctcttagtttcagcatagtggcaaaatggtctgtgtttgtttgatttgagggtagtagctttgtgttctttttcatattgaggcatgaattttcttgtggggtagattttgcatcttcaaaccttaagtgatagcaccccatttggcaaaagtgaggatttcag

SEQ ID NO: 106399 - DNA, 231 bp, Glycine max
gtgttgagtccgtggtggcatcaaaatctgtgtgaagcaaatgacccaacagtctgagaactccaccaccaccaagaagaagaagaagcaatgcaacaaccagcaatgacaaaagcaaagtcagacagcagtggcatgggtatgctcctggtgttattcccccaagacaatcctcaacctcaacctcaaacaccgacattaaacccatgtgtcaacttcccttccccctcc

SEQ ID NO: 106400 - DNA, 236 bp, Glycine max
caaacggataattttcttccaaattgccaccttttctcatcaaaattgcatagaaaaaggaaaaaaaactattgttttctggttactagtactttcaagggggtgtcttttaagatatgggtttgagttctaagcaggtttctcatagaggacttgattggaaccagaccttgtggaggctcaaaacttggagctcccaaagcctcctcctatgaggaaacaacagcaacaaactc

SEQ ID NO: 106401 - DNA, 228 bp, Glycine max
tcgagcaggtgccatacggtgatgattcacacatttttaaaagtgttattcctggaagtgaaataccagggtggttgaataatgagcatgagggaaattgtgtaagcttagacgcctctcctgttatgcatgaccataattggattggcgttgcgttttgtgcaatatcgtcgtacctcatgaaacaatctcagcgatgggggtttcaggtccagatcggagtcattt

SEQ ID NO: 106402 - DNA, 242 bp, Glycine max
  unsure (1)..(242): unsure at all n locations
cctcgagccgctcgagccgctccagccgctcgcgncgctcgagccgctcttgctcttcccaacttctctcactaaagaatataatactcaaaattcatccatttttattttatttttcttaaaacacaaagcgcgtatcgtctcacgcccccgacgatgggttttcccgtaggatacccgagctgctggttccgaaactgttcctccacgcgctctccctccccgcgtggctgcgctccctc

SEQ ID NO: 106403 - DNA, 232 bp, Glycine max
cttgtcttcagaccaaagcttccaaagtactcagtggatgaacttcaagtcacaaactttgatcttgcagacaacaacagcttctcagtgacattcaacttgacaatcactgccagaaaccccaacaagaagattggaatagactataggggtggcagccacataagtgcttgtacatggacacaaaattatgtgaagggtctttgccaaaattctatcaaggtcaccgcaa

SEQ ID NO: 106404 - DNA, 235 bp, Glycine max
tcgagatatgttcagatagtcactgagatttcaaaggagattaacattgatgaagtctaccatattgtatcttcatagattgggagccttaaatctgtgggtgactgaaatgctgtttgggttccttcgagtcgccctctcaatcttgaggagacaatgttagagggtgagacacaagtcaaccgctggacgaggtgagggtcctggaaacctggctgtggtgggtggatcaatg

SEQ ID NO: 106405 - DNA, 236 bp, Glycine max
ctgaagttgagagtcagaagaagccaaaatcgcgaacatgtcgcacgagcaagacatgcgcgctaacactcatggcgctcttctccctctcctcctcctcctcctgcacccaacctgaggttcggaatttggaagcgcctcaggctcggactgaatccaagttacagaaccctctgacttcatgaggtccaagctcgttctcatggtctcgcacgaactctctctctctctctctc

SEQ ID NO: 106406 - DNA, 226 bp, Glycine max
gcaacatgttggtaatttcctctgcaacgtgtgggagaaagttgatttcattgtctactacgaggatgtcctcactcgtaggcctgttaagtgggtcttctacacaggatacactgctcacgtgatgacatttgaggttggtgcagtacttgaggatccaaattggcaggctcctgtgtattgttttagtgagaatgggaaggaaaacaatagccccattttaaga

SEQ ID NO: 106407 - DNA, 244 bp, Glycine max
tctttgtctgcacagacaccaccctataaccaacatgtcatcaatcacaagctcacctcactcacaacttcttcttacccacaaccataatcactttactcttgcaagtggagattcaagcctcattcacaccctctccgagccctttccggaccatctcgattaactggagctccatcacgcccaagtacatacccatcatgcccttccggctcaaagccgggcattaagagcgcgtattcaa

SEQ ID NO: 106408 - DNA, 233 bp, Glycine max
gaaaaaaaaaaaagaatattacttgccacatgaagcatgctcttggggagtaagaagattgaaaaggctctgattgtgtttgcaaagagaattgtgagcagtttttttcatctcaactaaccatgaagacagaatctcaaccccagcaactgaatgtaattttccttccataccagctcctggccatatgaaccccatggtagacacagcaaggctatttgccaagcatggtg

SEQ ID NO: 106409 - DNA, 266 bp, Glycine max
tcagtctctattgtcctcttgttgcagttctgttcacactccccttttgtatcctctaacttgtactcatggcatgagttttcctcagagcctgatactcacgtcacactcttcaaggaaccaaacctctctctcttcaatgaacacccaaaacctgataccctttatccttcttcttttcatacctttctcagtttcattcttaaccacagataactttcttcttagttgtggatcacacagcaatgcttccctcttcaaccgtg

SEQ ID NO: 106410 - DNA, 264 bp, Glycine max
ctcacacacacaaaaacacaaatacaatctctctatctatattgttggcgttctcagcactttctctctctaaaagattaggaccagccgacggtggctgccttctgaaggaatcaaagtgcacacacactgcacgcacaaccccccaacactgtcttctcctctttcactttctctctctttaaagaagggaaatttggtgtttttattgtttttgcccgcaattgggaattgcgtttgtcggggtggggaagaaaaaaaaga

SEQ ID NO: 106411 - DNA, 259 bp, Glycine max
ctcgagccgtttcatttcttttctcacacaacatgtactcaacaaagagcatagctgattcacgcatcatggtgttgtgccttggcactattgtgtctaatactattggggtccataagggagaaccatgtgccggaggaggatgaagccaccgcgagagggcggagaacctctttgaaaggccgtgtgatgagatatatgtggtgggagaaggggagaccctacacaccataagtgacaagtgtggtgacccttttat

SEQ ID NO: 106412 - DNA, 261 bp, Glycine max
gtttccgctacttaactcactgcaaaagtcaaagctcagccaaacgtaaataaaaaatgtccagagatgcaaacagaaacggtgctatgtcgaaaaacgctgaaaacgacgaagacgaagctccgtcacggagagattccaggaagtcgcgagaaaattcggacgtagactcagaattcgacagaaagcacaacaattcgcggagaggaagctccgattccgaagacggcgataggcggcgctggaggaattgggaatcga

SEQ ID NO: 106413 - DNA, 254 bp, Glycine max
aatcgctcaatcattcagatgggtgtcatgagagaagtagttgcaatgatggagtttcatgctgcttaatatcaaatactctggatcatatcaatagctctaatgaaggatgcaatcaggcagcatcagaggataatcatacacccttggaaaacatgttaattgatatgtctggattggattctaaatctgatcctttcgagtcaaaacagggaaagaaagtaaaaagaagacaaaggcagaggaaattatat

SEQ ID NO: 106414 - DNA, 262 bp, Glycine max
ctcaactcgcagctcttttctctcctcgacttcgctttgtctctggaatctgcagcaaaccacctcgctcactcgccaactctatgtcagcaggtgtttccttgaagactagctcggggaattcctagagttggaacatagcctcgtgcattgtacgctatatttctgtcataaatcacaatcaaggagttaatccgttgcatgctcaatattcaatggatggtgaccatgaaattgatgtacatgattcaagattggggga

SEQ ID NO: 106415 - DNA, 254 bp, Glycine max
gctcaacgtctgctgagaaaaatggcagttctcagacagttcaaaacgggcaaattccccaaactactcggaaatatccggatgtgcaagctaagaatggctcaaatttaggttctaacaaatctaaacagtgcacccaaaggactaagcacccactgcactcagcgcaggaacacccacagtaagaaacggtgtaaagtagttttgaaaagactcacgcacataatgtttcaaatggatctgaggttgttagt

SEQ ID NO: 106416 - DNA, 280 bp, Glycine max
attgaactccaaataagccaaaaaaacatcccaagaaagcaccattgtggttccacccgcttgatgatagaaggcaagagaggatgaatgtcaactacaaaggcctttaaaatgacagaatcaagccggagagaggcataatttcttctgataatagtggttacaattcttcattgtagccacttgtcatcatgcacaaaaaatgcttgcaaaactcaagccagaggcaaaagcaatgagaacaacagcctaaactgagataagggacctgctcaaattg

SEQ ID NO: 106417 - DNA, 181 bp, Glycine max
cggctcgacgaaagctacaatgaaatattagtatttgtggagtctgtaatcattataggaatccgtttcgttttgcgaagaactcgccctaccccctacagccgccaccatacggttctaacactacaaaaaaaaaaaaaaagggcggcccccccctacccacttccccgccccgggattt

SEQ ID NO: 106418 - DNA, 274 bp, Glycine max
tatcactttctcctttaatcgcaaccaccaccgatcccgaacccgtacctttgactttgttcgagcaacaataatggatcttcctccagaaatcgacggttacatcaaggaatccatcgatcacagcgtgggccttcccgtatcctcgcaaaccctcctcttcaagcttcacgcttccctagaatcgcagcgccaactccgcgaccagcacctcttcctcctcgcgaaattgaaggagaaagacgctctcatcgaacgcgctagagttttgtga

SEQ ID NO: 106419 - DNA, 271 bp, Glycine max
cagtcatagacgaaggcattcttttggggaagatgagctagcatatttaccagatagaaaacgtgagacctggattaatgatgacacagggagccatgcttcagttccttcaccagaagaaaaggatgacattaccaatttagatgaattggggaaggattataaaagaagcaaaaggcgtggaatgcttggttggttgaagctgagaaaacctgataatattgatggattatcgccaaatgttgatagtgagggctctggaaatgggtca

SEQ ID NO: 106420 - DNA, 260 bp, Glycine max
gaaatatggtccatccttttaacattatggtacatgaagtggaagcttttaatttcatttagtccctatctcatggtggtggtggcctttcttttatttgtctattggaatggaagtgttgttctgggtgcaaaagaagcgcatgcagttaccccacattttgcacagatgctttattttagtctggtttctgtattggctcaggctcctatgcacttcactatcactcaagctgtggacctgtttcagatgtttcggaa

SEQ ID NO: 106421 - DNA, 274 bp, Glycine max
aacaataagaaaaattgctaacaacacacttttgaatataagaaaaattgttaacaacacacttttaaatatattttttcttattggttaaaatttcttgaaaattatagaaaataataaatcataaatcatgcatatttaattactttctttcataattttataatttttaataaattttaatcatggataaaaaaatgtgttattagcatttctcctaaaataatcagttcccttccattctcccaagttccaaccggaaaagcagataaac

SEQ ID NO: 106422 - DNA, 259 bp, Glycine max
catggtgatgccactcctccgccaccgcctagccactctcactcaccgcttacgccactcctccgccgccgccgccaccccgaaaccccccatcctctacaccgccgacacaaccgccgacgccaccgccaccctccaagtcctctcgtggggcaaaggcgcctccggccagctcggcggaggcgtcgaggagacccgcctctacccttctccggttgccaacctcgccgtccccaaatcctccttcgccctctcccaa

SEQ ID NO: 106423 - DNA, 275 bp, Glycine max
acgcgactcacagttactaatctcacgcacattctttctctctctaaattctgcaccacaatccgcacaatgaccaaatacttcttgctgtgaatgtcgaaaatgcctgcaggcacaacatgtgaagtgatgcaaaacggcaacacttgtttcaccaggttagtttcatgtctcgctccgcaacttgttacactcttagatttattttgtgtctcgacatggatgaaattaatggttatacgagaaacagatcctttcgtcattgatggggaaga

SEQ ID NO: 106424 - DNA, 263 bp, Glycine max
ctatagttcattatcttagttcaccaaactcttatacgtagagccaagccaaaccaaccacaccaagtacaagcagagagttacaacacatatttctttttcttttccctttttcctaggcacagcacacgccctctcacctagaaactgagagatgaattctgatcagtttcagaagaacagcatgttcgtagaaacccctgaagatggtggcaaaaacttcgacgatgatggacgagtcagaagaacgggtacatggataa

SEQ ID NO: 106425 - DNA, 266 bp, Glycine max
gagcaataaagatattgcaaattttcaccggccaaaagcactatggtatccccatgacaatgaggtggctgtcaaagcacaagggaaattgccaacacaaggacccatgaaaattattataaagagtttgggtggcaaggggagtaaactgcatgtcgatgttgaagaaactctctcttctgttaaagcaaaagcttccaaaaagctagattttaaggtatcagaaacagtgaaaatattttatttagggagggagcttgaagatc

SEQ ID NO: 106426 - DNA, 259 bp, Glycine max
agaaactcaattctcactgaaagaaagttgctaacacttggcaccacttatcaacttatcatagttgataacatcaaaggcacaacattgagggaatgagggttgttatatcagcagtatgtgctattgtgctattctcttatgctggtgagacaacaacttaccctcttcgcgaattttgcttcactttcactttcatttcacacacattcaactgctttgttgatgttctctggttgtagctgcgtacgatcctttg

SEQ ID NO: 106427 - DNA, 256 bp, Glycine max
gtttttctttttaattctgtttgtatatagttgctgctaattcgtctccgatatcaagtatcaaaatctaaacggcatcagcaaacatgtctcaacaccatggtgatgaaatggagtatgcggcagatgataatgaaatggcagaggtagaagaggatatgtatttccgtggcagggcatttggtgaatcagattcggatgatgacgacgactacgaatatgaccctttggaaaaccgaatatcagataccactgc

SEQ ID NO: 106428 - DNA, 274 bp, Glycine max
ctcaaaacttttagcttctcaagttatgtgggttttacttaatggttaataagaaatctttgtaaagtgtttgttcgttgctgcaattgctagtgttggagtgcacctaacacacaattgtgcaataaattagtgatcagagtgattgccttatcgctgtacatgctagggcatcgctgttgtggcagcacttggtattttgtactgcaatgcccatgtatatctattaggtattaggttaaaccctaaagtattaagttctaaatgacatggc

SEQ ID NO: 106429 - DNA, 278 bp, Glycine max
ctctgttgtatcaaagtaatttgtattgttggaaagagctatcgattctgttgtatcacagtaatttaatttccagtaaaaaaaataaaaaaaacaataaaaaaaaccaaaaaaaaaaaaaaaaaaaaaggggggcccccccaaatgggcccccccccccccgggaatttttccgcggcggcatccgggaggggccactctttccccctaagggggccttttaaagccgtggggaaaacggggaaaaatgtcttccccgggaaaaatttttccccccc

SEQ ID NO: 106430 - DNA, 267 bp, Glycine max
cagctacactctctctttcttcactcttcaccgcaactcacacttccggcgaaacctcgccggaagccatggccatagaatgagtctccgccgattgccatgtcggtctcctgctccaactgcttccccgacgacgaccactccttcctcctctgcggcgaggactcctacggaatcatggattcctcgacggagtgttccgccgacctcgattcctcgacggcgtcagatcgcgagtccatcgccggattcatggcaacagaacgc

SEQ ID NO: 106431 - DNA, 273 bp, Glycine max
aaagacctcttgctcagccactcccactcccagggacgcatcgcctctccaccaatcgtgcaaattctggaactagtgtaacatcaaaaccagaaagcaccaggggctcaaaatcatctctatatttccccttaccgaaacctggttgtgtttttaacgggggagaacctacagatgctgaggaagatattggcactgcatcaatttctagcggcactctattgatagtgatgaccaatgtgactcacattttcttagtcctctggcatctga

SEQ ID NO: 106432 - DNA, 268 bp, Glycine max
gataaatttatagaaaagagaagagtaggtattagtattttggtggttccatggatctctgagacggtgatgagaggagagaaggagggcgtcgtggcttgggatatttggaagcgcttattcccggcacgaagaagcaggtcgggttggctcccaaacataagaatgggaaacaacataaacctgtttaagctctgctctggcctcagagtccttggctacttgatgatcctcttgttcggtgctattgttgccctaacttactacg

SEQ ID NO: 106433 - DNA, 264 bp, Glycine max
aaatgttacaacaagaacctcccggagggaaagtggagaaaatcacgagaattgagaaccggagcagaaaaccgatccgattcactaaaccttaattttctactttcctttcgcaacttaccctcttgtctataaacctgaatccctgctttatccttaacctctccaacaaaatcccacaatccaagtcctcttgctccatccatcatctgctgggactgctccaagctcttcagacaacagaccaactccaccacttccccg

SEQ ID NO: 106434 - DNA, 227 bp, Glycine max
aaaaggggtacgtgcctcttcttggggttgttgtgcttttgtcgttatggaaagatatgttaatacagtatattaccccatagtatttggatcgtccttttgttgtagctattctctgaggaaaacaatatgttgggtaatgtctattattggcctgtcaaatgttatttctgtaatagtgtgtttggacgggaaaaaaaaaaaaaataaaaaaaaaaagggggggc

SEQ ID NO: 106435 - DNA, 268 bp, Glycine max
aaaggaggctgtgggagcttttagtccagacaattcaaattctatcctatacaagctttttggtaacgcttcaacactagaccgtgacaaatcgactagtattgttgagcctgatcagaaagcagatgagacatggagtccacacgccttccaatcttccaagtttgctcattggtttgttgaagaagaaaagaagccagtggatgacttgacacataggccgaatgacttgctctcacttatcgttggtggagaaaaaggggggttg

SEQ ID NO: 106436 - DNA, 260 bp, Glycine max
ctcttcagatattgttgaagacacaccactggcagaacatgctggagacaagctaccatctgaattctcttcagaaattgttgaagagacaccactggcagaacatgttggagacaaccaaccatctgcatcctcttcaaaaattgatgaagagacaccaccggcagaacatgtgacagacaactctgaatcctcttctaaaactgctgaagagtcaccactggccgaacatgttgtcgacaagctaccctctgaatcca

SEQ ID NO: 106437 - DNA, 284 bp, Glycine max
acaaattcgcgtggatctctacggaatttatttcccacgcgcattcattctcctactatccagatcgccgcaccgttccatttcctctatcagcatcggacattgatcctaatttcccaacagtagaagaaagatctagggttcctcctgctgaatccacagctctctcaagcgcatttcttgcattccgattcaaattcatctcgctccagcaggtttcctttcgtggatgagaggggttacggttaggctttaaatgagcatggaggtctgtggcgatacgg

SEQ ID NO: 106438 - DNA, 279 bp, Glycine max
tgtttaattcttgattgatttttgttgggttttgatgcccaagtagattgattaaatggtgtggcaactgttgtggggactagagtttgccttattcacgtcctatagctcaagggggctgacaataccattgcttacactcaaggaatcccaaacccccatttttttgaatgatttttttggccttgtcatctaagcctttaaattttgggcactagtatattattctcagttcccccgagttttcttgtttttcttattcatggtactattgtgttt

SEQ ID NO: 106439 - DNA, 176 bp, Glycine max
tagaagttgttgatgttcgatttgctacagatgatactgggaagtttaaaggattcccccatgtcgaacttgcaacagcagccgctgctgttgcaaactcaacatgtccttgcgattgaatggacaacaattgtttaatcgtgaactccgacttgatttagctcgggaaaggggtg

SEQ ID NO: 106440 - DNA, 277 bp, Glycine max
ttccactatcgccatggcctcccactcaaaccaaccaggttctttttcagtctctccttctatctaaatttttcatttttcgatgacccttttgcttgcttgtatcaggtcccggagctgaagggctaggagagaaggaccccccaacaagtttccagaacccgctttctgagatatccccgtcgccgtctccgtcgtcggcgccggcgccggcgctggtgctgtcgaactcggggaagcgaatcgaccaggcggggaagaagaagtacgtgaagca

SEQ ID NO: 106441 - DNA, 243 bp, Glycine max
tctccatgtctgtcttataatattccacgagattatttaatattcatttgtattcttctgctaatatgcttgttatattagcaggtgcctattatccccagtcatgtgcattctattaacgattccgtgtcagcagaagaagctgccgatgattacgagtttgtcattcgacagttagtgaaaacccgtgttgtcagcgtgtctgagattagtgactgtccaaagtttgacctcattctgctc

SEQ ID NO: 106442 - DNA, 201 bp, Glycine max
gtattttagaagctaagattttaaaaatcgtgcattagttcctgactttataaaacatactaatttgctttagtcttttttatattttatttttcattatcgtttttacactagtaagaactgaagtgaatgttaacattgtatattatcattattaatttaagttctgtgaaaaaacaaagtagcttttgttatcatcag

SEQ ID NO: 106443 - DNA, 257 bp, Glycine max
ggcatcccagctgacctccattaccacctttttttctttcttatagtcaaaccttaccctgcctccttatgaagtatagaacaagtgctgtgctagctatggcctcaacctttctttggtgtgttaggagagtgaaaaagatagtaccaacatggtggcttcaaaaggattttaactccaacatgtgaacatagtgtaacatgttgataaataattttgtttctatgagtggttgaaatttattaaaaaattatcaa

SEQ ID NO: 106444 - DNA, 179 bp, Glycine max
ctaatgtaaagattttcatttctttcaactagttgtcatctcattcttggtggaggctaagatgggagagttaaacatgtttctcaccatgggaaaggttttgtaaaccattattttttttttattattttgatccgatggatttttcttcttcaaaaaaaaaaaaaaaaaaggggggc

SEQ ID NO: 106445 - DNA, 265 bp, Glycine max
  unsure (1)..(265): unsure at all n locations
cgcagagtctcttgatcctggtttcctcaccctagggtaactcgnntggtccctcttcaattaacttcaatatctgcgagagagcgtgcgagtgacgcgcctcccgagagacgccatgggaggtgacagtgccattgaggaatccgaaggggtcaacgtcaacatcaacgttcgctgctccaacggtttcaagttttccgttcagattgccgtcgattccaccgttcgttcctttcgagacgttgtcgctcgcaactgcgacatc

SEQ ID NO: 106446 - DNA, 273 bp, Glycine max
ccttgattcataacttcgcgggttaggctcagacccaatctctattagtattatatatcctggtcttaattttgattgacgcaagctagcagcctggccctttagatcttggaggaaccaaatggctccactcttgtaccttggtttcagaagggtgctcctgttctctcttcttttgttcttttttgtttctgtttgcttcagtggtgtttgctcagaacatcaaccagagagcaaagccttgtctagtggtggcagcaacagcagaaggag

SEQ ID NO: 106447 - DNA, 165 bp, Glycine max
catcagtcttcaacgacatcatgacgccgaacaagttcgacaatgcttacttccaaacccttcgcaaggttctagaagtaagcattgtcgaacttgttcggcaatgcttacttccagaagcttcccaagggcattggtgtatcgaaatctgaccatggtttgtat

SEQ ID NO: 106448 - DNA, 270 bp, Glycine max
atctcgctgtgtatcgataattcactaacgatctttcaaggaaatactcgttgcaatcggtgattctgcagttgttattgaaaccacaatgcggggctatgacgacgaaggagatggttacgacgattattatgagaatgagggacaagaaaatgagtatgaagaggggggtgaggaagagtatgaagaagaggaagaggtgcccaggaagccttcaaaggaagaaatggagtaccttgagttgaggcagaagttgaaagaatccattag

SEQ ID NO: 106449 - DNA, 261 bp, Glycine max
aaaattgctcatccgcaaagagaataaaactcccctcactctccacttgcgttgtgtcgttcacaaacccgtcaaaaccgaaaacgtctctttctttcatcatcgaaatcaccgccatgtgctcagtgataagcgcgcaaggggtggccgttgcgaccgccgtggccgtctccggcacggtgatcctcctcgccctccgtctccggttctgcgatcttgcatatccaatgtagggaagaagagcaagaagaagaagaaaag

SEQ ID NO: 106450 - DNA, 262 bp, Glycine max
ggcggttcgcctcagtagttcacataataagtacttaataaactgcatctgagttttgtccttaacaaatttgatatcatggactctaagaagccatgaattttcctggcgtactttgtagattgaataaattaagacatgcatatgtaaggccacttattactggttggaacacattatgcattgctaatcatctggtgtgtttgtaatttttaagttatataattaattatcttagtttggtaagttatttttgccaaac

SEQ ID NO: 106451 - DNA, 259 bp, Glycine max
cttttggatcttgcaagaacattgctgtacctaatacaagtccagcgaccaacacagctggaagctttacaggatctgttcagttctccagatcagcttcaccagtccattctccaaattgctggtgtttcctcgtgttttacttcctgcttattgctgttttattgtaactgtgacgagtattattgtataccatatgcaagctaagtctcaagtgaagctcttagtgttataatatttacgtatttatgtatcataa

SEQ ID NO: 106452 - DNA, 255 bp, Glycine max
  unsure (1)..(255): unsure at all n locations
attggatatgttttatattaaaggaaaaccctttttgtagttgttcaataattactaaaattaaaattcttttgtaagtcacttgaaaactctttgttccactgtagagagtaaatcaaanctttaaaggatcaagtctacaagtatcagatccttagtatgcctttatccaatggttttcaatttagttggttcatgacgtggaactagtagagcttctcttcaagtaatttttacttggataaacttctctcc

SEQ ID NO: 106453 - DNA, 258 bp, Glycine max
  unsure (1)..(258): unsure at all n locations
cacaaacaggcacatatcgtaataactacagcacacagcatctttcgctatgtagctgcatncagtatgcagaaaattagcaaagaaactgactagctttcatgctgaatccatattgggctttgagaagaagctctttggaacctgtttgtggtgttgttaaagcaaactttcaacagccatcgtatattacttgaatactctctttagaaacaagggttttagcatgataattatggttcatgtaaaactacatac

SEQ ID NO: 106454 - DNA, 251 bp, Glycine max
atttgtttcgtgctgtggcattatgtgttaatcacattcattaacattattatttttttgtaacaaggaatgtgtattgaaaatttgaaacactcacaaaccaaccactagtgacttaccgaattacgtaccagaagttcattttttgtgtatgacaaattatatatattcacttggcctaacgttacaatttactactattcaggttgcaagttggggtgcctatcttctgtcacgtgacatattagcag

SEQ ID NO: 106455 - DNA, 255 bp, Glycine max
cctcgagccgaatcggctcgaggaataaacgggttgaagttgaacaacaaaatcggtcgacggctgaagtgaagatgcctgcgggtcaattacttgttactcttaaatgacttgaatgagcagaagagtgtgattagacggcaaccacctcaataattataattatatatagttgagcccaagagaaaaatcatcaaatcccaacccgatcgatcttaatttgcgctctcccattttcttcttcctttcccccaa

SEQ ID NO: 106456 - DNA, 252 bp, Glycine max
cgattcctgctcgaggctataaccttgtcatcctcaacaattacacatctggcaacaaacccaataggtggcataaagagagtagagcatagcagcaataatgctccaatgaagtgttcaaataaatagtatgaaattgtgaaggaaacttacccaacaggcacttcaagaacatccaaagctaactttgcctgtcacataaagtagagcaatagggtaagaatgaagatttgaacgtagagtgagtagtga

SEQ ID NO: 106457 - DNA, 262 bp, Glycine max
ggaggggtgaagttccctgctcttaaaacattgtatgttgctgactgtcatagtctgaagtctttgccactggatgttacaaattttcctgaattagaatctctgtttgttcatgactgtgttaatctggacttggaactgtggaaggaccaccatgaagaacaaagccccatgttgaagttaaaatgtgttttattcaggggtttaccacagctggtggccttacctcaatggcttcaagaaactgccaactccttacaga

SEQ ID NO: 106458 - DNA, 269 bp, Glycine max
taaccatctcgttcccttttctgctttgttgaaatgccatgacagttcagatttgtaggaagcttattggaagaaaaatagctttgatatttggaaatgtctgaagtgagaaacaaagtggatttcatccagttgcttggacctgacatgtcaatcaagattctcacccatttggatgacccttgtgatcttattcgggtttcttctgtttccagttcttggcaccgatttgttattgaacatggcctctgcaagcaactttgcttgaa

SEQ ID NO: 106459 - DNA, 266 bp, Glycine max
ctgctttttgtttttgtgtgttataatcttttttctgcagatgccctattgagaaaaaagaaaattattgtactctaatttttatccctcttatttttgtggtacaatataagtacctttattttcttctacttggttgtatacattattataataagtctatgtatttaaacgtttgagactcgatggtgtgtttgaatttgttagtgtgagttgcacttttggtcaaaaagtgctctaataattggaaaattaagtatgacatc

SEQ ID NO: 106460 - DNA, 262 bp, Glycine max
caccccgatgcttgtgttgttgtgttctccgagacggtggaacttgatttcttcaaggacagctttgttaaggatgggtacaaagttgctgttgctatgccaaatcttgatgagcttctgaaggatatgcctgctcacatttttgcttctgtgtggtttgaatggaagaagacaaatttctattctactcattacagtgagcttatccgccttgctgctctgtacaagtatggtgggatctatctagattcagatatcatcg

SEQ ID NO: 106461 - DNA, 261 bp, Glycine max
catgctctggtttaaaggttgtctttcattaatttatatagagacctttgaatgtgaaactagttttaaaatatttgaaggaaaatgtaacccacccagagggaatcgaaaaacaacaaacaaagagaatcgactttctccaaaaattccttctccctccgtcaacagtggttgccctctggtttgtgttgaatgtaaaattcagtattcagtattcagtggtgtgtttctggatatctcatactcctcaccatctgtgat

SEQ ID NO: 106462 - DNA, 260 bp, Glycine max
  unsure (1)..(260): unsure at all n locations
gtgaaacggtgcctattctgaaagtcgtctccacgttctcctttgcgcatattgtggggtgtgctgtgctgtgtgtgccactattgtcatattccgcacaatgtgctttctcctgtagagttctgaaccttccttgcttttgtacatgtcaggaccctcttggccgatattgctgaaggctgcattgttaggtcattagtgagtttcggagatctaggtctgttgcaagctgcatttgngtaacgccatgtgttagagca

SEQ ID NO: 106463 - DNA, 274 bp, Glycine max
gttttataggatttgaattgaatgagcccaaatatatatatatatatatgaattttcttttagccccattttgttatttttttactatttgttttgttgagttaattatacaagcaaaagcatgattgtcaaagttgagttatatggaaacactttatcaatgacgattatggaattgtaataaaaaaaaaaaaaaaaaaaaaaaaaaggggggccccccgacaagtgaccccccgacccggggatttatttcgggacggttccctgggggggt

SEQ ID NO: 106464 - DNA, 271 bp, Glycine max
cctgtttctcctacatgtggaaaggttttctcaaagggactgtctcgctacattgatcggggcacattggaaatctcccttcaccttattgttctttctctatctgtggttatggctgggtctggacatttacaaacctttcggttgttgagattcctaaggagcagaaattgtgcagatgggcagtcaagttatggtattcagatggcagtaagcttagctattggtttcttgtttcttggtggtggaatgagaacgttttcgacaaaca

SEQ ID NO: 106465 - DNA, 271 bp, Glycine max
cttgtcttagagaagacgaaacactctctctctgtgtgataataatcatatcttaaagcgtcaaacaaaaaaacaaaaaaagagaaccaaatgttcttcactttttcgttctatcgccatgtgagttctgacacattctattcttcttctcgtgttccctctttacttcatacctcgctggtttcccctgactcaccaactcggtgagtcaactcgatggcctcatcctcacgtgcaaggagcagctcgccattctcgcaccgcaaatcct

SEQ ID NO: 106466 - DNA, 238 bp, Glycine max
cttttctctctctctctcccacttacactagaaatttatcagaggccaaacaccctcttttcctattgtttgttcctacatacctcaagtgttgtcattaacatattttcatcctaaacaatagttcttgttgctatatattcgttatccttaattaaccacatacgtgaaatttaaagatgccatcacaagcagagcttagcatgatggattacaagccctacagctactccacaca

SEQ ID NO: 106467 - DNA, 272 bp, Glycine max
ccgtcgatacgcatcggctcgagcacacactcaccatttgcctcttccatcttttccttctaccattggtgtctctgaagtctctctctttcatctagtatgttttgggtgtccttccattttaagttgcctgtcatggcttcgtacaccccaatgacgtatcctcattactggggtggctggatttattgcgtctcatgttgccagtcggcttgtgcggtgctagcctgactgctgaattgttgtgcttcataggcttgattattgttcta

SEQ ID NO: 106468 - DNA, 268 bp, Glycine max
tcatgctcagcatctctgtcattattgccattggtgctgctatttttattgtcattggtgtggtggttgttactgtcctaaatatccatgcaaggtcttcaatgttatcttctgctgctccatttgtgttctctggtggtgatgactatagcggttcacccgcgaatgatccaaactatggccagcttgtgatgttttcccggcgatgctgaattttgttgatcgtgctcctacatatccttaacaagaccagtgaattaggcgtgga

SEQ ID NO: 106469 - DNA, 262 bp, Glycine max
caggaattgctggagcttcctctcaatgttcaatggtctactcagcgtgatcaacgacgttgcgagccattagctcgcaaacacttgtcacaccaggcacctcgcgacgcgttagcgccgtctagcgtggtgcctgcaagagtgcatggcttcttctggtgcgttgaacttggcctatcgaaaggcgtcgcatgcagtgtacatcatctcgagatggttagagcacatgaatgcgagcgtctaaggtgataatatccagtta

SEQ ID NO: 106470 - DNA, 279 bp, Glycine max
aaagaaacaatatgataatgatgaagtgacggaaaaaacaggaacaacatccaattatgctgctattcgtgatcctgtttcaccgtttagcatggatataacagatatagacacctcagagaaccaatcacacctgcaacccatatctaccgaggtcaaaatggataatatagagcgagaaacttcataatcatccagtctttgtattgctggggaaacatatcatgcaccatatgctcgagtatcttctatggacgatcctagtaccagacatagtga

SEQ ID NO: 106471 - DNA, 115 bp, Glycine max
ccatatccctccctgctcattctcctattgttgttgacaagccgagttactttctatggttcagagaaggagaagagtaagactttcatagatccaggtccagcaggaagccaag

SEQ ID NO: 106472 - DNA, 274 bp, Glycine max
aaaaaaaggggaaattgtggaaataagtacacaaattagcagatcttgggaagtgaaagtgaggtgagtccaagcaaggtcagtgtgcttatttcccattttgcccctgaaattgtaacaagttcaggggcaaaatgggaaataagcacactgtccttgctacaatttctctcaagtacctctatgataatgataagaatcacttcttagtggtgactttaatgtaggttgatctgcaatttgttgacaatttgtaattgtctctagtcttttg

SEQ ID NO: 106473 - DNA, 271 bp, Glycine max
gagaacccgaccccttgtgtgtgtaatttagttgtttattgtttatagcaccacacgcacaaagtgagatagaaagagagtaaaaagaggttgttctgttcatccaactcttagaaaaaaaacagtgaaagagtgtaactaaagtttcttagagtatcactcgtcatatatgttacatggacatggctttggctgtgtttccaagttcaaaatcaaaactcagatagacacaaactcgttctcttggtgaaacaagacaacgcaaatgtgg

SEQ ID NO: 106474 - DNA, 279 bp, Glycine max
ggaggaggtaagggttgtgtccattggtatttcgaactaaatgacattagacagtttgaaactggagggcaagatctatatatccggatgcctgctttggagtcagtcaaccaagaagagcaacatggacacaccacaagcgtgaagataaaaattgcaaccccaattgctgcaattagtgggatacttttattttgcatttttgttatgtacagagttcgaaggagcagtgctgataagtcaaagacaaaagataatttaaaaaaacagctagaagat

SEQ ID NO: 106475 - DNA, 134 bp, Glycine max
ggcctcatttccacgaaactcacttcatataggggctgctggacctataaaacacaagtccttccctcttgatctagcatcatatctacattcactactttgattccctgaggtttctgcaatctacaaaattc

SEQ ID NO: 106476 - DNA, 269 bp, Glycine max
gtgagagtagattccaaagaaaattccatgcaaatgacttattatggagtgatcaccaactcttctggtgaagattggaaggatgtcaagctcttcttgtccactgccgcacctaatgttggtggaactcctccattgcttccaacagctaaagtaaccttcaaatctgattacatccctcctccagtggccagaacattccatgaacaacaagcaagaagaaacatgaacttcttagagaacaatatgcaacaggctcactggggaga

SEQ ID NO: 106477 - DNA, 241 bp, Glycine max
gtctgaaaaccgaaaatgaagttttagtactctgtttagagcagtattacacaatcttgcgttgcgttctctatttacaaacgcaattgccaggaaacaatctcaatctcaatatgttttcccaccacaaaatatgaacctaaactcataccagagggaccagttgtgttccctaccactctttcgttctgatcaagcattgccgataacctctttaccttctctacctttgaagcatctc

SEQ ID NO: 106478 - DNA, 266 bp, Glycine max
gtgaaattggcatagatcacattatcgtcaacctgggctttcgaagacttcaaatcagctttatcaaaagccattagcactccaccaatatctgatttcaacttaaagctagtgtttgacgagctactagaacgggcaaaggagaaggaggagaaggaagctaagaagcgttcacgtctttcggatgatttttttcatctgctacattctaccaaggacattactgtgtctttaaagtgggaggattgtagaccacatgttgaaga

SEQ ID NO: 106479 - DNA, 248 bp, Glycine max
ggggttgcatggaggttctatagtgagaggagtgaacttaggagggtggctggtcatcgaaggttggatcaagccttcactttttgatggcattgccaatggagacatgcttgatgggacagatctgcaatttaagtcagtgacattgcacaagtatgtatccgctgagaatgggggaggactgaatgtgacagttgacagggatgtcccatcttcatgggatctactcaggttatggagagcatctg

SEQ ID NO: 106480 - DNA, 266 bp, Glycine max
cgctcgagccgaagcctctcactctcactttccgtgacccaaagcaatgctgcagatgcatctctcgcctctgaatatataaattttcttttcactgctatgccgcaaaacttctgatcccaccggccaccactctctctctctctctctctctatatatatatatatatcccatggctactgttatctcttctctctctttctccactctcactcaatcttcttcgcagaggcacctcaccacactctcttccaattcaccaacc

SEQ ID NO: 106481 - DNA, 278 bp, Glycine max
gttcgacttcgactccatgagacgaagacgacgtcgtctctctggtcagaactcagaagcagtcctaattcctcaatggagagttctgaagaggaaactgatggagtctctggtaatcatgctcctaaggaactgattcgtttggcatcaaatggtgcataatttatagatgaagtactcaatggtcaaaatgaatgctgtctggataattttcgcatggataaacatgtattctataagttgtgtgatatcctgcaagccaagggtttattgcgtca

SEQ ID NO: 106482 - DNA, 266 bp, Glycine max
tggtgatgcaactgggggaacaacatcatcggagatgatggatgagataaacttgaatggtgctgcaaatggtggcaacagtagtgatgatgaggtagtggttggagaggatgaagaattggatgaaagcaaaaataatctgaatggtacatctagctcaagcacaaacttaaatggaataactggtagtgattccatgaatggagacaccttgaactttgaaagcagaagacaagtgttcacatgatatgggttcttcaggttga

SEQ ID NO: 106483 - DNA, 271 bp, Glycine max
ctcgagccgctcgagccgaagagtctgagggaaaggatccaagtattttgacaaatgagtcgcagagagatcctagagtgctggagtggaggcccaatggtgggaaaatgcttgctgtgggttgcaagggtggaatttgcatgtgggctgcttcttatcctggaaatgctgcatctgttagatctggagctgcttcctttttaggaggtttgtctagaagctcagggaatcggtatatcctggtcgattttcttcgtagtccatatgatga

SEQ ID NO: 106484 - DNA, 209 bp, Glycine max
cagcattcacccaatttttttcctgtcctctttgcctctcagaggaggctctgattctgctcaggtgtaccgtgtcaagagatcctgttgtttatgaggtgtgaagggagagagacaagagattagtcagtgtggttatcaacagaaggatgccttgacaagctgtgaggagatgacggatggaatctgtggtgtgacctaaacctcga

SEQ ID NO: 106485 - DNA, 242 bp, Glycine max
actagtttttgatccacagccgccgctaggagtcaagcctctgtccgtatctgctcgaggcatttcgtgaagctgacctgcctagctcgcttcccacatgttctaccatagagtcgtacgatcatgtatataaggtagtcgaaggatcattctgcggcggtgcatgtgctgcgtcacggtccaatattatcaccagcttctcaagaagattctgctcgactcatatgtcgtatgcggttgca

SEQ ID NO: 106486 - DNA, 130 bp, Glycine max
gaattcaactcacttcaatttctttaccttatatatatctatccaattaaccactcttatattagaatccacaaatctctcgtcgtccaagaagagagcaccacaaattaattctcgtttcccattccca

SEQ ID NO: 106487 - DNA, 251 bp, Glycine max
aaaatttgtcgagatacttggatttatcatataatcctttgactggcagagctcctgagtgttcgaagaataggacaggataacttttccttatcctaaacagcaataagcgaagtggtggaatccccccatcaatcgggtagatagatggatcattgtaatgaatctgcaggagaacaacttgaatagtaaattgtcaatagacatagcaaactctacatcattggaaatcatcatatctggagagaata

SEQ ID NO: 106488 - DNA, 277 bp, Glycine max
accatcgatcacataacattgcagcttgacgtggcggtccgagcttctgatttcagatcttctaatatcatcatcatgatactacaaattaaaaactcatttgcattggtataataataataatattagacgatctgaaatcagaagtcgcaccgccaccatcgatcacataacattgcaaatgagtttttaatttgtagtatcattttccatttttctttcatcccttttatgtctcttaagttaaaattcgggcctctagttcaccataggggac

SEQ ID NO: 106489 - DNA, 262 bp, Glycine max
cgatcggtgagagttagaaggtgacgatgccttaaaatgtttgttagcttaaaagtaaatccgaccatgatgataaggaggatcccaatcatcttcgattaaaaataattggagaattttcaattaataaatttttaactatcagattaaattgagtgttgagatttgaccatgttttcaatttaattttttttgttttttaaaacagtaaaatgtctttggttctatccacgacaacattggaagaatcttgacaattctt

SEQ ID NO: 106490 - DNA, 279 bp, Glycine max
attgtatcataattgaactttatattataaactcaacctcaatgcaatcaagttttgaatggttcctaaggcacaaacttgattggattgaggttgaggttataatataaattataattgtatcataattgaacttagttcatattcatacatttgcattttgattacaagttgaaataggaaataaaactttcattctggattctattctctgctattgtttggatacgtggtctctctatgatattgttggcctaattttaatctttaagggttgca

SEQ ID NO: 106491 - DNA, 269 bp, Glycine max
tatgggattgaggagctctctcactttggaatattataagaaggcatatattcacattgttgaacaatatccttattggaatcgctcatcaggaagggaccacgtctggtctttttcatgggatgaaggtgcttgctcatgctcctaaggagatatggaacagcatgatgttagttcactggggaaacacaaacacaaagcataaccattcaaccacagcatattgggctgacaactgggataaaatatcttctgacaatagaggcact

SEQ ID NO: 106492 - DNA, 143 bp, Glycine max
ctgacaactcttggtcaggttcattctggatggatttttggtggaatagctgagcttgttgataattccagagatgccaaagcaactaagatggacatttttgtacgatctgatcaacttacagaaatctgcggaaggctgtc

SEQ ID NO: 106493 - DNA, 290 bp, Glycine max
ataaaaatccccttccactttgaacttttcactactgtgtcgctttcgctttagccaatttcaacgtttgactttttcaggcattaattcattagtttcataattagggcattcaacaagtcaatttggatttggatcaattaattgcgctgcgctggatttgttgactttgattttgggattacgaataatagcgccatcgcattcattgcacgtaggttggttgttttaaaggacgagagattttaagtgtcaagtttataagataggcaaattgagtctcagttgag

SEQ ID NO: 106494 - DNA, 288 bp, Glycine max
gaaattcagcatcaggacaatgaatacaaggaaaacttcagaagcccccatttaggatcctcaagaagagtctcatccccagaaaccattagtctcgaatccaattcatatcaaagcatcaaagtgttcactgatgactgggagctcaattccccattttctgatgtctcttcgctttatcaagaacctggggcaaaattttcagtgcatgatcgtgtgctttcagaacaaattatagaaggtgatgatgacgacgacgacgatgatgaaattatgagctcctatgtc

SEQ ID NO: 106495 - DNA, 290 bp, Glycine max
tagcttggagggaaaagaatagtatgttgatcttattttgaagtcctgacttgccaatgatgttttgtatacgcgacgctttggatttgaagtatatgcattaattgaattgcattgttcaaccgcaggcccttagaaaaatctgttattttgatttgtcaattgcatagtgaaagcttctactacgatcttcccaaattgtttgctttcagtgatatttaaggcggttttggtgtatatttcaggtgattaagagaatcagagtttgcttatccatataacagatcatt

SEQ ID NO: 106496 - DNA, 275 bp, Glycine max
gagcagtgcttgcctatcacaaggtgcaaagcttgaagtggacagactcaacctgagaagctttggggcctctatctggtgtgtggattagcatgtgtgcttgctctcctcatatattgtattcagaccatgaggcagtactccaagcaccgccccgaggagcttgagtcttctggccatggctcaggatcttcgtgtctgcgcacattccttacattcatagatgaaaaggaagagatagttaagaggcgctccacgagaaagacaatggaggg

SEQ ID NO: 106497 - DNA, 165 bp, Glycine max
acggaaatcaaacacttggtcctgctacatactttgttactggtgcaaaccgatgggctattagcaatgttggattatttacggggagcagtaatcctgtctacaaaagttttgtgtctaatcagtccactggcactgtgaattcggtgctcttccaaacagcac

SEQ ID NO: 106498 - DNA, 276 bp, Glycine max
cccaattactcctgaacaataaacttccctctaactatccataccaaaatagatgctttagatggcagctgccagctggttagtaatatttgattttgttgattgaaatgatattttgtttgggttcttgtagttagtatgggaaggacttggacttggaggtgtgtcagatgtaggaaactggagcagggagaatgataacaagaaaatccttcttgggataggtggtggacattatgcacctcggcatgtggatgtagtattgaaagataatgt

SEQ ID NO: 106499 - DNA, 263 bp, Glycine max
  unsure (1)..(263): unsure at all n locations
agaagaagttgtttttcctttgcctcttagtcttaacggttctcttcttatgttggacaatgtttttcttaaccagtataacatcctgcatgtttttccttatttaacggtttaattttactataagtaacgaggattcttgttctaactactggcgcctctcttntttctttgttctctgattcagctcttttctctttttgcacataatagatgtacttttttgctattcataatttggtattgatcaatcataaggagtt

SEQ ID NO: 106500 - DNA, 280 bp, Glycine max
gaaaagcaaaacactttctaaacggatgagaaagatgcaggaatttgaaaagaagatgcgacacaaggaatttgagcgtgctttcttcagagagttctggcctgaaaatgtgtaaacgagaatcaaatgatccatattgtgtcagcatttcctcttgcattactttcgttgtactggtgatgatttcagaaattgtgcaaggtggatcttcagggatataggaaattgtgaaaggcgttttgcaaacagaaggaattcgaacacctttatgtgcaaattt

SEQ ID NO: 106501 - DNA, 263 bp, Glycine max
attcgttaccttatgactagtgcaatctaagggtagatataacgatacacaacatgcgatctttgggcagaatcagacaagccacttgctgtgtgcataccgtacccagcagcaggcaacataaacgcaatgctactactagcatgacatcgtcagttcacaggcgttcacataacctgtgtaaacactgagtatcaccacaaacgccttctcacagcaagacgcgctgattcacggaatggcctctcttcgatgcgcttaga

SEQ ID NO: 106502 - DNA, 182 bp, Glycine max
atcttaaaactgtccaattaatataaccacccaaaatagtaaaaaagtagtaatagcagttgacatttgacaaacacatgagcagaatttcacactctagtttagggttcactttgtatttgcagtagcacttcctcgcgcgccactacttcccgacgattctgtcgtcgtcatcagcaatg

SEQ ID NO: 106503 - DNA, 263 bp, Glycine max
gaagatttcaaccatccatatccttactggaaaaacaaataatactttgttgatgtactcttcagattaaatgaagatatcaatccaacaaaaacaacccattcagggatgacactttcagatctacaagcagacaagaatgtcaagatctgctgaggcgaggtctgattgagccaacccggtcaactgggcatgccaagctttttacgtaggaaaaaagagctgaaaaaattaaggggaaagaaaagattagtcattgacta

SEQ ID NO: 106504 - DNA, 258 bp, Glycine max
tttgcttttactgatctcagtcttccacctcactgtcctagattgtggggtttctcttttcagttctcatcgtaactaccataggttccgttaaacattccccttttcgtgctctttttatttttatttttttcatttctcaatgcgaattgaagcagatttcactgtggttttttattctcttttcatttgcagttgctgctccgaaaagggttttcctaacaccgcccatgcaatcaatttccgagtaaagaagct

SEQ ID NO: 106505 - DNA, 273 bp, Glycine max
ctcaaccctgtcaaaggtgtcaagcacatgctgttgtttgtattctgtgagcaaagggtggtgtggtggtgcttcttgtggttggtgttggggtgcgcaggataatcggcaaagtaaggtgaaggttagggagagaaagaatcaaatcaaacaaacaaccccatttaaaaaaaatatatatagaaagagaaaaaatatataaagaagattgttctttttattaacacaacccaccatagttttaaggccatttaattggttcttattgtgttt

SEQ ID NO: 106506 - DNA, 270 bp, Glycine max
gtcttcacaccttgaacaaagcttgtgatatcttggcccaatctttcagttaaaatactccaaatcattattgtttctaccttctagtatatttcttgttggtagtgtattgtaatctgaattctcagcttcacaatgactaaacttttttcttgtattgacagagcaatgaggatattaaccacaggcttgtctgtgccaagcttgaactgatagcagcaaaatggaagccaatgctaagataaagaaatatgaggagacagttaaaca

SEQ ID NO: 106507 - DNA, 265 bp, Glycine max
gttgctctagaatgtgatagggaggaaatgtcagatgctcataccatttcaaatgaagaaagttcttgctgtttagaaaattcttgtaccgtaatggtcaaggatcaatcatctaatagtgagatagtggaggtaaatgctgaagttaaggtaaatattgaacagagaaattgtggaagtcccagtattgtacatactgatcctgaatctgttccaattggcaattgagtggtcaaggcagaagaagtgtgcgactttatgagct

SEQ ID NO: 106508 - DNA, 262 bp, Glycine max
cgagagtggagacagatagaagtgagagtgtgagagggagcacagtgaagatgagaacgcaggaacgaacatggagactcctcctccgcaacaaggcgtagtgaagaagaaggagacaaggggccgataacccaagccgaaagacgaatacgccaaggcgttgaaggactggagataaacacagcaacaacaatatgatcagcagcaacaacaacaacagcacatcaaccttcggtggacgagaaatacacgcatgaaagtc

SEQ ID NO: 106509 - DNA, 240 bp, Glycine max
agaattgaaaagcctcatcctgtttatgtgccacgggatgaaacttttgaggagatcaaacaggacactttctctgctggaaggttgaaagctctgttccacactacatacgagttcccaacgtctactctgtcatgtccacacgagcctcatcacgtcgcccctgaccttgatgagccttatctctacactcgtactgaacgccgaggagacgtacgcgtctaacgacgtctcagctct

SEQ ID NO: 106510 - DNA, 273 bp, Glycine max
cacagtcatgtcatgtttgtgagagaatggttatgcaaatgcaacccaacaacctcaactacttctgtgggtctcaagtttctcgaattctacagcaaattcaacactccactacgtatcttcatttttgtcatcattacaaaggctgattgaagggatgattcttgtgaggctgctgcaagttggagttgctcaaaaagcatgggaggattattgtgtaggctagattatttatcatcttatactaccctgccattggaaattaactgccgt

SEQ ID NO: 106511 - DNA, 262 bp, Glycine max
ctcgagccgctgaatcttgcgccgtttccctctcccactcgccagtgttgcggaattttttagaagtgtgaatgttcgttcatgcatgagcggctcttaaagttcccacgcggattcgattgcgatatattgagactgcgatggcctcagccgtcgtgaatttcttgaacgcgacgttggattgggtgacgtttgcgtcggatggtccttctgcgcgagctgtagttttcggagtccatatcggtggacatttgtttatcga

SEQ ID NO: 106512 - DNA, 218 bp, Glycine max
ggggggggggtgcttagttattgagattgtgtgttgaatatgaaagaattcgtttaggcatttaccatgaaaaagcaatgattcagctttgttgtggcaattgaaagtggtttgtttgaaatttattgcatgtggtatgttgttccgagcatccatacagacaaaatgatggatgtattaagtattgtaattgaatcataaagccattaatcatttag

SEQ ID NO: 106513 - DNA, 264 bp, Glycine max
cacagaaggaggactctgatgttgagccgaatgtctttgatgcaaaacccgcttgtgatgaaaatatcaatgccaatttcatcacaagcaaaaccaacagaagcagaaggaatggggagaataaattttctcaaagagattgaggatcatgaagataatagcaagtcaacaattgaggataattgcatagcagcaagcgaggagggtgtcatgcaaatcactactccaagaagtattggtaattgtattccttctccctctata

SEQ ID NO: 106514 - DNA, 266 bp, Glycine max
cacaacaaccaaccgtgacagcatcaatttccgtttccgacaccccctcaaccgtcacttcccgccacgtgtcactccctcattcgccctcctttcggcgcctgtgatcatcgctatcaaaaccctcaacacctcaaccttttcgagtttgtaacctctttgtcacgttttcctcgtcgcacaaacaccacactacacttttgaacactgataattgagatcgcagaagaagaatattaatggagatggctcaggttaaggcacga

SEQ ID NO: 106515 - DNA, 193 bp, Glycine max
atcaacttcctcaagtcatgattgattaaactagttctgatgtttgctgggaccgtatgtctagagagggcaagttttgtgccaattttccggtgataatctggtcaagtgaggacatgagcatactctagggatccggtattactatatcatttacttgaaccgttacattatataaatttaatttggttgc

SEQ ID NO: 106516 - DNA, 247 bp, Glycine max
agaacaggaaatctcaaactgcaagcgttatatatttgaacgtaccttgagatgtatatatcacaaagaaactggtattggtttgtgtttgtatccttgagcaaaccaatttggaagtggttgttatttttttatttgttacaagtcgtgtgtcatgtttaatttgctttgtatttcatatattcttttgctgcaaactttaagaggaatgtacggtaaaaaaaatgcaaattgtgacagtaattgg

SEQ ID NO: 106517 - DNA, 288 bp, Glycine max
agaaaaagcagtgaccaatcagaaaacttctgaagcctggcaggaagatggaaaagaatccatgtcccaggctccatccaagttagtgaaactagagtcgaacaagaaagtggactgtccagctaaggcagttgagcccaccatattaatgattaaatttcctcctgaaacatcacttccatctattgcagagctgaaggcaaggtttgctcgctttggtccaatggatcaatcaggtttccgtgtattttggaattcatcaacttgccgggttgttttcttgcacaa

SEQ ID NO: 106518 - DNA, 288 bp, Glycine max
ctcaccctttgcaccatccccaaatggtttcctacgccactcaccatgacactgacacacatcatcaacaacaacctcctcagcaaccaatcaaacatggctacaacttttcagccatcaaatccaacaagtcacaaagcacactcagtgacgaagatgaaccagtgttcacagcagaagacaactgctccggggaccccaagagaaaagtgtcaccgtggcatagaatgaagtggactgacaccatggttaagctcctaataatggcggtttattacattggagacg

SEQ ID NO: 106519 - DNA, 284 bp, Glycine max
actcctaagattttggttttgttctaagctcattaatccgaactagaactgtatactctttcaaccgtttccaaaatttctttattcgctaatgaatttattattttatattttatttgaagtggaaaaggagaaaactcaatcaccctttttgcttgatagtgtaatgagcaatgttgtctcagcagggaatgttcagctgttctgttttcatgaccagaagtggttttgtttgtgctgaggtttctgtaggattaagtttgggattttatttctctaatgca

SEQ ID NO: 106520 - DNA, 285 bp, Glycine max
aaaagccaacacatccaaaaacgtaaaacgaaaaaaatgggacttcttcaacgtcccttgtgttgccactcacaacaagaccaacaacaacaaccaccacaatcccatgatcaccttcatttcgaatcatcaacctcatcctccctctcttcacaagcaagcctcccttccattccctccctcaccccacaaaaactgcaccaccccgaagaacaaccgcaaaccacccaccacaaacttgtaactaccgtcaagggccacacctccacgatcttctccctcgcc

SEQ ID NO: 106521 - DNA, 284 bp, Glycine max
tggggttgtatgagattattggtcttctgatataaaaaaacccttgttaaaatgtggctacttgacaaatctttatgttttggagatgattacatcacgtgagacagaacaatgttgtttataattggctctagccttgggtttaacaaaatgttgtaccaaatgacctatagacaacacgggtgatctagtgaacatccaatggaaggattcttagacatttggtatattggcaaggagatgggtggcaattgtgctattaacaaatgcagtttttacttttg

SEQ ID NO: 106522 - DNA, 189 bp, Glycine max
aaaaagaaggtaaattgttgcaaattgaaatcaacaggaaggtggtcttacttgtttattgcttagtaaccttgtatcttctgtatctttgttttttttttgtttgtgtgtgtgtgttctcttactttgtaacttgctctgtatccctaatttgcaatgagaaatggaggaaatgaagcagaggctttc

SEQ ID NO: 106523 - DNA, 281 bp, Glycine max
attggaagctcttaaaggataaaggaagagctaaaaaatttactggttgtcggttgcacatacttcttccagatttggacagaaaagagagagaggaagttttagaatacataaagatataaaaaaattactggttgcacatagtttgcactctttaacttttttttttcttaaaacgaaacattgcataaaggaacaatccactcccttatatcctttgaaaaatctgcatgtttattggtataagaataaatttgagtccgtgcgacatgcgtgcatat

SEQ ID NO: 106524 - DNA, 281 bp, Glycine max
aagctccgctatgtccttttcccaatttggaccctccttttaacacttctcttctctgctctctctttcaagtgtgtctctctgtcacacttacttactttcatcactcactgaacagaaacaatgtccactccatattacacacttgttcttcttcttcttcttcttattgtactcatttccccatcctcctcctctcttcatccaacggacctgaatgcccttctctccatcaagaacaccctcaccgaagtctcacccacgaagcccttcttctccac

SEQ ID NO: 106525 - DNA, 287 bp, Glycine max
tagagataccttcctagctagagtttacatcatagaagatagtcaacaacctttctggaaagaaaaatttctagccggtctcccaagatcattaggagataaggttagagacaaaatccgtagtcagtctgctaatggagatattccatatgagagtctaagttacggtcagttaattttttatgtccagaaagtagccttaaagatgtcaagatgacaaaattcataagcaattagtcaaagaaaaagcccaaacaaagagagatctaggatctttctgccaacaa

SEQ ID NO: 106526 - DNA, 281 bp, Glycine max
aaagaacgctcccgaagcgcacggcagctcacatcggtctgcctgttgaaattccagcagctcgctgcgtccctcggctggctctcccacggcctccttttcctcctccgcaccgcccaccgccggatcaccgactccgcgtcgttccgcggcgacacctcgcgcctctaccgcgcgatccgtttctttctcatcacagtcctcctactcctagggttcgagctcgtcgcgtttttcaaaggctggcatttcagccctcccgatccgagcgacgttttggg

SEQ ID NO: 106527 - DNA, 287 bp, Glycine max
gctctctcatacattcaactagctgcagtttcaacaagtaaggagttatcaggtgaagttccagtagatatttttaacgtctactttttatagaatttaatttacatagctaacaagaagttgtagtgaactatgcaaataacagggtactctatggtggactttgatattctgtaattgatttgatggaatcttccaaccaattcaatgaatcatttaggcaaggtcttacagctggatatgtctttgctgcaacttttgtcatagtactttatatgtcctcttgt

SEQ ID NO: 106528 - DNA, 171 bp, Glycine max
ctccaatcaagatacacttgtgaaacaatttgcctatattcttgtgccatcccatcttccatttaatcagaaaaaccatgtcaaatagcactacacttaactctgcagtggcatctcttgcagcctcagctatgctaatccgaagcattaccaacgatttcattcctcttg

SEQ ID NO: 106529 - DNA, 270 bp, Glycine max
aatgtataataattgacttgatgtgcgggttttatatttggatattttgaactttcataactaaccgtgaatgatgaattgttgagtttgttttatgaccctatgttttcaagttgactgttgctgttgtattagcttgtcaccagtacaaattgcaaactaaattgttatctggtaacaaaaaaaaaaaaaagggggggccgccgattattgacctcgtcgcccggggatttatttcgggccgggtccttgcaggggtaccagtttccc

SEQ ID NO: 106530 - DNA, 286 bp, Glycine max
ggtttttggagaatgaattagaaagaaatttctttttcatttcttctatctttctctctctctttttttctgttgttctaatctcaaacacttttttttacaatatatattttattaattataatattgaatgtttaaataataaaccattttacattctctaatcaacggatcatttggttgacaggttgatgaagatcgtagcgaaatacgttagttagtatgatatgcaagaactcgtgattcatcaaaatatcgaacgcaaattgcagtgtatcttcatgga

SEQ ID NO: 106531 - DNA, 280 bp, Glycine max
  unsure (1)..(280): unsure at all n locations
ctcgagcccctcatgcanatgaggaaaaagcagataatgacactactgaaaaattaattgctccttcttactgcgcaaagacatggtataagttcttgattgatacattctttcagaaaagatcagctgctttgaagctaaaatacaagacataaataatgacacaagagcgctgagaggggctagagttattgatgacgaagtgctcctcttgaggtcatacatagacaatccagctattactgtatgtcaaaaaaacctacgaaagcatggggatgcc

SEQ ID NO: 106532 - DNA, 260 bp, Glycine max
cgtggaatgtcagcgttttatacttcacttttacttcgcttatttttttatttatgttttgtgctggtctttgctaggtaagttcacttattgtccaaggtatgcagtgtagcgttcacttgttatttttcatgtaatctgtattgaaagaaaatgagcaaaaagctttctctccaaaaaaaaaaaaaaaaaaaaaaaaaaaaaaaaaaaaaagggggggccccgtcatcttttccccccccccccgggaatttttccgg

SEQ ID NO: 106533 - DNA, 280 bp, Glycine max
cactttcaccgcttccaatataatgacaaaacacggatatgccgccatcattgctaaaagtcaagatttgaaggtgcatggcccaaatgacgaaaatgaaaagacagtcttgactggcacggggttgagctctactaatattgcaatgacgatgaggggacaacatacaaatctgaacatttccattggaggctgtggacatgcagtggaaagtcgtggctgtgcgtgctggttgtcgtggaggctgtggaaatttgattaagagtggtggctgccgcgg

SEQ ID NO: 106534 - DNA, 275 bp, Glycine max
  unsure (1)..(275): unsure at all n locations
ctactctctctctctctttctctctccagtctcaaccatggcttcttccacacactctaccaccccctnnnnacnantnntnccnannannannanctntctcnnntnnttctccccntacccactcngnctcaccccactctccgccctcccccacncgccctctccctccgccgccgcctcaccacctccatccgcgccgccgcctccgtcacaaccgtcgagaaagcaaccgcggacgccgcgctcgtcgaaaaatccgtcaacacgatccg

SEQ ID NO: 106535 - DNA, 206 bp, Glycine max
gccttataattttcaatgaattctctgcggaggttttacttgtaagaaagagttagtagaaggtttatggattaattgtcgaatgttcattctgatttcttttggattgaaaaaaaaaaaaacaaaagtagaaaaaaaaaaaaaaaaggggggccccccaaaaatgccccccccccccgggaaattttttcggggagtttcccggg

SEQ ID NO: 106536 - DNA, 241 bp, Glycine max
cggaattcgggtagagcggcttcggtgtcctttccagcagagcccaggactttctggttgccctggaatttccaatactaattcacagtacccgaagttgaatggtaaggatctgacacttgtttgagataggctgaggtctgctatttagacagccccaatatctcttgcgtcttcatcgggtggttatccttttggccacggggcataatgaaattgttttcggccaaattgaccgagt

SEQ ID NO: 106537 - DNA, 278 bp, Glycine max
agcaattttctatatccttcttcccaacggtcatcatcttttggctgtggctgtagctgttgcaggttcttctccgaagcttcaaagttaacacagaaagactctaacaacctaatcctccctcgtcactcattctccaacttcacttaacggctcggagtttcgattcggagatcggttgtggggaaagacggtcgaatccgggactctgctgaagttctcattgggcaagggaagttgtggtttcgtagttctaagtttcttcattctgtgcagag

SEQ ID NO: 106538 - DNA, 186 bp, Glycine max
ggaaaaagaggctttcagagaaatgatagtagcaatagcaagcaagagcaacatagtgtctctttggttcatggttgctccacaaatgctattaaccctataccccaactccaggatgaaagtgaggagcaactaagtgttagcagcagaaagaaagtggcatttgattccaatgtgaagacctat

SEQ ID NO: 106539 - DNA, 266 bp, Glycine max
tgttcacgaatcactgtagcgagttataaaataggggttgatatggcaagtttgataataaattgggaagcttttagcttgtggtttggcacggttcttttgaccccccagataagtcttccaaattgggggtaagtggtaattaaagtctccttcaatgacagggggagccttttgcacttccctcgggggagtcctccccttaatgggtcattttttcctttaaggtaatctcctcaactgtcaatcctggtactcaaatatat

SEQ ID NO: 106540 - DNA, 264 bp, Glycine max
tcgctgtgctgcttaatacgcacatcaattgcaccgtcacttacttttgaactggatgttattttgcaaaagcttcaagatctaagtgtggaaaccctgacatctgatcgcatatctaaatgtatccttatgcttgtattgtaacttatgtaagatgtaagatagtaatatccagttatttccactttacattttacaagaccctattagacactgaagggaatttttcattctctcagttatgtatttattttatattgccag

SEQ ID NO: 106541 - DNA, 279 bp, Glycine max
ctccactgtgtgtgttgtaatcataccctagaacaacgccacttaaactggatctcccttaatttgtatattttattgtattaatttttcttaattaccctctaaatattttcatcatcaggtggatgatcacaaggtcttgatgggttccaatggtggaagtagtaacaataataaggtaatggaaaaaccaggtcaaaatcaacttgtgcagcagcagcaacatccagaaaccctcaagtgccctcgttgtgactcatcaaacaccaagttctgcta

SEQ ID NO: 106542 - DNA, 251 bp, Glycine max
agaattttcatacaacatggtctttggaaattttaacataagaggttttgttaccatcttaatttatttcatttctataaatgggtgctattatttttcagtgaaagcccttacattttgctacttgttataatccttagagaccatttactattttttcaccaagaaaaatggtgagatttttgcatgatcttatcctgatttcaggtatcttgatcgccgcaagaggctgataattgccatggatgctg

SEQ ID NO: 106543 - DNA, 149 bp, Glycine max
caacaatcttggataaatctcagtggctggggttgcacttctctttccttttctgggaaattttttgctgctatttatgtaggaatgtttttggtggggctagctgtgtgacttattggatttagaaatcggctattgagtggtggtga

SEQ ID NO: 106544 - DNA, 293 bp, Glycine max
tcgatattttaaaataaagtatcaaaatcaacaagcaaaatttaatcatatttacaataaataaatagaagcatatttaaagcgttggaagatataatggcaggcaatcacgatggagagacatcttcaatatcaaagtcgagcagaaagaaaataaatttatatgcaacacaaaacttcccgaatgataaaaggttgggttgggaactttttaagtttaaactactctaatgtatctggggatcagccacactaatccaaaataagcacagcctcatgaccgcgaaattgta

SEQ ID NO: 106545 - DNA, 127 bp, Glycine max
ggttcggtaaccctaggtgcagtgcgcgcacgaggcccttcttctcggcgcattttagcataagaattcagaattctattacactgtttcttttactcttcctttttggtagctccacacaacatac

SEQ ID NO: 106546 - DNA, 288 bp, Glycine max
actcgagccgaatcggctcgagcggctcgaggtaaaagtggtacacaggtgttgttcattaacgatatagagaaggcaatggtttggaactatgaagttttgaaaaataaatttgaaagcttgccaccaaatgttgtggtaattggctctcatactctgcttgacaatcggaaggagaagacccaacctggtggccttctgtttaccaagtttgagagcaatcagacagcactacatgatcttgcttttccggataactttggtagactgcatgatcggagcaaagaa

SEQ ID NO: 106547 - DNA, 279 bp, Glycine max
ccgtggtggcagtagggtccacacatcattccacaaacacacaagttcatcatcagattactattactgccagtaacatgtgcaccaccacccccacccccaacgaaagcaaatttataactcgaagaaatagttttaaacgaccttcttcatggctccttgatcctaaaagagttcttctcctctttgctaccttgtaagattcagctccaatacttggtttctgttccgtccttcatttattgttatgtgtcttaatttccctgcactgaaacaggt

SEQ ID NO: 106548 - DNA, 284 bp, Glycine max
actcgaaacgctcgagcggctcgagcggctcgaggtttaattcggacatagatatatcatataccgtatgaataagtctcacgtgactatgctgctgatcatcatggttgtctcaattgcagagaaaccatcagttatagaaggaaggacactttccttaatatctggtcaagggtactcaaagatttttgcaacgcttggagttgtatgcaagtgttgtgatggggttggaggcgcctgcactagtaaatggacagaatcttgcaataacctacaatgttttc

SEQ ID NO: 106549 - DNA, 225 bp, Glycine max
cgcttatcattaaatccaaaatgtgaaactgataataaaaatacaaagaagtattatgattgcagcctgtggtcttctctaaaacagttgagtacactactccctctttaattctcaataacaatacttctttgtatttttattatcagtttcacattttggatttaataataagcttatcattctgctaaattgatataaagtcattgtctacttaatgatcct

SEQ ID NO: 106550 - DNA, 262 bp, Glycine max
tttctcttcaaccccacaagaccacaacccattttttctcccttaacctcaattttctcatcctataacaaacttttttatttcacgttgtttttaatttataatttctcgtgatgggcaattacatttcttgcactttggctcctcctttgatgaagaacacaagggcaaagcgcgtgatcttccctacgggcgaagtgaagcaatacaaggagcaagtgatcaatgccgcggaactcatgctggagtgccctactcactt

SEQ ID NO: 106551 - DNA, 262 bp, Glycine max
ttacgttgctcccaactggccaatttcaccaaagctcctcacactcactcattctgcaaagagagagagagagagagagagagaaatagcactgagggcagccgtactccgccacgttcgtgtggcactccaagccgctccgaaactgcagacatggcgtgccatgtcatcacacggcgacgatcatctctccagagaggaggtcgtcgaaagagtcctcgctgtcgtcaaaaattctccaaagtcgatccttccagggtga

SEQ ID NO: 106552 - DNA, 278 bp, Glycine max
tacagaacgtgcctgatacttgttaatggccttgtggaaagttattccaataggattgccttaaggcagttctggcgaagggcagcggaacctctatattattagctacggataatgttaatgtatgtagttatatctaatggatgtttagactattgcaaatgtatatggcaagccaaaggaggagctggatgccactttatcatggccttgtgagatcttagtgggggataaaaaaccatatagagtgatgtgaattatcgataacccttattaag

SEQ ID NO: 106553 - DNA, 261 bp, Glycine max
cagatcaccatcaccctacataatttgttgttaatctattgattcgaaattatacttacgaataaatctagggttcaggctgaatccgcaactcccaatccgaatatctcaaccgcattctctccctttgggtatagtatctttttgttataggcttcgattcgtcggaggcattgaaattcaacctgctgcaattttttctaaaggagaaaggaaaaataaaattgaggactcgtgttgatcttcgtgctgagtgatttg

SEQ ID NO: 106554 - DNA, 251 bp, Glycine max
tgcgatcgtactagctagtcttatccgcacttccattttaacttcttttccggttttcccgatctatacgatctttgtttttgttgctgcggtgtttgataaccatcattatatacgaaccataaatcatatattattgcggtcaaccacttaaagtacacgaaatttgaggggatcaacgagtttcatagctttcttgatcattggtcaattgaatatggatcacgaaccattttccagttgatcaatat

SEQ ID NO: 106555 - DNA, 139 bp, Glycine max
tgattgctgagtgttaagtgtaaatccactttgtgtgtgtccaaatggaatctcagtggtaacccatcttacccacaccatatcatatgacagaaaagtcttgccagcttaatcacaggtcaatttgctgtccacacaa

SEQ ID NO: 106556 - DNA, 252 bp, Glycine max
ctcgagccgcctagctctttgctcgttattacatacagtatatactatattcagaagatcgctagctacatactgcatcaattcaacgttgttcttgttcaccatagcttctgtcccagaaatatcatgggctttgatatctctaaaccagggcttcgacttggtcttggccttggtctccatgatgatcactcatcagaaaattgcatgaagaccaatgaacaaagccaaaggcaaagacaaagccagaag

SEQ ID NO: 106557 - DNA, 275 bp, Glycine max
  unsure (1)..(275): unsure at all n locations
gctccgatttcctcatcgtggggcaccatcaattgagttaacaatctttgttccatttcggcatgaaactctaattcactcgcttctcgatctcgttagagcaatctttccacgctagataaaacatagaaaatgtanatgaagatccgtcaagagggttggttataggatggatgggaacaaggacgaggcgttgaaatgtttaagaatcggcaaagaggcgatggaaagcggcgatcggtcacgcgctttgaagttcgtgacgaaggcgcgtc

SEQ ID NO: 106558 - DNA, 272 bp, Glycine max
ctcgagcgggttaatacaactaacttttgtgtaagaagctgttgtaaattgtatacaactcctcccatttatagttctttttggtggtattgtaattactttttgttaatataggtaatcaatactcaatatcccaattttgtgtatttaatgatcattccatttcaatttcagctaaaatgggcaagattggtgaagtggagaatttattgattcactaagccgtttcacatgctgagcgagtaatctgctaagcgcgacgtccgctggct

SEQ ID NO: 106559 - DNA, 236 bp, Glycine max
taagaatttgaggccttttatcaattgtacatctgtagtgcctaaaaattgtgcaactatagtaacggatgatcatcaagcagacaatataatcaacgcacaatttttaggcactacagatgtacaattgatataagaatttgaggccttttagcttttctgtaaaggatggcgattctgttaatatatttatctgacgtacactgattaaaaaatctaaaaaagggcggccgcct

SEQ ID NO: 106560 - DNA, 271 bp, Glycine max
gtgcctttctcagctaaaggagaatgacatgttaagaaacaagctaagacagctagttgaacaatatgaactctctgagcagcaacatgcacagaagttgaagcaaaaatcattggaactacagcttgctgatttaaaaattaagcaacatgaggaaaaattggttcaagaacggtcacagataaaagtatatgcagaacaagtatctcagttattagcaactgagaagagtttacggttgcaactgacaactgatggagaaaaattccaa

SEQ ID NO: 106561 - DNA, 270 bp, Glycine max
ctcgagccgcgcaacaacactcactttctcaccagcgattgcacatagcacaatttcagacgttgagacagcaacagctggcaaagcagcagaactcggtgtggaatttacagaagcaatgtggtggggtttactctcagaggcaacaacagaacaaccaaatggatcacaatagagggaggaacaatcatgttaacaacagtgttggtggaagaaatgttaggcctttgggtttgtctgcatctgcatggcctcctctgcagcacgcga

SEQ ID NO: 106562 - DNA, 104 bp, Glycine max
gagaagtaacagtggcggatttgggtacagagtgaggaagcagtgagcaaaagaaaagcttgaaacagcgcaccagttctgagctgagctagctagggtttcct

SEQ ID NO: 106563 - DNA, 287 bp, Glycine max
catgaattgagaggattagcattatgccttgcaaatcatggagagttgactcggctaagtggtttggttaacaacttagtccatgcttggcttgggacgggaagctgcatttgctggtgctgttttgggcgacaatgctctgatggagacagcatggcaggatactggaatgctggcagaggctgtgcttcatgctcatgcacatggacgtccaactttgaagaacttagttcaggcttggaaccaagagctgcagagagaggttgaacctactccatcacagaaga

SEQ ID NO: 106564 - DNA, 274 bp, Glycine max
agccactattccttgtgacctttccctatactactacttccagcaagtttgacggcaacacagcctcctacgatggcagatccgtggcttctcctcagccttctcacggccccatgccttccttctattcctccaagaatcgtgattctcaaaccttgcttcctctgatagtcaagcagatatacgtcttgtaggaagggtgtgcatcaaagttggaggaattactgacatcacttttgtgcctaatgatgatactgggaagattgagtgcttc

SEQ ID NO: 106565 - DNA, 257 bp, Glycine max
ttttcatgtagctacaacgaggggtcctggtgatgaacaaggatggattcttctgacatcagcctgtatacttgatctcaaagaaccgtacgacagaatggctcaaccgcaagctgatccagtagcccaagatcagcaacctcaagcacttttacagacacaggtattgaatttagaatcagatatctgtatctttccatgcttaagttgtaagattaaattctatggatgacactcggaattggtggtttttcaca

SEQ ID NO: 106566 - DNA, 274 bp, Glycine max
gaaatagtgaagcatcaggcctacaaaaatgtgtacgatttgaaattgattgaagagactaagtttgaactatttaaatctagctgcatgtctaaaagcaaggcagtctgacactcaagatcaaggtctgcaacatgttaatatctcaactgcacaaggtatatgtaatggtataacttttggctatttcatcatctcctattctgtatcactcagcaagactttgaacttacaagggatcaatcactattcactaagcaagggctatggcagg

SEQ ID NO: 106567 - DNA, 272 bp, Glycine max
atgtcatttgcaaaggaatcatttgttcatgtgccaatcgaccttcttcaagcctctagatcgaaagggcagtgtgatagactttcggtaataggggttatgtcgcaatctgttgatctatttaatgcctcaaaaattctcgcgactgaattcagggcagaacacggtaacatagagttcagtgttttgcatcggattaattaaaatttgttggcgaacaaagacagagacatatgagccataaaattgaaattacttacccgtgttggcga

SEQ ID NO: 106568 - DNA, 285 bp, Glycine max
tctcgagccgaatcggctcgagcgttttctagaaggtcttgcatgaactaaacaccctcttcggctaaaaaacgcagcaacaagcgagtcataagatccgtgaggttttaccccgttagcgtaatcctaggtgaggattctgaaccgcaatctaatagtcatagtcataataagaaatgtaacaacatttatgagagtgaatctaatctcactgtgagaaagattactagaagttcttccataaaggagctgaagaagaacactgttcggggaaaagaaaatgca

SEQ ID NO: 106569 - DNA, 288 bp, Glycine max
  unsure (1)..(288): unsure at all n locations
cacatttgcacaactcactctgtccattaaagctccaacncactttatgctgctatcttgttatgtacttagtattcatagtgcacatggctacattctcctgtctgtctgatcatcgctttagtaagcaaatgctcttgttgaagtggagagccagccttgacaaccacagtcaagcttctctctcttcatggattggcaataatccttgcaattggcttggaattgcatgcgatgtgtccagttctgtttccaacataaatctcacacgtgttggattaagaggta

SEQ ID NO: 106570 - DNA, 99 bp, Glycine max
gttgcaggcagtgtcatctctcctttgacgacaagatgagcatcccaattccccatcggcagttattcatagacggagactggaaagtccccgtcctca

SEQ ID NO: 106571 - DNA, 261 bp, Glycine max
cacacacgcggttagctctgctccttcagtccagcaaggggaatagcagcactgctctcgcaattcaccgtcctcgcagaccaggcgctacaagacaagcacttcgatccttcgcacaatcgaagatctaatgaagctgttccagatcgcgtcctaccaggcatgggcaggagctgagcttgagcaggcgcacgacgttggcgtagcagccgctgacattgacgcagctgcggcctacctgggctcagtgacgcagagtgc

SEQ ID NO: 106572 - DNA, 265 bp, Glycine max
ctctattcattattattattactgctgagactctgctcaagtcttgcaccagagatctgggttcccagtatcctccaattctacggcaactttttcggctaaatcccattcttcccatcgaagccgagctcgcattgcacattaaacgcgctttgcgagctgcgctcttggttgtcatggagactaaggcatagattggccgtgcagatgaggttaagcgtttatcgaatgatcttcagcggcgatccttttacacggaagcgtg

SEQ ID NO: 106573 - DNA, 280 bp, Glycine max
cagatttggaccaaacaaaacttggttcctctggttcattgtgcatccaccctttctttcctgttacagatatgaagggggaagaaggtgagcaagggaacttagcagcccagggaaactagggagagtgtgaatttgcttgctgatgggtcttagcttgaagatgcagaaccaccatcctgtggctttgaggttgcatgatcaaatggggtctaagagaaagtacactttcattcaagctcatagagcttggcttccaaagtttctgctgctgtggatc

SEQ ID NO: 106574 - DNA, 271 bp, Glycine max
ctccgacgttaggtttttcttttcgtttctcgccgggattttgggggcagacttaatctccggcagctatggcctccaacttgcagatgagccctcaggtggagcagatccacggtgaaattcgcgacaactttcgagccctcgcgttttgtgatatttgagctttttctacacaagagacttgtccatattgtgcagaagagaagagttttcatctggacttttaaggggggtagtcagactctagggaagtttttgcttgtttttattt

SEQ ID NO: 106575 - DNA, 273 bp, Glycine max
cgtcattcgtaagcattcctatagaaatccttctcttcaggagcgaacaattcgttggaatatggattgcactaaccatatatatgattcttcgtatgttagttggtatatggaggatgtgaacagggacaggaccatggtactatcttagcgaaggaccatggtgttatatgagaggccactcattgccatagagtattgatcttatcaacaaggagcatcacatgtttgctatgaatcaattgaccacacgtcggatctatatgggtcctc

SEQ ID NO: 106576 - DNA, 253 bp, Glycine max
cggctctcgggtaactgcccgcgccagtgtatctcagcggggggtcagacacgcgggctgcgactgggccatagagtctatcatcgtctgggtgagtgcaccgaccacgcggatgcccggagccattctacagctcatacgcgctccataccccgcccaccgcgatggacgcattcatccgacctaacgtctcgacaggccctgccagttgcgacgcggaaacatgataacccggcggcgcgtatggactatg

SEQ ID NO: 106577 - DNA, 274 bp, Glycine max
gaaactcatcccgattcttcttcttcttctgtttttttttccctaaaaaacttatatcttttgtggcttcttagtttgattaacttcttggttagattgcgatggtttaactgttagtatttattagggtccatactgttattgttctacttactgagattaccattttatatgttttggttttcatgcgagtctgggttgtgccatcggttaactgagtgttgataacctcgcatgacttcgttgatttgcttctgagaaagagaaatgtctt

SEQ ID NO: 106578 - DNA, 279 bp, Glycine max
  unsure (1)..(279): unsure at all n locations
gaaaaactcaaatggtgtcncacatcgaacagggaggcatacagctccagttgacgtgaaagtagaactgggagtagaaaataaacgtgtttttactgaaaaggtaaagagagtgattgtttatattatgattcttttataattttttagatcgacgagagagagagagagattgttataatttttttcttggtttgtattttgtaatcacacggataatggagcaatagcgcttgttgctttgtttgtatcatgacattcttttattttactccacac

SEQ ID NO: 106579 - DNA, 165 bp, Glycine max
gtgggaactatactcatttattagacttgatgtgtttataacaatcatataatgaatatagttcccaccatatacaggaaaaagcaactgagaacaatatagaccaatatatgattgttataaacacatcaagtctaataaatgagtcattttggtttgaggaac

SEQ ID NO: 106580 - DNA, 148 bp, Glycine max
atgacattttctaagcattgttggatttgaagttgtaatttttcgattggcagattcggatatatttgcatggaaattagtgagttgatgattcttttccgcctagcagtcaactaaaattcaatgtagagtggattcctgtgtgttt

SEQ ID NO: 106581 - DNA, 275 bp, Glycine max
gaagaagtcacaagaagaatctcccatgctgaaagtagagacaagagtcaacacaaagctagaagatcacatggtaagttggcattggacttggaaaaaaagatggttataagacgagaccatgaagatataggatcggacaagttaaggggagccatagaacaaagaatgtcaagcagcaagtccgacttcgatgctactgagaacatactcagggcaagaagcacgaaatcagaacatggccgagaacagcgacgatagagataatagtgatt

SEQ ID NO: 106582 - DNA, 267 bp, Glycine max
gttggagctaaggcaaaacaaggttttccttcttaattatgtccaagaattcttggtggacatgaacggtctaagttgaatgactcgttccaaagttttcttggtaagccttaataaggaaagccttgtgttggagctaatgcaaaacaagatttttaggtcacatttggtgggaaatggtgagattccttggaatgcaattcgtgaatcgccatagatggaattcaaggaatgggtgaagatggatttggtgagttggattagtgc

SEQ ID NO: 106583 - DNA, 271 bp, Glycine max
ctctttcctagctactacctcctccagtttccggcttgaagtcaaacccctatatttctcaaggatatttgttcttctaattctccatccaattcagcacttttgcaaaatggcttcaaattcttatacaagggaaaggttctcaaaattataaggttgaccaagatttctttcatttttccccataatctgagatacagggaaactcaagagtgttggtgatcaaggcagagatagaaatggaattcagaacaaattttatggaactagg

SEQ ID NO: 106584 - DNA, 223 bp, Glycine max
tcgatcctcccatatcaatcaccaagacgctctgcgacaccacctcagatgttgccgccgacatcctccccgacgacgccgccgcctggcccgacctcctccccctcctcttccagtgggtcacctcccttcacccgaggctccaagaaatctcgctcttgatattcgctcaattggctcattacatcggccaaaccctactccctcaaatttccacacaaca

SEQ ID NO: 106585 - DNA, 263 bp, Glycine max
agcaaggtagaaactagaaaataagagagtgtggattccattaagatcagaccgagagacagagagatgagagtgtttccaaggctcaaatcgctgtcaagagcggtgcacgaggaacaagagcgtgagcatgatgatgaggagaaaaagaaggcagcagaaaagttgtacacatccctaacagtttggagaaaatccttgctaatgagttgcaatggattcacggtgattgattcttatggaaatttggtgtatcgtgtcga

SEQ ID NO: 106586 - DNA, 260 bp, Glycine max
gaaaccacgacacaacacaaaacctccttagacttggtgtattttgtttttctgtctgtgttgttccttcacaaacacagcataaaaaacaaaaacatctaaatcctctattcttctctgtgtttgtgtttttagtttttgtttttgtcctatgaaactcccaacaacgtttgcagacccggaatccttgtcttacctctacaccttgctccaatcttccttcgaccaaatcaatgatcccaccaacaacaacacttcca

SEQ ID NO: 106587 - DNA, 262 bp, Glycine max
ctcgaaacttaattagaactcaaaatatagaaaaataagacaacatattaattcgtcgtgttcctcatcatgttcctatttgaggatctctggtccctcccgcgcctcttctcagtctttacgcgaatcctttacgagctcgagctgtgacagaacggagtcggagcaatgccgcgacgagtcggcggcgatggttctgaaatccgtggcggtggcgtcgattctggtcgccggattcgggggagtctcgattccgctggtc

SEQ ID NO: 106588 - DNA, 258 bp, Glycine max
tagaaggggttacactgtcagggtatgattttgacactgatcagtatatagaacgacagacatcacgaggacataatcaccggcgcataatggctaccagatggcaagggctgccaaaatctcaatgggccatagccaatggttcgcatccaggccataattctcaaatgtcaaagcttggagtcattcaaaaacatggaaccaactgtgatcaaagggtagctcctatagttaatggtagtaagttttggagccgaa

SEQ ID NO: 106589 - DNA, 288 bp, Glycine max
tagataaggataacgcggcactcttctcttttgttttgttatgttaactgtcaccttttattcttcgtttacttcacactgcgcgttacttcatcatcaatcgtgccgcacttagaactccggggtcaattcggatatgtcttctgatagtgcaaaggaaaatgcatcagtagttgattcatcagtcactgaagggaggaatgacattggaaattcagatgatccagagagctcaggttacaagtttaatgaaaacattaatacaactagggcagataaagggggaca

SEQ ID NO: 106590 - DNA, 130 bp, Glycine max
gcaaaaagaaacccagattattgattattaataatggaagccatattcgtcaccaaacccgcttcccattctctcctcttaactaaactctctccgaatcccaaacacttgttccctccacacaacatac

SEQ ID NO: 106591 - DNA, 288 bp, Glycine max
ttcaccgtcattgccacatccctaccattcaaatctcctctcttcttttgaatttgagaaaccttcttaattcttttacttttgttccatcgatcaagagctaaaatctcatataggagtccaattaatgggtcgctactcgaagatgatggtgttcacaacaatattgctattgggtttacaacaaatatgggcatttaggccattaaaagaggatcaatggttgaagcagaggctagtaatacaatcactacaaagaggctccgtgcaacattccgaaagaaatcc

SEQ ID NO: 106592 - DNA, 290 bp, Glycine max
cacaaccaaaacaagcaaaatggtgcaccaacaccaagtgagggcctcactgatcacatgctttattcttttcctccttgtcttggccaccacctccttcatatcagttcactcgaggaacacactactgatccatgagggtcaagctcgggaactgcacaagacttggcaaaggaagacaaggatcaaccatggaagccaccgtggcaccaagaaacacctcgtgaacccgacaatcgaacatccatttcaggctcgtgaatttcctctgtagttctgtttcattgtgc

SEQ ID NO: 106593 - DNA, 291 bp, Glycine max
cctcgagccgaatcggctcgagagatgattcagttgatggcaatgacgcttctgctgctatgacggctatcgcagatgttctaccatcacagcagcaaacaagtgtacctgttcaaaatgatttatatagtgagaatgagttgaagggggaagctgctgaccaatatccaaacactaatgcaaacgaagatattctggcccctgatagtaacacatctgaagaggatccaaccaacgtgtcataacttttggttgctgttatcagtcgggaaattgtatatttcaagttgg

SEQ ID NO: 106594 - DNA, 286 bp, Glycine max
ctaagaatgaagcagctgctgagcatctgaactctcattttcatggaccatcaccatcttcatcttctgcaggttgtgctgggactgtcaaatggacatctttaatgtttttagtacttgtattactagtataaacaagttctgaaagtgagctataaaaggtgggtgagctaggcaaaggctggcttcacatctggagtggatacaagttatcattaagagtgtaaatagttggacgaattctaccgggcgaaagttaaacattttttgcacggtacgaaagtaa

SEQ ID NO: 106595 - DNA, 141 bp, Glycine max
ctagctgctctgatgccaatgctgctgcgtcatgaactctgagcaatgcactgcagcattgactactcgtactcgtagtatgttagtggtatggatagcatatcatggagtgtagtagtcagtcgtatgggcgactcagtg

SEQ ID NO: 106596 - DNA, 114 bp, Glycine max
tgtttccttacgcgaagaggactgtttatccgtacatcatttattcctgcctcatctttgttctatttgtgcccaaccctcctcacccatttgtttccttccacacttcagacg

SEQ ID NO: 106597 - DNA, 275 bp, Glycine max
aacaattccagagttgcttatattttaccagtggcatgtctgtgtgtactgctccgattgcatattgaggcacaagtggcaagctcttattctgtatatattgaaaggtgactagtcaaagggtgccatgtgtgctacagaaaatttccttgactgtagggttcctgtatgatgttaattaagcaagctttgccctcatcagaatgctttacgaacagaaagtggccctttttgctgacttcacttatcttctagctagggtctcttttatatct

SEQ ID NO: 106598 - DNA, 272 bp, Glycine max
tggagacttaattaaaagccctttgtcacggcccctatttattgctgctgaatctgggatacctgagattgtaattgagcttctttactcatatccagatctactttggaaagttgacggccaaaatagaagtctttttcacattgcaatcatgcatcgtcaggagaaaatatttaacctgatttatgacataggggcacacaaggatctgataacttcatacagagataataacaatcacaatatactgcatttggctggaaaattggccc

SEQ ID NO: 106599 - DNA, 119 bp, Glycine max
cgacagcaacaaacgacagagattcttcctcaacacaatcgacacataaaaagcttcgcgattctaaaacgcagtgaacataaaggtaaagcgcactcggccttttacgacattgcatt

SEQ ID NO: 106600 - DNA, 269 bp, Glycine max
atttgaccatgaaaattattgaaataaaataaaaagagcttattttgacaaactataccaagaagcccattaacaagtcataagcccttccagactggagaaagagcgcttcaattaataacagaagtgaacaattgctatggcttaccactcacaatgatcatttaaacaagtagtaatattatatctacacacagttacttacatgtaaattattagtttgcctcgtttatcgtttgcttaatgttttatgttcattaacatctcaa

SEQ ID NO: 106601 - DNA, 287 bp, Glycine max
gtttcatttccaagtgtctggttcctgctgcttgcgtttcatgatctccattaaggactgcgcatgtgcttttctgagtagctagctatcttgtgctggtttttgctgcaccccgatgctaatatgactcctttttcttatattaataaaaattatatagtatattttctgaagttaagaatgaatgtagtaattgtcttttaatttaatttaatggctttcgtcttggttcatttattatttatttagtcggtgcttgcatttattattatcttcgaattgaatga

SEQ ID NO: 106602 - DNA, 279 bp, Glycine max
  unsure (1)..(279): unsure at all n locations
aattaaagagagagattgtaaatacacagtttatttattcacattgnaaatgacgttantaggttctttctggctcanactagttgcatncttgttgggttatgcatttctattagggcttcttaggagagtgaatgaatggtactatgtttctaggcttcagggaaagttgcaacaccctctcccaccaggtcatctgggttggcctttattggggaacatgcccaccttcctcagagcttttaagtctaaccctgattccttcatctatgaccttgt

SEQ ID NO: 106603 - DNA, 277 bp, Glycine max
ggtggcagcagggtctacaggagctgttgttgcagctgctgctgtaatctacgtgtgctatgggaaacggaggtgattttctgtgtcggagactgatcaagaacaaaggaacaaggggaattccaatggaaggaggaaggtgtagaggttagacataccaggtctttagtagtcatagatttgctgctgcagttttgtttgtcacaaaacaatgctgcttctctggcttttgtttttgaagcctgtgaattttttgctcatcgaagttggcatacta

SEQ ID NO: 106604 - DNA, 209 bp, Glycine max
cacaaattctacaaaaccctactactgagtggatggttttgactatcaccagcaataccaccatgctcctacatgccatccactcagtagtagggttttgtagaattgttacacaaattttcttttccctctgtaatgctataactagtgattcgacgtttgaaacgtagatccatagattcttaaattggtttcaagaaatttaaaaa

SEQ ID NO: 106605 - DNA, 277 bp, Glycine max
agagacgttgctttttaacgccggcgaggaattttcggtcactctcgccggaaagcctgttttccgtttccagttgaaaactcttccggcgaactccgaataccccgttcctgcatttctcggtttctggatcgagtcttctacaacactcttggtgatgtttctcttcattttttcttctttgtttaactttgaagcacacccaggaaaaaaaaaagtaccttacttgcaaagtgggatttagagttcggttactctttagtctttatcttctgtg

SEQ ID NO: 106606 - DNA, 174 bp, Glycine max
gaatttatgagtttgagtttattccccatttaactatggaacttgaaatcgataacaggaagtgcttcttctgtcattaaaattataattgtatttcggtgtgggtgagataatggactgaaatgtatgtttacacataaagattgagcaggtgtcatagcttgattattaaaa

SEQ ID NO: 106607 - DNA, 275 bp, Glycine max
cctcttcttaactttggctcaatcctacttttacaccctttaagcacacgatttcagcttctaccatttctacttttgcaatttctcaagctgggtaagaatcatggaagtagagaaggaaaataccacatcagctattactgcagaaccctctgtatctgcctctgatggtcaagatcctgtttcttctgttaatgcatctttaccggatccaatacaacctgttattccacaggttattgcaccatctgttgtacctcctttagctccaattc

SEQ ID NO: 106608 - DNA, 273 bp, Glycine max
actttacgatcggagcagggtcctgagactggagagattgaagctgcgaataagacgacgcaaccttactcaggcagattagacggttggaatcggggatggaccaagaagtgaacaacaacaacactgtaagcgatgtttcggtgaaggaagagatgatagccactctgcaggatagtagcccgctctgtggatccgccattcctggatcggactcgtaggagttgagttacgagtgtctcaacaatagtgatgaggtcggagggggttctg

SEQ ID NO: 106609 - DNA, 280 bp, Glycine max
  unsure (1)..(280): unsure at all n locations
aaganagacaaaagtgtctttctgagtttgaagcgcgtctacgttgatgtaattagccacgtagtttgtgtagtacaggggaaaactctctgttgcatcaaatgtaattctgaatggattaattttgtacttttccaaatatgataatatatattacaagttacgtatctaacaatatatattgtatactcttaagttctgagtcgtgacatgcttagtaaagtctcacaatcatggcttgcatgctcgtacgaattggtcttcgttaaatggtaaaata

SEQ ID NO: 106610 - DNA, 157 bp, Glycine max
cgcaggtccgattatgttggggtatgtgcttatgctatatcttacatgctatctggcggcgactggtcgcactacaatcagcacctgaacgtgccattgggacacagattccgggcttcaatggcagtctaccttccaagcactatgctgggtatgt

SEQ ID NO: 106611 - DNA, 275 bp, Glycine max
cttgcgatcatttagttatgtggtgcagctaccaaagtccatgatgttgtaagcttagaagtatttcttttattcggggtctgtcaattgaagtattgatcgatgataggaaaaagaagtgctgctattatcagcggttcattgatatagctttcttcagtatggttggttactgtaaacagttgagagaattacagattcaagaatggataggatagtagatctctataagttaatgaagagaggagtctagcgatatgtagatcaaatggagg

SEQ ID NO: 106612 - DNA, 274 bp, Glycine max
tttaattttgtagaaccttcactcttctgatggatcaatttcctattcgtcttttttttgtcacatctctcctcagttgcccatttctgctcattgctcaatctccaagtccaattatctcccgtatcagtgtggtcggagctgtttattgtgatacctgctccaccagcactttctctaaacagagctacttcttgcaaggtgttgaagttcacatacagtgcaatttagagcaacctcaccaaaaactagcgagcagataagcttctcagtg

SEQ ID NO: 106613 - DNA, 272 bp, Glycine max
ccctgtcaccgttcatccactcgatctgttcaattcagggctttattcgagatctttattgttcgtcgcgtcgatacaaatacaatccatcatgacaatcgccgattcagtctttccgatggataatgtggccagttgcatactgcttccgccggaggaggaaaaccggatcgtgtcggagttcctcaaggcgtcggagcttaatttgaaagaaggcaacttatttacgttatttctaacaggtggttttcaaggtggcagagttatgttgg

SEQ ID NO: 106614 - DNA, 273 bp, Glycine max
caaattgtctcactcataaaggtgctaaccactacgcagtaactaccactgtttttgacaaaactagaaaaaaaaaaaaaaaaaaagaagctgtaaatcaacacacaacacaacacaaccaaagccaaaggtcacattcaacaacctcggccttactacgtttcagtgcttttaccaacagacacaacttgtatttttgctacaactaccaaatctaccttctggctttcacttattatttcctagaaagcttgaacctctgcagacaattct

SEQ ID NO: 106615 - DNA, 270 bp, Glycine max
aaaaaaaattaaaagataaataaggaagctaaattagtatgtaaatcttgtctttttaagaactaaatgggacgatgtttggcacagcgttaatgcagtaatactaatagttaatattagtatgtgtgtgtgttcagaagtgctcaaataagtgaagataactattacagaaaatcaatacatagtgcagttggatctttgaataattccaaagttctcaaacaccaaacttactttgttcctttgtttttatcatggcatgaggcattt

SEQ ID NO: 106616 - DNA, 281 bp, Glycine max
accacccaaaggtcgtaggtaggctgaggtcaaagaactataaatgaccggattatattctttttcccattttgagcaacattgaggaagattggaataggaagttgttcattatcttcagcagaaaaaaaaaggaagttgttcattatggtcgaaattatggtgattttaccatatgtaggagtgaaatctaaatcatattggttataccatcctacattcaatcttaaccgcagattgtatgatatctgatgttgaacaaagattatacatgaaataaa

SEQ ID NO: 106617 - DNA, 287 bp, Glycine max
cggctcgaggaaacccaactcgaataatatatcggaaatggtgtgcaagtttgccaaagtttgtaaattgaagtctattggggtgttctcttccgaaatccccaatctccctcactgtgcaagatccatttacaatgagacccttctgagtgaagacagcagtgaagagagcagatgctatgaccagaaagtgcatccccaccccactgaagttcctgccaaagataatgcttgtgcggtctggaggtcatgaggaagctgtttgatgctgtttcggcgctgaaatt

SEQ ID NO: 106618 - DNA, 271 bp, Glycine max
gatagatccatcaagatctcttccccaaatggagatgatgttagagtccattataaggtctcaattccccttacaaaattaaagtctgtcaacaaaagtcagaatgtggagaagccttcacaaaagtacatagaaatagtaactgtggataatttcgatttctggttcatgggtttcttcaattatcagaaagctttacgatgtcttcagcaggctgtccctcagcttagagagaaaaaactgtacaagtaaaattgtttgtcccctctgc

SEQ ID NO: 106619 - DNA, 204 bp, Glycine max
ctcgagccgttttgggttggcatttaattcacagtaaggtcataattgcactctcttagtggacaaagaagttaattttttgacgcaaatataattttccaactatgggatgctcccttgagttaaaaaaaaaaacaaaaaaaaaaaaaaaaaaaaaaaaaaaaaaaaaaaaaaaaacaaaaaaaaaaaaaaaaaaaggggggc

SEQ ID NO: 106620 - DNA, 235 bp, Glycine max
cggctcgagaagaaatgttgtattctcgaaataattgttagatagaaacattcttcatgtttccaacttagtcatacaataagggacatgcaattgacgtgcctctcggaatctacattatgacaatggaaattgcttccctctgttacctcagtgccttgaaattgataaacattctgcagaacaatttaactacctctttcttcgcacacaaatatataaccttacccttcaa

SEQ ID NO: 106621 - DNA, 296 bp, Glycine max
acgagagataaagttaaagaaattaaatagcaccaatttcgcccacgaaaccctctctcttgtctcgtcgcttcaaactcctctgcggtttccccttcttgttcttcttcactcaaatggaggtagcagtggccagagcgttgaaaccgagttcaacgatagacctcatagatcagcaaatgctctgagaggatatctttcagcctgaacgacagcaccgtcggccccagagatgaagactgtctcgacgacctatttgacttctctaacggctctcttcacaacgaacaacaaca

SEQ ID NO: 106622 - DNA, 298 bp, Glycine max
ggtgccggcaaggtaactctttgttgcttctgatttttcaattattcattgtgattttgggagctgaaattgattgtggttggtatccaaacacacactaagaacaaggttgaaacatgtgaggaagctagattttctatcaagaattgcatggaaatatcatataccattatatactcaggtttatgttagatgatactagtatttgggcgggattctttttatctctctccacttagtactcgaattacattgatctaggttgaaaagaatggttccagcatttcaagctgttggg

SEQ ID NO: 106623 - DNA, 294 bp, Glycine max
ctgtccattcccggcaatcattaggtgtggctagccttaaaaatggatggctagagataatgctagaccgccggttggtaagagatgacggtcgtggtctgggacaaggagtgatggataaccgtgtgatgaatgttgtcttccacctaaccatggaagccaatgtttctgcaacatcaaatttggttcccacaccttttccttacagcccttctcttttatctcaccgagttggttctcacttgaactatccaatacatgcatttgtttccaagaaaccgcaggatatgtctg

SEQ ID NO: 106624 - DNA, 287 bp, Glycine max
aacatgatcattaaatagtttttgtagatatggataggatactagtagtaatacctgtaattttgtgcatagttggaatctcggttcacaattcaaagtcatcaacctctttgcttgtgttttttgtgattaacacgataattttctctattctcgtgggaagtcgcaaatcatctttagcagaagttgacatggcttcgcctttactaccatctttttttgaagtagcgggagaagcacaaggtggctttttagagaatgcaacgtatgataaagttgatgaaagt

SEQ ID NO: 106625 - DNA, 143 bp, Glycine max
atccatctttgtagctattgactgtctattcttctccgatatgttcatgcatggctactgccgctcactgagcaaacgtggtgtacgatttaaaactcttgtcttttctttgatgcacagattccgagctgttcatactgagc

SEQ ID NO: 106626 - DNA, 240 bp, Glycine max
gattgagaaataacaagaggggagtagtagtaggagtagctaaaatttatgcattaggaaacaatagctagccagaagataagtagacaagaaagcagggtggagatcagacgaactatgagcaattagttccagattcgcaggacaattatgacggcagcttcctcatctagtccaaatggaggaatgatagtcgaaagtcctcagattgcaacacaccatcagacctccacaggttct

SEQ ID NO: 106627 - DNA, 262 bp, Glycine max
gttttctcttttttctttttcttatgttgcagtgccacggtagtgtcaatcagcgggagaaatctctgcacagattctaacaaagttcatgaaccctttaaagttgaagaagcagagactgtaaatgtgcctccacccccaacggaaaagttggttgtgcttggaggcaatccgtttgttggacttggatcacttggatcacacattttgttagaagccctacatcgtggcaagtgtgctgggagtcctaccaggtctggta

SEQ ID NO: 106628 - DNA, 261 bp, Glycine max
ctccgattcacatgcccaacaattccttccccgaattccgtacagatgcggattcatatgccaactacaactgcagttacactaatgttacatctgcacaatcaaaatcgggttggagatgtacatgcaaatatggcttcaagggaaatccctaccttgaccaaggctgtaaattagctatggaggattctcctgaaagaaacaaaactcgattaaagtgggccataggagtttcttcaagcctcggaaccgtcattttac

SEQ ID NO: 106629 - DNA, 271 bp, Glycine max
gccctgcgtcccttgccatttaatgtggtacatcgtgtgcgagaattggctaaaattcacccatacccaaggcaacgtgggtcaaagaggttgcgtgttagccaagctggctcttctatcattgctaaagattctcctccccttagtcttagcaaaagaaatgtacgtaggaagtttacttagaagtccatatgtaaaacaatccatggaaatctatagtcaaaagaatcttgttgaaatttaggtattacatttgcacaattttatatct

SEQ ID NO: 106630 - DNA, 145 bp, Glycine max
tgtgaattgacaagaaggaagcaccgtagcagcgcaaaaaggatgagcgcagcactggatgatgacccagaaaggagacgcttgaatagtgggttgaagcgctttcagcgcgatctgatggctggggcggtgatgggtggtgtgg

SEQ ID NO: 106631 - DNA, 272 bp, Glycine max
agtcctcagttgctagaagcagcagagcagaccctgattgtcttaatcaatcaatacgtcaccaaatttcactttgtagtgtagaaaataaattgaatgaatgctcctttgcttcctctacacccatccttttctttaggctgttcctcattgatcgtatttacaccaaactgacctaccaagcaaagttaacaaaacatgcttcttctgtttaattggaattgtggtgcgtggcatgaatgctatcttgcttgcatgccaaccttcttctg

SEQ ID NO: 106632 - DNA, 265 bp, Glycine max
gtactagtgtgacttttattctattctagtgagaataagacattaaagagatgtgcaagcggatgcgagtgcgcggtggaatgttgaaatccaagttgaatagaatcgcatgggagtgtcatgctagaaaattgttagagctcacaaagcgacagtcgatttgtggttttcatactgcatggtgtggaaggaacgtgacctcgtctgtctatgagacatgttgttggagtttgggattagtctgggactcatttgacaattcaat

SEQ ID NO: 106633 - DNA, 260 bp, Glycine max
attgagcatcgtgtgtctgccaacggaagcaagagtagggtttcaatgcctatttttgtaaaccctagaccctcagatgttattggccctttgcctcaagtgcttgctagtggtgagaaggccatgtataaaaatgtgttgtattcggattatgtgaagcatttcttcaggaaagctcatgatggaaagttgacaattgactatgccaagatatgctgagcttaattcctttgggaggtactacagcaatgcagatattt

SEQ ID NO: 106634 - DNA, 266 bp, Glycine max
agagtggcagggaggacaaaaatgagccatctccaactcaaatgaagctcgaggataatacgagagaagggcaaattttgaaaagtggcgggaaggcaaggagaaatgaaccacctacaactcaaaggaaactatcagctttttcatggatgtggtataccatgtggaagattatggccaaagaatggaaagagattgataaactttggaggaaaaaggaaatgcataatttagcaaaggaacttgtaaacttgctagcacaaaaa

SEQ ID NO: 106635 - DNA, 181 bp, Glycine max
  unsure (1)..(181): unsure at all n locations
cacaaccactcttaatttctctctgcattgctcacttacacanctctccaacctttcactttccagttcatttcaatgcgtctctatcctttccaaatgcgcagcgttgaggttgcacatcacacaccaacaacagcttcagaacatcaaacaaccgagcgtcatcaagatccaggaacca

SEQ ID NO: 106636 - DNA, 152 bp, Glycine max
cacatcaccaggtattaaaccaattaccaggcaaagggagaagtatactgacgcagaagacgagggtcaaagttcaatggctgagaagacggaaatgattccgcaacaatgtgacatcgatgccacatgggacgcctgcattgatctcccgt

SEQ ID NO: 106637 - DNA, 283 bp, Glycine max
ctctcgagccgaatcggctcgagcaataaccccttccctcttctctcacctctctctaattcgaacgctgagtccgaattcaaaccgtggtggtgacgtgtttttctctgcctctgcttctagtcgcggcaatgggattagggttagggtacggtgagtcttcgcgattgtagcggtaacagttcgtgtcgcggttgagaagttttcgctcaattgataggttagggtttcggttatcgtcatgtccgatccttcgaggggtcgcgttaccattactctaggg

SEQ ID NO: 106638 - DNA, 149 bp, Glycine max
ctgacaacgatgctgctttggtggagtcggactctaatcaacaagataagcatgcagatgtaaatccatgcccttctgaagggaagaagaatgtagatatgtacaatatcttcttgcagttgccgcaatctgatttgcgaaatttggca

SEQ ID NO: 106639 - DNA, 274 bp, Glycine max
ctgccaggctatcactggattccgagctacctagaagcctggccggatcactcctgatctcggttgcagagtcactgctagggacgcttgcttctcgtgccgttgaaaaagcttctctggccatgggggtgtaccatgatctcaacagatgagtgtgactatggcactggtcaaagccttgctgttagatgctgagcaaaagaagcagcagaacaatgcattgagcgagtggctgagacagattaagcgcgtattttcggatgccgaagacata

SEQ ID NO: 106640 - DNA, 272 bp, Glycine max
tttaaagatcagcacagggtacgtgatgctacattcttctgatacaggtgctgcatcttaagtgcacttgtacaagtaaccgcttattcttattcttctttgcaaaacaccaatccaaaaagaagtttcttgataagtgttctttggcagtgcattgctgacccaacattcagttaaaactattgggctgaagcatatagatttgtgactgaatattggattctgcctgcatctttgagtgaagcatttgcactgaatcagtgtggactgta

SEQ ID NO: 106641 - DNA, 273 bp, Glycine max
ctcatctgcaactacaaacactctctgtccttgacagacagctgttccaaacccaacatcatttacctgctcccaccattccatttcctctttctttctcccacctctctcatatcttcagatccatcactctctttgcaaaaaaaaaggttaccccttttccatattttacctttcaaactctctctctctgtatgtatatataaagtctctttctcatgtttccttacttgggtgtagctttatttggtcatcaatttaattgcctgacca

SEQ ID NO: 106642 - DNA, 272 bp, Glycine max
ctcagagtatattgtcaagtttagaggaaagcattggtaggatcgatcgatttctttcatttgagagagcatttgttcatggagatgtggtctgctccttgtcagacccatctggacaaatggggagggtcacaagtgtggttcgtttgtggatttggaaagtattaaaggaaaagtattaaaaaatgtgaactctaagaaacttttgaggattcgctccatttcagaaggtgattatgtaattaaggtggcgtagcttggtcgagttcaga

SEQ ID NO: 106643 - DNA, 334 bp, Glycine max
  unsure (1)..(334): unsure at all n locations
cgtcacagagtcatgaactcggttagagcagagtgttgtgctgtctttttggtgtggtcacctatggtgcagtgacaacacgaagatcggaggagccaaagatgcgtagtgcgtaagttcgagccaatgggctatcgcaagggtgaagcgcttacgcttgctgatattcgtccgcttcagtttgggctactgcagggatgtatatcgatcactatggtgttgctttcaagcatnggcgatgagtcgattggatactgctcagtgtgaccgtcgatgtgagttgctgctattgataatagtcccttttgcacttgtccttgaaagaaaaataaga

SEQ ID NO: 106644 - DNA, 281 bp, Glycine max
caccattttctctcaccaaagtcagctttacctgattcctttgtttagtttgatttattgtgatttcattggttcctttcttactttaaggaacaagtgtggctataatataactctggtgtacataatcacatagatgaggtggtgtggagttggtttattttcatttgttctcctttgttctaacttcataaatggtgataatgattcaaatgtaagtagcttagggaaataaagtttgtggaaactgggtatcagcactatttttgaaaataaacttt

SEQ ID NO: 106645 - DNA, 293 bp, Glycine max
ccaaatttggtgacttattggaagtctctccttccattaacaacaacaatcgtgtggaacaagaccttcaagtggatccatctctcagtgactttgatgaaaagaaggctgaagaagagtacactaagctcaaagagaagtatgacaacgaacacttcaacttcaagggattaaaggtctctgcaactccattgtgtccttacattcttcccaaagtgaagaatacaatctatgttcttcttgagatcaaagttggcaagaaacaagaggaagagaagaagaagagatcccct

SEQ ID NO: 106646 - DNA, 286 bp, Glycine max
caagagagcagtgtaagacattagaaaatgcgacaggcgcactttatctgaaagcaaaaaccctacctagggtcaaccgtgacgccataatcgctcttgcgcgtttgaacgccttcaacatctttgcaacgggatcaggtgctctgatggtacgaacctgaaggatatgtcaggctaatgaccgggactgggaggactgggaggatggtcatctgcaagatcatgtagattcaatacattcgcctctctagttccatttgatcttgttcccgaggctgtcactttg

SEQ ID NO: 106647 - DNA, 284 bp, Glycine max
tggatacttgactgactggaaatttgatgatgagattagcttcatgactgaggttgcaaccaaaggatcagatacaagtttttacaattcttcagcaagttttagcatagtaggtggagcagattattcaccaattgatgcttccaaacctatccttcatgagactctaagtgagagttcgtaagaatttgtgttatagtgcttttgattgagtgtacaaacaatgataatggcaatgtgctaggaaaattgtgttcctttcttttagttttacatgtgtttta

SEQ ID NO: 106648 - DNA, 288 bp, Glycine max
agtcaagactggttatggcgcaaatggcttaacatgggcagtaacgagcctggttacaccgctgaccctgatgatgataatgacgaggaccctgaaagtgactcagataatgaagtttcgctatttctgtgatctgcgtcaatttgaatatgcagagtggggcaaacggacacggtttggtgacagcatagaggaactagctccaattgagtcaaatgaatttcttccaaggttaagcaggcaaaagtcattaacttctaggtctcagtatataaacaagaaggaact

SEQ ID NO: 106649 - DNA, 287 bp, Glycine max
cagtttgtccttctactttcacctctccttcaatcctttcattctcaatttccttctttgaaactttcacaccatctcacgcacttcgcaaagttccagagccttccaccccaaaactgaggcgttaaggaaacggggagtgaagagacctaagcatatctatccatggtttcaccatattctctcctttattgttttttgtttttgttttaactcacaggtgtcggtaatggtagagtatggtggttacagtggcgtcggagccgaggcggacggtcatcttcgat

SEQ ID NO: 106650 - DNA, 150 bp, Glycine max
ttagatagaaatgaaggggaataaggatacttttgcctcggtgtgcattcaatccaatctaatcaatataagaagagtatagcgagagtggtttagaataaagaagttgagtggcgccagcagtcattataaggctatcgccgatggtga

SEQ ID NO: 106651 - DNA, 284 bp, Glycine max
cttttctctctctctctctctataataagattcttccctctatctctctctagaacttcgtcctccctctgcttctttctttcttagttgcagcgcgattgctgcatcgtcctccaataagagctcgctgctagtgaaccctaacacggcggcaacgagaggtgttcggttgaagctcagatcagcgatggcagcagcaacccgcacttctctgcggttcctcctctcagtctccgtaaccctaactctcgctcacctcgccgcctcaaattccgaaggcgacg

SEQ ID NO: 106652 - DNA, 273 bp, Glycine max
cgatgattctatctctaggatagctttgagttgtccgaagcttagggaattggatatcagctattgttatgagataacccatgaatcgttggtgctgattggaagaaattgtcccaaccttaaggttctcaaaagaaatctcatgaattggcttgatccttcccaacaccgagggattgttcctgacgattatctaaatgcttgtccgcaagatggagacgatgaggctgctgcaattgctaattccatgcctggtctagagcagcttgagat

SEQ ID NO: 106653 - DNA, 254 bp, Glycine max
tgtaaactcttcttcaataagccttctattgatctgggcaagtgatcttgacaggagggcacaagaatggtgttgtctataaccttcctcctacttctgtctcgactagtcattgctctccgtatgtcactgtacgtagcctatagaggttagctctaccctcaattctaggacggttcatgtcgcagagctgcaagagattgtcaaatccatcgttgccaaggcagtggcaaaagagccccgtgtggctgcct

SEQ ID NO: 106654 - DNA, 270 bp, Glycine max
gaacaatcggacagaacttcatgacaggataccgtttggtatttgataggggaaacaagaagctagcgtggtcacgctcaaattgtcaggatctgagtctaggcaagaggatgcccctttctccaaatgagacttcatcaaacccattgcctacagatgagcaacaaagaacgaacgggcatgcagttgctccagctgttgctggagcagccgaacgtttgtggggagctcttccagcaacagctggagcaactgcatgcccacaaacct

SEQ ID NO: 106655 - DNA, 264 bp, Glycine max
ccttcatacgctggattttctgcttctgcatctgcataagcataaccgttaataattactgcaaagccctaattcccctaatcgatgatgaaaggctcgaagcgtttggccgcgtcggcacccaaccaggtcgataccaacgaaacggggttgcggaataaaagaataatggaaggatccctcttcgatatccatagggccgaaccatctcaacaaccaattgtggcagcaccaccattggatatgaaacgggcggagtcatca

SEQ ID NO: 106656 - DNA, 257 bp, Glycine max
catcttcttcgtctttcctttgtctctcttctttcccctctttttcgagggtttttctttttcttttttccctttttttatttttcctttattttgtttgtttctttctcttgtttttcagttttgattccatttcctttgaatcctcatttattcttcttcttctgcaaccctaactctagtattgaagatgcagtttcagaggttatggcagcaagccatgatgcaatcatctctctaccatcatcctgctctac

SEQ ID NO: 106657 - DNA, 244 bp, Glycine max
ctcgtcactcttcagatctctctcacttccttacatcccatccacaacgatgatgagaagccataaaccatggtgaatattcgctgtattagagctggctatgttggtggcacaagcatagctgtacattgacttgaagtgtcctgcgatcgaagtgatcgctctggacattgctgcaccacgaatcagcacgtggattcagcaaccacctcccgatatatgagcctggactaggtcgtgtagt

SEQ ID NO: 106658 - DNA, 260 bp, Glycine max
  unsure (1)..(260): unsure at all n locations
ataagagtganttcggctcgattgttactgcaaatactgtaactattgctattttgggacatgttggaggacagttagccattattggggtgattttcttttttttgttcaaaaaccaaagcttttgcttctgagggaaaaagttgcgcaagatggatgctttatgcaacaagggtgaaaattttcaaaagaaaaaagatggggttccttcttcttctagtgattcaactcacgaatgttcttctccttctcttggctgg

SEQ ID NO: 106659 - DNA, 260 bp, Glycine max
ctagaatccgcgtcgtccgtccatcagccgtgcgatcagcgagccgcttcgtctccgccggaatcagacgtattgtgttcggtgcacgaactctgtgtagctccgaagcttctcgcgcttctgagttccctatgacgttcgcgcgaaaattcaaattctctaagcagagcccattgccggcgcttcaaaattgggtggaccaaggcaacgatgtttcacccttccagctaagaagcatcgccagaaccctcgtcaaatcg

SEQ ID NO: 106660 - DNA, 263 bp, Glycine max
cttccaacaaccttcctttggagtgtgtcataaggagagtcttcaaaagttccgagagagatgaatgtatatgttgctctgccctgttgacacgtaagtaaccacagtggatatggagcggacaactagagtattgcatgaggatatgacagggtaaggttagcttgggcagagaagagggaagtgagacacacatgcctaaatggtcctgacaacaacaattatggagcttatagatgggttgttcagtttgtcacaaacgc

SEQ ID NO: 106661 - DNA, 290 bp, Glycine max
tctcgagccgattcggctcgaggatggaatcatttcaaaacaataccaataaaataaggcacggtcatcattgaattgcatgcaagtctgtcatgatcaatactagaactgaaatcctctaaacccagcaaaactacaattttttattgaagtgttagtacaaacaaatttggatgttatgttctaaatccaaattggtattgaccctacgtaaatacttaatttcatatttttatgtacttttttgcacgtgcagttttcaaagtctgcacgcagggtatcagatctta

SEQ ID NO: 106662 - DNA, 289 bp, Glycine max
cttcatcattgaattattttgtttatcatctaatgctgcggcactgaaaggttagtaatcatgttgccaaatccttggagatatattttatgatactcattaaattgtgcaagccttggacaactgtttgattcctcatcatgatttggcgttagcagttattggattcatagaaaattcagcaacatctatggtatccttgatccttcaattttgtatattccatctcacacttttaataagccatttttctgcttaagttctttcacacatatggtagcgagtgtat

SEQ ID NO: 106663 - DNA, 285 bp, Glycine max
gattggcttgccttcagccaagctagattttccagtttccaatgtgattggaacatcagactttggggaatcactaaggttccagaaggtcttgcaaggtcaagacatgttgggtgttaatactacttatgatagttttaatgctcacagtcaccagctatctgatttgaggaggtgctatcctggctcgaactatcctaggattgctgcaacaggaaatagcattggaatctcacaagtgagttccaatgtttccaacaacggcataggctttagtgaatcttt

SEQ ID NO: 106664 - DNA, 285 bp, Glycine max
ctttccagagaatatcacacgaatcccaccctcccccagggtacggatctccttaccctccaccccaaccgggttacccatccgcaccgcctcacggatacggtgggtaccctccgccgcagccgccgcagcgtccgccgtacgactcctatcagggttacttcgataacgggcatccaccgccgcctccgccgccgcactaccactaccagcacgtggatcaccatcaccaccatgaggagcctgggtgcttttcgttcctccgaggctgcatcgcagcgcttt

SEQ ID NO: 106665 - DNA, 274 bp, Glycine max
ctctcacgctcgaatcggtataagttgacactaatcgacaaccctacacacaacccacttcctatactacgatgaagatgcgcgattatcatgaggaacagccaccgatacctgtggttctattcagaggatgttccacgggagggataggccacgcgcttgcacgcgccttcgctgagaagaagtgcagggtggtggccaccagcaggtcgcggtcgagcatggcggagctggaacacgaccaaaggttctttttggaagagttggatgttca

SEQ ID NO: 106666 - DNA, 170 bp, Glycine max
gtgatcttgacacagtctctgttccacgcaagccataggcaatgttcacgggtccagagactccagagtcctttcaatgaaaagacgttctcaagtggaagtttaatgtgtgaaatgcgacttgtgtgggttcacagaagaatgcacccctgcgtgaatcacggaggtgc

SEQ ID NO: 106667 - DNA, 282 bp, Glycine max
ggacactcaagcatcaagtttttatggtcgtgtgacactagggctcaggattcattttccctattttaagtcaacccagtgtttccaaaatatgttcttttatcaaatcatgcattcatccgagtccattttgggcgttcggaaaattttcacaacattcactcttcaggtgtatacacattttttttcaaaaactggttaagatcagtaaaatctttcaaagaaaagttggaaattatctttttcacaagcatgttgttttttagctagacaaattttttt

SEQ ID NO: 106668 - DNA, 281 bp, Glycine max
gaaagacatatagcaggactgaagaagaaagatgatgtaagtcatatgtattattcagaccttggaaaattcagtagaatgaggtctatactaccccgagcttctctgctattatgcagagatactgctttctatccatagctaacacaatgatttgcctggataccctccccactccctttctctcctatatcataacaacatattccactattcaataactagctcattccttccctttctctctcactgccagctcatcattcctctctatcctccct

SEQ ID NO: 106669 - DNA, 282 bp, Glycine max
cctcgaaccgaatcggctcgaggtttatggcaattctcatgctcacgcgaaggcatttcagtcctggaagaccattagaagcctttatagtaactcctcccccaaatcgaaatgctgtagaacaactgctgacattacaagaggccattacacagtttgaatcgcttattcaagctgcaaatattattctcctaaaattgagagctcttctacttgactataagcgcacaagctacagagatagttgcactagtgacttgattcctagccgcagtgtttgct

SEQ ID NO: 106670 - DNA, 205 bp, Glycine max
cacacatgggtgggtctgcaaagcccacgtcgatgtagttggactgaaactcgacgattactgcgatataattaagcagcccctagatctggggactgtgaagtccaatctctcgaagaacgtgaaagccacgcctgaagattacgcctctgatgggagattaacgttggaacaatgcaacggcggatcaacccaaggggtcact

SEQ ID NO: 106671 - DNA, 263 bp, Glycine max
ctcgagacgttgctgtcaaagcagcctatgaaataaataatcccaactctgcctcaagtaaaccggctgactccatgtcatggcttggattaggtgctcaagcaagacaagtctaagtgcatttgcagtgctcagtagttttggactctctgtcatctacatttgactgtgtagcgcgttgggactaaataactacgagtctactatgactctgatagctctaagcattagtagtaggtgcaggcttcaagtatgatgattgc

SEQ ID NO: 106672 - DNA, 258 bp, Glycine max
cagatggtggatctgctgcatggacatgctttcgcggaaagtgtgggtggaaaggcagtacacaggcctatgctggtagcaattctgcaagaactcaactagccccggttaaaagataagacaaatcacagaggaggaattggaactagaaccactttgtgatgacctggtcacgtacttttctgagcgcttgatttcaaaacagactctggagagaaatggtgtgaagcagagaaaatatgatgatcagattgtgat

SEQ ID NO: 106673 - DNA, 265 bp, Glycine max
tgtttggtaggcggagctccttgcttcactggccgacagtagatgcctcaacctttctgctttcttctgtgtcacctgtttcaccggttcaggaggcctctgagtatgaagatcatatgggataggatgtcttagttactgggaagagctaccatgtggaatatatagtgtgcatgttgatgcttcaaaaacaagtggatatctggtgggtgaagtcaagatacatgaatatacaaactcaatgttaaatgaacttatcaagtgg

SEQ ID NO: 106674 - DNA, 270 bp, Glycine max
ccctcgagccgattcggctcgagcattttttagcaccccttccacaacatcctcgttatctgcaaacacacctgaatcaaattattttgtgtctccgactttcctcgaacatgaatcgatggggtctgtaacaagccctgccctgattctgaacttgcccggctggtttcagctgatacatcaatcaccagttctccaattttcgactttaatttctcgctcgatgcagtgggaattgattatccaaatttccccttcaatatatgaaaa

SEQ ID NO: 106675 - DNA, 223 bp, Glycine max
gcacaacaaaatcctttgttgccaaccatcttgctgaatctgttgctggagctgtgacaataagggcttttgaggaggaagatcgtttttttgagaaaaatctttatctattgatgtcaatgcgagcccttacttccatagttttgctgcgaatgagtggctgattcaacgattagaaacggtcagtgctgttgttcttgcatctgcggcactgtgcatggtg

SEQ ID NO: 106676 - DNA, 289 bp, Glycine max
cggctcgagccaaaaccaaaattcctaatatcaacgtacgccttccccccgataaggaaagtaaaatccacaagtacattcagcgataaattccttgctccgctactaaaactctctctttcaagttttaacaacaccccaccaccaactccatctcttctatccccaacatcactcaaaaaaaaaattaaaaaatttccctcatacaccttctcccatgatctgcaagcgaagctttgatttcacaaaagctaaatttagttaaacacctgcatattaaatttttctg

SEQ ID NO: 106677 - DNA, 122 bp, Glycine max
cacattggtatggcggctgcggcggcgacagtgggttgagtctagggcaaaaaaagcgaagaatgcccctgtcccttgcggacaattgcacggcgacaactcgcaacttcttctacaacaaa

SEQ ID NO: 106678 - DNA, 267 bp, Glycine max
ggcatgttgaggcagtttgggggtccacttcaactggtggatatagggtcattgagtaggaattgtgggatcaagtgtacagttgatgggatgcattatgatggggttgtttatgaggctggagttcagattttgttgaatgcattgcttattgaatctcatcagaggctatgaagtttgtagcattggtgtggtaccccccctcttagatgtgctcagctcagctccctctgaaggggggatatataccgtatgactctccaacga

SEQ ID NO: 106679 - DNA, 270 bp, Glycine max
aaaaagattgttaatatatgctcctgtaaactttcagaaccctcctttggtaaactgaaagtcatcaagatcaatctctgtggtcaattgaagagtgtcttcttaatttctgtggttagccttttatctgttcttgaaacaattgaagttttagaatgtaactctttgaaggagattgtccaggtggaaacgcaaagcactggtgaagtcaagcttatgtttcctgaattacgctctttgaagctacagtttttatctcaatttgttgga

SEQ ID NO: 106680 - DNA, 272 bp, Glycine max
aaatgaagatcgacaacgccacatcgagatctattactcttcatttacactcacccacttaactcccccaaccctattcagatcccaaacccaaaccccgccacgcgatgtgtttcaaatcggagcgataaacccctgcatctcgcacgatcccacgccgtttcgcgtaaaaatgggtgcgagccaatcagtgcaaagtttggaagacagcgaagaagaggcacaagaggaggaagaagaagatgacgagaggaacctcaacgggcccttga

SEQ ID NO: 106681 - DNA, 274 bp, Glycine max
tgattttcgtgtctttagatacgtatcttttgtttcttcttgtaacaagtgtatgcaaggccaggagactatttttcgtttattgtgtgattgtaatacctctcgcaaggtgtagcagtagctgaagcttaatcgtacttcagatttctacactgcaaattagattgaatgactggtgaccaacttgaacaactctaatggaaccccttttgctgtctcgtgttggattctttggaaaagtagcaatgctcttatcttttgggacatcagatgg

SEQ ID NO: 106682 - DNA, 263 bp, Glycine max
gaagaaggttcacttgatgcaggacattgcttcagagtttgcaataaaatgggattccaaagcttttgaactaaggatgtcaaaatgctctgtttttgcacaggaccgcaataattttaagtctaaccacacgagtgatcatgatataccattacaaggcaaggatgctaccccaaaaggagtcaagtttgagagaagtcatgaccatcctaatgacaggcacaaatttcagaatggcaaggaggctgttgtctcaaagggag

SEQ ID NO: 106683 - DNA, 264 bp, Glycine max
ctctcctctttcgggaatcactgttttggtccttctcctcgctctccttctcagattttacatcaaattcgacaccgctgaggtcactgttcctaacccacaaaaatttaaattctgggtttttagatttttctcaattgggtcataaaagatcccatttttatttatttttaatcaatggaaatatcagttacttagtcaaggactttgactctgctttttgttttgcagaggttgttcagtgctgaagagctatcattgttc

SEQ ID NO: 106684 - DNA, 282 bp, Glycine max
tgggactggtttggcagttcctgatttcagaattttcgctggccggggatactgccttgtccgttggaatcgcaggatggaagactcgttcctgagtattgatgactccttaggtgacacctccttaacctcgggcggtttgtgcagaaaaccttgtggtttgatattttgtattttttccctcaccaattaatttttagggatattgatgtacaatgagcgcacttaatatatggtttcgtgaactggtgtgctaaaaaaaaaaaaaaagggggggggggg

SEQ ID NO: 106685 - DNA, 273 bp, Glycine max
ctcacttcacaattagcccacatactgtcgaataggttaatgtgtgtgggctaattgtgaagtgagtggtggtggtggtggaggtgtgtgtgatgagaggttgccatgaccactcacttcacgaggtgcccacacacattaacctattcgacagtgtctccaacaggattatctccgaaagacaatatcggtttggaaccgaataacaacgataatggtaatagtcatttcttcatttcctccggaatggtacccaacatggtgttagaaaac

SEQ ID NO: 106686 - DNA, 273 bp, Glycine max
attggcttgccagactttccaggaggtcctcctagaagaatttcaggatttgcaggggggagccaaccaattatcacaagtaccactgttgaagttgttgttcctcgagcagtggtgcctgtaatatatggggaagatggtgaatgcctaaaacaaatacttcagatttctgatgcaaacattactattactgatccaaagcctggaactgtggaaactaaaattataatatctggaacccctgagcaaactcatgctgcccaaagtcttatt

SEQ ID NO: 106687 - DNA, 270 bp, Glycine max
ctcactccctctctcacatcgcaagccagccaccgcctccactggtggcactgtcataatccggcgtgaagttgccccctcaacgtgggagagtgtcgctgaagaagttgtttcgggaatgccagcacacaaaccagttgttaggttatcatggcaaccacagttgcctattccatcatcattcaaagccactgatgggtctcataccaaacctcaaactgaggcatcaagcagcactgttaggaaatccagttcagaactggttgatgg

SEQ ID NO: 106688 - DNA, 269 bp, Glycine max
cagctagctatgtaataagttagatgcagtgaggtgccaaaagatcacaaagcttggctgtgaagcaaagtatgtcttataaaacaattacatagttctatcgtactccaaattttacaaactaacctatgcttatttcacactataacataattcaaaaagtattccctcggcaaaagttgcagatgtacacctagtagcatctttaaagcatgcatgctcagtggtgctttaaataataaaaattaataaagcatgaagttattctg

SEQ ID NO: 106689 - DNA, 264 bp, Glycine max
cacttgacgttcaccaatcatttgtcaaatttcaggagtacttagctaacccagtgccagtcaaggtggggaaagtcagtagcccaacaactaatgtctcacaaactcttgtgaaaatctctgacaatgagaagattgatcggttctagatttgcctgtagaggaggcatcacaggccgaaaaatgtggtcatccatgtccattaacaattgtctttgtcgagaggcagacaaggtgtgatgaagttgttgaagcattggtagc

SEQ ID NO: 106690 - DNA, 135 bp, Glycine max
atcgagccgctcgagccggaaaaaccgaactttttgtatttccaataatgtcttgatataaggttttgtccatctcccgaatgatctttttctgctcttgtaggcaatgcttttcagtatatgattttgcttatg

SEQ ID NO: 106691 - DNA, 181 bp, Glycine max
tcgagctcggcggctcgagcggacctaagccaagacgagagaatacatgaaacttggggtttgaatcgaagcgattcatcgatcgatcgatggctcttgtaggagttgaacggaagcatgcggcggagggcgtaccggaggagtaattgctccgccaagcccaccagagcagtggcgaagg

SEQ ID NO: 106692 - DNA, 178 bp, Glycine max
acaatttctggctgtcttgtgtacatttgagcatggtcttgtatcaaaatttcattgctcatattcgtatgtgtattttagcaattgattttgtagttgattatttgaaatcctaggaaaaggggcaccaccacggcccggtgaagtgcgtttgaagatccgctagacctctctttgc

SEQ ID NO: 106693 - DNA, 265 bp, Glycine max
agtcgtcgctcttctcgttgaaacaaaataaccagcacaacaagaagctactaattctgccttatggatgtgaagagataaatctgtttggtattttaaagtgttttatgaattatttgatgggtgaagacggagaaaagtggtgacaaagcaacgaccaaggggtgttgatggagataaatggtacttgtatagctgcttacaagactgtaaatattggtgctgtaattaaatacacgagactagcagttctatctcgatggtt

SEQ ID NO: 106694 - DNA, 265 bp, Glycine max
tgcctgatagaggggatcagcccttttcaattgttgctcctaatgggccacaaaggttgttgactcctgctgctggtggcaacccatttggacctgatgtttataagggaccagtattgtcatctccatttgaatatctgtcttcccttttaattccagctttcctcttccatcagcttctttttctgccggatcaactacttatgtatatccaacatcaggcaatcggctttgctttcctgtggtaaattcacagttaatgggg

SEQ ID NO: 106695 - DNA, 248 bp, Glycine max
cctaagctggctgtaactcagttacgttttaacaaaacttgtgtcttatttgacagacacttcattcaaagaagaagaagaagaagcaagccaagcagcaacacctgcttcattatgggtgcctcaggaaaatggtaaaggcattaatcggactcaagaaaccagacaaagacgaccatgtgaaggagggtggtggtaagagcaagaggtggaggctatggaggagttcttcaggggacacggggggt

SEQ ID NO: 106696 - DNA, 247 bp, Glycine max
tggaaaccctacgaagacatttctcaaagaagaaaaaggacacatattgtgttattggccgggtcaagcacaatggctattgcaagaagcaccccaaacaccaccaatcacccggtgtgtgttctctttgttaagggaaaagctttctcaactatcttcttcttcttctgactcacatagaagaatctcatctatttgttcttctagttcttcttctttgtcatcatcatcttgttactcctcagct

SEQ ID NO: 106697 - DNA, 133 bp, Glycine max
cttgttcctcttagacagactgaggccttgttgggggtgatctagctaacctaaactagtgtgcaataagaaggtttattatgaaaaagtaatgaacattatgatgcagggccagttcaaaattatactcaag

SEQ ID NO: 106698 - DNA, 245 bp, Glycine max
cgagaaaattccccagaaatctcaacacagttacgacatcatcaaatcaaaatatgttttgagacaataccaacaacagtttttcagctctgtacaacgttggatttggatcagttttcgtgagagaatatttggcatagaaacatggtagctgaagcagaggttgcgtgtcaacaaaacgtgggtgtgttggatgtgaagcattttccaaataagggaagcgatgttcaccagatcggagacgc

SEQ ID NO: 106699 - DNA, 224 bp, Glycine max
agccaatgtacatataagtgaaatatatgatacatacttgattggatgatatttatttaaaacgggacctagaagattatcattatatatagtcacatgattattgtggcaaggactttgttgtttattctttgactttaccgtttagtttttgttggggtgttttcaattagtctttgatgtactttggggtgaatcattggtaggacttgaactttggttgt

SEQ ID NO: 106700 - DNA, 254 bp, Glycine max
cttcttcccctctcttctttctttctttctttcttttgctttctctcttttttctttctctcttctatgctcagctcaaccacacacacacacactctcactctctctctaactgtttgatgtgattctctctactattagctcccaaaaaaattaaaccatcaacctttacaaaagagaaagctccaagaggaaccatggtttatacttctatcccatcatatattgatccagccaactggcagcaacagcaa

SEQ ID NO: 106701 - DNA, 252 bp, Glycine max
ccttacttctcactctctttccaaaacactccctttctctttccccttacccttcttctgtgtgtgatgatgtagatagagaataaaaagagaccagtgtgcagtgagaaagaggttggtcacttcttgtgtggctttgttttgttctttgtgttggaatttgttgatgggtgaagagggagaagaggtgtcaagagataaggaacagcaacacatgggagtttatggaaatgagtggttgtttagtagttt

SEQ ID NO: 106702 - DNA, 217 bp, Glycine max
atcatatttcccatttaatataaaccaactaaccatggtgttcgcacaagccaaaatcatttagaagtctttaggcctatctttcacatagctccccttacatcctcaatgtgagaatgggagcctggtagaaatgatcattttgtgcatgtatatatagttaatgaggaaggattactgcattccagctaattgaatgtaataaattggctaatgt

SEQ ID NO: 106703 - DNA, 249 bp, Glycine max
aaacaacgaatgtgcgagggacaattggcatctttgtccagagacaataagctaaacccgttgtgaccccttcaatactcagtagctccacaagacttttagttgctagtttttttttattattagtgggaatttgaattcgtgatttctccatatcttatcacatatttaatcatcaattcaatcttatatttttaactttccctagtcaacggaaactcgatctcgatcccaatcaaaatggatttt

SEQ ID NO: 106704 - DNA, 155 bp, Glycine max
actcggctcgagctacccgtccgtctacgatgaagagcacaactcgccgccggccgaatcggacagccccgatcagcctccgagcgacgccgcgtggagcttcggtggcctcatccaaactctcgcctcgaaatccgaatccgtcctcgagaact

SEQ ID NO: 106705 - DNA, 248 bp, Glycine max
  unsure (1)..(248): unsure at all n locations
actcgagccgaatcggctcgagcggctcgagtttatttccccctttaatttgtcacaatggctagatttttcgagaccctatattaatttattatagccacttgttttcgtgtgtttcagctggtttcatcattgcataatattttgaatttgactgctaagganagcccccatttttctgagttgtaaagtggcttatattctttgagctgaagtatatctggaatcaaggatgtgtgcttagtcga

SEQ ID NO: 106706 - DNA, 250 bp, Glycine max
cacttgcattgttgtcacagtgaatatgggttgggccttggaagttggccacaaattgggaattaaaggagctcttctgtggcctgcatactggaattcgttggccacgtgtgattgtatcccatggttgattcatgatggaattatagattcagatggaaaccccatcaaaaaacaagaaattcaactctccacaaatctgccaatgatggacacagaaaacttgccatggtgtagcctaggtaagatg

SEQ ID NO: 106707 - DNA, 115 bp, Glycine max
gccttgtcaaaatccttaagtccaacgttgacttcggagcctcattattacataggttgatctgttacgatagtcggtgttgttgttcttgtcatccacaacatctggggtacca

SEQ ID NO: 106708 - DNA, 138 bp, Glycine max
cgagcgtgtaaatcactcctcatccctccaaggatgttgccatagcagtcaagcagaagttggtagatagcaatgctgcagtcctctcaggtgctactccagcatatgatggtagaaagaagtcttatagtccagttg

SEQ ID NO: 106709 - DNA, 140 bp, Glycine max
agaggagatatgtcccagcacgttagggatgcaactgcagttcctatcatatgggaagtcaagacatgcactcgctagagagatatcaacacgatgcagagatcctgataaccccactcaaactaattgcctcagttccc

SEQ ID NO: 106710 - DNA, 291 bp, Glycine max
cccaatctcaagatcgctgcgacacgacactccaacgttgttgctcagtgaaagaacgcaattttttttttagagaaataggcccaaacaaaaacactactaacccaagatctgaatccaaggagaccattgaaagtaccacatgatctacttaggcatgagtgctacgtaagacaaagtttgcttaagtaagcttctaaaagtatcgttggaaagtggggtcaaaagatgaacttcaggaactttggtgttggagataaccaccccacttgggatgccatgcatgggaag

SEQ ID NO: 106711 - DNA, 137 bp, Glycine max
  unsure (1)..(137): unsure at all n locations
gatgtgacttgcaggcagcaaacactgcaatggtacagcaagacttcttgtctgctaatcagttaaccactgaaacagaaagcaacagcccntgccagctcctcctcncctcgacgnagagtcaaaatccatggatt

SEQ ID NO: 106712 - DNA, 114 bp, Glycine max
  unsure (1)..(114): unsure at all n locations
cgcacacattgcagatgctcgacancggctgcatgagacgatgaccaactacatttcacacaacaaagctgcaccaatccaccatggctcaagcggcagcggcgacgtgtcgcc

SEQ ID NO: 106713 - DNA, 125 bp, Glycine max
tcgagcgaatcggctcgagtgtggctcaagttgctcttagtctttgtgtctgtgctttcaccctcaaaattactcactctctttatctgcaccttttcagtgtaaagcttcagatcacaacagat

SEQ ID NO: 106714 - DNA, 139 bp, Glycine max
tcttagtgatcgaaaacaatttgagaaaagcgagtcaacgcgtagagctactactttgagagaagagggttatagaagtgaagagttctaagtccgattgtgagttgagatctgaatgagatattgattgatgttttgt

SEQ ID NO: 106715 - DNA, 147 bp, Glycine max
tgctcgagattagaatatgaaggtcgtggaatatatggaagaatgtggatagtgtgtgtactaataagacgaagaagaagcattgataagtcagtgaagagagtgttgctacctccaacggcgacgacatttctcaaggcattgcct

SEQ ID NO: 106716 - DNA, 316 bp, Glycine max
  unsure (1)..(316): unsure at all n locations
ggtctctgcctctgcaattcagcgaactaaagtgctccataatctcatcttaatctctcttctccaaaccttctgctttggaccaacaatcccaaaagcgcgtttcaattaccattgcgaactcaataagtcatagcaatgcgncagacaaagagagagcgaaacttaagagactcttcgaagagcctacgagagatcgcgcatgctccaatggaggtgttccttcacatcgagactcactgctgtcttgacagtacgactcgatctgaagtgcggcagataaagcatgtgtctaacagatacatggacagtgtga

SEQ ID NO: 106717 - DNA, 298 bp, Glycine max
  unsure (1)..(298): unsure at all n locations
cggaatcggctcatgagaacataggttgactcctattcgtggaagacctgtcctcgagttatctgnggtcgctgatattctcagtcaagagaatatgctgatactatcatataggtcatagatcaagtagctagagctcattgcctttgtcatgcgtcacctattgataagctgaagaggtcctcattaagcatgagggagatgcactaggctcttctgaaggtgtggcttaatctgatgatgcactgcatttggaggcagagtctctaagaggggtgttgagagttgagaacatatc

SEQ ID NO: 106718 - DNA, 121 bp, Glycine max
tcgatggaagatggattcttttcattcgcaataatacctgacattttctgcgatagaattgtgcgcgcttacggtccaggaagcaattgttccataaattccgaactctgttgtctaattt

SEQ ID NO: 106719 - DNA, 173 bp, Glycine max
  unsure (1)..(173): unsure at all n locations
cgtntacctttattanaatacttttaagggtataatttgttgacatatttgtaataaatagatatagtgaccatagatatttcccaatagagaagcgttatctataatctatcactaaaatattaacgatatagtgatatacccatttgggttatacaggtttttttaggact

SEQ ID NO: 106720 - DNA, 171 bp, Glycine max
  unsure (1)..(171): unsure at all n locations
tcaaaaccaagtactacaanggaagaagaacttagctacaagctaaggaaggatcaaagagaatggctcaagcaatggcatcaatgactagcttacgtggttcctctcaagctgtgttggaaggtaaccttggcctcacacgcctgaatgtggggaattgaagcagggttg

SEQ ID NO: 106721 - DNA, 102 bp, Glycine max
caaaaccaagtactacaagggaagaagatcttagctacaagctaaggaaggatcacagagaatggctcaagcaatcgcatccatgactagcttacgtggttc

SEQ ID NO: 106722 - DNA, 113 bp, Glycine max
atggcctcaacctcgtctgctctcactatatcctcttcttccgaccttcttgatggcaaggctccaagacagtcagcagctggttcccctcaatgtgtgaagctccccccttc

SEQ ID NO: 106723 - DNA, 139 bp, Glycine max
cgaagacttagcattgagaactgcagcgctgtaaagtctgataaatctgtgaatcatgaggatagaagtggagccaaatcaccacttttgctacctcgctcgagaagattaagtttggccggagggtcaaaaactatca

SEQ ID NO: 106724 - DNA, 146 bp, Glycine max
ttgtgattgactttgttagttagcgcatccgtttgcgaatcaagcaccacctctagtgaagcaccagatgttcagtgtcagccctggagtccatttagtgctttgttaacgacaattggatcttgatagtttcggtatgtgagatg

SEQ ID NO: 106725 - DNA, 196 bp, Glycine max
tacttgctaaaacatggtccaagaatagaaactaccccgcgacgtgtacgtttgctcaaattttgacgacggtcatcgaccgacatgtccgacggacattcagtcaggcgaacggcctcacagacatcatagcggtgcatggagtgcgtatcagtgtgcaatgcacttcgattttcaagtacgatcgcaactcatg

SEQ ID NO: 106726 - DNA, 151 bp, Glycine max
gtaacatatgaaacatcatactcacgggagaaacttgtttcaggttcaccttctacctccaaccctattgggatggtaatggtagattcagccaaggataagaagatgaacgatgagtaagaataatgtctaagctctgagaaatgatttc

SEQ ID NO: 106727 - DNA, 142 bp, Glycine max
  unsure (1)..(142): unsure at all n locations
agaanatccattaaccgttccttgaaagaaagataaccgagctttgagaaggtaggaaatgaatgattgtaagaatcttggttatgtgatgaaaccanatcctacttacataaacaagattcttacaatcattcatttcctt

SEQ ID NO: 106728 - DNA, 246 bp, Glycine max
  unsure (1)..(246): unsure at all n locations
caattttctggcatcagttcttttcccactgaaaatgacaaaggaaatggaattaagaaagtggaaatatcagctgacatttaggtgcagctatntttgttatttcttcatatcatttaattatcccatcatcgaaataggtggtgagttgggaaatttttgtccggggttttcattatttgcaggaaccttggattttatttgtaacatttctagatggatatcctaatttaattttactgatag

SEQ ID NO: 106729 - DNA, 165 bp, Glycine max
gccggaatcggctcgaggagataccagcaagagaagagacacagaagagctgagattctctgtgaagagaagatggcatcccatacgcaaagctatgcagctggtcaaactaggggccgaactgaggaaaaacacgcaccagacgatgggcaatattggagagaa

SEQ ID NO: 106730 - DNA, 149 bp, Glycine max
  unsure (1)..(149): unsure at all n locations
cgcattcagagctatctgaatgggatgctggttacacaggtcgatncggcatcatatatgtggattacaagaacaatttgagcgacttagggtatctactcaaattgttcttgtaatccacacaactgatgcanatcgactgtgtatta

SEQ ID NO: 106731 - DNA, 137 bp, Glycine max
cagcgagcgctcattctaaccccaagacgcgagacgcgactagcgaatcgactggattgacatagcgagcgcgatggttgaggacgtcagcttacgagacgaccagctcgccaatatgacgaacgacgacgtcgtca

SEQ ID NO: 106732 - DNA, 138 bp, Glycine max
ctcgagtcgagataacccaaagtgcttctctgctctgtctatgtctctctcttgctatccttttggctagtggcactgctgcaagtgcaactccaagaatcgcagtgccaagtcacaatgtttcaacattcaacagaa

SEQ ID NO: 106733 - DNA, 137 bp, Glycine max
cacagatcgaagtgtctctccactcatccggcgatctcctgagtatgcctataccggtctgacaggactagaacatggacatacatcggatagacggatgcttctgaggattcgtcatcagagatggaggttgctgc

SEQ ID NO: 106734 - DNA, 191 bp, Glycine max
  unsure (1)..(191): unsure at all n locations
atcactgctcaaacgtctgagccgtctgacctctcacgcagcatgtcgctgcttaaatcctcgagcagcctcatacgaaaacgctaattcactaacgccatgtcagatcgcaatcacggttccgatcaataatncacttctcgataatctctccggtcgcgtcgcaaatcgaacgagatagtgtcgagtcg

SEQ ID NO: 106735 - DNA, 242 bp, Glycine max
  unsure (1)..(242): unsure at all n locations
gcactcgatcagacacagaatggataagaatgtggggattctcgccattgacatctactattctcncgcttgctttcagcagaagcattggagactcatgatggtgctagtacaggaagtatacgatggactaggcgagactgcatgtcatctgtaccgagtagagatgcatctcatgagttgacagtgtactctctctgagagatggatgactaacatcgcgctgagtgacgaacgatgca

SEQ ID NO: 106736 - DNA, 232 bp, Glycine max
agaggacacggtctgagtagcagcttgtgtcctttcattgttgtggaggaggatgtttgatcagaaatctgacacttgagctcttctgaaattagtgaactgatcagatatgaaggactggaaaataaagcaaaatcaagcatggatctatcatgattgggtgctcttcacagaacagttgattaggatggtcaatgactctatgagattcttcatgaacggtcagtgctat

SEQ ID NO: 106737 - DNA, 345 bp, Glycine max
  unsure (1)..(345): unsure at all n locations
actcactatcaagcaagatcagcagcaattctagctacaagcaatgactanatcttaatctagagtgaagtttctcttgaggctggtagctaacaagttttcagagtagcttgattggctctcagcatcctctggcctcaaggagaaaccttcactttcaagcaagatcagcagcaattctagctacaagcaatgactaaatcttaatctaaagggaatttcaagaaattttttttatatggtttgtttatcttttatccagttggtttcctagttttaacatagtgattcaagtaaagatgaaccaactggtctattgtatattcagttatttacggatgagca

SEQ ID NO: 106738 - DNA, 334 bp, Glycine max
  unsure (1)..(334): unsure at all n locations
tgatagactaatgaatgcttggagagaagagaagagatgtgcaagaacagttaacgagtagtgagaatcaggagaagctacagctagagattctatgtgtctgtgtctgtcactagctagagaatcggatactaaaacatgnatatgatctatgacgacacgatgtcattgccagcttccattatcatgacgaactcagatgtgtgtatctagctgcatgcataactaagctgatgcatactacacctggaatattgagatagatgagatagagcttctcgtctcgtctcgtcgtatactgatgtgtgtctgatgtgtgtgtcttagtgtaatg

SEQ ID NO: 106739 - DNA, 110 bp, Glycine max
cacgcaactcggcatgcggctcgagatgatatctctatagccagagagctgcctacagagttcagctggagcacaagagagtactatggcttggctatccgagaaacccg

SEQ ID NO: 106740 - DNA, 140 bp, Glycine max
gatagataagtacggtctggtgtgcttactactcgcatgtttgataggtacagaaaataagaagtcttgttgttgagcagatgtcttggtgtggatcgttactccgattgtcctggaattctgtgtaagaacagcaaaaa

SEQ ID NO: 106741 - DNA, 163 bp, Glycine max
ctcggaattgagccgactcgagcgctgatggagtaagattaaatggtaccatattttctctgttaaattattgtagttgatacgagagagcaaataatgataatattgccgaactgcttgtatagtcgcagccgtaacccgcttcgctgcttatggctgcgac

SEQ ID NO: 106742 - DNA, 169 bp, Glycine max
taatcaacagcgatacgcacgagatcttaattgctctaaaggcatagcgcattgtctccgacgacattcactcgcgggaatggcgtccctaccctagccgttggtgaacaagtcggtgccatagagctcgcactgatatacggtccattcattgagtcagtgaacaaga

SEQ ID NO: 106743 - DNA, 175 bp, Glycine max
tgctatgcatgtttatatacatggtcagctatcaggaactgcatatggaagcttagaattcccgtactagcatgtaacgagggagtgaactcagaccggtgtaactagatctctctctaagtgttgcagtggactcgcgatgttgtccttcattgaacatggatgctgggtcttg

SEQ ID NO: 106744 - DNA, 169 bp, Glycine max
atgggttcttcttccccgctggacactagcaggatcatagagctagagcgatagaacagctacatccggagactcaacagcagcaggctagtcaacgcctcctccgagctcctcttgcgcgccactctcttggtcgcactcatcctcgtcttcgtcttgatcttgaact

SEQ ID NO: 106745 - DNA, 135 bp, Glycine max
  unsure (1)..(135): unsure at all n locations
atntggaatctcatatagttagatataacaccctccggcatgaggcttttaaatttgttgatgaaggtgcgcggtctgctgaaacttatgatgttgcaatgaantgtttacaagaagctgcagaaagagtgtctc

SEQ ID NO: 106746 - DNA, 337 bp, Glycine max
  unsure (1)..(337): unsure at all n locations
taggttggtcacaagttttcagccgtgacaaatcctcatcgaggagcttgagctcacacaaggtaagtattctcctcccaacacgatttaattcatatctaaggttcaaccagttttgaacttgaaccacttgattaagagacacaagccattaccacttgtgtcaatagtcgtcggttgacattttctagtataaatcagatgttaaagctgttccctttgtctgaactatatatgtcgtctgtggtagtgattaattccgtctattatgtcggtcaggtgtatagaactatgtatgatataatgatgatttcgctgtaacttntgtcagcaatca

SEQ ID NO: 106747 - DNA, 353 bp, Glycine max
tcaagagatgattgactcgatgacgcagaaagctgagagactccgtgagtacattgtagagatgcaacaacagaagtggcaggccaaaatgccaatggaggaataggccataatgctgattttattagtttctttctcctgctttgattgtcagtatgctgacatagggcatggtcatcataaatttagttcctactcgcagggcatgatgtattagtttgctaagtggttaatgttttgtctattcttagatgagggttgaggacttgtactgcataatctgtgccatgggtcgaaggtcttgtgtggtgtagtgttttaggaagttgctttccttgaacgagcttctccat

SEQ ID NO: 106748 - DNA, 132 bp, Glycine max
gctcctaccactgaagtcgaaccgctatttttcctctccctaatggcttctcaagttcttctgcagcaggcactgtttgccctcaagctaagtttcccttcttcttctcgtaacgtggcgttaatttctagg

SEQ ID NO: 106749 - DNA, 177 bp, Glycine max
attacatacctatttgtctctgtagctcacaaacacattcccgccttacctcactctcattttccggtttcactcttctaaaatggcgaatctagcacgcttctccaagagatgcctaagaagcgcacacgcgctagcaaggctccacgtgcagcctcagctgctgacagcagaacg

SEQ ID NO: 106750 - DNA, 290 bp, Glycine max
tcggaatcggctcgaccagagctgcttggagagccgaacaacgactcgccgctcaacactcaggcggcagcgctctgggcgaaccagtaagagtttaggaagatagtggagaaaagctacaagcccgccgcatataggaagatgacagcgccggtgaagatgtggggtcttcaagcactcatttcgcttggatttatcgacaagagataatattttggattgtttgggttcccaggctggtgctgtagcaggaaggaatatttgggtcgcctagagcgtggcgattctgt

SEQ ID NO: 106751 - DNA, 240 bp, Glycine max
cgacagttgctctgtgcagcacaacagcatcacaaactcatagcgcccgtcacagaagtatgttctcaacagattctttgtcttccttcgttcaactctctgattcactcgttcttcaagctacacgtacctggacctgtggatctgttgtcgtcatacaagatgaaacactcaagctggcctgtaatggggatgtgcagatgctaataagcatcgagagtggcaaggaatagtgacgat

SEQ ID NO: 106752 - DNA, 169 bp, Glycine max
ccgaaaggcatttggaatcggaccagatggcaggtatagatgtgaggatccaaaattcactgaaggcacagctcatgtctaatctttcagtattgtatgagtgttcttttcatatggcttatttagtgatcaaatgttacacaatgtctaatataaacaggatttgttc

SEQ ID NO: 106753 - DNA, 206 bp, Glycine max
gcacgtacgtgagctataatactatatcggaagcactgccatagaaggaaaaggcttggtatagtttttgcataacatatcattggagtttccatttagagtaacatagagtgttaatttgggattgatgcctgcggtgtcacctttgaggagcattacagatgaaaagaaccaaggagagatggagggtatttctcaatggcaac

SEQ ID NO: 106754 - DNA, 135 bp, Glycine max
ataaagtgagaaatactaacctcaaacctcagacagaatcaaaaccacacttctctgcttccattgtttcaagttatcaggatcaacacagtgtcacatccataatcgagagatatggagtttagttaggaacac

SEQ ID NO: 106755 - DNA, 186 bp, Glycine max
cttcctttcgctctcttctctgcaaatgcttcatcccaagatggttaggactctgtaggctgataaagacaacactcataccgttggaaagaaggatgctgctggccatgttgcttaatttagttctggcttcctttgtcttcttgagttttatcagagacgggagtgcagggatcactagctctt

SEQ ID NO: 106756 - DNA, 105 bp, Glycine max
  unsure (1)..(105): unsure at all n locations
tctttcttggcctcgattagtcttgcagttgcatcctatcatccactctaagcactgatgtagcgtcctcctcctcgccatntaaccttctggatgctgtccgcc

SEQ ID NO: 106757 - DNA, 139 bp, Glycine max
agaatacatcatagtattacagtactagttggcggtggcgatggtggaggcgcagacatggacgacgcggagaatgagcaaccctcgtcttgacacgaccaccacagacccagtagtgtttattcccccgacaccgccg

SEQ ID NO: 106758 - DNA, 211 bp, Glycine max
tggctctagtggaacagaacagaacagagacaagaacaacaaccgcccaagattccatttcctctatactcgctcggtgcttctgcttctgacgcctctctcggatctcagattcattcattcattcattccactacctcaatggctgctcccgcttccaacgccgtgcttctcggggacgttcacttcgacgacgtctccaccaagcctt

SEQ ID NO: 106759 - DNA, 146 bp, Glycine max
ctcttctctttgttcttcaacaatcgccaaccacattttgggagttagggttttcctctctcctctgcaatatccaatttctccctttctcgcccactctctccgcaatgcagtggcaatgatgtacaatgatcctcagcagcagc

SEQ ID NO: 106760 - DNA, 210 bp, Glycine max
tcggctcgggcttgaggagatggcgagcgcgagggcgagaggtgggtgggactggcgacggacttctcgcaggggagccgagatcgctgcagtgggcggcgaccaacctgctccgcgccggcgatcacctgctgctgctgcacgtcatcaaggagcccgactacgagcagagcgaggccatcctctgggaatccaccggctccccgttga

SEQ ID NO: 106761 - DNA, 199 bp, Glycine max
  unsure (1)..(199): unsure at all n locations
caccanagaagtggaactgagcagaatcaagaagagaagaatggcattggcattgggtaacattgttgctcttcctctctcaaacttgaaaccttctctanagttatcttcttcttcatcctcgttgtgtatcaccanactcttcgccgattcgcgcatcaatgtctctgccactcggtagtagtcgagctcttcctca

SEQ ID NO: 106762 - DNA, 147 bp, Glycine max
caaaagatgagtaggtattcagagtgatattgtgttcttcctctcttgctctcagacgtattgctgtctccttatgatacaattctccttggtgtcttctgggttcaatctgaaacctgtcaaagagacaagatagcagggattatc

SEQ ID NO: 106763 - DNA, 185 bp, Glycine max
  unsure (1)..(185): unsure at all n locations
cngattctcagatactcaactcattagcccttatcttgccctttttcctcttcatgattgtggtgctgaaactagggagaaaactcaagaaaactgagccatctctgaacataccccaggaccatggaaactgcctattgtaggaaacttacaccaacttgttacatcttcacccacataaaaat

SEQ ID NO: 106764 - DNA, 188 bp, Glycine max
cggaatcggccgacgcagtggtacactttactagcagagagaatcacagaacaacagcacaatggtcataggtacacagttttagatcagattcaagcatagaacccatacctcactctcgctctctgtcttatatagtctcaagaactttcctccattcagttggtagggatccacatgaacatagc

SEQ ID NO: 106765 - DNA, 186 bp, Glycine max
  unsure (1)..(186): unsure at all n locations
cggatcggtcgncgcatgctgtcatgttgctagtttatatctttctatactcctggaacaacttgagtttctttgatnattgttattgtatccgtgtgtaacatggggtgtggcatggttgtttaggatgaagtcttgattgctcggatttggacaaaaggtcatgcctatttcaagtagttctct

SEQ ID NO: 106766 - DNA, 188 bp, Glycine max
cggaatcggctcgaccgcgctcgaaggcgtgacacgggtgaattcctcctgaacctccctagactactgtcgggcgacaagcgatcgaccagctggaggaagcggcggtgaccggtgaggaagctctcctacaattctttgccgagttcaggtggggggtcatgcagaggcgcgtgcataatccttta

SEQ ID NO: 106767 - DNA, 107 bp, Glycine max
ggttgcttacgtggagtgcactgagcggaaaggcgactttcaatcgtgtattgagttgatggttgaatagttgtgaatccctgaatggtgatgctgaccaagcaagc

SEQ ID NO: 106768 - DNA, 136 bp, Glycine max
  unsure (1)..(136): unsure at all n locations
atcaggtagcagttttggggacagaagctctggcaagaactatggtgatgccggtgncttcagagccaatgctgccagtgaatatggtggatgatcaggtggcagttttggggacagcagctctgtaaacaactat

SEQ ID NO: 106769 - DNA, 135 bp, Glycine max
  unsure (1)..(135): unsure at all n locations
tagttntggttctataaattctgcgcttgaagcatagagagttcccttccactttcttccttgtatcttttaagatatttctggtcacatagtntatggtctgcctctgcgtagtgcttcaacagncccctgctc

SEQ ID NO: 106770 - DNA, 130 bp, Glycine max
  unsure (1)..(130): unsure at all n locations
ctcataattgcacatcttcgttacgcctgcaatgggcttctatgattcaacaatggctgaatattccttcatcagatatacttattgtcttgtctcaanatggtcgatcagatagatgaggtttcaatat

SEQ ID NO: 106771 - DNA, 148 bp, Glycine max
cggacatcggctcgagctcagaacttcatgctctcaaataaggatctggagcagaaattgtagatcctgaaattttccctgtgtagagtttggcgctaagttagagtttgtgagaggcaactttgagaatgagatacgtggaggacaa

SEQ ID NO: 106772 - DNA, 111 bp, Glycine max
  unsure (1)..(111): unsure at all n locations
actctctcttcaccgtcaaactcaagcttcacggtttccgatcgctcttctcgcacgcgcttctcactcaaancttcnccacgcgacgttggaaatttctagaatacactt

SEQ ID NO: 106773 - DNA, 320 bp, Glycine max
  unsure (1)..(320): unsure at all n locations
agttggtgtgatctgatgctagtgtttcgaagataatctgagaagaacaanaagagaanaaagtatgattgtattcgttttccaatggagtcagatctacggcagcaccctcacatgtatttggatcaccactaccaccagcagcagatgaattctggggtgacacggtaccgatcggacgcaagttcgtatttttcgagcatccatggacgtgagttctacgaacacgtattcaatcgacgctctgagcccgaaacagagcgaatgatcacacgctttgtcgataatcttggtgnatgtgatgctgctgatgctgatgc

SEQ ID NO: 106774 - DNA, 330 bp, Glycine max
  unsure (1)..(330): unsure at all n locations
acatgatctgaacacaacgtggttcccatctgatccactgcatcgtctttctcaattgtcgaaagatgagtacaagtggttaatgagattgaggaacttgcgttgtctgagcgaaacaaagcagagatgtacctgaaggagcgctatggagtgaacagggnaggcgatggaatgcaaaacagaggattatggtgcagtgatgaggtcgtgaagtcactgcagcacagagagtgtatagagagtcatctcgcgctcagacggctcaaacgccgtcagatctgttctcggtcgtgcctcgtcatctcagtctcgtcgtgcgatctatcacat

SEQ ID NO: 106775 - DNA, 363 bp, Glycine max
  unsure (1)..(363): unsure at all n locations
tttctttcttagtagatntcacgacagatanaatttactctcttctgagatccaacatacgcataacatgtccagttctgaaggtgttgttcatgttgctttcctcncaagtgctggaatgggtcacctcaacccatttctcagattagcagcaaccttcatccgctacggttgcaaagtaacactcatcactccaaaacccactgtctctctcgctgagtcaaacctcatctctcgcttctggtcttcattcccccancaagtanaccggcttgacttaaaccctcgttctgtggatcaaccacacgtgcacatagaccctttttcctcagtcgatacatcgtcgtctctcacttctactcc

SEQ ID NO: 106776 - DNA, 325 bp, Glycine max
gaagcatatactgaaacatgcttgagaacaatttaaattcagcttgtgtgattaggataccagtttttgagagtctgtactatataagttagatcgtcctttttcctttttcagagacaggtgttgtaggtgacagttagcagaatagcataaaatgaaatatgaatgagagcaatatattttttttatgaactgaatgagagcaattagtttcatgcatcgtgattaagttatcagatttcttagacagacttaatttcatgtgggatggtcttcttgttgccaaaggatggttgcccactgatatgacgaggatgaaagcata

SEQ ID NO: 106777 - DNA, 162 bp, Glycine max
tcgagctcactcacctgaacggatccttcttcttccttatcgcgcaatccatacttcacaccctaatcgcgactgctgcttatgatgtgtgacacaacacaaagttgacgaatgtggtgattcagcatttgtattctagtattcttctacatcagttgaagc

SEQ ID NO: 106778 - DNA, 329 bp, Glycine max
  unsure (1)..(329): unsure at all n locations
cgagagcttcttgggttggttctctgagtttgtacctcctctgggtctgatccanaaaggcttaattttctttgttccgaggaaaaaattctgcttttgaatttgttggtttcaagctgtgggagaaggaatggcaaacgtctcatgtaccanatttggcattgggatagtggagagaatgtccttatacagcatatcttgaaaggcgcggtaggtcaactggggcaggatataatcanatgacctgaggaaatctgattagtctggatatcatcatctgatcactactctacagacagactatcagagtcatcggaagacatgcttga

SEQ ID NO: 106779 - DNA, 351 bp, Glycine max
  unsure (1)..(351): unsure at all n locations
gtcgaacttggtgttcttttgcaacctgcgagggtgcgactgcgagcgagcgagcgagcgagagagagagaatcgaaggcgacacaacttgcatccgattctgagaagaagaagacgagggttctcctcctgttctctttcgaatacaaaatctggtacatatggcaggacttatgcctggagagttgtcacatcatggaacatctgatggcaactctggtaaaagttctatagagaagctagaggaatcattaggtcgctggtatatgtctagnacaagaatagaggaacattcccccatcagaaagatggattgactttgagaagagcgtatctgcgcagtcatctgca

SEQ ID NO: 106780 - DNA, 337 bp, Glycine max
  unsure (1)..(337): unsure at all n locations
cggctcgatgtntgcagtgttcctccaaggttttgatctcaatccattacaaactagacaacctaatatccngggcttcagtggaatgaagatgtaactcatcagggaacggagatgccttcatgatgggctttgggcgcatacacagatggataggtggatggaggtgttcgtagtatggtataatgggacaaatttgcatatagaatttgcaaggacatgaaccttagagccatgaatgtgtcttctgtagtatgtcacggcaaaaatgtacaatgcatctgctgtctatactgacattcagcgacttataagatcacaagcaccagtactcatg

SEQ ID NO: 106781 - DNA, 363 bp, Glycine max
  unsure (1)..(363): unsure at all n locations
aagtgtaggatgctggccttcaatgtgtatcaagcctgagttccgagctagcaaatgtgaagaaggctgctgctatggactctgaaagtactcacagngaatggctaaaaacttgcgaaaggaattgcaagcatagcagaagttgtgcaattaaaccaaaccatggcatcagatgaaagcagtcagaaattcacagcatcaatgaacagattcatcagaatggctgaggaggacattccaagaattcaagcccaagaaagtgttacttccacccttgtgaangagatacagagtatttcatggaatttgacacagaagagctctcctttagatctgctggtgtagagattctagcagtctgac

SEQ ID NO: 106782 - DNA, 277 bp, Glycine max
  unsure (1)..(277): unsure at all n locations
catntctacatcactggctctgttccgtcgatgacgatggcgtttagggtgcgaaacactgacctccgcgttctcattcctagcgcgctcatgttcaacaacttccgcaaaggccttcttcgaggagcgtttcgatgacgcgatgggaaatcgttcggtaagatcagattggaaaaaagatgagaacctggctgggcagtgaaaccacacctggtgacactgctgtgagacgctaactacagtggtattcacacgagtgaggacacagatcgacgct

SEQ ID NO: 106783 - DNA, 215 bp, Glycine max
  unsure (1)..(215): unsure at all n locations
agaaaattctcacgcgcttgcatcgtgctctctctttctcatccacgtcatgttgacttctcttcctaacactctctgtctacgcggtaattggatccaattggattccatcataatcataaccatgtgaagacaccacaccacaccacgatcatcatccctctttctcttcaatactactctcaactcattctgctctctcanaaaccattaga

SEQ ID NO: 106784 - DNA, 303 bp, Glycine max
  unsure (1)..(303): unsure at all n locations
cgatatnttgtacattacactctttgtctcgattggggtgttagtagtaataagatagaaaagtatggaagagaatctattagtagtagtcatagggagttggggagaaccagaaagttgcatgggaaggtctgggtgaggagatgaagaggatgattgccatagcagggcctatggaggttgtgatcgcttctcagcgtctgttgcagggtgtgtccgtcatgatggttggtcacctcaacgatgacctctttctctccagcgccgccttagcgatctctcttactgctgtcacgggtttca

SEQ ID NO: 106785 - DNA, 133 bp, Glycine max
cgtgatacggaagaagttagttataaatttggcgacacggagtattaacgtggctagttctccacggtctgatacttcaagctgccaaaagagtccacgtcccagggcctgttaatggaaatgcagatataag

SEQ ID NO: 106786 - DNA, 350 bp, Glycine max
caggttcaagccattcatgatgcatcggtcatcattggtgcccacggtgctggtcttactcatatagtatctgcattgcctaaaactgtgattctggagatcataagcagctattacagacgaccacatttagcttatatttcgcggtggagaggattagagtatcatgcaatcaaccttgctggatcacatgctgatcctggagccgtgatcagagaactggcgaacataatgacaagccttggatgttgagtgtttggggttgaattgctgatatctgagcttgagtggtggatggaagtgactgtaatttctgatcacactcatacgggttgcatgttttccttcat

SEQ ID NO: 106787 - DNA, 136 bp, Glycine max
  unsure (1)..(136): unsure at all n locations
caaaactatagatatcaatagaaagagatgtcacttgccaaagccgcanacttgctacattggcaagtgaaatttctgtctgatgatatctatagcaggagattccactggccaatgtagcaagtttgcaactttt

SEQ ID NO: 106788 - DNA, 175 bp, Glycine max
tggatgtctcctcgcaatttacttgtcaagtttgaagattgaaatcgcaaccctcattttctctcattcgaccaatggctgctagttcctcttctatctgcgacagaatatacaacctgtccgtcacacacgcttcgctttcactcagcactggaacttcgtcaaagaccatatc

SEQ ID NO: 106789 - DNA, 177 bp, Glycine max
tcgtaacttccgttcctcgcagtttccggttcaaccaataagtgagtaaataaatacataagcgatacgaaccgaaccggcggatctcggttgttccatgtaggctccccgcggctggctcggcgaatccttgttctcgccttctgagtcgctggaatctggtcgggatacatctac

SEQ ID NO: 106790 - DNA, 174 bp, Glycine max
ataagttccattctttcagcaggttctaatgactcttgagatcaaagttcatccttgttcttcctgcagcttactgctttgtggttgccagagctgcgttcatcattgcataatattctgaatctgactgctaaggaaagcgcccatgtttctgagttgtaaagtggcttatat

SEQ ID NO: 106791 - DNA, 124 bp, Glycine max
  unsure (1)..(124): unsure at all n locations
gcagacatcagatagaataaatgaattcgcttcgtctcactatatgttgtgcagtggcagtgcntggagcactaccacacttctcatttgcacagctagatccttcattttacgatagcacttg

SEQ ID NO: 106792 - DNA, 148 bp, Glycine max
atgagttccacaagggaagtagtcatatggctgctgttgttaacgctacgggaaaacggcaagagactccacaaatcattgatgaagagcaaatgcaggaaacacaagcattggtgcggattcacagttgaccactccgctgctacag

SEQ ID NO: 106793 - DNA, 176 bp, Glycine max
cacttcacatacatcttcactgatgtgcattgtgtgacacttttcccaaattcataaacttttcaacaccccgcatcagatcttgatcccaaaccaattcaagtaggcaacaagcaacatgtgtacgatgaaacccactttaagattcatcttggtccttctcacccttctcttgg

SEQ ID NO: 106794 - DNA, 174 bp, Glycine max
ttgagacaaagctagcatagcatttttcttttacaaagcaagacacccttttccttttgattccatcatctctttagctttgtccacagaccatgtctgtggtggctgataattctgcatacaatggaagccacaagtggttttaatgtaacggtgatgccccaaggagtgtga

SEQ ID NO: 106795 - DNA, 169 bp, Glycine max
cgtacgttgctcggattcggtcgaatcctttccccgaaaaccttagacacgacttcatatttgcagtgctagtctgttatctcgtcagtatgttttgtcaagacactggacgaacatctttgctgctgtgccagtcgaaacatatgcactacagcactgctgtacagag

SEQ ID NO: 106796 - DNA, 237 bp, Glycine max
gagacaaacatgcattgtaataagtccattcagcgagtgttaattggctgagtgagcttttttttgtttctcttgtttactttgtttcttatgtagtttttcttggttccttctcgtgtgcggtttgtgattctatagttttcctttaataaatgccacaaccaaggttgcggctatgtacaacaagacgatttttttatttttattttttcattttcaatacatagttttaccatg

SEQ ID NO: 106797 - DNA, 324 bp, Glycine max
  unsure (1)..(324): unsure at all n locations
agaaaactaaagtctctttaatggctcctctcattgtgtcaactttatagagaaatcttcagagatcatcacctaaaaagagatacatttacacattctcacacaggtagatacaactttgtgtcccttatctgcatcagaaggtaccaaccagaaaatctcatttatagttaattacatacatagaggaagtggtattactactacccttgccatcaccaatgttgctaagttccatttccagaaccaagaagttcttccaaaagactataaagaacttcaagtctttcttctccccaggttattaccanagcttcccaaagc

SEQ ID NO: 106798 - DNA, 321 bp, Glycine max
atttgtttaattaacaacaaaattccaataccatttggattgcttcttgggcaaagggatagagccagctataacatttataatcgggggagcacttgttctgctcatcataaaagtgcattggccagatgtcacgcggcagggagtactgataggaaatgtaagacgttcatcagtttcagtagatgatatacccctttgcttcatatgagtgctcagcctgtgtttgtgcaaatggagttataagagcacagggaggcttaaagggaatttctggcccgtagattcttcgtccggcctgattcatgtgcaaatgcaaga

SEQ ID NO: 106799 - DNA, 317 bp, Glycine max
ctttgattggtgttaggctttcaacaaggtgaatatttcaaccattaagaggcgcaggtcgtttttgaatggccttaacatgccacctacttctgctgatgtgataatattcatgctacctttccttggtggcatggtaaacattcctctagttggccgaatcttcttttcttggttctctgcggtattgaagcattttggaacttcacattgcattcatcttctataaattgcatgtttaggaattcaaattacaatggagacggattgtcagttctagggattcaaataacaatacaacgaatgcagtttagtga

SEQ ID NO: 106800 - DNA, 128 bp, Glycine max
gtagcgtgtggacgagcaagttaaacgactggatctcatacccccaaagaagaacatcaaaatcacaacaagagtcttgaatccagcaagaactactgctccaaattaaccttcccttccacacaaca

SEQ ID NO: 106801 - DNA, 316 bp, Glycine max
ctatttgtaaataggaatattggtgttcaagcagcattcatagaggttgaacaccaatattcctatttgtaaatactcacacagtttaattagaaaagtgataccactcaactttgcttagtttatttcgaccgtgcagtgatgattgaacgttactcggtcttagtagtgtctgaactggggcaaatttgtcctgttaaattgattcatgcagcttgttttattcttttattcctcaaactgtagaaactgtcacattttcgtcaaatcaaatatcacttaacgtaaaaaaaaaaaaaaagggcggccgccgact

SEQ ID NO: 106802 - DNA, 298 bp, Glycine max
gttagaatatctgacttgctggtgttttctgagtcttagtatgttagcagtcttattgggctaggcttctattgattgtgcagtgctacactagaacatgacctagattactagtacatctgtacaagtagtgttgtctgcattttacagcaccagcacatcaattttatatcagtcattgacaattcttttactccctttctctttcacatcaattatcttaatgtcaacagtctcttttttatatatgcattgggcatgtcatagtatgtgaatacagcataggtcagaatgtgac

SEQ ID NO: 106803 - DNA, 128 bp, Glycine max
  unsure (1)..(128): unsure at all n locations
gatcgctcggtggatgattgtattagcgctcgttacgataagcacactctaggnacacagatgttagtgtcagcatggatcattgatgcttgtaacgacattgatattatagttcagttttgagatgt

SEQ ID NO: 106804 - DNA, 143 bp, Glycine max
cgagagtgggagagtggtgtttgatgaaatgcctgtcagaaatgaggttggttggactgttatgataaaggggtatgttgggagtggggttacaaaggaggttttttgcttcttaagagatggtgtttggtaccaactgggat

SEQ ID NO: 106805 - DNA, 300 bp, Glycine max
acagcacgtgccattggtcctaatgttggaactagttctgcaatgccaccggctgtgactaatgctgatagacagacaggagaggaagaagggcgacctcctggtctggtttcaagggattcacaaggcgagaatgtcagggccatcaaaactctgacatatttcaagcagaaaatcagtcataggatctgccttataaggagcatgtatcaggccaattcttgggatcagtggtcagcgactcggtctatagctatcattgtgtcgattgactcgaccgtctatggctactgacacata

SEQ ID NO: 106806 - DNA, 99 bp, Glycine max
ctcctttagtcctttgtctccgttccgtcgtcaaccctacctttggatctgcgtttggccttcaggttttgacgtccgaagacgtagaagaagagattc

SEQ ID NO: 106807 - DNA, 176 bp, Glycine max
  unsure (1)..(176): unsure at all n locations
attctagtaatacatttctggcgtttgtttgccttgtgtgtatctttctattgacgagaataatggaatgttcccaattctctgttatattgctatttgtcattnttgtgggaatatgttagcttcactgaggaacanaaagggacggattgccagctgcaggacactagaaatgt

SEQ ID NO: 106808 - DNA, 176 bp, Glycine max
cacaacgtctcatagaagtgcgctatagccataaggagacaaactttcaaagaggtgaaagcatcagagctcttctcttccaaatatatatatacttgggtgctaagctgagtgagtacattgacaatcctgaaatggcaactatgctgacaaaggagcatgttctgaccctcaag

SEQ ID NO: 106809 - DNA, 247 bp, Glycine max
  unsure (1)..(247): unsure at all n locations
attatgtgcagttcatgtatcacatgttaaaatgcctttagtattcataggatttaatatttaggaaattgcacttatttaatctttgcctagtatctatatatggatattttgactattgcatgatggaggtactgaataagaaagcttntcattcagatcttactctctagaatatcctatctatatttctctgttcctcccctctaaattcaactgaaacttgggtatcacgaattgttctgga

SEQ ID NO: 106810 - DNA, 192 bp, Glycine max
tcttaacatagtctcaaactctagagactgtcagaagattatgttttctcgtttttgttgaagctgttgtaggaaaacaattctctctctctctctctctctttcatgctcatagctcggtctttctttctgctccattggaattgactaggctctcatttcatagatcatgtaggattttctctcttctca

SEQ ID NO: 106811 - DNA, 208 bp, Glycine max
ctcacacgttgatagtgaaatggaggctataattttttctccttctctctaacgcttggaaacccaatagaggaaaagcttgaggaatcttaaggaaccgctagagacgatgatatcattatcgaactacatgcgtgagccctcttaagggaatgaacatgtgtggagatcttaggaaatcaagattgagatttatttgggatgttat

SEQ ID NO: 106812 - DNA, 282 bp, Glycine max
tgttctagatcgcgagcagctcgcccttttttttttttttccatttggaaattggaataattgaaacttgtagcagtttttacaacatcagtacataaaacggtcacattttttcctccatcttttcccttccccaattaaccatacatttgggcaaaaggcagagaggggtagtttggaattttaaacccttgcaaataacccaagagcttgcactagtctaaaaaaaaaaacaaaaaaaaaaaaaaaaagggggggccccccaaaaaaggcccttttccc

SEQ ID NO: 106813 - DNA, 110 bp, Glycine max
  unsure (1)..(110): unsure at all n locations
tgntatactgaactgttgaataaataacattagacaacgctacaccctaatcttctgcaattcgtgtgcgtggataggctcgagaatggtatcgctggaggaatcacgct

SEQ ID NO: 106814 - DNA, 289 bp, Glycine max
  unsure (1)..(289): unsure at all n locations
tgcgtcttcgatgctgagtaaggcaatcagttgaagcaatctctacncccaggtttgaccgtcgaggaggtctgattggatacatggcaacgccgagttgaactacccaagcttctttatcagtagcagagcatgctactctatgtacttttggaacctaagctattagacctgtcagtgttggatgtctgatcttgcatttttggagaaataccaatttacctcgttcaaggatgcaagtatatttcttgtttaactgcacattactttatatttatgcctgtttcat

SEQ ID NO: 106815 - DNA, 153 bp, Glycine max
actctccactcatcatctcttcattccttcttcttacagcagttcttctcatgggtaagctttacttttactcagctcgttgactctcgccgttgtaacagaatatcacgatttacggttcgccaattcgtgaaatcgcaagattcccacaga

SEQ ID NO: 106816 - DNA, 100 bp, Glycine max
tgtgagtcttgtgaggtctaaggatgaagcagttcaggtgagttctgttgagtcgattcagaacattgcctctggtgatgagttggttatgcagatggtg

SEQ ID NO: 106817 - DNA, 102 bp, Glycine max
  unsure (1)..(102): unsure at all n locations
tctanatgggacagtgtttcttaggacatttgctccatctcattttgagaatggattgtggaatgagggtgggaattgcattagaactaagccatttaagag

SEQ ID NO: 106818 - DNA, 99 bp, Glycine max
ctttctcactctcctctgatatttctatattttggtgctctgactctctacgatctggatccaacggtccaaaatgttcggggcttgtgctgcttgttt

SEQ ID NO: 106819 - DNA, 107 bp, Glycine max
cggttactctggtggttctcctgcagcccattccctagagaatgtgagcagagccattggcgaggatacctcaaatcgtccaaatgggtcaaaattccagcagattt

SEQ ID NO: 106820 - DNA, 100 bp, Glycine max
  unsure (1)..(100): unsure at all n locations
atataatttcctagatctcgcaaacaaattgtagcataagtcncatggccagagagactagtgttgtataaatatatcgcagcaaatcacaagtttgggg

SEQ ID NO: 106821 - DNA, 107 bp, Glycine max
  unsure (1)..(107): unsure at all n locations
gtcttttttctcttgtttaagaatttcggtgtattttaacagttgtanagcactctgcgctctctttgcatgatcatgtacaactacaagcatgctctctgtagttt

SEQ ID NO: 106822 - DNA, 114 bp, Glycine max
cacgcgtgcgcgagctcgcggattcggcgcgacggccgactggcagtgggcgactgtccgcgagttgcgtccatcaaggcgcgcctggcccccgagaccatgagcatcccggcc

SEQ ID NO: 106823 - DNA, 234 bp, Glycine max
cacgtttacagtccagcatgaatgagcatagcatcgggttcgactcgaggtgcattttcgagaccagagtgaaggccaacatgggacatctgtccacctccctagtgtgaatcacattctcctgcgatggaatctgagtcactgttatcgccggcaagatctcggcaacggagtgcactttcacagctatatgcgacgacgatgtacggttcacaatctggacgtggagcattt

SEQ ID NO: 106824 - DNA, 236 bp, Glycine max
gcaagctgtatgatatggagataagtgagagagcataagctgaatcaaaggacggtggtgagtgctggttctgcttcatcatcatcagagaagaatggtcgctactgtgtcttctgcgtggtcaaagcacggcgcgtgggctctcgattccgaggaatacgacgtcgaactccttcgacacaacatacgagtttgctgcaagtggatatgctgctgcgaaggtcaagcgagacaat

SEQ ID NO: 106825 - DNA, 238 bp, Glycine max
cttaggcggtaattcgtaaccgtgaacgtcgcaggttgcaaattgatcgtccgttggagatatacgtcccgagaatgaaagctatcctcgtggaaataatttttagaccagcataatcacgaccttatgacataaaccgctggctctctgccggggagagctcgggtgacagtctcagtggaaacttcttttcgctctgccagagggtagatcatgagatatgggttgaaacctgaag

SEQ ID NO: 106826 - DNA, 108 bp, Glycine max
agttggactgcacctacctctgattaggtgagtcaccactccgattctcgataaaccaaagatccatgctttcgtaatagtcaccaccctcactactacaaacaacac

SEQ ID NO: 106827 - DNA, 106 bp, Glycine max
agataacacaacacaggagtaaggagtgttttgcttgcgttgcgatttgcgtaccctgttgtgttgtgtcactgttgaaactcgaaacccctctcaacctaactcc

SEQ ID NO: 106828 - DNA, 258 bp, Glycine max
ctcgtcgcagcgttcataaacatttcaacaaacacttggtctccgtacggcaatgccgttagcgccgttattctccgcgtctcggagcctcgccgctgcagcagcatttctgcgccactgctccaccgccgccacgacgtaccgaagaaacctctatttccgaatcagccccctcggagacccttccatcagcgtggttccctttctcgacgagtggatcgaagagggtaacgccgtcgacgggccccacctccatca

SEQ ID NO: 106829 - DNA, 223 bp, Glycine max
gcacaacgaaccactctcaagccgctcacgatatccacaacactctcaaccctccttaaaccctaaccaatccagccatggcttcttcttccatctcccactcgcaatgcccgactgcaagctctcgtcctccgcagccatctcctcctacgcctatcgccgccgctccaacgacgtcattctgtcgaggcgcacagcgccgccagggtcttcgccatggcca

SEQ ID NO: 106830 - DNA, 246 bp, Glycine max
gaaaaaaaatgtgctgctacattacaaaggagaatgtgcgagagggagagaaaaaggtagcggagaagattatataattaatttgattttagaaagaaaagaaaaagggagtggatataggcatagaaatagcttccttcgataaacaaagcccaagcgggaaacaagcccaagtagggttttaaagaatataaagattaaagaggaggtgtgctgagacaggtagggtttcgagttacagccgca

SEQ ID NO: 106831 - DNA, 261 bp, Glycine max
cagacagattccatagttgaatattggagaataaagtggatgctggagataaaaaaaagtcaggcttgtttcatcaatctagttggtgttgagaacacaagtgctagaacagttaatttgtgaggttccccctctagagcagcgttttgttacgggtccattgaatttgtgaggttacccttcattttttagtttcttatgttgtgttagtatcattttgtacttgcaccactttgatttgatatcatgatggtgaattct

SEQ ID NO: 106832 - DNA, 108 bp, Glycine max
tgcgcatccctaccgggaagatggcccaattctatggcttgggaactgtcaaggtggatgactctttgaaggttgaagcagtggagatttactatgactcggcagagc

SEQ ID NO: 106833 - DNA, 109 bp, Glycine max
cggtcgagcgtgcatccagtgtggtagttctctctccaaagaacggtgatgaagctgtcttcgatgaaacataagatgttctggtggaattctactgcacatggtgtgg

SEQ ID NO: 106834 - DNA, 136 bp, Glycine max
  unsure (1)..(136): unsure at all n locations
gcaaatagctgtttcatntngccaaacttgattagacttgagtacattcttttgtgtgtgagaactattagctatctggtgtcagtgatcttcagcaaacaatgcgtataagttgacttctctagctattttaatt

SEQ ID NO: 106835 - DNA, 102 bp, Glycine max
aactttcacgacacaacacaataagcatagtactagacaacaccacttactgtgtctcttcactctaatggccatggcagcgtctgcatagcgcaacaccgt

SEQ ID NO: 106836 - DNA, 100 bp, Glycine max
  unsure (1)..(100): unsure at all n locations
cgaatatcttgttgtctagagcgatccgagacngactctgtaaacatgttggtttaccaggacctccgtacaggtgatgcgcgtctctctgactccttcc

SEQ ID NO: 106837 - DNA, 103 bp, Glycine max
cgttctgacaacaggattttgccgtacagtcaaggattttggagtgtctatgaccgtacatgtgaccacatcggtcacatttgtctgcacatgtcttaatatc

SEQ ID NO: 106838 - DNA, 217 bp, Glycine max
  unsure (1)..(217): unsure at all n locations
tctgtaagtggcattaaaaatccgtactaaggcttgtggatcctagccttggaacatattggaatgtatgtccatgtanagctaatgtcacccagtgctanaatgttgcccgctatccanaggtatgagagatggtcatatacacnagctaccttagatatgcaagaggtgtgtcggattgactcatacgactgtatcagagcacgtacatgtgcag

SEQ ID NO: 106839 - DNA, 262 bp, Glycine max
ggcagttgctgatgctggaggtatttttgagcttgcaaaggttattattcaagaagaccctcagccaccacatgcactctgggaatcagctgctttagttctctctaacgtattacattccaatgctgattactattttaaagttcctgtggtggttcttgtgaaacttttgcactcaacacttgagagtacaattagcatagcccttaatgctttaatagttcatgacagaagcgatgcttcaagtgctgagcagatgtgg

SEQ ID NO: 106840 - DNA, 269 bp, Glycine max
attatcgtttagattcagaaatctaatttggaatcaaagcactcccttctatctccctcttttcctctctgtctggtttgcattagtatacatacatataaatattcatgtatttgtataaggtcaatccccagaagaagctgaaggtccttttttttctgttggtttctttggttggatctagagaagacaatcttagttgtgaaactcaggagaggttaaactcagttttcatacacacagctgggaaatgaaaattaactgtgaag

SEQ ID NO: 106841 - DNA, 129 bp, Glycine max
ggtggactaagtttgaggcactgagcccgcttgaacacaagcaagagataagaaataaacactgcaaaattcgtaggaaccgcgcaattgagctagttgcaagtcaccacgatggcacttgttcaaccc

SEQ ID NO: 106842 - DNA, 254 bp, Glycine max
attccctgaaatgaattttgcataactaactacctacctgcgagttgcatagaaatttcacaattattttttctgatacctctactgttttgcaggccaacatctggttgcatacttgaggcgttgcatgttgatcctgcttctggtgtatcaattgataaggacaagaggcactctctttaacctgtctcaccaactcgcatctagaagcaattaggagtctgaatatggatctgggtatggtggaaaaagga

SEQ ID NO: 106843 - DNA, 257 bp, Glycine max
ttcatcaagaaccaacctctccactatgatgcatgatactagatacatatcaaatccacaatcttatcatgcacgatattaacatccctcactccactttcaacctaacagcgcactccagtggtttctcgcaaagatctcaccgccaccagaaacgcgaagacctcgaacgttgtggcgtgttggtcaaggttgtcagggaggagggcacggatggaggcaattttgatggggctgaagaacaacgagcgatgttc

SEQ ID NO: 106844 - DNA, 111 bp, Glycine max
cgccacaccgtaaattccactgcagcaccagcctccccatgtgtacttttcttctcagtctctttcgactcccctgcattctgtcgacagtctagctttacgtgcttctgg

SEQ ID NO: 106845 - DNA, 254 bp, Glycine max
ggatattttattaataaagacaacaagtatagtcggaaagcagtaaataagcttttgacttgagtactcgaaagcagtaaataagcttttgacttgagtactcggaaagcagtagtaacagcttttttgtacacaactcaacttggatcattgtacagtcgaattctgttttcgctttgaagttcgaactttgttgtacccttctattaggttccgcgccccgcaaaggaacctgccatgtgctcgcattcccc

SEQ ID NO: 106846 - DNA, 99 bp, Glycine max
ctgtgactgtcggcgtgtgctagtacgagctctctcgagactcggctggtgacagagagagagggattccgcagatgtgtcggcttcttcaccacgcga

SEQ ID NO: 106847 - DNA, 204 bp, Glycine max
gggttctcacatagaagaaatggatgtagacagctgttttgtatcattaacaacgagaaaggaagatagcacagccatgccaacttgcatagcctcagtaataacctaacatttattgttataactctagagtaagctctgattgtgcaatatcttctcttattgctttggtattatgttaagagtgggattggggtggatgtt

SEQ ID NO: 106848 - DNA, 109 bp, Glycine max
gttctacctcctcatccgcaggattgtctccaagttcttctccctcatgagaaccaattcctgggatctccaactggtgcatcgcgtgatcaatgttttggacgagaac

SEQ ID NO: 106849 - DNA, 120 bp, Glycine max
  unsure (1)..(120): unsure at all n locations
natgcagacagagcagaatgccaggagatttgggatcgacaagttcatagtctgtcagctgtagatggtgatgaacatgagagccgattacgagggcatagtgatctagattctttcgcg

SEQ ID NO: 106850 - DNA, 104 bp, Glycine max
atctgagaggagcagagctgaagacgtgaagtgaagatgatgtccggaacatatacgtcttttgacgcgcacagcttctggcgactgttcctgccggtccagat

SEQ ID NO: 106851 - DNA, 118 bp, Glycine max
gaatcctcaatggaagtcaagggctctacaaagaagaatgctcggcatgatgttggagtgctgtcaagaaaggaacaaagtacagatgcattgactatggaggagctagtttcaaaaa

SEQ ID NO: 106852 - DNA, 304 bp, Glycine max
  unsure (1)..(304): unsure at all n locations
gannaagaagggattatatcatcgatctagttgtatggctggatgagctacattagctgctggaaggctggtggccgagaatngaattcttaaggtgaattaacttcatagggtgcatgattatattatcgtgctgatagaacttcttatgatatntgcctgtcagctatatagtgacaagagatggtgtatgctatctgtgcataatgtcatggatcatatgacaactaagaatctgacactcgatttatggcatgcaatgtctatatcatgcacatgacttgctttcagtcactctgctata

SEQ ID NO: 106853 - DNA, 99 bp, Glycine max
tggaagacaccaatcttctctccacgcccttctggggtaaccgtctgaagtgcagcaatggcagatggattgcattcgcagcatccatcggtagttcag

SEQ ID NO: 106854 - DNA, 118 bp, Glycine max
  unsure (1)..(118): unsure at all n locations
aagtgatatttatggcagagatantgacaanaaagtgatttttgattggctgacatctgactatggcaatcctaaccagccatggatactttctattgtgggcatgggtgggatgggt

SEQ ID NO: 106855 - DNA, 100 bp, Glycine max
tcatcattctagttcattggctggaggagctacattagctgctggaaggctggtggccgagaatggaattcttaaggtgaattaacttcatagggtgcat

SEQ ID NO: 106856 - DNA, 253 bp, Glycine max
  unsure (1)..(253): unsure at all n locations
acgagagaagggatactggccataatccttcaataggtgctgaatccttgtaaccaggtagcgctggtctttcattgccatctatgatgcattcagttcctcctgttgctgctccgatggtttatgatcatagggctgaaagtggagctggccttggcatgctttcttcaagcagtcgttatggtggatatggatctntgtcgatggnggataatggctatggatctatgtcctcatatgccacaaagctgta

SEQ ID NO: 106857 - DNA, 178 bp, Glycine max
gattggagaaggagtctttggaacactctacaaggttccatgggatcacagtagatggacaatcaaacttaacctcaactatcatatcagaattgtaggagtaacaggacagacaactatctgagtctgtccatgtagcgatcatgataccatagctacccttgaagtatttaaagtc

SEQ ID NO: 106858 - DNA, 227 bp, Glycine max
gagaggagaaggcgaggttgatgattgtgatggcggaagcagagacaaacaggaatggcagtggcatcctccttcatcatcatcatcgtcttcatctcgctctcatctcttctcctaaaccctctctgcacatcactattcattctctcacattccgtatgtcaacgatcaatggctctcatacatgatctcccaactctctttcatcctcctctgtctctctctca

SEQ ID NO: 106859 - DNA, 327 bp, Glycine max
ccaagatacagatgtttgttgatttatcctgatggatatacttcactttaggattctccggttgtgcctatcgggaggagccccggagttgatgtccttctaaaagccgaaaatgtggtactggagtttgggggctgtgttctaagattggcaggactatataaagagatagaggtgcacacaattactacatggaaaagcgtattgttgatagtcgtcctgatcacgtcctgaatcttatacattatgaggtcagaatgccatttcatctctagttatttctgcattaacttccctaatttctcctataacttctgtataatatca

SEQ ID NO: 106860 - DNA, 330 bp, Glycine max
gggttaacgctttttgacccttctctccattggtcattctcccgaatacgccgcctatataatctagcaccgaccggaccctccatacccgttttcgcgcggatctaggagctcaggtaatccccgaggaattttcaattgttatcggttgaatttcaacggtttcttctttttgaaatttagttgattaattcagctagggtttagtgtgtgagtgaataaggttgttgttggggggtttgcgatggctccgaccacgatccggaaggcgattggggtggtgaaggaccagacaagcatcgggatagcgaaggtttcgagcaacatggc

SEQ ID NO: 106861 - DNA, 333 bp, Glycine max
atctgagacttggaagttggaggaaaatgtcaagtgaggtagaagaagaagaaagaagacctcttatcggccatgatttaggttcctcaattctcatcgttcatcaaaatgaagacactatctcaatctgtcctttgccacaatccaatcctacagatacacctctctttctcttcctaatcaacgcctttcttctctcgatgtcttccgcggtctaactgttgcgttgatgatattagttgataatgtgggaagggcattcccgtccttgaatcattctccatggtttggagtgacactggccgattttgtaatgccgttttttctctttgt

SEQ ID NO: 106862 - DNA, 315 bp, Glycine max
  unsure (1)..(315): unsure at all n locations
tactttttcagtcncaccaccaatggcactccatgatctacccttcacacccatgaccaccatttccctcttcatcattctattttctctattttccaccccttcccattctgccctcacttgtgcttcccagaagctcaaccgcacctacgccaactgcacaacctccccaccctcggcgccaccctccacttcaccttcaacgccaccaactgcaccccctccacctccggctccgccgtcaccctccgccgctacaacctcacctcctacaagagcatcgacgtagtcaaggccttcaccttcgaatcgtgg

SEQ ID NO: 106863 - DNA, 260 bp, Glycine max
atggcattctctatcttcaaacatgttctgtcgttattccttctttgcatcatcttgtcggaagctatcaatgagcttagcacgtcgtagattgtgtttctcggaggtaatgctgatggtccagctgcattgcatgaatcagttggacaagcattgtatgatctacatgataccctcgatgagctgttaggtgatctcgaggaggtatacgtagactctgctgactcgattgatgtgtctagcaatcgctaggctgtggt

SEQ ID NO: 106864 - DNA, 101 bp, Glycine max
  unsure (1)..(101): unsure at all n locations
ctgagatntntggacattaattctgaggcctacagatatccagagcatttctaaccactcgaacttgttacctntctgattagttgctgaacgtaacttat

SEQ ID NO: 106865 - DNA, 102 bp, Glycine max
agaggcgttctatatatgatggaattgacaatgacgcatggtcttgcttagcatccgctactaagtgccgtctagttagctgccactacagagatcaggcaa

SEQ ID NO: 106866 - DNA, 339 bp, Glycine max
tgaagtagtaaacttttggtgtgagtgtactgcgcgcgccgcatcaacaataagttctcaaacagcgtcctttaagttactccgacccatgagactaggcagatcattatggctgtacattccgtatcagcttcatcagaggagagatcatgcagtgtagtggatgacgtgctgacttttaatgctgagaatatgcacagcaacatgataattatctataacagcggaacatcttgatcaataatgggtggcgttgttgctggaatcttgggatttacaggcttgggaggatgtacgtatgacttactactcatggcacttactgcacttgggcttgtg

SEQ ID NO: 106867 - DNA, 110 bp, Glycine max
acgcttcaaggtgctgtgactatcaacactacagcggactgacgcgtctgcgcgctgagaccgtgactctatactggcgtgagacaatgctcttgccgccaacccatatg

SEQ ID NO: 106868 - DNA, 129 bp, Glycine max
atcctaggctggctgtaactgagtcagttacattggaacacaactttggctctgatgtgagctcatttgacagacacttcattcaaggaagtaagaagtagacgcagcacctgcttcatgatgggtgcc

SEQ ID NO: 106869 - DNA, 99 bp, Glycine max
cgatccgatttcgatcgctatcatggacgaatctaagctcgaggcggagaatgagccgattctgagtagcttcttgtacgctagcatataggcgcatga

SEQ ID NO: 106870 - DNA, 122 bp, Glycine max
ttttaattccgaccatggaagccacggcgtccgcaatgagcttcggccttccctcaacaaaagcccaagttcaaggtcaactcctgaatcggtacaccaatccattcatcattgcctcacgc

SEQ ID NO: 106871 - DNA, 360 bp, Glycine max
cgtttgttttgtgctttagataaaagttctgccaaatcaagaggggttttaagatcatagtgtgtgttttgcaacaatggctaagttctttgctgctatgatcttggcactctttgccatttccatacttcaaacagtggttagtcttagtcttcaatgtcggaaaatcagacacatttacacacaccacaatgtttttgtttttggtgccactaatgtatggttgaaatttgaagggttcttagttcttacatttgaaaggcttgatttttcaggtaatggctgctaatgaacaaggaggccacttgtatgacaacaaggtatatatatccttacctattcttcactctcttgtctctc

SEQ ID NO: 106872 - DNA, 154 bp, Glycine max
  unsure (1)..(154): unsure at all n locations
canacacaacaacactctctcttctcgctcttggcttttcgctcttcactcactctcattcattcatttccaccgttcatggatccagtaagcgtgtggggtaacacgcccttggcgacggtggatcccgagatccatgacctcatcgagaagg

SEQ ID NO: 106873 - DNA, 318 bp, Glycine max
ctcaaaatgtagcacaaatatgaaataagagaaagaacatctgcctttactggcatttgggtcacatcaaagagctgacatgtcaacttgctaacattgaggcatcactgatcaaaatctggtcaagcaatattagacagggttttgtttatgtaatgggtgatacaaatagaacaaactagatgttctcctaatatctagaataccattcatctctggtgtctagatataaggactgtatatcccttttgtattggtacctctggtactgtttcaattttatatatatatatatataatacatttattttgctgatc

SEQ ID NO: 106874 - DNA, 347 bp, Glycine max
  unsure (1)..(347): unsure at all n locations
ctcaaacatcgtcgccgcccttccctccgattcatctccgtcggcctcgccgacacgaaaccgtagacgaataactccaacaattctcaggaatcgtttggcactaaagagaaagtgagagagggagatgaaataagttcgtactgaagatggcgtcgaggcaaatggaagagattcggaagaaattggctgaccttaattacccgagagcgaatgcccctgcacagtccctcctatttgctggcatggagcgctatgcccttctagagtggctcttctntcggcttttaggtgataagtcacccttttctcaacaaaacatacaaggggatggccttgatcgtgat

SEQ ID NO: 106875 - DNA, 332 bp, Glycine max
ctcttacacacacaagcactaccacattttctttggtctctcattttctctatagctagatgggttctggtgctttacaacttcttctgatcttgggtcttctggctagctcatgcttagcacaagccccaggtgctgcacccacacaaccacccactacaaccccatcaccaccaccaccaagatcagcacctgcaccagcacccaccccgccagcaacaccaccaccagcaacaccaccaccagcagcagcaactcctccaccagcaacatctacaccagcaacaacacctacgtcagcacccacagctgcacctacacctgcttcttct

SEQ ID NO: 106876 - DNA, 330 bp, Glycine max
  unsure (1)..(330): unsure at all n locations
atttgattgcttgtgataattctattattttgataaattcagattttggagtagtattttttatgataaataaacaatgttgtctttttattacatcactactttgtcaagtttttggtgttaagtcgctggaatttggttgatgattttgattattttttatgttttttagctattaagtttctggtgtgaagtttctatattttgatgatttntaatattggttgtagtaataattatgaggattcttggctgcaaatattgttttagttggattcttcattttctattataacagttggcactactaaatagtagttcgacgactga

SEQ ID NO: 106877 - DNA, 341 bp, Glycine max
  unsure (1)..(341): unsure at all n locations
actagtgtttttgaatagctctgtattttgctgagggtgccttctcgtcttttgcataatcctctctcgcttgatgaattcttttattagatgtttggccacgtgttaaagcctgcttcttttaattgttgatgtctgtataattccagttccattttttttatacttaaaagtagaaactggatgacatatctattacaattaatgtgttgaaggttggaaatgcatttctagatatatgcttacttacttactttctctctgtttccgttaattaatattctttggacttagcttaatgtatcattctgttgagtanaatggtagtgtcattttgctaa

SEQ ID NO: 106878 - DNA, 320 bp, Glycine max
  unsure (1)..(320): unsure at all n locations
gcacgtgaaagctgccagcacatcccaggagccttngctgtggcggcttctccttggaaagctccacgcacccttctgccagggatcctgtcctgcagggatgacagacccagcagcctcggcagagggaatgaggctccagcagcttcatcagcaagtggcctcactgtgtgaataacggatcctgtttatttgtggcagaattagattagtttgtaaggaactgtgtttttcttttcctagaagaggggccctttctagctatacatccaccatagacttgcctttcgcttgccagatctaaggacacaagcctgggg

SEQ ID NO: 106879 - DNA, 335 bp, Glycine max
  unsure (1)..(335): unsure at all n locations
agcttttggacctgtcaatcttgctcgtttcgcaggggtgttatccatacctctcctgcaaagttatcccttcatgacaaagttgtcaggcttcacactacacctagtgatcattattgcctccattctgaagaatattttgacagagtcaattgcaactagtttattccttctgcaaaatagagctgtggaacaacatcaaagaggggcagctaatggttttgttatgacttgtatgtcagcattcaaaacagttggtcctgctagtgnggtgcaatattaacttggtcagaaaagcatatacattcttttttcctgccaggcacccatatagt

SEQ ID NO: 106880 - DNA, 182 bp, Glycine max
ataaaattctatttttgatttggagatttgttttaatgttctacttacttttaggttcatattctctttcaatcaccttagaagtgaattactgaatatgtttgactggaatctactatgttttctatgccctgttgcacttcttttgagacttgtatgtatttgcagctctttctggtgat

SEQ ID NO: 106881 - DNA, 223 bp, Glycine max
gtgcagcatcgtagagaaataagggaaaaatggtgtcgctgaaactgcagaagcgcctctccgaagcgtgctcaagtgcggcagaggaaggtttgctgaccccaatgaagtcaagaatctccatgcatctcggaaacatcagattgttaagtggtatcatcagaagcacagacaccgtaggtcagatgagagcaagaggccatcggtatgaagagaagagagt

SEQ ID NO: 106882 - DNA, 211 bp, Glycine max
gaagaacagcaggtggctttgcattttggtggttgttcttctattgttacattggcctctcacttatttttactaaagctgcagcagatgatgaattgtcaactcttctctcaatcaaatccactctcattgacccaatgaagcatctgaaggattggcaactaccaagcaatgtgacacagccaggtcacctcattgtaactggactgga

SEQ ID NO: 106883 - DNA, 330 bp, Glycine max
tggcactcctggggcaagggtggacagactcagacccccagcatggttagcgctagaccttcattagaggtcactttggaaccagatgtcttgttacagacaccttcctctgtgtaagtctcctcaccttgaggggtctttagtaatgcatctgggtagcatctcaactgctggtagctttatctgacttggaaagttggagaagaggcattcctactggagaaaaatgtcagtgttttcctataagctctgtgttagctattcattatatatgtgcttaaagatgttccttcattcatcaactaggggaagtccagatgcgggttatct

SEQ ID NO: 106884 - DNA, 237 bp, Glycine max
  unsure (1)..(237): unsure at all n locations
gtttgcttcatttttttttcttttcaacatgtaagacttttctggccctccttgcactgcaactcacgacctaacaattttatgagattttgtaaattaatgtggtcaagctaattcttcatcatttttctacagtcttaacaccacttcaattctctatgcaataccttttggaattggtgctgcagcaagcacaaggatttcanatgaattaggagcggggaatccacatggtgc

SEQ ID NO: 106885 - DNA, 331 bp, Glycine max
caggaagcctcttggcagccctagctgaagctggcttcctaattggactggaaaagaacagtgatgttatccaaatggccagctatgctccactttttgttaatgccaatgataggaggtaatttcttatgattttaccgggaaatttcttttatatatttttcttcattgattttggtctagccttattgtgcactatgttcttttctgagtagaagttttatgaaaagactccacgagaaaatagacataatttgttgatttctctgaggagacatgattgtacttgtgaaagtgaagaccagccttccattgagccagatataaattg

SEQ ID NO: 106886 - DNA, 125 bp, Glycine max
  unsure (1)..(125): unsure at all n locations
atcgacatntcnctatacttgcttccgcatagaaagaattctacagtactcgccgataaggggttttccanagcaggagcaatgtcttcctcttatcttcctgccacaactgagtcagttgctct

SEQ ID NO: 106887 - DNA, 122 bp, Glycine max
agtgcgtgacaagagcgaaaggagagaatatcaacaaggtagagtagattccttactagacatggcgttgaaggacacattctacatatctcatggatcaccaactttgtccatagatgaat

SEQ ID NO: 106888 - DNA, 343 bp, Glycine max
  unsure (1)..(343): unsure at all n locations
ggctacgagagatcgaagttctgaaagtgctcgttctgagatgttgaatgatcaacatagtgctattattctacataatgaaaattctagcattcacattgatgcttgtctcgatcctttaagtccaactagtcagaagttgtctggaattcttcgagttttgtggaaatacattcaacccagcatgaggattgttctgaatccattgagttcccttgctgatcttcctctgaagaactactacagatatgtagtacatcaatggatgattttagcagtgctgactcttcgatcgacgggccanaggcatttatcgctaacatgccattgtctaagactctca

SEQ ID NO: 106889 - DNA, 139 bp, Glycine max
gcaatgctacctttctgattctgatggcgtcgttttcccattgcactcgtcgttcatctcactctctcgatgaatcagctttagacaatagcatctctctctaacgtatgtgccacggcatccacggttcgactgggac

SEQ ID NO: 106890 - DNA, 292 bp, Glycine max
tacaattactactttctctctctttgtaacttgtaagcatggagtcctcaaagatctatgcttacctcttcctttgcatgctcttcctctcctccgccactctcattctcggttgtggctactgttggaaaccccccaaaaagcacaagcctggtcaaacaccaaagactaccacagtacgcgttgttaagccgacagtcacaatccctcccattgttaaagcgacagtcacaatccctcccattggtaatccgacagtcacaatccctcccatttgtaatccgacagtcac

SEQ ID NO: 106891 - DNA, 190 bp, Glycine max
actgaacatcaggtcagatgtgtctagacagatggagcgaagaaagacgatctagacagagcagacgagtctgtccgatctgacaagcaacggtgaagactacccaggatcctgctaccgtctccaagacagaaatgactggatgtcgcaactcgaccctcagtatctccgcgtcaaccaaatcgtctag

SEQ ID NO: 106892 - DNA, 384 bp, Glycine max
  unsure (1)..(384): unsure at all n locations
aaatgaagatcggacagtttattttttgactgtttattttaaatctgatcatatgagttaaaatatgatccgtctaatcttcattagacagtcatcaaattttgactgcagagaattcgggtctgtctctgcagccgaaaattgcaaaaagcagaaaaaagaaagagaaataaagaaaagttagaaagagatagagaggatgtagaagtgcagcagaaaggttggttgctgcagaagatccatgtccatgtagaagttcttgttgggaaattcaaatttcgaatgtcagattataaaacattggtgacttcaaaatgtgagtcgnaaaaatcctatgttttgggtcctcaaacagattagcacgtaagcatatatgacactttt

SEQ ID NO: 106893 - DNA, 313 bp, Glycine max
  unsure (1)..(313): unsure at all n locations
gcacggtgctccggctccttcaccgttgntaggacctcctgcgccacccaccgtagctcctggacccagcgaggatgcttcttcccctggacctggcactgctgccaacgatgagagtggagcagataccaccatgtgcttggagaaggttctaggaggcctagctttgggttgggctacctatgtttggtctttagacaggctttttgctgtataaatcttgtattgatcattatttctgtttttctttactttgagctgatgggaccatacattattacatgtactcagacttatatcgatctgcgtgtct

SEQ ID NO: 106894 - DNA, 373 bp, Glycine max
gcaatgctacctttctgattctgatggcgtcgttttcccattgcactcgtcgtttcatctcactctcttcgatgaaatcagctgttagaacaatcagtcattctcctcttctcaacgctactgtgccccaccgtccattctcaccgcttatcagaacttgtgtgtaccgactaggaagtgtgcagtcacttttgcctctacatagtacagtggctactgcaagaatggtgtctagtcttagcattgattcaaggaattgtgaagctctttcacatgctactctctgctgcaaccaccctggacgctaagaggtctttgttactttgaagtttgacatgtgagtgggtgtctccctttggaaaagaacaaacac

SEQ ID NO: 106895 - DNA, 342 bp, Glycine max
ctctttttttttttcacttcatcaaataaaattcattcacctaaaccctatggtcgacggagccaaagccaaaggcaacgcaaccttctcctctggcggcaattcaccacttctctgatgccatcgccttggcctctaccagccatgtcctctattccaatcgatctgccgcatacacttctctcaaaaactacatcgagaagatcggaatatataagaagagcggcggagctaaaggagtaagcatagtagacgagaaaggagaggaagagaatcaaaagaaagtaagcaagcaggaaaggggaacaagcagttgttgaggcctggcaccggtcccaagcc

SEQ ID NO: 106896 - DNA, 268 bp, Glycine max
  unsure (1)..(268): unsure at all n locations
cactgccactttgatttgattcgtgtgcacatataaggtggggcatggcctacacnctttccaacactctcccactctcactcgccttcttcccagaccgcaccctccttcatccaccctccacacacctcttcctctctcgcccctcagattcaaagtctntggtcgtcaatctcagagactgttcccgctaaagcatcgatgcgagacacacaacgtgcgtcgagctcgaaagagactgcgtgcctgcaatagcgcgatttcacaa

SEQ ID NO: 106897 - DNA, 338 bp, Glycine max
  unsure (1)..(338): unsure at all n locations
tagtgaaattggttggtgggttagcacccagaacgtcaatatcagaataaggaaagaataattgtgggcgtgctagtaattataagtgtttggttgagtctagtcttggattagatgggataaatatgaattagctagggttgaggagagactagaggaagatccacaagcataattaaagcagaaaatgaggaagatgatgatgatggcttaagatagatttattacagcgatcgagtcataattagagagagagagagcatagaaggttgaaatcaaacctagcttgctagatcttggccacaccacagacatcagcanaccttgatggcaatgag

SEQ ID NO: 106898 - DNA, 255 bp, Glycine max
agaatcactatactgttgtaccattcaaattatagattgtgcgaactgcagagtaaactgcagtagagtgctaactaaccctcagatcaacgagaaaaagagtctcggatctgttgcattcgagcttaaagctaagatttttattaggatgggtttgatttgtgggtgaaccaaactaagttgattgtcggttatatattactgtcgacggttttgtgagtgcgctcttctcttcagaggagcaaccgtacgtac

SEQ ID NO: 106899 - DNA, 126 bp, Glycine max
cttttcactcagacaatgcttcacagaccttgatcccagcaacgtcgacgacttcttcgagtgcatgggactcgggagacatcggtggcgctgctagtaattgataatggcttccatagtcgcttc

SEQ ID NO: 106900 - DNA, 337 bp, Glycine max
gtttccttcttcttcttacatttttaagagtgaaacacattcacctattttgctgcttctttgattctttgttgctctcaagttgaaaagcttagcacccggatgcgagcctgttcttgtttctacacactcaaacaaatagagagaggctgaaaatcggagaaaggggtttcacaagaaagagaattttgtttctaattgttgagtagctcttggagtacaacatagcatacttgaggagctgtatgaggtagaagattaacaatgagagatgagaattccaagaaaagcaagctctcatggtcgaagagaatggtcagaaagttcttcaatgtca

SEQ ID NO: 106901 - DNA, 363 bp, Glycine max
  unsure (1)..(363): unsure at all n locations
tgccagtttgganatattctctctaaatccaattaatgctgccattcacatttaacacctctggcagcatctagcattcattaattcattgagcttgtgactaagttcattaatcctttcactcctttcatatattaaaacccctcccattccattttatttccctctggttttcatcttctgatatatcaacttcaccagatcgtgcacttagaagttcatcactttatcatcaagaatgatgcaagactcaattgggatccctgcttgcttttcttcttcagcagagaagcagcatagccaccacgatcatgatcatggagctgtgacncgttctggtcagagcgtgtacatgtctgtgta

SEQ ID NO: 106902 - DNA, 362 bp, Glycine max
agaagatcctcttccataatctcgcgccacttcttcgccgctctcgcctgcgtcgagctgcttcctcgcaggttccccgctaataggtacggtgtctccagcgacggatcccaaaccatgcattcacacgaagcccagaccgttaaatttccgtgcatcggcgattcctcacacggtgcagtttgccgttgagtgcggttactctaactacgaagaggttagtggcacgaatagtgacgaaggactagagatcacgaatcttgggatcgctccacagatcgtagatgctctggccaagaaagggattgcgaagctcttccccattcaggatatgcttggaagttggaatattaaagcagatg

SEQ ID NO: 106903 - DNA, 322 bp, Glycine max
agttcactgatgttgatgagaatctaattaagctaccatatgagaccggggcatatccattgatgtcgagcaagcgtgtgagtgatgactataatgctgatatagccgatctcgagtgcgagacatcatctatagtacctcgtgtgtctgatatagcttaacgagatataggacatgctaagccagattatcatcaatggctatgcatacgaagttgatcggtgatgtctcttatgctgtatgctaaatgcccaaattatggcatgctatctgtgactaagactagaacataatagatctggagcacgtgtagctgtatgac

SEQ ID NO: 106904 - DNA, 251 bp, Glycine max
ctcgtcgcgtagtaactactattaacttccaccataacacatttcttagcgcttctggctctgcactgaacatactctggttcatcaggtcaattctatcagacacctccttgtcctcatggcccactgtacctcctcaagtaaatctgacaatctcaccagagtagactgtattggagatagtgcgctagttgtttgcgtaggtgatattgcaatacactctgtgccaacagtgtgtggagtgtcactag

SEQ ID NO: 106905 - DNA, 183 bp, Glycine max
atccactgcactgcactcgtccaatttcactcactctgacattagcaatgtctctatgaaaccctagtgtcagtcatggttgttacgtccagagcgtctccaatggcgctagatctcaaaacgctcttcagtcgccccagaaccctaaagctcaatgcgaagcagcaagagcttctgatccgc

SEQ ID NO: 106906 - DNA, 338 bp, Glycine max
caactagcaagaaagcagaatccatatgacttcactcttctctcttgcgttaatgtgtgtttcggtgtgctaagatgataccttctatttctatctttctctcgtgttattctctatagcttttccaaaaaatagaatttcgtgcaggtatttcacgtgaaggcaattctttgccatgagataagtttgatcataatggacaagaatgagtcataacaaatgtcacttgatttttccatttttggattaaaacccctccaaatacacctacaattatcagagaatgagaatgatgattgtatctacgtcgcatgcagaattcgcagcaagaatgcaag

SEQ ID NO: 106907 - DNA, 334 bp, Glycine max
aaggaatcatcattgccttcttcaacaccaccaccaccatcatctggcaccagaattagtcctgctgttcttttcatcatagtggttcttgctgttttgtttttcatctctggcctcctccacctgcttattagatttctcataaaacacccttcttctgcatctgctcaatccaacagacaccaagaactttccacatctgatgcactccagaggcagcttcagcagctcttccacctccatgactctggcttggatcaggctttcattgatgctcttcctgttttccagtacaaggagattgtggggttgaaggagcctttgactgtgctgt

SEQ ID NO: 106908 - DNA, 327 bp, Glycine max
  unsure (1)..(327): unsure at all n locations
gacgcgataaggtcgtttttccccacaacgacgtcgtcgttggttcacttccagagctacccaccggatttgctttccagaaccagtagccaggacctgcgtctctcgcttcagtctttgcaagacncggttttgcttcaccagaatcaccacaacaacgagcacgtgctttttgctggaaccgggtttgaaaacatggtagcgtggaatagtagtagtaataataataataatactgcttctaatgatacttgtggcggtggtggtggtggtggtggtggtggtggtggacgagggtttgtgtttaacgctccttcgactttgaca

SEQ ID NO: 106909 - DNA, 333 bp, Glycine max
  unsure (1)..(333): unsure at all n locations
cttntgggaaagctatgctgtcactcncctgagccaatttaatttgaacctctgggataactttggtcaacgttgtatgtgattttcaggaagtctggtttttcggggacattacagatttacagtgtctaagaatattgaggttagctagtggtgtgttgctagtgaggaggtggtaaacgctgcctgccgatacatgacagtagctgattaagaagcctcatcttctggtttctatctcgaagatatttgttttatggatttaggaaaatatttatttaggttatagttgtagctgcagcagaaatttgtacaggaattctcgtgttatag

SEQ ID NO: 106910 - DNA, 249 bp, Glycine max
gggagaacactttttggacaaggaacttgcaacttacaggcagatggattcaaaaggtagtgaccaatcatatggcaaggcaaaggtgcaacatgatcaatggggacaaaagcctccaatttcagttggaacatatgaaaatcgaagcaccatatcatttgttaagaaagatgaaataaaagatatttcttctaattatatggttgctcagacttgcatcaatatgaaagacggacaagagctggagaa

SEQ ID NO: 106911 - DNA, 253 bp, Glycine max
acctctaaactttaggtaattcatctctactttgcaagattttaaatatcagtcgaagttgcattgcggtcacacagacagttaaaaaaccttgatgttatgatccaaatcatggtgacggaccgtttttcaaaatcctggtactttgtaataatgattacaacacgtagtgacaaatctaattgtttagacgacacgtcgtgacagttaaacagtttttataattctattgatgatgtgaatatgagcaggg

SEQ ID NO: 106912 - DNA, 252 bp, Glycine max
atgggtgttgcctctctggtctgcaaatagataaactagatctgaagaccgtaccttaccgtttttataaaggttttcgagctcttactcgggcaggggaatttgaagtcaggtcataattttgtatttaacattgagtgatcttagacttgtaatgattctggacatgaaattttgttgcatgtacacggctagtttcatttgtaaagagttgatagtgttctcttctgatttcaaattattttcttttta

SEQ ID NO: 106913 - DNA, 249 bp, Glycine max
tacggatggtagtgcttggcacaccattcctactcaggataatgctggaagcagttcgagaagatctattccctcagaagaggtaaacgcaagacttggcctgggtatcggggatgaagcatctgaaaatgtttctgattcaaacactgcaggatgctcagaaagctttcacaggaatttccgtttgaggttacatccttcaaacccagcaaattctgttcctcccaccgcattctcaactgggagcat

SEQ ID NO: 106914 - DNA, 307 bp, Glycine max
agcaacttccttgctggagaagaaatttggtccctttgttgagtgggataatagtgaagtgttaaagaagcaaaatagaaagaccagaacaactaatgatgaaaagttgtataggtgtgagtgcctagaacccatattgccttctaggaaacactgcacacattgtcacaaaactgttgcgagtgacattgaatttgatgggcacaatgatggcaagtgtaatgcaggtcttctggccatagagaagaataaggataaaaatggatcttctaaaggaagagggaacttaaaatgtgataccttacat

SEQ ID NO: 106915 - DNA, 167 bp, Glycine max
  unsure (1)..(167): unsure at all n locations
gcnctaaaacccaaggctgctgagtgttgcagaggcatgtctgagtcggacacgaagaagaagaagcagcagcagcgcacgtncggaaagcatgaaggagaagaagggttgatgatcaagccccagagcttcactccccccatcgacacctcccaatggcccattct

SEQ ID NO: 106916 - DNA, 234 bp, Glycine max
catttttcaagtacttagaagatttcaagtttaacacttcaaccgagagtgtagtgacgagccttatctcaaaagttcttcttttgcatacactgtccaatttacaaactctccacctcacataatggtttcaaattcaatgttaatggcttcttctctgcattcaccttgcaccctcttcagttcccacaagctttgttcttcttcgatcaaaaccatctcaaaacaaagcca

SEQ ID NO: 106917 - DNA, 297 bp, Glycine max
  unsure (1)..(297): unsure at all n locations
agccgatggcgtcgatacttccttcatcgtcgtatccaagggtggtagttcaacatgttcatatgtactagttgacaaccanacgtaagagatgcttgcttgcatgttttgcctgtgacttccttccatgattaaagatagtatgggtctctcttaactatatcaagaaacctgctgattcaaggcttaaaatgacatgatgatcttatgcctgaactcaaggaaaaactcgcacaagtatctacacccctggagatcctccaatgatgccagatgacctgtcgcagtcaacattat

SEQ ID NO: 106918 - DNA, 120 bp, Glycine max
tcaatcattctgtttcaatccaatcgtcgcaataatcacttttctctagggtttgctctcctatcgcatttctcttctgaaattaagctacgggaatatgtggtttcgttggtactgaaa

SEQ ID NO: 106919 - DNA, 176 bp, Glycine max
aggttgagtaaacatgtttcttctgagcctccctcaccttctaggtcaacaccatcaccaccatcttcatcaggatacaaggatgaccctaggaagataattttgagcatggttttaggagcagtcactggactagtttcttctgctctctttgcacttgtggttcgttgtgttgt

SEQ ID NO: 106920 - DNA, 175 bp, Glycine max
aagatgttcacccaaggtctggacgagagcgcaatccaatggatcaagcagggatcaaaaccaccacttgatgttgccgacattctcaccgatccattcccaccgtctcctcttttcagcactgctaacactcttaattctccccttctgcctcccttcaagttccacacaacat

SEQ ID NO: 106921 - DNA, 176 bp, Glycine max
  unsure (1)..(176): unsure at all n locations
tanatgagcaacaacaaggagaatgccaaagttcagatggatcaactgttgtacctttggagacaaaagcactgcctgtaaagagcacttgtccaccagagactgttgattcttcaaaaaacaaaaaacctgaaactagtgaaaagcgcaaaagtgcaaagcgtactcttaaatca

SEQ ID NO: 106922 - DNA, 273 bp, Glycine max
ctaatatgtccatgtgatgtatgttgtattgttgtagtgccatcaagatgttgctggaaaatatgtatttctgtataagcttttgtaaacagatagaaagttctgtaacttgagtctcggtgactactaatataagagttgcacacacactaaagcttctagtaccaaaacttcctagaagtttagtttttaaatagtgaaatatgaggtgtgctcatacatgttggtcttttctgcttctgttagcattaagctaatgaatcagtgacttgt

SEQ ID NO: 106923 - DNA, 167 bp, Glycine max
gtcgatccatttgcatgcagactctccgtattgttcactgtatacgtgtaaagtttaatattcttttgaatgagattttttccaatatgccttagtcttactgtactactattgtttggtagggtaatagctagtaaattattttcctaaagaaggcattcacgagc

SEQ ID NO: 106924 - DNA, 134 bp, Glycine max
tactaaactcatatttccagaacgcagaactaattatgtcgttccccttcaaccactctcaacgcatggacgacgacgacgacgacaaacgacacgccgtttaccctcgtctgggtaacaccttcaacaaccct

SEQ ID NO: 106925 - DNA, 343 bp, Glycine max
  unsure (1)..(343): unsure at all n locations
gctanaactccctcactcactttttcttgtccttcatgctcctccttagtcctcaaccacccttcttcacttcccttctcattgcagaagagatggctcttgtgaaaccaattaccaatgtcactcccaaatttggcagcagccccagaatgggatcacactccaaattcagcaccataataagaatgtctgccactgccaccccaccaccaccaccctccacgtccacaaagccagctgcaagcaacaagaagggcaacatcaaggagaccctcttgactccaaggttctacaccactgactttgatgagatggagacctcttcaacactgagatcaacaag

SEQ ID NO: 106926 - DNA, 116 bp, Glycine max
gttgagctgagtgagtcacagttgttctcattgaagcagaagaagacatggtggcttctctggaactgttccaatgccaactagcgatacctttcggtccttccctttgcgaaggt

SEQ ID NO: 106927 - DNA, 324 bp, Glycine max
gagagtgctcatcacagagacgataagaacgtcttctgaatcgaaacaaggtgttcaggttgaaatcttagagtaatatacatgcaatcatgagagtgtaagaaacggaataaggtggaagtgttaagcaaagttgaggatgcgagaggctcctggctatatgcagagatcatttagtggtaatagacaccactatactgtgagatatgatggatatgaaatgctgctggtgaggcattgtggaacaggtgtccatgaaagtcataaggccgtgtccgcctgcacttgaactcacagataattggcattcaggtgatgttgtag

SEQ ID NO: 106928 - DNA, 140 bp, Glycine max
tcggactcggctcgatggcaggaatggttggagtctggcgaagaagatgaccacgctttggctgaaagaacgaggctgattaaacgagagttgcttcacagagagcaggaagaggcgcttcctcaggaagaggcagagga

SEQ ID NO: 106929 - DNA, 171 bp, Glycine max
accagatgttcgacaaagttgtggttctaacggagggacagtgtttgtactttggtccaggaagcgacgccatgcgcacatttcagtcggtcggtgtcgcgccgtcttatccgatgaatccggctgattttctgcacgatctcgctaacggtgtatgccatgtcgatggtc

SEQ ID NO: 106930 - DNA, 280 bp, Glycine max
agttatgtaacttgagatagatcatttttctacttctaattgatgcccaattatagggtgagcattaagcaattgatgctaaacaagctttctttggataatttgaattaagttaccatggtataataaagatggagatttctctggagtttctcctttgccctcctcatggcaatacaggttttgtatctcccacttacagaaatatacactttatatatgaagaaataatgcctcagctttatatatggttctacattattgaaactgggataatggg

SEQ ID NO: 106931 - DNA, 301 bp, Glycine max
  unsure (1)..(301): unsure at all n locations
tanaaccgaagaagaaacagaattgaattgaattgcgtttgcgacattgaaaatcggaagtaatggaattgcattgctcaatgaaaaaattggaaaacgagaaagcgtttgagtttctcggaggcgttcctcttctgcagaggcttccgagctcgtctctgaggaagatagctcaacttgtggatgtcaacactgtaggcagagagtatgttttcggaggtgaactggaatggcggcactcaattgatgagagctgagtcttgattgctaggcatgagaaatgacagcatcatgaacatat

SEQ ID NO: 106932 - DNA, 198 bp, Glycine max
acttatatcagccaagtcacatgccagtgtattcgttcgagcgctaacaactagtgtcttgttgtacgggtagatacaatcttggccttagatgtgcaatatttgatctggggaactagaccagactgctctcgtctactggttatatatatcagtctctttcacctgttgatgctctatactctcctgcttgtgcga

SEQ ID NO: 106933 - DNA, 113 bp, Glycine max
ccacaatcctatcgcacatctttctcagtactacgatggagttttggagtgccgaggttaaggttggagagtctgttaaggtagacccagccgaattttatgcatgcatacac

SEQ ID NO: 106934 - DNA, 207 bp, Glycine max
acatggtgcaaggagtattggatattattaggttacattcatctgaaaatgatgcttctttttcctccgtaatttgtttccggtgggttaaggcaagggtgcctcgagcgacacagaatttattgatcaatagttgcgtttctagcaactttgatgcaagattggatttcctcagagctaggcttttcttgatatatctatattcaa

SEQ ID NO: 106935 - DNA, 199 bp, Glycine max
  unsure (1)..(199): unsure at all n locations
tcctccatatattgaagcttcgatgaggccctattaataatacgcgcaaaacaaattgaagaaatttaaaattatttacatattacacacatcgattctcataaacatataatccatcnctcatttctcttttcgttctctccaatttcccgaaaccctaatttcctcaatcctggttttggaattcgacaatggagca

SEQ ID NO: 106936 - DNA, 352 bp, Glycine max
  unsure (1)..(352): unsure at all n locations
atttcattccttttctgatcctgtttaaataattggctagtaagctcaagaactgtaacatatatacatgtatttaagttcaattagcatagccattattggcataaccatcaacttacacacttacaggcaatcgtaaagataaatttagtttgtctagaacaatcaatgatggtgctatggaattgactgtttctctttattcataccatccagtatagaataagaaccaatgaaatcaacatgtttcatgaaatcatttcatatgtccttaaagaganaatatgttcttgaaaggctgtaatattattcatattcatactgcatgtcagctgatagagcatctttgtag

SEQ ID NO: 106937 - DNA, 148 bp, Glycine max
gggttgtggtggacacaccacttcctagatcatggcatactcttgcacaattgaaggccaattggtgctccggggtgacagtctgggactcttaggccatattatgactcacacaatatcacatgaagatcactcatggctctccgtg

SEQ ID NO: 106938 - DNA, 340 bp, Glycine max
  unsure (1)..(340): unsure at all n locations
cgagggtgattcggccgctcatcacccgagctttcattgagaagtattccacacaaagacaggcctanggggatgctccgcaagccgcagacgcgccgccacctcatcaggctagcccagctggatcgtttgacacggagcagtatttgcggcatttggttcgccaacaggcggcaaccaccaggcgcatgtacagacccatgattgtctttaccagttgagcctcagcctccagagccagggttttacttcttttccgtgccctactccggaccagttcagggcagggatcgcatggcttggagattggctgaggcacggcaggaagaggcgccacaga

SEQ ID NO: 106939 - DNA, 363 bp, Glycine max
tttttagagaaaaaaagaagttattctttcttctttttgctgaaaccccataaagcgaaatcgtaaagggtgtccttggaaaaggagtgtttcattaaaaagcagggatactttcgggagaaagataagagaaaggggtaagctttgttttggggcaatgggggatttggagaagcaggagaggaggaagaggatgatgaggaggaagaggacgatgaagatgatgactgagattgatgtccaaaaccttggttatgatgttttgtttgtgaaggaggctataatatattctgattgtgcatactaggctacttttttatatgtgtgctggtagataagaattcttcttttgttggcatgata

SEQ ID NO: 106940 - DNA, 361 bp, Glycine max
  unsure (1)..(361): unsure at all n locations
ctccaccgacaacactcttttcttctcggcccctattcccctcatccgatgcgccctccaacgatttcctttcctcaaattctcgcgcgataagatatgtttttcgccttgtgaggttttggctaccgcgatggcgtccaaaggtcccaggtccacgattgatcacgagagcagagccaaacggcagatggctcttgaagctccaagggagcctcggcgacccaaaactcattgggaccatgtcttagaagagatggtttggctatcaaaggactttgagtcagagaggaaatgganattagctcaggcataaaaagtagctttaagagccagcataggcatgttagatcaggctacaaga

SEQ ID NO: 106941 - DNA, 347 bp, Glycine max
  unsure (1)..(347): unsure at all n locations
cttcaacttccaacacacactagacgtgcacattctctcaactctctcaataagctttctctcatgctcatggcctctaccactacctttatctctctctcttcctagttcattcattctcctctctcaaaaacataaacatcagcacttctctcttttgcttattcctcaattttatagctacctagctacctagctacctagctaagctatacttggttttctttaatttctctgacaaatattccaacttcttttctatataggctctagtagcttagtagttatctttcagttaccttgaacaaatcaacagcaanatatatttctgacacactcatcagaga

SEQ ID NO: 106942 - DNA, 224 bp, Glycine max
gtttcacatcatgttaattgcttttgagagggtgaactatgatagcttccaaaatgtatttttatatttatttcgtggagaacaaaggccagttaccatatgatgatgatatgaaccgtgagttttgcaacatgtcattggctatctcgccaaatgccaatattgaaaagatgttagctgacttcactcatttatttaataaagaggtttacattggacatgac

SEQ ID NO: 106943 - DNA, 226 bp, Glycine max
aggatccgaacaacaaagtcgattttccgtacgagtccccggcatcgcaaccctttctatcgaaaccctcgtacccttcatcgtcttcttcggctgtggaagaagaatcggagtcaaaccagcaattccatacaacatacgagatagcgaaagggggatgtgctgaggaccttcctatcctcatcgtgttccttcgcgtcgtactatcctccttcgcctttggcat

SEQ ID NO: 106944 - DNA, 329 bp, Glycine max
agattttggtgaagatgacattgatcaaactgaaggtatgaagggcaatattaatgctctgtctgggttaattcatcaatatggcaaggaacgaaaatctgtacattggggtgataaggtataacatattttttatgctgttatctgaaagcttagaaactactacatgaagtctctttcaatcttatagtgttgtaccaaaaattgcatttttgtttaaatttctttgcaaagaacgaagggaaatgggtggtgcagggattgaacccatggcatcaagtgctctatggtaaagatggtagcgagactatcagctcattggtgtctgt

SEQ ID NO: 106945 - DNA, 178 bp, Glycine max
gtctctttgtagatcaagagcggttcctacgctcactttttccatcctatccaaaattggccttcttggagtgatagggtgttcatctcagatcttggggtatgctggcatcaggtatagttctcccacactttcctctgcaatcagcaacctcactcctgctttcaccttcgtgctt

SEQ ID NO: 106946 - DNA, 328 bp, Glycine max
aatcattcctttggcaagcctgatgtatgctgcaattatccatttgcaacaaaacaatggcggttgcagcattctttcttggagaatcaataccaagggtgtagaagaatataaaaaagtgcctgtggtaactgaagcatagatccaaagaaatgtggtgtgctatatgctgatgctgagaaaacagaatgactcaccctttggcatatctttttcctcttctataagcaacaaaatttgtcgcatttcagattttcatcaatgatttccaatctattaattgccatgttactactattaatgatgtgtagactcaattatggatgtt

SEQ ID NO: 106947 - DNA, 302 bp, Glycine max
gatactccatctaacgcaacgctttgacactttcatcccgacgccgggatgccggcatgacatgatttgacggcgcatgaattacatcgaatcatgcggcagatccgtaacagatatccggtcgttatccggacattcagatgattctgtctctgaagccggtcatcagatagcgagccatccatatatactggtatagccggaatatcagatctttgatcatgagtctgaagcgattcgtgccataactctatttgttgtgtctctctgtctcaagaggtaatgagattccaattgatgta

SEQ ID NO: 106948 - DNA, 330 bp, Glycine max
  unsure (1)..(330): unsure at all n locations
acctgatatgtttaaagcagcaagtgatatgattagtaaaatgccagcagatgaccttaagaggatgtttgaaatggcatcctcactgaaagggaaagaatctactccattagcagcagcagtagatgagaatgaaagaaatgtttcccggtcaaacttaccatcatcaagtactaatggaactactgcttttggagaatcaagttctcataatgtgttttcaaatatgaganatgcttctcagtcaaacttcgcttcctcaagntgcaatctccaagaacagatgagaaaccagatgatagatccagctatgcggaagatcgtcacatc

SEQ ID NO: 106949 - DNA, 299 bp, Glycine max
ttccgaaacttccatcgtcgcaaaacaaaaatccccaacatgtcagaatcagaggagcgagccacgctgacgtggcgcaaaatccccatcctcctcaaatcctcccccaacgacgtcgttctcgtctcccccaccagcccccgcaaaaacgacgccgtcaccggcttcttcgctccgaccagtggcacccgctgtaaattcgccagcgtctcggtggcagaaaggaaattcgacaaagaattcgcgcccacgcccgcacagcttctgcagcaccccctcgccgtcgtcgcattggttcc

SEQ ID NO: 106950 - DNA, 247 bp, Glycine max
gaatggggttagttgaggtccaagaagacgggaacggtaatggagatggaatgctctgatattccgatggggacataactagatacatcgagatgacctctgatccagttgaggacagatgaagttatgcgaagcaggcagtatgtgacaggagatatatctatgcatgtgccgattgtgcttctctcaattccgtgattctcggatatgatgagggtgttatgaactgagcaattatattcattcg

SEQ ID NO: 106951 - DNA, 349 bp, Glycine max
  unsure (1)..(349): unsure at all n locations
tcttcaaaaactttcccaaactgaatgaagattctctatagatataacacctcaagtgtatatgagaaatgggtgaagaagtagctagtaatccccctcgatatccctattgaacctctacctttgcctttgtcccattctctcattcgccaaacccacccgcactccctttttgtccctctctctcactagaccatttctcacctgtctctctagttgcatgtgacattcactgttaggcttactacgagtatgtcaagctttttatntagctcaaggtctttacttatttgaagatggatagacatctttgtttgtaaattgtagtatttgctacaccatgcttaat

SEQ ID NO: 106952 - DNA, 342 bp, Glycine max
gtacagatgaaaggaatcttccccaacccttgcctgcgcaaaggggaaatcaagcagataatgggagtaggtcaagcagttcaagcagctccagcagtgattctggatcttcttcaagtgattctgatagtgacagttcctcagcatctggatctgaggcagggtcgcaagggacctgaatgtgctccgtcagatctcagatttttagagtagatggtgtcttgatgccagcctattttggttttttgaagcttccaagattatggattttagtttaacagtcagattatagaggaagcattctgaaggcccgcaggtgatcctactgatgcagcatgggat

SEQ ID NO: 106953 - DNA, 340 bp, Glycine max
aacaaatctaaattttttgctgtaattttggtttcccatttctcccttatctctctctctatccatagtctctttcctcttttcctcatccctcgctctctgtaataaataataattattaccaactcttccgccattggatctgcccttccttccccttctggcaaaaagggtcagtctgctcctgggattacatttttttttataattttggttgagtgctggtgcttggggaaaatagagcttaggaaagaaaataaaaaaaaattggtggctaataattactttattattgtctggatctgtgtaatgtgcaatcatatagaagatatcttagttg

SEQ ID NO: 106954 - DNA, 217 bp, Glycine max
tggaagatcactttgccagacatatttcaaccaaattttcaaactcaaactcctagtcaaatgctttagtttcttctttccttgaagtgttgatcattgagctaggagtatgagtttatctcggaccatatgtcatctgctcgtgattcaaggagaatgatttaaattttctatcttgtgctgttgtggacgatatttacggtgtggaattgatgga

SEQ ID NO: 106955 - DNA, 184 bp, Glycine max
  unsure (1)..(184): unsure at all n locations
ctatcagtatanaatatagtcataatcatgcattgactgtcatggggagttagtattattaagaactagagagcaagtcatgtggttaattctggaaaagggaacattatcgtttagatgcagagatctgatttcgaatcatagcactcgctcctctctcactctctgtctatctggtttgtat

SEQ ID NO: 106956 - DNA, 306 bp, Glycine max
  unsure (1)..(306): unsure at all n locations
actttcagctcctaagagcacgcatcactgttgcacttcttactcgttctccctcttttgtttcttcttcttcttcttcgctanaccccncctttatttttcctatctcactaacatcgatgggagacgagaataagaccaagtcncctgcttccggcgtgtggtcaacatcaagctntcgtaatggcgagctccggatgctcgcactgcgtattcaccatcgtatgtcaggtgagatcactgggcaggtactgcgcagcattcacatgctagatgagggtctgctctataggcactctgatatca

SEQ ID NO: 106957 - DNA, 162 bp, Glycine max
cgtttacccctctatgttctttttctctcacttagaagccactttccttggatagacaagcttgccttgtagttgtattatgagttctggtatggtcttaagcatgtgggaatcagagagtgagtctggtgcacgcagcgtatattggagtggactcctcgc

SEQ ID NO: 106958 - DNA, 174 bp, Glycine max
caaaaccaactctgtctctctctctctctcaacttccaaaactgcttctttcaaacaatctttctcagcaaacccaaaaggccaattaaactcagaaaaacaagtgggaaaatggagaacttgtttcgcctagttgactatgaggacatgttctcaaaacgttgcatgtgggtg

SEQ ID NO: 106959 - DNA, 351 bp, Glycine max
tataaacccacacaactccaacctccaccacgcctcatatcctcatatctttcactctttttccttttgttttgtccaagacactggcttctggagtttgaggtacatagtcttggaaggattctccacattcctcaacaccccttttgtgtcctctacttctctgcaagattttctcactttctagggccttgtctcaggtgatagttctacacctatcataatgccattcagagcattgtgcgtgagctcaagagattggagagggcatagcacatgtatagaagaggagagaagccagcatgtgcatcgccatggaaatctcacattgcaccagatgtccttaccaca

SEQ ID NO: 106960 - DNA, 178 bp, Glycine max
cacactcaaggccagcgtagaccacaaatgaaaggaaacaacccttatttgattgtggttctcgtacaagccatatatgctgctatgttccttctctcaaaagctgcattcgatcatggcatgaacaatttcatctttgtcttctatagacaggcagtagcaaccatctttctcaccc

SEQ ID NO: 106961 - DNA, 114 bp, Glycine max
  unsure (1)..(114): unsure at all n locations
aanatagaaggataatagacatcaccactgccacttacatacactccctcaaatacgtgtagcatgttgtttgtggtggcagtattctttgcttccgcgataaacacttcttag

SEQ ID NO: 106962 - DNA, 345 bp, Glycine max
  unsure (1)..(345): unsure at all n locations
ctaaccaaccaggtaagaanatttctgtaatcctagattacatcattttgaaaatcggatcctctctcaactttttctttctcacttgcaaatatttaaactaaattctttcttgcacgatttgtgacagtttttgttttcattttcttgcactgttgccacagatctagtttcaattcgatgccataaattctctctctatgccgagacgatttgaatcttcgttccaaaattgtcatttttttacaaccctatttccctcaatatcctatcttctatctaccaaagtatcatctcgaacaggatctatctgccattgtttcgaacaagattgtcttgaataag

SEQ ID NO: 106963 - DNA, 342 bp, Glycine max
atggaacgttacagggaaggtcggcctcttccacagtctcttccaagcaatgttatgtttgacgagacactgatgtcaatgacaggccaaccatgaagtgcttatggaaatgcagcctgtggtattggccaaggttttcggcagcaacaaggtattccacgtgctcggccagtggcaccaacagctggtttgaggccatcagtgcatggaagttttgcccgggctgatggcactcaacagcccaatcagcaaaagtcaggaacacctgtgttggaggattccattttgaatcgtgatcagaatatattgaattcagagcctcaagaggcagcaactgcagag

SEQ ID NO: 106964 - DNA, 291 bp, Glycine max
  unsure (1)..(291): unsure at all n locations
ttcacaccacattgtanaaaaaaaaaaaaaacaaaagtgggttgggaactacaaacaataccgtgattatcattcatcattcattattcattctgggcgcaggaacaaaacagaatcagtgaatactgaagagtgtggaattggatcagatccgttatagagagatgtcacgggggagatctgattcgggagggtggttgaggggctgtttggtggtgtttgcagtggtctcagcgttgggtgtgtgtgggcctgctctctattggcgattcaaaaacgcaatcactcttc

SEQ ID NO: 106965 - DNA, 131 bp, Glycine max
gatttgtgcagtgatggcttcagcaaacccttcgccaaatgcttcacctgttgcagtgcctccagcacttggtgctattttatcaccacctccttcttcatcttctccagcaagcacttccaccccaccat

SEQ ID NO: 106966 - DNA, 182 bp, Glycine max
cttttatctacaaaattgtatttacttttataaataccagctcgcaaggttccagtgctcctctttattagttctttaaacaaaggatgcagcagaaggcacacaagttgcatggaactgctgaatcacataacattcgcatttcacgctcgcatcctttgtttaaagaactaataaagagg

SEQ ID NO: 106967 - DNA, 140 bp, Glycine max
ggttctcaaagttaagactggaaccgtgcctgtttgtcattttgttggcaacaaggctattgcttgggtacccaatctagtcactagtgaatcttgtgtggtctagttgctatatattttgttgtacactagttttcatt

SEQ ID NO: 106968 - DNA, 179 bp, Glycine max
aaggaggtatatgaagcagctcggagtgaactatgtgaggaagtagctaggaggacttcgctacaagatctccgtgctaagttaactaacgtgactaaagctgccgcaggaaaggagccgtctgtgtctggagcaaagaccatccctgatgaacttggacagatgcaagcttttatacg

SEQ ID NO: 106969 - DNA, 329 bp, Glycine max
cttaccgtgtaaggcagagcaattgggaggggaaaggaaaagaacgtgaattgaagcttagcttaagcttacagcaggagaaaagaaaggaagcaaaaccacctaaaagcaacctagccacctatttgtggctggtgtctcttaattaatgagagaaggaagtgagagattgtaatggaaaaagataatcagatgctgtccaaggaacatagcgattcttcagaattttgtttgcttatagtacttattcatcatctatctcctccttcttcaattctcctctccaatgattttgatcttcagtgcaagggagaagaatagaacaagat

SEQ ID NO: 106970 - DNA, 340 bp, Glycine max
  unsure (1)..(340): unsure at all n locations
atcaggttcatccaccttcccttctttatctacctttctttctttcttctaaattatanccctttctcactcttctctttccctcttttcacacgtattctctttctaccccaacaccttcttcatcattcccctgttctctctgtttctctgttcccctttttctcttgttcttgctgcacttacccatttcctcaattcccgtcaaaacgcaaactttcacctttcccatttcgggttgaacccatggactcccaaccgggtctctctctcgggttaagcgccactctctcatcacccgcggctccactcagtgacaccacctctgttccgtggcgtt

SEQ ID NO: 106971 - DNA, 122 bp, Glycine max
ctgtgttagggcctttcgttgagctcgtgaagtcgtggaatctcccacactggctcgtccattgggtctaccctggctacatggccgtagtgctctgtgccataggtggctacggtacctat

SEQ ID NO: 106972 - DNA, 132 bp, Glycine max
atcgatttgagtgataatagttttcatggtcaagttgcacctaagtggggaaagctccatagcctcaccagcctcatgatctccatgaataatttgtcaggtgttatgccaccagaactaggtggagcgttc

SEQ ID NO: 106973 - DNA, 110 bp, Glycine max
ttcttttctcaacctttgagtatacgccaacgcgaatcacgtctctaaacaccaacgtccttttcgtgcactcatcatagttctataagtggtacacgttgaattacttc

SEQ ID NO: 106974 - DNA, 161 bp, Glycine max
  unsure (1)..(161): unsure at all n locations
cagaaatctagtagttctgtttcaattttaatgcatgcacaacttcacattgtcttattagggatactacttttcttgttctanagagtcaagatttatgtgttatatatatatatatatatatatatatatgtgaaatatatgctactattattttatct

SEQ ID NO: 106975 - DNA, 177 bp, Glycine max
atatttctgttctttcaccaaatttttctctcaattttcctccattcccacgaaatctagggtttccgtgtccccgtatcatctcaggtggcatgtgtggtggggctttgaatttggatttaattagggaaaccctttttctgtttttcccctgttatttccccatggccttcactc

SEQ ID NO: 106976 - DNA, 120 bp, Glycine max
aagcaaggaagaagaacgtaagttgaaggaacataaagatgactcaccaaccaagcttggtctagctgaattttttttgaaggcagtgcttgatgtacctttcgcatttaaaagaattga

SEQ ID NO: 106977 - DNA, 338 bp, Glycine max
atttcactggagattttcaattttgggggggcttctgcttctggttttgttaaattctgagttgccttttgagggaactcaagtaatcagaactcaagtagtcaagttcaagcttcctactacttctctctcacgttttggggttgagtgttgcctttccttccttccttcttttgcctaagttggtttacacgcagtgaaagtttgtttctatttttggatctgcttaagcctaggtttttgggtggtttgtttaagtttgtgttttgttgagctaggttttggattagtgaattttgtgattttcagctagtactaggttgctctgttcgtaatta

SEQ ID NO: 106978 - DNA, 325 bp, Glycine max
gtgaggcaattacagagtgagaatcgatgggggagaaagggtgtgtgagcttagaaggaaagaaggtgatattggtcccttacatggaggcccacgtgcccaaatatcacgaatggatgaaggacccttctctccttcaagccactggctcaagcctctcaccctccaacaggagtacaccatgcaactctcctggtcccaagaccctaacagttctgttttctctccaactcaaactctatctatttattgcaacacaacgattatgatttatgggcgatatgtttcttttgcagaagagacctttattgtattggacaaggac

SEQ ID NO: 106979 - DNA, 234 bp, Glycine max
atatccttctccaagagtccaacaagaagcttacttttctacctagaagcactcttgaacagaaccttctacgaggacttcgaaacaatagggttccagaagaacgcgtgcaacatgatactgaacccaaaggagcgatgcgaggcgagttagagtcattcaacatggttcacgggctgacgtgggaggaggtgctgagcacaggaacgaggcacttcagcgaggagttcagca

SEQ ID NO: 106980 - DNA, 251 bp, Glycine max
gtgacaagtcattgccaactgaagtttatgactcaaagatagacagctggacagttcatcagattatgccggcggttaatctctgctcttcaaaaatggcatattgtgactccagattgtacttggaaaccctttcaccacttggtttgtgatgtatagactagacacaggtcattgggaacatattccggctaagttccctcgatctttgttggatggttatttggttgctggtacccagaagcgtcttt

SEQ ID NO: 106981 - DNA, 192 bp, Glycine max
ctctcgagccgattcggctcgagtgcggaagatggcttctgttcctgaccactgtttcatcacaggtgatggataagagtaacaataatggtggtggtggcggtggtggagaatctggagcaaccactggcatcaagaggatcacagtgagagaaatgtgggtgctgcctctccgcggtcgcagtcgccaga

SEQ ID NO: 106982 - DNA, 319 bp, Glycine max
aacatatctacattgcctgtcagaagtgatgtaagattggtaccccaaagcagtgaggatttagtttacgatataaacagtgcacctttgttcaatttccaccattatgaaagattgcagcagaaagttacatatgagggtgacttaaatactgttgattttgtattgatctctcggccattcaagagtaatgacgatcctggtttttccaatcctcctcatgttatgtctcatcatgcgtgtcacttcagtactgctagcacgggccctatttcatggctagtggatggacctcaaaccttacatcatgacttctctg

SEQ ID NO: 106983 - DNA, 179 bp, Glycine max
atcgcaatcgctttcttagtatctctccgtcttcaaatctagggttcctgcaattttagttgccgtcaccaccgcgaaccaccgcgaacgccaccaccggaatagttgtggccaatttcagattcgtgatgggaaaaaatgagtttctcacacctaaagcaattgccaaccgaatcaaa

SEQ ID NO: 106984 - DNA, 204 bp, Glycine max
cttcaaacttgacaaaaatggcaacagaattggcatcatctcccagattgggttccaagcgcagccacatgtttggcagcctttgccgccctccttctcctcttcctccgcggtctccgccgccgccgatacaacctccccccaggcccaaagccctggcccatcataggcaacctaaacttaattgggtcccttccacatcgg

SEQ ID NO: 106985 - DNA, 310 bp, Glycine max
caacacaacacaacacaacacagtcctaagttattgggacactgtattgcatgtaaatcaggaaatcatgacttctactcatgacctctcagttattcaactcattggtgtctagataatgaagctgatgaccagcagcagtcggaatcacaaatggagcctttatctgcaaatggaatttcttatgcaggtattgctactcagaatgttcagtatgcaacaccttcacagcttggaactgggcatgctgtggtaccgcccacttacccatatccagatccatactacagaagtatctttgctccctatg

SEQ ID NO: 106986 - DNA, 172 bp, Glycine max
atgacacattgacaagagtggaagacacaactggaagagcccaccaaactgttgatgtagcagaggttatacggcgatggacgcatgacttgtagcgtatccacggacaatcacttcatttggcacaagagaatgatggagagggtcctcatatattgcgcagagcacatga

SEQ ID NO: 106987 - DNA, 236 bp, Glycine max
agtgatttttgcagcggttatcgcggcttttgggttcttgttgttcccctatgctcaaattgtggccagtgagagtgtcaaaattggtgttgtgattgtgaatttggtcgaagaggaggcttctgttgccccttggatttacatgtttattggtgtcagtgttacctttgcagcattgactacttgggttctcgtggcttgcacaacaaggaagtgtgggaaccccaattgcaagg

SEQ ID NO: 106988 - DNA, 305 bp, Glycine max
ctctgtctcgtttacacatctctccaacctttcactttcgtttctcagttttattcgaatccctctctcaatctcctttccaaatggccagcgttgaggttgcacagcaaacaccaacaacagttccagaaaatgaaacaaccgaggtaagcaagacccaggaaacaaccccagtcactgaggctcctgcaacagaacaaccagcagctgaggttcctgcaacagaacaaccagccgctgaggctcctgccccagaatcaaccaccgaagcaccaaaggaagaaaccaccgaggcaccaacagaa

SEQ ID NO: 106989 - DNA, 131 bp, Glycine max
atgactctttctcacttttccgctgccattttcatctctttggttctcctcactctccaccaccacgccgaatcaactcagcgtccctattcctgcgactcgtgctccaagtcaccctactacccgttctg

SEQ ID NO: 106990 - DNA, 229 bp, Glycine max
atcttttcctttgttaatcagcaaattctaccttttaccttaaagatattatttcttctcttagctccgcttcgataatttattgtagatttcatcctgaataattatgttaatgatcgtagcctgttatttgaattcaacttggctatttgtttctgtttgtgggtatttttatgtttttatgtggaattcttgatagtttcgtgatttgttaccaagaaatttgtgg

SEQ ID NO: 106991 - DNA, 258 bp, Glycine max
aattaacttggcaaagttaaggtgctgccaggaatttttcaaaatggttcagaagaaacgacaacgactaacaatagtattgcatcaagagtaggcccgaaaaatgtttctttgactagttcaacaactgagtcaactccagatcttgaagacaaagacaaattgctaggtggacttttaaccactggatttgatgaagcatcatgcataagtaggatgcagtcccaattgtaccgcaaagcttctcctcataaacct

SEQ ID NO: 106992 - DNA, 220 bp, Glycine max
aggaggagagagagagagagagagggatggtagagctatagtagcatggtcaccaagttagaagtagtatagtagtactagtaagtagcatgaacatgaccaatgaccatgaccacaaagcataaccataaaaactaagcacaaacacaaccattgctacttctacttcccatttttccattaccggaattctaatgagccaaacgctgactctcgtttt

SEQ ID NO: 106993 - DNA, 352 bp, Glycine max
  unsure (1)..(352): unsure at all n locations
caganaattggtattcagctatgcttttctcgcactttttctctcagcagaaaatctttacattgcggacatgcggctgatgcagctgcaattgagatcatgatggattgcggagtgtcaaaataccttaacgttaccactgcaattgcagttacggactgcaatttaaaaccattagagcaatattgaatagtactattttctaacacattattccattaattgtgcaaccaatcacaggtattggagtttttctaggtgttgaatctttcggaatcaactatggccaagtggctaacaatttgccacaaccagacaaagtcgttgaattgttgagcacgcttaacctcac

SEQ ID NO: 106994 - DNA, 255 bp, Glycine max
ctccaacaaaatcctcaatttcaggttattaagagaagaaattgaagagccaagggtgtgaggggttttgagtagtgattttctttttccttgtttgatatggctcttcactgtggtactttctgcttctggactgtggcttctcaccctccaagttctgtcaagttgagtcaacccactataaaagcttcctccttttcttcccctcttgcccctccacttgtcaaattgaatgtcagaggaaaggcttttcct

SEQ ID NO: 106995 - DNA, 212 bp, Glycine max
agcatggctaattcagttgtattcatcagggagtgaacgttgtgctcaattttccaagtcatggaataagattgcttctttattggatgtctttgccaacattggtatggtggaacttggtgagaaggagctcgccatataccttgctgatagaagatcaacaggaaaaccattttttagaaatggaattccatctcttgttgccattcccg

SEQ ID NO: 106996 - DNA, 348 bp, Glycine max
taatttccaggctgttttttaatgctttggttgacattattgagggtatgctttaattgcagactttcttgtgcttgtacttggatgtgacaagcaagtttttcttcatcatctgcttctaccaaattctcttcaattatactctgaattgttgttggtgaaagaaagctgagagatcttcagagttgttgatctaattttccttcaggagaaaatgggactgcagctgattttcttgctaattgagctgcatttagttttctgcactcagcaggtccatgaatatgcagccaccaagctgcaacattccagtgacagacgccattttagtattgcaatcgcaccatc

SEQ ID NO: 106997 - DNA, 348 bp, Glycine max
  unsure (1)..(348): unsure at all n locations
ttcanatctcaacttttttacacccattcgatcttttcttccttctatttgatctttgcacgtgtcagcactctccacatgagtttcagaatgatgacgaatggagcacagaaaacatagttggatttctatcagcaccggcatcaaaaccatcttggggcaaaagcatttccaggtcaagaattttcggtctatacttcccattttgtcatactgttggggttgtgatctgcaccatggcaaccacattaaaaggaatctacaagagtatcaaatacatcacacaaatatttgttttgaaggagcgggagatggaaattgggtacccgacagatgttaagcatgtgg

SEQ ID NO: 106998 - DNA, 153 bp, Glycine max
ctaagtcctagatggatctagaaatctcttcaaattagctgcaccagtggaatgcaagggcattgttggtggtgatcgccgacattatcttcttgatttgttgagagtaactcctcgtgatgccaactatactggacctggttcccgattttg

SEQ ID NO: 106999 - DNA, 274 bp, Glycine max
agattctagtcttgtaaatccaaatgcagcaagaacaaatcttataaaagaaatgaagggattaatgaatagtaagaataacataaatccttgttcataacttgggaacaaggacaagtatatagctagctcaagcaccagcaatagttccaaaaagatgacggtttgactttggaaggaagacattaatgtatctcagcattctcacaaaacatcatacgcaaagagtgccaattccaaccgatgcactcttcttcgtctgcaatttatctct

SEQ ID NO: 107000 - DNA, 217 bp, Glycine max
ctagcatctcgtttcgccagcccttgtggcaaaaccaccctagcctgcgaaaccaaaccaccctagccttctagcctacgctcttctgaaccctaaatcgccagtcaaagtggcgaaaaccactgtatgactatgtcgccagctccggcgccggtgatgactcctcagctcgcgatgtagctcgcgactgatctcgcccaagcagagattcgccgtc

SEQ ID NO: 107001 - DNA, 330 bp, Glycine max
ctactttagaatcatcgtgtgattctgaggccatttctgccaaggttttcttggctaattttgggatcttggtaaggcttatgtcttctaaagcctgaagagtttagattgagcaggcatagtcagccacggtctgttttgctgttactagttttggggattcctgagtagatgactcaggtttgacggtagctatttgggtcaatgacccttcaaattttggtttatgggttgatgacccagtctgggtaggtgacccagaggatgatgaggttgtgttcttgattactgactctggtagagccaagaaaacttcttttcctttactac

SEQ ID NO: 107002 - DNA, 254 bp, Glycine max
  unsure (1)..(254): unsure at all n locations
gatagatagaagaaagagagagagagcgtagggtagcagagaaagatgtgttccgggtgtttgctgagaaggttagagaccataaagaattggtttcaagatgggctgttctacaggagacgcgtgttgagtattttagagggaaggatttcgtgagcttcttaaagagccatccggagctcagagatgttctagaattagataggattttggaaacagaggagattgccaacattctacttgcanaaaatctt

SEQ ID NO: 107003 - DNA, 177 bp, Glycine max
gtagcaacaagcggacacatacacacagtgacagtgaagtcgctgcaaatttcctaaggcagcgaaagcggccccaattaatggctcttcctcggaaccctactttccctctttctcttcttcttctcctcgtctttctgttatcagcaacatcagcgcaccaacaacaagaagaag

SEQ ID NO: 107004 - DNA, 248 bp, Glycine max
attcatcttgcagaggaagttgctaagatgcttacaacaaagtaccggcatcttatttatgcatgtgatactgaggtagccaagatagatgtcaaacaagaaactcctgtagatcatggggagataacatgcttcagcatttattgtggtcctgaagctgattttggaggtggaaagtcctgtatctgggtagatgttcttgatggtggaggcaaagagattttagaaaaatttgctgaattttttag

SEQ ID NO: 107005 - DNA, 346 bp, Glycine max
acttgaagcagtgaattcaagacttaactctggtattgaagcgtttcctcctaaagatgtaagtcttaaacatcccttgctttttacattgaatttctgattgagttaaaaactgatttttatccctcttgttttaaattcttatgttcctgggatggctgttagggtttgaatcatcttttgtagtgccattcatgtcatcagagtgttttatttgcaaatttgttcatttggtacttgaattttttttgggttgaatcttcagttgcttcttttcttcaaacgactggagtgcttcttaatgcttttcagagctggttaattcagtaatactaattcaggaaat

SEQ ID NO: 107006 - DNA, 306 bp, Glycine max
ctcgagagactgttgccgccggtattaattcttcttcttcttcttcttcttcttcttcccccaaaccctaatttcttcaattcacgaaatcacattcatggctgaacacaacgacccaccccaagaacccacattgccctcctccaagcgcaagtccgatctcgacctccaagacctcccttccaaaatcccaagctcgacctcaaagaaaacgacgacaaagacctccaaaacgaccatgaaggagagaacgacgacagggaagaggaccgaaaggggaaggggattatgcgtgacgacaagggc

SEQ ID NO: 107007 - DNA, 334 bp, Glycine max
acctccccaaaagggttattttattttgttatgacattctgtaatttcccccaaaaattgattttttagatcgattcgttgatgggtcatgctggggtgttgtcaatcgttgtaatggctaattgaagttctgtgggtgttttgttgggaaaatgcgggatcaaggtgttaatgttgggagagagaagaggaagatgagttttgcagttgttgtggagatgaagatgaggaagtgtggaaagagactgaggaacctgttgtggataaaggtttgaaggatgagcttgatgaattttcagtgaaaatgttctttaaggggttgtcaatggcaggg

SEQ ID NO: 107008 - DNA, 334 bp, Glycine max
gacggcgtcttcatctgcgcctaggttctccgaatccgtaacatcggtggattctcatgcggaatcttcgattatagtgccgtatccaccaccacagcatggagaaaccgtagaaaaatcaagatggagataattggatgtaatgttggtcatgcaactttggggatcaatctatttgtataaggatttcgtgatgttatgaacgagttttgagtctctgtgcatatcttatacgttgtagctttttccttcaggtttcaacaccattttgttgtattgcattatcttggaaccgagaagagcatggcttgtaaatacgcagctcactatttgt

SEQ ID NO: 107009 - DNA, 207 bp, Glycine max
  unsure (1)..(207): unsure at all n locations
cacacatccaacttccactcttctgcantctgtgccaccgacaacagctctcagcgatgtctatcgcaggaacagtaaggcgcatctatacgttgcttggatacctccgcatgtgccaaaactcagagctcaggttctaacaacactcctgacaggatggcagttgcggctgacgttaactgaacttcgcacatgtgtcatcctgga

SEQ ID NO: 107010 - DNA, 161 bp, Glycine max
cgcaggatacatacgctctcatcatacgccatgcgctgatcgctaattaccctcatagcctgccatgtcgtcatgatccctctgcgagactagacgaccccgctcgctcttccggaatcttcgacagcattctcgcggccaattttcccgcgcattctcga

SEQ ID NO: 107011 - DNA, 283 bp, Glycine max
aggtaggggttcttacctccttatttcccctgccctcaatttcattccccttcaaaaaaaaaaaacaccatgatactttctgctaaaagggtttacctggatgttatgatatttatgtgctacctggttaaatatgcatgcagtttgtgtatctatacacaaggcaaaataaaaccctaaataggctaatttggattaacttttagcttataataggagtttttcaattgaaagagggagctcataaatttgaattaggtgatgagagaacttatggagaggt

SEQ ID NO: 107012 - DNA, 304 bp, Glycine max
gatccattctctcatccgtagtatgtgcatttcctttcaaccattaaaactcctcatcattcttttaatttccacaattcatgattctggtggctttgtttgagttagacacccaataaaatcaagtaatcttttaggttgccatgtggtggaatctgtaattcgggtaatgctcctgcgagatttgctgccggtgcattcagtgtggtcacaatttgtttagtagccatattgcttcttctgggcttcgtgtgcattgcatactcatattactttcggtcacgcatccatcatgatcagttca

SEQ ID NO: 107013 - DNA, 333 bp, Glycine max
cagtgctcagtaccctctctcacatttactactattttgctcttctctctaggcctgccctctctccctagggtttgtttcacttatgccttcccaactcctcagcctcagaagttgaatgtagatgatacggaaggagagaagttgccctgtcctgtcggtggctctgatctctgtaaatgctcaatgctctccatcttgcatttttgtttggtaggtgggttcataatcacactactttacttttggggggtttcaacttttgcttattttcttttctatttctccgttttctactacttattcattcattcacgtgatctacatgaattg

SEQ ID NO: 107014 - DNA, 332 bp, Glycine max
  unsure (1)..(332): unsure at all n locations
cgtcgtccaacgagaccgaagccgtgtctctgacaacatgggtgagattcaagagagcaaggctcttgcaaagagcaagccttccactgaacaggacgttactgatgagctagacctaagaatgaagaagtatctcagagagaaggtgctaatttggagggtttgaaggataaaaagctgaagggtcaactagctgttaaggaagacttatatggaaaatctgcaaaagctgctgctaaggctgagaagtggcttatgcccagtgaaggaggctatctggaggccgaaggcttggagaagacatggaggatcanacaggaggcaatagctcg

SEQ ID NO: 107015 - DNA, 330 bp, Glycine max
acttgttctagatcgcgagcggccgcccgcgatctagaactgacgaacttgagatggatcgaagcggtgctgcagctgggaatcatagcgggaatgctctgcgtcatgggaaacgctcagtattacattcacaaatcgcgcatggcagacctaagcacatcgggaacgatatgtgggacgtggccatggaacgaagggacaagacgcttgtcgagcaagcctctcgctccaattaacatcgtcgatctgccaatgacattgtgcagaggataaactgctcacctggatttacgactgtgttctagggaagcaggggtaatcacaagaatc

SEQ ID NO: 107016 - DNA, 239 bp, Glycine max
catacaatggctactcctacttgtgtcttgtatttctgtgtacttgtcttctttgtatcaccatctttgtcagcatcaaatgaatttcctaagaccggatatatctccctccccattaacatagatccaaccaccatcagcacttcacatcaataggcataggaactccacgacacaacatgaatttagccattgacctttcaaggagctactgtggtacgactgtggtggtaattaca

SEQ ID NO: 107017 - DNA, 337 bp, Glycine max
  unsure (1)..(337): unsure at all n locations
ctcactctcnccttcccattagttttggaccaggcaaccggacatactccttctcagtatcttcaactacttccccacctttctcgctcgttccttcctccccatctgatgacaatcttcccctaattctgcacaagatcactaatgttccatcatcaatattttcattggatcaccagcaattccaatccaagactccatgcctcgagtacttgtaagtcatgcaagtgcgtacgatccatatacaacaactgcatgcaactcagaaattgattttgctttccgtcctctcattaaataacactaaccacttgttnttatctcgatgaataagaac

SEQ ID NO: 107018 - DNA, 341 bp, Glycine max
  unsure (1)..(341): unsure at all n locations
gagnaaaagagtcctagaaaaactcaaattcagaatgtttttgataaatctgaggttgctcatgagaaaagaactaacatcacaagaatagtttctgatcatgcaacagtgaatgatgttcaagaggaagatgctgatgctccttcaaagaagttggaagactcggcagtgtcagagtcaaaacaggttgatgttgagacaagtctaggacagcaagctgaagagaatgagaataatgagtcatgtaatgatactaatgctcncttgcaatctagcttgatgaatggtaaagatggagaattcattgaggacttgaatgatatcaatctaagaattccaga

SEQ ID NO: 107019 - DNA, 333 bp, Glycine max
cttcctcacacctgacctcatctaagtcgcgttcttcttcgttatgttttctttgcgtgaagtggttgctggtttcagaaaaccttaacctcggtcctctgcgtcgcgttcccgtcgtgagcgtcgtcttcttcctccgcgtcgggagattgtgttttgcgatcgtggtggtcgttggtgttgagtagcccaggcattttgagggtggtgttctccctccgcatcggcattgtcgaggttactgattaagttggtggattgagtttgtttcttccaaggtgtttgtttgaagtctgaattatcatggttaggaccagaggaataggtcgtgcc

SEQ ID NO: 107020 - DNA, 333 bp, Glycine max
cgaaaacgagacgcaacaacaattgctatccgcgttccttccgttccgaaccaacgccaaacagggttcataacacctccatttcattcccttcttcgaatcgctcacaactaagaagttttgcagttaaaaatactgcaaaattcttctccgaaggcgtaatctagcgcacgagtaagatgaaacggagaaagcgcagccacagcgagagcagacacgaagaagacagactgagcgacttacgcgaatgcgttctcctccacatactaagattcctgaacgccagacacgccgtaagaacctgcgtgttgacgactcgatggaaaggactct

SEQ ID NO: 107021 - DNA, 344 bp, Glycine max
agaaacaaatgtgagtgaactggaccttgaagcacatgttcagcaacataattgatctgtttttttcagtcaaacgagttgattaactgctctcaagggtcacttaatgtgaatcagtactgtaccaaattgaagagtatctgggaagagctgggtgggtatcttgtgaaggtgtgaaaccacttcttgattacatccgcatggaatgtgtcatgtacttcctcatgggcgttaataatgctttctcccaagtcagaggtcagattctactgatggattcaataccttctataacaagatttcctccctgattattcaggaagaaaacaaatggaacttggttc

SEQ ID NO: 107022 - DNA, 344 bp, Glycine max
  unsure (1)..(344): unsure at all n locations
cattgtcagtgatccatatcaacaagttgggcattcatctcgttctcaggctcccaactatgagaaaccaaagcgagacaagccagcacaagttgcagtgtcttctgtccaaaattcacacagatacgagagacctgggtcttctagttcttcaagatctcatcatgagtcatcagggaactcttcttccacttgttccagcaacatttctagtaagattgtggatcgttacattgatggagagcagcatccagaggaaagtagacccaagaacaattcacaaagaagtaatagtagacatgggaattatggtgtgaagcgtcctccanaagtacagcttacag

SEQ ID NO: 107023 - DNA, 341 bp, Glycine max
gttaaatctgctttccattcctgttgcagggcagggatcagatccagtgagagaaaaactccaaaacacaagtcttttgtgatcccttattcattctcaagtatagaggaagagcatgctacgcaactgcttcttgtaagcactgtttcaccccagataagaaggacacttttttgttgaatactgagtatctcagtttgcttcgggttatattggaaagaagtagaattctggatagtgacgaatttccagaatgtacatgctatcgcccagatggactcacagctccataggcatctctgtgatttatgcttggctggtatgctaatcccattacattt

SEQ ID NO: 107024 - DNA, 336 bp, Glycine max
ctcaaggatccggcagacttcttcatggctcatgagcgcttggaaaatgcaaaaagagaaatacagaagcagctgggtggagcctcatttgagtcggatcaggataaggcagccgctagaccacgacaacgtcgaccgggccttttggggaatgatcaattgtcaatcaagtacaagcatcggtatccaaaagaaacctcagatgatgttctgtcctctcaagagacactagggtctcggagtctcgctcctgtgaccgagaacactgacaaaggtgaatcttgtatggcatcattggaaaaagaagtaatagattcatctggtactgaagggaac

SEQ ID NO: 107025 - DNA, 326 bp, Glycine max
  unsure (1)..(326): unsure at all n locations
agaaatgattcaacacaaaaccctcatttgttgtcaaacgaaacctgcaccgcaaaaaaaagatggagttgtcattaccatcagtgagggagccggaagaaggagatgagcgagttggagctgactcaggcgttgggcttggtggtgtactggtgtcggtttccgggggtttgttgatggagaatttgatggaagtaagaacaaaacgtttcaacagagaaaaaagataaaaaatttgaaattcanaaagctgtagaaaaaagaagattgacggttgctattattttatttctttgctcgaaggagttgtgggagtgaataaagaa

SEQ ID NO: 107026 - DNA, 305 bp, Glycine max
  unsure (1)..(305): unsure at all n locations
aacaggaggaggaggctctggtgatgcagtcgcagcacaccggttgttggtggtggtgctgctgcatcaggaggagcacgcgacgcggtgcaacggcggcggcggatcaaattcacgggatgatagagttgaggaaggtgacaaacctctcngtggaacaggtggccaagacaagagactttggctgtgttgaagatacggtcggatatggacgtggctttagagacgcaagtgtaaagggcccttgtgcgaagaggttctaggaactggcagacttggcaccacagaatgccagaatgcaagag

SEQ ID NO: 107027 - DNA, 99 bp, Glycine max
ccgacagagtagaaccaaaagattcataataactaacattagagactaggtgagagtaactgcacagacacacaacacatcttccttaatttctccgtc

SEQ ID NO: 107028 - DNA, 260 bp, Glycine max
catgggagttctgctgtgcaaatttatgctaaggaatcaagtaagctcatgttggaggctctgaaaagaggcccaaaagtgaaggaggatggagagttgataactgaaaagtctggttcaactgctgaaactgtttttgacatatctgggggtcgcagagactttattagtggggaggaagctgcagaagttttgaaaccattgacgggaccaaagtattataccaagatatgttttagcaatagaagttttggcttgga

SEQ ID NO: 107029 - DNA, 137 bp, Glycine max
gtgatttcccccgaatcaccctctattccttgactattggaagaatttcatagtactcctgctggagggcactcaggttttgtgagaacataccgaagactggtagattccttataatgggtggggatgtagaggag

SEQ ID NO: 107030 - DNA, 177 bp, Glycine max
atgacgtttactgtagcattctactcatactagtttatcctccaaatccccttcttcgaattttcacttttcccacttgacgcctttattcatattctttcattcttctccataacccaaggttggaaagctctctctggatgggttgcaatcaatccaagatcgagaacgaggaag

SEQ ID NO: 107031 - DNA, 129 bp, Glycine max
attggcattgggtaacattgttgctcgtcctctctcaaacttgagaccttctctaaagttatcttcttcgtcatcctcttgttgtatcaccaaagtcttccccatttcccgcatcaatgtcgctcccac

SEQ ID NO: 107032 - DNA, 109 bp, Glycine max
acattgtggtgacaaattgacttgcgatctggaattcgtcttctgatttttgggagtactatttctggttctttcaatgtagtatttgagctttatctattatgaaatt

SEQ ID NO: 107033 - DNA, 132 bp, Glycine max
gattttatttgctctctctcagaggacattttgcttcccacttgtcgttgttgccccattcccttcttacaatagcatttgtactggattttgacaatcatgtatctgaaatccattggtttaacccgtgta

SEQ ID NO: 107034 - DNA, 235 bp, Glycine max
gtcgtagtaaaaaataaacgaaacaacctatagatgtgacacagtgtttggcttggtttcaaatgatgtcatcttattcttgagatctgcacattagtacaacggggttgctaaggagactgggttgaagagacaaattcttgttgggttttgatgctgggagatgtgtaactcatttgtgatatctctctgtattttgtaatattagcattttcttcccgattttgtacttcca

SEQ ID NO: 107035 - DNA, 271 bp, Glycine max
caaaaagctgaaaaacaagtgttatttattcaaaataagttgtacaaaaaatgcaccaacatttgcacattttgagaattatttcatgcaatataattttaaaattgaaataacaataaatgaatcataatggcacacacttatactctaagcccattgtcccccaccctttatcttgttattacaaataacaatagccattttcagctgcggtgttattttgttcttgttactgttaggagcagcttagtttgtttgcttaaaaacactt

SEQ ID NO: 107036 - DNA, 277 bp, Glycine max
gtgcaacagatagtaaccaagtgaagattccattcaagatgaaactctttgctcactttttctttatgttgttgttcttggtggccttttccaacatccaagtttgtttgggggactgtgataatcttcaggacacttgtccacagttccacccaataagcagaccatattcatcaatggtcttcaatgcaaaaacccagttaatgtaacagctcaagatttcaggaccacagaactaagcaaaactggccctagagacatttttggtgcatctttg

SEQ ID NO: 107037 - DNA, 267 bp, Glycine max
gccagagtgagcacgataagcaaggcttccatcgccatttatatatattaaaacttcaaataaagtaagacaaacagaataaacagctgcaacttttttacagggtttttttcccgggaaaataataacagcctctgcgcagttcgttcgttctttctcagatctcaccaccggaaccgccatggatgactcgtccggccacctgaatattcctccggtttttgctgcgcgactctccggcacgttgaccgcattatcaactccaac

SEQ ID NO: 107038 - DNA, 120 bp, Glycine max
ggggtcgatactcgaagtatcgaagacccggcctgagaagcgtattcaagttattggcgtaacagacggtcaacgaatattgagacttggggaacttggatctcaggggacgggaattcc

SEQ ID NO: 107039 - DNA, 274 bp, Glycine max
gcaattgccaactacaatgcagcgtggcctccttgcttcctctcttccactctcaacccgctagatcttccttcctctccctctatgcaactcaagcccaaacccattcttctacaaactcaattcccatagtaagccttcttcaccattcgcaattgcagcagctccttcaaagtgaaaccctcttcccaaatcaaaaaaatccgcgccgaagctgagcttgattccaagctcaccgcgctccgaaacctcttctccaaacccggtgtaaaca

SEQ ID NO: 107040 - DNA, 110 bp, Glycine max
catagataagatacggtctggtgtttttactactcccatgtttgataggtagagacaataagcagtcttttggttgagaggatgtcttggtgtggatctttactccattg

SEQ ID NO: 107041 - DNA, 238 bp, Glycine max
ccggaacataaggctggcaagatagttcgagtcttctctcttcaatggaaggcggcgaacaggttctcccttcggccaccaccgtcgtcgccgccgtctatcccaacgtctctcctcctccgctcgctgatcctacagtacatcagatcacgatactggtactttggacgaggttatatcggaatctgaaattcacgcgctgatgtcagacgaagagcacgatcacgatcttgatcac

SEQ ID NO: 107042 - DNA, 267 bp, Glycine max
ctgatatatgaattaatatcgaagaaggagagtacatgagtgtttacagttattggacggagagaaatctatagagcttgccagggcaaattaagctgctactaagacctggattaatttatcagtgaaacataatttgtgcatggctgcatggatcctgaccaaaataatcatgtggccggataaagttataatagtcatctttattagtgtttttctccaacgccttcgcatttcacgggcatgtataagcaatgtgatgtcata

SEQ ID NO: 107043 - DNA, 114 bp, Glycine max
gcctggggcatcaactttgattacagtatcacttctttcgcagtcaccccttactgttgagattgagcgattagaaatccagttcaaccaatctaattgtaattgcgtcattac

SEQ ID NO: 107044 - DNA, 265 bp, Glycine max
actttatggcaggtttctgttgtatgagtacatgggaaatggaagcttgaaagatcatcttcattgtatgcctctcaatatctatattcgatacattgttctacctttaaaaaacataacacacacacacacacactgttttgaataacatatttacgataatatttggtcagactacaaatggaacatccatcctccccccttgtgcttgcattcattttcatgtggatcttctgtatgtgcttttctgcatcttttaactcag

SEQ ID NO: 107045 - DNA, 261 bp, Glycine max
ttcacattattattagaagactaaaattggaaatcactgtctttatcaaaatgctcacatatattattgttgatataaagatggtatgttcttcactatttttttgtttaaggaaataaaatgagcaatttcctagagttaactatttgattctatatcaaggcatattgaaagaaatacttcttgtatgagggcctgtgtaattgtcattggcaggaaatgaattgagtgggaatggagttggaacaagcattacagcag

SEQ ID NO: 107046 - DNA, 260 bp, Glycine max
cgaatatctcaaggagatattcgtgtaacatagtatatacaaagcttcttcatttctacgctgcttgggaagattggattgcagagacagcaacataacatgggtccaattataattcacgaatagcttgcttctcatcggaccaagatgttcaagcgcacatacattaagatgtgaaggaggtgagtggagtggggttcgtgaattttttttccagtgacgggggattgtacgattaatgttgtaacaaataataataa

SEQ ID NO: 107047 - DNA, 245 bp, Glycine max
cttgaactgatagaagctgaaattggtctataagaggccattgaggatatggagtggttattgcgcataagagagaaagaagaggaaaagaaggcaaagatgggtttgctggatgaagaagatgatgacaatgaaggtgatggtgatgatatgacttctgtaaccaaacaagatgaaaaagctcctgcaaaggttgtagaagttcccgcagaggtggaagaggaagatgatgacgattgggatga

SEQ ID NO: 107048 - DNA, 165 bp, Glycine max
gagggcaatgcttgttatgtcgggtgattgcgggtcgggtcggatcgggttcggatgaggtggaaaaagaggacggagggtttgattcggtgatggctagtggagagagtggggtctacacccgcctcgatgaggaggagcttttggtgttgaatcctagggctg

SEQ ID NO: 107049 - DNA, 115 bp, Glycine max
ctctcagcgtacgcactagcactggctcgcagtgaaagttgttcagacatttgcactgttcgaactaagttatcgccatgaatcaccagcagcatgcccatcccttcgaagaaga

SEQ ID NO: 107050 - DNA, 161 bp, Glycine max
gtttgtctgcaatggtcaaagacagacgcttattattctttatttatcatacaaaacgacttcacgtgcggggaagtacaaaaaaatagtggaagataatcattgatcacgtacagaaaattattgtattggatgtatgaccttaacttcagttttacctt

SEQ ID NO: 107051 - DNA, 248 bp, Glycine max
gatgctctctcatgctctcttcgaggctctaggctccaccactccgtgatccatgctctattccccactgcgatgctgaggtacatcttgaggagtgccttagcgtagagaggcagagcgataccatgacaatgctcagttgggtcttcatcattgcgtccttattcctctccctgtgctacggcaacgtctacacctgcacgatgcatgaccgtcactcggagactgtcaggaagtggtctcactcc

SEQ ID NO: 107052 - DNA, 261 bp, Glycine max
ttcgtgaagataggtcacaaacggggctttcttctcttctgacaggggatcgtgatcgactgtagctgcgatctcggctgtaactgcgatcacggcttctgccacgacgaggtgaatgtgacctgactggtgacgataggtcacaaagccctcaacacaaaaatagtcctcagccctccaagacaaggaagcatagtccatcacctgaccgtagcccacagagaagaggtgacacatctcctgacaatgattggttgagca

SEQ ID NO: 107053 - DNA, 224 bp, Glycine max
ctttcctctccttcttcctctttcagatctccgctgaggacatcctcggagaaggcgttcgtactcacattggatccactctaactcttcacgacactgttcagcaagcacgatttccatcagtcgtccgcagttctacgtccccactggtgtggtccactgtacgcaagacttgctccggagtcatgagcacagcctgcttctatcttgagtagtcatgactc

SEQ ID NO: 107054 - DNA, 258 bp, Glycine max
gttgtactaaacactccttgtctcccctgaccctcagttttgccttttttgtgaaaaagtgtctacagagaacaaaacagaacggaacagagagagagaggagcttctctacttgactttctggagagacatggagggtgcaaactggaggataacagatgaagaagcagggccatcctcttcttctgggattgcttcaactaaacaacaaaacgcacctgaaacttttcatcataggaaggaggcagaagaagaaga

SEQ ID NO: 107055 - DNA, 187 bp, Glycine max
  unsure (1)..(187): unsure at all n locations
aactcgtcaaaggcagatgcgatagttagaaagctcgagatggatggacgtaaacgtagagagatgtggtagatttgctgatgatacatctaactgcggacngggngccgtgctattgggtcggggaatgtcaaggttgggtgaaggatatttgatagtcggctatcacggagttgggggaaccaat

SEQ ID NO: 107056 - DNA, 256 bp, Glycine max
tagaggttgagtagtctatatttacgtgtcgcctctatccttaaagaaagttcagctttgccatccaattttctagttgctcttgggaaagtattaagtagcacctccatcaatctcgcttcctgcagtacacttcagtttgaagcttgtctcaagttcttctccctaaagcagtttgtgtttcatggaccaatcagacatgtataggcagaactaagtgttcccaatattgactttgaacatcctcttccctttg

SEQ ID NO: 107057 - DNA, 241 bp, Glycine max
taataacataacccctacaagagttacaaaaaacaaaaacataaaaacggcagtttaatatttgacccagttgttccacacaacatacgagataaagaccgttcttcaattaactgttgcaagaagtcaatttttcctatactcaaagccttcatctagaaccagtcatcagttttgttttttgtttcgtccaggacgaggtcttagaaatatcatcgtgcttttttacgaggtccacaca

SEQ ID NO: 107058 - DNA, 242 bp, Glycine max
cagaaagtcaagtcgtttgtttcaaagcatcctcgaacttttggaggccgaggatgcagccgaagactccaaccatgtcaatgggaatcagaatttctcccgtacaacgataatcactaacgtggcggaaattcaggtggcgaccggaacaggtcaaacaccccaaaccgttctggcgtttgcaccataaataacacttgtactttcagtgccactagtggcaatatcaaccgaggctttat

SEQ ID NO: 107059 - DNA, 251 bp, Glycine max
  unsure (1)..(251): unsure at all n locations
gtcagattcatgtctcagcctttgaccaccaactctgctgatggtgattactgcgtcgccgtacctgccatgctcttcgattatcatctgatcgagcaaaaacttggagacaacataagaaaggaaaaangatnggattgggcctttgggttgtgggaggtgtagtcgcgtcatgtctgggacgggtgggcctgggctcgctgtcggggtgtggtcggggctcgtgctcggctgcgttggtttgcgtgatg

SEQ ID NO: 107060 - DNA, 170 bp, Glycine max
aacaagttcactggtgtgcttcctgaaaggctatcttggaatatttcaaggtttgagataagttacaaccagttttctggtggaattccaagtggagtgtcatcatggactaatttggtagtgtttgatgcacgaaagaacaattttaatggaagtattccacacaacat

SEQ ID NO: 107061 - DNA, 111 bp, Glycine max
tgatcccggccgggaacctgaaggggaacaagtttccccaaaagggagccgttttaaagtttggggaaatcagggcaaaagctgttcccgggggaaatttgtaaccggctc

SEQ ID NO: 107062 - DNA, 251 bp, Glycine max
  unsure (1)..(251): unsure at all n locations
aacaaacataataacttctccaatattccaagaatcctttccccttcattccacacaacatacaatattanaacancgananngnnacggngtccggatcacaggacacagattcgggngaccgttctacaaagaaggtgaccatcagtgactgtggtgagcttccaaatgcttgaggtggttcttttgtaattttgttggttattccttctattaacttgttgagttgagaagggaaagaggggcgggga

SEQ ID NO: 107063 - DNA, 118 bp, Glycine max
  unsure (1)..(118): unsure at all n locations
gttggagctaggtcaagttgtatgatgtttctgaaagccatggagatcttgagaggatgtacggtgnaattgatctgctggagacattggagcgcagaaacgttatgaagttccagat

SEQ ID NO: 107064 - DNA, 244 bp, Glycine max
gtaacatggcttccttaagctccttagtgctgctccttgcagctctaattctatccgctctagttcttgcaaactatgagagttccccagtgtacaagcctcccactgagaaaccaccagtttataagcccccagttgagaagcctgcctgtttacaatgctccagttgagaagcctccagtttataagccaccagtagagaagccaccagtgtgcaagcacccagtagataatccccagtgta

SEQ ID NO: 107065 - DNA, 162 bp, Glycine max
gcgtaactacgtaatacggcagcatactgagcatgggagcccggagcagtcaagggatcttgcatatctacatgatggccaaatactgacgtagagtttgcagatgtatgactctcgcgcaatccaataggcacctaaggttattaaactttagcagagagc

SEQ ID NO: 107066 - DNA, 245 bp, Glycine max
ataacaacgtgacaccaaaggacctgacatctatgatctactactctcaacaatcttcctcctcacgaccttcacaggagattccaaacttgattaattccagttcaattaaatctttgagccagagtgctaaaactgcactaatgacaatctcatatcgtggacaagttattgtctttgatgaatttcccatcgacatagcaattgagatcatgtcatatgccaccaaacggatcccccaaagc

SEQ ID NO: 107067 - DNA, 107 bp, Glycine max
  unsure (1)..(107): unsure at all n locations
atacattttcgttctatcccgagcgcataggccgtagcgagcgaccatcatctcactatggagtggaangctgagagcctgcaatgtctctgggaatgcttcttcca

SEQ ID NO: 107068 - DNA, 152 bp, Glycine max
caaaagtgcatgtatattctcgttacttttgtaggatggtccatctgaggtaagataagagagtgtagggatagcataatacccgatctagattagtgtagtgcgtaaggttctcacctgagtgggtccttggtgcataagtgcgtgtgtat

SEQ ID NO: 107069 - DNA, 102 bp, Glycine max
ctgaggtctacgggttcggcttccaggtgggtgcggcggagtggagcatttcgccgtacgaggggaagaacaaggtcgtgagtggggagacgatagagagtg

SEQ ID NO: 107070 - DNA, 221 bp, Glycine max
gtattaagattgattgggctttgtgagtttttattgtgcaaaaagcaggtgttgtatatataatgacttataactggattggaagattttcagagatgaatgatatagtttcctcttaattattggtatgaataaatattgttaacggcatggtttatatctaggtggaggaaacctcagttgaagataatatacgatctagaaaaaggacgatatatata

SEQ ID NO: 107071 - DNA, 247 bp, Glycine max
gttcaggttcagccaaaggcggcactaccaaagctcatttttcttcttcttcttctttagcctagttattcctcgatgacgatttcacgctctcaagcctcaagcttaagcgaccctctgattcagctggtaagtcagccaagaaacctgattctgaggaaattgatggggcaaagaagtttgaagaaatgtcaaatctatcatggttgtcaagtgaatctcaaaacaatatattactgcaacggaa

SEQ ID NO: 107072 - DNA, 117 bp, Glycine max
cagttatagtaacgcgcttatcccgcctctaccttcatctgtgacgcgttcactgttccgtagtctgcaattctttcgttgctattctacttggatacatactcgatccctttgcta

SEQ ID NO: 107073 - DNA, 258 bp, Glycine max
tgaaaacatgggtatcaacagaacatagctcctgcggttcaagatgatgaatttccaatttgttgaggaacgaaaatggtcaaaagatgctgaaacaatagaattgaagagtatattaggacaagctcaagcattagatctctaggccaaactggcacagttggcaaagggaaaggctgctcttgatataaatcctcacttactagagataacagagagagttgtaattatagaaaagctcaaggatcatattccaga

SEQ ID NO: 107074 - DNA, 258 bp, Glycine max
cacagacatacacagcatatatcttaaaacaatagtctattatcagtccgaggagcttaaaacaactaattgatatagcatgaatgacttggattaaaacaattgattgcgtgacttaagtgatgtttaacctggactattttgctatgttcagcttctctcacatctcattgtaagccgatgatctcaaagattaagtgtacaatagatatccaattatccattagtggtcatatgtttgttagttacccattagtt

SEQ ID NO: 107075 - DNA, 141 bp, Glycine max
agaagagactcatgagaaagccagaaagaaaatgggagtggagaagcagttactgaggcctggcaccggacccaagccaattcacggtcatgaggtgaccggtcactacactggattcgggacgaacggtgacctgtctca

SEQ ID NO: 107076 - DNA, 252 bp, Glycine max
gatgtgaatcgaggttgaaagttgaaattgtgggttgggacatgtgattggaattgggggagagggaacgggtaagggaatggctcgtgatgggagtgtcgtccctgcggacccgcaggcaatggcggttgtgaagaagaagacgcattcctcgaggagttggattctgtttgacgccactgggcaaggcacgttgctcgacatggacaaatatgccatcatgcatagggttcagattcatgcgcgtgatct

SEQ ID NO: 107077 - DNA, 250 bp, Glycine max
ggcttgtgaacaagggcaagagagaaactagaagggtctttttgtactcaggttgtttagggagtttcttgtctgatattgagaggtttgaatgacacaatgggagagttgactatgtaggagttgaagacaatggttgaatattaaaggaaatgatggaaaaggatagaaagtgattgtgtactttaaaaatgaaggtgcgtgtgtgggtgcgagatagatagagagagacagacagagagatagagag

SEQ ID NO: 107078 - DNA, 177 bp, Glycine max
aattcaacaatggcagataactcaattagcttattttctccatacaacaagatgggcaattctccgcctcataggggatggctccattccaatcaaggctcatggatcactgcagactgctgatacacgctcagagtacacggtgattcctcactgagcacttgatcctcaactctc

SEQ ID NO: 107079 - DNA, 247 bp, Glycine max
  unsure (1)..(247): unsure at all n locations
ctttaaaattattattccgtgcaaacacaacaacaacttcatcaccaacacgaagaacaagattagcgttatgggtctcttcctttctaggaatttggcttgcaaattcatatacccttttctttttttcaattcggtttcaaaggatttgttccccaagcagttggagaacatggtgtctctggttttnnccgcgtatggacaggcttttacagcgtatgaaaagtgctgtccgccagttgtggga

SEQ ID NO: 107080 - DNA, 143 bp, Glycine max
tccagtcacttccttgtccatgggggtaacactttctccctcgatttattacctaacacggtcactataaatggtctcttgtgtttctcaccttctgtgttatttgcgagtgttgagcgtcagctggatccaaactttttgta

SEQ ID NO: 107081 - DNA, 225 bp, Glycine max
attttctggctgactgaacttcatttattgatataccaactatgttgcaactatcaataggttgttttgaaagtagatgaattacatggggtactgtatgtattgtttcttttcttgactattggtttgggccattttgatgtatgataaagtgatttttgattgggaatgaatgaatgctaggattgtgaatcgaaagaaaaaagaaaaaagggcgtccgccga

SEQ ID NO: 107082 - DNA, 243 bp, Glycine max
caaaagtgcatgtatattctcgttacttttttacgatggaccatcttaagtaaggcaagagagagtggagattacataacacccaatctagttacgtctagttcgtatagtttcttacttaagttggtcctttgtacaaaagtgcctgtatattctcgtcacttttgtttgctcttgacaccgtgtttatttttcattatttcgggatgtatatatcaggtgatttcctgtaattgagtttat

SEQ ID NO: 107083 - DNA, 228 bp, Glycine max
agcgtgcacccttccacattcttgctcgtcttcgatctctctcgatgtttccttcactgttctccataaactacggacttcagatttgctcagaataggagggaatcgaatcgaatcgaatcgaaaggaaagtgcagaatgggtggacatgcggtggctggcgctcttggagaaggcagacgattcgacggcgagcaccgtattcggcgccgaccagtagttgtgaaa

SEQ ID NO: 107084 - DNA, 262 bp, Glycine max
gccactttgagcctccgaaaatattatcctgaagcaaacttacatagaactcatcctccatgatcagtcggtgaatgcattacttgtaccagaaaaatcttgtataattgcgggaggttactgtcggaacttggaagcaactatcgacatgtattcgagtcttgtctacccataatcaagaactgctgaggctgctatgaattacgctggaaatggctgacttagtcgctaggaatagcagtttcacatgatgcggcatgga

SEQ ID NO: 107085 - DNA, 247 bp, Glycine max
  unsure (1)..(247): unsure at all n locations
cagctcgagggaaacgccaagcctacctggactgccttgcatcggtccgaggtgtgctggagcacctgaaagatcaagatagagagtatctaggtatcaaagncaaggagttacatgaaggaaaggggatagtagacacatacacatacatgacgcatgttaggaacatgagtcgaactcctaatagcattacgtcgatacagacccttagccctcatatgaaacagcacatggtaagaggccctta

SEQ ID NO: 107086 - DNA, 246 bp, Glycine max
atccattcagacaaacgtgtatcttacttggaagttccctgagagacgtttgaggcctgggattccaaacttgatttattaaacgtatagtcaccatcaaaaagaaaaaatagggggggccacagactagggatttggtcacccgggatatgatttcggtatcggaccagaagcgactccatatccccctacggggactgattttaactatgggcaagctatgggcaaaatgtgtcccgtgggaaa

SEQ ID NO: 107087 - DNA, 258 bp, Glycine max
ctagactcgggattcagttcatcaactttataaccttgcaatgcactcagagcatttatcttttatgcttgttacaatgacttgtattcctttatccatacgattctggggtgagaatattcacaaatcaatgttcaccacaagcaaatttagtctccctcctggctacgatcctaattatagagctcgtgaggtgcacatactattttaacaggctgagatcaaactacaattgaatttgaacaaatctaacatgga

SEQ ID NO: 107088 - DNA, 210 bp, Glycine max
gacagctactttggggcttctctcgctaacaaagaaggaactagggttatacagaatacaagctctctatctctaacgacggttgtcgcaatgcaaatgcaatccgataccaaatatgaatcgtcaacccgacgctaagagggctcctaggcttcataaggcctataacacggtggcatccgctcagtcaaaacttgcagaacaggaacg

SEQ ID NO: 107089 - DNA, 255 bp, Glycine max
tcgaaaccattcgtcgttctcttcaccttctacctccaatcctctctttactctcaacacctccctctgctttcatctacgacatcaccttaatcacccctcttctttccgttattgaaaaactctcttgtccctcttacctttacttcacctcatcagctagaatgttttctttctttgcacgcgtttctgttctttcagcttcaaatcctggtcaaaccccttcctcgttcatcggtgatgatggtgttaaaa

SEQ ID NO: 107090 - DNA, 179 bp, Glycine max
agcatactgttgttgaccttaattaggacttacgacagacatgcattactattgattaagtatgactaaatatattattagttataataactcctgacattatacatcattgtactaaaaataaaaatgatacacactaaaacaagtacttataaaaaaaaaaaaaaagggaaaaagca

SEQ ID NO: 107091 - DNA, 252 bp, Glycine max
ctttggagctgaagcagggtgaaacacttggccttgttgcaactgttgatccagaagatagtgaagagtgtatatcttggtggttggtcatggaggacagttttgctgaggagcaaaagcttcatatgagcatcacggatggtgcatctgaatataggaaattcctaggtcacttgtctcttgatttgttatacgcaacactgatcgacttggttggcttgtgcagtggtggaggcggccaatgaagttgtg

SEQ ID NO: 107092 - DNA, 253 bp, Glycine max
  unsure (1)..(253): unsure at all n locations
tcaatgtgggcagtactggtgtcggtgttgccgcttccactgtcccatcgactttcnacacaanatactgattgccnnnnanaccnnnanntanacaantcaaagtnganaatanncagctatcaatgttctccacaagcaaatttagtctccctcctggctacgatcctaattatagagctcgtgaggtgcacatactattttaacaggctgagatcaaactacaattgaatttgaacaaatctaacatgga

SEQ ID NO: 107093 - DNA, 243 bp, Glycine max
cccattcatacgtggtgttattactgctgctcttatcacttttcttatctctttagttctctcttcaccttgctatttctttatcttcttcttctgagacttgtttaagcttttcttccagtaacataacatcataatgtgtggtatacgagctgttctggggtggcctgatgactctcgagagataaaggtccacgtgcatgagctgtctcggagataggagcagcgaggccctgtctgtag

SEQ ID NO: 107094 - DNA, 201 bp, Glycine max
attcacatactcataacatctgaccaaatagtggcagtcaattgcacttagataccctctaatatattagcatttcagtaactttgccatttagcacttgtagggaccacagcattcaccagatcgacaacttaattcaacataattatacccctaatcccaatgtagcatagatatggagcgatattatgcataaaattt

SEQ ID NO: 107095 - DNA, 230 bp, Glycine max
  unsure (1)..(230): unsure at all n locations
ggaactcacaagttaagactggaaatgtgcgtgacattgctagtgcaaagaatgatgccaatgcgcaagagctttccgcactgagagctgtaattaagtgtattgaagaatacaagcttgaatctgagtaccctcctgatacacttcggaaaagggttcttcaactagagaaatcanaaggagatcgaaatagaagtggaggagaatttattaaacgccctcaatcaaag

SEQ ID NO: 107096 - DNA, 229 bp, Glycine max
aaaaaaaaaaaaaagggggggccgctcgaatcgtttttttcagaaattttcccacctttgggggaagcgcgagacctttgcgtgttcaagatgggagctaggtggaagaataaccgcttgggggggttaaaggggaacccccaaaagttgggacaaagttctaggtaggtgcttgaacagggatttgtcttgatgtgtttttccatctgctaccagtttcatgacattt

SEQ ID NO: 107097 - DNA, 241 bp, Glycine max
tttgcttcgcatttcactcctcgtcgtgccttgtgtccggtgacggccaatcactgcatatggtagacgaggagcaagctgcagaacatggcatccctaggcggtgacgggctttgacctccgtcagatctataccctgctctctcgcgctcgtctatctgcagattctatatcatgggcaaggaggttctacgggcgagagattgtgtcacccaacgcttcggtgtttcaacggctggct

SEQ ID NO: 107098 - DNA, 114 bp, Glycine max
ccttacataatttgtaaagaaaaacaagcagacttggagaaataatgtactaccatgtgtccaactaccattgttagatctcacactgaactcttggcagtgacccctgtgttt

SEQ ID NO: 107099 - DNA, 111 bp, Glycine max
tagaattagtgattagtatggtgtgttagttcttcaggctcacgtctgccccggctacctcttttgtatatgatgtgtctaggaagtatttaataaatgtttactgctccc

SEQ ID NO: 107100 - DNA, 99 bp, Glycine max
cccgtcccgagtgccaaagctggggttctacttgagatttccctcgtggtgccagggtccggcgagcatcacgccgaggcccatcttccacacaacata

SEQ ID NO: 107101 - DNA, 257 bp, Glycine max
  unsure (1)..(257): unsure at all n locations
cggctcgagcagcgctctattcctgtagttggatttaatagtaattcgggggatcaaggtcaccatgtgaactcagagtcagtcctgagttaattagataattggacattcatctatggaactgtttttcaaattacggcagtaaattttgcagggacaactgtggtgtttncattacctttggagcagtctgatgtggaaggaccgggtgcatgcatctaccttggaagttttaaccgcttcatatcttgttatat

SEQ ID NO: 107102 - DNA, 259 bp, Glycine max
atggaatggttttgtcgaaagggttttaatcttgaagcagaaggggcggtttacatgtcggtgaaatactgaatatagtaatccatactgcaccaatcatcgccaaggaagttattattgtacagaaggcagggatgctgtgaaccctttcagctcttcctgatatataacttgtgtctatactatcgagtttaaattacatgtcaggaactgctgaaagggttcaccgcattcctgcctgacatgtatttaaactcga

SEQ ID NO: 107103 - DNA, 244 bp, Glycine max
cgatcccgaagcagagaaaacctaagccaacatgagtggcgacgctccaacccaaacccaaacccaagccaccgttaccaaaccagaagatacccacacccacacccaaaccatcactaccaaaccggaagaatctcattctcaatctcagtctcagcctcagcctcacactgccgattatgcttcataccctaaaatagaccccaccgatgttgcgccaacactcaacactgaatctcgcgcc

SEQ ID NO: 107104 - DNA, 175 bp, Glycine max
cgttgcgtgaaagccgcgccagtagtaatggttcggtcgtaaaagggcgcccagagatctatgtattcgggtgcatataaagcatgtgctgacgagacgtaagtagatggcccttagatccacgtggcagtttaaagatccatggctgcgcccgcttttataagcccaaaaagga

SEQ ID NO: 107105 - DNA, 178 bp, Glycine max
gctcacgtaatctcctcattcaattctctaaaagagatctttttctgctcttcgacgatagaaaggtcaatgttgggttctcgaacaatatcagcataacaccttcaggatacttcgccggcaagcattccttaagagctggaaccgtaaatgatgtatcgaacgtatgcacctaagg

SEQ ID NO: 107106 - DNA, 231 bp, Glycine max
gccatgtttttccttcccctgtgcttgaaaacttcacttctccttcttatgtttcccctgctgcatcaggaataggccacttttctgtgtctccaagtggagtagtgaacagctttgaagggaacccaaatttggcaaattctgagtctcagatcaatgatatgatccctgccactactacaacttcagcagctccaaactcatcaaccgttggcttagagtttccctttg

SEQ ID NO: 107107 - DNA, 214 bp, Glycine max
tcgtagttgtttgggatatgccaaaaagtatgtttcgtagaaagtcaccaacatgcccatgccattggcgagtgtctgctacgtgtactgcaatcgcgtgatccgcgacagcgtcgtgtacttggctaaggtctccgttcagaaccctgtattccacttcgcaatcccatgtgtgagagcaagtactccctcattaggtgctgcaggtttctat

SEQ ID NO: 107108 - DNA, 244 bp, Glycine max
gttctagatcgcgagcggccgcccttgtttgttttttttgttttaaaaacgttgtccgggaaaagtactcagcgcaaactcagtttccaaatttggttaaaattattaaagttcctaattttgaaaagggatgattttggtcctagaggcctaaaagagtaaaaaagggggggcccccctgtaaggggcctcgccccccgggaatttttcccgggcgggtcccctgggggggaccgggtttccc

SEQ ID NO: 107109 - DNA, 253 bp, Glycine max
cgattaggctgagcctgcagcgacaatcttgcttgtagagaggaggttgacgactatgacgactacgatgatgtctaccatctctcccgcgtggtcaatttgcttatatattccttttggatggtccaattatcttaatatgtccttaccaccaggggaactacaagcttcggaagcactgcgacaacaacgaggtcctgaaagctctctggggccgaagctggctggatcttttatggagatggcacaactt

SEQ ID NO: 107110 - DNA, 267 bp, Glycine max
aggtgatattgtggatttggagatcacaaaggaggtggtcacagagaataaagaggactccaatgccaatgctgagaaagatgttgttgtgtcaaagaaggatgacaataaccaatcttcaccaaacacaaaagtcattgaaggatcatccaaggcaactccgaagaggagcgaaaagggtgtccgaaaagcaaatggcacttaccgtacgaggaggaataggagggagcttggtttgaaggggatcgaggagcgtattgctgcagg

SEQ ID NO: 107111 - DNA, 257 bp, Glycine max
gggacaatattatcaagttggaggattctgagttatgtatggggctggaaactgcttcatttggtgaaagtcgtagtaagaactcataccatacttcagttggccattctgaggaaaatatacatgttgaaggtaggaaaggcccatctcagatgttaaactgtggaagtgaggaatgtgaacagtgcatgaactctctagggagatcaattcctcgtcctgactctttgtacttgccaagcatgcataggtactgc

SEQ ID NO: 107112 - DNA, 262 bp, Glycine max
attgtctaacattgcggaaaaccatgaatctcgggaaggtcaatctgagtctgctgcaactcctgaacgttccccagctagggttgatgatgatgctctagaggctggtgagattaattctcctgagctttcaagtgatgataagaatgatgagggtgacttggtagaggaggctgctgatggttctgacaagttgattgatgtcaacgaaccaatatcagctgagagcgatcaagtggctgagcctgttgcgagtgagact

SEQ ID NO: 107113 - DNA, 258 bp, Glycine max
aggtttataatggagatctcagatgtctgattatgatgtatttgttgccccgatttagtagatctgttaagtcaaaattgtgagaataaattaaattaagtaaactagagaaacaaaacttaaattaggtttttttctctggttttctatgttagtatttaattttaagattgttaacagcaattttgtttgattttttgtttgtctgtttatatttccttgtttttctctagaggttcatagatctgggagtctaag

SEQ ID NO: 107114 - DNA, 270 bp, Glycine max
  unsure (1)..(270): unsure at all n locations
catatatcccacattgggttgggctttaatgccatttcccgggccaacgccgaacgctccctttccactttccaccatcaaaattttcatttttccacacaccatgcaagataagtgtttatctttaaacacgcgacataaacatgacaaaactcaccaatctaattgggatcatcaaggacaaagcatcgcagagcaaggcgcgtgtnttgttatccaaacgcaccacgctctccctcctacgcgccaccagccacgactcctccacgc

SEQ ID NO: 107115 - DNA, 273 bp, Glycine max
aacgaacctcagcttctctcttcttccatgctctttctctctcacaattcgatctcctcctcaatcctctggtcaatgcagatacatttcaagtatctgattactcgtacttgtttatggtttaatggcttgctgttaagagatcctttactgtttgagttgctaagagaaagtatggtggaagacgctggatatatgtttagttaacactgtcgtatggcaggaaatactagatttgatttaagtgcagctaaatcagacgaattggctttc

SEQ ID NO: 107116 - DNA, 260 bp, Glycine max
cgtagatgtccttgaagaacgggctaccttcgcatgacgacggcactggatctatgcatctgctcgcactctataagcctctagatatgtatacttgggggctgttcagatatatgctacgagtggcgtcctatagagtcagcatgctgcatcaacaagatccgacagatgtgatcgattactagatccaaattctcgagtctcaaatccgcgtaaagttggcagaagtccagaagtaggacgagattatagcagtgaaa

SEQ ID NO: 107117 - DNA, 261 bp, Glycine max
gtgattcgatctggttgttacaaaccacaaactcgagaactaagctaaggcaaatgaaaatatgtttgaataccctatatatgcttgatatttgacttggataaattctttttgacttctgccctgcatatcgagggtaaattccttgtcttttgctctttaagtatgcagaccatgtttagtgtgtggagtaatttgtacttgtttcactgcagtgcatcagttaagaaaaactcgtagagatcataaattcaaatgcat

SEQ ID NO: 107118 - DNA, 266 bp, Glycine max
tattaaattgtgtttgatctcacagctgcacgtgaccctgtttagtttgaagccctctctctctctatttccccaactccaagaactgagaagctagaagagtagtagtagcatagcaaaacacttgtgctctttccctccttcctccaccccaaaagcagatgccatctgagtgaaaacaaacaaccctccacacctcacattcattgatgagtcctctctccccgatcgatgtctccatccatcttcaccatcattctactcta

SEQ ID NO: 107119 - DNA, 255 bp, Glycine max
tgtaaatattaaatataaatgccaacgctggagtgatggtagtttagggcggtgttactccttctcgcgttgattaggagctatagtcttttttcactcagcagttctcgtttgtgttcttcgctttcctgaaactagggttttcaatttcgattcattcgttaataattaaagatgtttgggatggcaccgaataatatcgataatacgaggtactacgaaatcctcggcgtctcgaataacgcttcgcaggat

SEQ ID NO: 107120 - DNA, 246 bp, Glycine max
cggctcgagctttctctctgtgtctctctcgccgaggtcttgtggcggtggcgagcgctgccactccgcgcgaagagtgcgagtgcgtggcgaagtggcggacaggccgagcgctgcgaggagatggtggagttcgtggagaaggtctccgcctccgccgagagcgaggagctgaccgtggaggagcgtgacctcctctccgtcgcctgcgagggttgtgtttcggcgctcgccgcgcctcctggc

SEQ ID NO: 107121 - DNA, 138 bp, Glycine max
gttttgtcgtcattctgtgactctgggcttagttaacgttaacagtgacttaatatgtcggattctgcatatgtcacccacgatgttgtgtccctcctctcatctcctcaaagggactttcttcttccacacaacata

SEQ ID NO: 107122 - DNA, 250 bp, Glycine max
gcaaaggctttccgatattgcgtgagcagctattatagtgacattagcaagtgccagtattacgtaaacgtgctagcagagtgcagaagagattcttgagccacattgagtgcatgagcatgcttgcttcgtttgctttgccttgcgatggtatagctttggagtttgcgttggagtccatatgtgtctcgtggttacgactacgttttttatgtcactgagtattccacgttgctaattggtgaatcgg

SEQ ID NO: 107123 - DNA, 263 bp, Glycine max
gattttgttgttaacttttgtcagcaatcatgggggtaatctcaaaacaaagggaatcgtgtatttgtcgaatattcggatggtcttcgttgctaaaagtccagttggacacttcactgcttttgatatgcctttggtatgtgttacacctttcattgttttgaattgctaatgcttcatagctagcagttttaagtttgctgtttttcctgttttacgtgaagagtttttttggttacttcttcaactgcccttcttgttat

SEQ ID NO: 107124 - DNA, 262 bp, Glycine max
gtcacatcctttgtgggcatgatgatataataacttgtttatatgttagtcatgaacttgatattataatcagtggatcaaaagatggaacttgtgaattccacaccctgcgagaagctagatatgttagatccttacggcatccgtcaggcagtccaattacaaagctagttgtctctcagtgtggccagattgtgatttatgctgatgatgatcttagtttgcacctgtattcaattaatggaaagtatcttgctgcctc

SEQ ID NO: 107125 - DNA, 259 bp, Glycine max
gtcgcacggcgtgctgcagccgtcaccgctcacagaaacctgaaaccaagcaagagctccctaagccctccgcctcggatagcaagcctcctggccattttgactctgattcagcatacctgccgcctgcccatactaaacccgcgccccagctcctgcgctgcatttcctgacctctgctttctccacgcttgttccgcgaccagcccgccctctccccacaatcatggctccgcccggcttgtaccagcgccccatc

SEQ ID NO: 107126 - DNA, 260 bp, Glycine max
agcgggtgaaggtttctccgccgcgccttatcacgccgtccgaaagcgtcgttgctgcgaaaccctagacagaagcgacgccgtagatggaggtggagcccgtggagccacagtcgctaaagaagctaagcttcaagtctctgaagcgcgctctcgatctcttctctcccattcacggacacctcgctcctcccgatgccgaaaggtttcgcttcttttcccttttcctcactctctccgtaatctctctcacacaccaa

SEQ ID NO: 107127 - DNA, 233 bp, Glycine max
agctttcttctccactctctaatgtggcccaatgtgtttcaaaccctacgccgtctggagaccatgttgtgggggggcccattactgaggattttgtcccagacagagaataagaggatggtagtagtaagatggttattccgttctcgaagcgagtccttgtcattgaaggaggatagcaatacggtttctgtttcgagaaaaatgccatgatgagtgagaagctctgaaag

SEQ ID NO: 107128 - DNA, 118 bp, Glycine max
  unsure (1)..(118): unsure at all n locations
ggacaacgatcacgcggtgctcgcaatgtcctccattgatcagggatcttcttcttccgcttccgtgtttccagatcaaaantctaatctctctgcagtaaatacgtgtgtgaatggg

SEQ ID NO: 107129 - DNA, 258 bp, Glycine max
gcaatgtttagtttcatcctctcatcttttccatcaacacattgaattaaaaccccctctcataaataaaagagtgggaaaaaatggaaagagcaattcccaccaacctgaatccaaagtcatcacccacctttaaagatagaagtgtatctttttcttctcctcatcatctcacacctgatcaaccaaacaaatctgaaccaccccatgctatgatgatgaggcctaatgatggacttagaactctagaccctgatc

SEQ ID NO: 107130 - DNA, 261 bp, Glycine max
attcttttctccctcgcacgcacgcacgcgcacgcaagcaaacgaaccaagttcttcttggtcttctctgcgataagatcgcacaaattttggaaccctaatctactacatttcgttttggaccttcatccgaatcgtaaaaatcactccctgcgaatcgaatcctctttctgacgtcgatcatctcgtcgactgagtcatttaaccctaaacattttacatggctatgaccggtaaccattcccctcgccattcctctga

SEQ ID NO: 107131 - DNA, 142 bp, Glycine max
  unsure (1)..(142): unsure at all n locations
ttgcaagttagcaagaaagaaacagtgctcgctcgaatttcgagaacgaaagagccgacgaaaaaatgtacaccagcggtggcgatgaagctgaaccggaatctgaatctgagcgnaatagaatgggtgatgatcaggacga

SEQ ID NO: 107132 - DNA, 194 bp, Glycine max
gacacaacactgctccatttcagtcccaagacccacacacaaccgaaatttaattgcaagattgaatttgattaaattcccatttaagatcatgagaaaacggagtaacaaactttcgttcaatttcatttttcttttacgtatccaagaagtttctcataaacgattcctcagagagttgaaaacattttcaa

SEQ ID NO: 107133 - DNA, 258 bp, Glycine max
atcagaatcatatagttttcggggattctcatatgttgcaagagatgtggaattcagaaacactcccagattggtatttccgcaatttaacttccatggtcgtggaagggtgtggatttttaatagatggaatactaccttcccatttacttcattttctcagtaacttaaaaaagttgcaagtgcggaaatgtaattctctaaaggcaatatttagtatgggacctcaaggaagtctcagccatctggaacaacttc

SEQ ID NO: 107134 - DNA, 260 bp, Glycine max
caacttttgtctcaaaatgccaacttcttttccctatccttcttccatttgtgtatgttccactcctcccatgcatttttggccttttccaccttctcctctctatgcattatttttccgtcaccttttctcgcctcttcatcactctgaattctgacccttcataccttcaaaaaaattccagtcttcttccatccctcgcttgttttctccaaaatatcatctgggtattccctggaatttagtggggtgcctttgtt

SEQ ID NO: 107135 - DNA, 271 bp, Glycine max
tctctctcaaacagggtttaaacgttgaatactcattcatgggtttgtcttcaacgtctcatgtaacggtttgcctaatgggaagtgctggaagaactgattatggtgcatacacctatgagaatcttgagagagagccttactggccatctgagaagcttaagatttccatcaccggtgctgggggttttatcgcatcagacatagctcggcgcctcaagacagaggggcattacgttattgcttcggattggtagaaaaatgagcacat

SEQ ID NO: 107136 - DNA, 249 bp, Glycine max
aggccagcacctccagaattaagaggaagaagatgatgaagaggatgaagataggtaagataagtatcgaaaattctcattgcctgcttgtttattacatagctttatttatagtgcttgttaggctgtcccctgaggatagacaacactaaggcaagcgaggaccctcaagctttgtccgtttcttcacacgtagtcactgaggtatgcaggttttgtgaacttccttttggacttttcttctatttg

SEQ ID NO: 107137 - DNA, 194 bp, Glycine max
accattcttttgccccgggggagtggtaataattcacatgttcatcactatagacaggatgataatttaactatgctttctatagtgatgaacatgtgaattattaccattcttttgccccgggggagtggtcccaattttgtaattgttaatcttgattttttggggtatattatgagtgtcaaatgtgttgt

SEQ ID NO: 107138 - DNA, 272 bp, Glycine max
ccgagttagttaaaagtgctgccttacgatctattactcgatcgaaacgagtaaattttattggtcaaatttcaccaccattatcaccgtcaccgtcaccatcatcatcaccaccatctccaccatcaccatcatcatcatcatcatcacctgctgaaagtatcataactcctatccctgaccatggagaatacctaatgagattctctttaggcactccgagtgttgaaaggctgcaatttttgacacggggagtgatctctcttggctac

SEQ ID NO: 107139 - DNA, 256 bp, Glycine max
gtttcgtttcgtttcactatttttttcaggtgaatattattgcgcttttcgtgtttctccccgaaagtacaaataacgcattgccttccctattgtctctgtgtccgtgtttggctgcccataatattacccatttttagcttctgccaaacaacaacttgtgcctttttttttgtctcctttcttatttgtttctttttagcctttttgtttttttattggccgccaaactaaaaacaatatcagtatttgcgtc

SEQ ID NO: 107140 - DNA, 258 bp, Glycine max
caaaacctcctctgctgcagagggaaaaaaggcttagtccacaacattttccaaacataaacaagtcagttcccaaatggattctacatcagttcacaaggacattgatgaacctttgctggtctcaaacgaacttcacccgagccaccttcttgtactcaatcattcagctcaaagcatggatcagatggtgaacttgagcgaatactctcaaacactagcgtccctttcgcgaagctcttggaccggcaacatggg

SEQ ID NO: 107141 - DNA, 239 bp, Glycine max
gcacaaggagtatttgtgtacctggtcatgacgtgtgtgggatcctgaagctagctcagaaccatattggttggagactctcaacgctggcaagccggcactaactatcagccaatgggccatccaaaatagccgctaccacatcaatgacacacttctgttcaagtatcgacggaattccacgacgctggatcagagtgtgtactgtactacacaccagtagagctacataacgtgcg

SEQ ID NO: 107142 - DNA, 267 bp, Glycine max
ctggtggtcagatgaaagaaaactcaaaataagcaaaatggaaaaagaaaatcagctggttgatggaaagctggctgggttgtggaggtttcgttcaggtcagtcagggtgtaaaccaaactggtcaagtgctgaatcaccggtttttcaggtctggtttttacaactatgatccgcatatcagttactgatgtattccatttttctttctgtacgaggaggggattgatacgatggtcagcccatttaattattttttaccagcct

SEQ ID NO: 107143 - DNA, 266 bp, Glycine max
cgtggatctaaaggacgctgttacccccgatgttctagccaccaaggacaagaaggttaccgctctcaaggagacgaagaagatcgtcaagttcctgatgcctaacaaggcagttatcgtcctgtacagccgatacgccttccgctatgcggagctcgtggtgaccttcgttgaggacttcagaatgttgccttacagtatatggtatcgtgtgttgcaaatctgatcacaactattattctgctcttagattcgtcatcgtcgcc

SEQ ID NO: 107144 - DNA, 215 bp, Glycine max
gcacaaggagtatttgtgttccttgttattacgtgtgtgggcgccgagagcgagcctagaaccattgtggttggagactctcaaggttgccaatccggtactacatatacgcaatgggccatccattataggccttccacaagtctgactgccttctggccaaatactcaggtgggtccacgtcgcaggctcaaaatcggtgcgagcatctggcc

SEQ ID NO: 107145 - DNA, 227 bp, Glycine max
cattcaagtcgataatccgagatccttcaactcctcgctggcagcaacaggagtactaccagcatccgcgtatgtctgaagtgatcttcgagaattagcgatgggaatttgaagcggatgcttcacgtgagtcaggagcgcacgaatcgtgcggcccaagccgtgagatgcatgtacgcttgcttcagcggcacatttggatcgacccgattccgcgtgtctatgca

SEQ ID NO: 107146 - DNA, 243 bp, Glycine max
accagaccctgatgtcaagctgatagcttaccaaggagaatctccagatgaacaagcattagcttatgctgccgccgcctatggttttatgctctgagagagaacctctggccatatagtcattgatattcatggacaggacaaaagttcaatgtcttggggttacctgaatttgacagtgaccggaagcgaatgtcagttatactgggggacctgacagttctgtgaaagttcctgtcagag

SEQ ID NO: 107147 - DNA, 255 bp, Glycine max
cgctctctattcttcagatttatgcctttcccatttttttccttaacataataacaattcaatcacacgaactctgaaccttacctgcattttctttgtctgataaaggcttctgtttttgaggcgaagaaggatggaattgtaatgctggtaatataattggagaattgggggaggagtaagggaggaaatcatacacaatgcccgagttccccttgagctcgaggttggaaagggtgcaaaatagcttgagag

SEQ ID NO: 107148 - DNA, 214 bp, Glycine max
attctttaagaaaagtagtgatcctaaaactgatattgcatcattcgtgaatgatatcaaatgcaattactgaaaataattcggctaggcctagatgctaggatttcaacttgtatgctttctacttttcgtgtacaattcttttgatgttttacttcagtgtaatgtaataacctgtgaaatgaaatagtggaagatgaactttagccaatat

SEQ ID NO: 107149 - DNA, 239 bp, Glycine max
ctcgagccgattcggctcgagttggtactttcatgttgaatttaatcattttatacacatgtgtgtgtgcttgcatcaaaagctagttgcttaggcagaccaacaacttgcagatccttttggtttgtcgattatataaattatctaaaaacactgttgtgaaattttccagattgtgctcgctataaagctagggatggatccaaaagaggcaatatcaaaagtgagcacactgtctg

SEQ ID NO: 107150 - DNA, 187 bp, Glycine max
ctcaacaagaaatcactgactcatccctctccaacgagtcacgcacttccactccttctgaaggcccgccaggcaactcggaaaccctaattctccgctcatcgcatctgcatgaccttgccactcatatcacagggcagctctaccgcacgtaagggaggaaaagctgcgcataaggtgtctgctc

SEQ ID NO: 107151 - DNA, 103 bp, Glycine max
cgcgtcctcgcgtagagttcaagttcgagacacaattgcgtctcgcgacaacatggcagggcagcacgcaacgacgctcgctcgcaataacgtcatagtggcg

SEQ ID NO: 107152 - DNA, 249 bp, Glycine max
caaatctgtctacagaaacattaattaggagaagcctgcgatggataacactactaccacccactcaacaagttccacctattcaattactctcctccttttgagggtcttaacctttatcttccttgttatggcgctcattttcatttctataaacaagctaacatttgatgaaattgatgcagaaatcaagtttcatgatgtctatgcttatcgatatatgctctctacgatagtcattgggtttgc

SEQ ID NO: 107153 - DNA, 246 bp, Glycine max
  unsure (1)..(246): unsure at all n locations
attcgacgatactagaaacgcgcagcgcaagcatcagcatagcttgctcagatgaaagtcttggcaacgacgctcataggcaagaaaagtacacgagaagtaggaagcgcagagactattgcagatgtcaaggacaagctaaagagcagnggaggaatgaccccgggatagcaaagtctgatatgggcggggaagcagcttgaggactgacgcatgcgtgatgactagatgattcagctggagagt

SEQ ID NO: 107154 - DNA, 204 bp, Glycine max
gccttgcggcttcacggcgcagcacatgttcgcttaaggtgtgcatccttgtctcgttctagcctgcatggccgttttcagctttctcatatcgaatgcttctcctgagattgacgcagttaggcgccacgatcggggcagacgtcaccgagcaagacctcttgcaatccacgggtggagcacgcaccatggtttcgtgctcac

SEQ ID NO: 107155 - DNA, 223 bp, Glycine max
  unsure (1)..(223): unsure at all n locations
gttctagatcgcgagccgccgcccttttttagttttttttttatgtttatttgtttttttttataacgtacgccgggggttcgaaaaaagttgtagaaggggcagaatcggcaaggagggaagcacctgcaaggggaaatcgcttgggggagaatttaaacaattccacgcaatataagatacanagaggggggtggaaagaacaagcacgaatttggttgcc

SEQ ID NO: 107156 - DNA, 197 bp, Glycine max
cgtgattctcgatcttcagattctaccgcatcacgtcaggtgcactgaaattctacgcgtgcaaaatctcagcggacggccagatcaaccgtgacgccggcggatgtccgggcggaggcgcaccttgccatctggttccgcagacggtctgagacggtcgcatactgaccgtcggaacttgatgccgtgatgctcgc

SEQ ID NO: 107157 - DNA, 239 bp, Glycine max
gatcttcagacgctatgttgcgctcgtgactctcatccacttcactcttccagtcatcgtgttctatcagtgagtgtaccttaagccacacctgcgagtcaatgcttctatgtcaccattctaactcttctctgctattctcgagtgctactcacctattcgttgatgtgtattcgcagtcacctgcgtgtggagtccgcgctccgttctcgtatcaaggacaaagatttcgcttcggg

SEQ ID NO: 107158 - DNA, 185 bp, Glycine max
  unsure (1)..(185): unsure at all n locations
atgggagatgtttgacagttggcaaagaagcttagaatcttccatgctgcctgtagcttgtctcccttacccttcacatccattccctcacaataaaaaacactccatctccttttcctcattacatctttctagcaacccaaacactgcctncaatcccccatgtctcaatgaagtcgcttcct

SEQ ID NO: 107159 - DNA, 233 bp, Glycine max
gcttcttcatcgttgctctcggagctgattgtggcgatctggcagaataacgacacgggtacagacgactgaaggaattgctcctgggctgaactcgtctcgcaggatcatcaatagcatcctcttcgtcatcaggattacgagggacaatatcgtggtcactacgcagagcaccaatctcgcagttcctacaatgcccagtctgtagatgaaggtgaagatcgatggctccc

SEQ ID NO: 107160 - DNA, 215 bp, Glycine max
ggttaagcactctcttgttaaaaaaattatcttagattagcgtgatcgcgggcatagccctacccttatccggcgcaatcgtaaccctataccaccgtgacgatgccgacggtgcctaccgtagtgatcagccccgggttctgtgcgccataaccggtgaatctagaggtggtgaagcaggtgatgacgctctccgacgggaactttctggtcac

SEQ ID NO: 107161 - DNA, 272 bp, Glycine max
gtgcaacatcatttatttatttgcatcgcttccattgttcttgacaacactggaataaagtgaaaataaacacaacacatcctgaataactgttcctattttgtttttcttttaaaaaaagacattatcatctagatatagtactagaaagttatagcttttgctttggcttttaatatattcatccttgctcctttataaaatgccttgtgattattattgtcatgtgaccaattgatagaaggtcaaaccatattgtgttttatctgtaa

SEQ ID NO: 107162 - DNA, 256 bp, Glycine max
  unsure (1)..(256): unsure at all n locations
atctaatcatatggatgtcccatcagcgctacatatgacacagncacggtggttagctcacttcatatacagaaacttccgataaacttggctatgagcatgccatccgctgagatgtgaatcccatagatctcantgtctaaaacgatgtgtataggctatagtgcaggtccactagaatgaagtcactggcacttcagtagactttataaattatacaagctgattcctctgagacgagtattcgcagcctcaa

SEQ ID NO: 107163 - DNA, 259 bp, Glycine max
gcagcaactgattctcaacggttggtttctggattatctgggacctctgtttcccattctatggctaccccaagcaccacaggggtagaaccaagcactgtggtaactacgagtgctgcacctacaatagttgccggaagctctggactagctgagaattcacctcaacaacccaaaatgccacccgttgttgaaaatcaagcatctcaagattttgcttctgcaaatggatcttctcttcaagatatcgaggaagcca

SEQ ID NO: 107164 - DNA, 265 bp, Glycine max
aacagggttcggattgtgactgtgactgcggactataaacgatgacgatgaattgagaatctacatcgatatcgctatcaagcaatgaaggagtagcatgcagtgatgagaagagaataaataggtgaaatgtattgctatgagaaacagtgactgattgagattaggagtcagaaaacgcgatccaaaatgcagcgaccgagttctggggatgacttggcctaaagaggtgagtacaacccttctactaactatcctgtggcac

SEQ ID NO: 107165 - DNA, 272 bp, Glycine max
gaaacagctgtctgattgggtgggggacgatgatgtcagaagagtttctgttatagtggctatccagaagcacagcaatggaaaatttgatcgtatatcacggacaaaacatgttaaagatttcatgtcacagttcaaaactgaacctggttgcatgcttttcattcagaacttaatgaacctctttgtggatgaaggtaatgcccttgaggaaccttcagatcagagtcaaactacagatgaaaattctgaaatagggtctattgaggata

SEQ ID NO: 107166 - DNA, 264 bp, Glycine max
gtgatagaagatttcgttatgtacatcattaacaaaatcttctatctctatactaaaagattttgttaatgatgtacataacgaaaagaaaagttagaccaagtgactgtgctgttttttgaagagtataggaggaaggctggaaaagatgaagaactggaggagagattcagatatccttcctgtaactgtaagtgatggaaagagaactatgaagaaaatttttgatccacaggaaccactccttcagaaatggaacaaaat

SEQ ID NO: 107167 - DNA, 263 bp, Glycine max
agggatatggctaattatccgcctggtgacaacctctatgaggagccactggatgaagctgtgacaatgactaggagtcatggtgaatgggacatggaccatgggacacagttgactgaaacagcaaccagctatacaaactctgtcgcagcagaagatcgtggtgaactatcatctttgccacggtctgatgacaatgatggaagccttcaaagtgccacagaacccattgttcccgagagttttgaggagcagatgatgct

SEQ ID NO: 107168 - DNA, 259 bp, Glycine max
attgtttctctctctaactggaaaaaggaagaaaaataaagtacaacagttagctttttctttttctccaacgaatgaagctcaaaggcgagagatttatggtttgagttcccgtaaagccttgaactttgtggcttcttttccattttcaccgtacctttttttttaggcttcacatatgtcttcagatataagctaagtttgattcttccctaacctctttggagtttacattcagccatggacacttgcaatgctg

SEQ ID NO: 107169 - DNA, 171 bp, Glycine max
tcaagaatccgccagttgttcggtatcttgttcttgctcactgtcatgatgtgcattctgtttccaagccttgtgatctatgtcagcagcagggtcaacggtgcctgctgtttcaggctaccgctttggttggtcagcatcctaggagttctgatcactgtcggatgccct

SEQ ID NO: 107170 - DNA, 257 bp, Glycine max
gttacgcatgaatgagtagtaatcaatatgttgcttttttcttcttgttttgttatatttaaatgagtattttcctttggtcatgtccttgttctttttaaaataaaatacagcatcattattgaacatctggtacaatcttaaaaaaaatagtacacataaaattatgcataattatgttttgtcattcacttgtttttttatcttatatatatatatattaaagaaaaatcttctagcaacaaagagaattagaa

SEQ ID NO: 107171 - DNA, 242 bp, Glycine max
agcgatcgaagtttcacatcagccttatccagtttagggtttcggttccttaccctacctttgacgtatcgaaaccttaaatttgggattaggtctgagcaatctggttggtagaacctttggtcttagagagtcaagttttatgtctggattagacgatcaaattcctactgccttcgatccttttgctgatgcaaatgctgatgactcgggtgctggggtcaaggagtatgtgcatattc

SEQ ID NO: 107172 - DNA, 256 bp, Glycine max
gttgtactaaacactccttgtctcccctgaccctcagttttgccttttttgtgaaaaagtgtctacagagaacaaaacagaacggaacagagagagagaggagcttctctacttgaccatctggagagacatggagggtgcacactggaggataacagatgaagaagcagggccatcctcttcttctgggattgcttcaactagacaacaaaacccacctgaaacttttcatcataggaaggaggtagaagaagaa

SEQ ID NO: 107173 - DNA, 282 bp, Glycine max
gagatggtgatggcgtggaaatggatcgtgcgaaggacccgcgaatccaagcccttcttccttgcattcgccaccatatgcggcgtcgttccgggcgtcataggctatggcgtcatgcaactcactaacacccgcaacgagaagctcgagtcacatcttcgcacaaatgcccgtcccgaatcattgtgtatattttcgcggctgctggttgatactgttgtagcggttttggctggggttaagccatttgtgctgctatatgtatgtcattaacctacatga

SEQ ID NO: 107174 - DNA, 206 bp, Glycine max
gtatttcaaactatttctctagtaatggtggcaaatgggcttatagcagcactggagtatttctaggacatgatatagctgattatgtagcatcaattctgcagtgcatgccctgtagctgacgacatgactccatgacagcccgcatcatgggacctgctcataattactatggacgttgtattctcctaggtaacaatcaagtg

SEQ ID NO: 107175 - DNA, 186 bp, Glycine max
cggcatgaatgcagccggaacaattcttggcattaaccttatcgaccatgcaggacgataaaaattagctcatgctagtgctgggaagtcgaattgaaacgctagccgtttcagtcttagcattgtagactaaggcatccaccggagatgtcgctggtaaattccaacaagatttcgtggctaagc

SEQ ID NO: 107176 - DNA, 270 bp, Glycine max
gcttgcactcatagcatccctgcattcgtgttgttatttgccgcccttgtctcctcttctcaccaaccagcctacttaatcctattccacacaaggatggtatcaaatgagactgagggagagggaggctacaacaagaaaagtagtaggtggatagcaacaaagtcatcttcatgtttgtttattttattctcgtccttgttgataagcatagcaggaggttccatgcttggattctggctacacaaataccatccatcaaatacccaa

SEQ ID NO: 107177 - DNA, 251 bp, Glycine max
cgtcggaagctccctctctaagtggccgcgaccgcgggcgtgcacggcgttggttccccttctacactcctctcaactcggaactctccaggacatgtgaaacttgttcaaattcaggatgagcaatgaacaatatttgaatagacagttgttagcagagaagttggtgaaaatcaacaattcacaacaaagcattgaaatcacttcccattggtgtatttctcaccggaagagagccaaagaaatagttg

SEQ ID NO: 107178 - DNA, 270 bp, Glycine max
tattgttttctggctctcccaaccatggaaggctggaaagctggtgccgatgccacactggcctcacctgacatcgacgccgacacggacgccgacggtcctttcttcgacttagagcttgccgtacccgattccgaagaagacgacactaatgataataacaacagtgactcagcctcagagaaagagttcaagttaacgctttctccttcaacttcaagcaatgatttcatcttcaactcccaacctaataactccaagcctcagttc

SEQ ID NO: 107179 - DNA, 266 bp, Glycine max
caccacctccgcccttaggtgcaaaaggtgccaatgttggagctgatccaagagggaggggacgtgggtatgcacgccctgcaggaggtggtgcaatggcaccccgacgatcctccttaaagccgttgcattggagcaaggttacgagggcattacaaggaagtttatgggaagaattacaaagacatggagaacctcaaattgcaccagagtttgatgtttcagagctagagaagcttttctctgcaaatgttccaaaacctacc

SEQ ID NO: 107180 - DNA, 232 bp, Glycine max
cgttcacatcccatttcacaaagaaccaacttgatcatttatgccatgtaaacccctgaacaagtcagcaatgcgtttaggatgataaattaatgtgtacatttgcaggaattatacaaattagtgtttaggctatctgtcatgagaacatacattcacaaatgaaatctacacatgtttctagatgtctcattgattaatgtttttcctcttcgcatggtgggatatacag

SEQ ID NO: 107181 - DNA, 168 bp, Glycine max
ggggaagcgaaggtagcagtgcacgactgcacggtgtgcggcacgtatgccactgatgtagtacatgtgtagctggtctggggcctcaaggatctcgtctgcaactcttgcggcgtcacttccggctagtgcggctagctcctacggccatcccctcatgatggctgg

SEQ ID NO: 107182 - DNA, 219 bp, Glycine max
agatctaatcactcgtgtagcgggacacatcattctcttctgattcgcgaagtactcaacgatcccaacccaatcgcaatcggaagcaatcgatcagtcaattgcttccggtacggcgagcaataatggcctcggcattagagatttctccggcggaagctcgcaaagctcccggcaatgatcaggtagatgccggcgtcggaatcctcctgcagatca

SEQ ID NO: 107183 - DNA, 263 bp, Glycine max
gatattaatggcagggggactcaacagagttctaatgggcacatttggtgttagcggttcatccttgacagacaatgttaaaccatcattgactattcaatcttcacaaccagtgcttccaatctcctctaatgcttatgaaacccatccattgttttatgatgacccggtcattcgccatggggaggctagtcaatatccactacagcatggtcttggtccttctaacaactctgctcacaatatccaagagattccagttt

SEQ ID NO: 107184 - DNA, 117 bp, Glycine max
gctcactctgacgcactcgctacactgtcacctacagagcctgggtctattaagtgtagtgcgagtcatctgcgtcgattacgtagtgtagttgcggctatgtctcgagcctcttct

SEQ ID NO: 107185 - DNA, 241 bp, Glycine max
  unsure (1)..(241): unsure at all n locations
gcttcgaaggcatgtgacaaggaacctcagcgagcgtttcctctggggtccattcacaatttcacatttcacgagtcacattcatcaattcatattcattcatggtccttctacaacctccttaatntcatgctcttcttcttctacctntgtctcacgcatcaccggttcttagtctagttctgtctacgtgtggtgtccnatacacgatagacaaacaacgataacacacacacaacat

SEQ ID NO: 107186 - DNA, 272 bp, Glycine max
cgaggtcctgatcgtggctatttgaatggtacctgtagcggcttcattcgcgcttgggataacatctgagggtacctaggtaggatggtacgatgggggaatgcattgcttttgcagttagtcttgtaattgatgttacagctatactgtgcattataagctgtcgcttcagctccgacacctaaatgcagataagatgaatatacacctggatgttgttagtggtggtgaatgggttgaaatctctctgcatgtcatccatggttaggatg

SEQ ID NO: 107187 - DNA, 210 bp, Glycine max
  unsure (1)..(210): unsure at all n locations
gcgatggggagaggagaaagatggaagagtcgcactcaaagagagcatttccagcagaacagagagagtgcttggactcttcctacgctctgatcagatcttcctccgacatacgattcgatctgcatcctacgcagtcacacgcgcatcgacatatacgcgagaggatcgtcncagcgatggatgatcggaagtccgatctggccgaga

SEQ ID NO: 107188 - DNA, 291 bp, Glycine max
ttctcttcgtccatttcctttggtatcagaggaatttgtctgaggttagtcgatttccttctcgtcttgcattagtggagaggttcgcggcttcgctgcctgggaggcgacgttgatgcgatacttgctctggcatacgggttactgtaacgttgtgacctgaccactggtggctttcacgtataggatacattctgttcttgtcatatgtaatgatccattgtcatttgtggaaaacgttctatcagattagtgttatcgtgaccttgagtctgcagctgctaaacgggg

SEQ ID NO: 107189 - DNA, 286 bp, Glycine max
aagagctagttacaagttctgacaccaaaacatccagtaccaaggttgctccggatactgcagacaaactaactgaacagatgagaagggcatttagaattgaggcagttggactgatgagcttgtggtttagctttggttcaagtgtccttgctcgttttgttgttgaatgggaatctggtaaagagggttgcactatgcatgtatctcctgatcaactttggcctcataccaagtttctggaagatttcataaatggaggtgaagtttcaccgcttttggattg

SEQ ID NO: 107190 - DNA, 151 bp, Glycine max
ctcaaatccagatcgtacggtgaccgaatgatgcagactctcgcctaccgcggagcgaacattcaagatgtccgctgcaacagcgccttctacgcctcttcggtgcacccaacaacaacaacaacaacaacaacgcagacgcagatgtgag

SEQ ID NO: 107191 - DNA, 160 bp, Glycine max
gagccagatcggtcttaagctctgtatgctctgctcccactgagagttcaggcgtcgtctcaacaccacctctcgcatacgctgctgctgcagcatgtgaaatcgaccgggtgacctttctaatctcagctgctgtctgtgtactagggtcattccgatc

SEQ ID NO: 107192 - DNA, 254 bp, Glycine max
agagaaaacgcgggttttgtttcgtttcgccctctttccgttacgggtgcagatcattggcaggagaccgtacctgcgcgcggagacatatcttaaacgcggcggcatcctaacgagtcgaactgcaccggaggccgcgaatgcagctcggggcgcgctccacgacgatgagcgccacacgcgctggcggccacaaggcaaggcttcctccggccactcggcagatggttcagagtctacagcagctactgagc

SEQ ID NO: 107193 - DNA, 251 bp, Glycine max
tggattctcagggcagcggtcttcacgttccgcttcttcgatcattccaattctcaactacacatcggtccggaatgggctttgctggctctaacattgtcgtcgtcagctctccctgctcttgtggctgatgtgcccttggatcggagggatcaagtgccgcattggaaggtccgagagctggatcatgttgatcttagattgcttcggggtcaccctaatgggcctcgtgtcgatagctagtctctctc

SEQ ID NO: 107194 - DNA, 136 bp, Glycine max
cggacatcatggggtatcagagtttcaggtggttcgaactctgacccatgtggtacggcctgtaattcgggtacaggtacagctgcaaccccaacggatatacgttattctgaatctgttggattacacgatattt

SEQ ID NO: 107195 - DNA, 283 bp, Glycine max
ctctgccttcttggtcagatacttcccactactcctactccaccctcactcaccattacacaacacaaaattaacaacaaagggtcttttatttaccccttttctacacccatctgattcactacttcactaaccccacttcaattcaaaagctcatatttttattcgcttttccccttctcaactcccaactctcacaccccttttgtcctttttaccccctgcattcttctgtcaaaaccctagatttcaaatctgggggtttgttttctaagtcagttca

SEQ ID NO: 107196 - DNA, 132 bp, Glycine max
aagatttcaaaggtgggatggatagtcggagaagttgttggtttcagcatccaggagcagcttggcagatgaaacgcatttacgaatccatatccaaatgacagggccggactcgcactaccatgcatgctt

SEQ ID NO: 107197 - DNA, 262 bp, Glycine max
gatcatttgattatttcaagtggagtggttctcataaaaaataaaatagaatcaagtaaagtggtcagatatatagacatatagtttgtcttcacgttaatcggatcgatgtaatctatttacgtcgtcgagttgcaagtgcagcgagaaccatgcatactgacacacatgggattggtcctggcgacttttggttttcttaaaaatggaaactattcttaccatacactatgagaaggtaggtacagtagtattgttgaaa

SEQ ID NO: 107198 - DNA, 175 bp, Glycine max
cagaagttgtttgccgttcttatttgccaaagtcaaccagtttccttcatgcatcaaaccattctagcccttgtcttctgcagcatggggaactttgtactgccataaatgcaggttctgtatctgctgatgatagagttcaaaatgaatctatgttacatgcatccaatatatt

SEQ ID NO: 107199 - DNA, 102 bp, Glycine max
ctcgagcgcgtttgtagtggaagctctacatacgcgcactgaattcaggagatctaggcccttactgtctgccaatcatatttgcgtaggctaaaagagaag

SEQ ID NO: 107200 - DNA, 252 bp, Glycine max
gttatggtcaactatagcaaggcgtggttgttcaaagagttgcattgtttgctgtcttgtgctacaagcctgagaagaaaatcccacctgataatattagttatgcagttgaggagattgttctctttggacattaactgaaatatgtttgtccactttcttgcaatggacatgtaggagaaattatgcttcttcctttaaaatgaggagacatgcccttctgtaaagaatgtccttcttttggattccgat

SEQ ID NO: 107201 - DNA, 253 bp, Glycine max
gcctttgtttgttctcaagagctgaaacatggtgcttatgcttggaagcaagctgtactacagaatgttcatgaccagatattatctagccagaaaggtgttcagtatatccttgcacttggagaaatttatagagtcgcagaaattattgaagcttcagccaaacttcataaaccttggatgttgtcaggtgccatagatcataaaagtttatgtgcccttttgaatgaatgttatagcatatggttggctt

SEQ ID NO: 107202 - DNA, 204 bp, Glycine max
aaagtttcttaggaaccgtggggttttgtttttgttcatcatgcttctcattggtagagctgcacgaaagcgttgtgaaccctctgaatttagcttcacacgatcaagttaggagagagtggtgatttcactgtttcaagtgtgatcatgatgatggtttggagttaatcaactttgttctgtcggaaggtttctgcttatcgt

SEQ ID NO: 107203 - DNA, 252 bp, Glycine max
tgataatgagggtaagatatcaagcatcccacgggcggtgcgaaagaccaaaatgcgtaacatggtgacatgacatatgagggggatgctgattgggaaattttaattgatgatcaagctctaaatgaaagtcaagttatgacagatggtgaccgcactcttagatcaagattgaagcatgattcctctttgaatactggtgaagactcttaaaatgttgcagtagtagcagtatcagctgggctgaaagcg

SEQ ID NO: 107204 - DNA, 252 bp, Glycine max
ctgagtgctgcgacccagtcgagctctcattcgacatggtcgtcacgggacatgaagacctgcgtcgagcagccgatccgcgagaattcgcactctctccagatcgacaacgccctccgccgttcgcgacagcgagtccgatcggcctcaggagtactacaccggcggcgtcgagactggcatgcatatccaagatccttcactgggaaatcatgtgcacgaacttcgcgatcaggctaggcaacttggggc

SEQ ID NO: 107205 - DNA, 273 bp, Glycine max
cggtattgaacatgctgtatcaagtgtgactgtctatctaatggtactcgtgtacacttcaacgactcctttctctgttgtggcttcaattggtccagcgtttttcctcgtgatcgccatatttaattttgttcttcagattaggtctttggtcacggagaaagagcttaaacttcgccaggcaatgactatgatggggctttacgactttgcttactggttttcctggctcatctaggaggcagttgtcgcaatctatcgtcctcctcatag

SEQ ID NO: 107206 - DNA, 164 bp, Glycine max
ctaaaatcagaaaatgagtctccaaagcaacctcttatctcttttggttgccttggccgcagtttttgcatctttgaatctgataaatccaattccacagtttctcaataatttcacatattttagtctcacaaccttgtcaccatcatctgcatacttggcaa

SEQ ID NO: 107207 - DNA, 254 bp, Glycine max
gttggacctcagtctgggttcgaatgggactgagtgcgttactgctgcgttgtatatctggagtcgattggctcttttcgtattccctcatcgtgaattggcttgactctctcatcgctacagtactaagatctatgacatgtctcgttgctcgtgttttggaattgcaagttatgaccttcaatgtctacatctcggaatcatgtgtgtatcttgcaatacatcttatatgtatagatttaccacttcatgtg

SEQ ID NO: 107208 - DNA, 260 bp, Glycine max
ataatcttccccttctctctcctctccccatctccctgatcgggttctcatggattcaagtactgacatcaagctatgatcaagccttatggggctccgctttaccatctatgtgtgctacttcagcacttgagaattaccaccatgtcgaccatgagtaacaatttcatagaccgcgaccatctctactcctcatggagcttctcaaagctcatggctatcttcttactcgtaatctccatctcctacctcatctactc

SEQ ID NO: 107209 - DNA, 249 bp, Glycine max
agatgtaagtgtgggtttttctgggtgtactagaaaaggcagttttggtttctggccatatctaatatctttagtttctttgttgttgttctccaatctgcactgaaacgtggctgaatgcctctctcagtcccagccagagcgagaatccaccatctccatggaccctcctttttccctaccatttccaaaccaaaacaaaaacccatttggccaacccttttgcctctgaatcgcgcattcgggtgc

SEQ ID NO: 107210 - DNA, 244 bp, Glycine max
atttgattcgttatttagccaagtggttgaagaaatatgagaggtttcctcaagcaggaccgtgtccaaaagcctcatcagtttcagaggcttgtgaatgggttcctaaactcgaagatgttataaaatgtcttggcttagtgcttgatgagaaattttcttcatcggttaaacaactaaccacttcttcaattgatctcagctcctcatgaaactgtggatgtaacaccaatgaagagctgag

SEQ ID NO: 107211 - DNA, 239 bp, Glycine max
caacacaatctcacccctttatgttcagatgaggagtgcgtagatatacatttctctatgtttggttgctgtagctgctccagttatggttttgtaacctctctaagttcaattcttttgtttctagtggcaacccaaaaacttgggttccatacatgaccaacaaagactgttcacaaggattttgtagcttgtattgtccacagtggtgctatgtaatctacccgcctccgcctcct

SEQ ID NO: 107212 - DNA, 248 bp, Glycine max
gtttcagcagattttcccaacttgactcaaattggcatggtagaggggcatgaagggaattatgggatattggagccaaataaaattgggttaggaagagatttctcccttccttcactagaaagtagaagcattgaaagcaatagtgtcccaattgatgtgaaaagccataacaaccacttcaattatggttccttcaatcacactgataaaattcagggctccaaagtagaggacttaattgagtt

SEQ ID NO: 107213 - DNA, 191 bp, Glycine max
ctctaatccatgagactcgttcttagtctttctcccgggcggtagtccatgtcactgtagactctccaccaccaactgtctacctgaggatgatactgcccctctggctctctctctaactgtctcagcggctaactcagctgcaccatggacgcaggtctgatgtacactcagtgcatcgactacgccaa

SEQ ID NO: 107214 - DNA, 285 bp, Glycine max
accacctttcatgatatctatttgtatgttggaataagttagagaaacatttaaaaaaaaaaattgaataaattctattcattaattgtaacaactttgtctaaaatcgtattaattggggtggggtattatatatgtttcacagttggttgtacagaaatatcagcaacacaatttttaacatgccgttttttcaatcattttctattattaattaaaatttattaaaaataacaagtttaagtgcatcacacttttaaatctttcctaatcttgtaattttta

SEQ ID NO: 107215 - DNA, 272 bp, Glycine max
cctttctacaaaaacacaaccttataactgttattttttgcttttcgtttgctcctaattttgttcgccgaatccgagaatgtcatcgccggggttccctggcggcggtagtgcgtcggaattttccgctggatcgggggtattcggcggcagatccattccgggggccaccatgaacaaccccaaggccgccgcttccgccaccatcaacaacctcgaccctctctaccgaacccaacaacaagagaaccttcccgcaatgtttctagatc

SEQ ID NO: 107216 - DNA, 259 bp, Glycine max
ctagctgaggaccaaaaagtgtgggtctcttcttgatgtatcttaaaaattaagttcaataaaatttacaagctgggttttgtaaaaaaaaaaaaacaaaaaaaaaaggggggccccccaatttgtagtcccgtcccccgggaatttattccgggccgggaacttgcggggggccccttttccccaaaagggagccgtttaagactttggcgaaatcagggtcaaaacttttccctgggaaaattttttacccgtccaa

SEQ ID NO: 107217 - DNA, 209 bp, Glycine max
gttcaatcataagagcacaaagagtgacacatgtccgcattactatccgaatttcttttgacgacaagaacacagatgcgtgcgtcatatgtctgcaccaagtgacacatgagtactgcagtgacatcattaaggctgctgcaatgttcaagcttaaccaatagacagtggcagctggtgggtcaatccctacggaactgagtcatagt

SEQ ID NO: 107218 - DNA, 274 bp, Glycine max
atggagttcaaggccattttgttgttgctggcttttgcggcttgctatgccgcagcagttgttgagcaggatgatggatcattccagttcgacgtaattcagcaatcagttcacaaagatgcttttaaagcacaacaactcaaacgtctcgctaaattgggaaaagctgctcgttctcttcccaagtatcatcaaaagctgattgacgctccattcaaaaatgactggatcttggccaacgtcactttcggtcagcaaggtccattcaacttgg

SEQ ID NO: 107219 - DNA, 109 bp, Glycine max
  unsure (1)..(109): unsure at all n locations
ttgggcnnngagtggtgtgnctcgtgatagacagataatgatggtcaagggtggtcttttgaaggagtgtgntgattggtcaacagtaggggagttaatggcactgaag

SEQ ID NO: 107220 - DNA, 273 bp, Glycine max
  unsure (1)..(273): unsure at all n locations
gttcatgcacacatctcatttctctcattcttcctatctctctctttggtgagaaaacccactctgctatgctctcacgtgcaaacaacatataagaccgnaaggaacctttcagacagggaagaagactctcatagtcacaggtgaggatctaatgacaggaacaggacggaagatagccacagaagttcagttggacattggtgaagggcactgtaggagttcaagtcatcgcgatgaccactcacgtggaaggagctctttagagaggag

SEQ ID NO: 107221 - DNA, 257 bp, Glycine max
gcagcagaccagagagaaatgccaggagatttgggatcgacaagttcaaagtctgtcagctgtaaatggtgatgaaaatgagagcgatttagaagggaatagtgatctagattctttcgcgggagatcttgaaaatttacttgatgctgaggagtgtgaagagggagaagagagtaccaatgacttaaaacgtgataagggagatggtgttaagggtcttaaaatgagaagacacccaactttggctcaggcagagg

SEQ ID NO: 107222 - DNA, 111 bp, Glycine max
tagacatgcatgtcgaacgtttagttactatagtctaactcaactttcatggtggaccttctttactggacacttccattgcaatatcttgaattctcaagtttacggcgg

SEQ ID NO: 107223 - DNA, 259 bp, Glycine max
ggattccgcaacagagagtagaaaagatggcgcggttgatcacagtggtgtggtgcgcggtggcggtgctactgtgcgccgcggcgggcgcgtcgtgggtggaggaggcggcgaacccgatacgaatggtggcgggggtggaggcggaggtggttcgggtgatagggcagtgccggcgcggcgctgaagtttgctaggttcatgagcaggttcgggaagagttaccgaagcgaggaagagatgagggagaggtacgaga

SEQ ID NO: 107224 - DNA, 178 bp, Glycine max
gctttctcctcggtccacagagacaaaatgtaagacaggtgccaacagttcatcacgaaagataggactagctgagccgagatcactaactaaaacgaatttaatactaatcgaaaatactaatagaatagaaatagaactgtcttttcatatagatatcccttcaacacaacatagg

SEQ ID NO: 107225 - DNA, 258 bp, Glycine max
gtttctgttagccggctatgactggcatgcctcgcgttagtgccttggtgctgatgctgctagtgtatgttgggagactcagtgcattatgtgttagtagatgttgagtgttgtatggatggacacacccgatgtggaaagaactcccatgtattgataggaagtgccgtatgacactctagatgcagcgccaattttaaggacgctcgcatccagcgatgtcatcgggcgtgagcgagcgttgtcgtgctgttcgtg

SEQ ID NO: 107226 - DNA, 265 bp, Glycine max
cgcggacgtattcctgctacgtgaactgcctcacctctcctccttcttcatctgtaactcttcttcactctatttctcattatcattcatataccttcatcactttccccaaaacgcggtcggatccaccgggtccggttccgtggcattggttggctcgtatgaatagcgtgttcagcgagcagatactcgccgacatcctgactaagctcaacagcactcagcattgcattgacacttgatcacattggtgtatacttctccg

SEQ ID NO: 107227 - DNA, 172 bp, Glycine max
gaccttctcccataccttcacatagtaaggagtcgtttctggcacaggggtttcacatattgtagatttgttaaggttgcaaaaaatgtgaagcttcccatgaatgccactggatgcgagtgtaagggcatttgtaatgacccaacaacctgtgcatgtgcatggcgaaatg

SEQ ID NO: 107228 - DNA, 200 bp, Glycine max
ggaaacacatctttcagttctcgtttcctttcaacctcacacaccgtgcagtgcttgcctttgaatacactccatcatcaatcatcacccaattctgactactactactaccatcacttctctcactgttctgccctccaaacccaggccaggtaaacaggtagaggcagcggggacgggttgtttgggagaggcggggg

SEQ ID NO: 107229 - DNA, 253 bp, Glycine max
tgaaacatttgaacatggctgccacattcgtctctcacttgtcgcttcttcgatccaactactaccctgtctctcgctcacacaccctctcgcttccctcattctctcaccaaccgtgtcaaaccctccctctgtgtggtatctgttgccaaaatgggaagtggagtggtgccaaaggccaatgtgaatgcctttgatgccaattcggggttctccatttcggctaagaagtccaacaagaaccccattgttg

SEQ ID NO: 107230 - DNA, 267 bp, Glycine max
gcgactactgctcaacagcctcatcgtgtcaatccagccaatcatcattctaatggcgtcccagatggtggtagtacacaaggacgtggtcctaccacagggtatcaggatctcaagatacggacaagatggacttgcgctcacctaaccccaggctcagcaatcccactacacacagatgcgcaactcaacgcctgtaagtagcacaaccatcacttcttcgatatcaggtggcaacaacactgcctcaaggagccagactttccg

SEQ ID NO: 107231 - DNA, 209 bp, Glycine max
tctttcaaacacttcactttactctacactctctgacagctaaaatacaaggaagcatgagatcatatatgacacatgaaaatgtacttaaaaatgctgaaatacaacacgtgcacatagtaagacccataataacaacaattgacacttcacggtttgaatatgttaacgcctgatacacttgcaaagactggtattgagagcaccac

SEQ ID NO: 107232 - DNA, 124 bp, Glycine max
gttagactagcacagatgccagcatgggaggagccgatcgacctggtcgagcttccaagagatgacgcacttggtcacttgcagtcatccaattcactcgcctatgggatccaatctggatccc

SEQ ID NO: 107233 - DNA, 105 bp, Glycine max
caaatcccttgcaacgagatatgcaacaaagacttcaggcctcaggtcccttacttcaacaatcaaatgttcttgatcaacaaaagcagttataccaatcacaaa

SEQ ID NO: 107234 - DNA, 256 bp, Glycine max
gcttttgtgataaaacataccaaactcttatttatctaccttctacttctcgcaattgttcttttccttggtttttcagaaactaaacacggagtcatgttgatgtttacttgactttgcaaattgacttcacttgaatttaaataaggtagtcattggtggctatacttttgtaaattgtaacttaattaatttataatattgctaaacaaatcattgatccttgcctttgcctacttacataacgtcaggagga

SEQ ID NO: 107235 - DNA, 189 bp, Glycine max
  unsure (1)..(189): unsure at all n locations
cgctccaggaccattactgccctttcactttctctgcctctgcagtatctacgacccctccatctcactctccgttccccatcacacaacaccaactcaatccgggccccacaaacaaaatgccgtcattagcggacgaantcttcgcatcaaccccaggaaagctcaccatggagcggtccccccaca

SEQ ID NO: 107236 - DNA, 266 bp, Glycine max
aaagaagttaatgtccttgtgtggtcgctcaaaagaagcaaacaagagtcattgtgcgctatgcatgtataagaggctttaacccatctcttcacatgttcatgctaaggtaagggtaacatcttactcccatgacctatccttctcataagtgtgggggccatatggtctacataggaatataattcctcttatgccataatggcacaatggtacaaactccccccttaggagtgtgaagagacaacagatggtgtgaatagtcc

SEQ ID NO: 107237 - DNA, 135 bp, Glycine max
gtgcaatgtgtgcaattgtttgtgaccttgcgtgcactacatgggcattggcataatattggaaactacataatgcttaacacccaccctcaaaatctgaaactaagtaaaactatttctcatttgacatttacg

SEQ ID NO: 107238 - DNA, 138 bp, Glycine max
ttttaagttaaagcccctcaaaacaaagccctgctcagtctcactcacattgcactcactccacctactaagcgacgtcgttgggaggcgtaataatgtcgatgacgatggttatggaggaagatgaagaagacgtag

SEQ ID NO: 107239 - DNA, 257 bp, Glycine max
attacttagtcttgatattctctcttgcgttgatcattgcatttgattgcatgatgatgagttctagagctagtaagcttgtttcttcctcccttttggcagcttcaaaattgttacttaaatcttcttcttctgctcctccacttcaaactacagctcttgttggctcaatggtccctaaagttcaaggcccgaagcacagttctggtttccctagatcatacatgtcagctaccttagcttctctggccaaggaa

SEQ ID NO: 107240 - DNA, 166 bp, Glycine max
cctgggcgagtttataatttaacagcgtaacgcttcggacccagtcttggatctgattggcgaggctgactgcgtcttcttcggtgctgattttccgagggcacgaggctcatcccatggacgacgcctattacgcgaagccgctgaagccatggctctccttcgg

SEQ ID NO: 107241 - DNA, 257 bp, Glycine max
gagcaaagttacttatgttaatttgtatggtttaattacttatttgatttttatagttacaaactttttcttttagtctttatacttaaaaacatcctttattagtctctatacatacaatgtttgatatcttttagttctcatgaactaaaaggaattaaaaatgatatatgtaggggtcactgtacttaaaaacatctttaatccctacatatatcatttttaagtatagtaactaaaaggaagagtatttgtaa

SEQ ID NO: 107242 - DNA, 100 bp, Glycine max
caagtggttgtttctctctctgactctgatcctcagtctctctgtctccgtcggcgcccgccacttcgtcctcgtcctctcccaggaagactacaaggac

SEQ ID NO: 107243 - DNA, 218 bp, Glycine max
cttatttgcgacgtgtatcaggagaggaatatgggatgggctaatgcattggttgttctcttctgaaacgttttcaccgaactgtgagaatctagtattagaggttatgtcatccgtggtgtaaacttggtgcgttgaaatgatcaatttaaagccttagtcgtatatagcacagggtattctggctgagaaattgctaatccacaacagttatctgc

SEQ ID NO: 107244 - DNA, 240 bp, Glycine max
tatcatatacggtgggatgttcgcgagttgtgcaccaacttagcaggcaggtcagacttgacctgttagagaggagaagaagccttctgggattggaacaagatccaaaacggtagatggtgtaagattatttgtggggcttcccctagatgcagtttcttatgactgcaagtcaataaacatgctagagcaattgcagctggcctaaaagttttgaactcttaggagttgaaggtgttg

SEQ ID NO: 107245 - DNA, 231 bp, Glycine max
gacaaaaccaataattaagatctagtcctagaatccaacaggggcgacctcacctccaagaacacatagccatgtcaagaaacttgcttcttgttctttttgcagtagccaccttcctccatggctcagaagcacaaaccagacacgtggtaggtgatgccacgggctggatcatccctcccggcggcgccgcaacctacaccacctgggcttccaacaaaacattccccg

SEQ ID NO: 107246 - DNA, 247 bp, Glycine max
gtgaatatgaattttgtgaagaatcttcctcaattcctccaagttatttgatgctataaagtaaaattattttttgtctgttatgacttttctaattcagtgtaagatggtgtaagaattaagactgatcaatagtggttatttgtgcgaacttatagaaaaagattgatcaagatccttatttttgggctaaatttttcactgtatttattagggagaaaggtacaatgttttcagcttttatgac

SEQ ID NO: 107247 - DNA, 256 bp, Glycine max
gcgaaggtagactgaaggctatcctcaacagtgatggtgaaattgagaaccaagagatctcagagatccaaactaaagattcggaggttggttcttcaacatgttattgaattgaacacccttggaaaactaaatcatttatgaactttttaggatgatgcggagaagaatcacaaagggaagaagcagcataaaaagagattgagaaagaagaaaagagacaaagcaagcgcaaggaaaatgctgtcaacgaaag

SEQ ID NO: 107248 - DNA, 256 bp, Glycine max
gaaattaatgggttgctatcttttctgagtttggtcatttcatgattatgaattatgattatcttctagcatttagtaaagggcttagtatttccctaatctttccttttaaatgcttgcattttgggagatgaagaataactttaacagttacccaccccacttatgtcctcttttaggagtcatgggcttgttctgaggtctgattagcttgttaattgggttggagaggagaaaacattgagttaaaaagaga

SEQ ID NO: 107249 - DNA, 253 bp, Glycine max
ctggcaaagacaccaacaccccttatctctctctgttcaattctggtgattattcccctttcttcctccttacttcttttcctccaattgggtcattcatttcacagcaacgggtttttgtttaggctttttcttttgcctaattttgctgtccctcacagtctatgttatcatcgaatcccaagtttcttcgtcaaaacctcaagttctgttggatcttgcatatagttaccgtttattgattcgcaaagat

SEQ ID NO: 107250 - DNA, 250 bp, Glycine max
ctggttttgtcctaccgtaatttaatgtgcatagtggacgagggaaaaaaatgtttactaaatgcatcgtcgatgttgagaacatgagtttggtaacagaacagggtacaatctacccctaccgattaattggagtacttttatttgggagttaattttctcttcttttattcttaaccttttcaaatctaacttctctaggtattcctgtttttatttttttttttttggggaatttaaaaggcatcct

SEQ ID NO: 107251 - DNA, 247 bp, Glycine max
gagaaatttaacaaacattgtgttgttaggtttttcatttttaattgtaatgttagttttagggggaatgtattttaggtaaaatgtgtaatagcagcttttgaaattgtaattgttgttttgctgaagaatttgtagtaggaagtagcttttgtagtgtaatagcagcttttgttgctactgtcaattacccatttcaattaaatataatttgttggtgaaaaaaaaaaaaaaaaaaagggcggcc

SEQ ID NO: 107252 - DNA, 267 bp, Glycine max
gtcatggcttaattgatcactcatcagactccttgcattcttgcgatctatacaatcatgggtttcgcatagatgagaatccatcaaacctctgtagcctcaattcccaactacgcctctctagagtgtgtcttggggctatgcttcaacgtgataagcatactccttcagcttgcctatgagtacatagtccacagtcaaattctcgtcatagtcttcatgggtcgcccaagtaccttcgatgcctgcatagcatggtaatctggg

SEQ ID NO: 107253 - DNA, 265 bp, Glycine max
acgggagatgtttgacggttggagaagaagcgtggaatcttccatgctgcctgtagctgttctcccttacccttcccttcccttccctcgcaatagaaaaaactccatctccttttcctcattatatctttctcgcaacccaaacactgtcttcaatcccccttgtgtcaatgaagtttcttccttttctcatttccttcctttttgcctccctaatcgcaacctcaggaacgccgcatcccaatgaagaacgcctcaacatcca

SEQ ID NO: 107254 - DNA, 269 bp, Glycine max
gtgggagtgggatacacatcaaaagagaggagtttaatggcacttgtttggaaaataattttccagatacacattcctttcctaaccacacaagaacctcctacagctgctggctgcttcctttgatggatagaagagcagtctccagcatcaatactgatcaagagtgtcctttggacgacactgattcctcctccgctctctttagctacataaagcaaatgctcatggaagacgacacccaggagagttacagtattttccatgat

SEQ ID NO: 107255 - DNA, 267 bp, Glycine max
ccctatcctcccaatacaaaacaaccaattatacgcaacttttgcttctttcatgacaccagccatggacaagacttcatcctcgtcggacatcaccaccgtccaccccgacatctttcaatcccacatccttaatcgcctcgacggccccaccctcgcttccgccgcttccgccacctctcacctccgcggcctctgcaccgaacaccacctctggcgtaacatctgcgccgccacgtggccttctctcaacgatcccctcgccgc

SEQ ID NO: 107256 - DNA, 261 bp, Glycine max
cacaaatttcccttctcaagctcacaccgagctttctttgggaaggaatttcagtgttggaggaggaggaagaggtggaggagctcttgaagaaccaccaccacataacaacaacatcaacaataacccttattatcaaacccaaaaggctcatttgcaacatcttcatcaacaccattctaatgcttcaagagcaacgacaagtactactacaagctcctccaatcacatgagtcacataaactatggggtttctttgct

SEQ ID NO: 107257 - DNA, 260 bp, Glycine max
cctagctatatatgggcagccgctatcgtctatcatagcaccactgcaatccgacgtgtacttttactgcatgtcctctgccatggcccctagagagtccccattggtctcgatatggatgcatactctaggtccagatcctttgcctagtggtcactattcagccacaaattcccatcgtggttcactcgcttcttacttaggaagtcccgagatggccacggaagcggttatgtactcgtaccatgagtacctcaatg

SEQ ID NO: 107258 - DNA, 253 bp, Glycine max
gagttagctcaaccctactcttcgtccagtctccagctcaatctccatccaatttagctagggatactgaagagtgcatggatgatgatgtcgcttaccctaccaagatcactactaccagactcctatctatgcttggctatcgcatcaccgtcatggacattcacttcatccatgcgacattcgattcaatcggggtttatgtagcgccagaactattaggacactttgaccagttcactccgacatctgc

SEQ ID NO: 107259 - DNA, 192 bp, Glycine max
atgaacaatcctctgcttacagtccacatcacataatccttatctcgaatttccacatcggctgctatttacctcggattcccttctattcatgttgaattctcattgggatctccatctaattgtggtcaaccctttttatcggatctatggtcctacatatccgcaactgaattagggttagactccaat

SEQ ID NO: 107260 - DNA, 256 bp, Glycine max
agaagttgtctctgaatcttcaggcagtgccattgatgactgtaagttcagtcatggttcaagcaactccctaggtgatgccaagaccaagctttttgatgctggtttgataaggcaggagcaagatagcatcataggaagttatgattcttttgaagagatgaaattggtgctacaaggattcttgaaaaaagcaagttctgatgaattaagtgccatgcataagttattcagctctgatgcacagttcactaag

SEQ ID NO: 107261 - DNA, 252 bp, Glycine max
gaagttcatgggaaacaccactaaaaaggaaaagccccatactttcatatcctagatcacctccacaaatgacaccttctgaaccatcccgagagctatcctcccccatccacctcagtgacaagttccttattccaatcccttacttattgatttacattggggacaatgtaagatttaagtttgggattcctaaccttaggataatgcattttcttgttttattaggaacattatttgcatttgcatttt

SEQ ID NO: 107262 - DNA, 251 bp, Glycine max
cttttgactagcaaaactcaagttgttgccactcaatcagctcgaatgttaagtgctctgtctcgtccaacaaagaacaaggctgcaaataaaatgtcttatattgtagagggtgatgtcaagccactaatcaagttagctaaaacatcctctgttgatgctgctgaaactgctgttgctgcattggccaatcttctctttgatccttttattgctgctgaggctctagcggaagatgttgtttcagcttt

SEQ ID NO: 107263 - DNA, 253 bp, Glycine max
aaggaagaaaggtttatgtcaacaaaagtggggaggagttgacaggccgcaatgcttatagagaatatcggaaggtacatatacttgcataccattctgatgttttgttgtccttttggttgtgatgtagcactgaatgcctttgatgtttacaggagagtggagcaggattcaagaaatcaagaaagaaaaaaggtgccaagacgacaaatgccaagaagaggaactgaacacttgatggcaagactttatt

SEQ ID NO: 107264 - DNA, 247 bp, Glycine max
  unsure (1)..(247): unsure at all n locations
acttgagcagcaacaaattgcagggtcctattccggagtctatctttcatattaatggactccgtttcctacaactttctgcaaatgaattcaatggaacaataaaacttgttatgattcagaggcttcacaatttgcatacattaggtgctccacacaacatagattcaacnnntataattgncaatgatgatcatgacctatcatcctttcccagcatgaaatatatattgttggcttcttgcaa

SEQ ID NO: 107265 - DNA, 250 bp, Glycine max
ctccgccgtgctggcgggttattttgcgtggaaaacggtgcgttataacccgatcgaggtgttttccgaggattctgccgatgaagataaatcctccaagaagggagattttgatttcaagaagatgattcagatggattttggggtttcgttgacatggctagtgggaggtatctgtggaggaatttgaggtcaaccaacaaagacgccgaattgaaaagctcttagggacctaaccctaatcctcttc

SEQ ID NO: 107266 - DNA, 247 bp, Glycine max
gcaagtcataaatagaacgtgagctatgagatcttcagcttgtatttatgacttgctactaaaagcattatatatgttggtggaaatggcaagcacacttgtaaccacagctagtaaatatttttatcagtgcaatcataaatacaagctggttctctcatttctccccttctattgttttttttatatgtatagaaaattctatttggggagagagggtatggctggggagattctagaggcattt

SEQ ID NO: 107267 - DNA, 196 bp, Glycine max
cgagtgtctatattagttaataacactatgcctatagattaaattaaccttttaatttaatctataggcctagtgttattaactaatcgagtgtctatattttttttagttagaattctttatagtttaaaacttttatttaaatccgtacagttataagttcttataatcgagtctttacaagttaacaccagtt

SEQ ID NO: 107268 - DNA, 248 bp, Glycine max
caaaagtgcatgtatattctcgttacttttgttcaatggaccaacttaagtaagataagagagtatagagatatcctaacaccctatctagtctagtctagttcgttagtttctcacttaagttggtccttgtacaaaagtgcatgtatattctcgttactttttttggctcttacatgccgtgtttatttatcattatttagggatgtatatatcaggtgatttcctgaacctggagtttatagttc

SEQ ID NO: 107269 - DNA, 248 bp, Glycine max
aaaaaaacaaaactgagtgaggagatcattattaactacattataccgtgacagtgaagtaaatggttgcaaggcggctctcatccatttttaactacatgaggcagcgaagcatttctaatcctgcttaagttagcaatgtttagttttcagaaaatttatcttctattgacagtgttatttctgctagggaagcctgtcataagcaaggatcggtgcagggagaagtgtggacgcgttcatattga

SEQ ID NO: 107270 - DNA, 200 bp, Glycine max
caacaagctcagaggcaactatcgaacgcaatacactggctagagtaacgagccttgtgggtagcatataggtttgatgcgactagtgggaatggagcttgagttgccttgaggacatacggaccaggttcaaattgcctgtgaaggaaggcttcaaatacagcatgcagagccaggatatgtgatgttaacatactgga

SEQ ID NO: 107271 - DNA, 266 bp, Glycine max
gtctttttttccttttaaatattatttccatatttccatagttgtttgcatatattttctttctccgattatcatctccttattttcatttttatgtttattttttcatataccaaaagagtgaagttttctcacgaggaaaaaaaaagctaaaaatggggtcgaagtggatgtggttgatattacactttgcatcggttttggtgtttgtttggggagatagaacaattttgaaggtggaagggcctatgttgttggatattcac

SEQ ID NO: 107272 - DNA, 260 bp, Glycine max
atttctgctatcacttgtgaatcatctggttcatgttccaagttcctcaaagacatggctgatagaagattgactgagtgcattgatgatgttatattggagtatctttctgttggtgatcctgagtcttgttgtgagaagcttgaggagatactcacacaaggtctaaaagagcacttagaaggcattgaagtaaaaccagattgtatattcatgctgcatcccctacatcaccactctataaaagatacacaacactg

SEQ ID NO: 107273 - DNA, 147 bp, Glycine max
gtcaggtcatccagatggcttaaggcgcgacaagctaggcctgattcttgagacctatatggaacgcatgatgtgattcctcaaagctgtcctgtgacgtaccatggctgtcgcccaaaagattcaacaagcagctgagagagtgca

SEQ ID NO: 107274 - DNA, 260 bp, Glycine max
attctttctttagaggctcgaaatgcacaagtgctggagcttttcttagtaatgcccaacatgttagatacttggacctctaggtaacatatgcatcttaaatttgtatttgaacatattaagatcttgagctggcaaaatagaaagtcaatggcaagctgtataacaaatgatcaaacaagcacatagtatcttttatagccttaaccaaccaaataaaacaacaatgatagaaattatccttagtgtcaggtttgtaa

SEQ ID NO: 107275 - DNA, 259 bp, Glycine max
tggtggatctccacccaccgcaaaatagattgcttttaaatgtgcaattaaatttgttatcatagtgagcatcgactcatgtattccgattgcatcgtttatgccaatcttattggttgggtttgggaatattttaattgccgggtttgatttagtgctccatgcttgagcaataattaaaatttacgatatatatattaattatatattctgcacttttgttgttgttgaatttagtttttgttttgcttggtgtgta

SEQ ID NO: 107276 - DNA, 257 bp, Glycine max
aaatagatacatgcgagatcaattaaccatataataatccatccacatccatatcaccatgcaccccacgttcatattccccatctttatgttgttgttaaccactttgcgacaatcccactgtcaacccaatgatccagtttgtagacaagagtcatacaattgtggatcattgtccaacatctcttaccctttctggggtctcaaccgatcccgttcttgtggcgggggtgacccattcgagtaaaatgccacga

SEQ ID NO: 107277 - DNA, 239 bp, Glycine max
gttttattcctatcatatcttctagattctcaattgctcagaggaatcggtttatggactcaaactgtaattaccacatcgatcttcttcactcttctctcgggtgagtgttattcacgtgcttttcaatcgtctcttctatactatatttcgtctttcaagttgggtccgtgttgttttgcatctgcatcctccctttactatgaacctagttagagacttgttccgtgcacttttca

SEQ ID NO: 107278 - DNA, 257 bp, Glycine max
ttgccaacagcgtgaccccaagcggtgtacagatacccataatcattaatccagccaacggcaactattgctggattgatcatgggtagtatcatccaagattgaagtattctaatttcatggattacctgtccttgagtcagaactgcattgtatgcgcttagtgaacggctaaattgatggggatcagtgtccatagtcatgtctgctcggatcatattcttcatggatttcaagtgcatgctctgtattcatga

SEQ ID NO: 107279 - DNA, 263 bp, Glycine max
cttacctgcctcaacgggcagcccgaaacgcagcatttcccgtgatgtgacgctgcccgaactgcccgattcttggctgagaaattacgagcattcggtctgcagtacctgttttagagctccaaaccttcagatgcacctcattcgtctccagatcttccttcctggataacgttttcgggttcgagaaggcacttgtgttgtttttcgtacgaaatggagactaaacagagttcggtgacggttacgctcagttacggcgc

SEQ ID NO: 107280 - DNA, 255 bp, Glycine max
ccaatatttcctctctttttccctcgaaattggttagcaattcacttgcatcgcactaatcctacagacaataatggacattgcaagttgtgcactgctcattgtcttgacatgtgccatagttcatgctcttcttggttcattccttgcaatggccacaaaagcaaaccataagctgccaccgggaccatcccgtgttcccatcataggtaacctccttgaattgggtgaaaagcctcacaagtcattggcaaa

SEQ ID NO: 107281 - DNA, 258 bp, Glycine max
attctctaaagattcttttagggggtggggcagaattactagtacaccagttgccaattattaaaaatacttttatagtttatttgtaacaatttgattataaaaaagtacttttttttttaaaatgaaaaaaagtgagagcatcttagctattttccacaaaggcggttatcttctttataacacttagcattaatttgggatactttcattttcatatttcttcaagtttcattctaaacttttttccttctaata

SEQ ID NO: 107282 - DNA, 250 bp, Glycine max
gccggacttccagcctaggttttgccatgtggatttgttgaaggtgggcatgcaggccttcctgttggtctgcaaatgattggtgcagcatttaatgaggtattggcttttcctgtaggttctctatgttacctatagcttttttattcttttctttctagtctctattatttgtcaaatgagatatttgcgtaggaggtacaaatcacaatgatcttatgttatgatttgatgtctgccttttttcttt

SEQ ID NO: 107283 - DNA, 256 bp, Glycine max
aaacactagtcactagtaatagtgattagtttcccagtaagtaatagcatcacatcacagtatagtctttggtgcaacgatcaagtactcatcagcatgggaatgtcgttgttgttgttgtcttactctctccttttcctggttctgttccttacactggaatcccttttccaacgtagaatattgataaacctacgaccaggtcctcctcctgttcccataataggtaaccttaacctcctcgaacaacctattc

SEQ ID NO: 107284 - DNA, 222 bp, Glycine max
gtgacaaattgagctggtgctggtatcacatgaagtctggttgccaatagcaacgatgtgtgtcgggtatttgagtgtggctccaccaccagcgctacgcaacgcaacgcgataacggtctcgcctgtacaccaccactagaccgcgaaacaccggatcagattcatcgatcattcagcgacggtggttaacgcactctccgattcagactcctatgcagca

SEQ ID NO: 107285 - DNA, 220 bp, Glycine max
ccatggcagaagtggtttctgcaagatgccatgcaatcgctgaacctcttcgtcacctgaaactgtcttctattccctcgtcgcgtaacaaggctgaatggcatggtgaagctcaaatcgtcgagctctgaattcgaccttcacattgaagatgacctgccttctggatccagtgttcagcaagaacggcttggcaagctccgcctgtgtgattcgccag

SEQ ID NO: 107286 - DNA, 219 bp, Glycine max
ataacagatctagcatagaattttatatcatctcattattagattgatcctatgtaatcaatactgaccttatttgctgattataaggtcattcttgacacataacattatggtaaaacactgttatatggtatctagagcttaggttataataaaagttgttctcaaaacaccgccaaagactgccacactgtccatggggccccacatagggccctg

SEQ ID NO: 107287 - DNA, 225 bp, Glycine max
aatttttactatgtttgggtcttgatatttatgtgtaaaatttggtggtgtctgaatattattggcttctagttcttcaaaaatgatagttcggagggagaaacccttttagccagtgttcgattatatgcatctaaaacttattggactaaagatagcaataatgttaaatttaactttcagtggctatttaagtttatctcctcctcagtctttcatatctag

SEQ ID NO: 107288 - DNA, 216 bp, Glycine max
aaccggttaaattagtagaccgctgtgtgatgaatttcatgtgcatgacgtcaattctttgtagttaataaggtgtatattcttttacttatacatggaataaaataattaataatactaagttggtttatacgtgaattacgtgcaggccaaatcgattttaatgcttgcaaatagaaaattggaggaaagagtgaggacaccaactgggtcaga

SEQ ID NO: 107289 - DNA, 216 bp, Glycine max
gtcaatgctttggagttctaaagttctggctacttttaggcaaatattatatatgtagcatatggtgtgcatctctatccatctgtcatatatactcccaaaatatctttaatctgaaataaaactctgactagccttcaatatgttcttgtttgattactgactaaaggcttgtaatattttgcagggcaatctatattgaaaacgggagatagg

SEQ ID NO: 107290 - DNA, 263 bp, Glycine max
attctcatactataaggatgtttattcttgaatgatttatctgatattgatggatgctgatttctccagtgtatcgtttacattcactgagtggaaatgaaattggaattcaagtctctcaaccaaactggtcacaaggatagtgtcaaaatcctatgcaaacctattggagttggcctctggagaggctccgtcatttaggtacatgaacaggagagttccatggattatgactgtggctagtgtgatatctgatgttgatg

SEQ ID NO: 107291 - DNA, 114 bp, Glycine max
atttctggaccgtctcagtcatcgactcagtgccatgtatgcaccccccttcagccgccgtcgccgtctaccatcgtcggaattatctgctgcgatgaaatggacgggcgtcgt

SEQ ID NO: 107292 - DNA, 270 bp, Glycine max
accgccgctagctgcacctctaccgaggtcatcgtcgccaccagcaccagcaccatccacccctccttctaggactagtcctcatctcagactaagttctcaaccatctccacctttaaattctacaccaatgtcatcaactctatcgccaccttcacttactaatttggacccatccccgccatcacgactcctgtcatcgccaccaccgccaccggctcagaacaggacagaacactcaagccctgatggacgtggagatgggattcg

SEQ ID NO: 107293 - DNA, 268 bp, Glycine max
cttcttcttcttcttcttcttcttcttcttcttcttcttcttgttcttcttcttctatatatatatatatatataccatgtatagcccgattagcagataaacaccaccaatggagtctcacgtggacaccattctctctgcaatttcagttctactcctttcttcgttaacccatgtcagcatcagcgcaaatgcaacaagaacaccccaagaaaacagcctccatctccaagtagcatactccacatgcgagggaacactctactc

SEQ ID NO: 107294 - DNA, 265 bp, Glycine max
cccagctcccactcaggcctggactcaaccccagagtccctcgcacaagtacgaggttagacgccgtgtcctcgggcaggggtggaggtgagagagtatagctataagattatatgggaaacacatgtgaatacttaatggtggcattcactattggcaaagattgatgaacttcatagccatttccggtgtcatgcagtactagaatcgttccgtagtaaagtgggttttagacggtcgaaacgcagaacgagggcgagccctc

SEQ ID NO: 107295 - DNA, 178 bp, Glycine max
tgaaaacctttcactttgtttttttaatccggattgccaatttatgtatatctttttgattcaattaattctcgtcttgatgattgtatgagctagattttgttggagattctggtcaattgcgttcgaagcgacttgatcaattttttgaaaaaaaaaaattggggatgtagtttgt

SEQ ID NO: 107296 - DNA, 271 bp, Glycine max
cggctcgaggtctcgatacccgtcatccttgagtactaccgtaccggtctaaaataccagtaacaggtagctcgctcatagacttaatggagtctgcaatgacaaacatcgaaaaatatcgatgagctaccatcaataacggctaaacgtctatcacgaacctaagtaaaaaggcctcttgcagatccttatcctcgtccttcagggaataaatacctacccgtagacccattcaagttcgctcctacaaattatcgggagcacaaactca

SEQ ID NO: 107297 - DNA, 115 bp, Glycine max
tcctttgatgcgtacattctgtattcatagtgacgaacttctgaagagatggcaaatcatccttcgacacactctcattattacagcgataggtaatatgatactctcactggtc

SEQ ID NO: 107298 - DNA, 263 bp, Glycine max
tcggaagctcccctctctaagtggcggcgacggcgggcgtgcacggcggtggttcaccttctacactcctctcatctcgaaactctccaggacatgtgaaacttgtcaaaatcaggatgagcaatgacatatttgatagacagttgttaccagagaagttgttgaaactcaacaattcacaacaaagcgttgaatcactttcccattggtgtatttctcaccggaagagagcaaaagaagtagttgaaacttgggataaattg

SEQ ID NO: 107299 - DNA, 268 bp, Glycine max
acatagccggcctcactgttccaagggcgcatactcctgcctgagttccacttgcgaggatcggcgattcatctaaactcctttcttaattaagatcatcgtcatcatcatcatatgcaatatttactatgtgtgtacggataatcgtcatttcaataaggtctcattcatctacttcatatcaagtatataagcccttccatgcaacattgacaacaacggctgtccgccgtcacttgtgctgtataatcggactcagagcaccgtc

SEQ ID NO: 107300 - DNA, 240 bp, Glycine max
caactttgtcacatcttacacaacactgtctctctctcttctctttctctgcgattctctgaaaaaccagtacaagctctggagaaaccgccacagaaagacgagatctagtcgtggctggcctactcgacaaatggtatccccattaggtcatgcttcttcaccatacccctctcttgtctcccctcttgttacccttctctatatcgcctgcttatctcctttaactgcggcatgaat

SEQ ID NO: 107301 - DNA, 224 bp, Glycine max
cgccagtattcacgtcgcgattcgtgaactcacgaaaagcttaatcgattcgtgttgagttctccgatcctaagatatcctatatcattatcattcgcgtgtcgcggttctcgttctcctttcagtttcatcgagataacgaccacgagaacgtgcttcgttcgatcgcgttcgtgcgtctcaatgtacaacgatttcgattggcttccttcgctgtattccga

SEQ ID NO: 107302 - DNA, 262 bp, Glycine max
cggctatactgtaaactatcaggatcagagtcgatctgatcagaaataaaggactagatgtatgggacacgatcagattcctattgaggatagaatctcagtgtaatcgtcgacaatcaagaggacgatctgaatcatcagcggcagatgacgagagcaagttctggtcagcgatacccatagcggttcaacgctgcggagtctcatgaggggtttgatggatcctctcgagctagatcactcacatgcagattcgcccagt

SEQ ID NO: 107303 - DNA, 274 bp, Glycine max
cacatatcatagacatataatacattcattcccctgaacgaactccaaacctgacttcatccattccattccaaagcttcttgcttcctctcttctctttttttgccctgctctgtggggtttacactctcaactcaaatgctcttcacccttatctctctgatctgcttttttcttctccctctctcagatcctaaagggattcagctgctgcaactcagattctcttgcttgtgcttgtggacttattatcatctgtgctcatgcctgccct

SEQ ID NO: 107304 - DNA, 127 bp, Glycine max
gttaacttcgttttctctctctctcactctttcgaggtaatttgcaatggctgaaccttccaaggtcattcacgttcgaaatgtggggcatgagatatctgaaaatgatttgcttcaactatttcag

SEQ ID NO: 107305 - DNA, 124 bp, Glycine max
cgaagacggagagtatctcgagtgtgactgcgtgaaagggttcgtgcgttttttcttcctccgaagcctttcatggagttcactgcactctctaacgctacccaacttgggagcttcaaccctc

SEQ ID NO: 107306 - DNA, 124 bp, Glycine max
cacctattgggtatgtacactctggccgaagggagtccttatgtttagtttcaaaatatattactttcctggattctcttcttcactttttctgactttgggtccattttcttttcattgcctc

SEQ ID NO: 107307 - DNA, 180 bp, Glycine max
gctggctttaatggagctagtagattatgttgctctggttggattcattagagtgatgaggaatttatccacagggtatgaaggtttttattttatcattggattgataattttattgttagaagtatgatctattatgtggttgtaccattatatgaatttatatttgttgatcagtgt

SEQ ID NO: 107308 - DNA, 120 bp, Glycine max
  unsure (1)..(120): unsure at all n locations
gatagatgtctttgtgagttagagatgtttatagaggatggtgaggatcgggantatnnnaagaggaagagtgnnattaatgagggaatggaggagtttgtgagtgatcctttggcggtt

SEQ ID NO: 107309 - DNA, 124 bp, Glycine max
ctctcttttttttttgccctatctcatagggtttccaccctctatctcatgactttttgctctcacgagttcttctttgccgttgccctcttattctttgctgtatttggagccttcttttgtg

SEQ ID NO: 107310 - DNA, 120 bp, Glycine max
tgctccgccacgtcgccgccaaattcccctcccgccgtgccatctccgtcgctgccaaattcgacctcacccactcccgcctccaccgcctggtcgaatcggccgccgctcagttagtct

SEQ ID NO: 107311 - DNA, 99 bp, Glycine max
tactcattctccatacctcaacgaagaggttaaagagacggcaacactttgctgtccgccttgaccgagcagagcttcgtcttggccctcgattttgcc

SEQ ID NO: 107312 - DNA, 157 bp, Glycine max
gacctcatgctaataaaagtccccagcttctggagaccccctgccggcagcccctttccctgccaccccaggagccaggcttaccctcagctgggtgaagactacagactccctggggttggcaagggctccatctcagtggaccaggaagcaagag

SEQ ID NO: 107313 - DNA, 277 bp, Glycine max
attttatttgaggtatgccattttgaagactgagagattaaaatataatttggttgcttttggttctgaacaaataatgagttcttttatttgaggtatgccattttgaagactgagacgttggagttttatcctagaggagaaaggaatctttgggaaagtcagtattttatatagcaaaaatatgaacctcaaactgaatcctctaaaggccccatacaatgaagtagacattggtggaaacatttacacccagtcagcttgaagagtttcaaat

SEQ ID NO: 107314 - DNA, 278 bp, Glycine max
acagtctaaagagtgggtatcagaagaattttaccatttacgctcataggaatactaaaccaaacccaatcagaccaaactccaaagcccattgtgtttacaagtctgcctcttttgtgtgatagcaagtcagtcctttaaagcagaaccccatttactaaccctacatcccaagtaagcaggcctgtatcagaaccaaacagctgtcctcttacatcagaaaatctaagtgatctgaaagacaattcatcacaagtgtttccaattttcttctgaga

SEQ ID NO: 107315 - DNA, 269 bp, Glycine max
gttctgagattccacacaacataagctatgaactgcgaagtcatcaaggttttggtggcacttcagctccttaatctgggcatggaaacatcttcatctgtgtccaataagaccataacattggaagaatggaacggttctcccccacaaaactctccaagactttcaccatcaaggcttcctcttcctctgtcctcatcacaagatctggtgcccgctttacccatgtttggagaaggttacttcaggcatttgtccctgagggtttt

SEQ ID NO: 107316 - DNA, 265 bp, Glycine max
tttcgggtttgatttttcactcaacccctgcactgcagttccaaggctagctgtttgttatggaggacggggataacattctggatgccatatacgaggaggataccttagatgatgacgttgacatggttgatgttgagaaggagagttggtggagcctgattcccaaaatgttttgggacaaagcagtgccggagatatcaacgaaccaaatcaagaacctctcagtaagaaccaaaagcgtagagctaacaagaagaagaat

SEQ ID NO: 107317 - DNA, 269 bp, Glycine max
ataagaaaaaggtactactgagagttcagaggcaaagaggggtttcttccgcattctcttctcgagtgtgatggtgttctctctatcaccaacccaagaaatctaagaccgttagggttccacactccatacgagccctgatcactgttgcgaaatcaatggcgtccgtttacataccggtgcagaattcggaggaggaggttagggttactctcgatcagcttctgagggaaggcctccgacatcctcgacatcctcatagccgaaca

SEQ ID NO: 107318 - DNA, 270 bp, Glycine max
agtttatgcatagaagctacccttttggtctctctgagattattgaagttgagggattctaatggtggtgactcatcaggaccctactgaaaacttggtccagtcagagccagagaagaaacgcggtattatagagaaagtaagcatttgactagcttgggaaagaaaaacaatgccaagttagatgaattggaacaaacgagtccttatgactcggatagatcccccgtgtttgactcggatgactcgtacgattccaccacaagcagt

SEQ ID NO: 107319 - DNA, 270 bp, Glycine max
ctgttttcggggaaataccatgtgcaggatatcgattacaagaggtatcagatccgattgacagatgcgggtatcgcggaggatactgcttgctccattcctcgctatgttttacagagatttaatttcagtgatgatgaccgctattttttacggatgtgaaggagtatcaggatgaggattactatcctcgaaatgtagtgtttctgaactgtactaagaaagtgaatgatgatcctcgatatgttgaagtgaatgccgttcgtcgtt

SEQ ID NO: 107320 - DNA, 272 bp, Glycine max
ctgacccaaccctacccgagtttctcctgcaaaaggaaactcagagcgcgagaaggaagccaagaacagaacagcacaacagtcttcagcggcacgaccagcagcagtctccagcacacgaacggcgacgacggtgacgcaacaacacctgcacacgacgttctcgagcgcgacgacggcagcagtccaacagcacgacgcacaacgcacgcgagagacccaagcaagactcatccgagagagaggacgcagacgaccaagcgacattgacg

SEQ ID NO: 107321 - DNA, 262 bp, Glycine max
atagaacatcgcactctgaagtcgactcacgcgctctgcgactctggatgaagctattgccatgtcatgaagagcgtactagcttagcctacagcgagtggtcaacaatgggggggtaaccacagtgataggggtcccctagagcacttgacataggcgcaaggtacaacatcaccaacgccctcctagagacaggttagagcaatgctctattcaggattactccgaaacggtggtaattggcactgcatcacaagaagtc

SEQ ID NO: 107322 - DNA, 266 bp, Glycine max
atcatttccgttttcattttcttttccctctgaaaacacaccctctttactgatcctgttgtttctctctctctctctctctctctctctctcacgcacatacacacacaatttgttttctttctttgtagctgccaaacaatttgctcaacataaagagagagagagagagtctaccaaaggtttcagttttagatctgagggagctaaggttgtttgaagctatggagacaccccatgtctcttggtctttcacatgagatgaa

SEQ ID NO: 107323 - DNA, 263 bp, Glycine max
taggcaacttcttgctgctactgacttcggtgatggtggacatactgcagcatactatcgaaggatttattggaaaattaatttagcagagcctttactttgtacagctaatgagtctcatttaggtgatgaaattcagatgatgctctcactcttatctgcacctcagcttacctcggcactgggagcaagcaaggaactgggccaagcagttggaggccaatggtcgcaccctggaaatctgctacgctccatgttactga

SEQ ID NO: 107324 - DNA, 184 bp, Glycine max
tgctgagattgtggagtctgcggatacatacttgtctactggtccaacttatactgactacagctctgtggcgtattcacttcatctcaggaaggacatagcgatcaatgctgcagcctgatcccagtatacatccgacgaatgcacctgctattcggtcgtgtggctgatgaagggttgcctc

SEQ ID NO: 107325 - DNA, 272 bp, Glycine max
gttccttcagtcatggaataaggacgtgtttcctcaaagaccctcttcaatgcttgacatctctggtcattgggagagcgcagttcccacggtcgacgtcggtgactccatcaacgacaccagctacgattgctatggcttccccagacaaatgtaccaggtttcacttagtagctctaaatttagagtgctcctagtcaccctctgtgccagtcttgtggttgtagaaaacgaggatttgagtgattgctatttgatcctttttaaattaa

SEQ ID NO: 107326 - DNA, 203 bp, Glycine max
aaaaaaaaagaaatcctctgtatgttctggaaaaaccggtccattcctgtgatgttccgcaaagaccaaagaacataactgttttgcttgcatgaaacacacttgtggagttcaaagccccattcattacctgataatcaatctctcccaaaatattgcgctgcgctcggtcagagtgagaacagagcgcccgagttggtcat

SEQ ID NO: 107327 - DNA, 275 bp, Glycine max
taagtatattagtttctgagatatagagagtcttaattgattaatcctgctattaattcagagaagcctgtgagtcctgagatttcaagtgaagaaaatgatcatgatcgagaagatgacactggtggaaccaaacgctcttatgagtgcacattcggcaaaagaggcttcacaaacgctcaggctttaggcggccatatgaacatccatatgagagacatgggcaaggccaagcaattcacacttgatgcttcaccttcagttaacaaattcaa

SEQ ID NO: 107328 - DNA, 111 bp, Glycine max
atttggtcactcagcacattggccatggaggctaacctgtgcatatgtcaatagccagaatgtgataagtgacacgtctctctctgattgttatcgccttgcacttggaag

SEQ ID NO: 107329 - DNA, 277 bp, Glycine max
ctctgtctttgaagaataagtagatccaaagataatcataatgaagcgaagtgttgagagtgtgatggggtcacgtgcggtaccatctcaggccacgtgattcggcttgaccttagcggcgagtagcttcaaggtcaactccatccctagagcaccatcttcagcctaaggcaccgtcaacaactcgaccgatcctatgatgatggttcaggctctgcatgatattctgcagtgtgggatctcgtcaagctcatgaagcttaatgtggcatactctc

SEQ ID NO: 107330 - DNA, 172 bp, Glycine max
cgcgcgaccagtcagacttctgggaagagcacgtttggtcgacggcggaacaccgtgactgagatgtgaatgccggtccccggcgagtgggaggcatgcgcgccgccgcgacggtcgaacaacagggacaactgcaacgtgatgggtgtgtcgctggcggtcgaggatgggg

SEQ ID NO: 107331 - DNA, 229 bp, Glycine max
tttcgagccactccacagtcccacttccgggttctcgcgttcgcactcgctatcatccatacctctctcttcctctccacaatcgcaacccaacaaccgctcctctaagatcaagacactcccatcactcattgccatcgctacctccgcattaacattgcccacccaacccctgactacacctctgctgtctgttgccgctaagcccaggcccaaagccttggcctca

SEQ ID NO: 107332 - DNA, 271 bp, Glycine max
tgatatgcttgattaaatttaattactgaagacgttaagtagatgcatgtccaattcagggactgaggaaaaaactgtaggtggtctttctgctttaataaatttgggttaatcaacaagggacaatactattggaacgtgtatttatccagttcatatggtggctagagagaggtgggaacataaaagagcagctatggcggacgtttagtttcattgtggtgtcctttgtcagtgagtgtctggtgtatgtgtcactcattggggataa

SEQ ID NO: 107333 - DNA, 146 bp, Glycine max
cttgctatgatggcattggatatgataggtgttgttgccatgaacggtgattgagtaagctgcttccgctggattatagagcatggagcatctcattcgactccgttctccaacctcttataatgccaattctgcttcgtgcgcct

SEQ ID NO: 107334 - DNA, 151 bp, Glycine max
agaacccacagtgcacgctgatcattgatcacagaaccctagaactcaactctggcttcagcaaaggatctcagatacttgagtagatgtctcaaagatggatgtagatgctgtgctttcagtctccggcgatcaagagaccaagactgcc

SEQ ID NO: 107335 - DNA, 189 bp, Glycine max
acttccaatccccttatgtgaggtcaatcaaggaccagagaagcggcctgaccacgatgaatgggtaacttgtgacatcgactctgatgagacgtgtgatgatgtatacaacctggcttgctcataagtatgtggatgaggaggaggtcatggttcggatttaactactcaaaggaatggctgcgctgg

SEQ ID NO: 107336 - DNA, 221 bp, Glycine max
ccgagatcaagcactctcagacaaggcggatactcgtcctcggtgtggctcatggcattgattaggcgagtccagttgtcagcgacataattcgtacacccggtatagcgatggagttggacctctgagttctctaactctagctaggattgagcaacaagaacaagtatcgtactacgaacgagttggaagtaggagtggtttttggcaagcttttgagt

SEQ ID NO: 107337 - DNA, 271 bp, Glycine max
gagtgttgcaggttgtcttgcgcgtgaatcaatgtctgcctgcttcggcgtcttcttcttctcctgtaccctgctcttctccttctgctcctgcctcttcttcagctccatgatgaagccctggtgtaactgcgatgttggcaatagctacttgacggtgagagagcggataaaggtgccccaatctctggtactggtgacactcatctctgtcgtaagtccccaaccggcaccatccacgttcacgtgttgggtgacaccatcacctcgt

SEQ ID NO: 107338 - DNA, 273 bp, Glycine max
gtgggcatagggagtaggtggggattgtcacaaagtgtgcagagtgggaaggggaatctgactggacagcgagagcgtagcggcgattcatgggttcctctccgtcaacacccaaagccaggcaaacaaacattaacctgtaaccagacagaccctaagttttgatctgcctctcattctttgttcccttctcatcgattcctaaataatctattagttttcatgcagggaaacactcctggcagcatggaggctgatggtaaacctcctgag

SEQ ID NO: 107339 - DNA, 268 bp, Glycine max
gatcaagatggatttctaatgcaagaaagactttcaagattaccattaaagatggatgtccctgagaagattctttatcaagcccatgttcaacctggtccagttgctgattttctgcatgagaatggtattttcttcatatatgctagtgttgacattctttgtgagaattgagaaaatgtgtataaggtagagtaaagatgatttattgcttgtgtgttctaaaccaaatcaagttgctttctaatgcgtgctattttcttgcagc

SEQ ID NO: 107340 - DNA, 205 bp, Glycine max
gtttctctcctcatcgtacaaccacaacaagcctcgcccgtgttttgccgcgaacgattttgtgtcagtcccatgattgttaccgaggatctgctggccactgctccagcaactcgttggaaaaactcctctcttctgatcttcatcatcagcttcgtcgtccttcttccagaaccttcgggagtcgatgacggactcaggttgc

SEQ ID NO: 107341 - DNA, 265 bp, Glycine max
cgatactcaaggtcacgattagcaattataagaagcactgtctcgtatgtcctatcagaccctattacagatgcacgagcgcagacacgtgatatggctctggaagctcttcaatcacccatatctgccactccatcgtttagtccctttgaagaaaccaacctcagttacttggagacatcgtggaccttaggaagagcgttctaagcgtagcgcatggagcagcaacggcaacactcttcatgcaccgaggaagattacctcg

SEQ ID NO: 107342 - DNA, 265 bp, Glycine max
caacaacaacacacgaggttcacagttgtgcttcgctgctgactcctgcgtagcaccgctacttcgcaggagataatatcataccctcatttccagcaactcaatgtcagacaaatcctcacaggaaccagactcaacccaacaagtacctacagagacctccaacaccataaactcaacatttccagcgaagcatcttcagcggcagaatatagactgaagctagttcacagagacaaagtccccacggttaacacgtcccagc

SEQ ID NO: 107343 - DNA, 147 bp, Glycine max
ggatacattaggtggtgcaggaggtgctgacagtacaatgcatgctgattttcaagtacccaatgaagcaaaagtagggcatgagtcaggcaggttgaatgatattgtgagtgatggtggtgccaacaggcatgctgataaaggatc

SEQ ID NO: 107344 - DNA, 153 bp, Glycine max
tgatgatagcaagttggtgctgataggcatagacggcagcgagcagtgcatgttacgcggctgatatgtggctggtggagtcacttcttcccgagcccaatcttcaagcgcgttctcatccactcaaggctcatcggcagctccgccgtgggc

SEQ ID NO: 107345 - DNA, 260 bp, Glycine max
gcagcttaaaaaaacaaggaagtgaaaaaaaatatatatataaaaaaagaattgtgaaaagagaaggtagaaaacgaggaggagtaggtggaagactttgcggtcaaaacaagggaggtttctttctttcttactttttggtgtagttattgggagcagtcgtggcttgctttagaaattggacctctccagcttttatgtatatttgttttctttaattttgctcttttggaatattcttaatctttggtgggtctgtt

SEQ ID NO: 107346 - DNA, 252 bp, Glycine max
tgagtctgtaaggaaaggcaaagaaacaagaacaaccaaacatttcctaacttggattccgttttccccaaatcttaattactgcaatgccaatgcgttagcaaagtttcaatctttgccaaaagggatcatggggagggacccatcttctgccaccgtcgaggtgcaggttcatccgcgccgcgacaccatcgccggttgtaggcggaggctctctccttcaccgccgagcccccccgccgtgcgcgatcg

SEQ ID NO: 107347 - DNA, 243 bp, Glycine max
aagcaatggcagcgggataatttagagtcactgatattacgagaggggtctttttgtaaacctccttttcaatgtcaaagcaccaatttataaaacgctgcagatgtagaggttatgtgcaactgatctgtccagtttgtgtatgaaatggatttgataaagtttttgctagttatttactacattttgggattaataagtgcattatatgcatatttttccggaaatctacagttttttgta

SEQ ID NO: 107348 - DNA, 252 bp, Glycine max
gttatgtacaaactagtttttatagctatcaacattaggagtaactttcaaccttgccagcatcactggtatgatgtatatttaattaaagcacacttttccccgaccgtatacttaaaatgacaaagccattcttttaaatatttgtgactctttcctaaagccaaagtttctgttgaattatgttttgacacacccctaagtacaaggtggtatggttgtatacacatgctgccttcttggggattcaaa

SEQ ID NO: 107349 - DNA, 255 bp, Glycine max
gcgctttccatccacccctttgaatcattccaaattgccaagcgtgatctatcattgtcatacacatcacaagacgtacaccaaaacaaacctagcattcttctctccatccataaccgaacaaaattaaagaaaaaaaaaacccactattcaaaaccaaatccaaaaaccaagacacccccattaggtagctaggccttaattgatctccttttctttcaccaccaccaacaacgatgtccatgctcgaaaccg

SEQ ID NO: 107350 - DNA, 268 bp, Glycine max
gtccaaggaagctcgaagcaggtttaggaccaggtccccttgagaggtcagaggggcctgtgtgggtgctgggtactccagaggtgccactggtggaagggtcagcggagcccagcaggaagggtgggccagccaggccattcttagtccctgggttggggaggcagggagctagggcagggaccaaatgaacagaaagtctcagcccaggatggggcttcttcaacagggcccctgccctcctgaagcctcagtccttcaccttgcc

SEQ ID NO: 107351 - DNA, 266 bp, Glycine max
ctttagctctgcatgtccatattctctcctccataaacacaaaaagcctgccaaagtgaaccccacaagtttgaaatctcatttaataccacatttgcacttccatttattatttatgtaagatcttctggactaagtactaacaatcaatttgtttccatgcaacacccttcaccaaatgtcaattatatttaagctgaaatcaaatgtatatacttaggaagattaaggtttaaactctctctctatcctgagccttctgatga

SEQ ID NO: 107352 - DNA, 256 bp, Glycine max
atcaagaggagttacctattattcctggggtgaattatatctcactcactcaagacaataaaaacaaagacattcttaatgctggattgacatatgaatcaccaaaaacccttggcacttcctcatgggaaggtatcttagacaataatgctggaagtcaacatgtgcattttcagcctttatttcctggaacacagcctgataacatgggaatcaatagcaatttttctcaaggagcagagataatggtgccata

SEQ ID NO: 107353 - DNA, 265 bp, Glycine max
ctccaaatggagaagctgggtacagagtttggatgtgggtggggtcagaagcagatggtcaactcacgaaaggaggatgtgtttaagcctaggagtacctgatatcaacatggacagattctaagccttaagaacactctggggtgagaattgatgtaacatgaacaattctgtaaagacagaaatatgcatttgttaattcaagtaacaagtctgaagtgtcaatgatgtgggaattgctgcactaggtgctgaggagataatg

SEQ ID NO: 107354 - DNA, 262 bp, Glycine max
gttgggagctctccaaagaaactggttggttttaagaaaatagtttcaagaagttcaactatattcttttagatattatgtattgttttactctgattaggttactgtgataggcatttattcatattctttctataccactgtcattaatatattaaaaagatgtatgtgttagactatcgaaagggccttattctctctttctcatagactgaccttcttttggaatttctgagtcatttattttccttagctttttcca

SEQ ID NO: 107355 - DNA, 259 bp, Glycine max
aaaacaaaaaaaaaaattcacaccattgctcacagaattggcatctcatttttgggacctcccatctttctgttttgaaaagtgtacagtagtgcagtgttcctgatgtaactttatggcttacaatgttgacatgtctcaggttcatgtgttgcgattggtgttttccgtctcaggtagattgcaaagtgtaggccccacacattggaaaaaataataataaaacaaggcaaaaacaggaaattatggattttagttg

SEQ ID NO: 107356 - DNA, 260 bp, Glycine max
gctcaacaaccacctctgcttcctctgccccacgttgtttcgccaacttatggtagcggacaaggccttgttgttgttgttaataaaaacaaaaacaggagcagagacatgtctctgacacctaagaaatcgaaaccaacgaagcgagaggaagcgacgaagagatcggtgacacaatctgataaccgctggggacctgatcccaaagaccttcccaaagtggtgctagggatgggaaacaaccaccacgacgtcgtttc

SEQ ID NO: 107357 - DNA, 256 bp, Glycine max
  unsure (1)..(256): unsure at all n locations
cctctcccttctcctctcacatgctccacacaaatcgctctattncccgaagatgaagaaaacgacgacgtatccgagttccctggctttttcgtcgatccaaagcctcaatcctcgttgcgacataacaacggtggtgattcgaggagtgttcgagtgaagctgatgccggagtgcccggtcatatcagtatcggaaagccacgaaactcgtgctttggtgttgagagtgaaggctcgccgtcgccgccgagatg

SEQ ID NO: 107358 - DNA, 271 bp, Glycine max
gaaattcgtgacccgtttcagtgtactcgtatatggcttggcactttcaacactgcagaagaggcttccaaagcctatgaaaccagaaggcttgagtttgaagccatggcaaagactcaaactctaaaaactggttctgaacctttgtctacaacttctgataagagtaactgctgtaactcctctgctgctgccgccgccgatgtgtctgtgtctgaaaagttttctactacttctgatgactcggaagagagtatgttgtcacacaatt

SEQ ID NO: 107359 - DNA, 272 bp, Glycine max
tgtctggcctgtgggattatctgaacgaggctgccatcaccactttctctgtccttgggctcttctcctcccaagctgccgccatcctcagcaccctccttgctgctgaggtcatccccaccactgtccggggccgtggcctgggcctgatcatggctctaggggcgcttggaggactgagcggtccggcccagcgcctccacatgggccatggagccttcctgcagcacgtggtgctggcggcctgcgccctcctctgcattctcagcatt

SEQ ID NO: 107360 - DNA, 272 bp, Glycine max
gtggaaaaacgatgctcatatcgctataagagactgctatgctgcaagggaaattgataattcctcttacaaagcactatactatatgtcagaggcattgtcacagttgggtagacatgaagatgctttggagtttgctgttgcttcccattcattggccccatccaaatctgaagttgcagaaagagtagcgaatgtgaacaagggacattgctttggctgaagctgaaaaaagtagtaagaccaatgatggggcatcaaggtttgatagt

SEQ ID NO: 107361 - DNA, 240 bp, Glycine max
atttgaggcagggatggccaaatattgcgacagcctcgtaccgcacactcttgcattcagggttggtctactgggagcgagaaagcgaggtgtaagaaatgggactgggccgcgacatagacggtctgctcaagaacaacgccaagcaaactgacttgaccccgctatggttcttggaaagagcagctctcgtccaccccaccagaacttccgtggttcacggatcacggcactacacgt

SEQ ID NO: 107362 - DNA, 275 bp, Glycine max
gaatgactcctggcagtggcgctaggcaagcgccccttagccaggctgtcgggcttgcgtccaagcgcactaacacctagtactgcacggggctcaatcagagctggtcttctaggccagaacgtgacctctccgcaaggtacctggcccctgactcctatatccaggactcgagaccgtctgacacctggcaatgcatgactgaccgatgagtagactcagcatacgcatgcgtgcggctgctgtcctatcagacttcgcttgtgtcagatggg

SEQ ID NO: 107363 - DNA, 195 bp, Glycine max
ttgtgttagaatcatcatggggttgcaaaaccaatgtaacgacgtgtcgtcggttcgattcgctctggtgtgtgcaataccactggtcatactcagtcatgttccgcttgaaaccagctagcgatcatcgacaattcgcgacgtctgcgcgcgatcgctgcgactatattctcgatagtactagagcatctcaca

SEQ ID NO: 107364 - DNA, 256 bp, Glycine max
gagagagcgagagagagagagagagagagagagagagagagagaatatggccagtgcacacggtcttgctccaattttcatattgggttgtgtgttttccgctgtctcactatcataaatgaagaggcaccctttgatgtttcgtgtatcacactgtggattttccctcatattctatggtgagctatctgccagctcctgtaagttcataaacccttcctgtgtcagtgcaaaacacggttcattaaggtgtttt

SEQ ID NO: 107365 - DNA, 254 bp, Glycine max
cttttctctcttgttctcgttctcgttgcgtggaaatgaatgcgtttcgtttatttttttcattttcggtttttttatttgaattttttgggaaatagcattgacgtgttttttttttttatcggtgaagattctgataatcattttcacgacgatgatcttgggatgcagcggggcgatgaatctgctcgaagtgaaaatgagtcaaagtttcgtaatgaactgaagcatataaagtggagacctccaggtat

SEQ ID NO: 107366 - DNA, 247 bp, Glycine max
tttgaagaaaaatataatcagtaactcaaatagagagcatcatttgggaggtaatggtagatgtcaatagttaattcgtttttgtgcctccacaaacattccataattatatacagggtttatgattatggaatgtttgtggaggcacaaacattccataatcataaaccctgtatataatttaaattcaaaaaaaccaaaaaaaataaatcatagctggttcttaggttataactgcccaataaat

SEQ ID NO: 107367 - DNA, 257 bp, Glycine max
cctaaattgggtgatcaagacattcacaaatgtgacactgtctctcaataaaagagatagaaagacaaccttcgaatattgctttcattgatcatttttctagttggatgtgtttttttaaaaataagaattaacctagtgttttcagctggtacttctttactaatcttaaaaaagctttttatgtaaaagagctcatacagaagtcagagggaaaaaaattctagctacttaaaaaaatgattggaaaaactgta

SEQ ID NO: 107368 - DNA, 221 bp, Glycine max
ctgttcgagcgctaggtcacagatacgctcagccgccagtagcatcagtataaacctgatgttcaaaatacgtggcaatagttactctgggagtcctatgggaaacagccagccccaattgttcctatatgccgagctcgaatcattggactgcacgatgagtcaaagcagtgaaggaagccggcaatctctgagcgaagagaatcagtgcaagctccagg

SEQ ID NO: 107369 - DNA, 262 bp, Glycine max
caggcttctcagatcccagagtctctctttcctacctcctcgatcttcagttgaccacggtcaattcagtgcgtccattagggggacagtcccctccgggatgaccggattcacctccagcccagggaatggcatctagaggaatacgagtcgtgggtctggacaaggagcggcaggcatcatcacccatctccagctgaggagccctgtcgcaaggatagggaagctggggattcagagggaatcttccacgagaggtgtg

SEQ ID NO: 107370 - DNA, 168 bp, Glycine max
gtcagactctcactgggactgtatagttgctgtttcctgtatttgataatatctgtcaagaactgcagggtaattcaaagtcacgctattagcagcaagtgtgagcagtgttggtttccccagtctctacatccctcatcctttctttcttctttatggttgtctatt

SEQ ID NO: 107371 - DNA, 263 bp, Glycine max
gtttgacccaactgcagatttccacacttattcaattctttggaatccccaacgcattgtgtaagcattaaccacccaatccatatcttctctctctctctatctatctataattgcaaactgcagctagatatagatcatatgtttgtgtagcacataagttactaatttcatgttttataattgcgtgttgcagtttttctgtggatggcacccccatcaaggaactcctattgattccaaatagccaaccgatgaggata

SEQ ID NO: 107372 - DNA, 166 bp, Glycine max
aggtcagtctgcagctctcccgtgaccgtcaaatgcagaacggactcatcgctgcagacaaacataggatctcactgcgtgagctcggtagagttgaattagaggactaggactcagacatggctacacacactctgcatactcattgaacgcggcctacgaggac

SEQ ID NO: 107373 - DNA, 257 bp, Glycine max
taacacaattacacaaagcaaagcatagcatagcggggcagaggataaagaaaggatcaaacaaagtaaaatataacagagcacctctctgttcttatttctctctctgttcctctgcccgccccatatcttcttcttctttccgaaggtgcccagtttcaaattttcttcctttcctgcaccatttattgcctcttctcaagtttcttcaatttggctcataattttgaacatggtatttgccttctgagtgcaaa

SEQ ID NO: 107374 - DNA, 258 bp, Glycine max
cttttgttctgagttcttggtttctttggtttctgcttctgacaatatattggaacttggtatttagggattggtgctttttctaggggtacccagttagaacatttttatcttcttcttctacttcttcttctctaactcatatagtcaaagctctcatctttgataagttgtgtacaaggtctatgagtcgttcctcgtagtgcagagctgggcatggtcttaacgttgagtctgagtgattctgctacttactat

SEQ ID NO: 107375 - DNA, 260 bp, Glycine max
caaaaccttcaagttttgaatatttatggtttagatagtttcactgcaatctgtgaggaagatgctgttgatttaacacgatctttgtctccaaggggtgtgttctcaaatctcaagaaatttcagctcagccaatgccatgaaatagagacgttgctgacaccattgttagtgccacaacttcaaaacctagaggttttatcggtcgagagctgtaggtccatgagagagatatttgcagtgagtaatagtggcaatga

SEQ ID NO: 107376 - DNA, 256 bp, Glycine max
tttggcgtcatgttggatgtccacacatccatatggggtcagttctattaggattccttcgggaagaggtagagggtaggaggggttaagccacgagacgaggcatgcagaggggtggcctggatgggtctgcactgctgtccatgctcacggggagcgttgcaaattgtgcttcccagcccatagtgcccccacagaggagcccgggagtccctggtgggcgtctgtgttcctgcaagagccagtggagatggcc

SEQ ID NO: 107377 - DNA, 193 bp, Glycine max
ctgtatctgacactagaacaaaacttgacgggtaaataaacattgaattagaatgaatcatagaaaactgattagaagaatacttgatgttatgatgattgtggtacaagatagttaagtatgttctaatattgtctgctagcattgcgaagcgattgatcatagattaagtagaaattcagcagtaggccta

SEQ ID NO: 107378 - DNA, 252 bp, Glycine max
ctcaccgctccacccgcaaacaaacaaaacaaacattactctatctccaatctcccttctccgccgcgccactcatcggaaaattcaaaccaccgccggaggttatggacgctccggcaatcgctgctgatcttgatttcccaagcaacaaccatcgcttgtttaagagcaccaatcttcttatctgctaaaattagcggtttctagtcaactactgcaaagtttcgcgtgcagcttctgcagagtttcagt

SEQ ID NO: 107379 - DNA, 252 bp, Glycine max
ctgcagcgccatcgcttttcgcggcaccgcacccgcgccacctcttcagtcttcattcttctcacttcacgaatcacgaccgaaccgtgaaaaacgtttccagactcccaccgtgccacctcttcaggtgtaaaaatggggttatctgccaagaaatctagaaaaagaggaaaaagggacagtgattcagatgaatacgataatatggagtatgaagaggtggaggatgatatcatgatgatggtgaggagg

SEQ ID NO: 107380 - DNA, 254 bp, Glycine max
acggaggcttgttaccatctcacccaacaacaagcccaagatgaacactgggaagatccaggagtccatcggggaagcagtcaatggcattgtgaagcacaaacctattatgagacattagagaagaatgaagtagtccctgaggaaaactggcatacaagagcccggaacttctgccgatttgtcactgcaatcaacaatactccccggaacatcggcaaggatggcaagtttcagatgctggtgtgcttggg

SEQ ID NO: 107381 - DNA, 256 bp, Glycine max
cttctatccagatcacaagtactactcacactcactggagatcactctccatcgataccattgttagcatcaatgcccgccacatctcatgtcactcgcggcaactacaaccgtctacagtggattcgacatgcaccgatggtacttatgctagagctgctgttccaagtggtgcatccaatgggatctatgacgaccttgtaatttctagatctacgatctgtctaccttggaatatgtgtatcaaaggctgttg

SEQ ID NO: 107382 - DNA, 100 bp, Glycine max
gacagcttttcctctctgcacctgcgctctggtgacttggggtggacgcctctgccttcacttgaacacaaatgtgcttcctataaaatcatgtaccaag

SEQ ID NO: 107383 - DNA, 258 bp, Glycine max
cggctcgagatttcattctcttgtatataaaggaagcaatgtgtgtcaggcctctgtgcagtcaacccagcctcctcccgccagtgctaaccccgtgttgagcctgcatgctgacactgtggccgatctggactctagaagtgctagtttgaaatatatccattactgtcatttccttttgagcttgtggacaagctgaatgtcaggactgacttctccagctcccagccctgcgggggtgtccttggcatcccatca

SEQ ID NO: 107384 - DNA, 247 bp, Glycine max
aaaattaaaaaatgagtacaaatgtaagtgataattgagttagcaaataacttcccatattcccatggagaatataacttcctatgaagcacggacaccccagccccttgtcgtgtctggtgtccgacacgcgtccgtgttagtgccgaacactgacacgacacccgtactacgttctatattttggacattacaggtgtccacgtgtccgtgtccgtgtccatgtccgtgtcgtgtccggtgtccg

SEQ ID NO: 107385 - DNA, 248 bp, Glycine max
gttcatttagttctaagaatagaagggagctgatagatcacataagtgtggcaatctgtactgggtttatgacatcctaccatgtgtaagtgctacatccagtggacttgtacatggtaggatgttataaagtcattacagatggccacacttatacgttcatttagttctaagaatagaagggagctgatagattgcactagagagactatgagtgcatggttaaggactcagtaaaagctgtaagt

SEQ ID NO: 107386 - DNA, 254 bp, Glycine max
cttgctgaacacacacacacacacacacacacaggtggggactgggcacagctcttcacaccattcattctggtcatttcccccaaaggcatcccagcctgggggccagtggggaactgagggcaaggggatatagtgatggggctcagatggactgggaggagggggagggtgatgcattaattaatggcttcgttaattaatgtcatgttgcttgtcgctttctcagtgtgtgtgtgtggtccatgcacact

SEQ ID NO: 107387 - DNA, 143 bp, Glycine max
tgtctcgttgataaagtttgtcgtcaacggcggacgcgtcatcgacggcggactctgcgacggagctggagcgccatgggccgatctcaatgatcctctttggagcgccaagtgcctcttttccttccctcacctcagttcgc

SEQ ID NO: 107388 - DNA, 267 bp, Glycine max
ctttggaacagaaagggaaaaaacagtcttatcctgacaggagcggtctatactagtgcagatttcaacacttttttttaacgttttaattactatagtgttatgtagagatttgattgagcagctaatgtttctgaactttacttactaattttcagtgtccttaagggttctgtagtgttatcaaagcaaaagaaaatgctgcataaaaataccaaacttcagcaactgttaatactcagatcatatacctcttaataaatagca

SEQ ID NO: 107389 - DNA, 270 bp, Glycine max
atcaggagcgaagttgggcgggacttcagagatccgcctcccttgcccttcccccgcccccggacggtcacagcacccaaaccgcaggccctgctctggcaggcaggcaaagctaggcagaagaggattcccaggatcctgggtctgttccctgccccagtgctgcagaacggacttgggagctctcctttgctgctcccgcgggtcacccagcgagtgctgagaccccattttctgtcgaggcgggccgagtcttcccttatccccaga

SEQ ID NO: 107390 - DNA, 268 bp, Glycine max
ctgagctaagggtaaggcctaaaacatgtggaaaagggtttgtaccatgtaaaaggcgcatggcagagagagaaagcaagtactcatcaatatgttacgaggagagggaagagcaaggtattaagctttccttgtagtaccctcttattggcttttcttcaaagcagcttcccttttacaggtataatgttctgtttctgttgctggatgaccatgtatttctttttaatcctgggtcagagatcatgattgtctttcaacttattgg

SEQ ID NO: 107391 - DNA, 171 bp, Glycine max
agaagccctcactcttccaaaccttctcttccctcttttcttgctttcatcctcaaatcacaacctaatattcccaccttcaactttctcccccaaatcgatcacccccaccactgccaagtcccattattctatacatttattcgtatatatacatacaaagagaggggg

SEQ ID NO: 107392 - DNA, 258 bp, Glycine max
atttgttgttttggaattgcactatacataatacgaagagcagttcctggttgataggggagttattaggaagtattcaggatagttggttatttgtaatgacaattatgttctttctttttatggtaaaagataatagttggacctggaggataaaaaatgaaaccaagtatggaactaccttttctagctttagcatcgattgatcaatcattgacattcattttatttttacagagttcatctagatcaccaagt

SEQ ID NO: 107393 - DNA, 151 bp, Glycine max
tcattgttgatgatgctgtcaaggtattaaagactcatgtgtgatcgaagccatgtctaccattactcctgctgctcataggtgagctattgagtactctaggcctgtgtctctagtagttcaatcatgtcttcagagatagttagagaga

SEQ ID NO: 107394 - DNA, 191 bp, Glycine max
caaccatctggaaaacgttacataatggaaattgatccaagtagccaccacccaatggccaataaatcataatgtacagaggcaaaaaagaccataccatactaaattaaaatttccacaaccaccacaaaaaccagggtatggctcagagccctgatcagcagataaagcccttagctcaattaatatga

SEQ ID NO: 107395 - DNA, 202 bp, Glycine max
gaccaaccgggagaccatggaattgtcaaaagtacaaactgacagtgtgtatatttaatttaaagacttatttaaaaactcacaagctctcacctagactttggagagcagtctgttttctgtaatgtctgatactagaaactaatttgcttatttaagtggtatccaagatttgaggatgtattttatagacaggtctgtt

SEQ ID NO: 107396 - DNA, 217 bp, Glycine max
gccttgtgacgtctttctgtcatgtagcttttagggtgtagctgtgaaaatcatcagaactcttcactgaagctaatgtttggaaaaaatatatacttgaagaaccaatccaagtgtgtgcccctacccccagctcagaagtagaaagggtttaagtttgcttgtattagctgtgccttcataattttgctatgtaaatgtgacatattaataataa

SEQ ID NO: 107397 - DNA, 191 bp, Glycine max
aatccctcagaagcaaaatacatgctccataccacgatccgagactttaattttttactgttgctatcactgatcgttgattagtacaacttaagttaattttggtgcaaaaccaacctggtgaaggcattcttttttgcttctaaaattgcatttggtgaccaattaagtcgttggtctttcgctttctg

SEQ ID NO: 107398 - DNA, 188 bp, Glycine max
cttctctcatcacctaaaagcacaattttattttcattgagattataatttaaaaatcatgtgtcatacattgttgcaatgactaatgaatactttgtaggtacatacgttgttgacattttttaatttttatttagattagagaagatgggtgctcttgaagtgggtaaagtgattcatagacacca

SEQ ID NO: 107399 - DNA, 180 bp, Glycine max
caagcccctcaaggcttcctctgctgactggaaccccaagtgcttggccacatctttgctgacaaacacctgtgggcactggaagagaacctggtcgtcacttctaactcgtcattcaccaacagcagcctagcgttgcccccattacaacacgactcccccaacatgtcgacataggat

SEQ ID NO: 107400 - DNA, 179 bp, Glycine max
cacttctggtcatcattgcagcaacatgcaggttttgagttgttggttattcaatatccattgacgccaaacggatcagccagctggatgatgagaagaagaagaagattatggagtgataggcagctcctctgaaatgggagcagaagctggaagctcgctgctgaaactaaagagag

SEQ ID NO: 107401 - DNA, 265 bp, Glycine max
tagatcgcagagaagaacagagatagatccatccatcaattccaatggccgatcagctcatcgaagaacagatctccgagttcaaggaagccttcagcctcttcgacaaggacggggatggtctcttttctcagatcccttttctctctctctttctctcttatttcattagatctcattccagtctcgtttatctttattacccttttgattattttgttaaattgttaatcttttgtcctttgggtgccttctcctttcactt

SEQ ID NO: 107402 - DNA, 99 bp, Glycine max
agtaagtagtaagtagtaagccactatcgtttctctctaacagcagaagagttctaacctcaccagacccacactaccatgggtaatgagaatcgcgag

SEQ ID NO: 107403 - DNA, 175 bp, Glycine max
aaaacaaatagttcagttgcattcatccttgtatataacacatcccttgcaaagcacgaagccaaagccaatccaacccaactcaacctccaaacacaaaaaccttccttcaaaaccaggcaattcattcccaatgataatgtctcagaccctcggttccgatgagccaccccag

SEQ ID NO: 107404 - DNA, 180 bp, Glycine max
gtctagaaccactaaccccgcattgctgttgatcgtcacgctcgcatctatagataacggctctccagacctgagctttccgcgtcagcaagtaggaatcgtttttgctgcagagaataaaaggaccacgtgcaatacttaaaaaaaagaaaaaaaaaaaaaaaaaaagggggggccccc

SEQ ID NO: 107405 - DNA, 254 bp, Glycine max
ggcattcaactcttcacctttcatcacttgcaagatagacttgggtttctgtgcttttccttcaccatcctccataattgggaagagacagaaatgcaagataacatcatcaaataagattgtttctgttgtgtcatcccccaagaacaaacgcagcccttctgcaactggctcaaccaaaattccgatgactgcgacagagaagattcgggcaagagctgccgagaaatgtgaggtgaggccaggggagaacg

SEQ ID NO: 107406 - DNA, 258 bp, Glycine max
gtctgttttagtgactctgacacgatgctgtcctcaccttccaaatacccagttatttattcaagaggggggaagtgggtagaggatgggatgttttggaagcactttgcaacttaccactatctgaaaatcccctggcgttgcggggagaagctttgaatgcactgaagagaattccttctaaatgaaggcaggtgatagtgttctttctgtaagtaaagggaaagaaaaaaaacatagtttgcttaccaggtggag

SEQ ID NO: 107407 - DNA, 263 bp, Glycine max
gtgaaaccctaactcacatcgaatcgactacgagtgtgccgagcttctgcgaaatcagttttctacagtgggaacgaaaaagacagaggatgatggaccatctgataaggtcaaagatagtagcaaagatcctcggaagaaggaaaaaatttctgtctctgccatgctggccagtatggatcaaaagcctgataaacctaaaaaagtctcttcttcctccagtaagccgaagcccaaatctgctccaaaagcttccacataca

SEQ ID NO: 107408 - DNA, 263 bp, Glycine max
ctcgcgtcctttctcctctcctctcctctcctctcatacctcaacccaaacccattcccatccccaccctgctctcctcccttgacgttcactttgcttcattgtgtatagttactattattattatctatatatttttgcaaaggtgtttcatctgtattattaggaatatcagattcaggtccctatcaccaagatccaacaacttctcaaccacaagaagttgttatttcctttgattcacgaacccaaaaaaaattaaa

SEQ ID NO: 107409 - DNA, 261 bp, Glycine max
cattcattcacttgtagtttttgagtgcacggcattaaaaacaatttcattccttcaaaggaatctctaagaattgttcttgctcttgcctcgttgtcacaagcatctttttttgcttgtttgccttagtctttcctactttggtggctgttttttagatttttgaacaacaataaatctatggctagatatttttggctttctaggtagtggcaacagagtcacatgatgttgcaggtcttttcccacttcgaatatact

SEQ ID NO: 107410 - DNA, 262 bp, Glycine max
cttgaaaatggtatttcagttattggtagtcccacttcagagtcttccaaggcattggcagatgacagtagtggtaactatgtacagagtacaagtacagcaggaagtgtggagtctgcttcaagcactgatgcatctgggtccgatccaaagactcctccaagcctacattgttgctatggatggactgaggactggcgttggctcgtgtgcatctggacagactcaaggggagaattgctggactgcaatattttcccct

SEQ ID NO: 107411 - DNA, 259 bp, Glycine max
acaccacctgacaggccttctgggcctccaaagcccatccttggggttccccctccctgtgtgaaatgtattatcaccagcagacactgccgggcctccctcccgggggcactgcctgaaggcgagtgtgggcatagcattagctgcttccggccctcctggcacccactgtggcctggcatcgcatcgtggtgtgtcaatgccacaaaatcgtgtgtccgtggaaccagtcctagccgcgtgtgacagtcttgcattc

SEQ ID NO: 107412 - DNA, 259 bp, Glycine max
gtcttcattcacacttcccatggaacacgcattccacttcacgcaccctctctggcttctatgtccccggttctggagaacttggtagatcgcccacgctagcatcggagctccgagagaataatccaaatccacggcgtcccctgcgacgctgtcaccgccttcgtccgattcctctactcctccaggtcagtatctgcacaatcaattggtactatattcattcgaattttcggcgaatgtgaaatgaccgaggtgc

SEQ ID NO: 107413 - DNA, 255 bp, Glycine max
gcgcttcgcgagctgcagagagcacaagacaaaaccgcatttgtttgcatttgttttaattttcttcgcttaagcgctgtagtaggtggtgttggttgtttggtgcatttgattttgatttggtattggaagaatgtggaaggttgtgcgattcgcggcggccagatcgcggcggttctcgacggcgattcccggtccatgcaaggttcacaagcgtggcactgatatcctccacgacccttggttcaacaagga

SEQ ID NO: 107414 - DNA, 253 bp, Glycine max
gtcaaggtaaggtaagaaaaaaaacaagacaacatgggactccaacattttactacgtgcgttttgttagctctttgcattctaagccaaggtttggcaaagggtgctcatggctttgcttgcaactggggaacgcgtttaacacatccccctccacctcaaataaccgtgaaactcatgagggacaatggattcaagcaagtgaagctctttgaggctgatcccgcagcactcaaggctttaggaaattctg

SEQ ID NO: 107415 - DNA, 251 bp, Glycine max
  unsure (1)..(251): unsure at all n locations
cggctcgagttcagttctctatgtactataaagtcatgacatctgcatataganatagtttcacttcttcctttccaatctgggtacttttccccccaccgatgtcagttgccctggctgaaaccgacaatgcantgtcaaataggagaggacaatgatgtccattgtcctctcctatctgacattgcattggtggttccagcatgacaactaaacacggtgggacagatggacatcattgtcttgtttct

SEQ ID NO: 107416 - DNA, 270 bp, Glycine max
gtttcaggtgttattatggggtcgaactatttgaaagctgcacaggagcttctggatgaagctgtgaacgtgggaaaaggaatctagaaagaggaaaaatttgcagagaaggtgaaagcaaatagggaaagaactaattctgagctgctggcggtggtgatggttcaagtggtggaggagaaaagagtgcagggaaacaagttgtcgaactcagcaccgctcagaggcaagaacttcagatgaagaagtctaagcttgtctccatgctcg

SEQ ID NO: 107417 - DNA, 182 bp, Glycine max
gagaaaatcattaccatggtttggttctaggaaaaaggcagtgaataattatgcaatgaagcagaagagtagacgtgctatggcttattgggtagggagagatgggtcattgaggaggacgtgccgattaaatgcagcccaactctatctgaatgcatgtcgcaatagacagggcgctatcg

SEQ ID NO: 107418 - DNA, 144 bp, Glycine max
cttcaaacacagtcttccaacaaacacgttgtgatatcgatacgaacgaggtctccttctcagaacctccgccaaatttagcggcgatttttccaacttccattttctcccctcaccttcttcatatacgcctcacactttctt

SEQ ID NO: 107419 - DNA, 257 bp, Glycine max
cgagactgactctgatctccaacgaagcatcgtggagagagaataaggtgctatcacatgccatgtctctgcggagactgatactgatgtgcatggtgagttcccggacacagagttctctgtatcagatgagactgaccggacatacgtgtagatggtatgagtaggggtgtaggtgaaagaggctcttcttggatgtatagtgacactgacgactacgttactcatgacggtagataggggaatcgaatcgagaa

SEQ ID NO: 107420 - DNA, 267 bp, Glycine max
  unsure (1)..(267): unsure at all n locations
gccctttgcagagttcagagctctcgcgagcctcgtgttcaactcctcatcttgccacctgcttttgatacgcaagaaactgaggcagaaagcagggaagcaacacagctgggtagggcccagcagagtctcaccccaagtcgcaagatgctcacccacagtgctctgggcccctcccacttccacaactgcgaccttgtttttgaccttgaacttctgtctcctcctcccaaaatgctgnggaccaactgggctgcctttgacgag

SEQ ID NO: 107421 - DNA, 276 bp, Glycine max
cagctacagacttgaagctattcattccaagaggtggcagtgccgggaagtgggaagagaatgatagctgtgtatgttggtattggggtgtaagggttgtctccatcaggagactactggaaggcatgattaggggatggagcaagggctcacgtttgtgtgagccttcacccctaaccaggactgtgaaggctaaactgtccttggttttattcccaggcctggtgagtaccttgtaattcacagtcacacacggagcagcggcacctctccttg

SEQ ID NO: 107422 - DNA, 272 bp, Glycine max
cttttccataactttttaaaaatatatatatctaaatgaatgcaatgtgcataaatattttttaaacataacagtgaactattgcaccttttgctaatgcctctatttacttgctttggcataaagaatgagccaatgaacctctgtgtcctgtggaaaaatgtataaatgttatctgatattgctcttagatgtaatgctaattaatgttaaatcacaaataaacagtattttaaatatacaaagaaataaaaaaataaaaaaaagggggg

SEQ ID NO: 107423 - DNA, 120 bp, Glycine max
atcaataaacattgtgatagatacaagtatataacatcagggcatgaacatgacttgataaattaagtagacttagtttcaatactataataggagggaccaattcatgttcatgccctg

SEQ ID NO: 107424 - DNA, 274 bp, Glycine max
gagaattttaactaaagtggttggcgataatataaaaatatttatcataattctcttacaaaagcagaaatactaatttgttatatataaaagctttgttttttgtttattaataaaaaacaataataaattgtgcgagataaagcacttggttcctttttacagtaactttaacttatttttatatatatttttgtttaaaacgacaatgaaatgaatgaatgattttaattgagcggcggggcagaggaaggggcagagttttggagtttga

SEQ ID NO: 107425 - DNA, 274 bp, Glycine max
tggccatgtcacctggctgctaggccagagccatgccaggctgcgtccctccgaggcttgggataaagcaaggggaccttggcgctctcagctttccctgccatctccagcttgttgtcccaatgaaatactgagatgctgggctgtctctcccttccaggaatgctgggcccccagcctggccagacaagacgactgtcaggaagggtcggagtctgtaaaaccgagcatacagtttggcttttttcacattgatcgattttatatgagataa

SEQ ID NO: 107426 - DNA, 247 bp, Glycine max
aacagattcaggctctttttatcatggtgctggaagaaaaatgataaatcctactacacttcctcaacagtcccttcctggtattgaggtttcggctcagtctgaaaattcttttcaatctcaaagtgttgatgctgtcaaagctcaaactgagaacaaaagtggttttcgtcttcaggccgactttgctgaatcaccacctcaaaaagataatggaattaagatgttctcagctgatcaaaagggc

SEQ ID NO: 107427 - DNA, 281 bp, Glycine max
  unsure (1)..(281): unsure at all n locations
accaattcagaactgaaaagctatgcataggacaaggaagatacatagaatggggtggaacacagcattttgtcaagcactgtgcaatattccatatttttccccactatggtagacaaccatttcgtggaagggcagcctattatcccacactgcatctaattttatgtcnctgtcacttctgtgatccattttaatttccaggccacaagacagtagtgatgctctgaaatgaaagtttgtcttcacaatatagaggcccaaaatggaggaaaactaag

SEQ ID NO: 107428 - DNA, 265 bp, Glycine max
agacatgaaaggccccctttttccaaccattgctgttcacagtcaaaacgaagagagtgtgtttcatttatctctgacagggtgcatgtcaactttgggcagaaaccatttacttttgacctaaaggaatttgaagcacaagaaagaatgaagcagcaactgaaaatagaagaaatttctgtgccaccaaatgtcagttatggaattgtccgctcctacctgctacactatggctaatgagatacattgaatccatttgatgtgg

SEQ ID NO: 107429 - DNA, 275 bp, Glycine max
ctcacctttactcctcagtaaatcaggaatgggaaattaaaaaccagtgaattgaaagcacatctgaaagatgcaattcaccatggagctttgtctctggcccttatttgtctaattttggaggtatttgataactgagtaggtgaggagattaaaagggagccatatagcactgtcaccccttatttgaggaactgatgtttgaaaggctgttcttttctctctgaatgtcatttctttaaaaatacatgtgcatactacacacagtatataat

SEQ ID NO: 107430 - DNA, 291 bp, Glycine max
atcccactaggaggtaatctattttaaagaactaaaattattattatcattatcatcggtctgctacagtggatatgaaactgaaatcaatgcaactaaatgttagcaaatggaaggcttggaagttgagtatttgtgcatatggtatgacatttatgctataaggacagcattctgattatgtggtttggttgttctagaagagaggctttgatatgatttttatatatttctttttatctgtccacattcctttaggtttgaattttaagttcatggacttgtcctgta

SEQ ID NO: 107431 - DNA, 116 bp, Glycine max
tgtagaagaacaagtagttgagaactagacggagaagcaaatggcttcgctcaatgatctcttccccagctagatatcactgtacacagtcccggcgccagcatggttcatccctg

SEQ ID NO: 107432 - DNA, 283 bp, Glycine max
tgaagggatataaaaataacgtggatgccaatacggcggcgtttttgtttggttggtttcacaccggtgatgttgggtacttggattctgatgggtatttgcatctcgtgggtcggatcaaggagctcatcaaccgaggaggtacattaattgttattatttattagtcaaaaactgattaattataaaggatatcgaaagtagtaaaatgttgttttgctttgaatttcgtatttttctgcattgataaaaggaaaggaaaatgttaactaatatccttaac

SEQ ID NO: 107433 - DNA, 275 bp, Glycine max
atcagttggtgtctaatagtgctatgcaaacacaaagattggaaccaacttggttgctgctgaagattctaacagcagcagcggcgttacaacagaagaatccgtccctcatcatcaactcaacttggacctttccattggccttccttctcaaccccaaggttcttcgttgaacccagaaaagttgaaaccagaaccgcaagagcatgatgatcagaagccacaggttttgtataagtggatgggaacacactagccagcaagtgtgtgcctgt

SEQ ID NO: 107434 - DNA, 288 bp, Glycine max
ttcattcccaacaatcagaaaatggttctgtgggcccaggcaagttctacggcaccagcctcccccgccctcggatctacaccgacgtcaagttcaacgaccaccgcattgacccacccactcccgtcaacggcccacttatgtcctgggcccaagaagcccactggtccatgggcggcctcagcttcaagcgcctccgcctccagggcaaaatagaaggcaacgtcgaaaggctccgctaccagccgtgttagcccaagcccaaagctcgagcccaccaccccgccg

SEQ ID NO: 107435 - DNA, 285 bp, Glycine max
atctggctcccgccatttctccatctccccctttctttctctcaaaacaaaaccttgcgctcttcttctgccaaatcaattaagctttcctctccttggaccaacgcttccttgacttccccaaactgtttcgcggtaagtacgttacttacttactgtttggaagcgcgtttggcacaaacaaacacgtttagtgactattaatttggcagaaagaggtatggggttgggtgaactccaatccaagggcgtcgccgtgagaagggacaccgcggagtggtggtg

SEQ ID NO: 107436 - DNA, 275 bp, Glycine max
atttttggtggtaatggtttggttccgtctgggtttctggttttgattatggttattgctacgaaaactgtttatttggtgagtggggttatgaccgtggctgggattgggttttttttgttcataaaactctgcaagacgaggaagtgggtggagtttgaacaagagaaagatgatgatggctttcaaaggtatgtgttgtgatttcaatcagagtttcagagtatctttctgctgtataagtgtagtagcagtcttagattaagtccagtttg

SEQ ID NO: 107437 - DNA, 292 bp, Glycine max
gcaagatcgtaaaacgtaggatcataagatcctaccaaaatgtaaagttatatatttatactaatatatatgtaaatatatacagagaaagtatggagaaaaaaaaaccatgagtgataaacattgaagcaaacttaaaactgaaatttcataaacataagtccataacatccactactagtctactagcactcatgctcacagcagagagagggtcgaggcttgagagattcagaaatcagagtgcaagacagacagtgtgctcacagtcacagcaagtctgaatgcacac

SEQ ID NO: 107438 - DNA, 290 bp, Glycine max
ctcacacacccctcgcatccaacaatgtctctcaccattccctccaacctctccaaagctaaggtccgccgccacaaccaccatcgtctgcagcaccaccaacaacaacaacaacaacaacgtgtcctccgacctgaaggcgttctccgccgcgctggccctctcctccatcctcctctccgcccctctccccgccggcgccgacatctcggggctcaccccatgcaaggagtcgaagcagttcgcgaagctgagaagcagtcgataaagaagctggagtcgtcgctgag

SEQ ID NO: 107439 - DNA, 280 bp, Glycine max
cgaggaggaagtgggatgaagttgatgttggtagtgtgaggaaggtgcaagatgagaaggtggatttgaggagtgagcatggggagagtaaaacctctggtggtggtgatagggttgtgaagtctactagtaaggaggatagaagaggggattctgagagagggaagagtaaggggaagtcggattcgggggatgttggtcgtgaggagagggttgagaagcccaggcaccatagggcggctgctggttatgatgtggctgaaacctgggataggtcgtt

SEQ ID NO: 107440 - DNA, 282 bp, Glycine max
gttaataaccttgggagaagagaacaacacaaaactattgtacttggagaatcccaacactagaatcctgtgcttccaatgtgggactcaagttccacgttccacaccttgcaattggttcctaacattcgcatgttatttgtccatttcataacaaatctgtgttaattctgatatgcaaattaaaatcaaagtttggcaggtggaagagttggaggagtccaggaataatctttttctagaaaaccagcaattgagggaaaaagtgtcgagtctagagtc

SEQ ID NO: 107441 - DNA, 233 bp, Glycine max
gaaagagttagatttaatgaatatggtaactcgtcatataccagatcgatcccttttttcatatgttgtataccctctagattaggtcttatgccatccgatcccgtgaggttttaactctttgctttattctaaagcatgtcaacgttacggtggaattgtttatccggtcgaagatcttggtataatggtctattatgataaattgttcatgacagaattaacaataatta

SEQ ID NO: 107442 - DNA, 285 bp, Glycine max
attttaaccaaattaaacatcaattatataatatcaacttgaaattaatttaaccatatgtttcataaaaaaatatcagtaaccattttgctttgaattaatttctgattttaagggtaaaataacactatttttcccctaattttttttagtatgagcatgtataatattgataaattagttcggccttaattataagtgcatgcatatgataagctccgaacaaaagaaatcacgtttagccaaaaaattaggtgatatgtagctgtctgatcataatagata

SEQ ID NO: 107443 - DNA, 272 bp, Glycine max
ggaagaagtgagagagaagtaagatgagaagagagagagtgagtttgaagataagaagtagtaagagacttagcaagaagcttcttccaccttatgcttcctatgctctggtagccattgtgctgtttttgttaggcgttttcttttactctgtctcctctgcttcatctccgccaaatcacccttctaattctctccccatcaccaaccactcttctctttccacttccacggagcttcctcattccatctcattcaccaaccactcctcc

SEQ ID NO: 107444 - DNA, 273 bp, Glycine max
gcattgacaacgctgaaggaccttctttgcaaagacttctctgatctattgcatactggacaatctggttccatcaaatcttccatagaatacctttccaagttgtctgcagatgatggagtctcagcagaaatgaggttgttgatattagaagtttcaagagaattcactcgctggagttgcgactactatgatgccagtaggaaaatagagtctgccagcaccaacatctcgaaagcagataaactagaaggaaatcttgaagctaacaag

SEQ ID NO: 107445 - DNA, 284 bp, Glycine max
ctgttggctgtgagccctgtatcacctcttatggctcctggtgggaaagcacaggttgctgctaaggagcttcttgattcaattttggatgctgttgttcgaatatttgagaatcatgtcattgttggggagcttttggaagcaaaagcaagtcagcatgctgacataaacacgccaaaatcattgccagtagatgtaaattggaaccctgattctgaagcatctcaagtcaccggaggttacagcataggtttctccctgacagtgttacagagtgaatgcca

SEQ ID NO: 107446 - DNA, 289 bp, Glycine max
atgaattatggtggctgtatgtattgaataatgttaaaatggtgcagagctactatggtgtgtatggaggagcaacagcacagtacccggtttatggaagtggagctgctgctgcagcgttctacccatatctgcagtacggagaagggagtggcggtggcggaactagcggcggctacagttccggacagggttatggtgtgaactaccctcctcaggctcacctctttcagtattctcccattgcttccactgcagccgccacagctggctatgcccagcactatgg

SEQ ID NO: 107447 - DNA, 298 bp, Glycine max
tcggaattcggtcgactcgagcgcgaactgccggacctgagtttgtatgaagtggccagtgggtttacaaaagtgttgcagatagcggctatcgtggcactatcacgctatagcatagtgggttttaaggaaaatgcaatcgcgatggtgtcgcattgcggactccacgaaaatcgcaatcgtgggcgccttacgcatcattgaatctcattgtgccgtggctgttgcatcgtcggtttccgaaaaggttgaatctggagagagattgcattaacagcatttagggttcattggttca

SEQ ID NO: 107448 - DNA, 284 bp, Glycine max
gcaaattgtcacaccaaaaaattcttgcttagctctcacaaacaatctttaacaacaatgaaggtcagaataactagactctcatgggatgaaacccatctcttttataatatttcctcttcttcccccaatcaatgcatgcatacacgaattgcattcatgagttttctcagagctttactctgtctagcttgtttccactagctaggacttgtatttaactatttcctaatttcatgttttagatgtagaagtaatttttgagtctaaattaattaacagct

SEQ ID NO: 107449 - DNA, 279 bp, Glycine max
cactttatggatatgatgcacctgccaagaagaaaccaccgagcaaaacttgtaactgttggccaaagtggtgctgcctatgttgtggctctagaaagaaaaagaatgccaatagtaagaaggagaaaaagaggaaggtgaagcacagtgaagcatcaaagcagatacatgcacttgaaaatattgaggcggggaatgaaggttagaattttggaccatgtggctgttcttactagtcaaaatacatactttgagaaatttcctcaataatactaaata

SEQ ID NO: 107450 - DNA, 280 bp, Glycine max
gtttaaggtagtggtttataacctctgatgctgctaattctatgtccgttcttgctccgttcctcgtcaaatccaaatggtaaggcaccctttatccaagagcactaacaaataccttagaaaattcaagagatggccacactcccttacaagacctcatggcaccacaacttcggtgaagaatgagaaatgaaggatctcaaacaagcaaccctagaaatggattcttcccaacacccccaaagacccaaccttccgtgcccttttctcctctccactc

SEQ ID NO: 107451 - DNA, 280 bp, Glycine max
ggtccttgcaggagataatagcaatagaaagattagttataataatcaagttgatcttgatcactcaaccctatcaacaacacctgtttctgttagttatgaacctcccccaacccatcaagtgcaagcccctcctagaaagttggcttccctgacaccgacactgacaccctacacgccaccaagaagagtttccctttcatgagagcaatgagagcttctgagaacaagagtgatccctgtggggggaggtacatttatgtgcatgaccttccctcca

SEQ ID NO: 107452 - DNA, 276 bp, Glycine max
actttatgttgctgaggattatgtttatttgcttaaggagtttgccaatactggtgaactattgctagccactaggacctatgattttgctatgagtagggctactgataatactttcatggggaagttgaccagcaacatattaggacccttggcaggttaaagaagattgagcttgccttggatttgtttgaagagtctaggactagagggtatggaaacactgtctattccttttctgccatgattagtgcacttggcaggaacaatcgcttt

SEQ ID NO: 107453 - DNA, 277 bp, Glycine max
attgcattgttaagtcacattttgtaggcatattcttccgattcgctggttctcagcgtgctcattaatcagaaacatgaacatagacatcaccgtttccatgatggctgcttcagacaaacaccttctacatctatctctacgtcttcaaatgccaagatactttagctgaagccatatcagagactgactggaagcatgcagagcttgtatgtaacctgtcgtgggacgaatccggaatccatgtagtgatcgacgaaagtagcattgacggtat

SEQ ID NO: 107454 - DNA, 280 bp, Glycine max
ttgaaaaagacaagaaaagaaaggaataaattgtctcaagaaaggataaaataaaataatgtaatttccacaatccatatatagctaccctgtccagatttttagtcaattcagcagccaaccctgcaaagggcttcaactagaattcaagtttaaaggcacctgaggtagaagtggacatgaacagtggaagtcttggcccataaaacgattttgaaacttgttcactcgatgaagctacactgaaaaccccaagcaaattcatttattctgtttacgt

SEQ ID NO: 107455 - DNA, 300 bp, Glycine max
agaagcattggttttggtactagaggttgtagctttgacactagtggtagctgcagtggtaatagtgataggatctttgtgagggcaaagacaaggtcccgtggctttgcatcgaatcgccgccagccgatgttggctgatttggagcaaaggaattctgttaggagtgatgagagtgatgctactttggttaaggttgataatggatctataaatggaagtcctgctaagcctccttgtttcagtgatcatcgattatcccagaaacttgtggttgctgttgatgttgatgaggatatg

SEQ ID NO: 107456 - DNA, 298 bp, Glycine max
gcaagacaggcccaaccatacaacttgtcagtgcagctggctaatgcagctgaatctgccacaactatgccttctagccagtcccaaaatcaaccaagttctgctgcttacaactcaacaagaaatcctaattttgaaatggcagcaggtgcatgtagaaccgcacctgccacccctcaattggttcaagtttcttctagtaagcatcaacagcaatatgttgctcactctcaaatttatcatcgccatcctcaatcaatgcctcctaagtctgcagtacctgcaaattatgcttaca

SEQ ID NO: 107457 - DNA, 301 bp, Glycine max
tgctgctccaagttattgatattgttattttttacatttatatttgataatagaaaattcaaatattaatgggatggattagtggttggtgttgtggttcatttatatttggcaggtaatatcatcctaaaaacagaaccgcatttcacgacaaaggcaggtaatcaagctgttttttattttttctaagcaattgtatcttacccgtggtaaaatgaaaaaggtaatcaatctttttttgtccaaataggacttgtgtatttgttgttgaaaactggccaaaattttcaaattgtgtatt

SEQ ID NO: 107458 - DNA, 101 bp, Glycine max
ctcgagccgcggctacacttagccgtttcccactttgtcattcagcgacaacaacagcaaaactagtttgtgtgccatccagggcttcccacgttgctctt

SEQ ID NO: 107459 - DNA, 249 bp, Glycine max
  unsure (1)..(249): unsure at all n locations
ggtgtgtgttctgttactctttcctttcctcttgagttgggttcgggtgacaacacaaacacaaacacgatggtgtgttgatcagtctcttttctctctctttccatttgatgtctctccccaccaaacggtcgggcaccgctggttcctccccgtcgccgccaccccctatgaaaaaggccaagtccctcatcctccattacacntnatactccgaagtcgttctggagccttcctacaagactctcg

SEQ ID NO: 107460 - DNA, 273 bp, Glycine max
cgcagcgcgaactatggagcaccgtttctcatggcggttccaacatcggaaagcgaatccgtagagaacagaacactcctttcacagttttactctcactatctcgtaaaccgaatcaagactctctatccctacttctccacaaatttcttctccaactttgctctccgcttcagatcaacgcagcgtcgggaatgtttccttcttcggttactttcttcttaattggattttccggtcttatgacccagaggtcttaaatgcatgatgttg

SEQ ID NO: 107461 - DNA, 290 bp, Glycine max
aaacatttgattaaaaaataacatgaagtgtaaatagagtaaagaataaaataaataatgtaatattaatggaattttataaaattataagatcagtactgtctgaaaaaatgctagaaaatagtgagataagcttagttatcaaacatctctatttcagtcaaacaaatttataagcttgtcaaatattctagctgaaataactagtcaaacacagtctttgggaaaaaaactgaaaatcaactgttgctctgtttcttcttagccacttaaatgaagtcagggaaatc

SEQ ID NO: 107462 - DNA, 293 bp, Glycine max
ggagagagttcaacaattatgtggctttccttgctcgaagcaaggttagtattctacatgaggattgggatcatgtagaggagagcgagaagaatatgatttggcaaactatcatgcacaattatgacgttccaaattccaagttcctcaagaagaaactaatttcatatgctggtcaacgttggaggggatttaagacacagctctctagcttttacatatatgggaagtacaaagacaaatctccttgtgataagtatacattcctcaagaaggatacgtggcaaagattt

SEQ ID NO: 107463 - DNA, 287 bp, Glycine max
cttcataagaagggagaaacataagaaattaccttttcagtctaacattttaatttattcacgctatttttctaagaaaacacttcttccaaagtcttaaactttgcctggctctccattttctcctttctaactaaattctaataattgattagctcaattttactattttacataattttccgaataagaacaacagacatttcaatttttacggcgaaaagtgaaagaaaaagaaaaatcaattatcaaattatcaataataataaaatcggcgtttttgtgaa

SEQ ID NO: 107464 - DNA, 267 bp, Glycine max
  unsure (1)..(267): unsure at all n locations
ctgctacggagaaagagaagaaagcggcaaacaaagcaagacgttacanatgcatatgcgttattgtatcactaccaggggtattacctgacggcatctggcatacccgatcagggctagtgcactccagataatctgcgtcgtctgctagttgaacatccacatcttactacggtgcatgcgccgttcgtggtacagtcagcgagtcctggcctatgcacgtgcgatatatggtgtcctcgacatggtgtagcttatgacacctgt

SEQ ID NO: 107465 - DNA, 281 bp, Glycine max
ctcccctctctctctcaattgagacttattcatttcgtgttctctgcgaattagcatgttccgttcatcgttccgccgcgcgttttcggcgagggcgtcgaagcactgcgagaaccacgagttcctctctcggaactcgttcctggggagctgggaggcgccacgggacccgaaggaggcggaggcgaactggcgcggctgcgaagggaatacgcgaacaagtgaaggaggttcggaaggaatacataagagagatggaagcgatgaagattgagaaggag

SEQ ID NO: 107466 - DNA, 277 bp, Glycine max
atcaaacgctcgaggagtgagacatactacaaggagttcatttttgggggggagtttaagatctgtgggggtgtaaatgtgtaagtttgtgctgttttgtttgtggggattgttttcttgagaaaagagtaagcggtgtgtgtggtgtgaaaaagtgtgttaatatgagtaactggttggggttctctctgactccacacttgaggattgatgaagaatttgagagagagaaccaagagcgtggagcaggaggaggaggagggtaccatcatccttc

SEQ ID NO: 107467 - DNA, 276 bp, Glycine max
gcatcgaaaggagaagatatgcggtactttgatgtattttcaagtagcttctgtgtcctctttgaagagttgacgccaattcatagttgaatgtgcataatcaaagccaatccaaacacgcacttactctctgtccaggtgggattggtgaaaagaccccccttatgggagtttgagtagtttagccattttgaaatttggacctcggtttagaattttaatatcaatgtagcaatggtagaaagcagagcggaatgagaaaatgtgacaaaaagt

SEQ ID NO: 107468 - DNA, 274 bp, Glycine max
  unsure (1)..(274): unsure at all n locations
gcagaagcatatcccagtactagctagtagtttcacatctctcaatagcagtgaattgttatcaagaacagctaccaaaccatctaccagtgttggtggcaaggaaaaacttagtgataagaaaagtttgccttcttcagcatcatcaagtcatcttatagggaatcccttcctgaaagtgccaagcttcctttttacgatgtcaaacgatttgaatcttccaaaagtgtaactactcgncatggagatgagaagagcttgacacccagggcgt

SEQ ID NO: 107469 - DNA, 243 bp, Glycine max
ttcttgacccaaaaattctatttttcccttgttctatgttgttgttacaagtatttttgggtcaaggcattgaaactttttccctctctactttgttatatacacttttacagccaacaatacttgtaacaacctctaagacaagggaagaattgcattttttttcattttttgtatgatgctctataatggatgcatcatcttatttttgataaaaaaaaaagagaaaaaaatggatccatc

SEQ ID NO: 107470 - DNA, 296 bp, Glycine max
ctcaactaagtaccaatgctaagagacgaaagcgtgggttctagaagcgccaggcacagcgccaccgccaccgccaccgtctccaacaaggttctcgtcgccgtcaaggccgagaaggtcatctctaacaccgcattagcctgggctctcactcatgtcgctcactccaccgactccatcacgctcctcgccgtttactcttctcacaaaaccggcagaaggttctggaatttttcgagactggccggagactgtacgaacggaccggcgggaaagttgccggagcaaatttccga

SEQ ID NO: 107471 - DNA, 289 bp, Glycine max
atttgatttaatctgattttcgtgtttgtggttttcgtagatcggtgtttcttttcgtgataaatggatcaggaaaattagatgaattccaattttttttttttgaaaattcttttttgtggttaatttggtaggtttagatacactagttgcgacttttgtctttccagttttgaattttttgactttgatatgaaataaatcatatactttgtgtgtgctcatggtgccaaggaaaattagtcatccttttcggcgggccacttcgtaaaaaaactttggtagtttt

SEQ ID NO: 107472 - DNA, 150 bp, Glycine max
ttacaaacaaacatcgtcgtcttcatcgtcataatcatctaattcttcttctttgttcagcttccgtaaccgtaacgttaacgtcatcgtcatcgtcatcgtcgtttatcccaaaacgatggacttcaccactttcgcaaattccatatc

SEQ ID NO: 107473 - DNA, 284 bp, Glycine max
cggctcgagctttataatataatttattattagtagtagtagtagtattttgtttgatggtttgatcattcctttttaagtttcctattcttcctttttatttcctgcttattaatttttccattcagctggtgaatatactcccaaaaccatgttacagaagcaacaacaaggacacacatggaagggatgtgcacggggagagtgaaacactgaggatgctaagtcaaacccaccttcattctccagccttcaatgaaatgcaacaaagatatggtccctac

SEQ ID NO: 107474 - DNA, 286 bp, Glycine max
ttaataatgagcgagttccgcgtgtttgcagaagcgtgtgggcgtgaggatcatggagattctccgcatgccaaacctcaacacagacgatctaagagtgcttctgaaaggaacctggcaaacgcaagaggtggtggagcctcgcatccactcgagaaagaccacaatgaatcccttgtttcaacatcttcggtgagtgcttctaggttacggagtccgttgcatgacaatctcactcgtgtaaacaagaatacctcttcaaatcatagagcattcttagaaaaag

SEQ ID NO: 107475 - DNA, 284 bp, Glycine max
cccgctcgagctcgagccgctcgagccgctcgagaactgtctttacctcggtgtcggcacaagcctctgaatccccatcactctacaacaccttccttcaatgcctcaccaaatacacaaataacccctccaacatagtcttcgccaacaccaaccccaagttccccactatcctccaaaactacatccgaaacgcgcgtttcaacacctcctcgacgcgaaaaccattactcatcgtcactccccagcaagaatcacacgtccagggcacagtaatctgcgcc

SEQ ID NO: 107476 - DNA, 289 bp, Glycine max
cctctacaacggtgtttatagtttaacccaaattaccgaattctgatcggatcatctctaaaccctagatggaccttctgaagcaagagcttctcaagaagcgccaatccctggcgcaagacaccggcggcaagaaattcttcaagcgctccgagatccagcagaaggaaatccaaaaactccgccagcaagagaagcgcgaattggaagccaagtcactaaagcgcctcgcaacatcctccgacaccgccgccaccgccccgtcctcttcatccaccgcctcctcctc

SEQ ID NO: 107477 - DNA, 158 bp, Glycine max
gctattattccattctggatccgttgtctccagtgctttcgacgtttgcttgaagtaagaaatacaatggctgggctcaatgggctaaaatacatctcaacagtaataggacttgtcttgagggctactaatgagttccgtagaggaatggtttggca

SEQ ID NO: 107478 - DNA, 265 bp, Glycine max
atcgagccgctcgagccgattaagtggccacttaattatatttccagataggaaaaggagatagtgaacactttgatgatggatggttgaaaatttgcatgattttttggcaaatgatttaggcaggctgcttggtacctaattattttgactagggaggcttaatgaatatctgttctaacttcttaagtgttttagccttgtatttttattttatggtgtaattaactttgtaatatagggatttttttacattgttcctatt

SEQ ID NO: 107479 - DNA, 127 bp, Glycine max
aatcgagccgtgctcagtgatacccttttcttagaacaatgagagcggggtaagggagtcaagtagaggaagactacgacgaagaagatccggggtcttccaagaaacatggcacttactctgcccc

SEQ ID NO: 107480 - DNA, 219 bp, Glycine max
cggctcaatcgagcgattcggctcgagtaaacatatactgctcaagatagactaagagtgagcgagagtgcatggacggcagagagagttgtcaccgattgatgagaggcggtaggctaagagctgacaaaggttacaaccatggcttatgcaccactcagatgcatgtcatggctgccatatgtgatgccctcattgcttctctgccacgcaaccaag

SEQ ID NO: 107481 - DNA, 188 bp, Glycine max
gtgttttacaccatctatatgcttggagtctaatatacattagtcccattcatttagaacaacacttcacatgatttaacatgagttttacaccatctatatgcttggagtctaatatacatattttaaaatgatgtttccctttcttccccggttcaaggaacgatgttaagtgattctaacatccc

SEQ ID NO: 107482 - DNA, 279 bp, Glycine max
ccgtcattagcgtcgttatcaggtggcaacaatgtgattgatacctcgggtcgtaatctgaaccttggttctgcttcgtctcgggcttctacgtctgttatgcctgctgtcatcagcagcaatccagccaggtctcagcatgaaatgcagcgtggtcagcactagctgccaatccgtcaacgtcagccctcaagtcgatgtggagctgcatgtgacggcgctgcacggaaccgagcctgatgcagatgctgctgccgtgttcacgcctagaagccccct

SEQ ID NO: 107483 - DNA, 287 bp, Glycine max
  unsure (1)..(287): unsure at all n locations
ccaaaggatagatacagggtgttgtaactaacactttccaacactagaatgttaaaactttgtagcacgtacaatgacacaatcaatcatttcaatagaaaatccacagtacgctgttanccaaaggtggagttatatttcaatttacctctcatgccaattgcagtgttcaattacccatctggccaagactcagtgatccaagtaagtagccaagactatgcaagttgcaacactgatgcatacagtgcaaaattctcagacggcgacacagtcatcaatctcaa

SEQ ID NO: 107484 - DNA, 284 bp, Glycine max
gttcgacttgtcctggaaggtgtcgataagttcagcaatttaattgggtcggtgtattctcctgatggtgaatcagcaacggacctagcattggaacttgtagataacggttatgcaatatacgatgaatggagtgcaaatatgatggacgaagaggcaaagcgttagctgtagactgcggagctatcaggctaagaatgacaggttaaggatgtggacaaatatgtaccaccgccttcaaattcaaaggcaattcataaccagaatttttctggcaaggtggt

SEQ ID NO: 107485 - DNA, 282 bp, Glycine max
cgggagttttcactgagatcgtgccctcctagcttggctttacaagggatgcggtggtcaactattagtgatcagagatttctgacactgggttttgactgggatacaaatgaaatgagcattttgttagcttgctaagcttgcaaaaccattgattggaactgctcgaatagtgattaacagtcttcatatcaagggtgatcttcttgcctcacctattctagatggcaaagcacttctgtattctcctgtatccactcctgaagtgagaataggaattgc

SEQ ID NO: 107486 - DNA, 284 bp, Glycine max
aatttacagtacttattaacttcctcacaaatagggacagactgctgcttcttcaactttagagccatgtttctgttgacttggaggggcgtccaaatggtgtgcaatttaatggagtttcacttgctaagaaagctttgtctacctcgaaacaagaatcctcagtagttgaagacttgaaatcaattaaagctgatgatgattcaattccttttggtctggcctctactagcttggctgatccttcaattggaagaaataaaactgtgaggtcaacacggctt

SEQ ID NO: 107487 - DNA, 280 bp, Glycine max
  unsure (1)..(280): unsure at all n locations
gatatattcgagactctgcttttgaaccacgccgttgggttgctccaggacagcgttctataaaacttatttgttgtgattgtgggttggaaacccttgaagtgcctttagatgcaaaattccatactgaagatccaaaagttgtggttgggaagttttgcgacagaggtncatgctggatgtgttctaagactattgctgactgtgttgaagctctgataggcgcatactatgtagatggtggactttttgcttcacttaatgtgatgaaatggcttgg

SEQ ID NO: 107488 - DNA, 275 bp, Glycine max
ctccatttgaacttcttcaggtaatagaagttgtgaagaaggaaaacgtggcagacgatgaggatagtgatgtaaaaaaaacaagtgataacatgaaaaaagagaatgatgaggaaatgatcgatgctatgggaaaacatggggaagaaaaggaggcaaaagacgaagacatgcaggaagtagaaccaagtgataacatgaaaaaaggcaatgaggaaatgaccaatgataccggaagacttagggaagaaaaggagggaaaggacaaagacatg

SEQ ID NO: 107489 - DNA, 151 bp, Glycine max
gttttctacttttcttctacacccactccataatatactcaacatatatcagttctgcttcaacaccgcacatcaccatgcaatgcagtaaaatttgtaccatgcagcaaggggctctgattctgcttttgagcgtggtcactctgtaccc

SEQ ID NO: 107490 - DNA, 277 bp, Glycine max
ccggaattgaatagaaatagaatcgtcgattttctctttctctgactctagggtttcattattttcttctgtagatccatctatctagcttcggagctgcaaatggacgtcgcagtcactgccttccggtcaccggtggaccatcttcgagaacggttaaaggattttgcttaagttcggtccggtcccacttttgggtttcccagaaagcaccggttcgattcagtatgtatccccaaccacaagcacaagcacggtcgtagaagagggtttgtag

SEQ ID NO: 107491 - DNA, 175 bp, Glycine max
gagaaatagtacatatgtaatgtatgatttttcatgattacagaacctactgccttccttctgaggcgcgcctttaatgtttgtgattttgtatgcttgagtgttttttagtaaattatttctggtcactccccagtttatcgtggtttaattgtatttaaagggcctaaggttg

SEQ ID NO: 107492 - DNA, 278 bp, Glycine max
ataagttccctaacattaccaagagattaaagagacctgctgttgctcttgtgtcaaccaatggtccctggatcacgtaagaacaccaattttactttttttggtttttgattctacaagtgcttttaactatggagtatacttgaaaatatgatgccacattgatgcttggattgaccgtcattaactatgaaaggagggaaattctttcatgtcatatccaaattatgcgtgtgtgtctgtggatgttttcatatattggaagccattctatgtag

SEQ ID NO: 107493 - DNA, 150 bp, Glycine max
cctcgagcgaatcggctcacgcaaattgtggagaacatagaagacgcaccctccccagctgcctctcttctccagagagtcctgagagtgatggtgcgcagaaagatcttcagtgcacaagaatcagagacaggagaaaccctcttcggc

SEQ ID NO: 107494 - DNA, 108 bp, Glycine max
ataacacatgcaattcaagatgctgggtttgaagcagacatattacctcgaatccagtacagttggcaaggtgccacagggaaccctggtgggacagttcacaattgg

SEQ ID NO: 107495 - DNA, 278 bp, Glycine max
tgaatataatgcatctggtggttggtcacgataatattaaaaaatatgcattctgagatttttaaaacatgatatattggtggtggaattagcagcagagagtttttctgatatgctacattcttaatctggtaggcaagtactttacgagtgatgcttttgggaatggttgatgatccacgtgttgtgctcatcaagcttgcagatcgtcttcacaacatgagaaccatttatgctctgccattgcaaaaagctcaagctgttgcagaggagacctt

SEQ ID NO: 107496 - DNA, 172 bp, Glycine max
ggcaaattatcgtgtttattccccttacttttaataattattacattgcatcagcatactcattgtggtttcaggcggagagaaacaatggagcgcgctatttccgaattttcggaggagcacggaagccggttcctccatgttcgtaatctcccatacgaatcgaacacaa

SEQ ID NO: 107497 - DNA, 271 bp, Glycine max
gttacagtgaagagattcatatgccattatccaactttcatatttcatttttgttttgaaattaaaggttcataatgacaaccacaccatgtttggttttgtagttatgctagcttgatgatttacccaagtgtgttgtatgttgatattgatattggttccctcaagactattattgtctgtctggattatgtttttagtcataatttgttttgtcacttattatggcaaatgacatataagtgataaatgttgttttgccttgtagatt

SEQ ID NO: 107498 - DNA, 170 bp, Glycine max
taatgttcaaaaatattgttgatttcttttgttctatatccaatctccctggagtctttaaaaccaaggctttaacttgtatcgtgccattgataattaattaaatattgaggagtacatgaagtatatcgagaagtttgaactattaagtatgtccaaagcattttgag

SEQ ID NO: 107499 - DNA, 118 bp, Glycine max
ctcgagccgctctttctcccttcaaatccgtcacttcccgtcaccgtcaccgtcactgtcagcggtcattcctcttccattgattctccgagaatgaacctcaaccattaccaccacc

SEQ ID NO: 107500 - DNA, 262 bp, Glycine max
aatatcgaatccaacaaaatacatggatctatctacactgttgctagctgttctcttcatcgcaggcctcattaatattttcttttacgtacccaccaccaagattggtgcgtggcttcaaactttcttattccccaacaacaatgcttgcaacaaaaccaaaaccaacttagttccttcttcctcttcttcaccaacgaccaaggtggagagtactggttcccaaaagaagaaggaggagcttagaaaagtgttctccact

SEQ ID NO: 107501 - DNA, 293 bp, Glycine max
gttcctgttcttttgaagggaagtggtgtatttacattggcaaagatatatcaatttataagagaatgatatatccaaacccaaggtacattattttccacagcagatgttctttataacttctatagaatctatgcacatgtagctaatagaatatactataaatatataatatttgctttcatgtttctgtgattgcatgcttccatttgggttcccgatgctctagagcaaccatttcctaatggccaatttgatctagtgtagtccatggagattggagagcatatgcc

SEQ ID NO: 107502 - DNA, 255 bp, Glycine max
atcctcttcacaaactttgatgtgcatcatagttatttaagtggttgcttatgtcatctgtaccactgggacaagttaccaccgtcaatgtgttgtctgcaatagcattttattctcataaattagagtaatgaagttagcatgtagagattattggtattattagaatcttaaagccatcagacaaattgactgattaatgtattgttatgcccgtgattttgtctggatgaatggattatggttgtaccatgt

SEQ ID NO: 107503 - DNA, 288 bp, Glycine max
caacatcaccgcagtaattgggtagatgctgaagaggatgatgaagatgaacaggatgaagatgaacaggatattcagccaacaccaccgtactatgaagaacattaattcagagaactctactgtaatggttctcctttacctcagtaactgcttgtggcgattctcttaagttgctttgtctctttaagtttcttttaattgatccagtaatctatcaataaaaggattgaatagccataaattgctgagtttcttgtatgtattatattattaaatcttcccatt

SEQ ID NO: 107504 - DNA, 141 bp, Glycine max
caactatgagcaaggattatctaatcatactggctctccttctttccacggtgattgcaactgcaagtgactctacttactacttcctgaatctatcttgggaagggcttctcacatcgcaaatagtctcccagttatcac

SEQ ID NO: 107505 - DNA, 282 bp, Glycine max
gctctttacaatgatggcaattacattggctttcatggggatgatgaagaatatttggcaagggatgattgtagtggtgggtcgttagaaagcccgtgtggaatgggatatgttcgtgatcgagatttggacttgtacactcgcaattggaattgaaaatgtccaagaaagtagtccccaactgctaccctacaaatgtcaaaaagcttttatcaactggcatccttgacggagctgtagtgaagtatatttacaatcctggaaaggttgagctacagggga

SEQ ID NO: 107506 - DNA, 277 bp, Glycine max
gattgagacttgatgccaaatcccaatatggggtgattgcatgtgacataaacatgttgtacaagtagatcttaaatggtgttagacggttggtcattcctattgccattatggtattttggattagaactacatttactttgtgcttgaataatgagatcataccatatccaatctcattattcaagcgccaaagaaaatgagattggatatggtatgatctgtgcttagaaattataattagacatggggatgccaagttctgtgatagaatgtc

SEQ ID NO: 107507 - DNA, 280 bp, Glycine max
cttcagaggactacacgtcctcgccgtcaaagggtcatgtgccatcacctttgtagggctacatgccctcaccttcagaggactacacgtcctcacctttagaggactacacgtcctcgccatcagaggactacatgttccccatttcaaagggggccatgccctcaccttcagaggattgcacgtccttgccatcataggactacacgccctcgccatcagaggactgcatgtcctcaccttcgtagggctgcacgccctcacctttagaggaccacac

SEQ ID NO: 107508 - DNA, 272 bp, Glycine max
aatattttctcttccctctttctttctctcaaatagaaggtgcttagtagtatggaagacctggattcggtgttcgtttaccacgagggagaacacgagttaaggcagaaacttatgaatgccagacatgaacttgagaaatgaaaaatgtcaaggcagaattgcttgatctgttgaacatggcataccaagagagggatgaagcaaggtgtcagttacagaagctgatgaatccattcatgccctctaatccaacccatttgcaaaacgtg

SEQ ID NO: 107509 - DNA, 101 bp, Glycine max
cagaagtgctacggacgcctcaaagcagaatcccgttaattcgatggagatgctggatgtccatgcggcaaccaggtctcatcaacatgtcgtagtgtatc

SEQ ID NO: 107510 - DNA, 291 bp, Glycine max
aaaagaaagaagaaaacaatggacttgtacggttccttttccaccccttcagattgctctacacatcgatgatttttcagatttctccaacatcaccaccaccaccaccgacacccaccaccactttcctccgccgcaaaactctccatcaattcccacgatcccaatttcttcctcaatttcccttccgttccgagcgacgaagcagtggagctggagtggctctcccagttcgtgaacgacgaggcgacgtcgtttcacaacatcccaccacccgcatccattggatcc

SEQ ID NO: 107511 - DNA, 169 bp, Glycine max
aaaaggtaggcagggtgaagagcaggctgaaatcatgttatacaggtctgcaaacttagtatccaaggctgtggagttgaagcccatgagtttgttggctgtaggccagttaggaaagacttaccttcttcatggagaattgaagtgcagattagtcgtgaattgagaa

SEQ ID NO: 107512 - DNA, 281 bp, Glycine max
tccgtgtttgtgttttcaaagtccgctaaacgcaatccctctcttttcatctatctttctagttctcgttcccttcaaatcttgcactgtattttcaccccctcttgccgttcatctctgttatttgagtcaaaggattatcgcctgtcagttgcaccagttgacagtattccctcattaagcagtgatctcttctatgatatatttcgtcgacttgatggtgcaacattggctagtgcagcatgtacttgtgcagcattgtgttccatctcaaaagaaga

SEQ ID NO: 107513 - DNA, 112 bp, Glycine max
aatgaatgaaagagagactcggtcactgcctctgtctccaatcatccgcattcattgtgccatgttactctccgatccctcttatactctttgcctccaactcttccacata

SEQ ID NO: 107514 - DNA, 293 bp, Glycine max
aggttgtttctcattgggctgattccccatacaagattgataaggcaatagaatcttgtcctgtcaattgcattgcgtaagtgtgtgtatatataccattcgggatcaagatgggatatcattataactatgtgttaagtgttacataatcaataccgtatttgttgtgattgatatcgtgcaatattctcgtgattaccataatatatagagtcatatgaggtggtaaattgttgcacaccttcaggttatcctatcttagagttacatttcttaaaattctaatctagcat

SEQ ID NO: 107515 - DNA, 285 bp, Glycine max
gttgttctgagataattcagataccctttaaggtacaaaacctctgtttttgtcagagtagatttaaagtttctccctttatttttattcatttttgtgtttggattattggtgtggtagactttgtgatattcttcggttcaaagatttaatggggttatctgagaatttaattgatgggttttgttttgttgattgagttttattgctttaccggcagttattccttgaataatagaagatccgtgttcatctcactaatcaggtgctgaagattcgtttttg

SEQ ID NO: 107516 - DNA, 283 bp, Glycine max
ataggatactctaaagtattttaatatcgtcagatatttctcatttcttacaaattgtcataagatgattctaggttgcagacttgcggttgttttgtagaatgattgattgtattgctaattattaatttaataaagatctgaaaatttcatcacctttcacttttccaggcttctttatttgctagattaatttactggcatatgttattttaatgtggatagagagatatggagtttagttaggaaacaccagtggtaaagttgtgagaaacaggaagaa

SEQ ID NO: 107517 - DNA, 282 bp, Glycine max
gtttctttgtagttctcaaatttattcataaaactttgtgtttccacaactaccagggaatacatcattcgggaataaatcatgaatggggctagtagcagtaaaacaacaagaaaaaggggaggtcggcccaaaagtaattactggaatgaagttgaaaaaataggtgacatgtggaagtgcaaccattgtgaaggggagttccatggaggtgctacaagaattaaagagcatatcattggtggaggaaaaaatattagaaaatgcccccactatcctgct

SEQ ID NO: 107518 - DNA, 274 bp, Glycine max
gtacaatgcagttatgcagggttggcaacttgtattcaactgggagcaaggattgaactttcaggttcgagatgtatgtgctcgcgtcttgacagacatggcttgggttaccatgaaaacatatgttgacatggatacagggccattcaatgtgaccaatatttatgagttccataatggacggtggtatatggttcatcatcacagttctgtggatggggatgtggaccatcagattgtgcatggataatagtgagagatgatgatacattgt

SEQ ID NO: 107519 - DNA, 288 bp, Glycine max
ctcgagccgctttttttattttattttatttttgaggacacttggagctgcgagcactagttttcccttttccccttgtttgtttttttaggataataattgaccaattgggtatcttgtcagttgagacatttttcaagaagtagcaaagctccttctacaatatttgacttggtgctttccttttggatcttacaatgggaaacagtgaggaagagaaatctaccaagactgaaaaccttcttcacctgtaacagtggatcaagccaatcagaccaaccagaccat

SEQ ID NO: 107520 - DNA, 266 bp, Glycine max
ctcttatctttttaaatgctatattgaaaaggaaatgtctaaattatcactttcaagatgacgtggagattcattttgaattatagattgaaaatcccttgcatatactgaataacaatcaagcatataaaagggattttctgggctgatgtagcggattcttgttcaatcccatgccttgaagtggcataatatataaccctcttaggcttgcctatgcttgttgtataacagatgatgaacggggtagtactgggcaggttggt

SEQ ID NO: 107521 - DNA, 287 bp, Glycine max
ggacaagacatcatcaacaacaacaacctccgagagagaaactcacgacttcatgaacgtcgactcgttctcccaactccccttcatccgcccggctcctcttgtcagagagaagtcaggcattcgcctctttggcatcgaatttgccggcggaaacaacaacagcagcaataacaataacaattttgttgttgtctcggccgaggattctgagtcggccgaaataacaacagcagccaacaccaacaccaacatcaataccaacaaactcaacattcgacctcgat

SEQ ID NO: 107522 - DNA, 191 bp, Glycine max
ccaccaccaccgcttcctattcctcctcccaacccaataaacaacctgcatggacccaccaaccctcccccactcagaccaccgccttgcccggtggccccccctccatggtcggagacatcttcggcaagagctggggaacccctcaaccttcttctgcttccaaaaacatcgggatcatcaataagaac

SEQ ID NO: 107523 - DNA, 283 bp, Glycine max
cgttaaagtggaaagtgaaggaaaaggttggaataaatgaagcctcaactcaacgttgctgttgctcttgttattagcttgctctgtattcagcactcattttgtgatgaaccttctgatactggactaaacaagtggaaatgtagatgctcttcattacaagggaacaagatatactctcttgctaattgttccaagtcatgtgattgccatccagatgctgaagagaatgcatccatatggacatgcgaatgtgctccaaacgggtttcaaagtgacagca

SEQ ID NO: 107524 - DNA, 277 bp, Glycine max
tgaagatgaagaagaagatgaagatgaagaagaagctaatgctaaaggtgatggagatgaagatgaaaatgaaggtaataacgatgaaaatggaaatcaaggtgaagatgatattacattcaagaagcttgagagtttgactcttagctcgttaccaaaacttagaagcttctacacagggagttcctctttgaattttccatgcttgaaagtaatgtcgttcagcaaaccttgcagcacgaaattttccgtctttttgacatgtacgaacaatgag

SEQ ID NO: 107525 - DNA, 283 bp, Glycine max
gaaaaattatgtgattataaagttctaaaccctggcaggtttatatattcttaatttctctcagaaagagaactcagcgaggttctgtacacatgtacagtaccccctgtcccactgagcaaaggctttttctcctttgacacaactttgataagaaaaatctgcactgcactgtttcattcagctagctagcttctcatatataccaattgtgtgactgttcatcaaaagtttcagataaatggacacaaaaattgtgctctcaaaaattatcacttgaagg

SEQ ID NO: 107526 - DNA, 284 bp, Glycine max
ctccgttgcttttcaaaattccccttcccccaaacggcgtcgtctctaacaagagctttctcacaaagcacctccatgtccataaaccttcactctcacgccttctccggcaaccctctgctctccaaattcccactccccggcaactgatgggaaacttggctattgctggtcatgctaaggcactgctggaatggcataatttttcacgattttgtggccattgtggagagaaaacagtcccaatggaagctgggagacggaagaaattcaaatgattcatg

SEQ ID NO: 107527 - DNA, 278 bp, Glycine max
tcttccatggctttctcctcattagaatttggtggctcttgagtaaaagcatgacttagtttcccaattaatgtgcttgaattgaatatgtcactgaggatatcatagttgtactcaaaaccatgtttcttgaaattcttgtaatgccttcctttttataaaagataaagtgtacaatgtcaatactaagcaatgacaacatacaacaataacaataacaataattttaggatcaagttataccttaatcaatccgtcccatactttcaggggcattc

SEQ ID NO: 107528 - DNA, 276 bp, Glycine max
tctacatcatatgcacgtgttaaatccacaggtattttatcaaaattttcaaaattctgtacttttgttatgaaattgctagttactagtttagtcatgtgctgacttctattctgaaatttctggactattatctccatttgtttttttcttaaagaatcttttaaagataagattgagtcaatgatccttttcctgaggtatcattgaaatatgcctccaccctctctagtttaaaattatgcaatgaacctccaatggttggcaaaatctatt

SEQ ID NO: 107529 - DNA, 279 bp, Glycine max
ctcgagccggaacaaattgcccctgttcaagaatgtcttttcaatcagccagaaacttctaagcatgctggcgaatcacgcaagtttcgccagaattcatgtttgaagaggccacaattaaccaagataggaccagagagctctaagattgagtttgagaatccacttgttgcagaggcaaacttttgtttcaggtctgggaaaccacatagcaagctttctgattccatttccccaagggttgatacagaaatgacaaaggctgataacatgactaag

SEQ ID NO: 107530 - DNA, 284 bp, Glycine max
ctttaagtttatcatccaagttcatgtaccatagcttttataaatatccccatccattttcccttccaagttccaatattcaattcaacaccttccctcattctcttcaaatgtacggacaaagttgctacgagtccgatttggcccttttggactccattcgccgccacttactcggcgactccgaggaacacagattcggagccccgaatgttaattcgggtagcactccattgtactctcggagctccagtttcggctagttgtacccttgcctgagtaac

SEQ ID NO: 107531 - DNA, 269 bp, Glycine max
ctttgatgacaacaactgaagctgttgtgtctgaacttccaaacgatgataaagatactccagctatggctggtggcatgggtggcatgggttattaaccagcttctattgatttggttgcacctgaaaacaaggattagtgctgaatccacacttactgtctttttttttttggggttaaattatttgttgtgtgaggcatcactgtaatcatagtgagagatcaagatgtaggtaaggaaatgtaactgcaataaataagatatttg

SEQ ID NO: 107532 - DNA, 273 bp, Glycine max
cgtcttagtcgatcgtcgtgaaggctttccagcacctccgtggttctcgcgcgtggttgactaccgtcaaaggtcattttccaggcctgggtcgtccttgtcgttgacagtcattgtgtaagactgtgaatacaagtggtagagctccatttcatcacgctgactcaagttgttggcttcgatcaagaattggagccactccctgaattaaaaatatttgatgagataaggaagttccatgaactgtaccttgaacactttgaaaataatgta

SEQ ID NO: 107533 - DNA, 177 bp, Glycine max
atacaacaaaaataaaatgaaaaaaaaaatcaatttacaaagcaaggtagtactgctcatgaaaccttcaataccatataccatattcacaacagttccattataaggtaagaaagcaaatgtgacttttcacactactaataagtaataattcctttccaattgatcattcttctc

SEQ ID NO: 107534 - DNA, 130 bp, Glycine max
cggctcgagataattttctgtcaattggattagtggatcatccagttcgaaatgataacaaaatacataggatgttataaggagatcaattaaacatatacaaatagtataccatttaattaccttattt

SEQ ID NO: 107535 - DNA, 127 bp, Glycine max
aacagatgtctaagctcttctttctcactctcatcaccttcacccatggccaaagaccgagagaagaaactctacgtagccgtgctcggaaactacgccgccgaactcaaactcctcctcaccacgc

SEQ ID NO: 107536 - DNA, 109 bp, Glycine max
cggctcgaggtctttatctttttcagtctattctttccctctcgcaataaagattcactggtgttacgcgttaacatccactttattaagcaaatgtgctcctagtagt

SEQ ID NO: 107537 - DNA, 260 bp, Glycine max
ctcgagccgtgaactttgtccatgatagtctgttttgtgatattcatttgcttatccgataacacaagtaaaaactgagattaaacctgttcttatatgttggaaagttgaacatagtattgtctaataaagtgggaaatttggtggatgatgttgaagtccttctcaacttggaagtaattggttaatcaagcttgtgcctgaattatatcatttaattgtgaatcttatctcctccctgtcgtttacacaagttatct

SEQ ID NO: 107538 - DNA, 284 bp, Glycine max
tggggaaacctgttctggtggtaagtgtgaggtgcgtgctgaaattagaaaggcagttcattcatctaacacaatgtcatctgctggtgcttcagaagctgtattcttgtgttctcaatgcgaaaggaaggcttgcagagtttgctgtgctgggaggggggcatttctgcttgtaggatataattcaagagaggtccaagttgactttcctgtaaatcgtttattagctcaggatggtataatttgtaaacggtgctgccaggatattgtgcttcatgcattga

SEQ ID NO: 107539 - DNA, 278 bp, Glycine max
ctcgagccgctcgagccgctcgagcggtcgacaaatgtatttgactagttattttcagctgtaattgcatcagcttagattttagaattcgattcaccaatatgtctcatcaatatcatgtcagcttggacataaaatggtaaatgcttagacgtagaatcgtgtataccttgatttattctagttaataactcaattttattgtttataaaaaaaaaaaaaaaaaaaaaaatcaatgaacaaaaaaaagggggggccccccacaaattccacccccc

SEQ ID NO: 107540 - DNA, 280 bp, Glycine max
gaacatccatgaacagaaaccgtactcttatcactgcttcaactgaggaatctcgtgatcctacagccaatacactgtggatggaaaagatgttagggatggagctgtgtctacacagttggaagacatggatgagttgaaaataagcagtggagcaggactgtcagctggagagtgggctgatagccttaccaacattagtgtgggggatctactttcaggagtgtcccaggatcttgataactgcatcgatcctcctattgcagagaattttcatgat

SEQ ID NO: 107541 - DNA, 278 bp, Glycine max
gcagtttcccgataacgagccagtatgttttttaaaaaataaattataacatcattgtctattttatgttttgtaaatttcttactcttaacttgtttcttcccttaaaaacatggttctttttttattttaagctttataaaaaaatatttacttccaatctctatattttagtctacttttaagaataaaaatgtattcaacattacttgttattatctcaaagtgactataaattaatggtaactcttgtttgaattttctccagcttatcgtga

SEQ ID NO: 107542 - DNA, 159 bp, Glycine max
gtttcagattcagaagtcaatcccaaatctgcacctaattcctcacacacaactcagttacatgtgacactcactagattttgtagtgactgtattatgtatcaatattattctgtaccaatcctcatgtaatattgcaatctaatagttgtgccattt

SEQ ID NO: 107543 - DNA, 272 bp, Glycine max
atcctctttccttttctctgctcttgtgatgacagcgacttaatctctgagattccgccataaatgctttcttcgcattctcgctccgtactccgtcttctcgttccgttcggcatcgctaatttctctccgtcgaggtagaaaatagtacttccagggacttttaatgctagcttaagagtatgggcctttgattttactatgttgagatactttatgagaagtatagagtaaacagcagtttggtttagagggtgaaaagcttcacaaat

SEQ ID NO: 107544 - DNA, 280 bp, Glycine max
cgcttgcgaaatatccccaacgaaattttaatctcatcgcgattccgcaaaagaaaagaaaacagtgtgtggtgtcggggatgaacatacattgaggcaaaagtgtttcttttcttttcttttcttttctgcgcagttattattattttaggactgcaactgcatgagttggacaaaaccgagcaagattggtagcttgaagttctacaagcttcagcaactatggctattgctacggccaccctctctctccatttcgccaaaattcccattcgtcaaa

SEQ ID NO: 107545 - DNA, 280 bp, Glycine max
gcacaaggttatcgcattctgcttttgctgcttcttcgttcaaccctttctgagcccgtgcatcggcatgggcttctcgctagtttcaaattcaaattcaaaagcctaggctacggttcgtctaggttccaggctatgccgattttgtagtctgagttgattgattcacatcaccgagctattgtcacagacacaagatctatgaaacattgttcaatatcttttgatttccgacaaatgtgagtagcttctgatttcacctcatttatgcattcctttt

SEQ ID NO: 107546 - DNA, 275 bp, Glycine max
atgttaatcattgtctttattgtcttactatatgatgttggccaggattttttatctgacatacatgggcagaaattgtttctcactcttcataatgatggtaaactagccagcttcgaggattcatcaggtaaagtatatgattttgtaagctattctgctccggagccagacgaaacagtttttgttccctctacagaaccaaaaataggtatgcatctataggtattattttttgtttaatcttctctattactattatatttatataaaga

SEQ ID NO: 107547 - DNA, 281 bp, Glycine max
cggctcgagttacattttccttctagaaaaggccatgcatgatattggccatgaggatgacttggtgatagagcttgccaatgaagtgaagaaagtacttggagtgggaaatgtagtaccaaaggagaagaaacaggttggagcagcacaacttccacaccctcctcatgtgccaatccctacccttcaagtgctcccgctgccagaacctattgctttggatagctgacgcggaaactgacgctgagttcggcaactaaactgatttactgcggacccta

SEQ ID NO: 107548 - DNA, 276 bp, Glycine max
gtctacctctacaaaggaagaagatattaatagcttccctagccggagaccgtctccatcactttctgatgcaacacttttgagggacagaaacagcctatcaaatcaagcaacagccagcgttcccttggttctggaaacatggtttctagcaatgtggcccttggatcagtctcttcagcctctgaaatagctaaaaggaacataatgggagctgatgataacattggaagtagtgggatgggtagcctcttgtatccccgctaagtaatagat

SEQ ID NO: 107549 - DNA, 272 bp, Glycine max
tgaatattgaggggatgcctttagtgcaatttgttggagatgatctgtttactagtgccactcatagaacccttggtggggccattattgtttcatccattttacgttgggagagtgttgtgaaggttgtgtagatgatgaggggcacttgccgtgtgaaaatggctcgttcttgagttctaaggaaaatgctctcttattgagtgataatggatatcctcaactaagaactgttttcgggtgcataagaacgagaaacatctattgaatgg

SEQ ID NO: 107550 - DNA, 169 bp, Glycine max
cacctcgtagtctccgcagttggggtttagagacaactgcaactccgttaataacaacacaacactcaaaacccaatacactttatactttcttcacttcgaactcgctctacgtttccctctcatctctccgccacgcgccaccatgtcagtctctactccgtccagc

SEQ ID NO: 107551 - DNA, 275 bp, Glycine max
caacaacaatcctacgagcaccatcacagtcataataacttgcttttcaagccccaacaaggttttggattccttgggacaaccactggccccgaatcctggggaaattgtgagtaaatacccttttttgtctatcaatttgtaagcatcgatcactccaaaatttacaatatatttaccgtaatccttaattttgcaagagttcatttttttaagaataagaaatgttagtagcacattctttaacacacttttttaaaatacaattagaaatt

SEQ ID NO: 107552 - DNA, 148 bp, Glycine max
caatttttgtctttgtttttcaatttttaatctcctagccctttttttaattttggaatcgaaatatctaatctaaataatccataagttcactcttaatcgtgacagtgatatacgcgtatatgtaaatcctagatgtaaaaatagg

SEQ ID NO: 107553 - DNA, 248 bp, Glycine max
actccggcgtcgttttgatcagcttcttggggggtggtaagaatctgccctctgtgtctctctctctctgtttgagctccatgtcacaggttcagatttagatccatcatgtgctttgtaccgcttttagaaatcttaggcttctgagctgtggaaatggagattgaatctatttcttaaaaagatcggagcttcctcgtaaagcttctcgtgatcggagacctaggaaagagtgtataatccaatca

SEQ ID NO: 107554 - DNA, 208 bp, Glycine max
caaaaagaaaaagtaaacggctcctattttttgtgatgttgttttctaatggtcaatgttgtaagaaaaacaataatgttttactataattcgattgattttgtttaattcacgtgtaatttattgtatttggaagttcaacttgtgctacttggcaaagtatgaatcaatcactgcttggtcatgttgaaaatttagttctgggcag

SEQ ID NO: 107555 - DNA, 269 bp, Glycine max
gaaacgagagatcttccaattccagtgacaagtaggtagttcccacagcatgagcaagaggagcatgtatcttcataacctccatagaaattatctggctgatatcggggcagataatcaaggtgtctcatcatgtcaagcttcaaagccaggtccagaatcaaggccctgatgtcatactaagtgaggcagaactttctcaacgcagcagcattatcatcatctacaacatctattctggatggaaaattgttcacacgcaaactctc

SEQ ID NO: 107556 - DNA, 258 bp, Glycine max
ctcgagccgcgttaaacggcgccggattgcttaaccgcgggtttactgactctgcttctgtgcattgccttcttggacttgacgacgatgttgccgagacataatctcgataccggttcgaatgacggtggggatggtcgtggtagtagtggggttggttgcggtggtgcttcgcagggtgtatctttcgggaacgggtacaatttgaagcatgatgtccactccattcgcgattcgtccatgctcgaaacgacgtcg

SEQ ID NO: 107557 - DNA, 276 bp, Glycine max
ctcgagcgctaagattaatcgggttactatagttccttgtggtcatgtattgtagtcgtagatgttcttctgcagtgtcaaggtgtcccttttgtcggcttcaggttacaaaagctatcagaatttttcgtccgtaatatctccaatgctttttgatcattttatttggacattgtcagagttccattcgccaatataggctaactgaagttggctaagattaatcgggttacattggactctgacgtgaatattatgtctatgtgattgagcccc

SEQ ID NO: 107558 - DNA, 268 bp, Glycine max
caaattcttaaataaaagtgcccccattttcccaaaatcaccatctagagttttctcttttccactgaaaatcaaattagggtttggatttcggaattgccacagaatcatggccactctgaaagagcttcttcctcctgcaaaatcctctccaccgcctactacgaccacaccaacgatccatggttcaagcagcgtttctcctcagaagatgaggagttggaatctcaagtgatgcgactggagagaaagttggtacctttgcatt

SEQ ID NO: 107559 - DNA, 266 bp, Glycine max
ttgttccagacggcacacagggtacatttcaaactgtaaattttagctcttttttttggctcttttctatcagcagttgccttaactaggataattgtgtcctagttctacaatgtaacttatgaatgaataagattgagatatacttctaaaatagaattgtttcaaacctattatagctttacatggacaaagccataaatcctctcccaataaagtttcaaactatctaggataatcgatcaaaataaaaaaagggcggccgc

SEQ ID NO: 107560 - DNA, 263 bp, Glycine max
gcactttccctttcttccaattcatgcgtgttgtggatcgattccctttctctatcacgctaaatctcaccgaatcgtgcgacgcggtatgatgttatataattgtggtgattctcctcacttttcttccttcagtgtgatctgccttggcatgtggtattggcagtgcattgatcttgtgaattaggatgtttccttcccctctgtgtgctagtagtttcgtgtttgggttcgcagctcgaatttagtggaactggaatgct

SEQ ID NO: 107561 - DNA, 269 bp, Glycine max
catcaacagagaagccatgaaaactctgatttgtgcaccaaacgcagccttcaatctctcaaaactttctccatggaaaccaaacttccaagcttatcatcatcaccctacacacaaactcaactaccccttcaccacattaaagcacgtgctagtgccaaaggcttttcttccacggggcctccaactgttgcaagtgataatgccaatactactaagaagcccatgagaagaaaaaacaatgatgatgatgatgatgagcttcccca

SEQ ID NO: 107562 - DNA, 267 bp, Glycine max
tctcgagccgctcgagcggctcaagttggtgccttatcgctggtgtttacatcgtctagcctctctgtatttgctgaatccatataccttcgccgtacgccgaaacaatggccggataaggttaggtcccagcaatcggaatcgactcggacctactaactctagtgtcggtgtgtggatactttacctattagaaatcatcgctaaggtctaagggaacagatcgtcgccgtcttaggtcggcttcactgaaaccgagcttctcat

SEQ ID NO: 107563 - DNA, 262 bp, Glycine max
gttctcgaggcactcctcctgcgaaacgacgtcgtttttctccccaacttcctcacttacatcattcttctgcttttccacctcattcgccacctccttcgccggagcaaactcttttcgcttgcctccggcacccaccttaccttcctggcacacgccggcgacctcgacctccgaccagaaccctcgccggcgtccccccggagcgaggcggggcccacattgcgcttccgattcgccgacgtaccggagtcgctaattt

SEQ ID NO: 107564 - DNA, 231 bp, Glycine max
cccttctcttctcacccccacactcccatctcacacactccacgcatccaacaatgtctctcaccattccctctaatctctccaagctcgctgcactccgctccaaactaagcccaaagctaaggtccgctgtcacaaccaccatcgtagcagcatctacaacatacataataccaacaacgtgtctccctacctgaaggcgtactccgccgcgctggcattctcctccat

SEQ ID NO: 107565 - DNA, 179 bp, Glycine max
acaaaataatgaaaatggcacgcttgccagtgatttttttcccatttttgaccctgctcctgatatctgtctcgacgaatattaatgtacttggggagctaccgttttcagcaatgtttgtgttcggagattcattagtggacatggaaataacaactatctcaactccttggcaagag

SEQ ID NO: 107566 - DNA, 282 bp, Glycine max
aaatctgcctagacccccttttcaacaagaggaaaaagaaacaccgaaaattaggcaggtaaaaaataggataaataaaataatatatacaaaagaatactatacagaaaaagaaaatgttaatatatacaaaataatggaggcagattagtgttagcaacactcaaacattaaaggctcaataatcacaaagccgatggatcgatcataatcagggactgatgagtgattagttccatcccatatgactgacactgaacctagccaccgaaattccaccat

SEQ ID NO: 107567 - DNA, 291 bp, Glycine max
acaacacataccctttttcgaatcaacgccactcgcccaaagaccaaactgagtccgagagagagagagagagagaaggagggtcaacatttcacaactcaattttgcaatttcccctttcctttttctactgcccctcctctccctccctcttcgtttaacatcttccattcccttcctctctctgtgtattctagggttagggttcttctgactccacaatggccgtttcaaccactttctccgctcccaaattggaggccctattcctcaaatgctcttcctcctctt

SEQ ID NO: 107568 - DNA, 289 bp, Glycine max
aaaagtaaaaattaaaacaaaaaggaatattatatccgatctatctcaattaaatatgagaaattgtaacttaaatgatcaaaattatacattagttaaaatataaagatttgaaacatatttaagtctaagattaattaaaataaattgatatatagtatgttattagtgttttgtaaaaagaggagtcttacatgacttaacttgatgacattaatttgtttctaacatctatgtgacactactaattcatgagttatagagaattgaactaaagttcaaagaacaa

SEQ ID NO: 107569 - DNA, 232 bp, Glycine max
cagtgctattgaggatgtaaggaaaagtctgaaaattaataagcaacagtttctccagtgttgggaggttttgatctacattggccttaatcctgttgacaagaacatggagaactttgttagtattattgtgaaccgtgttaagatgatatcttagggaaagattgtgttacatctggatctgttgtaccatccagaatacatagagcaaaacgccactctagccttccag

SEQ ID NO: 107570 - DNA, 284 bp, Glycine max
gttggcgcgcaggtccgcgactccctcgtccagtccaacgctgaccccgacctcctcgccgccttcgagactggcggcgccgaactcctctacgagatccgcctcctcagcgcctcgcagcgcgtcgccgccgcacgcttcctcgtcgagatcggtgcgacgggaaggccgcgcaggagctcgcacgtgcaatgaaggatttccctagcaggcgcggggataaggggtgggagagcttcgactacactctccccggagattgtctttcttttatgtattaccgg

SEQ ID NO: 107571 - DNA, 286 bp, Glycine max
gttttctagaaaataaaattacgctcaggattgtcagttttgctaacaccagaaaattaatctgaatggtaaaaacagatgttttacatagacaaactgcctcatttgtttaaagatgaattatgactcatttaatttgtctcatttatttaaatgctcgtgcttacatgtacagacactattaaatgttatttcacctatattgtataatattggtttgaatactaagattatttttattattttttacataagatttcaaatacgagtttcatagacaaggaaa

SEQ ID NO: 107572 - DNA, 280 bp, Glycine max
gtttgctgagataaagacaggtggaggtggtggtgactcagaggggacgcagagagtggatgctgtgattggttctgcttctggtgatggtgggtcccagcaggccataacatctccgcggagcaggaagcctcttaaggtggcgatgaggccatgattaggggaattgagaagtacatgcgaagtggaagtgcacgatggagaagaagaagcccgtcctaatgtaactgcttggcataatgttccacgcccggaggcgaggttaaggtcttggtctgct

SEQ ID NO: 107573 - DNA, 279 bp, Glycine max
gttcattcaaattattaagagaacacaaattttgtgctaggaatatcttcttttactcttgttttgtgaaattaaaatagtgttaccgttgtgtgctgtgacgaggcaattttatggactagagtttctgatctgggaactttctcaaaattgattatcaaacccttggctgtctgagcatactgaattaaatttgtcagattttttataatttcgtttttgaagattcttaatgtggtctacttaataatctcattgttagctttaaattttgttcca

SEQ ID NO: 107574 - DNA, 280 bp, Glycine max
gtctgatgaagtgtctttccttgatactgcagtttgtatcacaaaggcagtggcaaatcagaggtagtgctttgaaattgctaatggactacattcgcactattccgtgcacgaattctgttacaacagcaagttgttacctgtgcccgatcctggttctagagggtccaaagtcttggtctgctgtgggactaatggttgtgcttttcctcataaagattgaacattttgagtcacgatctcaaggacaacataggcgacgtgttgccaatgagttaga

SEQ ID NO: 107575 - DNA, 279 bp, Glycine max
cgacagaagagctatcagggtcagaagatggtagccacatttttgaggcaattggtttattgattggaacagaagatgtcctgcctgaaaagcaatctgattatctatcttctttgctcagtcctctttgtcaacaggttgaggcatgctcataaatgccaagttattgaatgctgaggagactaatgccaaaattgctgtaatccagcaaattattatggcaattaattctctcagtaagggctttagcgagcgtcttgtaaccgctagtcgccctgc

SEQ ID NO: 107576 - DNA, 286 bp, Glycine max
cggctcgagtgggattaatttcccttaaattttataggatgataatgatttgttgatgggtaattcttagaaggtagaagctaaggaagtagtgtgggaatatggtagttaaaaaagccaatggtctgatggattcaatttaaaattcattagaccttttggagtactatgaaggaagacatcaagagaattcatgaagaatttcatgctcatggtgtgatccctagaggttgcaactctttttttgcccttatttctaaagtagatgatcctcaaggcttagggg

SEQ ID NO: 107577 - DNA, 284 bp, Glycine max
ctagggagaatcaccagcattgcttgttgatgacgtgcaggatggggctctgaatgggcttgaattgaaaaatggaacttgcaaaacaactgctactgttggcgataagatggtgagtatatgcaatatgctacgaatatcacgataatctctatgtatgttgttactcataattagattagtgcctagtcaaatcttctgcctaaagcaaaaactgggcctccatttttttgacagtatgtcattggtggagctgatgatggaactttgtccattgaagttca

SEQ ID NO: 107578 - DNA, 277 bp, Glycine max
ggaagatactggtgttctttaatgtgaaagggctggaacggctactaatttgaacactgaaaagagccttcctttgcggtttttcttcttgacgaagaagaaggctctctgtagttggtgattttgtagaaggtaagacggatggagatgatgatgaggctatggactcctgatctgcaattcgtggaactttttgtgagttcattgaatcatatgctttatgggttgtacatacttagctccgctgtggctggagatctctcgacagctctcaatg

SEQ ID NO: 107579 - DNA, 288 bp, Glycine max
tttgcccctcctttttgctatttttgctttaatgtttatcctttttaattatttttactttactgtgttttctggggtcaaccctttgcttgtttgtaaaatttgttggctggtggcttttcatgtggtacttctttgggttggttcgcattctagtggagaaaatatctcatgtggtgtgattttaactgcaggatgtctctcaagatctgtctggggagtgaagcttaatttgattagtgatattaaggagtaagatctcatgtcaacacactaaacaatagtgat

SEQ ID NO: 107580 - DNA, 291 bp, Glycine max
cccattcattgtgtgtacaatatgtgagaagaagaatgagaaggttttgacagaatgctacaccacattacatgtctctgagtgcaatttctcatgtcagaactcacctattatcaaagtgaaagagtgaagcttttctcaagaagaaactcatgttcccagaatggcttcccctccttccccacccccatgtcgctttgctgctctctctccattttcttgtacaaatttctcaatatttatttgtttttctatgttattttctgagaggaaaaaaaaatgcatactggt

SEQ ID NO: 107581 - DNA, 286 bp, Glycine max
gttacagaagaccagatcgaggaaatctactctaccggacaatcaaaggcttaaaccctggtcgaagcgaagcgcatgcgatgagggaagagagagaccaccaatgcaagtggatcgacttaagcatcgatttcgaaggcgacaacatgaagcatgaaaatagagccagccactttttatcgttaataatgttacaagcaacaacgataaaatacgctcttggatgcatgcccctatctcccacccatcgtcctgatcttggcttgaagtatccaagtagcgctaa

SEQ ID NO: 107582 - DNA, 278 bp, Glycine max
caatttttctctgccatttttcatttcccctttttttttttgttttggttctgttctgaaaagggtttgtttctcttttcagaatttcgtcggattatttggggaagtttctatcttggtcttgttctgttctgtagtgtgttttcagtttttaagttttgagcttcactaacttcagcatactcctttgagtaaatgagtaacatgaagttggatttgcatgttggaatttttgtcacctgaatggtgattctctctgggactttctgtgttggaga

SEQ ID NO: 107583 - DNA, 283 bp, Glycine max
gcttcctctaagatatatagactgtggcaacaaaacgtcctttgcattcatgggatgcatctcttcagtcaaataattatgttcacttttcagcttgcttttttggatgacattataatgtttatgtactagcttgtgatcgctgatcattatggtatagttatcctaccagtactatgttagtatttaaaaaaaaaaaaaaaaaaaaaaaaaaaaaaagggggggcccccgattagtgaccccttcccccggggatttattccgggccgggtccttgagggg

SEQ ID NO: 107584 - DNA, 265 bp, Glycine max
gcttacttctaaagcaaaccagactgaagagagtagagaaagacttttttattacgttatccagaatgcgatgccccaaggcaagaaagtagcaatcggctttcaatcctatgattttactcgaatagctaatgtcagattttccataccgccggcaagagaaattattaaatggttcaggattaggattacgtcaattttcatgtgacacaagtttttcttagtttcggacaaagaatgaataaaacaaaattatgtgtcacgt

SEQ ID NO: 107585 - DNA, 284 bp, Glycine max
cggctcgagattccaggtttccctccttttccacttggtcactcatcctctccttcgccaatagacatgttccgcttcccctccgtccttctctcccgccgcctccaccgccgagaactatcctcctccaccacctctcacccgccctccctccctctctcccaccccatctacctcatctggggctccaacaccggcgtcggcaaaaccctagtctccgccggtatcgccgccgccttcctcctctcctcccccaccccctcccaattccactacctcaagcc

SEQ ID NO: 107586 - DNA, 270 bp, Glycine max
gcgattcttgttctgcttaaggaatcctgccgtagccagaagcaggttcgagaaattcaagcgcagtcatcctccagaaaatctacccaaacaccagagtcgctcaacacttcatcggtgcgtgccaatcacacggccttctcaacactgctcttgttctcttcaccaccctcctcccccacccccacgtctacaccttcaacaccctcatcagagtcttctcccaatcccttaccccgcacacccctctcttgatctacactcacatgg

SEQ ID NO: 107587 - DNA, 171 bp, Glycine max
gtgatatagaagaagatgaaagtggatgggaaactgtgagccatgttgaggatcagggatcaagttgttcgcctgaagggagtgccctattggtgaacaagaatcgtcgagagagtgatgtttcagggaggagtgtgcttgaatgggaagaaaatgcaggtttagagactc

SEQ ID NO: 107588 - DNA, 261 bp, Glycine max
ctccgttttggctctcaccaaccacagatttccccttctctgtgtcttcctgcgcgttaccaaatttgattttaccttttctctctttatattcttctcttcaaattctgatactttctacgccggccactcagtttctctttcgtttttctttttcttttctttctttctttctttcacttatcctattagtattatttcccagtcggtttctacattctctctggtttgttccttccaccgactgctagttttcgttaa

SEQ ID NO: 107589 - DNA, 269 bp, Glycine max
gcgcaatgtagattagagaaatttaattagtgtaaatttgtttgtgataagtaatgttttctagggtgtactgtagatattcattccctgcgccggtggttctcagttcttgacaactgggaagggtcggggaaatgttttaatttgtatccgagcatccaacgctgacaagaggtggtttaaccggtgcatgaccatgatgtagtcttaatgttgaagtctttaattgttatttatttttgttaaactttggttctgtcgcttagtaa

SEQ ID NO: 107590 - DNA, 185 bp, Glycine max
ctcaaaggaaaagtgtggctatttcgtcaagttatctgggaagttggaacaatgtggctgagagttcaacattcagtaacaatgtgttaagcaagccatataaacagggtgagcatgtgcaatcctcattacagtctagcaaggccaagtccttggcagcaagccttcagaagggattacagatt

SEQ ID NO: 107591 - DNA, 281 bp, Glycine max
ttcgcgtcagaaaggtttcacaggttcctgtgttagaaaccattgccgaagaggctgaagaatgtgaccaagagtttagtcctcactagctagctattgttggtgaatatattacatatatatcgttgttgttcactttaatttgttgtgtagaatcatcaagtttcacaatcgattgaaagtttttgttgtcgattcgtggtaattaatgaagtttttgtatgttgatttgcctagctaaaaaaaaaaaaaaaaaaaacataaaacaaaaagacaaaaca

SEQ ID NO: 107592 - DNA, 178 bp, Glycine max
caaaacccaaaggaggctccttcggatcataatcaccgaccatgacgccaccgatactgactcctccgacgaagaacaacagcagcagcaacaaaaaacaagaagagtgaacagagaaatcacccaaatcaacatgcaacttcctctatcacataatagttccttttccccttcatct

SEQ ID NO: 107593 - DNA, 281 bp, Glycine max
ctggatttggagagctgaatccactggggtcttaacatctaaatctggttatcaagttattaaagctgacagggatgatgaaggtcagtacctgggcttcaagacactctgggagattaaacttcctcctaaagccctctcctttggttggaggttactatgggatagacttcctacgaaggacaatttgattaagaggcagattcaggtggataataatttatgcccattctgtcatagtcaacctgaaactgcttcccacttatcttcacttgtggcaa

SEQ ID NO: 107594 - DNA, 290 bp, Glycine max
cgactcaattggttttctaaataaacttaaaatattgggtgctacaaggtgcaggaagcttaccacatttccacctctcaacttgacttctcttgaaagacttgaactttcatgttgttccagtcttgagaattttccagaaatattaggagagatgaaaaacttattgaagcttgaattgtctggccttcttggtgtaaaaggattgccagtttcatttcaaaatcttgttggactccaaagtttagacctggatgattgtgcaaatttcttgttaccaagtaacatta

SEQ ID NO: 107595 - DNA, 224 bp, Glycine max
tttaatttaagaatcaaagcagaaaggttcaagagagggactcagaggccctgcctgtcaaatcaaccactgctttgattcttaaattaaataaatattattgttgttgttgcatttgatcattcacactaccctacatacctaatttattaaattatatgctaccaaataaatttgtagttatttgacattgatgactttgaattttatatacataattacct

SEQ ID NO: 107596 - DNA, 288 bp, Glycine max
ctgcaacacactcagcaatgtcctaacaaactcaacaacaaccctcattctagaacctacctcctgagtcatcatctatattatcaattatcagtaaaagacgaataaggagcattaatactaggaataggcctagcagtagacacagcttattaatactctattggacctaacaataggacttgggtcataacaattcctaaattagctgaatttgaaatctgcatttagccttatgtgggtacttcctagaaaaatgtttatttctcatttcacatcatatatgaa

SEQ ID NO: 107597 - DNA, 279 bp, Glycine max
gtgatagtaaatacaagaataataatatcatacaacttctgaaacaagatgaaaggcaattatcatttatcaacataatactatctcaaaactaagctctataccagtactcatgtacaacgtcatcctactccattacaaagctaaatagtctttctcatcccttgaattacacttatgcttcgatcaattcccgaatagggattctatctatcttaattgaagaaatatcagtgaattctgacaatatagctctgaattcatctccaccaagggtct

SEQ ID NO: 107598 - DNA, 274 bp, Glycine max
cttgaagaaggagacatggggagaaattaaaatggctggaggcatataaccggtaacaatcgcgtttcgaattcagaatcactcgtatctcgcttctccttacggtcgacgcatgaatgcaggggcttcaccgcttcagacttcagtagcagagtgacagtcattagacactcaaaaaagtaggcgcacgacgtgagaaaccatggaacgtgaaaacgacaacagcgccaaaagcagtgtcaacggtcaacgacgcgtgggcctactctacgac

SEQ ID NO: 107599 - DNA, 284 bp, Glycine max
gctgacgtggtgcattgaggaggcttccgcaaagagcaacgccgccgtccaccatcgagggagcttcgtcaccgtccactgtcgaggtaagcgctgtgaccatgtcgtttccaccattgttgtcggcgatagggtagattgttgatctgaaagtggagatgtgagtgttacggatcaacttgattcgtaaactgctcgacgaaagtttacggatcaagttgatccgtaagcatcttccagatcaacttgatccgtatgatacttacggatcaacttgatccgtg

SEQ ID NO: 107600 - DNA, 151 bp, Glycine max
caaatcttcaccatctccacttgatcaattatcctcttttgatgtggcaagatcaggtttgcagctcctccttccttgaagcacaaaatcatctcttgtaacatccaaaattatcacaaaaaacattaaaaacgggcggccggcgctaaaa

SEQ ID NO: 107601 - DNA, 277 bp, Glycine max
cagcttctgaatcgccatcgtgtttttgtcgttgtcgttgttgcaacagatagatttgactctttatgacccgaagggctcggaaacttcagagttgatttcttgtgaccaagagttttgctctgccacttatgacggtccaattcctggttgcaagtctgaaattccatgcccctacagcataacttacggagacggaagtgcgactactggatactatgtccaggattatcttacttataaccatgtcaatgacaatcttcgtacagcaccacaa

SEQ ID NO: 107602 - DNA, 125 bp, Glycine max
tcttctatgctagaagcacttcaatgggttggtggatttgcagatcaacactgtttcgtgaattctactcctcaacctttactgtcttcaaagcagcaagcatcctcagaattacttcatacagg

SEQ ID NO: 107603 - DNA, 288 bp, Glycine max
cttcttctttggttgttgttggctctctccatcttacttcacagaatggttacaaagtgtgggaagatccttctttcatcaagtggaggaaaagggaccctcatgttaccttgcattgccatgaatctcttgaaggatctcttaaatattgtatcaacgcaataaagtggattttttggcttcccagtcagctgtttggaatgatgatgctgttcaggggtctcttgactgtgctgcattttgggtcaaagatttgccttttgtcaagtccttgtctggatattggaa

SEQ ID NO: 107604 - DNA, 291 bp, Glycine max
attccattctacagtcgagatcggaatttacatacactaggattctacatatccataagatagtgaaacataatatgtgctttgtatttctgttctcccctctcaccatgttagatgggaagggggatgataatcaggtttgaggtttgatctatgagcctgggtactatcaccacttgaagtatactaagtttattaggtcctataacatgtcgttccctatagtatttatatcatatagtatgtcctatgatatctatttttcaaagccctgtatgtaacatgtcctat

SEQ ID NO: 107605 - DNA, 287 bp, Glycine max
gaaattatcaatataatacttttgcccaacaacgtgttccgcgagtgttttttagatcaattttatgagtacagtttattcaaataagttagagaaactttataagttggagtagtagtttattttttgaatttgtgattttgaaacacgcatattcttaaccatatttacatttattaagaatcatctgtctaatcatacatttacatttacatttacttattggattgttaaaatattcgtgggaataacgtagatatttacggtttctgctattttcttgttta

SEQ ID NO: 107606 - DNA, 280 bp, Glycine max
ggaacccaatttgccctctgccggtctctacttcgttctgggcctgcagcatcacttcgtgtaaatattagagcattccccaaaattttaaagtctgatggcaagcttctatttgatacggaaactactcactttggttgttgtgtctccattagatagaacattgcaaagtacttgatacagccatacttgactttgttatcaagcaaatttcaaaagactcctaaacaaacacagaacaaccaacagcttcaatgattgttgttcaaagcttatgcca

SEQ ID NO: 107607 - DNA, 282 bp, Glycine max
aatttctttaattgaagtttgcaccaaaaaaataaaaaagaaagaaagaaaattttatgtcaaatcgttgcgatgctggttgcgacagattctccttttttttttaataagacacttgaaacaagaacaatcatggaatgaaattaactctacaaaatttctatagtggatgtgtagtctacttttatacaaatcatctaacactaattaacatgtgcaggactcaaagtaatagttttctacaaaaaaattgaagtttggggggggatctacatctctatg

SEQ ID NO: 107608 - DNA, 282 bp, Glycine max
tctctctcctcagcgcgcgctcttttctcttctctctctctctatatcacagatctcgctctccccaacgattcacctccgaaatttctcgcttttgttccgttcaaggttcaatttttcagaactccctttaacccctttccccctctttcttccttcttttaattatgtttttaaaaatattttgtttatgggtttttaatttgtaaaatcggacacgatcgctgttcgataatttcgattctctccacaccatggcattctcctttccttagccaccta

SEQ ID NO: 107609 - DNA, 191 bp, Glycine max
ctcgagccgttgcgtttgttatggggtcctgtgagctgcacatgatccaacctgtaacttacggacgacgaatctttgctggtcattagttgttcttaattctttcagaaattcgaacacaacccaaaatctcttgggaattgccagattcagtgctactcctagcatcagatttcgggttcttctgaccc

SEQ ID NO: 107610 - DNA, 280 bp, Glycine max
ccctctgttgctgcatccttaacaaggcaagacattatcaccaacgtttgcacttggcacaatttgtaagcactcataatggtgacatccataccattcagtggaactggcaagcaccaatacagcattcagaatatcaaagctccactactccctgcgcatctttctgattacgaggagcattgtagtccttttatccctgaacgagaaatactatctattgatagggcagctgctagtggtgcaatgaatgatgatgctagtagcataatgactgctg

SEQ ID NO: 107611 - DNA, 279 bp, Glycine max
atgatgaatgatcatccagttgatggtgccgctttaagttcataccaaatttagtatggagatgcccacacaggtaagctgatatggaatgctttaggaaaacatcttccaatgtccttccagaactagagggtgcagaaaatgagagtggaaaatgcccaaaggaaattttggtgagtagtgacagtgatggaagataggaggaacctgtgaggtcgccggtgatgaggacgagggaagggttgataacggaaagagcggggcccacaagattggcga

SEQ ID NO: 107612 - DNA, 281 bp, Glycine max
cctacgccttccttgcgtttaaactgtatttgctgcatcttttagttatttggtattgttattgttaccaatagcattttttgtgattgtcacaatgtctcgtatatgtagaagctattctctcatggaacttcttgattttgtggatgaccaattttagcttgaacttctttttttatggtttacttagatgaataattggagcttgggcttttgtgaggactttgaatgacacaattttgaaaaaagttaaacctttttgacatgtagagaattggtat

SEQ ID NO: 107613 - DNA, 283 bp, Glycine max
ggaaaacagaccgttttcagcttcaagcttcaatggagatgagatttctttgccgatggggcaccaggttagatcagaccccgtgagaactgctcagagtaagctaacattttataagcttactcgatgtcagagtgaacatgtggtacatccttccaaacgtgtttggaatgatgatggttactgggtttaaggtttgatgattcttctcaatggttactgggtttaataaagtttgacaattcttgcgttcttataatgtacagtttcaaaatggcccgaa

SEQ ID NO: 107614 - DNA, 274 bp, Glycine max
ccctctgttgctgcatccttaacaaggaaatacattatcaccattttttgcacttggcaaaatttgtaggcactcataatggtgaaatccataccattcagtggaactggcaagcacaaatacagttttcagaatattaaagttcctctactccctgtgcatttttgtgattgtgaggagcattgtagtccttttgtcccgtaaagagaaaaactatctattgatagggcagctgatagtggtgcaatgaatgatgaagagattagcataatga

SEQ ID NO: 107615 - DNA, 299 bp, Glycine max
ctactccccaattgtagataactcatcccttatcttgatgtagtcactcaagcattctccgttatcagttgtggcattgttggtgctctccagagcttctcctccggtttctttgttagggttcccaaacgttagagagaaggagaagggattgaagctccattccaaggtcttacccatcgtgcatctttctccattcacaggaaatcgtttgtaaatcccaatggtgacgatgtgcagaattaaattgcgaaccacatatcagaatttcatgacaatccaatggttaacgagttcgg

SEQ ID NO: 107616 - DNA, 168 bp, Glycine max
aggggtactcatgattatggtttaagtggaaaagttccacttgagaatggtaatcagtctgcattagcatctgtatctaagcttcctcagctttttcatactacgtctgatttgagtaatggaatgaaaggtgctcctagcaccattaatcctaagagccagtttttg

SEQ ID NO: 107617 - DNA, 301 bp, Glycine max
agtttcaggatgaattctcagtagatttgcaagtgtttgcccaaaaattattgagagagcatttgacaatgaaattctcttagaatatatatcttttttgcttttcgaagtcatgcacatatattaggcccttcttaccttttcaaaaatggttcaagagatgtgtcttttcaaaaaagctttttctgaaattctttactagtaatcgataacaggtttctggtaatcgattacacagttatattttgaagggtcataactttttaaattgaattccaagagtttcgttactgataatcga

SEQ ID NO: 107618 - DNA, 282 bp, Glycine max
cccagaaagggcaatgaaataattccgtaaaattacaatttttttctttctataattctccaaagactaagagggggaaaaacagaagtaaaagacttgaaaattttcccatagatgattttttttttcctaaagggcataactgaaggaaaaaaaaaaggtaaaggtttggactgaaagagaaggcgtgaggaatcttttgaatatggtgggcaaggaggtgaggatggagggtttcgacgttttctctgtcgacctcaatcaccaacagcctcggcccca

SEQ ID NO: 107619 - DNA, 299 bp, Glycine max
catgagtcaaaacctaatgaaccagtggtccagtcaactgaagaatttcatgcactgaaccttactcaaactataagcagtgccttctttccacgattcagtccagatgggaagtttctagtatttttatctgcaagaagtgctgtggactctgagtgcacaatgctacaaattcacttcacagaattgattggccaacagatggaaagctgttccaatcttccaaaatttatgatatcattcctgttgtgatgtgtgctgaggatggctgcttccctgggctttattgtactactatc

SEQ ID NO: 107620 - DNA, 296 bp, Glycine max
ttgacgttgagaaaaggcatggccaagagcaaagtcacgattgacttcaacttgcggccacaaaggcaataaccagcaccatcatcgtcaaatgcaaacaccatagattgagaaattagggagcgtggtcaactgatgctgtgcaaaggggcatttcggaaagaaaaataaaaatttaaaacgttgacagatgtcaatttttaattgagtcgcaggtttttccagtctcttgcatatcggaggatatataacaaagctcttaataaaaacacaaaccctaagagccaaacacgacg

SEQ ID NO: 107621 - DNA, 237 bp, Glycine max
gtcatcttcctgaagctgaaaagtgtctctaatatcaaggaccttgagatggctttgagctttttcttcatcatttatattattgttttaaagattcaaaattttcttttcgatgttttctggcaataaattaatctgtttgggaacttggagtgaaacttgtggtgattcaatgtaaagaataaagtccatttggataaaaaataaatttgaggaactagggagggccgccccccc

SEQ ID NO: 107622 - DNA, 289 bp, Glycine max
tcaagatgctgctgagtgcttcttcactcaagcatttcaccaaaatctagtcctcaacttagattatggttgttttttgtcacataataaaaagctatggttgaattgaagattcttgattctcattgtattcaccatttttggttaagtgtcattataagtattacagctgttactcgttccttggtgcttttcttcccttgttgcttttccttcccttgttgctttccaattattcagtgagtggaaaataactgctcgcacaattctggtactggtttcttgattc

SEQ ID NO: 107623 - DNA, 294 bp, Glycine max
tggatttcactgaccctgattggttagagaaatcccttcttttcccacctggtattgttttccatatgctccacatcctatccacgttggacagcaagggatttcactgaccctgattggttagagtccgcatttttcttctacgatgagacaagaaccttgtgcgcgtgaaggtgaaggattctcttgacacaaggcagttggggtatgtttaccaagatgttgacattccatggctcaagaataagcctaaacctaaaagatctaaagctaagaagttggcattggcacaag

SEQ ID NO: 107624 - DNA, 293 bp, Glycine max
atgactcaggtggtagtttaggtatcctctgaaataaaacgaacaagaaatagtttttgcgaactactggactggaattatgaaaatgtagtgacgtgttgccgaaaaagcttaaagtcaactggatgatggtgtaaaaatagttacctcgcttctgaagccggattcatgaggtgatggtgttcctcttttagcgtgttgtagcgttcaatcacagatttcatgctgtcataatgtaggaagtcattacaagagcacgttagcatatttttttgtaagtaaataaaagatgt

SEQ ID NO: 107625 - DNA, 293 bp, Glycine max
gtctcgctaactacagagacagtgttaaccagagtctgaaggaggcagaaaagagttagagcactagggtgttttctaggttcaaattgctgtcaagagcagtgcacgatgagcaagacggagagcatgatgggggggagtagatcaactaccctttaacggacggaaatttgtgtacgtccttaacatcagcggtttggagataatcccctgtgattagttgcaaaggatccacggtgatacatccatatggaaaccacgtgaaacgggtggacagttacatcgtgcacccc

SEQ ID NO: 107626 - DNA, 274 bp, Glycine max
ctcgaccgttatcatttaactctgggtaatttcttgcttaaaaaagttccattacgccgtcctagtcaaatactagttgatccacatcagagaaatcatttgatcccaccttccagaaggcttcccaatgggacttgggaatcctttagtacgtcgttcccatcatctctctgatgcagcctcctagtgaccgacacgagcctccagcttctcctatcatgtgccaaatgtgtagagtcagtatcacagtctggagttgatacctatttgctag

SEQ ID NO: 107627 - DNA, 284 bp, Glycine max
actcgagcgaattcggctcgagggcttcaatggcatcttcaagctccttctgcaacctcaagtttatcaccaaacccaacaatggtagaagaagctctcttcgccgtattgtattttgtcagaagcatcacgatgacacacccaccgaccaaatcaaccgaagttcttacttcttcacactcacactttctatttcctttctattgattattcgtaaccatcttctgaaatctcgttacatttcaattcttttgtgtattgaagagaactcatattgagaagca

SEQ ID NO: 107628 - DNA, 281 bp, Glycine max
gtggtgtacaccgtcatgtcccggttcccctgcgactccctttaccgcatcaatatttttctctttggaaacacaccaaccatatcttctcttctctttgcattcattttctttcaccctcacaattttaatttttttatccaatcacaaaattttgagaatataagaatttcaattgaagtatttgaacattcttattaaattctctcatccaaacacactcttaaggtaattattacaaaagtcaactatcttaccttgaaatttaatatagaataaat

SEQ ID NO: 107629 - DNA, 137 bp, Glycine max
gtgatagtgaaataatgtttaacatgcggtttctttcaattgttgcaacttgcaaatatagcacttctacttaaatgttatcatgtactttatgtaacgcctaaattagttcctaaatcaacctacctttcagtttc

SEQ ID NO: 107630 - DNA, 281 bp, Glycine max
gaagaagagaacagaatagggacgtactggtcaaattcataggttggatcttgaatctgggaataaactcaaaaacccaacctatgaatttgaccaggacctccctattctgctcaggtccaagaagaagagaacagaacagctattcggttctgtcagttcaagaaattctccaattgaaataattgacgtataactcttaactcatcactctcttgtatattttatattagttaatatacataaactcttggggctattattttcattactataacatt

SEQ ID NO: 107631 - DNA, 276 bp, Glycine max
gtttctgaggtgaccgagcagcttcttcaaatttcattttgaagttggtcaattcgattgacgcgcggggcatggtcaaggcacattcaacttcacgccgccacgattggtttggtttgttgagattacattaccaaaactattcgatttggacatttcttactgtgcatgtttcataggcatttaaattgcatctccacacttctattgcaacatcaatactacttatttttcctttcccgtgtaatgtgattggtgtggttggtgttattcaga

SEQ ID NO: 107632 - DNA, 272 bp, Glycine max
cggctcgagggctgaacaaatacggagattttgagaaagtgttcgttgccggcgacaggccggcgccaacatcgcgagctatttgggcattcgggtcgggttagaacagttacctggtttgaagctagaaggggttgctttggtgcatccttatttctgaggcacggagccgctggagtgtgaggcggagcgggcagaaggcactgccaaggtgcaccagttgtggcgatttacgtgccccaccacgacgggatccgacgacccgattatca

SEQ ID NO: 107633 - DNA, 268 bp, Glycine max
gtcacaaacctgagcatgctcaagcacactcttagccgcactcacgacacgcaatgcctttgttgttcattaccttatccctttcatctcccgttagttgtatatgcgacccatttctggttctacggaatctgaacttgagggcaagtcactgataagtcggctatcagtcccaaattcctggcagccctgataatatcccaaatgtatatcacgataggtttatcaggcaagaccctttcaggctccatttacggtatatagaatc

SEQ ID NO: 107634 - DNA, 271 bp, Glycine max
ctaaatttggaaggaaagtagtcaaagctgttacatacagggtcaagtctgtgccctcaacttccaagccttgtgtaaatgagaaattagaaaatggggataagctgatcaggttctggaagagaactgagcagcttatccccattttctcttcacttcttccattctccgccaccgccaccacaactaccaccacggatggcggcgacggcgacggcggaagcgaaaacctactggtgccacgagtgcgacatgagcgtgtccctgactc

SEQ ID NO: 107635 - DNA, 234 bp, Glycine max
cgaagatagtaacttgttgtgttccttttttgttttacttaaactaatgctatgtattcttattatggtcaatagttttatggcatgtaatgtttaggaagaaatgttgcaagcttatctcacaaaaaaaaaaaaaaaaaaaaaaaaaaaaaaaaaaaaaaaaaaaaaaaaaaaaaaaaaaaaacaaaaaaaaaaagggggagccccagaaatggaacagctccccggggaatt

SEQ ID NO: 107636 - DNA, 209 bp, Glycine max
cggctcgagaatcgacgcattgccttacattgattatttccgcggtagccccggtacgcctaccgttagacggtggggcttccagcattagaactcccccgtcttacggtaggcctaccggttctaacgggatattatccacgcattgccttacattgatgacgactacgcagaccccagagtcacacttgaggttgaacgtctcgtgg

SEQ ID NO: 107637 - DNA, 256 bp, Glycine max
cataattctattacaatatatgttagtaactatattagttatgtttgacaatgataatttttaatttttttactaactgaaaaactaatttgattgtttgataagtaagtttttctttttagtaatttctagtgtttattgaaatgctacttgaaatagtgcctttaaaatattagtttctaacttttattattttatatttttttacttttatttttaatatatttattcatttttttattatctttttaaaata

SEQ ID NO: 107638 - DNA, 260 bp, Glycine max
tcttcttcttcttcactattttttcagttatcgtgaccttatcccaacccttttctgttgcgaaggtgcttctgggctgttgtcagatcaatccacaaccctcaattgttgggattcatataaagtctatgctttcactcaaatgctttaagtgcctgcaatctctttttgtcttatccgttgcaaagggaggctttccttgctgctggtgttttggctcttcctgtatcatggatggtattcatgggggtgattctcgg

SEQ ID NO: 107639 - DNA, 260 bp, Glycine max
caatgatcctactccagattattgtacattacttagtttcggttttctaccttgagattcagcctagtaattctgcaaaattaggatgtgccatgtaatatatcctaaatgaaaatgactaaatattttacatggcacatcctaattttacagaattactaggctggctctcaaggtagaatatttagtcattttcatttaggatatattctttttctttttttctttctttggtcttttttggtggtagtgggattagt

SEQ ID NO: 107640 - DNA, 292 bp, Glycine max
ttcaaactcactacatactccatggaattgagaacccggcgtaattggttttctccagcggctctttttcctatattctgatggccctgctacgtctgcccactacagaacaggcctgactcccgtgagcaggtccgctggctcttagtatggcttttgacttttctgatccggcatgataacaactcgaaccaacttctattctttcaagagcaagagaagggcaccgagatcccgcgtaacgtcgtttgcccgttgccaataggatcgacttgggtagtaagattcaatt

SEQ ID NO: 107641 - DNA, 220 bp, Glycine max
gaagttattaggaagttttaggccattactgtttgtggtaacaattaatgtctatgtgatatgtatttgagttttttaatttacaagaaagaactaatgatactctattacgcgtcacataaagattaattgaaactgtgatagtcttaaactttgcgatgtttactcattaacttaactatgtccgtcatgtagtaatcattggtacatttgttgagaa

SEQ ID NO: 107642 - DNA, 299 bp, Glycine max
gtttatttgaattttgttctcttttttcttcccgcgaagaataaaatattggagataaaattgtttttgaagtgttggaatctatatttgggttttttcattctaaaatcaaattaatgataaaattcagtatagttttgtttatttagagcaacaactagtcgaaattgctcaaactcaaatcaatttggatctaaatcaattctgcggtattatgaatatttacctatgatcacttaattctgaatcgcgtgatgttgtgaaatttatcttgcaggattaagcggtgagattcgtga

SEQ ID NO: 107643 - DNA, 305 bp, Glycine max
acaaaagcagtcaaacaccaaaggagacggcttctatcaataatgcatctattccgtctatcaactcaacctgctctggtgatttagaacttctttttgaatattttgaatttgagcaacctcaacaaagacaacctctttatgagaagatacaagaactggttagaggccatataccaattgaatcttcaacttatggggaccacaaaactggattcaattaacctacgagatcttcaccctagatcttggttctcagttgcatggtatcctatttaccgcataccagatggcaactttcgtgc

SEQ ID NO: 107644 - DNA, 287 bp, Glycine max
tcgaatgtcctaccaatgatgaatgaattttttttaaaaatggttggaatccgagatgaagatttggatagcactaatttctccatggaaaataacttctgatccgtcagagtatagcccatatgagatgcaggatcaataatcaggtcttgcatgattttctgtaacttgtcatcttgtatgatctctactaccattcttcgaaatctatgagttgtaagactgtcatggcacaataggaacttctcttggacagtccatcagtagcagaattttccttccctggc

SEQ ID NO: 107645 - DNA, 191 bp, Glycine max
aacagtactattaaccgcttggcgcaggagcttaaaaatgagagctctttgattgaggacctgaaacttcaaattgaccgacttaaagctgagctttcaaagactgatacagataagaaggatcttgaaaacaatttgaaagacaagatagattccattggtgttttacaagaaagaatcaatctgctgag

SEQ ID NO: 107646 - DNA, 216 bp, Glycine max
tcggctcgagggttactttcacttcagatatggctaattagggttccgttagcgcgagctaagtacgaacgcagtagaagcagcgaaacccaatcacagagcctcactctcaacccacacttcacgtaagtgaaaacgagtttgttgttgcagcagcttatgtgttggcagccaaagacaatgctggttccattaaaacaacagaccgatactgct

SEQ ID NO: 107647 - DNA, 174 bp, Glycine max
gcttcttcgctgctgtgattccgtcggaagaaaatgggaaccggttcgaccttggccgggaaagaagttccaatcgtcggaagcgacgccgttcgctggatcgatctctccgttccatcttcgtccaacattgccgccgtcgacggcgtcgccgcccttcccaccaccgacgaa

SEQ ID NO: 107648 - DNA, 290 bp, Glycine max
gtgctttttggtgcttctattggcatctctctttgacctcaatggatatgaaatcatatgatatggacatggatatgaaactttttaacacatacagaatataacgtgatgctttgcagcaattcatagaagttgtattgcaactgtaattagattactgtaggttaggcaaatgaaaatgtatttagaattcccattattactgctttcttccaggctcagttttcacagatgaggcctgttgcaataacgccttctgttgcgccccgtatgcctctctaccctcctgg

SEQ ID NO: 107649 - DNA, 135 bp, Glycine max
caaggcttgatcttcagcacgtcttttgttaggcccccccttttttaaggtttaattgcactttttacctcgaatgctgtaatttatagtgaatattacttatctccaacaaattaccttggcgtattttattcc

SEQ ID NO: 107650 - DNA, 268 bp, Glycine max
aattcatattttatcattatcactgatatgaattgcctattgcataattaaacgaactagatgatgttacatgttaagtcaagtaattaaggagagttgaacgattatattgaatagttaatatgtgcattttttcacttacccgaacaagaaaagatcaaccctggaaagtgctctccacatgtagacgtctgatatgacgaatttttggccaatcctcagcggatctctccacacacttggcttgggcaattgcagttcgaatttc

SEQ ID NO: 107651 - DNA, 283 bp, Glycine max
  unsure (1)..(283): unsure at all n locations
ctttccttgctctccttgtgagtcataaagaagatagttaatgtttatctatcttctttccttgctctccttgtgagtcataaagaaatgaagatagataaatattaactattaagtggtgtgtgtgacaacatagaaggactagccaacaccttatttatgtttattacaacagaaaacgaagagtatatatattttgcatctaaccaacaggactgttanatgaaattaaactaataatgacaatatgtctttatacttcattgtaaaggaaccatactaa

SEQ ID NO: 107652 - DNA, 213 bp, Glycine max
ctggtaattgaaattcaattccctttctcttcttttcttgtttacaacacttttctgctcttgtactctctccaaacatgttgtgttgaagtgttgaaatttgaaaccttaactattttcattcatctgttcttgtgctgtattaatgctgaaatgaataccatattagacttggaagctttagagattgtagagggttctcctaggagtcaa

SEQ ID NO: 107653 - DNA, 281 bp, Glycine max
cgcgtttttccttcttcgctagattacccagatctacgacgagtctctgctatgaatcaattcttatcttaattttatttatttatttattttcattctaatctttccagaatcctcgaatctctccttcgaacgttcagtgatcttgacttgaccgaatgctgttgcggttgaaatctcagaggctttgggatttcggtgtgagaaaatagggcttcgacgattcctttgcttcccttcggactccttctacgccatttggtcccttccttggccgtatt

SEQ ID NO: 107654 - DNA, 272 bp, Glycine max
  unsure (1)..(272): unsure at all n locations
gagaaaaagaaaacaaacagagtagcttcgtctaagagaagtggcggtgaagttgagactcaagaaaaacactcttagtatttatatatatcgagaaagggagagaaagaagaagcagcaatagacactactcttaggtatttatcttatcattaccgttattatcatgagcactgaaaaggagaaaacatctgcaccttcttcttcttcttcttcaccttccgtcgagctctgncaaggtgtcaatggcctcgagaagattcttctccgcg

SEQ ID NO: 107655 - DNA, 286 bp, Glycine max
caaaaaccacaacaacaacaactactgtgatggccatttcaagttctgcagaatgaatactcaattttgcagaacaccaccaccccatcacgtgcatgcacccatcatccccacgtgccacttcccttctttgcacactgtctcaccctccaccaccaccgacgtttcttcttctaccatgccaatttctcagcttctcccacacccatcttggaagaagaaccttcttcttccaacacccccaccatcatccatgttgtagatgttcacttcgctgctgatgttc

SEQ ID NO: 107656 - DNA, 289 bp, Glycine max
gtttgaatagcctatatatgtaacatctttcatatgtattatcttagaatacagaatgccctctgcagcctgctccatatttgtgaatgattaaagattctaccttactttttcattttttgtagtgttgacaaatgacaacagagagtatgttaaaagagaaactgttgtcatttgtcaacactacaaaaaatgacaacagagagtatgtataaaagagaaactgtttttagtgtaaaaatttgtagtttctttacgtctataatacagtgtaactttaataaacctt

SEQ ID NO: 107657 - DNA, 280 bp, Glycine max
cttatgtggatccacgtagctgtagatacatatagaggacagtggatccgctccactccacgtgctgctcaagcctcctaatcatgtctaaattgaactgctgtggatagagtgtggtgtctgctcacaaggggtgtttcactgacctggctctacagttcaaagtaacaggagcaataaccaccaagttgtgaatcttgcatggtgtctgataaatacagtgtgtgcaccatattttaaggttatgggctactctggagatccatgcatgtttagccag

SEQ ID NO: 107658 - DNA, 136 bp, Glycine max
gttgtggagtggagtgtttcggaggctttcacatacaaagatttccttatctcttcatattcttaagaggggatttcacctaagaccttgagagattctgctacgttttcttcttgttcgtgggagatgcccttct

SEQ ID NO: 107659 - DNA, 270 bp, Glycine max
gcttggattctgttgccctcatcttgatgatagtgatcgatcatgggttggctggaccctgatgtaatttacatatttactatcatattttgttaatgttcttgattgtaggataacattggagttacgttgattgtctgaatgtatgtatacttccatacagaccttggtgatcccttctttggttgttactgtgatatgtagatagtagattaaatttgtgtaaaaaaaaaagaaaaaaaaaaaaaaaaaaagggggggcccccgaat

SEQ ID NO: 107660 - DNA, 234 bp, Glycine max
tgtaactctccagtgcccttccttttcatatcaaaaatagagatggtaaaccctaacatgggatggttggagttccaaatctcactgtaactctccagtgcccttccttttcatatcaaaaatagagatttcttagcatccaggatctgttaatttatggtgccttttccacacctagtctcacgtgcagcataatttattagtaatttggtacaagtagaatctagatcgcga

SEQ ID NO: 107661 - DNA, 294 bp, Glycine max
aaaatccatggcgaaatcatcaaaacgcagcgtcggaaccagcagcaccgactcgaagaagaagaagaagaacaaaaggagcaagaagttcggtccagaaggcgtggccatgaaagtgaaagccaacaacaacaacaatggcactgcctccaatcccttcgagtcgatttggtcgcggaggaaattcgaggtgctagggcagaagcggaagggcgaggcacggcgcatggggctggcgcgctcctggcgatccagaagcgcaacgacacgctcctcaaggagtaccaccagagc

SEQ ID NO: 107662 - DNA, 291 bp, Glycine max
aaaaaatcagctttcttcaagcaccctagatttcctctctctctctctaaaatggcgttctcttcttttctcggccgagtcctcttcgcctctgttttcatcctctccgcttaccaagagttcgttcatattccttaactgttccttttctctgcaattttgaatcatgcatggctattgttgtttgtgctagcagtactttattgtttttaactgagtttatctgctgagttggctgttgttgttggtagtttctcactttctctgcttggatttgttacgctcaattga

SEQ ID NO: 107663 - DNA, 124 bp, Glycine max
cggctcgaggtaaaactcccacttttaactccctttctccgccggcgcatcgttgctgtcatacaccgctgaacgcgcgcatgttgcacctccttcctgcatttatcagtttatctccactgtg

SEQ ID NO: 107664 - DNA, 288 bp, Glycine max
atgtatggaggttctgactggctcgactcagagaaaagtggacagcattctgggagagacacatctgtttgcatggaacttgcattgtctgggatgaaatttcagtatgatgtatttccagttggtggactacgtgtatctaagatgtcggtgtctgttcaagatctttttctgtatgacagaagccaagatgcaccttggaaactggtattaggatattatcattcaaaaggccatcctagggaatcttattcgagagcatttaaattggacttggaggcagtgaga

SEQ ID NO: 107665 - DNA, 103 bp, Glycine max
ctagtcactagctcgtgagaggtcgctgacgagcgagctcgttgactagggaactaattccggataggtacctgcacgcgtacgagcgttaccgatactgaca

SEQ ID NO: 107666 - DNA, 200 bp, Glycine max
cttcgaacctatgccctctcctgctcgggatcttactctcacgagattagagtttgcagatggtgtctgacgcgtgctagacgactgctgcgccgtcgaatgcggcggcagcggcctcgagcggatgccttgcactcagctgcttcgtcgaaaacgtcgtcgtctgagaaggccgccgacaagctgtccatcggaattgg

SEQ ID NO: 107667 - DNA, 284 bp, Glycine max
gagcattagactgcgcagggtgcagaaaagcgggaagaggagagtgacaccgcgaaatgacgagcatgtcgtatctaaccaacactctgctgccactgcacatccaacggtttcggccttctctatccgctctatcatgctctctggcctacaatgtggacaccactcacaattcctacttccccaagcgcggcgacaccctcgaaatggtgtgcgagtcacttaccttcacaggcgagggactctgcaaggtcaaccagaccggcttcgttgtcctatgcgac

SEQ ID NO: 107668 - DNA, 286 bp, Glycine max
aacgacgcttcgctgtcttttttcagctcttgcggtttctctttttctatcagcaattgtccagtggtgagaatcaaataacaattctgtgtgcatttggttgaaacgggagtttgtggatttgttaaaagattgtgtggtagagtgaagcttggagatttaaaaaagagaagaaatactatcagggcttgatcttcaatctgtctgttatgtggagttcacgagcaatttgagagtatttgaagtaccagttgggtcagactcgggacagctacatagattccag

SEQ ID NO: 107669 - DNA, 189 bp, Glycine max
attgtgatagcacatggtcttcaagcctttcttttaaccataactctaagtatgtaatgtgactatatgtgattgtgttagtgtacagtagcaaggaaaggaatagcaaccaaaaattagtggctgttgagggcatcctgtgagggaattgggaattgtgatcagcacatgatgagggtgcattgtgat

SEQ ID NO: 107670 - DNA, 261 bp, Glycine max
gtaaaactcataagaaatttgttttccatgtttctgttagcaagctctcattcgggtcgagtcgggtaatcggatccgatcggcgctgtgatcggatcatcgatttgacgcttgtttgggagagaggcattttcattgccaatgggaatgcccaatcccaacaacattcttcccagtcctcctcgtcacttcgcaccatgagcaaagccctgggaggaacaacagaagacgaagacgaagaagatcaacaactactagaac

SEQ ID NO: 107671 - DNA, 285 bp, Glycine max
aatcgacgtcgtccttgaattcctgacgcaaaacttgaaggtaatgaaagactagctaaatcatgtcctaccccagcggacaatccgaccatggacctactcaaagagaatcttgacttgcccattgatcttaggaaaggtactcggtctacacgtaatccttatcctatttataacttcttaagttatcattgtctctcttcttcataccattcttttgtttcctctttatcttctatttctcttcctaaaaatctttgtgaagcacttgatcatctaggatgg

SEQ ID NO: 107672 - DNA, 240 bp, Glycine max
gattaattcggccccgacagtattatcttcaattgaaattacgtgtgacttagaagaagaaaaaaagatgatgatgattttgtttgtaatttattttatttgttttgggttttttttttaattttgtagatttttctttttatgatgggtaagtagggattttaatttgtaattgttattggccgtatattggtagatgctggaaattgaagattctgctggaagatgcgaacgtttctg

SEQ ID NO: 107673 - DNA, 282 bp, Glycine max
ggatttcggccgtttgctccccaaggaaagaagcagagtgtttcttttgaaatcagctagaaaagatgtcagggaattgttttgtaaaaatttcaaatggattagagaaatatgtaagagctgctttggagaattgaatccgacagcactgcaccttagttatcattagaagaaattaagaaaagctacagaaactaatcatttgtattagtgtggaaatcatgtagaagctgctgtgaagaggtagctgttgcagctgaggcacctgctgcttcaattcca

SEQ ID NO: 107674 - DNA, 274 bp, Glycine max
ctgaaaagaaaggaaagaatgatagaaaatctaaaaatgtctacatagcctgggaagacaatttgtcaacatccttcaaaatttaagatttagggttgacactttagcggccacatttgttcacacataaatagcagtttctgcaatgagaacacacatagttgcctcgcactattaaaggtctatgccttaatggtttgtagaacctgttctggagatatgagcaagcgcacagattatttttctggttttcctgtgggtgtgcatggtttac

SEQ ID NO: 107675 - DNA, 173 bp, Glycine max
gtgactcaacctaggatatacgcatgacaaacattgccgaccttgatgtgcagttgaagagttgaagatgacacagctctctgaatgtacgtgaaggttcttgtagtgggagaaaaagttgggtgtggaatgagcaaaagttgaaaaagttccattgttgaaacatttgcagc

SEQ ID NO: 107676 - DNA, 99 bp, Glycine max
gctgctacaaaagtctcccttccaatgatcatctgaaattacataggatttatagggtcatcaagaactcttcagcatcacgaaagggtattgttcttt

SEQ ID NO: 107677 - DNA, 285 bp, Glycine max
ctcagaactcactacgacatcatcggtttcacaatataaacaaaaacggtgtcgtattttaaataaaacgcagacaatgaggtgtaagatacacttaccggacctcacaagcaccatcggcgtgtgcgcttcatgcctccgcgaacgcctccagcctctccttgcagcccaggcccaatcagaacgttccaccaattccgacgtggataataataatcatcgtcgaagaaagcccaagctcaagcccgaagaaaaccctctgccgctcaatttcccgcgctccgt

SEQ ID NO: 107678 - DNA, 276 bp, Glycine max
tgtgaacccgaattgttcattgcatcacatgttttgcagatgcctatcacagtatacatgtatgataaagatgctggtggtttgatatcaattgctgagtatggtcaagagtacggcaaaggaaacccaattagagttctctaccatggctttggtcatgatgatgcattagagattcctagatggaagggtcctaagccaagactgtagcatttcatatttagaatgtggaagagattacagcttgtatcggttgccttcagtaacattcataat

SEQ ID NO: 107679 - DNA, 184 bp, Glycine max
atgaacccgaattgtgcattgcatcacatgtgttgcagatgcctatcacagtatacatgtatgctaaagatgctggtggtttgatatcaattgctgagtatggtcaagagtacggcaaagaaaacccaattagagttctctaccatggctttggtcattatgatgcattagagattcctagaag

SEQ ID NO: 107680 - DNA, 294 bp, Glycine max
gtggcagaacctgaggaagaggaaccgcagaaggcactagtggttgctgaaaaacagcgccaatgctagaaactttgttcatccggccatttctttacacagagcacgaataagtgtatcttgcgccctcagattgggtcatttctttgcagttagattaacaataaaaatgtgcttgaagtcagccaatgttcaatatttgcaatcaaaaggctttttatagtcataatagccagccagttgtctaaatatcttgcacctatagtctatagatggggcattcctttgtagcta

SEQ ID NO: 107681 - DNA, 187 bp, Glycine max
atttatctttacttttcaagtttagttccaccacatctattgcatactgtcggctatgagtatattttgggaggcattatagcttctagcttggtgcttgtgtatgttatatatggatctgtatcaaagaggaaggctaatagtccagtacatgcagaaagtaatggtggtagtattataaggacat

SEQ ID NO: 107682 - DNA, 287 bp, Glycine max
tatcttcttcaggcatgttccctcaatctcacggtggacatatgaaccaaggatctatggcacttgttccttcacacacagctccccaagcttcaacaggactgagtgcaaactatttgtcttctcaatcccccattgccattgatcaagcatcacagtttaacagtgggagcttgttgggacagtcatttaaccatcaaccacttggtcaaggagtacatgcttcacagagtgctgtttctcaaccgcccaaggacaagtttgagacaaaatcgacagtttgggca

SEQ ID NO: 107683 - DNA, 277 bp, Glycine max
  unsure (1)..(277): unsure at all n locations
ctgctcgaggatctattcaaccagtttgcagaaacaaattttgatgagatagctcgaaacttacaaatttggtttagcaagttgttgtcttcaacttctgagttcatttcagatgttagaggagcacacaatttggccaagttgcaatattataacttgaccattcagcacgattactccatggtggatcagtacgctatatttggtcgtggtganaatgaaataggtgagactcacgtaccagtatgggacgctgatgagagtgatgctgcctcag

SEQ ID NO: 107684 - DNA, 278 bp, Glycine max
aactgcttttctgaaggtttgtgttgcatgaatggtactaaccaagttgttgattctcaactttgacctctatcttattgttgtatatattgctcatgttaactgactgatttgtttatatattgtttacttataatttcatttctattgttgtgtatatatatcttttcttatttgaagatctgtggtgcttggaaaagtaaggcactggctaattttgttgttcctgagattgaacactagataagtttcacctttagttattacaatattatttg

SEQ ID NO: 107685 - DNA, 266 bp, Glycine max
ctgctcgaggagtactctttcattcatcaccaatatgcttcagttctcattcgtttttcctttacttttcaagtttagttccaccaatctattggagttcatgggttatgagtatcttttgggagggcttatagcttctagcttggtgcttgtgtttgttgtatatggctctgtctcaaagaagatgcccaaaggttcagtagtacatgcagacagtaatggtggtagtattatacggacatcatcagagtatagttaccaccatc

SEQ ID NO: 107686 - DNA, 271 bp, Glycine max
ctacactctctctctctctctcctctctcttctctctctgcgtttcactgcagaaccaaaacaagctccggagaaaccgcaacaaaaaaagaaaaaaacacacaaacttaacccaaaactgtaaccccagtatgccatgcttcacaccacaccattctcttctcctcctccttctctctattttcttcttctctctctccgtcaccgctgcaagaacctcttctttccattccttacgtattcaagatggaattgagggtggtggcgaggg

SEQ ID NO: 107687 - DNA, 267 bp, Glycine max
gtagaattgtagaagcttcacttcactctcatcaactcagagttgcatagaaatttgtctctatttttgctcatttctctcttctttgtggacttttagcaactatattgtttccaatgtccaagatgttgggagtgtttgtgggacttttgttggtggggttggctgcctctgccaagtttgatgaactcttccagcccagttgggctatggaccatttcatccatgaaggagaactcctcaaactcaaacttgataactattctg

SEQ ID NO: 107688 - DNA, 249 bp, Glycine max
cttgtgttgcatatctgtaattttcggttccttgcagcgtttgggatactttttttcccttcatgatttatttggttttcataattaaatattttgaacattccgaaccgagtttaggagtactatgtttttatgcaacgaataacgaagagaatcatacacctgcatagtatctctacctttctatcacctgatctttcattttatctctctccttcatcagatatttcactttctcctttgtttctt

SEQ ID NO: 107689 - DNA, 297 bp, Glycine max
taggaaacacacgtgaagtgctccctgaatttctttttggaacttgatctatcttaaccatctggatgctgctaagttagtttgtttgaagctgggaatttcaatgagtctcgtgacaagcacgttttgctagagagaacttccaagtttcaaattagctaatgcttgtagtagatctgaagctattcctccagagtgggctgaagctgaacaaatttcataggcaaatgaaaggtctgaaagacttgagctacaaatgaaggagtggcaggaacaaaatcagaagacacaagagga

SEQ ID NO: 107690 - DNA, 295 bp, Glycine max
tgaatggctctttgaaggaagtaccattcagttgtctcagattagttttccatgattgtgtcatggtatcttgatatgaaagagattctgagcttaattgtgtttcacctcattcaagaacttgaaactctaattaccaagcaatcctaagagtccaaatatatagatacgatgacacaatcatggataacttctctgagagagctgaatggctctttgaaggaagtaccatggaaggcgtttttccaaaatcgtgctgtgtgggctatgataatatgctcatttctgtggtagt

SEQ ID NO: 107691 - DNA, 161 bp, Glycine max
atagagcgtgtgtgtgtgtgtgtttgaaagaagataaggatgacagggcaagtcgtggtgaccaacggtcgcggatgcgctgctgtcgggaagggccggagagtcgtcgccggcgaagaggagcagaacccggcgtcaccggtggcgcttctgctggcggc

SEQ ID NO: 107692 - DNA, 278 bp, Glycine max
ttgcattattgcagataagatcaaccctactcccttcagttgttgtaaataaaatattttggacaaaaaaggggctgcttgaatgaagagggcatgattcgggccaagatggcatcacttcatgctaatgtgacatcagttgtttgcaagagtggcaaccatgcttctcaatcgaaattcacaagctcttcattcttgcctggttctgatgttgttggtcgtgcttcaaatgcttggaagacacacttgtcccatcttcatttccttggtgcctagag

SEQ ID NO: 107693 - DNA, 247 bp, Glycine max
tttttacttatttttcattgataatttattagaaaataaatattcaacagatactaattagataacccttttttttaatacaagtcatcttcctaccttatttatgagcaccagaacaattcctttatgcagaaaacacctggcgatactctattgggtcacaaaaggcaccagtcactgtcataaaacgtaaaaccccacgatatttcgcacgctaactcgccatatcgcaacccaatatatcgtc

SEQ ID NO: 107694 - DNA, 247 bp, Glycine max
cttccatcaaagctctgtcaattgaaaagggcaacggtacgcagctcaaggacattcctaatgtggctttcacgttatcaaagagaaaagctgatgacaacctgcatgcacttcatagtatattgtttgggaaaaaagcaaaggtacatcatctaaagagaaatataggtctgttttctggctatgtgtggactgagaatgaggaaaaacagagggtgaagataaaggagaagattgaccaatgtgt

SEQ ID NO: 107695 - DNA, 276 bp, Glycine max
gcgaaaacgacgacgacagcgattgcatcgaaatcgcgccggaatccgctaatttccgcgacaatctcaatgccctcgaggacgctgacgtggacgacgaaccggtaccggcgtcccgcggccggaggttcgtaatcgacgacgacgacgaggaagacggtgaggaggagaacgggggaagggatggacacgtggcggaattgtatgatgttgagtcgagcgaggaggaagaggaagacgttgatgaattgaacgagaacgacgttgttggaaggg

SEQ ID NO: 107696 - DNA, 277 bp, Glycine max
aatcacgctcacgcacctgagtctctgagattgaatttgcaaattcatcttagaaccctaatcccctttttctcaatcgaacaaatcattccatcatccgggtgcaagagggaatgataagagaggcaagctgcaccggattattgccaaattgaagcctccaagactccaaattccttcagtgaataatctggttgaaatgagcaagtatggcttgaaccttaggccggctaagccaaagaagcagccaccaagaccttccctctccacccctttt

SEQ ID NO: 107697 - DNA, 276 bp, Glycine max
gggtcacgtagcattacggctctctattattatttaaccgtgtgaactaacgaatcatattaccacgaattcagaacataatcttgagtcttcactttggtacttcacaagtatcgctgggcttattttgttggcatttccattagattttcaaactcttcatacatattcgtcgaagcgtcactggtactattctaattgttctgtagccgcggatcttgccaatgtttgcaggctattgaagatcaatctctgccctggtcatggccactggac

SEQ ID NO: 107698 - DNA, 272 bp, Glycine max
cggctcgaggtctggttaattttattatagtttatgctctgtttttcctttgcattgatgaatcaggacagagcagtaaggaaggatcacagctacttccttcttttaacttgcaaaatatgattctgcatactgtttaaagtaacacattaattatgtgaccttctcggtctaaggaagtaacaactcataaaggtttcttacatacctcacgtgtttttattcatgggtgagataataagtagcaattgacatatcaaaccaacaatttt

SEQ ID NO: 107699 - DNA, 271 bp, Glycine max
tacggactccatctttctatcaaagcactgattaatgagacatttattattaagtatcccatattcataatccagtaaaaaccgaattgtcgaagaaaaggaaagatttgctctggaatttgttcttccccttgatacgtgggaacaactcgtatgatatgtaattaccgatcttcttccccattcgaaacatgttctgagaaatcgctaggttgcatccataatacatcactatcaatggggccagacttaattttaatatgtgatggac

SEQ ID NO: 107700 - DNA, 266 bp, Glycine max
gtcgtgctctcgttttagtaggccactttctgctagttataagagtactttcccttcaatggctttatgaattccagaagccgacaatgtttgcaactgaatgaatgcacacgttggccttgtgtcatgaggtattgcaatcttttctctctatcacagtttcatttaattttttaatgctgcaacgtatgctgctgtataaaaatgaacttataattcaactagaatttcttcttattaaaccacacgtacataagattatgcaa

SEQ ID NO: 107701 - DNA, 179 bp, Glycine max
agttaaaccagatggctattctttaccagattttgaaaatgaaaaccccgaacattgtcttgataatgattttattgttgttgataagggcatagaactttcatcaaacgaatctgttaaactagaggaatccatcataaaggctcctgacgatgcttctacagttgatagtgccagta

SEQ ID NO: 107702 - DNA, 249 bp, Glycine max
ctcgagctcgagccgtgcaactttattttttttgcttaataatttttcaaatgtgcagatgaacaagtacctgagttaatgaattctgatccttagtcaatcttacataatctaaatttggttagggtttatcatcgttaattcgattgataattgggtcttttgtcattgagggtttctgggtcacagtgagtggatgttaaggtttagatttcaacctggctgggtctgtgttgttttctaaaaggt

SEQ ID NO: 107703 - DNA, 284 bp, Glycine max
tgagtgtgtgtgtgagagatggttatcgcttcatggaagaagctgatgttgttgttgttgatctttctctacacttgtaaagcacaggaggtatagagctcgatcccagtgtacctgtaccataactgtgctggcggcatcaccaccgccaacagtgcctaccaactcaacctgatgaccctcctcacttcactatcgtccaaggccatcagtaccgtattctccaacaacaccgtgggactggtgacatccgcgtccgacaatctgtacggcctgttcatgtg

SEQ ID NO: 107704 - DNA, 173 bp, Glycine max
ttccatagcactttttatattcttctctctgcgatagccgtggatttctccaaagcggtcgccgacgggctgaaactctccaagtgcatatacgtcgtgaaggccaggcggatgtcgccgcacaagcctccgacgccgatggcgcgctaggccaccacattcctcccctcggc

SEQ ID NO: 107705 - DNA, 144 bp, Glycine max
attgacttccattatagtctgttatcatccttgtcttcagtttcttcaattggtgaacctttacaacctaattatatagcaagacattagttatataactcaattgctaaccttgtgagtcttgagcaattgttacaattagaa

SEQ ID NO: 107706 - DNA, 284 bp, Glycine max
gctggacctactggcggcaggcattttgcaaatcgcagttctagtgctcttgcgtctaatgtgcctgctgaagcagctgcctttgatccattgattgggaagaaagtttggactaggtggcctgaagataaccacttctatgaggctgttgtaactgattacaaccctgctgatggccggcatgctttggtttatgatattaataaagtaaatgcgacttgggaatgggttgatctcaaagaggtatatgttttcctatgctgtgctgcatatatcagagcagt

SEQ ID NO: 107707 - DNA, 283 bp, Glycine max
aatcacacctccagatacaccaaccatcatcacagttccttccaccaatcctgtgcagctttcccccaccaatccagcttcaacacctgtcacagttccttctaccacaccagtggttcccttaccccctacaaatccagccaatccagttaccaatcctgtggcctcttatccaccaccatcatcaggaagtgttcctgtcacaagtgcactgcctcctcctccaagcacaaatgctcaagccatgccagcggggcagagttggtgtgtggcaaagactgga

SEQ ID NO: 107708 - DNA, 279 bp, Glycine max
gtcatgtcttgctagtagaaatggaggtgtgaaggactcttggaagatagattatgaggcaacaaggaatagccttgttgctggaagaaaacgtggggcttcacattttgtgttgctttcagcaatatgtgtgcagaagccgctcctcgagtttcagcgtgccaagttgaagtttgaggatgagttggtgaagttagctgaggaggatggtggattcacttatagcatagtgaggccaactgcatttttcaagagtttggggggtcaggttgagttagt

SEQ ID NO: 107709 - DNA, 295 bp, Glycine max
aacaatattcttgctgagtgtggggccaagtccaatgcaataagaaaagtggcactctttcttcttttctggtctacaatgctatgtagcttggagcggtgttacggtgacagagtgagagtgagagtgagaaatgggtctgctttctaacagagtggagagacatgagtcaagcctggtgatcacatctacacttacagagccgttttcacctattcccatcatggcatttttgttgggggaagcaaggttgtacatttcagacctgaaaggaacttaaagtcaatgactgaga

SEQ ID NO: 107710 - DNA, 289 bp, Glycine max
tggcggtacttgggtgcttggctatggtgttagaatgaaaagagggagggaattattcgttggtagttacagaagccttcaccaaacaccgatttcccccattcagttccagcaaacgatgtcgcattccgatccttcaaacagatactcctacacccccactctaactggaaccctcaagttcacgactacttcctcagagcctacagagccgaacacttctctcggatctccaccgcgctaacgcggccttctcgctactcctgcatccgagtcagcacgctcaggt

SEQ ID NO: 107711 - DNA, 274 bp, Glycine max
tgcaaaagcaccaggaggaatcttgaatgtaccttggacatttgcatttagcttttgaaacattggttagtggagtctcttgtgctcgctattttttacgttagtcttggttgcatctgaatcatagctcaggattaaggcttctagaattgtatagttactaaattctattttttttcatacaatagttgaattttggatttccagaatgtatgtttgtgtagtatctactttctgccctagagagtctataattaatggctataataagacg

SEQ ID NO: 107712 - DNA, 146 bp, Glycine max
caagcctctactatactgcttcaccttctgttctagaaaattcagtgctgatacatggcttcggcaactcgctctgtagccagacccagcctttcaggcaaataggagaagcttctctgaaatcctcttggctccggaagctcatc

SEQ ID NO: 107713 - DNA, 279 bp, Glycine max
cacatctttgagtatcatctctacaccagctagacatcccaacagttgcaactcattcaagtgggttatcctgtaaagcttggaagtggagttgctgctgccagtgcatacttacagaacactattcctatgatcccttccaggatttgagtcaaaatcattcttgtctttacttcgtttttctgctctttcagaaattctgtaaaatatatattaccctcttttacactcctttgaagatgaacgtactttctactttcagctttaatgcattgcttc

SEQ ID NO: 107714 - DNA, 286 bp, Glycine max
gaaacatgcgttgcgctaaagtgttgtatttttaaattacagaacaataccataactctgttatttaaaaatgtacacctgtttatgtggcgattctacacattttttctttgataagatgaggctaagaaacatgcgttgcgctaaagtgttgtattttcttggacaataaaccctcttggttggatcgtgaaagtttgttaaatgagcaaatttcatgctttcaaaagtttatgcacttttggaagtggtttgctctgtcatatgaactcagttccaaggtttt

SEQ ID NO: 107715 - DNA, 302 bp, Glycine max
taatattcctgcaggcttgcgtgctgccgaggccacgctttccaattcacaagttaatgttgtccctgaatgtaaggctgtggttcttccgatggtgaaacacccatttgttgttggtttcttggttgctgagcttccattggtggagcaggaacagtgtcagaaatctcaaagtgatgggccagaaaacctcatgtctgttgaggaaccttattcatttcctccctttttggatttagataagaagtcaagggaaattcagaatcttcaggtcaagaatgaggcagttggtatgcataact

SEQ ID NO: 107716 - DNA, 299 bp, Glycine max
gggtgattatccacaacaaattattttcctgttgaacagtggcatatttcctaggttgcgaaaattagctttgcgctgttataattcagtcgaaggaccaggtatgttaccaagtctacagcgcctcagcaatcttcatagcctaaaagtaatgcgcggttgtgaacttctattagacaccaatgcgtttccatcaaatcttaccaacgtaaccttgaaggatctacatgcattccgtgatccccaatctttaatgaagacactagggcgacttcccaaccttcaaatcttgaaagtag

SEQ ID NO: 107717 - DNA, 300 bp, Glycine max
gaatctcacaatccttttcggaaaaagccacacgtcttcatccttacatcgtcttttctttccatgaaacaaccttagcggtcccttcatatatcctcacacacttgtcttaccgttatgtctgaacccacgttcccagtatcttcttatctgcgcgagtggtgactgccccatttgccttttcgaacccaaaacactttcttttcctcaaagatggatgctttatctaagaagaacgaaaattctcaaaagacaagagatggggttgttttgtcttgtctcaccacagattcttccagt

SEQ ID NO: 107718 - DNA, 307 bp, Glycine max
aagcgcgctcgaggcctttggaagtggagcaagccaatcagccactgagtttcctggtgtttcttcatggctgaataaactttttactgataccttagctaaaaccatggtggaacctcgccgtacgttgtttcagtttgcctgtggttgatttgaggaaaactgctgttggaggcattatatatgtgtcagtgatttcagcaaacaaactttctaggagttgcttcaagagtagcccatactttgaggcaacaaaatagcacgatcaatggatattcagaaaacaacctggatgacaatgactaca

SEQ ID NO: 107719 - DNA, 297 bp, Glycine max
cttcatttggcaaaagcgaatgatggagagggtccagatatattacgcagtgcacaggaaggtgattcaagtggccatgctgagtctttagcagcaacccttgcagagcatcagcagcatttggctagcttccaggtgcttattaaccaactcaaggatgttgctccaaccatacagaagtccatatctgagtgtacagaaaaggttaactgtataacctccaatttacctccaacgaacagacctaatggtcggtcaacgtcacctatccagacacagagtagtgggaggatggac

SEQ ID NO: 107720 - DNA, 189 bp, Glycine max
  unsure (1)..(189): unsure at all n locations
acaagactaccctcactgacaaaaccatacacccatcacaagtggggcacaacctgaagnactcccagncaannnaaaaangaaaagaggggaaaaacgaccagcgagaaggaccaaccagcagagaaaanaaaccagaacgaaagagaagcagcacgacagagcacaccccaaaccaaagccaaaacc

SEQ ID NO: 107721 - DNA, 286 bp, Glycine max
gagatgcaatatgttgataaggaagaaattaaaaatattgaagataaagtaatcagttctgaatctgagaaagaagccttggaagggaggctccaatcagctataaatcaacttcaggaatcagagaaaactattggcagcttgagattggagtacaaaccttgaaagaattgaatcgaatacttgaggagcaagtacaaaatcatgcattcataaatgtagatcttgacactcagctaacagaaactgaattagaagaagctaatcacaaagttttggcatagaa

SEQ ID NO: 107722 - DNA, 282 bp, Glycine max
cagctcgaggccatgaaaatacagaatcctcaatcacatcagattcagaagatgctaaccggcaatccgaattaagaaataatttggattgcgtcgaaactgtcttgtctcattgtcatgatgtttctatagtgaatagccagaatgcaaatgggagggtttgacaagaaatccaagctcactaattagttcatccttggatacgtacaagaaattatgcattggggaatcctattgtggaaactgcccaaaattttgacaattgtttttccaccactaatg

SEQ ID NO: 107723 - DNA, 283 bp, Glycine max
atttctaatatttaaaatagaaaatatagtcttatagaagcttttggaatgctccaaattctacttgagtatccgtatttatagtagcttccatgttcatgcttatcccaattgtcgcttcagtttattacttttttcttttggttcctagctagtttcctagggacatttattagcattctctttttgataatgtatcattgttagtttagcagattggttgttttattttacaattttcctaacaatatgaactttctggatgcagaagctatggactatg

SEQ ID NO: 107724 - DNA, 282 bp, Glycine max
gctgataatgggggaggtcaagtttcatcgcgggtgatattggtggagagatatagcaatgatatgtattaggtgatgattcacagttgcaagcctttcttgttgaggaggataggtctacgccaaacagttccctaccaatgtgactgatggatctgtcacaccctagtcacttcaagtcttctaaaggtgggtctcaaaggatggcattggagctgttggacgcttattcattggtgggagatttggaagcctttttgatgatgatcccaagcatggaga

SEQ ID NO: 107725 - DNA, 205 bp, Glycine max
gtggtttggtaatcattggagctggacatttaaaaaaagaacagtgtctctatattgtatatcttggatggaatgcttgtattgatagcatgaagttgagtatctcgctgtagatctgcttttaatttctgctttaaattcactagcgtgtcaggaacttatattggttggtttttggcaatgaagtgtatcataatctactggt

SEQ ID NO: 107726 - DNA, 279 bp, Glycine max
gttcattttctctgagatcattcgaatgctgcatgaagagaacattgatgttagaagtgccaattcctcacttgctggagactcgatgcttcatgttgtgcatgctgagattcctcaatctttacttcaatttggagccaccaaagtagccagagattgaaaaggtttgtgaatggatcctgcagtgatgtggaaacacagcccgagttgtgggattttgaaattggtactgatgatatgtggggtttgtatatcttacaaggatgcattttacaaatg

SEQ ID NO: 107727 - DNA, 283 bp, Glycine max
tgttccctcaaaaacttgtctcatccatgcaatttgactgggtatttggggcactgttgcttgcagctcatagctgttttctctcaataaactacattcttctgacacggatagtgagagaataccctgcagaactggtggtggtactagtcgcattgcattaacatctatactatctgttcctgctgcactgatttcagtaaaggatctaaaagctttgagactggggtttaatatggagcttatagctattggatgttcagcatttttgtacttacctttc

SEQ ID NO: 107728 - DNA, 267 bp, Glycine max
attttaataacactagagccaaggtaacttgtcctctaaaagatttagtgttgactttccaactacttagacactttcaaaccttgtccactagaaatgagagaagcatcaactttccaaccaatactaaactttcaaactctgtcacttgaaacgaaaaatgcatcactctggaatggggattaggtgctcctaaatagagtatttcataataacactagtgattgggctcttgagatcttagagtagcaattaatctctctcata

SEQ ID NO: 107729 - DNA, 279 bp, Glycine max
tgccttgttaaacggaatcaattattttgtgttgcagacagagaatgaaatctaaaacaatatctgaccaaacattccaaatactatttataggatttttttgaggatcacaacttcacaagtgtttattagtccaaactattaaggaccctaagttagataacaggtgaatttataagaaaagtttgaagagaatagtataaagccgctggcacctgagactcaatttcaaacgctgtgttgtgttcttgaactggttaagggcagctcctccatctc

SEQ ID NO: 107730 - DNA, 285 bp, Glycine max
aggacatgcaaagtggtgttgtcacttctctctacttactttgttgcatcttaaggatagtcaagatcaaagatttggcaaataccatagtcgttgctcttttttatcccttagagacctttacaagattttctaggggtaaagtcaaggctatatctctgaatttggtcttacatccataagccaagaaccagatgatgataatattgccaagggcaatgcaggatgcttgacagtgaatgtgccaaactcttctagttcttcaggtttcgacccagaagtgtt

SEQ ID NO: 107731 - DNA, 279 bp, Glycine max
aaggaagaatgtgcattgtaagcagcgtcatttctgcttatcctattcgagcttccactccaattgttacctctccactttccattcctcgcaatgttatcaacgctcatcaagccattgcctacccctttgtgccagaggttgtaaagcagtggatgccttgcattcagagttccgggctgtggataatttggttgcgtgcaataccacccgtgtccttaaagctttccagaatgctcgagttggatctcatcactttggtggttccactggtatggt

SEQ ID NO: 107732 - DNA, 285 bp, Glycine max
gataaatattaattattaatttttatttttttaataaaatggattgaagccacaacatttttcttgtatttgttaatcaccccaaaaaaccttatatctcctgtgtaccattgactgctgcaattaacagacttttatttttgtgtaattgttaacgggctaagaataaaaaagttaaagatgtatcaagtaaaagaaaaataaaagtagaagtaaaattaaatgtatacaaattgtttcatgttgtatgaaaaccgatttcgtaagccattatttttaggtaat

SEQ ID NO: 107733 - DNA, 293 bp, Glycine max
gcagaagttgagaggatcaagacaagactgctagaattagaggcatcgagacaagcaaagcagaaggatgccaaggcattgaagctggctgagatgaatagaaaaaacaggtttgagaacttcaagaatgcttctgaaatgaagccggtgaatacaggtttgaaagcaggggaggcaggttatgatccattttcaaggagatggactagagcaaggaattgactatgctgcaaaacctggtgaagaagctgctgctggtgctgggaagttggtggatacaagtgctcctgtgg

SEQ ID NO: 107734 - DNA, 159 bp, Glycine max
tatgtttggaggctctactcatttgcccagggtgatactcttcaaagatggaggactgaaccttttatcatgataacgggtagtggaagatggattccgccccaattaccaatgtcaaaaagtccagagcatgaaaaggagtctggttccacacaacat

SEQ ID NO: 107735 - DNA, 275 bp, Glycine max
cttggttctgaatctgtctacttgtgcaaatcattctgtacttgttggatactgtataatagataagagagatttgtggccctcctatttgaattcaggcacaatttattgacaactttagatttgatacctgtgtcagttgtttaagtgaagtttactaactggagtctgtttctcaaatgttcccctattctcctcaaagacaccattctattgatacggtcacttcaaatatcacatctttgtatgggcaactattgattatgattcacaat

SEQ ID NO: 107736 - DNA, 275 bp, Glycine max
attgaaagccatggatgttgacagacaacaactaagaagtgcaaacaacaatcttcgagataccattgaacgtttaaggcgttcattgcaacctaaagagagtgctattgaggcattgcaacaatgagttgtagaaaaggaacagatgttggaaaatatgagatggttgcttcaggctgctgaagataaaaggcaagcggcactagctgagctctcagctaaacatcaaaagaatatacagagtgtggaggctcaacttaatgatcattgtctga

SEQ ID NO: 107737 - DNA, 275 bp, Glycine max
tagaaggggggatgctagtcacataaataggtcaaagagatatcctgaaaatgctaaacctaggtggaagtcctttatgaagataataccggaagtaaagccggacttgtccaaagagccggttcagaatctgctttcagctttagcagatctccaaaggcgagttgacaaggctgatgcaattgtgaagcaaaaggaagacgaaaataccgaattgagggaacagctaaaacaatctgagaggaagaggatcgaatatgagacaaaatgaaatc

SEQ ID NO: 107738 - DNA, 275 bp, Glycine max
accgttttacgtttgaatttggttccattccctaatttctgaagtctgtgctaatatcttcatgtataattactgtccttcagtgcatctggtgttatataaggtggataaaaattactgaaaaaagaaagaaagacaaagaagatgatattttcaattatagtttcggagtttgtgttttatcttgccttatgatataagcctctaactgttcgaatttctgaggtctgatgatatctccatgtaaaataatcttgtgaagagttctcatgtat

SEQ ID NO: 107739 - DNA, 277 bp, Glycine max
cagaagtagactcatgccttgcttgtattaggactttactgaacccaaataccacaaaattctttagctcagccctgctagccttaactgagaaagtggaaatttaagatgggatccgtgcatcgtatggtgtcaacacccatggcatggtttagtatcataccatatgcttgtttttctgcctgtgaacttgtgagatagaaaaacagctacctagtcatccaattttactgtttgtatatttattggatgttttgtgtacttacatttcaaatgt

SEQ ID NO: 107740 - DNA, 280 bp, Glycine max
cagtcaatatcgagttccctcccagttataatatctaaacaggaagacaatataaagaaatgagtatttataatcttaaatttgaaatttttttcatttcagattttcctgaaaacatgaactatcaagaaagaaatgtgacacaaacctaagcacattattttctatttatgacttaggaattggcctttcatgaccatggctgacatccagatgcctatagagtatatatgcacctgagactgattttgtatagattagaatgattgctatatttgtt

SEQ ID NO: 107741 - DNA, 276 bp, Glycine max
taaagccaagcagtgtttgcataaaatgtactaaacagtgtcattatacactactttgaaaattgtcacatgtttctaagaaacaattactttttatgcaaacacagcttggctttaagacaatgacaaaagttatgcaggttacacagtggagtattactcaactcccaactacgacagtgactttacagtctctctttaaacagcatagggcttcaatgaaaacagagtgcaattaatgtcatggcttgtaaagtctgattacagaggtacagc

SEQ ID NO: 107742 - DNA, 268 bp, Glycine max
cggaggtctggtgagagcttcagatgtatgcgctgctaaccaacctgggatgtctggtatggacgcagcaagagcgatctcagaggaggatggatgggacacgaactgagctgacgccgtttctcaggactgacctgttctacataaatatacacgtttcctatggaataatgtgatactgtttcatgttactagacactgaacggtttcctcattcccttaaaatgtattcggccttcccgtgaaatctataaacagcagaactgat

SEQ ID NO: 107743 - DNA, 277 bp, Glycine max
gagacagtcagtctgcttctatggactcctcaccagcttgtgttttctagggagctgaccaagtcactcttcccaggtaggagctgcagatatgggggcccttctgtggtcactcctgctgctgcttcatgaagccaaagggttttctggagatgatgaggaccctgaggaagtggttgctgtccttcaagagtctgtcaacctctctctggaaataccatccaatgaagaaattgacaacattatctggttctctcaaaaaaaccttgccaccgtg

SEQ ID NO: 107744 - DNA, 273 bp, Glycine max
gatatggcgccttgtatttctttccagtcttgccccccgccccccattctcccagttctccagcccaccgtactcggtctgcatccccggatggttcctcagtggccgcgggatacggagcctgctgctaaggaaccgggattctccatttcggcagtagaagcacggaccctaatggtcgcatgcgcagtgataattccgcggcctaccgaccgcgccttttgactgctgttcaggtgaagattgtggtgaggaaggagaccagaagatggg

SEQ ID NO: 107745 - DNA, 279 bp, Glycine max
tatgcttagaagtctacctgttcacttggaaatagaatgaaaataggtatggatttttaaatttttcagtaagtttcttaaatacatggtgtgaagtactatttgcatggcataaacaggtttttaaaagatcaagccttactcatttgtcttatcattagatacttaaagaccaaatgcaaaactgactgaatttgtcctgaggcaaacagtaaaggcatttcaggtgttgaccgcagactccagcagctgacaggtttcttcttgcacttggggttg

SEQ ID NO: 107746 - DNA, 276 bp, Glycine max
agattggagtcgtttggtgaactggtggggctctgggaggcaaaggtcagttccgggccgtagggcgggaggctttggggcaagagagtcaggaaggatcccgcggacgagacccgggatctgaggggtttgagagggcggggcttgaggaagcgaactgcgttgacccggctcctgagtggatctgtcggcccagaacccgcagtcgtgcagcacccaggtttctttcatggcggtcagagcgtcgttcgagaacaactgtgaggtcggttgttt

SEQ ID NO: 107747 - DNA, 276 bp, Glycine max
gtcagtgcagtcagcttgcagcgggctgtgagggagagtgcctttgtcctaagaaatgtgctttgtgtttttcttttttactgctttctttttaaacccccaagacaggcttgagaagacttctgaaatgattttttaaagccgaatagaagacaggatccgacacctcccacaagcccttgacgggttttgtttgagtctgatttttttgtgtgtatgattttttttttaaagccttttacatactttgttttgatcttgtgaggctgggcctct

SEQ ID NO: 107748 - DNA, 274 bp, Glycine max
ggtggcgctctggtcccacagctttgtccggacttggggtagctgtgggaaggcgatgactgagagactctctgcgcaagcgaggcagcgggcggactgaaggctttgattgagcaaaatggagatactggtagcgacaccaggggagagccgcacctagagctcctagagccagcgacggtagggaagcaggtcccggagagcggggagcaggcccagggaggcgaagagcagctcccggggaacggagagcaggccccaactccagtcgccg

SEQ ID NO: 107749 - DNA, 290 bp, Glycine max
gccgctgctcccgctggcctgcaggaccgtgcttggcttggtgacaggaacattgcccatcctcttcgcctcctgctcacagacccatcacacgcacccagggcgtctcaggatggagctctgatcgccacctggcccaagaggcaggctatgtgctgactcatgcgcttcccgtccacctacttctcacaaccagcctagaagcctctgtcacgagcccccaagtaagcggcttggcaaatccagccggattccagaatcacattctctgggcaccctctcttctcgcc

SEQ ID NO: 107750 - DNA, 285 bp, Glycine max
catgtcaccttcatgcatccaaaacaaaagttctgagcacccagaacaaaacaccaaaacaaaagcctgagctgatgtgaagtgggaagcttcttggagcctttgttcctgatgtctgtcttctgtctgtagttctgcatatgtgttctcagtgttagtgtcaaggtttgctgtcctttgcattacagtgctgcggactcttgtggttttcctaagacaatagtgtacttgattttgtattcggagagagctctcgtacagcggacccttagagaatgtggttgt

SEQ ID NO: 107751 - DNA, 291 bp, Glycine max
aaataatccaacattcattcttatataatatatatattgtgagttcatgagtgattgttattctttgaagcacggacactccagtcccttgccttgtttggtgtttgacacgacaccgacgcccgtgtctgggttgagtttgatgtgtttgacgggtgttcacgtgtccgtgtccggtgttcgtgtcagtgtcggtgcttcatagttgccgtttgctacaacgaagagatactgagtcaatttctcatagtatatttataattgttgtttgctacaacgaagagataatgt

SEQ ID NO: 107752 - DNA, 286 bp, Glycine max
gctgggaatctcagaactgtgtacttccagctgggttgaggaaggcagagaggctaagggatgctccacagagggaacgtactgcccttgtttcataaatcaccctggccggaaaaaatgagccccaccggaaccttgcaaaactttccctttgtgtttgtctgctcgttgatattccagctcactatgcaagttgtgaggacaagaggccagaggccaaggacccaggaggctccggcaggacgttccgtagctgtgcctcatccctggccctgagttcgataaa

SEQ ID NO: 107753 - DNA, 288 bp, Glycine max
aaagaaacttcctacggcctgtctttcttcaagccacagcctgggaacttcgagaaaaacttctcggtaaacttatataaagttaccgggcagttcccatggagctcacttcgggagacggacagaggagtgtctgctgagtacagttttccactatgcaagaccagtcacactgtcaagtgggagggtgtgtggcgggaactgggctgcctcgcgcggactgcgtcattcgctgtgcggaaggaaagtggacactcattgaagtcgtctctctcgcatgccatggtc

SEQ ID NO: 107754 - DNA, 284 bp, Glycine max
agagacagagacatagagactatcttgtgctagctatgatggcggtttatgcctataatcttggtacttggaaggactgaaagccaaggacagtgtaggctacaaacaaacagacctttcttggtaactgagaacagagctttccaaggctagccctgtgctgagcctgaggtaaagttgactgagaacagagctttccaaggctagccctgtgctgagcctgaggtaaagttaacttcaaccacatctggtggctgaggactgggaatgatggttctcaaagg

SEQ ID NO: 107755 - DNA, 284 bp, Glycine max
ggatgggatagggggtgggtggatagatagatagatagatagatagatagatagatagatagatagataggacatgaaagtgggaagagactagttgggaaaataaagggtcgtcaggagtcggaaggaggtaagatataggaactgcacatgagcacactacattgtatacatgctggaactgtcaaaagtgttctaaaacccctacaaatatgccgtactaagtcactgaattgtataagtgggcaaatgtatactatgtaaactatcaataaagaatttaa

SEQ ID NO: 107756 - DNA, 284 bp, Glycine max
taaagacccatgaaaatccttcatgcggtgactgaaggttgagatgcacagacagttgcctggaaaataccaaaatcctacaaggggaaaagcaaaattgttttgcttcactctttatggggaagggtttgaatagcttttcttagttgctcaatagatggtgtcaacaccgtgtcacaggccggcctgtgggtgtgggcagtgctggggagctgatttccatgaagtataactggggagaggcttgtcaatgccaacactgtgggctcttgtttgacttgggg

SEQ ID NO: 107757 - DNA, 285 bp, Glycine max
gcctaaagcgcaactaatgttagtgaaccccactttcgcggtaggaaggctttttgtgtgcagacaagtccttcttttgaatttatgatgccacaaaaatgagtcccgcaatgtgcatgtggcctttaacaatgaaagcagagtgactgggatagtgacaagtatctgtaatcccaggattgcaagggttgaaatgggagggtcacaggctcactagtggagactaaaagcatgggaatgctttaacaaggaaagggaagatgagaatccatctgtagcagccca

SEQ ID NO: 107758 - DNA, 168 bp, Glycine max
tctctctctctctctgtgtgtgtgtgtgtgtgtgtgtcacaggtgtagaggtcagagggtgtacatgcggtattagttctttccttcttcctttacctgggtcctggggaccaatctcaggttgcagccttgtatagcaagtgcctgggcctgcgttctagatcgcga

SEQ ID NO: 107759 - DNA, 301 bp, Glycine max
gcgggcccgaggggaggagctggacgaggatctgttcctacagcttactggagggcatgaggccttctaaagacagcccctgctctacccacaccctccagggactctcccatggccacgcccacctgaactctcccagcatgcaccctgctgggcaccctcacttgtcctcaggtaggccagggccctcactggggtagatgctaccaccacccagcctagggacgatgggccctgagccacacgaagcccctcctcttgccctattggcacaagctcacacccttgagctatatgtagt

SEQ ID NO: 107760 - DNA, 294 bp, Glycine max
aggactgtgtgctagtttctggttcttccagtagaagcctcctggtaatcattgcaactgctacaatcttttccatagttgctgaaccctcattgaaatgcagatggtaatctccaagctgcttgtcagtccatctctgaattggtgttaagaaagactgtaagaaagacatatctcgttcgccttcaaccttagaatgcaagcttttcaagtgcaacctctcttgttggcctctttgctccatcagtggtattttatttaattgctcaagagcatgcagcaaaaccccatgct

SEQ ID NO: 107761 - DNA, 290 bp, Glycine max
cacacacataacaaaaacaatcccatgttcatgttattgctatgtagctgccactagtactcatcctcatcctcaacctcaagtctctaagtaattagcacctcaactcaaattaaaacaacatcatcgctagtttgctagctgctaattaacacccattaattcttgttggtcaatactaaacagtactaaacatgggtgtctgctttgcttcgctcgctcgccaccaaacaccctctagatccattccctacgcaggttcagggcgtgagtccttggggagcaagatg

SEQ ID NO: 107762 - DNA, 288 bp, Glycine max
gccatgactgctacaacagctccatcagtcgaaaatggcatgagacgttgaatactagctagtgttgtagcagcattaacttaggtatgtatgaagcagccagctcagatccaagaaagccatcggcaccggccaccggtttcccggtgagctacagcaccagcaccacggaggctgaggtgtattcgtattcatacggtccagttgtagtaccagtaccacctccccaccctaaacctattgtggaatggtcaaccggcctctgtgattgcttttccgattggggaa

SEQ ID NO: 107763 - DNA, 134 bp, Glycine max
tgcctatcatcccggtaactaccatgctcctcacattacggcagatggctacggagcactttcagcgagtatgcgtacgtatagagattctttcagatccagataaaaggcaaatatattgtatctacggcgtg

SEQ ID NO: 107764 - DNA, 103 bp, Glycine max
aattattgttcttacaattgttgaaaagattgttcttgactaccaaaagattcgtaaagagatatgaatagttcttgtgcttgaattgcatggtgaagcaaga

SEQ ID NO: 107765 - DNA, 125 bp, Glycine max
cgttcgcttatttggatattagtcttgttggagacagatttaagaacatgaaccatcaaaaaggaaggcatcccaagcattcagtgtgagtcccatttgtgagttaagggtgccacttaggacca

SEQ ID NO: 107766 - DNA, 299 bp, Glycine max
cgaaaagatcaatgaaccggaaaggcagtggcactgtacagcttgtcgaggtggtcccggtgctattgttggtacagaggactgcagcctctgattactcatgccaaaacaaaggggtcaaaaagggtgaagatccatagggagtttgctgagcttttggaagaggaactgcgcaaaaggggctctgcagtaattccacctggggaagtatttggtaagtggaaaggtttaatgaggagctagccaagctcatggaaaagtattccctatctcacccagaaaagtccaatggtatctga

SEQ ID NO: 107767 - DNA, 289 bp, Glycine max
gctgaggagaaccgctatgtggtccggctaagtgaaagcaacctggtcatctgatgggctgtcagaattgacactctgccccgtcctggaaggctcggaaggcttcctgcaggagggagagctgcacgggactgaggaccaagatgcaaaggcctagcagacaaaacagcaaaggccaagtcctggaggtgggaccgtccgccccactgaggaggcagcctgcggtacagcacgtgagcaggagatcaagaacccgccctatccctgcagccccggttacttccatgca

SEQ ID NO: 107768 - DNA, 292 bp, Glycine max
gctactactacccccagtcctctctcagcaatgcacaacttgtcaagtgctgtgcatcatcagctctacttcaacaacttcatcatcttactcttatcacaacacacccttccttccacgcagagaacttcaaccacgtgctcttctcataggtattactgtaatttgcaactaccattcttctctctctctactctttgtactcgaaagaccgaacaaagtgggcttcagtataagattcacccgtatagcttcacattttgccacccagatgctcctctctgatgactgg

SEQ ID NO: 107769 - DNA, 289 bp, Glycine max
acgatagctaggcctcagtagcagaacatctatggccactgccactgtttcaatttcgacctatgcgctagcttcggatcccattgcgccatttcccacggagctaaaacctcttttttctcaacctttcagtctcaatcgatttccttctacctgttataagctcactttagtcgctcggtcacgtatttcaactcttcctaacgtctctgaatccgcggttgccgaaaccgaaaccggttcgtgcgagccgaaccggacctattgtccggctcacctccctctggga

SEQ ID NO: 107770 - DNA, 264 bp, Glycine max
ctctatatatataatgttaaagttttacttgttttggttggctttgggaatcaacttgtcttttttaatcaatgtattgaattggagttgtctttctcgacctacaatacgaaggatgaatcaaaaagaggggacgcggatgttgccacttccaaggtgcgggaattttttagggagatctatcgtcgagcaaaatgacttttaccggtaaattcgctaccgagaatctgcgagataagggctccgagatttccccggggaaaa

SEQ ID NO: 107771 - DNA, 275 bp, Glycine max
tgcttatttaaaattggacaactttgacatacttcaaaaagacaattttaaataagcattatgacaaaagaagattcaaaattgtctttttgaagtatgtcaaagttgtgcaatttctttattctttcttttgtttctctagtttttcttttctcaaaggactgatttgaaacaatctttatccttatgttagctttgatacacagaatcgattcatgtttggggatgatgatattcccaggaatataaaatgtattcagttatgttcagaaaaa

SEQ ID NO: 107772 - DNA, 283 bp, Glycine max
gcttccttccttcttcaaacgcaacgaagtttctttccactttcaaaattcccacccgcccctttgttctctccgtacaacatcatcactcctgattctgggtcatttaaatccccgaatcaggggctcgaactcgagccgattcggctcgaggccttacaaaacaagtttttgtataaagcagcctgaaagagtttccctttttccttgcagatcatttcagcaataactggagggattactgatctctcttttaatgcagttggctatgcttggcagacag

SEQ ID NO: 107773 - DNA, 270 bp, Glycine max
actcgagccgattcggctcgagtgaaacttgtgatgtgaaatgaatatctataagaatatatgcaattgaaatagcgtgtgactggaaatagaaatctgagaatgattgcaagaagtggatattggttgaagcatgtattggacaagccaatattgatgggtgtatggttgaagtgttaaggttgtgtctgaagtattttttttacttttgagtgttatcctgtttcacggtggtcaatctttgtgatatcatgcttgctttggttgcat

SEQ ID NO: 107774 - DNA, 289 bp, Glycine max
gacacatccatccatggcttccctatcatcatctcgactcacaacacagtttaacttaccaaactccaaattgtgttcctctcttccattcccattctcaacaagaccctcatttcttttctcttccctcaacaaattctattcctactccaattctctgcgctgctctgcctccgtggaagacaccgaatgggattgggaacgatggcaaaaccatttccacgtggtcgatgaaccagagcttctcctcgacattctcaaatctcgcttaggtgatgctctgcgtttg

SEQ ID NO: 107775 - DNA, 232 bp, Glycine max
gacaaatttatcatttagcaaattgtgatgttcttccacaaatgatcttgaagtcatatgtaatcactatcacacacaattggtgtcatctcaatttatgtgtcaccatcctacttgtaagtatatgggctttgtatacttgtaagtaatatggactttgtatagcatacactggattgcctctaaaaaaaaaaaaaaaaaagagaaaaaaaaaaaagggggggccccccct

SEQ ID NO: 107776 - DNA, 281 bp, Glycine max
cggagtccagtatgatgttttctccactcttttcactttcttgtccttagtttctcaactaattcttatatgaattttgttatataaatgttcaaatcactattagtatgtgtaaggttatagaattatgtttgaaatatacatataacatatctatacttgtcaaataatggagttgcactgtggagtaaaatcaattaacttttcacgttgaaagtgaagcaactcatcatgggatttctacgttcttttatgtagtttaggtagccaatgtgcatcca

SEQ ID NO: 107777 - DNA, 123 bp, Glycine max
tgtgatttcataacaagttgatagcctctactcgtgtcctagctcgtctaagagctaggacacgagtagaggctatcaatgtgatttcataacaagttgatgcgtccgaatatcggaataact

SEQ ID NO: 107778 - DNA, 281 bp, Glycine max
tacaatctttgtctcattagactgaggcattcacgtatgattttctaacaagtgtcaaacatctgagacttctgcatttctatacttcgactttctagtaattctatttcatctttctagctgtatgctattgaacattgatggtcatcaagtccctcaacacattatgatggaagttggagacacttacaagagaattctggcagaggtaagatcgttgctgcatatggcttctggtgcttcttttaatcacgaatgcggttgtggttatcttaaactag

SEQ ID NO: 107779 - DNA, 301 bp, Glycine max
aaacgatcttgtctctgtctctggttcgcttcgtctccggcgtctcatttacggtccctgcctctgtctctgtctccgttcgttctgattatacgctgaacatatcttcggggggatctgtgttttggaggattaatttgtagcagttagccttgtcactgtagagaatgcctctgcaactttttgatggcagtgattccgaaaatgaggacatttcaaagatcaagatagacgagaagtatgctcgtaggtttgagcacaacaagaagcgggaggacctccagcgttttaggaattaaaa

SEQ ID NO: 107780 - DNA, 289 bp, Glycine max
attgaacaccgaggaacttgaggtaaggttgttccctcaccagaaactgcttcgtgacaggacagtggttaaggataagggctctgtggtggatgaagagaaggtgctgagtccggttgacgataatttggttgcggtcgagtttttggctctgattgataaagagaaagagaaggtgaatgctggggaggatgtgaaggaaatgggtggaggtgggaatgttaagatgaacaatggcattgatgtgctgctcggggcggatgagaagctcgaggatttcatgatgatc

SEQ ID NO: 107781 - DNA, 293 bp, Glycine max
gaacaaacgtcccaagtatcgttttccatatttgattacagcctcaactcaaccgtgtctgaagtcacttcaatggcggatagggaaccaaagcctaaagactcgccttcagtttggtatcacactaccacaaaaatgatcttgaacgacgctgattcaaagatggttcttccaaaaccaatgtcatccaaaacgcagtgtcatttttgtaaatcattgcaagtgttcaatagcgattttcaaaaaaccgtctttgaacgcaagtgttcaacaacggtttagatttagaaccg

SEQ ID NO: 107782 - DNA, 279 bp, Glycine max
aaaaaattgaacttacccctccttacaaggcaaaagaatatatgggtgaaatacaggaatgtttatgggttttgtccttgtggattgatgtttttttctagtgcttagatgtctccttcaggtgacacaatgccattagattttaagtatttattaaccaaaatgaagttcttccgtttgttgtaattaatttgaagttttgtaattgtcaatacaagtgtccaaagaaagtgcttgttatgtgtatgatttgggaatgtactatttattcctgtttaa

SEQ ID NO: 107783 - DNA, 286 bp, Glycine max
caactagaagaagtaatgagcatgtggcatcaactgaaagtttgaagatctagcatcgatcacttgaataaggagttggaaaggatgaaaaatgagaatatgcttccttcagtagatggtcaaagccacgagtcaagttttccaggtctgcaaagagaactgatgcaattacacgaggccaatcaagagttaggaaacatattccctgtttttgataaattctctatcagcggtaatgcattagaaagggtgctcgctttggagattgagcttgctgagcattgcg

SEQ ID NO: 107784 - DNA, 151 bp, Glycine max
cccttctctctctttctctctgatgggttttggaagcatgtacgaggaacatcttatactcaaaggttcacactcacacccctagcacccatagcttatgggcatgccaaagttaagctctttctcccaacaagtgcttccacacaacata

SEQ ID NO: 107785 - DNA, 287 bp, Glycine max
gaacagttgtgcataaataatagcagacccaccgaacagcatcttggggaattagagagggttttctttgttaattcagtgctaaagttagttgaccgtggtcaatacagcaagaatgaacatctctctgagacagttgctgcagcaacttctatactgtcctatgtagaaccctcattggttttgccatttgtggcatctcggtttcgaatggcccttgagacgatgactgccactcaccagttgaaaattgccgttatgtcagtggcatttgtcgggcgttcact

SEQ ID NO: 107786 - DNA, 279 bp, Glycine max
gttgatctcatgcttagttctatttgatccataatgtagattccaatgaatcacatcaacagatacctcttaaaaattggtttgagtgtcatgatctaaattgcatgcaattgttgcaccttcaaaatcttaagttgtggctaataatattaaaaatcacacaaggaacatttcttaacgtgttgttattggtgtgaaactttttctatgagaaattgggagccctccattgatgtatggttactgtttctcttggactattgctgttttttaaatggg

SEQ ID NO: 107787 - DNA, 279 bp, Glycine max
taagtgttcactgcgctctctctcaggttaataaaaagggaaccacaactaccaccagttagcaatgaagtcataggtcttcaaatctgcatggtgtgcaagtctcccgggatgtgacaagtctttcctgatagtagggtaatagaagtgacaagttgttagtgatagtaactcaggccctcggaatcttcagagaagctagcagaagttcatcagagaaggttacatattagatggcaataacaccttttggtagtacatcttctgcacaatggggaa

SEQ ID NO: 107788 - DNA, 126 bp, Glycine max
atgcgatctatttttcttcagtggtgcatttaataataaacatattgatgttatggtataagaagaaaaatggagcatgttttggcgccaagatttcctcttaatgcagaagattacacattatat

SEQ ID NO: 107789 - DNA, 105 bp, Glycine max
cacaagttgtgttcctgttgtgaatatcttaaatttctcaacttgtgtttgtgtgtcgtcctataattgtaggttcagttgcatacttatattgtggttcacata

SEQ ID NO: 107790 - DNA, 307 bp, Glycine max
caactacagtctacagctgatgcattggtgatatcagttatcaccacaatattgtccagaatttgagtaaactaatgagcatgagatgctgcacaaatgctgaacttctttaaatcttctgttgatacagaaaatatatacatagcttttttctttctatctctcttttgtccacctttgaagaggaaattactaaactgctccattccatgcacagtacacttcgtatggtttatcattacttttatatgatagagagatttagaaacacgttgtgcttctaaatacacattgtaatagccagaag

SEQ ID NO: 107791 - DNA, 146 bp, Glycine max
ctcgagccctaacagccacagcatggcttctctctcttgcttcgccaacgaccttgcgccactcttcaaggagaccgatgacgtcaactacctgtgcgcgcaattcgactccatttctcgacagctcagcgtaacaacctacgccg

SEQ ID NO: 107792 - DNA, 292 bp, Glycine max
tgatgaggaggagagtgacgcggatgaggaggagacggagtcgtcgaggcggatggttgttaatggagagggccatcgggagaatggtcttggggttgcgccagtggagggggacgatgttgaggaggaagattgatgaggaggagggggatgatgatgatgtggtggaggttcatgagattgaggatagtgatgatgaggatggagtggaggagtatgatgaggacgatgattgaggacgacgatgaggaagaagaggtggataacgacgagggtgattttgtggagcctg

SEQ ID NO: 107793 - DNA, 219 bp, Glycine max
cagcaccacattcacctgagctttttgtgaggattccaaagcatggcttcccttgcagcatccactgctgctgcttccttggcatgtcagaaatgcttggaaaccccatcaacctcagtggtgccacaaggccagctccatctgcctctagccctgcctccttcaagactgtggctcttttctccaaaaagaaggctgcacctccaaaaaaagctgcag

SEQ ID NO: 107794 - DNA, 283 bp, Glycine max
attttattttttctgatgcttactccttttctattggagttatcaataaaagacattagacatggcaacggggcggggacgggtattgcctccccagtccctgaccccgactcctcaacatatccccgtcgggtattggatattcccgtccccggtttagatatgtattttttttttgtaaaaaaattatattaaaaatttgatttaaaaaataattgatacgggaatggatatgggatgagtggtgacatccctgtcctcgaccccaaccttggtttaaaaa

SEQ ID NO: 107795 - DNA, 147 bp, Glycine max
attccaagcgcctcttgatagggtctcccattttcaattccttctcagtttccttttctctgaaaaaagatgttgagggttgcagctaggaggctctcttctctctcctcttcttctccgttgcggcccaatcacgccgcttccgtt

SEQ ID NO: 107796 - DNA, 301 bp, Glycine max
ctcattttcccacgacccattttcatttttccaaaaagatctcaactttgcttcaaactagaacactccctctttttacgttcccgtttcatgggcatctcttggaatcgggaaccatagacatcgccatggaaaaggacaagtctcacactcacagctttcttacagtatcgtcaaacacttcaaattcggttcaccgaaaggattctgtttctgctctgttgtgtttgatcagagcgaaacaatgaagctgacgtacaccaaatggctgcacaggagcagaagatctttgcctacgaaa

SEQ ID NO: 107797 - DNA, 229 bp, Glycine max
ctgaaacatcaccctctgacttcacaagattaaaagattcaaagatttgcgaggtagctctcatgcttgtttctactccattttaatggaaataaatcctcgaactttcagccgagttctttaggataagaggctaaatattcgatcacatgtactagtatagttatccatattttaaggcaatgctcaaattgattattagattaattcaaagttagtaacttactgt

SEQ ID NO: 107798 - DNA, 298 bp, Glycine max
gctgttaaaggatgtgttggaccaacgactacctcaaccagtgaatccagttgacaaggaggtgatcttgatagcaaaaataacatttgcttgcttaagtgaaagtccacgttttcgcccaagcatggaacaagtgtataacgagtttgtgatgccaacatatcttcagtgaatttattctccatggtcacacttagtcaactcgttgataattgaaccttgtttccagcctgttgtatgcttttttattgctttaactagtgaagaatctcagcacggtttactggagactcaatgc

SEQ ID NO: 107799 - DNA, 292 bp, Glycine max
agatgaggcacacaagaactcaacaaggagcagagccatatcagaaagctgtgatgagaatggggtacaaggaggagagaacaccatgaccccctcagattacaaggagaaatgaaattcaagaaagggactaccttttggatttggcaaccttgagctcacatgtgtcctgctgatgatgataccaaatctgtgactggttcttgtgcaaatcacattactgttctccaaacatcgacggcggccaccgcgaatgactacttcaaatccaggaggacaaacagtttggggg

SEQ ID NO: 107800 - DNA, 288 bp, Glycine max
caagtcacaaccacttagtcaaggaggctcgacgctaggtcaagaattaactatcccacaaattgttatgtgaatgctcataaataactttgttacatcaacagtctccctaaaaaaaactttattacatgaataacatgctctaaaatatatttgagggaaaatggcacatgattttgactaattgacctttaaacttgtagcagatagaattcattcaaccttttacagtgaggtagtgactacctgagtctggtacatagatgcatgaataaatacaagaacatc

SEQ ID NO: 107801 - DNA, 288 bp, Glycine max
tgtacaaccatactgtaaaactgaacgttatcagcaggagagtacgtcaactaacagtggcaacagaagggctggaagtgactggaaaaaggggaaatcactgagcattggcatgagctgaaaaccagataggagacagtttctgaaaaaaaatttagcactaatagggtccaccggaaggcatgaaatagttgtctcttgtcaagctctggataacatgttgaaagtaagagtttgagcatcttgagctggtgccattctaagataagaacatctcttcagcttttg

SEQ ID NO: 107802 - DNA, 291 bp, Glycine max
aaaagcttcaccaaccacaccgagtcaccgactcgaagccactcactcggactcgctctcaacatcgacgccatgaatcttagctatgagcagaggctccaggttgtcgccagactcattctcgacgaagactcacgccccggagacgcgccgcttaccaggaggagcttgggctgagggtgaccctcaagccgcaccaggtggaaggggtttcgtggctcatacggaggtacaaactcggtgtcaacgtcgtcctcggtgatgagatgggactgggcaagactttgcaag

SEQ ID NO: 107803 - DNA, 288 bp, Glycine max
caaagtttcgttattctcccgttaatttgttgaataaatccacaagccaccttctttgttagtagctgatctcttctctctctatatatagatagcttatttattgattgtctatgaataaaatcttcaggttttgttacagttgtaataattggtggtgattggattgaagagaaaaagaagattatgaatatggggttgaaattgaaggagacgttctacttgtcccatggagcaccaagtctagtcatagatgattcaatccctgcgtggcacttcttcaattcc

SEQ ID NO: 107804 - DNA, 193 bp, Glycine max
  unsure (1)..(193): unsure at all n locations
gtagtattttcctacttttgctttcgctgaattcagtgtctcgtacactgttcttgttccattgattctaattttctatcttcttaacatgcacactttgctttcagaagcccttactcaccctccactcctctctcacccaccccgaactcgctcttccacaaaacgtgcaagacactcncttcttccctca

SEQ ID NO: 107805 - DNA, 285 bp, Glycine max
gaagataatatgagtaaaatttaacttgtttgattcggcagaaattgatttttaaatccttttacattctaactatacaacaacaacaacaacaacgccttatcccactaggtggggtcggctacatggatcaacttccgccataatgttctatcaagtaccatacttctattgataaaatatacagactgaaaatgtaaatgttattacttattattttagtattttctgtttataattcaatattcatgtagttctatcattaatcttcttcagatatgaagt

SEQ ID NO: 107806 - DNA, 276 bp, Glycine max
ctcgagccgtttgttgtgcttcactactaaacaaagcaagagatatagagagaggaaaacatctacatacaaggaacaaatgcttgatctgcttcctatgaatcagctcgctactctggtcagaaatatccagcatttgttccttgtatgtatatgttttcctctctctatatctcttgctttgttttgttgtgcttcactactagatctgaatttttttttgctgttactattcatcatccactcattaagcaatcaggggtaactaggtggata

SEQ ID NO: 107807 - DNA, 100 bp, Glycine max
cagcagctagagcttcaacacagcgcctagttgtgagcagcaaaccaaaccacattgatttcaaggcagcgcagaagcaggtgactgtccacgctggtga

SEQ ID NO: 107808 - DNA, 285 bp, Glycine max
ttcctctatccctgactttatccccaaccatcttccacttcctcatctcttccttttccaccatttcttctcattctcacattgttctgcctccctcttcttccactgcctcttctgattgtcaggatgtcctcaacatatgtactgatcctccttgccactcatcgaatgcagactagatgaagtctagcatctacaaacctcagcctttatctactctcttgtcacacgggaaccctcttctgtttagaaagctcaatattcagctcttcttgccaattagta

SEQ ID NO: 107809 - DNA, 288 bp, Glycine max
ataaaatagaaaaataaacaaaagaaaaaagggaacgagaaaaaagaagataagaaaaaaaatagataaagaaacgaaaaaaaacagaagaagtaaaggaatgaataaatatctacattgtctgacctcttggactctgaaggagagcccattaggtcaaacgaaaagcatagtgcataaaaggggaaaggaagaaagtctgtacaattaatgcatataaaagccgcatgagtaccaaggacatggaattgatcaacgaaagggtgacatttggcattgccatcagag

SEQ ID NO: 107810 - DNA, 119 bp, Glycine max
cttctttgaaaggatatctcgtgttataaagttgaaccactagtgtttttttcgtatcattgatctgccgaatgtgtatttactgtacatactaactgattaatttttatttggagaac

SEQ ID NO: 107811 - DNA, 285 bp, Glycine max
ccaacccatgcttgatagttagtacataaatcatcacacgctcggtcaatagtttcatctggccttgtgcaattgaagaagagtggatggagattcagttagagcagcagcaggagtcatggtcggagacgtcgagcacggggagcaggagcacgcgagcgggcttcagcgggcccatgagcggcccgctggtgacgcccaacaacaagaagagcagcaagaaaagcacgaggttcaaggaccaagaggaggaggacttcgtggagataacgctggacgtgcgcg

SEQ ID NO: 107812 - DNA, 280 bp, Glycine max
gctgctgcggaattagagggaggagagggagagtttgagttgtgggagcgcatgggtccgggtctcacttttattatgctggcacagccatatctcaatgctgttcctatgcccattggcctcgagggtctctgcttgaaggtctgcactcactatcccactcttttcgaccattttcagagggcgcttcgccaagttctccgagactccttcattcaggactggcgggacaccaagtcttggaaactgcttaaggacctcgctaattcggctcagcata

SEQ ID NO: 107813 - DNA, 244 bp, Glycine max
  unsure (1)..(244): unsure at all n locations
tgaaaatagatacgcttgtatccttgcagtgcttnagaaccngatgtctgatggtaatagtttcaggagccatggaagttaggcacaagactttcttacttctatctcatggtatcaggaactggcttgaaataggttacccttttatcagatatgcaagctcattctcatcaccatcaatttcaactacgacaagcaataaatgccgatgactacataatagttggaagaggcacagcaggtg

SEQ ID NO: 107814 - DNA, 277 bp, Glycine max
cgtcaacgacggcggcttctctcgtctcgtctctgcttttctcctttcgctttcgcttttcgtgtcgccgccgggcgaaaaagtgtttccctgagaagagaattttgcaaatatggttccaccaaggggtttgattcacatacgaatggttctttcggcgtggaagtgggtggttctcgcaaccatcacttcgcttgttcaggagagacgcggttccatgttgaaaaggaggaaggtgagatttgtgttgaacacgagcttgcccctgtggtgccac

SEQ ID NO: 107815 - DNA, 180 bp, Glycine max
tttaaccccaaaagcgccatgcaagatagggttaaagactacaatggggagaagaatcgtaatcttacctgagcagtttaaaattttgggagacgataacttttgtctttataccatgtgtttccttcgctatttgatggtgtacgatttgcttataaataagaaatgaacgcaacaatc

SEQ ID NO: 107816 - DNA, 271 bp, Glycine max
gcaaaacaaaagacacttcactccaattccaaacctattgctgaaggcccaaaacacttacaacattctatgtttctgttcagaggaagaaggaaaaccaaaaaagttagcgtggttttgttgatttgcaaccgattcacttcaattcattccaaacccacatttggagatgaacccttccgttccatttcggttttcaattattcaatgcaggtcaaggagcgtccacttcccaaatcagtgcaatcgaacccccacgcgtgctaggcgg

SEQ ID NO: 107817 - DNA, 211 bp, Glycine max
tgatgatgctgatggatactcgaggtactgataaccagctggactgtgcccaaaccgctcatacgagtggtaaagatcttatctcagtcctaagcgaagatcgagatcaagctactagtgaggctggaaagcgtccgcttccagctgtaagctttcgatcctcgagttactctagatgatcttgtatcacttgtctctgaaccgtctcatg

SEQ ID NO: 107818 - DNA, 272 bp, Glycine max
tcggtcagtgctgaatgcatgctctgtgcctctggaggctttcttgacatggctaaaaaaggagtgtatttacaaccccatgacacctcaatgtgtcttaaagaagtcccctctgatctaccaggttactcaaacagtattttgaactctcaatacctgaaggcggcacaagatttgcttgatgaaatagttagtgtccgaacagctttgaagcaatctggaatggaaaaacaagagaacactggattagatggctctaaagattctgatgg

SEQ ID NO: 107819 - DNA, 276 bp, Glycine max
ctataacaataatattgagagttagagataattcggggggaacattgctaatgagcatagaataggggaaaattgtacaaatctagctgatgtggcagctgcagcaagatttgtacaattttgccttattctatggtcattagcaatgttggaacaagaattatctataacaataatattgagagttagattttgattggatttggtctttattttatttgggggatggggagaagggttgtgtactagatgagcgcataggtacaaaaccatcat

SEQ ID NO: 107820 - DNA, 172 bp, Glycine max
aatacattctcgtcgccatctctcctaattggtcgagtgttcaaaagaaataagtcgatcaaaacgaagagtcccactctactttatgtcagggccaaaatctttcagctcatctgcgatcttctgacacatttcagaaggaaccagcaaataatagaggcagaaggttcta

SEQ ID NO: 107821 - DNA, 260 bp, Glycine max
caagaagagagaggcctttggatgaccggtgtccacgcacgccgttcatcatgacgagagaggccttttgatgaccctgttagagacatggagggtatgcttgatgagtatggaagcaactcaagttttcagatacctggattttgcatgccccgaatgcttgacgatgatggggggagtgattctgatgaaggggagtttgaggctgtcacacctgaacatgattctgaaacatatgaagtgcaagaaacaactcatgc

SEQ ID NO: 107822 - DNA, 293 bp, Glycine max
  unsure (1)..(293): unsure at all n locations
cttctctcttttcttcaaacttaaaactacactttcacttctccctctagttgcatacttcactcacaatccacacctgtacttaccattgtncaatccatttcaagcaaggcttggaaatgcataaggaaactgaggatgactatgcttacctctctaacttacttcaagactttaccattattcccaacattgacaaggcatggctttttagctcaccgggctcgcagttgcagggaatgtttgtcgtttcccaaccagatcttctaacaaacaagaggaggacatccatc

SEQ ID NO: 107823 - DNA, 270 bp, Glycine max
ctgggaggaagttcattgggcaggcaagtggctccagtgtctcaaactcctgttggggcaggtaattcatactcggggaggctcaccgatgcggtgcatgtggggatgaatcctccgagtttaggaggtagtaaggagcagggaactgcagcaggtggtggtggttatccgaacgcgtggtcaatgcggaaagaagtggcaagtgctgtcgagccagagcaaccagcttggtctagtgctggtgctgcttccaagttggctcacgccatg

SEQ ID NO: 107824 - DNA, 282 bp, Glycine max
gttttatgatgacttctgcctatattacttgcaaatgttatatgatacaatacaaagtataaatagtttgctttgaaaatttggaagttctttcaaccttgtatgatatttgtagttggctgtatttgttgtcaataaagatgttgcttgtctttattatgattcatggtggaaatacctatctgatgtttgatttttggggtattcttttttgttttcattttcatgtttagtgcaactgtttttggagtttcaacagaatccatgcagttatcgtatgac

SEQ ID NO: 107825 - DNA, 226 bp, Glycine max
  unsure (1)..(226): unsure at all n locations
ctccagcgaagcccttctctctctctcttcaatttcacccttttagcatttgtacattgctaccccttccttgaatcgtncttgattgcgagaggggatatcggtgcagacgatcggcctcctcttgattgcgagtctgaatgctcggatggcgtctatagctgtgacgacgaagtcgtctagtagtaagtaccttatgtacgaagctcctcacgattacaccatt

SEQ ID NO: 107826 - DNA, 288 bp, Glycine max
gtggaatgctacaataaattacttgaggtgtccaaggcatttgtagaggggaaaatgcttctagaagattatgttttaactttgaaggcctcagttgggctcaaagctcttgttgagggagtaggagttggtaaggggaaagaagatcttacaggactcgctatagattctatgaaatccacacaagtacttcctggtcgccaagaaatacctgttggcaaagcatgttcattgcttactccttctgaaataataagctttctaacaggtgatttcagattaagtaaa

SEQ ID NO: 107827 - DNA, 99 bp, Glycine max
gagacatcagctttctagagatcgagacttttactaaattcagtatgtcattttcttttctttagtacttgttggcatttggtacatgactggatatag

SEQ ID NO: 107828 - DNA, 289 bp, Glycine max
cataaatcctcaaggaggacatgtaaatatccagtcctttgatgatagttttacggcaaaaaatagtggattaggcatacaactaatcatgcagttcgtcggtctcatagttcggccatgcaaatgcctaaacagcagagcctgtttgttactggccctccaatcacactttctgttgtaagcagaattaggaacggagctaatggctggagaggcactgtaagcggtgctgctgcagctgcaactggtaggaaacatgactttctggggccattgcttcatctttccg

SEQ ID NO: 107829 - DNA, 285 bp, Glycine max
gggtactcttgtttggggattcaacacagtctgatattctggtcaattttgcccagaatgctggttctgcacttggttcattgctcaatgttttagtccgtttaagctatgcttttcatgttatgttgactttccctctcctgaatttctcctagagaaccaacgtagatgagttcttcttccccaagaagcctctacttgccacagatagcaagagatttgtgagcctcactctagtgctgcttgtcttaagctacattgctgctattgtagtcccagatattt

SEQ ID NO: 107830 - DNA, 302 bp, Glycine max
cacaaacattgtatcagagcaactccatgcaaaagaacatccctgactcaagctatgaagcagggcttgaattggccattcagtcctctggcatagcaaaccaggaaccagctattacatccgccaaggaatgtctgaagacaacaaggagaatgggtccttcaccaaccctgaatgctgcaagcctggcagttagcttatccaaggtggtaccttatagagcgcaaatagaatggtacaagacttggtgcgatgagcaagacgaccatatgggatattacgactcattcagaagcagggct

SEQ ID NO: 107831 - DNA, 309 bp, Glycine max
tagcttattgacattagaaaatggtgggtcccctatttcaaatccctctactgcagctgaagatgcacgattagcatctcttatttcacttgatagcatattaaagcaaatcaaggatataataaggctttcttccgtgaacatcttgagcaaaagtaagaaaaaaacgatgcttacttctctgaatgaattaacagagcagatgccttcgcttcttgaaattgatcatccatgtgctcagaggcacattgcagatgctcactacttggttgagtcaattcctgaagaagagaccccattcaagatatt

SEQ ID NO: 107832 - DNA, 305 bp, Glycine max
aaaacatggaaacaaccgtgatcaaagggcagctcctatagttaatggtagtaaggtttggagccgaaaacctataccagaaactaatggggtggttttaaaagccaaactgcagaaagaaccagacaaaggtaagagtcatgaagttttgataggatctgtatcagttagtctggattattgcagcagccattcacaagggaatttggtggcagcccagcgggactgcgtggtagagaatctagccaagcagaatactgctcaggaaaagccagtgaaacatgattctttcagggaagtaatgg

SEQ ID NO: 107833 - DNA, 208 bp, Glycine max
atatcgcaacactatgccatgcagtaggtactcgacgctctatatcttatctgggctgggcatcctatacagcaactgcacactcctcgcaatgactagtctctgtattctggtgttcttcagataccatcaacacgtgacaatcgtgagatctaagccacttcatctttagtactacgagaactctctcttggctcagcagtggtaa

SEQ ID NO: 107834 - DNA, 280 bp, Glycine max
gttttcttgtactcaagggcaaagaggatcaagtcagtccaaaagacaaattgtgtctacaatatttacttttccctctgcctgttgatttttttttttctttctttttacattttgtgagggtatcactactccttgttaattggccatcctatgcgactaaatcttagtaaataatataggagtttaatagacatgtactgtaagtttaattttttttacaaatattcagaaatctttattgaaaaaaaaaaagaaaaataaaaaaaaaggggggccc

SEQ ID NO: 107835 - DNA, 296 bp, Glycine max
  unsure (1)..(296): unsure at all n locations
gacgnaccgaatcggctcgaggctatttccacccaaaacaagtggatgttggagtgtgccacttgtccttgaatgagaggctcctcatacttgctgcaaaacaagaccatgctaatcatcatcacaggcttcaaagttccactcagaggaaggcttcagcttctattcacaagatctttgcttttggttctcttttcactcgccaccaattgaaatcgcacaactattatgatcaagatgatgcctctcccagcccagaaggaaagaccttattttactcattaatgcctgctttt

SEQ ID NO: 107836 - DNA, 152 bp, Glycine max
gcatatgtctcaaaggcccacggttcctcaatcctcgtccatagtctgagggctgcaatttcaattgctgggctccagtgagatgatacctagctccaattggtccctataatcaattacctcttaattagtaattatctaatctcaattag

SEQ ID NO: 107837 - DNA, 274 bp, Glycine max
aggactaagcatctttcctgcatgatcataacttaaatttcttcatctccaaatgacaatggcccttggaagaattatttgataaagtgaaaagaatgattagtatggggaaccaaaatgaatgtatagacctgctaactgcaaattatgaaatggtgaaagagcgccttaatgcaatgactaaaagcacagaagaagctgtaactttggacatcatagcaccaggttacatggctgttggagacttaaaatttgctggatctctgttgaacat

SEQ ID NO: 107838 - DNA, 291 bp, Glycine max
ctcaattttgcatttaagaaatgacatgatgatcggggataagaaccaagattgagatggaaaccttcgcttcaagaatggcggtgtgttagaaaatagacatgcacactgtaaagttaaatcacatgacgttactgatattcctccagacacaagaaagcagagggagccagggtctaaggataaagctgatcctgtaggaaagaaaaaggtccataaaggcagcgtaaaattcgaaaatgcaccctggaaattttagttctggagaaatctaggaacatgactagttac

SEQ ID NO: 107839 - DNA, 289 bp, Glycine max
ctttcttgcacgctcgccattggtgatcacttccgatagctcttagaaacatccaatccaatggcagagcacaacaaccaccaccatttcggaaccgccatcagaaggctcgcctctgtgaccaaccacctcacttcttctcacaacgcacccggcgaactcgccctgtgccgcacttccggtaggagcgacagcttccaccgcgtccagggccatggcgcctcccacgacgtcgtttggaggatcatcgcctccgaccacgacaactccggcaatgacttcaccgaca

SEQ ID NO: 107840 - DNA, 274 bp, Glycine max
gctgaggactggttctgttgaagatgttgaaataatctaggcaaagtcagaaatgttaataaagttcagacactactttcagtgctactgtgcagactgggttaagcaaattgctttaacattgttgaagccagatcagataactgctgagcttgatggacatacagaatgcacggcagcaccaatgtacgcatatcgtacttcttgtactagttctgccagggccaacttatgcagatagtatcgctttatagcatggaggcggacattgtat

SEQ ID NO: 107841 - DNA, 154 bp, Glycine max
ctgaaacgttcattcatgtgagcactgatgagggttatggtgagacagatgaggatgctgtggttggacaccatgagggctctcaattgggacctaccaatccatattctgccacataagctggtgctagaatgcttgtcatggcgtatagtag

SEQ ID NO: 107842 - DNA, 310 bp, Glycine max
ggacattcttgttattgaccaatgctcgtttgggcggattcgaaccatggcgatctctcccccgtcctttttcccttcacccttccccaaccactaggccaactttatatattccagtagtgagaacatgcgtctactatagttgccaggactcctcctcctcctcatcgacgtctgcccttcttgctattaaaaccatgcttcccattgtcggatacttggttgcatgattgctccagctcgccaagatctatagcaaaaaaggattccatgtcgtagtccgcacttagtgtgcttggtccgatctatt

SEQ ID NO: 107843 - DNA, 305 bp, Glycine max
ctcgagccgtgctcccaagagaagaaaggctttcttacagccctctctttctctctctctgtctgtgagctgctatctctcttcaatggaggtagtggagcttgcaagatagacccagaattcacacggcgcgattgtattttttcgtgctgttcagaataattgcagagatgaagcaagaaaacagtgttatgctgaaagctggggagctccctggtcgattgactcgtgctcgagctgctgctgctcttcgtgcatatggacagctaccccctttgaaagagagagcacagcaaaatcagaat

SEQ ID NO: 107844 - DNA, 307 bp, Glycine max
tgccgttacatggtgaaacactgtataccttgtcatgtcaaactatttgtacttatcatgtctgtcctcacggtctgctcattgaattcaacaatctttccagatcaaggactgccggacacgttacaacggtgatgctgaccatcatcagcgacgtaaaaagtttacatttcctgctcgccttatatgtggagattgttatgaggttcgcttggacaaagttcttgcagatgatgctccttttgatatgtgtagctgccagtttgcattgcattactcatggtctacggaggcccgtgcccggcaa

SEQ ID NO: 107845 - DNA, 298 bp, Glycine max
agagcaacaccgtcaagtcatgatcgcaacctcgctcgacctcaaactcacacccgtcgccgccgccgccgccgccgccgcttgaccataaccttttctccattcgcaatgtcagatgtttcgccctatcctcacacacaacttctctcactctcaatctccctcgcctaagtaagtcaatgagaagattgatatattctgccttgcagttatactattggggctgacaatggtaaagaattgatgggctctcatctcttgcagagtggggctgttgtacatataggactttgtttca

SEQ ID NO: 107846 - DNA, 294 bp, Glycine max
tcagaattgaaaagtttcataaaatttatgttgacatttaatatgaacatttatagcgtgaattagcatggtgaagctctaattttgattgaaaaataacactaaaaacacctgatgaactgtatctaagctttgtccataacagaattggaaggccgatgtaaattcctggtacatacgactagtttcattgattaagattgcaagtttgtgttggcttcaagggtagcatttgaattgagatattaataataggatcctgttatcctgtgtacttaaggtaatggttaagga

SEQ ID NO: 107847 - DNA, 274 bp, Glycine max
ggacacgtcacctctgccagccattttcctttatttctttattcttttttttcggaacgtgatcgccaagatcggacacttgctcccatttccttcattatcacagtttcatctaaccatttctcgtcaaattccagttccagtttcaggttcaccggttgatggctaaagttggtaagttgcggacaaggctcgaggtcacagggcaagcccacatcttttgtcttgtggaagaaaaaatctgaaagatgttaatgttaggaagactcttcta

SEQ ID NO: 107848 - DNA, 292 bp, Glycine max
tttaattttctattttattctattacactcaaccagagagaggaagcagcagaaaacagtgagaagaagagcttggtgttaccgttgctgttgcgtgacgtgccccttatcttgttggcaccaaaggccgaaactttgaagataacaagagagcaatggctatttgtgtttctgggtcgcacacacttttcgtgaaccgttccaatttgaagactgtggcggttctgagcagagagaagaagatgcgtgtgcaatacgatctgaagcaagggcagagtcgtaatttccacga

SEQ ID NO: 107849 - DNA, 291 bp, Glycine max
ctgaggaccttgcaacaccggcgtctccctccttcctctcctctctctgcctttacctttgattgtaggttattcattatttggcggcggtgagttattacgcgcaacagtattgaaaagtcatgcatatgctatatgcatatctcaaatcgtgttttattttttcagaaacagggttgaatatttttgttttagcgtctgagctttgaattacagagcaaagtgaagcgtgaacatggtgatgcatctaaacgggacaccgtgcgctctcggattccacatgcctgcgga

SEQ ID NO: 107850 - DNA, 293 bp, Glycine max
acaaaacacgtgaccttcctcacagaacagaaccttcatttcttgcttcatgcctggttactttaacatgcaaactagcatgtaacgtaagttcaacagtaaagtcgcttccgttcccgttgtgactgatggcctcggtgacgggttttctgcctcacatgtcggtgctgtaaggcaccaccggtttgaagttggaattggagttcgggcggtgtcgtcatctgaatctgaaacagtggcagctgtgaacggatcttcttcgcggaatggttccttgctactgaaggaggaaa

SEQ ID NO: 107851 - DNA, 295 bp, Glycine max
ggggaggtcttctcgggatgtcacccgttttttctccttactattgttggtgtcccccaggggtttctacctgtaccttccattgcagcggttacgcaattccccaactcatcctattgaaacattgccttttccctcaggtgcttctttattcccaatcctctatcggctaacttgttagatccagtacatcctcttagtacttccatggactttcctccttttttccctgatccactggtgagaatgtccttgccatctcagcagattcccactttcacaccattaatgtgtg

SEQ ID NO: 107852 - DNA, 293 bp, Glycine max
ctcgagccgctcttgtaactcagatgggttcaaggatgaaaacagcagtatttgaagagcaaacaaacaaggctctgaagaaatggcacatggatgcgaactggaagaagaagaagcatgtaggaacagtgacactaggaaagtcgagtcacgaatcatggatggaagccccattggtaattcttcaacagtgcactcctcctctgttcccacactacaccgtttcggaactaccggccactcaacaacgtacgacgatcaagatcatgatcatgatcatgaatatgaatccg

SEQ ID NO: 107853 - DNA, 283 bp, Glycine max
ctcgagccgaaacagttcctgccttcattttacatgacatgatatcatgagatcaggtgctatgggtttatagctttgattgttgaagaagcatggcttgtatttctctaccttgcaatactgggtcatttgctaccccaactttgactctgagaagatatttgggtgtgtgtggaggtttgtgcactaggtcattcgtcgttacttctctagggtgtaaccagtgcttcaaatttcatcatgagtttgtcttgaacaagtagctagggtattgtggtagtag

SEQ ID NO: 107854 - DNA, 278 bp, Glycine max
catggtttctcagaagacgcctttcactgtagccacgctcttcttcctggcattgttccttatctccatcttcttcttcttcttcttctccaccagaacaattcttgcagccactccctccatccactcagatctctacctcctcctccaacctctttctccgcctccgtccccacagccacagcaaccagactcctcctcctccttcaccaccactgagagccaacctgagcctgtcggtgacattgacgatgccacggacaatgtcaccgatgccg

SEQ ID NO: 107855 - DNA, 274 bp, Glycine max
ccccattctcctcttctactctttctctgatgataacttcataacaatatctcacaagctgaaggcttctttatcacaagtcctcactctctaccaccccttttgccgaacactgagaggcaattcagccgttgagtgcaacaccgagggcattctttacaccgaatctagagtctccgttgagctctcatacgttgtgaagtaccctcatcttcaagagatcaacgaacttttcccgtatgatccctacaaccctgcaaggtatacactggaa

SEQ ID NO: 107856 - DNA, 161 bp, Glycine max
  unsure (1)..(161): unsure at all n locations
aangagattttatacagaaatattcgtcttcattcacatagaattcaaccataataaatgtgatacaatctaacacagctgaaaaattgaattttggtatcggtttatattattagttctaaaaatttcttattggcgagctacgacaattgcacctatca

SEQ ID NO: 107857 - DNA, 184 bp, Glycine max
caggattgtaaaactataccttcatgctgtaatggttgtaatgtttcggactggtatagcttgcggttgatgtttaatgaatcaccaccattgcacatatgtgcaaattttgtgctgagccaaatgtatgtatgtacagtatcaagccttgaaaatttacttaaattggtagcacttcttctcc

SEQ ID NO: 107858 - DNA, 281 bp, Glycine max
aattgaaaacagcgctggccttcgtgttgctctgatttgaattttgaaacaatggaaaagaaatcacctgaaccacccgaagaagcatcacagtcacgagactcatcgcgagataaccagacctggataactgcacaaaacattctgtacaataaactgatcacagaggactgtttcgcatgggaattacaagctggttccaaagaggaagaagcattgagatacgttggtggggttgactaaagctactcaaaggatgacccatcaagggcatgtggcac

SEQ ID NO: 107859 - DNA, 170 bp, Glycine max
ctcgacggattaagttggctccaacgttgtaagtattagtaggccatttccgaattatgaaggagggaattgacattcattgtgattactataatttgtttaaacggtgtcatttcttttatattttgaaattttgttaactttgttgttgaaattttattctaatgaat

SEQ ID NO: 107860 - DNA, 267 bp, Glycine max
ctcgagccggttggaagtccgcagtaagtaggtaccttcgtgtgtttcagattcgatttgtggaagtcgagtaggcactgcagttctgcgggcatagatgggtgttgggacactgagtttatccgtggtggtcctattttaggccactaatttcaatggtttgcccccatctcggtcgtccaattcgttgccgcatctctcgttcacaaagccatcttgggttgtgagaacggagtctaatgttcggaagaaaagaagaaagatgcc

SEQ ID NO: 107861 - DNA, 261 bp, Glycine max
  unsure (1)..(261): unsure at all n locations
tcgcgatcctctcggatcctggcggtaatcacggcgtcattctgagcacttccgtcaggcggtagcgtaacattgtgaagcgtgggggctttgggcgcgtccgagctagagacttaacattctanatagtatctttcaacacaaacatttcatatacgtctaagcgttttactccataaagttctgctcaagagaggttcaacatgtttcgggcgcttccatatcgtggagattccgggtctggcatgatggctgatattg

SEQ ID NO: 107862 - DNA, 264 bp, Glycine max
cttggaaacaggagatatcttcttgaaagcaatgactttgttgctcttagagatttgagtgatctgtccagatgagtctttgctgcacttcctgttatggtggaaactttatcaaggaaaatcctggaacacattactgaccaatgccttatatgctgcgatgtgggagacccctgcaatgcccgacaagattgcagtgacccatcttcactcattttcccatttcaggaagacgacatggaaaggtgcaaagcttgtcagttg

SEQ ID NO: 107863 - DNA, 248 bp, Glycine max
ccagaccccagcaagctgatttgttttttctcgcccttcaacgcataaacacgcataacccttagtaatcatcatgtcctctcctctcttcttgccctcatcattagaccctcgctttcatcatcaccaccgcatctcttacctcccaccaaccgcaccaaatccatcatcctcctccgcttctagcatcaccaccacatcaacaagtgcaagtcgaatgagaggcaaggagtgagagaagggttaga

SEQ ID NO: 107864 - DNA, 261 bp, Glycine max
acccgaataggaatggttaattagtagacgaagggtatatatatataagtgtgtgtatatgtgtgtttgtgaattaacaagaggttgttggtacaagtgaaatttgactcaatttctttaaataagattttgagtttaagttgtttgaatgagaaatatgattaagatgattagtattaaaagtggtcaattaaattcttcaataaaaaataaagttaatagatattttgtataataagatgattatccaaaatatatatg

SEQ ID NO: 107865 - DNA, 111 bp, Glycine max
  unsure (1)..(111): unsure at all n locations
tcacaaagccagttactctatctctaagttataatctctctctttaactatcagatccacttccacacattctacactacataagatagttnaccnattcacatctnaatc

SEQ ID NO: 107866 - DNA, 147 bp, Glycine max
  unsure (1)..(147): unsure at all n locations
ctcaatcactcttacttaatctcttaattcnacctnaaactcttaaaaaccanttacattaattcataatctaanctccaatataanactaaatttctatttacacttctcccatttacttcnaccctcacaacctctcctctacac

SEQ ID NO: 107867 - DNA, 265 bp, Glycine max
gcacctgataattttatcataaagtaaggatatccctccatgctaaaattatcaggtgcatgctccaaaaacaaattaatgaaatagagggatatccttactttatgaaaaaagattggattagctttgaagacctggatagattttatgagagacttgattcactgaattagatgtccccaaacttgtacagactagtgattagatctaacatactttattgtcaactgattatattgcataggataataagaggcaggcgaaa

SEQ ID NO: 107868 - DNA, 146 bp, Glycine max
gagcatatatattttatatgatgaatacaagcgagaatgttctctcaagatttatgctagaagtatgtagtaatctcaaattatagagagtatacaattttactatgtgaattgcagtactttcacggaaaagtaaaagaaaaggt

SEQ ID NO: 107869 - DNA, 155 bp, Glycine max
cagagtgggtctagtaattcgatgcatcgagaggatggaagctattccatggcatgtggagcgaagatctatcttcggctcagaatcacccttaggtgtatagggatgaaatgtgactgaaactgggacactcactattgatgtgcgtggcgctt

SEQ ID NO: 107870 - DNA, 256 bp, Glycine max
ctagggcggtccaaaggcctctgatacggagcgcatggtgcgctgcccatgcatagtgagtgacacacctggagtagtcatcatacgagactggaaataggactactatgacaagtttcagcagtctcaatggaaggaccagtcaaatttccgacatactgatacaagttctgagatacatcagaatgtcctgcacgatacatgatgtgatcatacgaatgcttaggagatcaccagcttcacaatgaagctgact

SEQ ID NO: 107871 - DNA, 255 bp, Glycine max
atagttcatgccattgctcccaacactatttatggatctcacacacacatatatatatggccatggtccttaagagtgagtatatatagtttctagcaaactgtgatcgatcagtctatttatctatttgcgtgtgttttcggtgagcgatggagaattggaggggtgctcggatgatggtggtggcgaggtcagtggcggctatggggtggctttcggtggtggccatgggaatccggtgcttcacaagtggga

SEQ ID NO: 107872 - DNA, 260 bp, Glycine max
ctcaatcacgccgtagtgcaggaaactcttgtggacgccagggtggtattgaagcttttgagtagatgtccacgttgatcggtagtggatagactttgttacaggtggccctctgtgtcatccatcagaagccatacatccatcaactgtgcttctatagccaggcgtgtcttctagagggccaagaacggtggagatggtgtccccgtatctgttggtgactggatgcataatagggctgcgtggatagagttccctgt

SEQ ID NO: 107873 - DNA, 259 bp, Glycine max
gcagattggttaccatggttgtgggttgtgttgttgtctgttggcttgtttcgccatctcaagacaccttttgggtcctaagtaactgactggcttccatttgaggcatctcccaagttggagattctgcaataaagctttttggagcagatattcgcaatattcttcattttcccattaagccaaccactcacttcacagatttccaactctctttgactcagtgtgagattcagcgtctgcctcaacccatcatcat

SEQ ID NO: 107874 - DNA, 273 bp, Glycine max
gtgcccaattggacttctttgtttgctttcaacttacaatttctgtggtatgatttcataccttgttagttacctaacctatcatacatatgcatcatcttcaaatccactggagttccaaatcatttttggaagaaaaaataaaattatttccttccaaaaccctctttatgacaattagtgccaagatatatgtgtctatctttccaccttttttactttttttaaaataataaaaaaaaaacagagatcttattatttatgttctacaac

SEQ ID NO: 107875 - DNA, 260 bp, Glycine max
agagcatgtttagcaaaatttagcttgggtatagataaactgttgtgctggcttttctaagaaccttggagttggatatgagaagagataacggtattgggctttgatattaaggtcatgtactaagtacatgtggatgaactagatcagcgctaagtaattgttaataaaccatttatcccattagacttcactttcgcatcacgtgtccagtaatgctgattagatctctagcatgtgacttaacaataagagcccgt

SEQ ID NO: 107876 - DNA, 265 bp, Glycine max
caattatcaattcggttttaatatatcctgggctagactgcatgttcttggatacgacatatatatttctcaagacagtagctgtgagtctgatgtctttgaattactggtaaagccagtgcgtttagtgagggataatgagttgttagaccaggaattcgtcaatattatgcatgcacttcaggttgtccatttctattgttggaaaggatcagctttactgaacaacatgtcaaatatagactccaaggtactaaaagtgaca

SEQ ID NO: 107877 - DNA, 230 bp, Glycine max
aggaactgtagctagggcatcatctatgcgatcaatagtcgacaatgatttacgagcttagctctccgcgagtccgaaccatgcgcaaccagaagcagaagctcagtcgagaacaggatatcgaacgaacagaagccagaagagcagatacccaaagccatcgagaacgaacctattatgactgagtaataacggatgaactgcattcagttatagaatgaaaataggtt

SEQ ID NO: 107878 - DNA, 252 bp, Glycine max
gtatcaggattgatttcagggtgtattctgtacagtttacagattgagcgtagtttgatcatgtgggctttctgaagaacttaggtgatgtatgatatagaattataggtattgtgttgtatagggatgagaaatatgggatctcagagtcaggcagagcaagagccaaagactactacaccattggctagtgaagggtccatgcataatctgaccctagatgaagtgcataaccaacttgggaatttaggg

SEQ ID NO: 107879 - DNA, 146 bp, Glycine max
atgtaacattaaaatcacagagagaacaacgctcactgattagcagttcgatcgttggggactccacatgaggctagactggacacctctctctgcaaaacaaaaccactctcttccttccaacgaatcgctggcacacaacatac

SEQ ID NO: 107880 - DNA, 197 bp, Glycine max
gtgcaaagggtgccgtgggatgggtcggatgcccatatcctattccatacagatttgcatagtggctgcgatggtatcatctctgcgttttacgagcctcaaggctgatgtctgataaatgctgtgagtagaatctcacaggaactcagagctggcctttgctgtagttcttcagtctcgagcagtgtagaggatgt

SEQ ID NO: 107881 - DNA, 255 bp, Glycine max
gctgatttcaaaactctattttcgatgttaactcaatggattttaacatttagttcattctagtttttaacattaattgttggcttactaatcgttttatgttttttttgtgcttgtatcccacagcctcgtcatgcaacccagcgaagtacatgtctggtcgatgtggaggaacaacgagattcatagtcttaattggtggtaacttgtgcttatttcatgtttccaaaaccgtttaagattaggaattatcat

SEQ ID NO: 107882 - DNA, 123 bp, Glycine max
gggaatttgtcattccttcttattttgacggaggtgaaaatgagacattatcatataagaaggatggtctttctttgcttacatccaaccgtgaattacccgtggaagttccacacaacatac

SEQ ID NO: 107883 - DNA, 267 bp, Glycine max
ctcatcaatcatctatggctagctgtccctcccctccttcaccatcttcttgcttctgacaatttcgcctccaagatctagaatgttttactatgctggtaggtgagtactcactatgcaggagcctcacttcctccgagcttgttttctttgctagacataccactaggcgaatatcgtgacatctccatgtactgagggaccacaccactgtgtagcacagagtgcagacaggtgctaagatagctggatcaggcataggtgata

SEQ ID NO: 107884 - DNA, 253 bp, Glycine max
cggctcgagcctcatcatgttttttgcctataaagcaaatcaaattcagaaaaagggtagcggggttaccagggggatatagggaaaaactgaaaaaggatttgtggggaaggtgaaaatcagcttccgacggaatagttcattggtgccaaagttataccgtcggaagctgggggtgtttgtatgtttccactggtttgactatgatgtaatattaatatcccagcattactgtaaatgatcattatggcgt

SEQ ID NO: 107885 - DNA, 244 bp, Glycine max
atgacagcagcatttggataatagttgaattatactagacactacagtttggtgtggttgctgaggttcctactatggcgtgttttgcatcacagtggatctatgttggaattagtatgctttccagtgtcccgagcttatatgcatctctacctagcagatttatatattgcttggaggatgccttatgaggctggactctgtggatctatgtatcgacatattcttaagcagtgtccgggat

SEQ ID NO: 107886 - DNA, 154 bp, Glycine max
gcacgaccattttgctggtttatttgacagcaatattgatcaagttttgggggttgcaaccaactcatagtgggaatgggagtggactaggggagttcatctgtagtacgtatgtggtagtgtgcttctggccatattggaagggctgtttgcc

SEQ ID NO: 107887 - DNA, 257 bp, Glycine max
gaactttgctgctgaaaaggcgaaactgttgcatgctcatggcatgggttatgctgcaatgaagcggaggcattgggaggaagcagttcagtatgagcagaagtttgatgaggaactcgccaacctcatggaaaagactccccgttggagaagttcaatggtatctaatggtagggtcttttgcacagactcatacaaacagataaacacagccaaataggtagagaaaatagagacatcagctttctagagatcga

SEQ ID NO: 107888 - DNA, 169 bp, Glycine max
gccaattaagtagcttgaaattgggtgcaagagaactataagatagtatactaggagtgaatttataaatttctttgatttaaattactacaattttaaagtcattttgctttgaagttgtactgcactgatatattatgaacttatggctgcattccattgtttctgc

SEQ ID NO: 107889 - DNA, 255 bp, Glycine max
ctacagtccaggagatgctctttctaccctccgccccttctagctccaggggctctggcctggatgggtgggctctccgctccccaccagccaaccctcaccacgccggctgcgagctccttgcaggcagagccacttccagcaggcgtgcagcaggagcaggtgaccggctctcgggtgtgaagtcccaagagcacagcgcgtgcccaggggtgcggacaggagccagtgggccagggaggcacaactcggagg

SEQ ID NO: 107890 - DNA, 148 bp, Glycine max
  unsure (1)..(148): unsure at all n locations
cttaactttgatgttgctgaagacagatttggttaaaagctcnacttaagttccttttcatttatcatagtgtgattgtgatatatagaactaggattttattttcttggctgcatattcactgaatatcagcagttccaggatctgg

SEQ ID NO: 107891 - DNA, 272 bp, Glycine max
gtaagtttctcaatttctctcaccaagtttgtttcttctttaatttcttccttttctttgtttttccataaactctcaaattagtccatacttaccaatatgtagttggtttgaataataattgctcgagtttcttaaataactgtttaaatgttcaaattctcaaatgagtaataaaacaactcttttttttcggcgaacccatgacctctttcttcctccttcttcctctttatttcttcgaccaccaagtaaatcttgtaactttgagt

SEQ ID NO: 107892 - DNA, 264 bp, Glycine max
gccagatattggggctttcagcgaactcgtatgagccccatgagattctcagccttggaagagggggagaggagcatgcaatgttggataagccaaacctactttcttatcttgcacatatgcttgtgttggttcttacaaacttgggacacatagctggatggatgtgttgggggaagactgcagagatttgcaagccctatttttatatggagtgaatggattggagacaacatgctggaaagcggggggaatactcaattt

SEQ ID NO: 107893 - DNA, 246 bp, Glycine max
atgatatacatatatgccatcttgaagttatggaaactattcttgtagtgcctgtttttcatctcattttgaaaaatgcaaactataatttgcaaagttgttgacatatgagggtgactgctgactacttgataactcatgtttagagtccatcttttaactgttaaatagcaatttatgatcttattgtcaattccctgctggtgaaagggctccattaggcctcaatatgagtcatttaataac

SEQ ID NO: 107894 - DNA, 271 bp, Glycine max
gttagtttgtttgaagctgggaatttcaatgagtctcgtgacaagcacgttttgctagagagaacttccaagtttcaaatgttagattcttgtaaccataaactcacttgtagtagttatttttgtttgatcaaactcggagtcttacattagttatatagtttgttttataaatttaaaaattatggatcccaacattcttatttatgcttacaatgtccatatgatgttccagtagctaatgcttgtagtagatctgaagctattcctc

SEQ ID NO: 107895 - DNA, 259 bp, Glycine max
aagattttgattcaaccctggcctttgttaatcacgagaggaaacaaaggactgaggagagtttgttgggcactgattggagaaatatcaaaggacaagtattggcatctggtagacagccttctcgaaagcaatttttagagtcaagtcctagcgattccaaaagtaccgaggcatcaacaagcatgtctgtcgatgatctcggtgcccttgattcggcctctgtgccttccacctcaagagcagcagaggtggggga

SEQ ID NO: 107896 - DNA, 248 bp, Glycine max
ctgttgtgatttacttgttttgatatggactctaaatccattcaaatcaagttaccttccttaaaaatgttaaaactctactcatgtgttgaactccataacttattggtatcagactcccagttcctctaagcttttagggaggcatgacctataaattttagcaagttgctgctgaatttcctagtagtaatgctattggttttgaactagaatttggtcgattgctccgcaattttattttgatc

SEQ ID NO: 107897 - DNA, 255 bp, Glycine max
gacgacctagataaagctcctgttaaaaccgatgaaaagcgatagttacagtatcgtttcaggagtttcatggtcccttgatgcttaatattcagtgttctaattgcataatctctttttccctatgcttttgctactagtttatgttatgtatatagttcaggaactggaattttatttaaaagtcctttgtaagagatatattttcagtttctgaatgttttgactgaatttgactcaaagctgatgcagaat

SEQ ID NO: 107898 - DNA, 265 bp, Glycine max
ccggttctcacagggtttatcgtttaacggttgaaacgaagcgaaacttccaacttcatcttcaaccctgcgcttcttttgaactggcatggcaagctctttgacaacattagccattacctattctcctgtcaacaatggttccaggggtttcagaaagtctgttaatgcttctaaaggaaggtgttgcataaaagcaatgaggatagagaaatccttggaggaattgtacaatgtgaaggtggaaagaaaagttcctcctgag

SEQ ID NO: 107899 - DNA, 254 bp, Glycine max
aaaataagaactccactcttttcctttcggttcatttttttctgcgaatgttcgctaccaatgccgcgagcaacctcttcttccccggcaatccttcgtccttccggtgccgcgccgccgccggagacctctccgcgggcccctccttcttccagtccgtcgctggcggcctaagaataggccagtttcccgacggcgcaggactcgtcgtggaaggacggcgcggcggtggaaacgagccgataagggtgaag

SEQ ID NO: 107900 - DNA, 248 bp, Glycine max
attttaggaaaatggtggactctgggttgagacctaacttggctgtttacaataggttggttgatgggttggttaaggttgggaagattgatgaagccaagggtttctttgagttgatggtgaagaagctcaagatggatgttgctagctaccagtttatgatgtaggtgctgagtgatgaggggcgatggatgagatgcttcagattgttgatacgttgttggatgacaatggggttgatttgatga

SEQ ID NO: 107901 - DNA, 153 bp, Glycine max
atgcttttatttcatagaaaaagtttggtgtgggtaactgacttttagtagtagtgttttagaatcatgtgatcttgttaaatgtactttatgatttcccgttatatccgctgtacactgtgacttataaataagagttgtatttctaagctt

SEQ ID NO: 107902 - DNA, 165 bp, Glycine max
agcccatatcgcctcttgtcagaacaaatattccataagcatggcccattatgacggcgtgcactaacgagtccaactccgccgttagcacgagcacggtgggggctaatgtggcaacggagtccagcatggcacccagtgttacttctattgggaccaagagtg

SEQ ID NO: 107903 - DNA, 154 bp, Glycine max
actgagacaaagaagtgagaataagagcaagaagtaggagcttgagcagctcccccgaagcttgtctcagcggcagacgctgaaagctatctgagtagcctcaacccggagaatagcaccaatggtagaggaggagaacaaaccagaggaaccc

SEQ ID NO: 107904 - DNA, 160 bp, Glycine max
tgtcgtagttaggttgttgctcgggttcgtgggtgcttgagcgatgatcttcttcgttgagagtcccgcaatgtttttgatggttgctaggtccagagaaccttcagttacagttgagatgctattgaagctgtcttggtgattattgtaaaccctgcca

SEQ ID NO: 107905 - DNA, 206 bp, Glycine max
tagtggaactggatttccacctcgtgatgatgatgatggcggtggtggaggaggtggaggcggaggcaactggtctggtgaattcttctgttttgggtttcttgctttgattggcttcttaaaggataaggaaactgatgacacatacagggattaccgaagaatgtgaaagcattggccaccacagagtcatgcttttgcttgag

SEQ ID NO: 107906 - DNA, 174 bp, Glycine max
tgccagccatgtcgatcgtttctatgccctcaccaacgtaccgatgttcaatttcagatacaatttctcggcagccattaccatgttctttcacggctcaagtgataagaagagggaaagggaaagtggtaatgagcatcgaggcaggcattggagtgatgggcaccaagttgg

SEQ ID NO: 107907 - DNA, 233 bp, Glycine max
tagaacatgaggtctgcattcatggatatcatccatactcgtggattcgaaggcttgtattctggagtatcgccaactttagtggagattataccttatgcatgcctacaatttggcacatatgatacatttaagcgttggggcatggcttggaatcatagatactccaacacggtctcagaagagtaccgcgcgagctttcagcgtttccgtgtgggagttgcagcgggaac

SEQ ID NO: 107908 - DNA, 111 bp, Glycine max
ctaaggttcaaatgtctcgtgtggtatgttacggtaccagatcagcgcttgggttattatcggtaaagcattgtacatcaagcatcacatgaacgccctggaggttttgct

SEQ ID NO: 107909 - DNA, 140 bp, Glycine max
tcgtgagaacacagcagtgtacgaaatgcctccgcagcggtgcacggcggcgtattcggcagttacgcatatgggcatcaacacgagcaagtagatcgcggaggagctggtgatgctgtgcctctcgtgcgagggtgagt

SEQ ID NO: 107910 - DNA, 118 bp, Glycine max
cgtcttcatccaagctccgaatttgtcgaaccaaacccaaatcccttctcagccctttcaccggtctggttcctcttaaccccctcttgctgtcgtctccttcttcagagtatgccgg

SEQ ID NO: 107911 - DNA, 124 bp, Glycine max
ggcatgttgcgatgtaaaaacaggtgaggagtatcatgacctgccatactgctattccctctcattcgagtcatcttggcacttctagggcgacaatttcggggacacagtcctattcggagac

SEQ ID NO: 107912 - DNA, 173 bp, Glycine max
tggcgagggagaaggagaaggaggtgatgcggaacacgagtattagcaagttgaagcgacgtagtttgtgttccgccaccgtcgagtggaaacgagggttatgcgacggcgaacaactgttatcgccgccgctgcgaagaggctgaggtgatccgcatgcttcaattactaat

SEQ ID NO: 107913 - DNA, 182 bp, Glycine max
gttgaggtgttgtggagtagtggggttaggaaattgcctccactatctcctttgcttgtaaagggccggaatctctataaacagaaaacttacagacagagatggaaaaatgaagctgatagaatcgaggtgcttcgtgagaagcacggacgtggtgcagcagcgagatctataggatcatt

SEQ ID NO: 107914 - DNA, 256 bp, Glycine max
agagagtcgaagactgcagtcccctcgctcatcggaagggaggaacacagccagccacgacaggattactccctgggatcgggttctgtcttcttcattgcagcaggtctcactacagtgcatgcatatgggagcagtggttgtcttggaccctttaaaaagcccccactaattgctactgcaggtgttccgccaaaaggattgaggagacaagtcacagggaagcatctcatcagccagtataacaaaccaagct

SEQ ID NO: 107915 - DNA, 174 bp, Glycine max
gcatggtatacccttgctagcttcacagagatgtaatgtaaattctccaccaaacgcgtcgctgtttttgttgttgtccagatgtataaaagatataatgagtgtatgtcaggacactgagataaggaaaccaatgcatgcttctatcttcattccttcccaataagcctttct

SEQ ID NO: 107916 - DNA, 207 bp, Glycine max
gtgtattcacggtctgcacgaaggacaaaccctagctagtccactcccccttgctccgttcgatcaacaatgacaggagaagcagtgaaccccaaagcttagcctttggcggatgcccaactctcagtgaccatactaaaccttgttcaacaagctggcaactacaagcagctcaaaaaaggtgctgaatgaagccactaaaccctg

SEQ ID NO: 107917 - DNA, 187 bp, Glycine max
tcgtggtctagcagctatgaggcagatgaaggcgaatctgaatcggtatctagctgttatgtaggtcgtcgctacatacttgctcgcagttgtccgagcgagatccatctcctactaccgatgatatctgcaacgtcctcggcgcagatgatgttaggctgagcatcagttgattgagttgctcttg

SEQ ID NO: 107918 - DNA, 207 bp, Glycine max
cacatttccaccgcaccgagcacatagttcagacttgtctcagacaacagagtggagagtgaacactgtacagtgcagagtggagtgttgagtgtcgagtgttgcgtttctctctcactctcagctcctaaggttccagcgctacactgagctatcgagcattgtggcttcgatcagctacttgttgcaggttacggacgcgaatct

SEQ ID NO: 107919 - DNA, 243 bp, Glycine max
ctcttattctatctgcgagtgcggattctgtttagcaagaacgctacatgagacgtgaagtggacgccggagacgagcagctaagggtgttatacgagctatgatccctcagcatgcacactctcaagtttcctccgttatcctactctgatagcacctcttactcatttgcttcttctcgcgcgtctacgtcttgggttcgaattctaggagacatcactggtggacaacgttggctacctc

SEQ ID NO: 107920 - DNA, 252 bp, Glycine max
ggggaaagcaacaaagatcttcatcttcatcgtcaccgtcctcgtcgttgtcggcatcgtctttggattcagcctcatgcgccgtaaccaccaccataacaacgctgccaaatgctccgatgctgcctgcaacaacatttctcctcccctcagccccattactacgcttccagctgactccaacccctatccaccgccgccgccaccgccaccgccaccgccaccgccgcaatcgactcctcctccgtcata

SEQ ID NO: 107921 - DNA, 212 bp, Glycine max
acgcaccttattcagccactgctaattgctagggtgccgaaatggtcgctggtcttgaagatcgtataagtgtcgccggagtggatataagtgtctgtgcggccctaatgaagaagccgtgctgcaatgttccgtcaagtgcctggtctccaatgtccgccgtcgtaagtaatttggccgttagtttgtagtaatggatggaactcccagcg

SEQ ID NO: 107922 - DNA, 257 bp, Glycine max
agcgaagatcatgaaggatctggggtaaagtggtcatgattcaagtgtaagtattcgtgttatgcgattcatgtagagcattacatcttcattcttctccatcttcctccatgtgattccacttcctgtgtcggtgtttgtatttgtagagtctttcttggcaatgataaactagaccttctattgttgggagctcagccaccaaacactcttgatgtaatgattgtaactatctatttaatattatttcgatatta

SEQ ID NO: 107923 - DNA, 270 bp, Glycine max
  unsure (1)..(270): unsure at all n locations
caaagtttcttcctttctctgctctttgtcttctctgacatgctttggggccttgttagagtgtgctttttgcaagagcggtactggcgaacngacgtatgaggtgcctgctgagcgatgggctccttnctgctcgaggcataggactatccagcggaccctgccactcagtcaaccacttgcattagatgactgagtgagactacacaaatgtggtncctatttcacaggggctccttattcgactgagttacacttgcacactttgct

SEQ ID NO: 107924 - DNA, 246 bp, Glycine max
gtgaactggatgaagaactagattctagtctggatttgtcaaaactcagagctcatcctttgaaacctgttatccattgaagtgaaatactatgtgccggatttaatgaatgtatgcctacttggtggaaacagtcttagatttgcggcattgtatactagagtacgttgtgaaactctataagaatatgcagacagcatattatttctaatattctgattctgttagcatgtaagtcttgtcaaa

SEQ ID NO: 107925 - DNA, 246 bp, Glycine max
gagtttctcacacaatctcaatggccaccatgctcagctactcacccccgcgtttcaaaatcgccgtcgacgctcaccacgatcctctcttaccttttctccggtctatcaagaaagccctagaagcttccgacgcctccgcttcgaatctcagtaacttactcaaagattgcatcagaaacttcaagaacaatgaccgctaccgaaacgacgtcagattcctcaagatctggctcctatatgtaa

SEQ ID NO: 107926 - DNA, 178 bp, Glycine max
gcaacattgggtctgactatagttctcacttacttgaactatagtggatgaccttgtgggataggttgctgtttgtatgggggtgttctcactcctgccatttgtggtcatgggatttctggcgattccagccctgaagcctgcaagatggacagtgacggacccgactgacatgaac

SEQ ID NO: 107927 - DNA, 265 bp, Glycine max
attaggtttaatcatatatagtgcttttgccctccttggtcgatttacagtactctccagaatatggatggtaaaactccaatcgatgttgcgaagtaacacaatcaaaatgaagtcctaaagctacttgagaaagatgcttttcgtagttgtaatgcatgatgccatgctgtcaccaacaagcaaagggggcaactgaggggaagaaggcatggtgacttcgttattttctcgtttggtttcttccagccatttagtgtggtaa

SEQ ID NO: 107928 - DNA, 240 bp, Glycine max
tggcacgccagcctgcttgcgcacttcactgatcccgcagtcctccctggtcgcctccaggtgtctggccaggcctcccaagctccacacttgtgagaagtgcagtaccagcatcgcgaaccaggctgtgcgcatccaggagggcggtaccgcaaccccggctgctacacctgtgctgactgtgggctgaacctgaagatgcgcgggcacttctgggtgggtgacggagctgtactgtga

SEQ ID NO: 107929 - DNA, 100 bp, Glycine max
agttgctcgacggaaagcatgtcgtgttcggacaggtcatcgaaggattcatcgttgtcaatggacatcgagaaggtcggatccatctccggcagtacct

SEQ ID NO: 107930 - DNA, 250 bp, Glycine max
gtttcttttattatgttgtgttccttgggggtgctgatgtatgtgtgttgaagttctgaatttgaatggaaacacgtgctagtggtgatatgaagatggccatagatgatgctttgaatggcttctctcctgtctccacccctaggattttctggaatcacgaaggagatcagctagcgggaggaatttagaggtatcagaagatactgctaataaaccacccagcaagcaggaagatactcctccacct

SEQ ID NO: 107931 - DNA, 243 bp, Glycine max
ctctctcgctcgcattttcacctcactcttttctctctctcttagcgaacgacacaattgaaccctaaaacgacaatggcgtgctgctgcgtttcgtgactgatgatgctgcgcgtcgtcgtcgtcgtcgtagtctcggacggtggttgcatggctggaatctggtgcggccgtgtgcattgtgatcaatcaatcataatgatgaaagaggattgtttgattttgtgattgaaatcgaatcag

SEQ ID NO: 107932 - DNA, 248 bp, Glycine max
gagcactcatgtgtttccttcccatccccactgccaacacctatggtttttgctccaacccatctagacatcataaaccctgcgatgttcatcactgcccatgcagcaaaactccctcatttgccaagccatcaaatttcagaacaatttgggtcatggtgcacctagatttggcaatgcactattttacgggggaagttcaataaatcggttccatgatgatgggaagagctctaacttcagctggg

SEQ ID NO: 107933 - DNA, 239 bp, Glycine max
gggacgaggatacacttctaggtcaacaagaggtgtttgtcgtccggagggataataagtgagagaaagcgcgtgtggagttatggaactgtgttctctgggctctaacacaaggctatgggccttaagcccataaactctaaacagcgagataacagaactaacttactggaccacggacccaatgccaacacaacagcatccgcttccaaaactcgtcctccttcaagcaccaccga

SEQ ID NO: 107934 - DNA, 123 bp, Glycine max
aaatgaactgctatggagagcagataatactgcatttttgttgtttgggcggggaagacgtggaaacttggatttgcaaaaccatattgagaacaaaaatttatttacctatctttagttttt

SEQ ID NO: 107935 - DNA, 257 bp, Glycine max
caaccgttcacaccacacttagcgtgacaccaaggacgtcgtcgttttaaccctcgacttgccgtaacgtaactgcagaacgcaacgacttgaatgaatgccatggtgaggaaaaaggagtgacaaaaaagtattattactataaaaagcagtgtcgtatactgaaaaaaacgacaacgaaatggagtgcgttgcggcgaggaacttggcggcaatggcgttctgcgtgagtcctttgtcgtcgaggttgaggctgc

SEQ ID NO: 107936 - DNA, 257 bp, Glycine max
agaagattcaaatgaggattctaacttggatggttctgcccgtagttcctgggatgagaccaattcttcagatgatttggatgacctggactatcagatgaatggagaagaacaggaagatgatgaggataatcaagagtctgtcactgctttgggggtagatcatgatgataatgtggatgatgaggatcgatcctgaaaatatttcacttccctcagagcaggttgacagaaaccccgcagctgtgcagaagtcg

SEQ ID NO: 107937 - DNA, 264 bp, Glycine max
  unsure (1)..(264): unsure at all n locations
cgcggaatacttgggaatgttccacttgtcctgatttctgctttgtgtcgnaaccaatccaatccctttggagacatggaaaaatgcagcacagatggaactgcctatgtatcatttggccagtgggtcggtgctatcatcctatatacatatgtatttcaaatgttggcgcctcctccagaaggcacatttgagattgataatgaaagtgttcccttgaagagcactccaatgagtgatgctacacctgaacaagctccattg

SEQ ID NO: 107938 - DNA, 258 bp, Glycine max
gcatggtcaatcacatagctgaactaccccagctttaaccaagtcagtggtggcaaggggcatctccatcactgtattcatcctgaactacctcagcacactaattgccgtagcatgctcaatcacatagctgaactgatttatctgcatgagagatgtttcagaaattctatgctttcagttcgtccctttggtatgctttgatggaagctgtatgtatagctttgtggggaaaaaattgagaaaattatgagtcga

SEQ ID NO: 107939 - DNA, 129 bp, Glycine max
ctaattcctagattctctcatttttcaagtttcaaccatggtaagcagcaacaatgtcaggtcgcggaaagggtgggccaggttcaggaaagggatgagctaagaggcatggcaaggtgctccgcgaca

SEQ ID NO: 107940 - DNA, 256 bp, Glycine max
  unsure (1)..(256): unsure at all n locations
gctatatctcgattcaaaatttcatttattngtagtatgnannatcttctcttttttngnnntgtttcnaatcaanatcntatgtgataaagtggtcatttcttgcccttgagcaagttcactgcgtctgtccnngngatgggtgtgntaaggtcatggttgccttttttttatatatatatatataataaatgtttggtaaaaaaaaaaagaaaaacaaaaaaaaaaaaaaaaaaataaaaaagacgggggggcc

SEQ ID NO: 107941 - DNA, 100 bp, Glycine max
ataaatgaggctgcaaaagcattatttctccagatattgcaaataaacaattctacaacacaatcatcaattaagagccctgatgttttcctttatgatg

SEQ ID NO: 107942 - DNA, 244 bp, Glycine max
ctttctcggcctaagttgcaatcttcctttctttgttgccctctcacatattctaagcctacaaatagaaatattcaaccaaaacccacttcttatccacgcattagagctttggaccttgatcaaaacacggtagtggctataagtgtaggtgttgttactgtggctgttgggattggcatccagtgttctatgaaacccaaattgataatgctgctaagcgagaaaacacacagccctgttt

SEQ ID NO: 107943 - DNA, 108 bp, Glycine max
gaaaaatccaggttctctcaacttcaatgtcattgcaatatcaaagaaatccaaggatggacattaaggcagtctatttgggtgaagtaattcttgaagttatctgca

SEQ ID NO: 107944 - DNA, 240 bp, Glycine max
aagaaccccagctccatctacctccaacccaacacacccatttattactctaaacattactagtaaaattaaatcaaagaagatattcttcttcctaataacataccaattcatttcaaagattgattctccacaccagtatcaaaaaaattaagttccaaagaaagacatcttcacttactatgctcctctgctgcaatagtaaggcaaaacgaatcactgtgttctagatttcgaaat

SEQ ID NO: 107945 - DNA, 106 bp, Glycine max
gaaaaattggaatcttgctaaatttggaagcgagagtttaagtaacatagtcaacaaagtttacatacgtacagttaaatctatcttggacctttgacctagttgt

SEQ ID NO: 107946 - DNA, 132 bp, Glycine max
caacatcatccgatgttgtggaatctgaccatctgctaaattcttgggacttcgaccttttccaattttaaattgactcttgtcctgacacaagtatacagaaatttaaatgacagtgatactaatttgaat

SEQ ID NO: 107947 - DNA, 262 bp, Glycine max
ataaccttctccatctctcgaaactcatcttccctcatcattctcactagaccatcaaccaggcacaagccaatcttcctgccacagcgtcacggttctctcactttcaacaccatcagatgcatcaccactgataataacaataacaatactagtaacaacaacacaaccaatgatgatgcaaactcagttcaagttcaagcaccaatggcaacaccactaaatccgtagaaataagcttccggagacgatcgagaaggaa

SEQ ID NO: 107948 - DNA, 100 bp, Glycine max
atatagtcgaaaacggcagtcccctccctcatcggatgggaggaacacagccagccacgacaggattactccctggaatcgggttctgtcttcttcattg

SEQ ID NO: 107949 - DNA, 258 bp, Glycine max
ggtagttcaaaccaatctggcagttttagaaattttgggtcgggtcaatctggtgcatatggtgacagaatgtcaagccttagcagcacctttggtaatttacatggtggtggtttcggtgcttttgggaataatccaaatgttgacagttacaacagaggaaaggctttttaacttcatcaacttggcaccttgagatggaaaaggttatatggccatagaataatacattctactctgaggcatccccttttttta

SEQ ID NO: 107950 - DNA, 100 bp, Glycine max
tacacttttgcagtcacattgagaatggggcgtgttcgcacgaagacggtaaagaaatcctcgcggcaagtgatagagaggtactactcccgcatgacgc

SEQ ID NO: 107951 - DNA, 125 bp, Glycine max
gtagagtaccaccacaatatgttaatatcccaccaaaaagtgaatccaatgcaacctgttcgatagactcgttgtgaggaacagcataggaatttcggatcttattctcctaccaaatcatggct

SEQ ID NO: 107952 - DNA, 247 bp, Glycine max
ggagaaggctgcctatgggatgctcattgttccctgataggaatgttgcataactaacgacgtggctgggaggtgcatagagatctcaggattaggtgttctgatacctctactggtgtcgtggccaatatctggtttgatactggatgcgttgcatagtgatcctgctgctcgtggatcgattgaggaggataagggcactagagtcgtgagacgggcagtaaggggtgcttcttcagcatgagca

SEQ ID NO: 107953 - DNA, 249 bp, Glycine max
gtcaccaccggatccgttcctataatggcgacggtgacgtgtgcctttgccgctcagaccttgactttgccctatcagcccaaaacctcaatctcgagctgcgctccggtgtcgaatcttcgcttctctcatgctatcttcatccggtcccgaaattgtagtcggattcgggcggcgcgggatggggagtgctcggcgaaatggagcaacaacagcgatcagagggagacgataatggttcccggctgt

SEQ ID NO: 107954 - DNA, 111 bp, Glycine max
ctttccctccacctcaacagcccagtaagattgatatacaattagagactggagaatacttgttaagtaacaagaggaaatcagcaagatatggcaagagaagcaggagaa

SEQ ID NO: 107955 - DNA, 258 bp, Glycine max
caactttggcttttattaccaaaatttatttgaattcaattagatcattgcaaattgttcctcaaatttcttcatttggttgaaaaaaaaaaaaaaaaaaaaaaaggggggcccgccgattaggaacctcttcaccccggaattaattccgggacgggtacttgagggggaacaagtttccccaaaagggatccttataaaacctgggcgaaaccagggcaaaagcttttcccggtggaaaattgtaacccgcccaaa

SEQ ID NO: 107956 - DNA, 176 bp, Glycine max
atccacttataaaccaaattttatccaatccagcttgtgcacgataatgttctctgcttcctcttcaatgtttatatcaagaccccatttggtattaattatgaccatggctttaagttcacttgttgtctcctgtcgtttcattcccacaccctttgttacttccactcaacata

SEQ ID NO: 107957 - DNA, 266 bp, Glycine max
gttctcctaaccagacaaagaaaaagaagtaatggcgaggggcaaaaggatgtatttaactttctgaatttaccagaatgaagaagactgcctgagaattagttcaacatatcttaattctcaaattcttcattcgttgaagcatgcacaagcatctgcaggctacaatcaagtcaacaacttttcaagtttcagataattggccaaagtttaatgcaaccatgagccaaatctctggcgttgctcacacagttgcatccttagct

SEQ ID NO: 107958 - DNA, 260 bp, Glycine max
gcctaccatatacaaatgaaaaggtttaattgaatctatttagccattaaatgttgtagttaatatttgataatgtacttcgattgttgcagaaattcaaaattaaaattttaatttgttagcagatcggtgcatatgctcattatgatagaagatatgtggattgaggtatgaagctagctggtttgtttatggttaagaggaaatggctcggtccggttaaaaccaggtagattccaaactggttcggtttcacaccc

SEQ ID NO: 107959 - DNA, 263 bp, Glycine max
  unsure (1)..(263): unsure at all n locations
gggaagaagagaagaggttcatgagttgagttgagagaagggtagggatcatgggtaaggagctgagcgaggaacaagtgtctgccatgaaggtagccttctctctattcgacacttacggagagaggcagatcgctccgtcnganctnnggatccttatgatgtcacttggaggtgacccgacgcaggcccaactcgaagccatcgtggctgaagagagctggaggcccccttcgacttgccccgattcctcgattatgggg

SEQ ID NO: 107960 - DNA, 224 bp, Glycine max
tgaacatatatatgttatatgatgaaacgaaaaaaaatggtctctcaagattgatgctagatatatgtactaatctcaaattatagagagtatacagttgtactaggtgaattgcagtacttgcacggaaaaaagaaaaaaagggctgcccgcgtatagggtgcctgtcgccccggggtttttttccggggctggaccggggggggagacaatgttccccaggg

SEQ ID NO: 107961 - DNA, 108 bp, Glycine max
agaaacctcggtggtcggtggcaacgccatgctggggatcttcacaaatctgcattgacacgcagactttggttcattcgacaaaattcctatgatgagtcccaagac

SEQ ID NO: 107962 - DNA, 253 bp, Glycine max
gcttgttgtgtgtgtgggatgcaacaataacttacagcaacaaccaacccgtatttttttatttgactaaaccaccattttggtcctctaaagatacatggtgacatcactgtggtattttaaagatttcttatctcaaattagtcctcagagctctaaaatgacagtttaatcaatttatattttattttttatttctaaaaaaagatcttatcttattaggggaggtttgtcattagccctgtggatcact

SEQ ID NO: 107963 - DNA, 279 bp, Glycine max
caaataattaaatgggttacaagccagaatggtttggaggaaaaaactggcagagcaaatggatcctcccccagagctcttataaattgcctgctgagccttgagaatcgagggatcagagttttcgaagatgatgttttaaaaagccatgctacatcaggtcttgatatttctcaaactgagcacccagctggtaacttggagggcaaggtagcagatgatgaccttttttatgtggataatatttgggaagagggacatgcaggcgacaatgataag

SEQ ID NO: 107964 - DNA, 269 bp, Glycine max
gacatattctctccaatctgcacccacccccattccacctaccttatctctctctttcgcgttatcatcgcctctctctctcttaatcgttcttcacgagagagagagagactcacactagcacacatacatggacgccatcgttcaaaccagaggccttctttctctccccaccaaccccaaaaccagggtttcgcatcacctccatctatctcacggccttaaacaccgttttctctcagtgagacccaaacccctatccacccctt

SEQ ID NO: 107965 - DNA, 103 bp, Glycine max
caagacatggatatggattagacattgtatttcatttccttcacttgtcctagttccaaatgacccagaaagtttgtgtttgcaatgctggaattttctctcg

SEQ ID NO: 107966 - DNA, 101 bp, Glycine max
ggatggtatctatgactggagtgaggttttcatgcacaaaggttttcttataggcatgaatgtctgggcgaagcgaggatggtgtagggttctgacttgga

SEQ ID NO: 107967 - DNA, 268 bp, Glycine max
gagatggagggagaaactgccaagactccatacacgatatttatcatcaccacccatccttgagagatcaagcagcgagaaattaagagattctaaaactgaagatacctcaaaattagatgataaacacatactagaaaagcatgaggatttgccactctttttgtacacccaaaagccacatggagataagaatttgaagccaaccagctttactacattgaaggagcatatttgaccaggtggtaccgatccggacggtttgtca

SEQ ID NO: 107968 - DNA, 164 bp, Glycine max
gtggcaggcaaccaagtcccaaacgctggtcttggttggccttgttgtctgggaataatggatttcaagcaacgtgtatacatactagaatttcgacttagaggaaaaaggcacttcaaattcgataactagataggcatatatatttgtcatgtggaggctac

SEQ ID NO: 107969 - DNA, 257 bp, Glycine max
atttttctttctcacacctcactcactcatttcatggcttctctcacaaacttgcatggagcagtcaataaaaacttaattccgatcacatgtcaccttccaaatgcactaaaagcataactaagagaggacaagtgattggatttcttggaagcaaaacacaccaaaaggatgcatcagagtgtgcagttcaggccacaagaagagcagcagcattaggccttgccactgtagtgcttacttggaaattcaatgac

SEQ ID NO: 107970 - DNA, 257 bp, Glycine max
gccactttgagcttgagaaaatattttcctgaggcaaacttttataaaactcttcctccatgatcagtggtagatgcattacatgcaaacgaaaaattttgtataattagggaggttactgttggaacttggaagcaaatatggacatgtattcgagtcttgtctacccataatgaagaacttgctgaggctgctattaattttgttggagatggttgtatttgttggttgaaatagcagtttaacatgatgcttca

SEQ ID NO: 107971 - DNA, 238 bp, Glycine max
atcacatttgaccgatgtctataactgcgtgcgctacatatgaaaggtgatgtgactgagaaggacaagacatcatccaaagcaatcacgtagatctgcgacgatacggtattggtggcgatgagtcggtggccgacagccgtgggcggcggggaccaccacttgggaatgggatgggtttccagcacgtgcaaggggaccattgctgattgcctgggaggggaggagtacgagttgg

SEQ ID NO: 107972 - DNA, 261 bp, Glycine max
atatacgctcgcatgtcgatcttgttcgatccgtcaccaacacatcgctgtgacatttcgatctctcagctgacattgccattgacattgccgtttcaattgctcgtaagaagcagagcacaagggggaaaagtggtaatgagcatgcgatgcaggtattcgagtgatcggcaccaagttcggtatgatcagccaattcgtgtccgaccgagaagtcgtacctatcactgtcgtaggtatcaaagaaggcaacatcgtcac

SEQ ID NO: 107973 - DNA, 203 bp, Glycine max
ggggtacaagaaggtgaagtgggcgacggggaataagaccgatgccggtggggtaaaaaatggggaagtttacttgactgcgttgctgcagaagcctgtgtccagatgagggtggtttcacgcaaaaaagtttgatatatgctataagaacgataagcaggtcggtttatcgtgattatgttcctcaaaaaggtgtttatggg

SEQ ID NO: 107974 - DNA, 258 bp, Glycine max
cattttcatcatggacccataaactcaatgaaagtatgtcagtaatgtgaacgtcatgtttgggtccaacatccttctcttcctaatacgtgtcatcgtagttttcgttcacaccttccgcgcagtcatagcttccgcagccaccgggtcacagtcaagccattcgaaccgtttcctccgtggctgttaacctagatccttgcccttccggtctaccattccttcccatctttgcgtattcctccgacacccacctct

SEQ ID NO: 107975 - DNA, 233 bp, Glycine max
ggaatggcgttcatttggcggttctgtggtgtagctctatgcaacttcacagcctctaatgcccagaatggtccttatccttctctgcccataaccttggacttggagcatcatataacaaccccatctttactgtaagatttcaaccataaccattttcttctcaattcccaccatttctcatctttcacccataaagaatttcaacatgtttaaccagttctcccatcgaa

SEQ ID NO: 107976 - DNA, 252 bp, Glycine max
  unsure (1)..(252): unsure at all n locations
atgatggctgaagtgggttttctatgttacgtaatggagacaatgtatgttgtgttagagctagtggaggcattgagtgtatttgacgcgagatacgaattaagaatcacgcaggcagagctaggaggaatcttggggacaatcgggcaaaacccnagcgagcaagaagncagggcaangatggaacacggcgttttttttaaagacgggnngtngagcatccacgagttcttggagatgaacaccaaggat

SEQ ID NO: 107977 - DNA, 148 bp, Glycine max
aagctgtggactgtaaaaactaatgaatgtgttgctacttatgatcatcatgaagacaaggtttgggccttggctgtaggcaggaaaacggaaaagcttgcaactggtggcggagacgctgttgtcaatttatggtttgattccacac

SEQ ID NO: 107978 - DNA, 265 bp, Glycine max
aggaaatcgtatgccctagtcgcgacatgttggaacactctgtgaggcattacagcttttagaacctcatgacttgtaatgcttctatgttgtcttctgcacttccgtcttgttgtttccccaaacctccagttaaactctctagtctctacagctcttccagtcttttgagtgcaccataaagtgatcacctcatcatatcatacctgtgacatagtcaaaaccaaataataatctctttagcagccaataccattggaaccta

SEQ ID NO: 107979 - DNA, 256 bp, Glycine max
gcgcggagtattttaaaattcataacgatgtagacttatttttttaagaaaatctaaatgtataccgtattatttttacaaaaagaacgaacttggatgagcccgttttttctaacccttataagaaagtatgagtggttgaattagaaaaaattaatagcggcatcacatcgaagctcaatagttaatagcggcctctcgccggcaagaggtggtcgcagcggtggttctgagcattgggagctgacagtggcag

SEQ ID NO: 107980 - DNA, 203 bp, Glycine max
ctatgttcctctgagaaacactttcttttcatggatgataactcaattttgttttaagattgaccttacctgtccattgaaattgaccatagcacatccttgatccttgagattttactattcaacctgtttttctgtttttgttgttgttcttttcactccctgaaattaggagagtagtacatatttgtgtcttccacaca

SEQ ID NO: 107981 - DNA, 256 bp, Glycine max
atgaataaatgtgtgtgctgttatccatacgagggttacattatctgggtatttgtattgcgaaacacatggcaattgcattatcatacatattccttaatggccacaggtgcagtccgtgcaagtgcagttagtgccacacatgcacttcccatcatgctcagctgctggaacatccatgacaaaggtctcgatgttccagcagctgagcatgatgggaagtgcaagtgtggccattaaggaatatgtatgaaaa

SEQ ID NO: 107982 - DNA, 263 bp, Glycine max
ctttcaatctctctcatgacactatacaaccccagatcttaattatctcatttatctagaccctcttattatgtctcattgagtccactgaaaagatcagatttttcagtgaaacaaggaaaaagaaccaacccctccatgttgatactagtgcttggactagcttcagctacttttttagtttttgttgcagtttatgtgttctattgcaagaggagggtgtcaaagtatgatgagagtaaagacattgagagttcagaaca

SEQ ID NO: 107983 - DNA, 201 bp, Glycine max
ggcaattcgtaactttcttgtcgtcttgactcttgtccctggtggggatgagcttgcagaggaactgggtataggtcttgtaactgcattttgatgtttatttatgtgtacactaaggccatttttaattaaaattgagtagtgaaatatatatatatataggggatatcgctaccatagaaaataccaacaaacggcata

SEQ ID NO: 107984 - DNA, 252 bp, Glycine max
gttccctccgcatccaatccccaaccccaaccccaacaccaacatcctccaccgcctcccggtttggcttggaaactcatcaccctacccgtttccgtcatttccggcagcctagggttagtttccggcgcgatcggcttgggcctttgggccgcgggaggcgtcctctcctactctctcggcctcgtgggcctgggctcgccctcgggctctggctcgggctcctcctcggccccgttggtttccgtgacg

SEQ ID NO: 107985 - DNA, 252 bp, Glycine max
atggtacttattttatgtggcttagtctttgtattcgtaattcttgcaaagaaaaaacaaaatcataatttgcgttttgaaatagtatactggcttttattggtaccattaaaaaaaaaaaaaaggggcgcccccccacaatcgccccccccccccgggaataaatccgggccgggaaccggagggggaaccaccttccccaaaggggggccgtataaaacctggggaaaccgggcaaaaccggttcccggg

SEQ ID NO: 107986 - DNA, 273 bp, Glycine max
gatcaattaccaaagcctaaagaagtggtggccaaggaagccatgcctccaaaatctccaatcactagaatggaacaaggagaaaaatctaatggacacaagacaaggcctcaacatgttcaagaggaaagcatgctgaaatccgccgcaattgcttcaaccccaagaaaagaaacaggaaaatctcaaaagggtcatgaggaaattgtgccaaagatagaggaatataggaatgaagagtccaataagcaaaatgacatcacaacatatata

SEQ ID NO: 107987 - DNA, 267 bp, Glycine max
cttttgattcaggacggccactagttgataataaatggacatcactggccttaatggtgtatcgtgaaacaattgaagccggtggaaaacctacaactgaaatattaccacaaattctgggatgcctgcaactcccttatgatacatctgtgaaaaatagacttgttgagaacctaggagtacgtgcagaaacttgaagaagctcaaacctctgttcattaatggatggatttggtgaatatgatcctcgtgctttttcaatacttg

SEQ ID NO: 107988 - DNA, 260 bp, Glycine max
atcaatttcaaaattacgtagtctacgccccaagaacaaccacaggactgcatgagttctatatcaatttaccttacccaagaaattagcaagaaacacaacataatcacacttgctctggatttgaagcttttgtgcgggcaagcaaagggagtttaaaatagtcatcgcttttccagcagcgtgaggaaagattattcttgttagggattggctgtggataatctcttactgtagttgctgggtgattatcattgtaa

SEQ ID NO: 107989 - DNA, 123 bp, Glycine max
catgcttctgacatgaatgatgaattttcataaatattttgcaccttaggtttgtttttgctatatggatttttttttcaggttaaaaatttgacaaccaacattcagttgatacttgactct

SEQ ID NO: 107990 - DNA, 257 bp, Glycine max
aggtgcaaaagaagatcaagaccacagccatgaccacgagcatgagcaccatgaccatgatcatcaccaccatgaccatgctcattcccatgaccacaagcatgaacgccatgatcaccactctcatgatcatagtcacgatcctggtgtttcatctgtcagcatagtttgtgaaggaagcttagaccttgagaaggctaacatgtggcttggtaccttgttgctggatcgtagcgaagacatttataggatgaagg

SEQ ID NO: 107991 - DNA, 245 bp, Glycine max
ggaattcaatgctactttcctgtgccctgagtgcttatctcttgctggtgttgatgagcatgatgacggaaaaggaatgcatatagctgttgtcgttttgctgagtattttggtttcagttacactgattcttggagtggtgggtgcatataagttctggcgaaagaagttaagggaacaggaccaggctcggcttttgaagttatttgaagatgatgatgacattggggatgagctgggccttg

SEQ ID NO: 107992 - DNA, 199 bp, Glycine max
catggacttgggcaagatcgttttcgccataataggcttctccacgtccttcttattttgcgtgccgaacataaagaaatggcagaagaaacaagtggccggagagaaactaaaaatcgttagcgaggcattggaagctgcagaagaaagagcagtgagatttcaacaaagacatgacagattactgagccaaatatgc

SEQ ID NO: 107993 - DNA, 126 bp, Glycine max
cttccacggagcagaaggcaggaactgtcgctctttggttgcattctttgaaccatagaaattatccagatctgcgtgttatcaacgaggaagccatccccaataacaagagtgctgatcccaaag

SEQ ID NO: 107994 - DNA, 256 bp, Glycine max
gaattagtggagaacggtttacatcagaaattgacatgtctagatgatctgatagctgctttagaggaagggggaaaaagagaggaagctgcatttatatcaaagagattgccaagactggataacttgaatggatctatgccgaatcatagcactaagaagttcaggcctattaaagcattaggaagctagaatgtcatgaaaagagaatgtgcaaagcacaatccaaaggtggatggagacactgaaacaatgt

SEQ ID NO: 107995 - DNA, 145 bp, Glycine max
ctcaacaagacaacttacctcattcagcccttttttctcaaggtttcggagagggatagctttgatcggtatcactgtgttgttgtgaccgaactgttatgctctcttttggacctttggtgttgccattgaaagaattttgtag

SEQ ID NO: 107996 - DNA, 227 bp, Glycine max
  unsure (1)..(227): unsure at all n locations
gctttgttaaccttcgccataacccttctggccgccatggcttctctctccgacaacctcaattcccccactccctttctgcatgttcagatctgtaatcctctcattccttaacctaacatcatttcatcttgtctctgtattggtttcataaacaccccatcggcgacgacgaggtcagcatgacaatgaatatatcacgccattccnagtctcttttcacatgg

SEQ ID NO: 107997 - DNA, 228 bp, Glycine max
aggtactgggcagaggaagagggttttgttttggtcgttggcagggtttaaggaagcgcggagaaaggttgtcttcaagaagtaagttttcactgttcaaatcaaaatctgatggcacacatcacaaaccttcccatgacgccactgatgccggccagcacttcctcaaacaacatcaaagaaatcgcgtttaagactgctccttcagcttccaaggtcgaaatcagg

SEQ ID NO: 107998 - DNA, 258 bp, Glycine max
cgctcgagctcttctcttatcctatttatgcatatttggagtctgttctagtgatttaatatatgactttctggtcatgctgagcaagcgtttaactgaggcagatgtatctatcattttggcattgttacaatgttgtgggatgaaaataagggctgatgatccagctgccatgaaagatttcattcttagtattcagaatacatcaaataagttgaaggcttcctctggagatgacaatgaagagcaaaatagtaa

SEQ ID NO: 107999 - DNA, 243 bp, Glycine max
ccaagagttgggagagactttgctgaatctctctcgagcatgggaacttgctgacacatcaacctcccactctttagtgaaaaagctccctttgattgaggccaagctgacgggttatgccaaatcagcacttggaaagcgtttggtatctgccggaagaaggtttcaatcaatgggacagtatggccaaggtgagctgcaaaagattgcaaaagcaatgattgcagctggtagagttctgac

SEQ ID NO: 108000 - DNA, 249 bp, Glycine max
agtgtggcttggggtcaacgtgactgtgtacagtgggcaagtaagtgtccctttccccaacattgatggcaggagactctaaatttgatcctacttattcacgttgttcattccaattgttttgacatagagtcttggttcaaaacagcgttgttcatcccattgtgtatgggctcaaaaagtatcattcatcccaaatttgtttgtggtgtgataaatgataacaataaacttgaaatatacatgaat

SEQ ID NO: 108001 - DNA, 246 bp, Glycine max
gtgaacgtaataccacatcctgctgcaattattacacactatttttttgtggcagatactcaattagtatttcataattttcaggtaagcgtgtatttgtagttttcttttttattggttcatagaaaatgatgaacaatgatgaaagagaagaggttaatccacccttttcgattctccagatattggatcgccttgagcatcagatgctgtttctggaagaaaggcacggttatggagcaccaa

SEQ ID NO: 108002 - DNA, 240 bp, Glycine max
tcgctctccagcttcttcgacgttccgacgaacgtacattcgctgcgccacgccgcttagcggcactcgctggctagccgctatgctcctggactatgctaaactgaatcatttgcgtgcgcttgggcaacaccgactttcgcagagaacgggactgtacctggaccggttcgtcaccgggctactgagtgttatatcgccgctgtggaactggggactgaccctatcgcttatccggca

SEQ ID NO: 108003 - DNA, 154 bp, Glycine max
aggattgtcaacgcctggaaatgcccacacaatacttgctcacgcgcgttgcacggtcagctcgttcagttgactgcatcgcaagtatgtactattcttcaagcatgttgtaaagactaacgtattcagctgagttggaagaataagccactca

SEQ ID NO: 108004 - DNA, 268 bp, Glycine max
ggtgatggcgcagttggctagttatcctgagtttgagcctctctcaccctaatgtttttataagagatttttttccccggtaatcaggagagtctctttggtctcctgcatcaaattcatactttctggactttatgtacttattttggctcttgacaaaaaaacccatactgtacaaattttgattctttcgaaaacagctaggaatggaataaaattgactattccaaatcttaatcagctttctctactcgcaaataaggatgtt

SEQ ID NO: 108005 - DNA, 236 bp, Glycine max
ggtgaattctctctctcctatgtcccaatcacacttcgctcttcggtaatttctaacatttctctgcgttctgaagctagcgccatggctgtcgtttcgcgacgtgcgacgacctatacgcgccactacttaatacgacacgagtttgatacgaaaacgaaaacctgcgttgccaataatagtctctgttactctgctaagaaggctcctccaccgcagaggattgttggtggccg

SEQ ID NO: 108006 - DNA, 226 bp, Glycine max
  unsure (1)..(226): unsure at all n locations
gtctaccgtcactgctctgtttcaccgagtttgagcgtttagatcagtancatatcctcttatcgtccaatggccaacctgacgactctaatgagctagaagaaacagtttgttactgacggagtgtgcattaccgatctcatacaggttcttacacgtgcttatacggacgacggcaaatccggcgatgatcatagcgttacgccgatcagcatcgagatcatca

SEQ ID NO: 108007 - DNA, 238 bp, Glycine max
tctagaaaccgtttctgggtgttagtgattccgaggaaactgtttctggttagtggtgttaatgtcttttgagcatgcaagacgcggttttgcggaagatcagggctttatctgattgctgattctggaagcattacatttacatgagttaatatttattcagaacttgtcaaagcaaagttttgaggttgttgactggtgatcctttctctgaggcattttctatgtcactacatta

SEQ ID NO: 108008 - DNA, 103 bp, Glycine max
gaaagttgcaagcacacagaagagaagagtcagatgacgtcatcgcgtccccctccgtcgaaatccgtggatctggacctaacaatcgtgtcggcgaacacct

SEQ ID NO: 108009 - DNA, 237 bp, Glycine max
cccaaaactctttctttttttccttcctccctatacccctataggtttgctgtttgtcactttgattgtataattagcttagctctctatttcaactaagtggtgtgatgatagccatggatggacaccaagcacaaccatcatcagacacattagcatcagaaaatgggagagaatcagaggactatggagaagaagggagagaaaagggtcctcatcctcttgctcaagctggaa

SEQ ID NO: 108010 - DNA, 224 bp, Glycine max
gtactatgttgataacgctgagaagatgttgcatgctcaaggcatgcgatatgcgacaatgagcggagccattcggaggctgaacttcagtataagcagaagtttgctgtggatctcgccaacctcatggataagtactccccgttggctatgttcactggtatctgttcataggggcttttgctcatactcatacataccgattatccctgccaaataggtag

SEQ ID NO: 108011 - DNA, 235 bp, Glycine max
ggtttttctttgaccccagtgatctaatattctctattataatattattgttcagtgaagattcaactcaaccatgataatttgtacgatcatacaggtggaaatggcaagtctagtaaaagaaagaagccaacacaatcttcagaatccaagtctgggcacaaccgttgactagtctcaagcttaactctcatattcttcaggagtctactgctaaagagattaatgaaaatcc

SEQ ID NO: 108012 - DNA, 123 bp, Glycine max
aaaaacttgacgaaaaaaattacaactttcctttaataccctgcaaaatacttcatcgtcccccgaaactattttttccctgaagaaataggtttggtttctgagaggaagtttgtggaatct

SEQ ID NO: 108013 - DNA, 254 bp, Glycine max
gttatgctatgcaggttgctgcctacgcacgatatccaagcagtagttgacggtgggtgccctaatcttctccgtaaagctgttaattcggccaagagactgagagcacacctgcaattagatgaaggggatgtttgtggtgcttgcaatctacgaagctcttgtgatagagcttatgtgattctaaaggattttgaaactgatgctcgaactattgatatagttcgaatacttttgttctacgcactagatcc

SEQ ID NO: 108014 - DNA, 200 bp, Glycine max
ctctcagtcacagcacggtggtgacgaccatggttagagacgatctatgcatcaccgttcccagcttcttccgctgccctatctccccgacgtcatgaatcccctgtcacctctgacgggtactacgacgtcacatacgctgtcaacgcaaaactgccgcacatcagttcaacatgtcgccacgactaaagctcagttgc

SEQ ID NO: 108015 - DNA, 232 bp, Glycine max
atagtgaatgtgcagcatggtcagattcagtgttgcaactaaaagatcatcctgggcatactgtttgctggatgcatccttatgattggcacttggattggaaggtggctgaaggaatgttgtatatgtcgatgagtagctgatgctcgacaagtgcattctgtaaggctatgaaaaatgtttacatctactggacttatgtatatatcttgtgccgaccctatgctatata

SEQ ID NO: 108016 - DNA, 274 bp, Glycine max
aagaatgcaatggtaatgatgatgacgttgagaatggtttgggacatgaaagagagagagagagatttggattgagaagggtggtgaggcccagagagttagttacagctggggttgaacaatggcgcgcataaatggacaaaacggattgaatcgcacacacatgcccaataattctccatgcttccacgtcattctacatctgtcatctactgctttggaaattctttatctctctcgatctgatcttgagaagcgaactatgtatatgtaa

SEQ ID NO: 108017 - DNA, 269 bp, Glycine max
ggacacactgcacagtgtgtttgcttggtagatgacatgggtaaccgtacaatgcggccctgtctctcaaatgctgtcaaagttcaggcacaagaattggtgaaagaggatttcaagggctccaagtggttggtattgagatatgcggtactcaacttggaggttattcaagcagcaattcatttagccaaacaggaaggccttatgaattccttggatttggccagttttgagatggtgaggaactttaaactaccgcttctcaagct

SEQ ID NO: 108018 - DNA, 250 bp, Glycine max
catacattttaatatgtcagtcacgttctcaaagtagttgctgacatgacatgtttagatgataacacctcatcacccaccaatttgtgtagtagataatcattatatgtaattgatgttccaaaatgcaagatggtatgtctatgaatatatggagtatggactagtaatttggaatggatttaaagaactacaactttagttatgctaatttgttggggggaaaaggcttttattaatgaagttatga

SEQ ID NO: 108019 - DNA, 143 bp, Glycine max
ggttggctatttttgtcaacttgttttgaatgtttgtcactttgggatccatattttgttattgctgaatatgcataaaatatccatttacagggcagtagatggccttttaaaaaaaaaaaaaaaaaaaaaaccaaaaacaa

SEQ ID NO: 108020 - DNA, 188 bp, Glycine max
cacagtcgcacgttctcctcagattgtacgcgaaggagctggaagaactcgcgcttgaggtcactgaggcaacctataggggcaaacaacttcatcaaatcttacacagaggaagctcaaagaaattcaggatttcagtcaattacctgagggattcaggagtactctcgaggacaatggatggaagg

SEQ ID NO: 108021 - DNA, 190 bp, Glycine max
ggcatggatagtgaccttcgattggttgccagtgtgatgattgagaggtgcaagggagtgttcaagggcataaattcattggttgatgttgggattggaacgagactatggctaaagctattaccaaatccttaccgcaactgaagtgcattgaatgcgatctccaagatgttgctgatggatagcatgg

SEQ ID NO: 108022 - DNA, 247 bp, Glycine max
  unsure (1)..(247): unsure at all n locations
acgtaatccaatgggtggagttggtgtccaacccctcaacggctcacnncagacctcggnggtgatggnggaccccaggtcatgatgnctgggcgtaatgtggggcccatgagcatgccaatgcccaacatccccgccgttcaagggcttccggccggccccgtcaacggcggtgggtactttcaaggcgcaggtcccgaagccatgcccggacattccaccagcaacagcagctccagcagcagca

SEQ ID NO: 108023 - DNA, 165 bp, Glycine max
gcctaagcttgattctatctatgtgtttgtcctcctcccagactccttcagattttgaataaggaacccagctgtgcctattgtctgacatctgaatagaatgaaccgcagccattgtagccagctagaggaaaacacatctgctaatcagtgcttctggacact

SEQ ID NO: 108024 - DNA, 284 bp, Glycine max
gtttgctgggcatcagcagctctggcccattgtctctgatgccaccctcccatctgcctcaccttaacagtacctgctgcagggagcaaagtcactcacatggcagtccacctaagccctcaagtctgctgggacagttctctccagcccaggtctttggaaagcaggtctggcctgaagcttctcttgtactgaaggctcttcagtcagctctgtctgacacctccagtggcctctgctctgtagactcgggtctagtagcaggacagatgattctgtagcag

SEQ ID NO: 108025 - DNA, 281 bp, Glycine max
ctttggacatttctggcagctttttaatgcgctgacattgtataacttggcccgggaccctgagtgcaaggagtggcaggtgctcatgtgcggcctccccttcctcctcctcttcctcggcaattttttcaccaccctccgagtggtgcatcagaagttccacagccagcaacacgggagcaagaaggattaagctagatctgataccagccccaaaggggcttctgacctgtgtgccaggtggggcggcaggttggggatcccttgtgtgtagggggttc

SEQ ID NO: 108026 - DNA, 281 bp, Glycine max
ggaaagggctgggaaggatgtgttctggggtagcttgtggttgttttggtttgtctttccttaaaggagaagtcctaccaaaactgtaaatgccgctttgccctcgactttgtagaaggttgtagttctgttttcttgaacctttgaaaacaaatctctaaggaaggagccattatcttatctcaaatctctgtcctgacaacaaatttgtgatccttctacgtcctttaggtcctttggtaggcacccctaccttttgtcatctgtgttctttctccagc

SEQ ID NO: 108027 - DNA, 286 bp, Glycine max
taggcttcctcgctcccggagaagtggccatccaacatccacgtgtgccatagaggtgcagggcctcgacagctgcttcagctacatgtcctgctccccataccagagtagtattttgtgttaaaggtcacctgtcctcacttgcccagccagccctacaggtgccttctactcccagtgccagagccagaccactggggcttcctgctgcaggaattgggggctcgggcagcaggggctcacaagtctggatgatgggaggagcatgccttagcctaaggaaagg

SEQ ID NO: 108028 - DNA, 194 bp, Glycine max
gcatgaggttgtccttagctgccgctatctcccacggccgcgtctaccgccgcctgggcctcggtcccgagtcccggatccaccttctacggaacttgctcacaggcctagttcgccacgaacgcatcgaggcgacatgggcacgcgtggacgagatgaggggctacgcggagaagctcatcgactatggaaag

SEQ ID NO: 108029 - DNA, 271 bp, Glycine max
cggctcgagggaggcaagtggagctccaactatgtgcttgctttgtgcatatattaggtttccaattctattcccacaatatatgtccatgtacatccccccattctgaccatttcctgaaaatttgaaacagtgagagttacacccccttctcgttctcctacagatcactagccaggactgaagggttcgatatcacaattttccaggcatgtatcagtccctgttaataaaacgataccagttgcgtctcttgtgcttaagcagggca

SEQ ID NO: 108030 - DNA, 277 bp, Glycine max
gacagagtcaaataaactcccttgagaaaatgctattggtgggtgctgggaactggtaattgttgtagttttgggctaggagaacaaaaggaagatttagaacaattatgctgtttgcactgccacatcagaccagaataaatccttctctcgtgccaccatttacatcagaagaaaattatgtctgaagttctgagactcccagaactgttggtgccctctctgggggaggagaaggtgtaagaggaatgtcaatagtatgtggtaattgtataac

SEQ ID NO: 108031 - DNA, 272 bp, Glycine max
  unsure (1)..(272): unsure at all n locations
ctccaccccaagattcctagcccccacgtctatgttcacctacgtcgtgctggtaatcaccatcgacatctgactctgccacgtctgagtcggccacatcacataccacactgnccacaactataagattgaacacacagagacagatgcggtgagctccagaagtaatggacggcccctcactgctggcgctgtccccaaatctgcaaaatacatcgctcaggtgctgcaggactcagagggggacggggacggggatcgggctcctagga

SEQ ID NO: 108032 - DNA, 264 bp, Glycine max
gaaaaggaccatgaagaaccttccccattctcatgggctactcaaggtaggacaggataagaaagatggggtcttcataatgttttggcagctaacctgctcccctttcccagtctggaccctttattttcatctataaatcatctttcagctgaaatcacacacagcttcatagctacgatccacgctccagagacacagagatctcaacatgagcctcagctttacctgcaacagctgtgctctctgggtgaatgagacact

SEQ ID NO: 108033 - DNA, 260 bp, Glycine max
gtcggattatttcattttatgattcccaaggcattcattttaatatttgtgtagagaatataagaaagtatttgctgtctgaagccagagaaaaaaatagacctgaatttcttcagggttggcagactgctgttacaagtgtattccacaacagaaaaatgacagtgactgtggagtcttcgtgctccagtactgcaagtgcctcgccctagagcagcctttccagttttctcaagaagacatgcctcgagtgcggaaga

SEQ ID NO: 108034 - DNA, 260 bp, Glycine max
agcaccttggaaggacaggtgtaattgtcagttccctttctgatctgggtttaaaggagagctgtattggagtcccaaggtcatgtgccgttacatccatcacaggcattcagccccacacagcgcagcatgacctggtaaggaccagcttctccctctgtcttacatatccattttgtgtgtgtatgtgtgtgaaaggaggtaagcacagatagacttgtagcagtggcacttgctgtgatcctgtgagctcagttgag

SEQ ID NO: 108035 - DNA, 262 bp, Glycine max
atttggctggccaggtgtgttaagagacaggatcacagcatagcgatgagaagttactgtatggacaccattaccttcgattccctcctgtccgagggagttttggagtgggctgttttcgggcagtgcagggagtcaaggcacacattccaagcagctcctcacactctgctccaccatggctggctcttcgttctagaggagctgagatctggcatgaagatgctgtttcctggcccttttttctcatctcaaagaacac

SEQ ID NO: 108036 - DNA, 258 bp, Glycine max
aagagagagagagagagagagagagagagagagcgagcttcaaacagcctaatgccagctctgatattgggcagaggtctatacatttgcagctcatggatatgctacctgaagagacttatgcagatctctgggctaaggtttaggtaccactcagatctctggggctaaggtttaggtacaactcaactttgcattattaatttgtggctccctcctccacccatgtagcatagctataattatgtctaagctcat

SEQ ID NO: 108037 - DNA, 127 bp, Glycine max
cgccagccctgcgcgtcgcgccaggtttagtgacgcatcgaggcgctgagatggcacagccgaacgctagagaggtctacaatgagagtcgtcagatgagacaacacagtagctgagcgaattcagc

SEQ ID NO: 108038 - DNA, 161 bp, Glycine max
ctgccctcccaacgcatcagccctgagccctccctggctggggactgtgtgggactcagagaaaaggcttcacccgggagccaagcacttgggtactgggttctcagtatctgccctctgtgtttacatgttcgtccatccatggatggatactgtagtct

SEQ ID NO: 108039 - DNA, 246 bp, Glycine max
attttgtgacgcacaccaagagggcgctggtccccttcctgttagatgaggactatgagaaggttctaggcttcgtggattcggatcgggagaatggcgagaatgcatggactgtgccctcctcccgaggtcaggccctgccctccctgctaatgtcccaaagccactcccaagagtacctgtgtctgtgtccagccaggaagacaagctgcctcaactacctcccctgcctcagttaccagacca

SEQ ID NO: 108040 - DNA, 273 bp, Glycine max
tccgtgcgctgagctgggtggctcggctgccgctaagatgtcagtgctgaggccgatggacaagctgcccgacctaaacagggctaccatcttgctggtgagcacggaggatgcgcttctgcagcagctggcggagtcggtgctcaaaatcgactgtgcgaccgagctgagtgtccacttggccaactccctgcctttgccctccaatgcgaatcggccccgaattgacctgattgtgtttgtgattaaccttcacagcaaatacagcctcca

SEQ ID NO: 108041 - DNA, 256 bp, Glycine max
  unsure (1)..(256): unsure at all n locations
cccaacgagatgctgggatgctgagatgaagacctgcttccttcttctcgggtctgctggctcctcttgctctctgagtcaggtcttctgcaaaccagtgtacagggaagaccaatttccatgtagcaatgttttcacactttctagaactttcagtcaagtaagtagtttttgatggactgttctactctttaatgnggcaagggaccaaaaaagcaggcatacttgaacttctctagaaaagtataaatgattt

SEQ ID NO: 108042 - DNA, 259 bp, Glycine max
gtgattgatgactggaggaaccgtttaaaagcagcagcgattgttggatttgccagacagcgcagggggagaaaccatagcaaatcgtcttgattgtcctctccccagtgaccaagagctagagacccggctgaaattgtccttctctgggtgcttctctttggatcagacaatctttactcttctagacttcctgccaccctgactgctgacttacagcagctatgaggtcccgccttctgctgcctgtgccccattt

SEQ ID NO: 108043 - DNA, 253 bp, Glycine max
atggcggcgtcgaaggtgaagcaggacatgcccccaccagggggctacggccccatcgactacaagcggaacctgccccgccggggactgtcgggatacagcatgtttgctttgggcatcggggccttgatctttggctactggagaataatgaggtggaaccgggagcgtaggcgcctgctgatcgaggacttggaggccaggatcgccctcatgccactcctccaggcagattggaaccgtagaccctgca

SEQ ID NO: 108044 - DNA, 236 bp, Glycine max
aaaaatgcttgttgtgaaagacacggatacccagtatgcttaatgtgaaaagaaaatatgttctgttttgtaaaggaactttcaagtattgttgtaaatacttggacagaggttgctgaacttaaaaaaaattaatttattattataatgacctaatttataatctgaagattacattttgttgtctatatatcaaagaaaaaggtgtctagctgtttcatcaagaaaattatatc

SEQ ID NO: 108045 - DNA, 158 bp, Glycine max
gagcctgacagcctgcatgaggagagtgcctaaaagggaagtgacattgggtctactctggatgcaactatttttgttccatgcgaccacctcggctcttgctatgagcggtactgcggtagcctgccccatggtggaggggaggtccaatgtctcct

SEQ ID NO: 108046 - DNA, 248 bp, Glycine max
ccagcatggattacttgacaaagagacactgtgcagagggtgaccacagactgtaactccccacttcaacacaaagggtgtcgttcttttccaacaaaatagccaccccttctccttcattgcttttgacttttcaatgggtgtcctaggaaccttctagaaagaaatggacttgcatcctgtaaatatattaactgttaaaaagaaaacattgaaaatgtgtttgggcaacgtcatcccctggcagg

SEQ ID NO: 108047 - DNA, 248 bp, Glycine max
tgaggtacttagaaagggccaagctgggcaggatgtgtaaggacagttttatcagctagcagactgcgtgtgggctggggctgttctggcgttgggagggtcgctgggagtgtccaactttggggaagaagcagatgcaggtgccttcagtgtccagtgtggaggaacactcactttgacttgcagttgggctttgaacatcagtatcaaagtatcgggtgctgcacctctcaaggctggtttttttt

SEQ ID NO: 108048 - DNA, 247 bp, Glycine max
ctgaacataggaaggaagaggagaagagaaaatgcctttcgtattctatcaggaaagtaaaaattcccccaaaaaccaaaaggattttgcattaagacagcagtattgcagacatgtaatgagtggatgaggggaatgagcagttcgttcactctaatcatctgtgtataaggcagttatttcagtgggctggacccgttcaccctgactggtaaatgcactcccaaggtgggaagtgtcctttgag

SEQ ID NO: 108049 - DNA, 251 bp, Glycine max
gcgcgttcctagcacagggctcgctgttgaacatgcgatctttcctgggagtcagtgcaccgcatgcagcacctcatggcccacacgtgaccgcaccgccacctccgcagctgcctgtccaggttgccacaggggtgctccatggtgagaaggcctcggcgagtagcagtcctgcgctttaagagagagacctagtcaccaggccggattcgcccccacagcagctaaagtcgcccttccagccggtgcgc

SEQ ID NO: 108050 - DNA, 173 bp, Glycine max
gagcggacgccatggcggccgacatcgagcaggtttttaggtctttcgtggtcagtaaattccgggaaataggacaggagctttccagtggaaggagtgaaggccagctgaatggtgaaacgaatgcacccattgaagggaaccaggcaggtgacacagctgcctctgcaagg

SEQ ID NO: 108051 - DNA, 248 bp, Glycine max
ctgttgtatgtggtagcgaagcctagacagatcggagtcccaaactggctttctgtgcagatagaggattacatgcgggggcggtgctctcaattggtgacatttgctcctcgatatgtggctcggggatgatctcatgcgactcaggattctcggggggcatcgtggtttgaaacactagaggggtcttcgtgtacgtggccagcttaccaggaccactggtcgtaagtgtaaaactgttgagtgtg

SEQ ID NO: 108052 - DNA, 248 bp, Glycine max
  unsure (1)..(248): unsure at all n locations
ggcaggttggcatcctgagtgatgtagacctggccgagagctggatcctcacctgtgaggatctgaaagttctgccaaattctgactctgntgaaatcctgaattccgtcctgggccctggtgcctctgacccctgctcccctatgtggtcccgcgctgtctgtgactgcggcttctctgaggttctaccttccgattcccgggactcccctcctggtagtggctctggatcctctatcgttgcggcc

SEQ ID NO: 108053 - DNA, 246 bp, Glycine max
gtttcttagtgtctccttttattataggcattatgtgtactttagtgattgtagaacttgaattgctctagaatgtgaattaatttgtgttttattccttttgagttgctttgtaaagagtctcctatgaggaattctcttttcaaaatttaatattgtgtggtttcttccctggctttagtaaaagattaattagaggacttactctgctagtgtctaacttaaactctaagtttatcttttaca

SEQ ID NO: 108054 - DNA, 110 bp, Glycine max
gagcccctggcttgctaagctcccctctgcgagggtgggtccaacctatcttgttacctctggcagtgcatgataattgcgtctctatctctgtcaggctctatctcgca

SEQ ID NO: 108055 - DNA, 176 bp, Glycine max
ggaacatgcctaatgggaaaaagcctgaagaacttgacatgagtgaatcatttggcttgtcagttagaagaaaacatgatttgtatttgattcctagcatctgtctctcatttggtaattaaaaccattgtgtagaaactcttgtttatgctctgattcattggatgctactactt

SEQ ID NO: 108056 - DNA, 249 bp, Glycine max
ggctctggggtggagccacagatccttgtacagtacttagtattacgaaaggatctatctcaggctcctttttcctggcccacgggcgcattggtagcgcaggcttgtcacgccgccacagcagccttgcaccttcatcgagaccatccgcacacagcagcttatctccgggagctggggcgcatgctcaaggtggttctcgaggctgccgatgagaccaccttgaaggagctggctgagaccctgcag

SEQ ID NO: 108057 - DNA, 249 bp, Glycine max
ccttacataatttgtaaagaaaaacaagcagacttggaaaaaaatgactaccattgtccaacaccattttagatcaacatgaaccttgtcagtgcccctggttttcctcggtctttggtggtttaactgtctccatagtaagaatgcagcactgaaaatcatctcagaagaattgcaccagatctaaactttctcttactgatagagcagagaagggggaacagagtggccaaggtttgactgagcaga

SEQ ID NO: 108058 - DNA, 144 bp, Glycine max
ccctcctataagttcctctgcagagcgtgtgagcgtttgataagagaaactgcgttttctagttcagtctgctttctcttccatcaacacatggactgattttgcattgtttatctcagttgaataataaagggttgttaattg

SEQ ID NO: 108059 - DNA, 113 bp, Glycine max
aatgcatagaaaatatgtaaatttggatgccaaaaagctccaaattaaagcctttaaaagaacatagagtttatataaacacaaagtatgcattaaagtctatttctaccagt

SEQ ID NO: 108060 - DNA, 205 bp, Glycine max
gtggctttgacagcccacttgtcaatctaggctaattatgtgctgtgtttcagaatagtcattagttactatttagataagagactggacgggaatacttcatgctaacaaaccattatgaggtctgcctgcaagtgttcatgtacttgatagccttgtatctgaggaaagtgttcttctcatgaagttacttgaggcccttatg

SEQ ID NO: 108061 - DNA, 152 bp, Glycine max
gtggaatcatcagtgaacccctcaacaagagcctgcgtcgctcccgcccactctctcactactcctcctttggtagcagtggtggcgccggaagcatgatgggacgggagtctgctgacaaggctgccgcagccgcagcctccctattggcc

SEQ ID NO: 108062 - DNA, 117 bp, Glycine max
cacgattgaggtgtgagcaataactctgttacggaagaatacagtgagagtgaaaatgctcgtgcaaactcaattcctctcttgttgggctcaacacttgtctcccgggctaaccca

SEQ ID NO: 108063 - DNA, 252 bp, Glycine max
gcaagaaggaatgcaggagtcttacagagcacactgattccaagggcatagcatggcattgggggtggggatgtttgttcatctttattctggtttggttttgattcctcagagcagagagtatagtttgtaaccatcatggcacagacatttctcactgggagaggagaggcggtcacaacacttaccggggggctgggaatatacctcagtggtagaatgtgtgtttagcatgcataaggcccatggttc

SEQ ID NO: 108064 - DNA, 131 bp, Glycine max
aatcaaccatggcaatggcgacacaagcgtctctcttaacaccacacatctccccactcaaagccagtgaccgcgatcagtgccatggaagcaaaactcaagcatatccttctccatcacgaagcccctca

SEQ ID NO: 108065 - DNA, 173 bp, Glycine max
gttgtcacataccatgtggatgagttatggcattagaagattcacttacaagagttgtccaggagcttggttcgattgagctaaactctaactgtatgtgccctcttgggcatgactttaggcactcagaggcctgatcagagcaggaactttaatgtcaagggcaatgattt

SEQ ID NO: 108066 - DNA, 209 bp, Glycine max
attcccgaatagcagcatgcaaagcaacgcgtgtgtccgaccagagcatgagtgaaggagataaggacccttgttcgtccagtccttattctattatctcctcgctccctcacgcaaccgtcaattcctgaaccctaagcttccgccattgctgtcgattcgcgaaattcgaggacatataagcgccactacttaataggagacgtttt

SEQ ID NO: 108067 - DNA, 114 bp, Glycine max
catttgttgttgcagagattctctgttagcagtgtacagtacacagattgggtagaagagtgattgaattggggttcttcattattctttctgtagagttttttcttccgtaaa

SEQ ID NO: 108068 - DNA, 197 bp, Glycine max
tgttgaactcccattttactatgatcctatttgatactttatgccatgtaaatccctgatcaagttagcaatggatttaggatgataaattaatgtgtaaatttgcaaaaattatacaaattaatgtcaaggctatctgtcatgaaaacatacattcaaaaatgaaatctacacatgttacaaattccccaaagatt

SEQ ID NO: 108069 - DNA, 203 bp, Glycine max
gggcaacacaacaccttcatagcaccaactcatctttgtatgcgttgagaatgttccaatttccagatgaaacttattccttactctgtcttctcttctcaagtgatgtctcttcatacaaacaatactggtcatacagcatggaataacgtcctagatgcaaattcacagtgtgcttcttcatcataatttccctctccctt

SEQ ID NO: 108070 - DNA, 128 bp, Glycine max
aataaagctgtctcgttccacaggtgttcccatttatccaatagcatcacgaacacagagattagaattcatgagaaaaggggatcaaagcacagaagaataatagaagtatcacaatggcaagccaa

SEQ ID NO: 108071 - DNA, 204 bp, Glycine max
gttactgtgttgaattactattgaagtaaaatatagatggagcaaattttcaaaatgaaaaatgagagtaaaacactgaagaaaactataaattgattgtgcataaacccaaaagaccacaggtaagttatcttcaaaaaagaccagaagagggacataagcatggctaaaatgtgaagaagtgaggtgaccaaatgcaaaaga

SEQ ID NO: 108072 - DNA, 107 bp, Glycine max
gagcttggacgggttttggtgaataggctaagaaacaataatgaaccatacgttgcccttcatttgagatatgatagagatctgctagagctttactaggctgcagt

SEQ ID NO: 108073 - DNA, 250 bp, Glycine max
acggttatcgtggaaatgtttctgatggttatggtggtggcaactatagtcgaaatgatgggggtggttatggatatggtgcaggcagttatggatcaggcggcaattatggggacagtggccctggcaataactactcgggaggctatagtggtagtaacagtggacattttggtgatgccggtagtgtaggcaatcatgaaagctctactggttttgccggtaatggatatgatggaagtgtcgtgga

SEQ ID NO: 108074 - DNA, 247 bp, Glycine max
atttaactcctgattcagacggattaccttttactcgtaactcaatcgattcctctctagggcagcatttacagcaagataatgagtattcaacagaacattcatccacaccagcattttgggaagatatcattgtggatgatgtactatacatagactctatacagacaatagttcagcacaggcatcaattagtcgtcgtcatctgggctcgattctagttgtctaactcagaatgtaagccact

SEQ ID NO: 108075 - DNA, 228 bp, Glycine max
atcgtgaatgcgtgtaaaaggaaaatagagaaattagcgtcaaaatgttgggagtgttcagcagctccatagtgtcgccgccggacgagctcgtggccgccggcagccgtactccgtcgccgaagatacggcggcggctctgcggaaacagttcgaagcgaataacccctccgcctaggtcgtagaggtcggagagcatgtccagcgcgcttatacccactacaacga

SEQ ID NO: 108076 - DNA, 219 bp, Glycine max
gcgagttcggctgtagagggtgggtcgccgccgcctcctccggcggagagcgagaaagagagcggagcctccgtggagatgcatccgttggagtcgaaggtgaaggagatagaggagcaaaagctgaggatgaagctggcgaggaagataaggtttacgcggaaaaggcttcttcggaaacgcagttcagatagagggtagatggccgactctaagagg

SEQ ID NO: 108077 - DNA, 271 bp, Glycine max
gcaaaatggtactctctgttgataactctgcctcaaggaagaaaaaagttgctgcttatcgctattttgtgcgcaaatccagcacaccaacaccatctgaggtgcaattaagccctaaatgattgtaggaaccatatatgatctttatatgctttgaagttaattataagtcttaactctcttcggttatgaacttatgattctgaactttgtttgagccaacttaaaggtacttagtactattgtattagtgtaatgtaaaaaaatgagg

SEQ ID NO: 108078 - DNA, 166 bp, Glycine max
atggctttaggagggcagtgcaaagtctgaagatactccttctgagtcgagcatgaatggggaagaagctgacaaagttctgggtcgtcaatttcacccgtagcgcaacctatgatactgatgatagaggccttcaccttcatataccagaggctcgtgagataca

SEQ ID NO: 108079 - DNA, 222 bp, Glycine max
gcttaattaggattccctacgagcaattcccagcggttgcttccgtctgcaaaggctggaacacggagattcactcgccggactttcaccggcgtagaagaaccaccaaacaagcccaggaaatcctcgtcacggttcaatccaatatagactccgaaaaaactcgaagcgagaatcacaattagtcatctatgacaaaggtccttccggggactggattcg

SEQ ID NO: 108080 - DNA, 260 bp, Glycine max
acaagtgaggtgttggagagctaaagcttcaagcagaaatggcccttagaaataatgataaaaactatatgtagtttcaaaacttcaaaattatgtagtatgtattatgttgcactctggtgttttgtgtctaaacaaacacccttagaataaagtggtcatttcttgcccttgagcaagttcaagtgttttggacttgtgatgggtgtgttaaaaaaaaataaaaaaaagggtgccctcctacaaatgagctcttcgac

SEQ ID NO: 108081 - DNA, 133 bp, Glycine max
gttgacgatcattcctgagaatgttacgaatgcagtgcagtcctcggatgctttcgtaagtctaggccctgattgaatgcagccaagaagtgttgtcgttgctcagctgctggctcttggggccaacgtgact

SEQ ID NO: 108082 - DNA, 251 bp, Glycine max
  unsure (1)..(251): unsure at all n locations
tgctgattttacatggacttttgtacacataagcattcatattcatatgagcttagaaaggaagcaggtggaaacacgaaaaaaagcagaatatccatgtgactaaacataactcggtttttgtgatacaggacattctgtaaatgatgatatcttgactantctaggagctactacagtagacgaaaatccatccagacacatattagaagtgcaagaaggcaataataaaacttacttaggaatgagtt

SEQ ID NO: 108083 - DNA, 103 bp, Glycine max
tagtatggccgcagtttagtgagctcgactacccgaacgattattctctggactgataggtaaaggcgtaataggattcaatagattgagtagaattagacgt

SEQ ID NO: 108084 - DNA, 272 bp, Glycine max
  unsure (1)..(272): unsure at all n locations
ggactcgagctcaacactgagatagggtaaagaacttgcggatgcgagcacatggtggagtgtcgagcctagcggtgaggctggggatagggtggcgcctttctctgtgcaattagcgtgccctaggcctggcacatgggagacgaagaagaggaggaggtgctcggttcgggtcaatcagcctccaccaacagcttgccacctcccgctgatagcacactcctcaaatcggancatctcgacatacatgctcgagatgctgtatcacacgc

SEQ ID NO: 108085 - DNA, 258 bp, Glycine max
cgtttcttcattttaagattctcaccattataatcctttctattattgtgctcagaattggtagatgttgacctcaactgcattgagttttttatttccatgttgataaatacttgaacaattttattgtatcattttaaaaagaaattaacttggtgtttttatagggtcgtaagcatatatttcctgtaaatgttgtgggtttttaaagttccattacgattgaagtccaataatgtggatttttttcataaatta

SEQ ID NO: 108086 - DNA, 203 bp, Glycine max
gcagcaaacactgatcctattgcttttagcaaacctggcttgctcttcaatttagcgttgtttatctacatttagataagactagtatgtgaatgcaagtacccaccaactaggaataatattgaaaagacactggaaaatgattcctttgttcttagagataaaaaaaaaaaaaaaaaaaaggggggcccccagaatgtggc

SEQ ID NO: 108087 - DNA, 112 bp, Glycine max
cctatattctacgcatatggggagtctaaaactacagtttttgaagagacaatgacagtttcagggccacttataacctcctttgttatgtttatgcacgttccattgttca

SEQ ID NO: 108088 - DNA, 255 bp, Glycine max
aattacgatgctaccattatacttcgttttctctctcatgctcagcttctcattttctcagtcatcatcatcgcagcagcaagatgtcgtagcaaacattcggtaaaaccgatttggaaagcggttctacggatctgtatccgatgatgctcgagagctctgaactgcggtcgtcgttcatcagaacagtgtactccatagtcgccatccagtgtgctcgtaaccatcgtcgtcggcgccgtcgtcgtcaccgtc

SEQ ID NO: 108089 - DNA, 254 bp, Glycine max
ggcgaagagcatgtaggatctggggtaccgtgatctcaattccaggctaagtatgcattttatggtattcgtttagagcattacatcttcattcttctccatcttcctccatgttattccacttactttgtctccttgtgtgtttgtgtctctgtcgtgacagtgagtaactacgccttctattgttgggatctcacccattaagcactcttgatgtaatgatggttagtaggctatcagtatgatgtcggtat

SEQ ID NO: 108090 - DNA, 164 bp, Glycine max
gaatatgaataccagaggggaatcctccctactcacgacgtaattacgtgatcctctgggcatgcccatccacgattactatgtatatggacgctcctgttgctttcaactgcctgtactgcgattcataccgttctcactagcgtcagatgaaaggccagtct

SEQ ID NO: 108091 - DNA, 103 bp, Glycine max
gaagatggccagagtgcgctagggcgagagagagagaacatctgctcggtattcgcaaacccaaatttcggaaagatcggcgatggcagcctccaaggatcgc

SEQ ID NO: 108092 - DNA, 229 bp, Glycine max
gttcatttctattatgtgttttctaaatcaaatcatttagcattttaatgtttccaaatatgtcctaatggttatagttatggaggagcaattcatacttagagttccacctaatgtggcagagcggatagagcgtcttcttgatgaaaacaatgcttcttcatctgaagacaagtcactagatttgtcatttagagaggatggaagaagtggtacgtttatgattggg

SEQ ID NO: 108093 - DNA, 264 bp, Glycine max
cagccacattgacaaggcaaacaaggaaccttctatatcttcttcctcttcccatgtgataaacatcaaagaaatgagaaaaactttagaacgcagaggccaaggattaacaaaaaatgattctgtaagtgtttccattcgtgagacattcatacagttctgttcaacaaagataatttgtccacaggaacatcgtgctgcattagcagttaagttatatggagttcaagcagcacttttatctgctttaggcaacccttttga

SEQ ID NO: 108094 - DNA, 110 bp, Glycine max
attcccggctcgtccatcgcgctactctacgtatgcctctacgatcttctactttcactgatacgtagccatgttgagatccctgaattcttaaagaataaggggcgctc

SEQ ID NO: 108095 - DNA, 109 bp, Glycine max
aaacattctgttttgtattaatgcataaatatattttgtaatcaaattgatattttgtgaactgaagctaagatgaaaaagaacctgaacaggtcacttttttccgtgt

SEQ ID NO: 108096 - DNA, 199 bp, Glycine max
caagtttctcttgtgtttgatgtatttggattctagtcgtccaactttgtctgtgttgttgttgtgctgtgtttgttgtctgtgaaagtgtgtaggatgctatgaacatccgagtgctttatggttgggcgcttaattctaaataaacaaccaatgtcgttgtcgtttgctaataaaattaatctgtgatgattgtgtt

SEQ ID NO: 108097 - DNA, 253 bp, Glycine max
ctcagggtcaacatatgatggttccaatgctaggaccggagtaggtatcaagtttattaaccctcctgttgtaacgtatgtcttccacgctagttaccaggcgctcacggcatattgaatgtctttttatgttatgtgaatactgacataggagatggttcttgtgtccttttcttttaaaaaagaaagtacggtttgtatataatctttggagtcgaattattatttgatcgttattctattgtaaatccta

SEQ ID NO: 108098 - DNA, 217 bp, Glycine max
  unsure (1)..(217): unsure at all n locations
agatattgttggtggctgagagtgagggtggaaatggttctctagcagctggttgtccattgagtccatcctcaggtgacgcctctagtagtccatctgaagcatcgactcctcacatttagatgtgttnctctttctgtgttaaattgcctcatgatgagagagttgtgcactttacgtataagtgttagattaggctttttgttgtaggtttata

SEQ ID NO: 108099 - DNA, 148 bp, Glycine max
  unsure (1)..(148): unsure at all n locations
ctcgaggttcctccgaatcagctctacgcagctgctgtactngtgattttgagaagggtgnttgttntntgcattcggttgttcaagcgtgccaagtgaaatagtgttgtgttgggtgggctcagagggagtggaaaaagtgttatct

SEQ ID NO: 108100 - DNA, 257 bp, Glycine max
aatagaacttgttcaaataaataataaaatcatctcgatcatacccgcttggtctggtccgatcggccaggccgaacggaccagtacaaccgggtactagtttcactattggatcgctcatgcatgtgacccgggatggcccggccaagcccggccaattttgtgaaaacccggtgacccggctggtttctacaacccagactgggatgtgcacattacaaaaataatgggagtgcagaatacaataattggggtgc

SEQ ID NO: 108101 - DNA, 149 bp, Glycine max
agttctggtgtggtgtacttggtcagatggggatttaattttgagggctgtatgcatgcgactgattagtgtagattaactcctgtgtgcgctgtatttcttaattgatgtacatgggtgcagatgtcgaggcgatgatcagaacttgt

SEQ ID NO: 108102 - DNA, 134 bp, Glycine max
tagaactgatgcaagtgcggctggttcgggctccggatccggatgttcgatccggatcccggcctgcgtgccagaacaacaacaccatagcccctcggcagataagattgttaacagccatcctcctcccggga

SEQ ID NO: 108103 - DNA, 183 bp, Glycine max
aacaagctactgaagataagcgtagaatgtgataacatttcatcaataatggatttgaacatctgtaatctggcaaatatccctaaatactaacaacgaatcaattttctgaggttgtgtccgcggattttatgccaaatggtgcccatctctatatatatattttagccatggaagctatat

SEQ ID NO: 108104 - DNA, 269 bp, Glycine max
atgacacaactgagagcttccaatggtttttccgtcttcctccctctccctcctcctctcgatcttacccattcccactctgctacctggtaacctcatcttcagacccaataactggacaatccttaaccaacgcgaattcccattgtacgatgacagaccaagcatcgcatctagtgctctaaaacccacttcacaagacaggatttttagaggggatctgatgctgtaggggcttacttcgctctctctaccaatgcgacgttcag

SEQ ID NO: 108105 - DNA, 259 bp, Glycine max
aaactcttgagcacgccatgcgagtgtgtagaacgtgggattgaatcatctcattgatgccaaaaggtggtgaaaccatcaggggtggcttggattggtgtcttgaagactggaataactatgatcaggaaatttcatggggaagtaattctgctacttttaacttatcatatgaggctgtgtggattgattgtgatgagatgagcagagaaagcattcaaaaaatttctaaaaaaagagcttatactgcaagaacagt

SEQ ID NO: 108106 - DNA, 123 bp, Glycine max
  unsure (1)..(123): unsure at all n locations
cgcacgcagatcctttattcctataatccgtccttcgctctctgcatacgancgactctaagatcatatccgcgacacacaacccagcaggaccttgcgcaacccatccatgacgcttggctc

SEQ ID NO: 108107 - DNA, 259 bp, Glycine max
aagggctgaaccacaaaagtctaatgaggccattacacaacaacagcaattttctagcctttagttatggggttcctctgaaatgatcaccttgtgaagatttggtattcttgacttgctttttttttttttcccgcctgtgggcctggggcatccgaaaccagagtggggcacttcaaccaccagggtttaaccaactgaattgggggaacctccttccagggggacccacccatcaaagcccggcttaatgctaaac

SEQ ID NO: 108108 - DNA, 260 bp, Glycine max
tagtagaaacttgtatcagctgcaaaatcatgttatctgctattgccttctgagtctcagtgtattgttggtctcgtattcacggtccaatgcgtcctcctttagcttttccggtttcagtgtcttataccacctcttttaactccaactctactaagttctactatactcatagagcatcctctgaaggagctcctaatgagtgcgttgatgactcataatttgggccgctgactttacgatgatcctatatatggtcc

SEQ ID NO: 108109 - DNA, 164 bp, Glycine max
ggagttggaggacttggaggtggtagtggtctaggcggtggaattgggggaggcatttacaaaggaattggaattggaggaggcatttacaaaggaattggatttgcaggggttggagttgtcgtagtgcaattggtggggtaggtggtgtcattggtggtttc

SEQ ID NO: 108110 - DNA, 262 bp, Glycine max
gctctattgactgcatataatgtgataaaataacttgcataaaagatgcaacataattgctagagttggcttgtttgatttgtgtccatggaagccatcagaggaaatgggcatcagacttggcttttgggatgaaagaaaaattgaacgtggaagatgaaacttggtgaccagattgctaatttgctactaaagtcaaaactcgacttgatgtatcattgaggcaagtgtatatttagaacttagaaggtacaatgagtca

SEQ ID NO: 108111 - DNA, 242 bp, Glycine max
ctgctgctctcacccaggtttggaatcacgagcttaactcaggacgtaccctggtatcactgtttgagttgtttggtcaaggaattctctccttcattcaggctcctgagatgtatatgttcttgtaacttagggagtatcatattaatttgatggatagaactctggataacccatagaccattatttcgaaaacaaactaaaattcctccatggtatgccaattcatgttgatgtttttg

SEQ ID NO: 108112 - DNA, 254 bp, Glycine max
ccggaacgaaacgcgagtgtagttgtcgcctcggtagaacaagtttaaccgttgtggttgttcgccgtaggtatcctagcatcctctcagccatttccgacaccgtcaggtttccatgcattgaattggttatgattgtttaacaaatatttgagtctcaaaatggtgattctttgctcgttgcactgaactattcagctttcctttgtcaaggtactcttttctaccatcaaagtttccagcaagagttgatt

SEQ ID NO: 108113 - DNA, 257 bp, Glycine max
gcaaagacttcaatgagctacttgctagtggaagtgaaaagatttctgcagtggctggtggtggtgcagcggttgctgttgctgctgcaccagcgggaggagctggtggcggtgctgcacctgctgccgaagcaaaggaagaaaagaaagtagaagagaaggaggaatcatgatgatgatatgggttcagtttgttcgactaaaaggtctgaagtgttttttgtgtttttacatttggagttctatttagtatttta

SEQ ID NO: 108114 - DNA, 164 bp, Glycine max
  unsure (1)..(164): unsure at all n locations
atctctcaaattccccattctagaaccgtggcctcgtgaacgagtttccactcaaaatgacgaagagagagaanaagaacaangctatagtctctcgacctcgtattatcaggagagtatcgggggcatgtgatggggagtccgttcacgaaatcgatggattt

SEQ ID NO: 108115 - DNA, 189 bp, Glycine max
  unsure (1)..(189): unsure at all n locations
tgtgggcaccatcaagctgcaatttgcaactgcgaggagagagatcgcgatggcgttcagggnctacgttaccgtatctttcgacgaataagccgagtgtgcacgcgacgacgtcaacgaggttttgggcatgatcgcaggattgctagctaagttgccagagatggcaagaagggctctgcagaagtc

SEQ ID NO: 108116 - DNA, 269 bp, Glycine max
gcttcatcatcatcagagaatggcggctactgtgtcttctgcttggtcaaagcctggcgcgtaggccctagattccgaggaacacgaagccgagctccttcaacagaacaacgacaacccccacgacaagccactccccgacttcccctcccttgccgccgccgccgccaccaagcccaagaagaagaagggacaaaggagggtttttcgattcgcagtcgcgcgctgatgaatctgacagctgggtttcgaataagagtttcgtgcct

SEQ ID NO: 108117 - DNA, 249 bp, Glycine max
ctctcacctgcctccgattgcaatacttataataataaatgaaaatgaagaaataatcttacggtggttgtgattttgtttgtttgtggtcgcagttggatgattgggtgctttcccgtatttacaacaaaaagggcacgatcgagaaactgaaccaagcagcaattttgctcatagccgaaatatcgaatcctcggagatcgaagccaggaagccggaaattctaaaaaccggaggaggttgtcttcg

SEQ ID NO: 108118 - DNA, 283 bp, Glycine max
aattatttatagacatcatgaaactcatgcaacatctctgtttgctaaggttcagagtgatgatttgccattgcagcggcatcagctaagcatgccaatacgagatagtgagaaatattttaaaggtagctctaagattatgtgcagaagtagggtgggcaggcattgctgagatgcaggaaatcagttgacttgattcatggggaaggaaaggtaaagatggggaaaatatggtcaagaacatgtacttttgtctttatgaaagagttatttgacatctgtt

SEQ ID NO: 108119 - DNA, 111 bp, Glycine max
caataaacaaatatgcattgaggagctattggctaatgtgtcaaagtgaagcaataatcaagtaaactgaagaagtaggtaagaagacaaagaagtatgagagacagtgag

SEQ ID NO: 108120 - DNA, 245 bp, Glycine max
  unsure (1)..(245): unsure at all n locations
ctttcttgttttctctctcaccctcatatccatcatcttccacacaacatacgcaagagnnnnnncgnnnngatnnnanacanaatcnatgacgantcaattcgcgaanaacctcnnnnanntgttggggctgggtttagctggaatgtttctaatcaccagtaagctcaagaagtctgtcagtaatgattgtggggctttcattgagaagcttcagctgcttcctcctccccagcctgctcctc

SEQ ID NO: 108121 - DNA, 252 bp, Glycine max
caaaccttcaacaaaagcacaagcagcggtggctctgacaagtggacggatgaaggaagcaatatcagctgaattgtcaagaatagaagctgagaattctgccaggctggctgaggcaggagagatctggtctgagttgcttagccgaggagagatacagagattttgggatgaaaagcttattgaagagaaaaatcgtggttttgatgttgagaggctttatcacgtggaagtaaagaatttggaagaaga

SEQ ID NO: 108122 - DNA, 245 bp, Glycine max
tatctgagctttttactactactactaccctttctttcttcatctaatttctaccacacttttctctttgtttttcccttggagtcttcttcttgaccttgtaagaccttttcttgaccttgtaagacctcacaccctatctcttctctttgtttttgcttttgtggaagaccctgtatcactatccactgatatagagtttgatctccttctttccccgttaccacccaactcatactttcctt

SEQ ID NO: 108123 - DNA, 128 bp, Glycine max
agctcgtctcctacgtctaagttctcatatggttccttcttctaatatttttgtattttctagaagagcttggttgatctttcttgttatggcctatgggatgaatgaacgatataatgcgtttctgt

SEQ ID NO: 108124 - DNA, 155 bp, Glycine max
cgagcaatttatggttttcgcaaccctcttcccttgttcgcaactagcctaatcaaaaccgtcacaaacgattacacactcaagctgactagagaaatgctcatccattcctcggtgagaagagagagaggaacggtttgctgaccgggaaggag

SEQ ID NO: 108125 - DNA, 268 bp, Glycine max
gttggtagagatgacaagatttctaatcaaccggctgataaaaaaggtagagataagaatatttctcatcaaccggctgatacaaaaggagctggcaaggacacaaaaactaaagcaaaagtttcatccaaaggaagaaaaggaaaggtgacatcaaagaatgttggcaatatttgtgaggcgtgtggagaggagtttgattcaaggaataaattacataaacatcttggcgattctgggcatgcgacaataaaaggtcgataaagga

SEQ ID NO: 108126 - DNA, 261 bp, Glycine max
gatttatagttctgttttaaggcatattgtttcgttcttattcaatgttaattgttagtgagacatcaattttactttataatgtcaaatacatgtatgtattcaaccttgaatgagatttttttatcaccttgttttgttcaaaatgtttaggttgacagctactttcaagcatatcagctaagagaacactgactgatttttatttttatttttattttaatttcgagtcacattttgaaatgcgagacctttgtcaca

SEQ ID NO: 108127 - DNA, 154 bp, Glycine max
aagagcactggcgcagctaccctgtggcttctcttctcttctcttctctgtcgtgagtcagcatggtgacggttagtgtgctgaacgatgctctgcagagcatgtacaatgctgagaaaaggggacagcgccaagtcatcattaggccatcctc

SEQ ID NO: 108128 - DNA, 148 bp, Glycine max
cttagcagcacatcttagatgtactgctgctgtctttattagcagtttgttcgtgtgatcttgagtgtagttgtgctgatccctacataagtgcaaatagaacttgtgctgcacataataccatatcgtactctcatactcaaaataa

SEQ ID NO: 108129 - DNA, 146 bp, Glycine max
catccctctcagatttggagaataaaggggcaagtatgattttaaaggaggacaagttgaatgcagttttcggggagtttccatatttgtttgctagtgtaggtgacctaacagtaggtgatgttgaagacctgctaaataattac

SEQ ID NO: 108130 - DNA, 112 bp, Glycine max
agtgtgttgttgtaactgcgtacttcttctcatgttgtgctgtgtatgtgttggcactgtctctgaactgaaaatgtcttgctgcggtagtaactgtggcagcggctgctcc

SEQ ID NO: 108131 - DNA, 206 bp, Glycine max
cacagatcatagaactggcttgagcagaatccatggcagaacaccaagctgcactggatgctctgggcgggtacttgcacggtgtgcggctgtcatgggttgcaggacgtgactactagctggcaatgctacgcgccactacacactgcttcacagaggcctgctgctacgatgggacggaatcgcgctgtcgacgactatgccga

SEQ ID NO: 108132 - DNA, 253 bp, Glycine max
gtggccccaacccagaattaagtgcatgttacatttgcattttgcaatgcttattggagattaggttaatggtggacaagcccaacttgcaaatcaaaaccaacttgttgatcattatgcttccaaacaccgaaggagaaaccccctgcagagaccagttagttatatttagagcaaatggtacaaaaagtccacaaagaaaaaatttctctctaggtgtgccttcatgcttttaatgtaattccctgcttgc

SEQ ID NO: 108133 - DNA, 169 bp, Glycine max
aaccaatcccatatgaggagttgaagaagcttggcatcccccctcctcctgagggaagatacatgtcacgctttcaggtgccatcgcctcctaggagagaaaggaacctttcagacagggaagaagactctcatagtcacaggaggggatctaatgacaggaacaggac

SEQ ID NO: 108134 - DNA, 263 bp, Glycine max
caaaagcttccctccttgccattgcagcctcggtcgcgccgctcattgccactacaaccaccgacgcgtcattccttcacctttctatcttcttcaacatctttctatcttcttctcaagagaaacttttctctccaaaacaaaaagcgtgtccaaaagcttccctccttgccattgcagcctcggtcgcgctgctcattgccactacagccaccgacgcatcattccttcccacttgcggcttgcaccgttctttcccacca

SEQ ID NO: 108135 - DNA, 172 bp, Glycine max
ggagataataattggtcctttcaaggtagcatgggcaatccttggacaagcttaaagacaaagtcttaaatggctggtccaaggattgcccatgctaccttgaaaggtccgacgtgctggttatcggagatgaataattcggatataacactatggcttagactgctggtag

SEQ ID NO: 108136 - DNA, 191 bp, Glycine max
gtgtgagactcctgaatccactgctgatagtctttaccatgaagtctggatcattgccatgatttggactaggcaagcccagatatgattcagcttctgctgaagaaaaagataactcatccgattccaagccctttcgtttggactttggcgagataccctatgtagcgtctttgaacccagttccagac

SEQ ID NO: 108137 - DNA, 262 bp, Glycine max
ggataagagatatgcgccagagttgaagcgagaaggaagggtccgcgcgccatggctggcatcaccacctcccccttcaaactctctcactttccgactctcttctcttcttctgattccaaactcttcggccttcccctctccaatccctattccctcaaattcgacccttcttctctctccactacctctctctcctacgtcaaagcccgctactacggcggcggcggcggccctccccgctcccccaacgactcccgct

SEQ ID NO: 108138 - DNA, 262 bp, Glycine max
attttgtgtatgccagctttaaactttgttttttttagggcaattggtggattgctgtgatgaagaaccattcagaaaaaaatgtgggtgatgaaagaatacaaaagtgcagtcaccttggactaagaccattgttgtggtgatattcttggaagagatggccaacctgcaactacattgctgaaatgtaatgacaaggggcaattctgcacactgtatggctgtgtatacagattctctactttcactcccttctgatggc

SEQ ID NO: 108139 - DNA, 254 bp, Glycine max
aaaatatagtgacatacttgcttgttttatttgtttgtagagacatactggtgggttactcaaatcaagtaatgaaatcagggactttgctgtttgagttactatcagaagctcttggtctgaactcaacctacttaagagatatcggttgcactgtgggacaatttgcttttggccattactatccttacctgtcctgaatcagaattaactttgggaacgatagtaatggccaaaagcaaattgtccactag

SEQ ID NO: 108140 - DNA, 118 bp, Glycine max
cacgagcaatgcttgattgtcgggtgattgcgggtcgggtcggatcggattcggatgaggtggaaaaagacgacggagggtttgattcggtgatggcgagtggagatagtggggtcta

SEQ ID NO: 108141 - DNA, 265 bp, Glycine max
gttctagatcgcgagcggccgcccgcgaactttctaaagattcttgctgagaagaagcagctgaagcccctcattgagaaggccaagcagaaaacaagcagccctcggtgaagaatgttatacaaccttatgcgtggatttttttccccagatatgagtatgcccatatgtatcacgttgcacttaattattatttttagcattctcttaagtactgatgcacacaagcttcttctgatccaaggatataactctaccctctttg

SEQ ID NO: 108142 - DNA, 252 bp, Glycine max
taaattactagtattaactaacatggttgtcttcttgctataatcgctttaaattttgtctgttttctttctcatatgtgtttgttttcatttgatgggttacaaaaattgcaggctgctaggaaaacagcagagaatgctataaaccttaaacgagtggatgaccaggttaacatagcagtaatagctgcgagcaaggctgccactgctgctagagttgctgctgtgaaagctgttcagaacaggatggat

SEQ ID NO: 108143 - DNA, 256 bp, Glycine max
ctcactgcaaaacccaaagctcagcctattccctaacgaaaataatgtcgagagacgaaaacgcaaacggttctcagccggaaagcgacgacgacgacgaagctccggcacggagatattctaggaaatcgcgagaaaattcggatgtagattctgaacccgatagaaagcacatcaattcgcggagaggaacctccgattccgacgacggggataggcgccgccggagggagaggaaatcgcggcggcactactg

SEQ ID NO: 108144 - DNA, 260 bp, Glycine max
gaactcaccatctttgtctgtgatccagtatcaatcatctttgggatgctcaatcccaacaccaactgtgctgctgatgcaggacagaaggcttgcattctaattctctttttctctgcaatcttaactgcctatccaatgttctgatcagcaaggatacatgtaatcttctcgtttctaatctatttacgcattcgattatctccttaactatctccttcataatcatccaaggttgcttcagatgatttacctggctt

SEQ ID NO: 108145 - DNA, 239 bp, Glycine max
cggtggcaatcaatgaacaacgccaattctgaaacttcttctccttcttcttcttcttttgtttctcttgtgtacttctacttcttctgaacatggaactgttgtctctgagactcaccccttcacgttcgagtcggatttcagcgtttcgtggagtttttactgatggcccaaggtatgttgcattccagcggaggaagaagaggagggcgtgcttcgacgcgcctaggcttgcggtg

SEQ ID NO: 108146 - DNA, 204 bp, Glycine max
agagtttccattgcatgcaaagcaaatacgcattatattactagttataatttgtcgtgtcgtatgcttctttctttgattaatgatgactagctttaaggttgcatgtgtggttgcgatgatgcccaggtttcgccccataattgtaccccccatggcacaggccgcaatcacgtgcgggcatgtctccggcgacgtgtctcc

SEQ ID NO: 108147 - DNA, 272 bp, Glycine max
cataaacttctcaggggagggcagagacaccatgcttgcagagaatgatgacatgcctattggttggccatttgggcttggcttcttgaacatgatgagacttagagttggggaatccctcccagcagcttcaatggccccttaccaattgcacgtgccatccaccagtttctcttcattttcatcctctaaccttgatactgagtcaacagcatcgttcttccaagacaacagtgtatcccttgcacagctaattggaattagaccaggtg

SEQ ID NO: 108148 - DNA, 181 bp, Glycine max
  unsure (1)..(181): unsure at all n locations
cttcgttgaaccttccaaatcataaacctttgcctctcttacctcgcaaatttcttctctttcatacaagttccttctttttattggtattattaccatcatcaatctccaaagttttccatcaaattttcacgcgattagtttcaattcagcacatcagtgttaagggaatgnttcattc

SEQ ID NO: 108149 - DNA, 287 bp, Glycine max
accgaataggtctccttcagaatttctcaaacaaatggcagtgccaagagcgcacaagcttgttgagaaatctgagcgttgctccagcaacaacgagaacaacctcgtctcttcccctctcattccttgacttgcctctagcaggtcctatttatgtgagacgccaattcttctatcactttgcacaccccacacaccatttctgtcaaaccacactccccactctcaaacactcactctctctcactctctctcacttttttcctctcgctggcaacctcctctgt

SEQ ID NO: 108150 - DNA, 224 bp, Glycine max
agagttcagaacctttggaggagtcaatggagaagggtgtggctaacaactctgcagttcaggatgaatcaaaagttcgatcaaagtagacactgatgttcaaatggactcttccattagtcagactttgcaagtaagacatgacacttttcaagcaaatgaggatttgaccctcccatcggatggcgaagcgaataaacatataagtctgctcctcagggcac

SEQ ID NO: 108151 - DNA, 277 bp, Glycine max
atggaatagagatgagataagaactgttgagggttatgttgtcctaaatagaccatgggcttttgttcagtggctggagaaagcagatattgaggaagaatatattctgatggcagaacctgaccacatatttgtaaatcctttgcctaatttggctcatggaaccctgcccgcagcatttccatttttctatatgaactcatatgagaatgtagacataatcaggaaattctatcctgaggaaaagggtcctgttactgatgttgaaccaattggc

SEQ ID NO: 108152 - DNA, 241 bp, Glycine max
cggttcgactcgagtgctgtgcttgcttctgttccttgtagttgaagtcgctccccctcattcttccttttctacttgccactgtttcctattcgtcattgccgcaaatggattccgtagctgcttatgacagctagtgcattatcatcagcacttcgccatcacgcgtatccatcaaggtcatggcgctgtggagttcgttttgtagcatcaccttatcatcagcttctgcttgctttcc

SEQ ID NO: 108153 - DNA, 275 bp, Glycine max
ctcacactgaatggtctctcaccacgatcaccagcctcctccacccaccacccacagctgttgcagctgccacaacttttcttcttacacctgttgcacacctcctccaccctaccacccttctcacacctgttgcacacccccaccaccccaacaccagcagcaccttctgcaagaccttttcatcactcctctctcaaccccaaccacaccttattcccatcccctcccagcaacactacaccaaatcctacacccatcaaaatctcaaactc

SEQ ID NO: 108154 - DNA, 178 bp, Glycine max
aacgccctgttgactcttgtaattattttgtttctcaaatttccctcccaggttgcaactagtggtggggtcggtcatacatgtcagcggagtttaggagtagaagaacgcttgttgccaagagggatgccggaaatgccttgtttggagagctcagccaacacactatccatggaag

SEQ ID NO: 108155 - DNA, 136 bp, Glycine max
agcaaatattgtataaataaattccgaaagcgaaaaaataattaacaggttaatcgattaatcaatcaccaccgtgtccgttgaatttgatcattcagcgcaactctgcaaatcacatcatcatggtggccgtaac

SEQ ID NO: 108156 - DNA, 280 bp, Glycine max
ggaactgattacgcaagttccagaatccacaaggcctcttttaaggcaaattgaagccatgcaggaaacaaatgccagagaagctgaagcttgggctgctgttgaaagaactcttaattctcgacttcaggaagcagaggctaaagctgcaactgcagaggagagagaacgatctgtgaatgaacgcttatctcagaccttatctcgaattaatgtccttgaggctcagatttcatgtcttagagctgaacagactcagttaagtaggacccttgaaaag

SEQ ID NO: 108157 - DNA, 284 bp, Glycine max
tctcgagccgattcggctcgagatttccacatgggtgtgttctaacatgaagagccaccaagccatcccaagagatgcaaataccttgtggcaactcttaaggaagtattttcccgttgccaaacgtttgcagcacggctttcaacttcaagttttgaggatgagtgcccagtgagcgattttgacgagaaacaagaagtaagtatctctattttttttaaaaaaattatgaaattttgacttttgactgtatcaaagaatgtcttgtggttcatgtaatgtaa

SEQ ID NO: 108158 - DNA, 278 bp, Glycine max
gcacagatggtgtgctctttaacaaaccgtgacgagtgcttagcttgtgggagttgaaatgtttcaaaagtaatgctttcattagaggcgacaaagataaatcacgtgttaatctatagctttttcaaagctttgaacatagttgtcatcaatatcatttgtattcttgcatatccttgtatcagattaattacccagtagtattaataccaagtcagttagaatatgttcatacggaaattgaatccggataatcatattatcaagtccagtcagaa

SEQ ID NO: 108159 - DNA, 282 bp, Glycine max
tttagtttatttgttttatgtttcctgtctgttgagttctagtcgagtcacccccacagcatagatgaacatatttgttattgatttgagctactgatggcttattcacctaagcaatctttcttgtgagtgtagagtttgagaatacttagctcatctaattcttgtcacttttttcggacaggattcaaagaaaccattacttcaccaccatggttcttgattcattgtcatctccgcacaggaggtcccaaaacatattcttcgtgtcatcatcaaaaa

SEQ ID NO: 108160 - DNA, 276 bp, Glycine max
tggtgaggctatcaggctagaaccagaaagcagttttagtagcagtggccgaagaatggttcccagaattgagagcaataagaaaggagctagtaagcggattcatcatcccgccaacttgtctatggagtccttgacaaaagtttctgccagtaatactgataaaggcttgagtgggatgtctaggttggcccctctcccatttgaagcacacaacacatttcaaacaagtcaaccaatgtcaagctcagctgggattgttccttcatctcctga

SEQ ID NO: 108161 - DNA, 299 bp, Glycine max
  unsure (1)..(299): unsure at all n locations
caaaaccccaacctcaaatctctcatttcctccttcacatcacactcntcttctctctctctctcttcatttcttttttatgcgcaccatgattccgccttatctttagctgattcagattcatatgctattggacgcaaacccagattcggactcgaatgcttggatctgctgccggttacatgatcctcagcttgaagcagttggagttactgaactatatatttcaatgatttcatattttaagaccaacctttagcctggatatgtctcttatgggttaataattgtggcgaaat

SEQ ID NO: 108162 - DNA, 297 bp, Glycine max
ggaaaaaggaacagcctgtggagaagaatcagctgcaatttggttctctgaattctgttactgttgagtcaaacaatctgctaaattcatcaaaagcatcttataatgctccaccctctgattctcggaaatgtaatggagtgaaaagtgccattgataattcacctgaagtgtcagggacagttaaagagaatggcagcattacgaatatctcccctaggtccaccagtaccattagtgtaaatgaagttgaagaataaaatgtgaatttttttacattacgttgtgaagatggtc

SEQ ID NO: 108163 - DNA, 294 bp, Glycine max
taccactcaacgcaattgacatactttacagatgcaacacattgaaaaatagaatcgaacttgtcaattccacctacattggttccttctcaagggaacaccgccgaccaacatgaagggctggctccagacccttgtactcgctgcttcattagcaggccgagttgtcgcaaacgaatttaatatacaacaagatgacgctcatcgacaacggtgttcaggcatgtacagccggacagcctggggcggcgatatcgatccctttatcctcacgaaattcgtcaaagctgaaga

SEQ ID NO: 108164 - DNA, 285 bp, Glycine max
aaaattcagtaataaatccaaaatcactgatacttcaattgaatcaaaggatgatgacactggcacgccaaaaccccctgccaagtctaagcatgaaactccaaaaagtggaaaatccaagcaagaaaccctgaagactgccctttcagaagtaagacatctcaaaagtggtggaaagactgatgttaatggtaagagcaaggtgaaatctggttcatcgaagagagaatattctgagaatgagaactcagatgtttgagcaggggaggtacaagatgacaagga

SEQ ID NO: 108165 - DNA, 154 bp, Glycine max
cttcttttttcctttaggtattgtggtgcaataacgaatttatgatgcatgaccacaacaaccccccccccccctctctggtataaactctttatgtgtctattccctggaactctttttcatgagatctgggaatattggattggatcaagga

SEQ ID NO: 108166 - DNA, 298 bp, Glycine max
ggaagctgcttctacaagccaagtattatttggtgtccctttgtttctttctctttctctcagagctaaactaaactaaaccaaaccaaaaaccccttcccatattttttcactttacttttgaagctcctccatctgaagaaagccatgagggagaggaacaaaggtgtggaagatcagtcttacaccaatgacatggattgctactactactccacctctgaattcacaccatgtaagaaacacccttcttcttcttcttcttctgttggtatatgtgcttattgtctcaaggacc

SEQ ID NO: 108167 - DNA, 276 bp, Glycine max
  unsure (1)..(276): unsure at all n locations
tactcacgctctctcaaatactgctgtcttctatcgcgtgggaggtcacacaggctgggaacagcccagtgtttagtggtcttgtggcgggcaggtgatctggtacaaacaggctgctgtacatcttcttccgtgatctactcacctgatccaccggagacatattcgcctctggcactcctctttatatcttactggtcctttgtccagttgagcgattttcaggtgacttctgagctctttgagantacgtaccagggtgcaatatattttgtg

SEQ ID NO: 108168 - DNA, 273 bp, Glycine max
tctttggaggaagaagagaagagtgtttttcttgacattgcttgttgcttcaaaggatgtgaattggaagaggttgaagatatacttcatgctcattatggagactgcatgaaatatcatattggggtgctgattgataaatccctcttaaagcttagtgtgcatggtacaatggtgacattgcatgacttgatagagcatgtggatagatgtattgtacgacacgagataccgagagcgcagtggttacggagtctcttatggttccatgag

SEQ ID NO: 108169 - DNA, 231 bp, Glycine max
cgaagatattgagtgcattgaagaattaggtagctcagaggagggtataggaatgatgcacatggcaagaagctcgaacttagcaaatggagactcgcataaccattccgaatatgcaaggggcaatggaaatggccatcatgttattaatgtgaattccaattccaacagtacccactccaaaacaaatcatggcacatgtcacattatgcgaagtagccataatattat

SEQ ID NO: 108170 - DNA, 270 bp, Glycine max
tacaaaaaaggcatagctagagatagagaatcatggataaccctaaacaaacacttgggagtttcgcagtggtaacactactctttgctggggttattttgctgtacaactggtccacctctttctccaatgaattagtgctatcccagaaggaaccactatgcgagcaatcaaattctaccaccaccaatgttgaagcatatggagatagccttgactatgctttggccatagcctcaatgggaaacaaaacggtgataattgctatag

SEQ ID NO: 108171 - DNA, 278 bp, Glycine max
agctcgagacttcatctccctcttgtagcaatgctgaagatagtgatggattgtccattgatttgaatcacgaagcaaaggaggaaaatgggttttgtagtcatcaagatcaagaatgcagcaaccagaacacccccgtggacgcggtcttatatttggaggaatcattggcaaactttgaggaagagaggttacaaattctagaacagctcaaggtattggaagaaaagctagttatattgaattacgaacccgatcactgctccgatgatgctaaa

SEQ ID NO: 108172 - DNA, 262 bp, Glycine max
atttgcttcttccgatcccatcacgaatgcgaatagcaattccgctactcacaaaaaaccttgtcctattccctattctctttcctgaacccatcacaacaacacaacacaggataaatacgttacattaaaaactagctaaattcctctctctctctcaatctcttcgagggttcggagtactgtacctcccttggagaaaaagaagagccaccgctgcgatgccgaacgagcatttttgaggtaccgctaacatatttgg

SEQ ID NO: 108173 - DNA, 265 bp, Glycine max
ctaccaccgaagagcggatattacaagagagatagatgttttgcttcgtctaatctggcgaatcattcgttctagcgaattttgccgaaaactccaaaacgccccctattagaaaactcgtttaactacaatctctgtctactacagcttagcctctatctctctcaacgtcgcttcaccctgtagcaattgcaatccaaactctctcgcagtatgtctcaagtatccgtagtagggacgtgcatgcgagtccatcatcgataca

SEQ ID NO: 108174 - DNA, 102 bp, Glycine max
tcgcactcggccaatcacagtgccagccgccgtgcgctcgatcgcgcgcgatctctaactgggacgaccaatgggatacatcgaacgccgccttatgccaag

SEQ ID NO: 108175 - DNA, 242 bp, Glycine max
cagctcgaagggagacacaccggaagcctaaccctaacggcgagatggcggagacattggcatcgaaattcgggaaggctaaggacaggggtgactgtgcgtactacttcaagatcggcgcgtgcaagagacgggcaccggagctgcccgggttcagaacaagccgaaacatagacgaacattggttctgtcgaacatgtaccagaggcacgagatgaacatgagcgttatgcacaaccccg

SEQ ID NO: 108176 - DNA, 319 bp, Glycine max
atcgacgcagatatctttgaggacatgaatggactttcctcttcagaaatacagcttatatcgtggacactactgagacgatcgaaatgagacacaacacaatgacaaggacattttggactgatgtatgtaaattcagcaagtgagcaaaatggtattcatcaagaacagacaatcataccatgcaagacaacactttcaacaggctagccacaactgccatggagaagagtttaaccgaagtgggattcgaacacacgtaccgcaaagcattgcagcagagtttttgacttcatggcacactcagaacacaaggcgg

SEQ ID NO: 108177 - DNA, 207 bp, Glycine max
gtactgccagattgagatgtgcttaggtatttttttttcaggttttctcagttggaggaactcgaatcatgcacctcggagactagttgacattagagtatatacattttcttttctcattgtttgtccacaactcaatctggtactctcactcgatctttttctgactataaattataacaaattaccttgttcaattcaatttcc

SEQ ID NO: 108178 - DNA, 115 bp, Glycine max
cacatgattgctgctgtgcaagtggaggtaggataacttctacgcacatcagatgtatttctggagccatgcagtgctttgaggagttcactgaggaaggttgcatctgaactaa

SEQ ID NO: 108179 - DNA, 208 bp, Glycine max
ccgcactccgagactctctccaatcccagcagcagcagcaccttcaaaccctagtcaattcccaatcctccctccacgtggcagaaccccaagcaaagctcctcctcacccttctccaatcttctcccacctcctccttccctcccctcttcacactcctctacacgtggctccgaaaatccccaaaccctaattccaatataatcga

SEQ ID NO: 108180 - DNA, 263 bp, Glycine max
  unsure (1)..(263): unsure at all n locations
ggctcgagctaggtggtcccaaatgaaggaatgccaatttcaaaggacacctggcaagaaaggaaaactgagaatcaagtttgatgttttgttcccatcaaggcttacctcacaacagaagtatgagctgaaaaggattttgagcaacagtactgctgatgactaattctgtcttgtgtatgtctattgggctccttggattttctattaacacaccttgagttaagagaggtcagtttacaatgtgtanatatttaaataca

SEQ ID NO: 108181 - DNA, 218 bp, Glycine max
  unsure (1)..(218): unsure at all n locations
gtccaaggaaagacttggggagcagntaaggatctatcaaaagtttcaatgaaggaacaaaatctcgcatccttttgacgggttcacagaaagggtatggtagttccttcattgaaacttttgatagatccttgtctgctgtccaaggaaagccttgggagttccttgggctttgtagcagatttgaatgtatctagtgtgtcctcccatctaggaga

SEQ ID NO: 108182 - DNA, 166 bp, Glycine max
tggccttaaaaatggcagatgagtgggtagagctagcttatgcacgagttgattataacgagacagctatgcatctcttggctgtagatcaaaaccctttggattcgtgttgtcattgtccatagatggaaggatccttacggatcaatcctgacacgaaacatgt

SEQ ID NO: 108183 - DNA, 294 bp, Glycine max
ctcgagccgcgcatttcccactatgacctagctgcagcacccacccatcgacttcttctacagatctaataatttttacatcgaatccgttgatatagaggcagagcttgagaaagactcaagtgcagtgcatttgattctccccccttcatcacccccacgccatcgcttcgaatatgactattatgctgactctcacgataagcctgatattttgggatcatgcagaggcctcatacttttatactacccgagaaacagtgatcacattatatggaatccgtcattaggtgt

SEQ ID NO: 108184 - DNA, 287 bp, Glycine max
ccctctttcaactcataccgcatcattcgctgcgctataaaacaaaccttcacgttcttctcctctcacatatttttcatagtctgtatatcttcttcctaactaagaaggtcctctcagcgggacgctaccacgtctcggcgtaaaagggagggcgctcaggttaaaaattataccatatcctacatacttgagttgaagtatgtaacgtgactgggtaagctgccttaccgtgctcagggtcagtttttattatttactggggattgtggtgcactcggtgctga

SEQ ID NO: 108185 - DNA, 219 bp, Glycine max
aaaagttatgagaagcatgttgcttgtattgtatcatttaagtctgaggacaaatatgcagggataccaaatcatcataaggtatagatgatagtagcattatgttttcagcatcttgatttcctatcttagtagatgtggcttagaatttgtcatatagattgtagaccactaggatgatttctggtcccaggaccgaaaattcataacggtgttaaa

SEQ ID NO: 108186 - DNA, 277 bp, Glycine max
agtggatcaaattctcctccatcacatgggaaaattaggcaaggagttcttgcctattagggcacataaatgataaatcatgttttgtacatatacatagagatattttccctcaaaattggttagttttgtgtagtgtaccaactagctagctagtagaccccccccccccccatttcgaagaaaaggcacaaggcagaggacagtgagcgtgcaagtatatatatatatggcccacacatggaaaatatgcttaagttaatttaatttttgtttt

SEQ ID NO: 108187 - DNA, 248 bp, Glycine max
attggatcaaattctcctccatcacatgggaaaattaggcaaggagttcttgcctattagggcacataaatgataaatcatgttttgtacatatacatagagatattttccctcaaaattggttagttttgtgtagtgtaccaactaactagctagtagaccccccccccccccttttccaaaaaaaagcccaacccaaagagcacttgtgcctgaaaattgtctttaatgggcccccaacagggaaa

SEQ ID NO: 108188 - DNA, 154 bp, Glycine max
ggtatttgtttagaaacagacccattatgaaaaatagtttctaaaagaagcccctttagggcaatttgcccgattctgtcatatatctagaaaatgactttgatgggagaatttggctagctctttatcaactttagttttttttttttttttt

SEQ ID NO: 108189 - DNA, 147 bp, Glycine max
aagaaatctcgtggggaagaagtacataatttaaaatttggtggtgaagtggaggacatatcaggtcttgagcagtttagagctgcaatatctttaccaggtgtttctgttgtcctttttgaaactgcatcaaacatgcaatgtaag

SEQ ID NO: 108190 - DNA, 278 bp, Glycine max
ttcatttatcagatgaaggcccattttatgatcatgtgatggtgtgcgatacaactaacgctcagtcagagagccatatgatcataaaattgcccttcatttatcagaagaagaagctaggtagctactaaaaacggaaacctcagggttatgtgaaaatagcaagagctgtttcagcgtcccagaaagtttgtgacgccctttactaaatgggtttctgatcttaattggcgtttaggtttaactgggttgatcatccctctggttttattcatcac

SEQ ID NO: 108191 - DNA, 210 bp, Glycine max
caaaaaacatggcttagaacttagaagtggaagagagtccaatacaggcaatcagatctcgccacttcagcctctcatacgtcgaaagtatatgcaccatgtgcatttttttcttaattttttttggtatcgtttctttccaccagacacgatctctctttctctgaagaagcaaagagtcgatctaaccgtgtcgtcgttccacacaac

SEQ ID NO: 108192 - DNA, 134 bp, Glycine max
ctatggttcagcagccattagctatttcccttgtctctctccatcttaactccaagcataagaatcatcgtcgcatatcgtatcagaccaatggcttcgctcactgtcgcaaaccattgtgttcgcactttgct

SEQ ID NO: 108193 - DNA, 286 bp, Glycine max
aaagcagttacacaaggctaactattaaaaatctagtccagaaggaatggagttgtgcattatgtcagattagtacaaccagtgaaaattgcttaagggcacatcttaaagggaggaaacacaaggataaggaaaatgagcttagagttgagttttcctctactcagaaaagaatcaaagggatggttctactaaggaatctcaaccaaattgcaagcattctcaatccagtttccagatccataagatggtgtgaatggacaaagccagagtttggatggacaaa

SEQ ID NO: 108194 - DNA, 129 bp, Glycine max
tgccattagacaatagttaggcagttatgtgggatttaatttatttttccagtttattgtaattataggagacagctgtttgcttttcagaacagtgagacagaatggaaccaaaacatgctcaagtcc

SEQ ID NO: 108195 - DNA, 285 bp, Glycine max
tgtcatatcatgcattgcaagtagcaccctaagcctttaaccccttcacctcacacactcacaacatttgtttcgctacgccagctcattcattatattcattcaaccccatcaccaacccaacccttctctctctctctctctctctctctctctctaaaacatttcagcgtgtctgtgtgagatctcaaggcttaacgtggtgttggatcttcctcggcatcgcgttcgattccactacacacacatcgttttcggggcaaaaacagagccttttgaggggga

SEQ ID NO: 108196 - DNA, 186 bp, Glycine max
ctctagccataagttaaaactgatagctatttaagccgaccaatcttttggtattttttgtctgaagaaattttcggtgactattattcaattgacacagttttggttgttaaaaaagattggttcatttagtacttgttgagtatgacttggtcgttgctgttacagttgcaagtatgatttcat

SEQ ID NO: 108197 - DNA, 276 bp, Glycine max
gctacatatatttgtgggtgaaacaataaactgattggagcccaaaatatacacattaacagtaagtcaaatatagacaaattttagatcaagttgattagggtttgtgtggtcaagcatgaagaagagacaggtggtggtgaaaagtgtggccaacacttcatcttcagtgatgagaaacataagatatggtgagtgccagaagaatcatgcagcaaatattggagggtatgctgttgatggttgcagggaattcatggctagtacaggggaagg

SEQ ID NO: 108198 - DNA, 283 bp, Glycine max
  unsure (1)..(283): unsure at all n locations
cgtaactgtagccacaataatctttttcacagcctattctaagaggcagctaaaggagttacaacagaaagagaatgatctggtctttcaataatccagtaggtgtagtctgggtttatttgctggcagcatgaggcagttactactatcttatactggcacagtatattgatgcacactgcacagtcgagtgaggttttatttattaagtaacctcatatatgggaggattgaacgtcacatgttggcttnaccacagaacaagctaacgcggctaacatca

SEQ ID NO: 108199 - DNA, 283 bp, Glycine max
gtttgtactgcatcgtatgtggcagaagctcgtcgaaagaattcatggacactcaacgcctagtaactcatgcttttatgtcccataagactgggttgagagcaaagcacttgggtcttcacaaagcaatttgtgttttgatgggatgggatactgttgttcctcaagatacagtaacttgggttccccaagtcttgcctcaggcagaagctctggctcaaaaggaggatttgattctttgggctcctattgttatcatccataacatatcgatgtctgatga

SEQ ID NO: 108200 - DNA, 278 bp, Glycine max
attttatgatatgaaattttggttttgcccttttatttctactttagaatattcagcaagtttgtcgaatgtactataacacagcttcgatctcttgtcaattgtcatgacctttctggattggctattcaataacccctattgcaacaacttgtgatttttcttttgcaagataagggaaagtgtaaaagtacattgagattagctagcgataaaaaggcatcaagtgtatcattcagtactctacgctgttctttattttatactaatgtgaacaa

SEQ ID NO: 108201 - DNA, 274 bp, Glycine max
gcttcgaggggttgaaaaagataataacgatggcgttgacggccccgaatcgcttcctctttccgttacttcctcttcgttgagatcgatttgcctcaaggagctcgttaacggccactgtttcgcgccgttaatagttaattcgaagaagcttgaaacgctgaagctgattcggtgtttgggggattgggatgtgactctggaaagtgttggaaagttgaattcagggttggttgagattcatttagagaaggttcaggttagcgatgtggga

SEQ ID NO: 108202 - DNA, 271 bp, Glycine max
ttcatagatcgctgctgtgtttgtcttagtgtgtttgttattcactatcgtcattcctgttcctcaaggtcattttttgtttctttatgatcctccactccattaatcaaactattgtttgctaattactcatctgaattagggtttatttgccactaatcaatcttaattcatcaatatcagtggttgtttagttctttttaatatttttacttctttttgtatgacggctgtcggagttgaaacggcgacgcttgatgatggccaatgc

SEQ ID NO: 108203 - DNA, 273 bp, Glycine max
tggacattcttgaacgtctttgatttctccaatgaggtggtgcttcctgctgttggatccgactataatgatctctataattctgagctacacaagatgcactcagattcaggtgagttattgtattctactccttttgagggttacgaacaattaattgaagctgatcatgatgatgatgatcctttttctcaccaatcattcctttggaattggaacttttgatcatcatatcatcactcgctactgcatgtgctgctagaatatgatgac

SEQ ID NO: 108204 - DNA, 181 bp, Glycine max
gtctccactgatggctctgacaccgtgttggtggcgatgtcccagacaatcccaccaggaccgcacagacatccctactggcatcgctggtggctcatctcgaacatccacgacagcctttctggggccggccacccaggacgcctgtccgtctgtcctccctccagcagcactccctggc

SEQ ID NO: 108205 - DNA, 313 bp, Glycine max
ggcattctgagcatcaggcatggggtcgtggttaaagataaccggagaaaaaggggcccttaatacgcaccgttttgttcagattgttctcagcacaatcgagtgagtagtagaaaggaatcaaggattggggaattctagtttcagattcttatatgccaacaatgcgctccagaaaactacttcaattccttttaccgaatcatatcctcttcaagttttcctcctcctccggttgtttcttcccgaagagtagttgtcactgggctaggcatggtgacgccacttggttgtggagtggacacacgtggaa

SEQ ID NO: 108206 - DNA, 302 bp, Glycine max
tcgctcgaggcacttttcacagagaaagtttaagcaagattgaaaaggatgttggctgcacaattaagatggatgagaagtttattattgtcagtggtaaggatagattaattttggccaaaggtgttgatgctgtgcacaagattcgatactcaggtgatcaaaggggatcatctagttctcaaatgacccaatcaagatcacctgaaagaagtcctgttagtgctcggtttcaacgctctagcccccaaaggtctcattctggaccacgaaatacatctcagtacctacaaaggtttggt

SEQ ID NO: 108207 - DNA, 280 bp, Glycine max
ctttgacacagatttaatcactgagttcctgatgagtggctgcttcaatttgcatgtggcatcaagactattgtgcttgtaccagtgcttccacaaggggttttgcaattcggttcatttgaagcggttgctgaagacaaggaatttgttacccctatcaaggagaaattctattccactcattatctggaaccagatattacccctttaaatttgggaactgattgtcaagatgtgtcattctcagaccctaatgcataatttgatgggcagtttggat

SEQ ID NO: 108208 - DNA, 181 bp, Glycine max
caaagatcttccttacaaaaggtgaatccaaagtgtggtgtgattcccaaatcctactcttgtgactacaagccttcctcctctatcttttgaaacctcttattttctattccccaaccaaaccagaagacgctaatcactcatcatcactgagctcatggctcctaatatgaccactgtc

SEQ ID NO: 108209 - DNA, 196 bp, Glycine max
ctggttctctttttgaattagagaacagctgatctatcaatgccatatcttaagtgtcttgtgacaccaatttctctgctgtttggaatcaaccaagtgtttgtgagtttatagatgaagatgcaagtatctaaattgacttgttagtccgtaacatgtaatgcatgtcttgtatgacgtgtcattttaatttatt

SEQ ID NO: 108210 - DNA, 297 bp, Glycine max
tggaatcatgtgaggtaggaaaaggtttcgaggccctgaggtagaaaaagatgccaccctgttttttacatgcttcacttgttgtctttttctttggtcatgtttatataaattttagccttgcaatattattgcaactatatagtagtcatatgaattaatgaaagtaggtgcttgtagcgtagaggttgagcattgtatcaatgtgaggagagagagggaaaaaaaaaaaggaaaaaaactatggaatctgatgatgtcgtaatcaaatttacaagttgtaatcttctaactttt

SEQ ID NO: 108211 - DNA, 290 bp, Glycine max
cactgagctagtgctactcattcattctcaccctcttattttcttgaatctttgagtgactaacaccaacaccaatcacatgccatccaattttctagacctacaaaacacaaaaggaataacggtgagaggaaggtttgtgagaaaactaaaactcgtcccaaccataaccaacttgaagaaacaaggcctagttcttcaaaaaaagttcccaaccccatatgatgactacaaaggaaacaacctgtcggagctagtagttgaggatgataatcattttgaggaggaag

SEQ ID NO: 108212 - DNA, 185 bp, Glycine max
  unsure (1)..(185): unsure at all n locations
ggctcgagctcgagccgactctaacaaggatcttctacataaagactaatatagtagtccgcgaanagtagaaaaagcagaacatggtcaagatgaatatcaagtgaagagatccaagtccatccaagtggttcctctgcttagaggcaaatctgcaactactcaactgaatgtatatccagaag

SEQ ID NO: 108213 - DNA, 286 bp, Glycine max
ctagttttccaaagaattctatacagaaatctagtttgtggttgctattcatgattttgactaaagggatctacagattaagaatttacaagctttgattggacatggttgaaaggataattatcaacacaaacatacggttttttgtagatactactcaaactttggttacctcttttagttttagctcattgggggcaaattttaagccactcattaagattattttattgacaacatgcctgtgtgtaaaatgatcaattaggatttgacagtgtcaaacaat

SEQ ID NO: 108214 - DNA, 178 bp, Glycine max
ggctcgagcacaagtggtgacacattctaaaacttgggactcatttcttggtcctgaatcaactgtgccaaatgaacattattccaccattggatcacaaagccaaattgtaatacaagaatatcccaacgatgagactgatccaagtgatctcacagatgctaacctgtggtctgat

SEQ ID NO: 108215 - DNA, 175 bp, Glycine max
accatattcaccaaatccttcaatattaacatattcagctccaacttctatacttgtagtttttatttcatttccctttcactctttttgcttatttgtttccagagagaggaacattaatatatacaaactaaacatggtgttggcttccccaaactcaataaggagcgaaggg

SEQ ID NO: 108216 - DNA, 148 bp, Glycine max
agttgaatttggtgcgagtgtgagaaccttctgaagaaatagcaaatcaacctttgacacactctccctctatccgcgagaggtttgataaccctctcactggtcaccggaataaacttttggcccatttgtccaggcttgataccaa

SEQ ID NO: 108217 - DNA, 284 bp, Glycine max
cacaacttcttccatatacttccctctctctctcatcctattgttaccacttccactggttgtttgttctcagctcaaggaggattcttgcccaagtcctcgtttttttgatcggtgacagactatttcaaaatgggcagatgtttcactgtccatggggggcacctttgtaaccaaagaaggacaccttcacaggagtaaggttagaaactaaatattcgtgttgtccagttattttctaatttttctccttgattactgcagatttagttttctcttcagca

SEQ ID NO: 108218 - DNA, 296 bp, Glycine max
atctctctctctctctctcactcttacaaagcaaagtttggtaattggatgcgttgaatgaaacttcgttagttcttctgctgaagaagtgagaaacatgtattctgatgaagaggtgtttgtatattctgagtagagtttgttcattgaagaactgagggaggttcaggtccatgatactttgaaatctgtctgtagtaggaactaagaagaccatgggacgagcttcattattacttatagtttttttggttcttggttcttcctttgccacctataatgtggtaacgatgata

SEQ ID NO: 108219 - DNA, 301 bp, Glycine max
atacattgcctactgcagtggcactagtctggtcatctagtgtcatcattcatatggggaaatgataattgcacgtctcaccaaccatttcatacccctggcaatccgcggttggataccgctatcctgcattagttgcaactcatgcaggggtgtatcaactcgtgattttttgggtttgcctcaccgggaagattcaaactttgaaaatttttctcgaaagccatgtgttttcagaatcgagatccagctttcattttgtcccttttgaaaaaattattatgtgcttgcgttcagccgc

SEQ ID NO: 108220 - DNA, 116 bp, Glycine max
cgcaaattcaagaaaccatgaaacttttgagccattgcatagtggacacactttttagctactattattattgatagtggcgtcatccgtgtttcatccactactacggtggcttg

SEQ ID NO: 108221 - DNA, 294 bp, Glycine max
cggctcgagttcagattccaatccaaagagttgttattgttatttctagtttttcatccatattcccacttccgcgccatcaactgattttacctgaaaagggtttcttctgatttcttttaccatattgtttctttgttttttctccctccgaagtttcttccaattttttcttattacaaataatcaaagatgtgtgtttgagggtgttgcagctcgatcacaatgagaacacacgcgttactgacacttttgttgttttctcgggttatgtttgatgtttccgacgctttc

SEQ ID NO: 108222 - DNA, 296 bp, Glycine max
ctcatcaaccgttgctttgaggatgatgccattattattggtgatggtgctactgtttagaatgtgctgagtgagaaagggaataatgatggcatcatcctcatcaaccgttgctttgagaaccatctcctctttctctctgaaacctgccaccacaacaagatcattactcaacactagtacttcatccaccataaccctcttaccctttacatcagcaaactcatttctctccaaaaccctcaaactcaacacctcttccccacactctcacctttcactacccctcaacaagt

SEQ ID NO: 108223 - DNA, 279 bp, Glycine max
gcataacttactatttttatgcggagtgctgtctataatttggctgtagttcgtagtaggatacaatgaaaactgtggacgaaagggtaattattcgtatttgggttcgttggtaattgatgatgctaggcaaaacattttgggtgttcagcaattggaaatgatgctaccgtggttgcttgacttggaattatgtgtctctagacacaatgaatggcatcattcactggatgattggccagccatggagattaaactatgcagacagatactcgatga

SEQ ID NO: 108224 - DNA, 240 bp, Glycine max
aagacctcaatatcaacgaggaatcccctccacaaaattgaggaagctaacaagtgggtccagaatcgacatgaatgagatttcttaactaaagagaacaggtatatcgcatcggatgagtgatcacagccctattattgagcctgaaccagctaaactaactgttgagacaaatcaggaagggcgataagaagaaaatttgcactgagattagtgcactagaagatgacctcctgatgg

SEQ ID NO: 108225 - DNA, 211 bp, Glycine max
gatctgcatcaggacattatagtctggtcattctctcagatcttatcatagggggacaatgtccctactacatcactgacgctaccagactctgcgttacgaggttgcccttcgatgcgcttgactaggaatcctccaatctcggatgcatctgattcggctacctgtggatgcttctactgggtcagctatgcgtatgcacccatcctag

SEQ ID NO: 108226 - DNA, 134 bp, Glycine max
ctatacgtgtcgacactttgcaagctagaatggctgctgccatcgccatccccacaagagggtatcgagtctcgtctgccgaagataggatgccagtcgtaagactgagatctgctcctgacgtcacatgaaag

SEQ ID NO: 108227 - DNA, 305 bp, Glycine max
caacgatgaccaatactgaagcctttcaaataaagtcgatttcagaactcctaatccacccgttgctatggagactcacaggctttgtgtcaagcgtatttgggttcagctgttatgccttcagcccctctttccacgacttgttcggacactggaacccgctgaagatctccttttacactgtggtaagctcacttttatctatctttatgctctttgttaaaagatgcagcggggaacacgggaagggtttcttgttgaaagcacatgtgggttttgtggtcttggggcttacctctctctgg

SEQ ID NO: 108228 - DNA, 127 bp, Glycine max
gttcaattaacagaaaaggaagactacaactggaactataaccccactcagtcttccagtgacattcgatagccagccattgactccgacttcgacatccccggcggcgaggtgatggatctcggcg

SEQ ID NO: 108229 - DNA, 117 bp, Glycine max
aatacctcagccatctaattacctcaataaaacccttaatagcaagcatcatggctcaggagacacaccaccacgacgtccaccaccacaagggcagggatgtgcctggcgaagccc

SEQ ID NO: 108230 - DNA, 290 bp, Glycine max
atgccaatgatgcagaaactggtagctttgatgatgcctacgatgacaataaccacaacatgtcccttgcttcatttgagggatgcttgctgaaatcctttgatgagatggatgagtaccttgctcaggaaattaacactgacagctattgcagtggttgcacacctgtgacattaattaacaaggtgaccattgataagttggcaatttgggtgatccccggcaataactttgcacaagggatagggaccaactcatcccggttcaactcactgttgacttgaaaccgg

SEQ ID NO: 108231 - DNA, 120 bp, Glycine max
atggtcgcgcgcccttagtcaaagggatacatcgttcttcggcccaggttatgaagaaaagcaaaagtgtgatgatgtgcgtcatttgtgcagcagatgaggtgggtcctacgagagcag

SEQ ID NO: 108232 - DNA, 107 bp, Glycine max
tgggaacggtgtggataaaacctacactggggattaccatgatgatgtcactatgcacgtagacccctagggatatgatgatggggagagctcaaagattggagtag

SEQ ID NO: 108233 - DNA, 115 bp, Glycine max
ctcaagccgacttctgctcgagaaacaaaacagcctcagagaaatgtgagatgccagcagtgaggtatagacgatgttgttgttgatacaatagcaactcatctgtcacaatcca

SEQ ID NO: 108234 - DNA, 115 bp, Glycine max
cagtcatcagcctcctacggcctgtattacaactgcagtgagacgccggttcggatccgtgtactgtgcgtgcgggcctgcgctcactgttgaagacagagatggtgaagaaccc

SEQ ID NO: 108235 - DNA, 116 bp, Glycine max
cacatgttggtgcttctgggagcaagatgcctacaggttgtaaagaggatgtaccaattgcttgtgcccgtattgctaaagatcctttcataggcaagtatgtacatgagggtaac

SEQ ID NO: 108236 - DNA, 275 bp, Glycine max
gttgcgtcttccatttcattacacactgatcccttcccagtcttcattcttctatcgtctctgccaaaacgatgccgtttgctatggagaataacggaggaggagttacgatcggacggtcctccttcgcccactgtgtcgcgatctgagatcgggattatccggcggatgattccgactccagctccgactcctccatcggaaggaacagcacctcgtcggaagattcctccgaccgggaagacgccggcgaaattgacgttcagagtccttca

SEQ ID NO: 108237 - DNA, 99 bp, Glycine max
taatgaagagtgacgaagccattttcgccatgatcactcctctcgcaccataagcgatgaagctctaggtgaacattttaggagtagctgaatcatatg

SEQ ID NO: 108238 - DNA, 179 bp, Glycine max
tgtccaacttgttggcacattattaaatgcacgttaaccgtcttccatatgcacacagcaatacaaatggaagacggatgacgtgcatttaataatgtgccaacaagttggactaaaataaagatcatattgattgttttcccaaaaaaaaaaaaaaaaaaagggcggcagttgtttat

SEQ ID NO: 108239 - DNA, 107 bp, Glycine max
cggctcgcatctagttcgagtgagaggaacatagaggctatttgcatctatccatgacttgaatcatcagcatctgcatctgacatacagggatacatgcgcgttca

SEQ ID NO: 108240 - DNA, 283 bp, Glycine max
actaattaatacccggcttaacataaggttttgcttggctattactggttaccacatgtttatgttagtcccataaaatgagagagtagacacaaaaaatgaatgagttcgaaagtttttatggaataaaatgataaataaataaataatacgacagttggttctgaatgtggtgccaatttgatgtgttatggttttgttaaaaatttggcatttattcctactcatccatatatagttacgtaggtagaacctaattgctacaggctaaagctataaattc

SEQ ID NO: 108241 - DNA, 286 bp, Glycine max
aacaatttctattggtgttcctcgaggggtttttattttgtactgttgcttacattacctacgtttcatacaatcgtcaatggagaccgtcactaaggacaactagtatccatgtgaatattattaacaaaatggatggaaacttcatggcaagatggaactttaccaatagctttatccctcccaacatcagcagaaagatcaagttggaattttcacatgtgatcaaattctatggtgtttcaggggattcaacattgccctaaggtctgtcatatactcatat

SEQ ID NO: 108242 - DNA, 127 bp, Glycine max
ggattattgcttatatgcttgctgtaacatcgcccagcttcgcattattactgataaaacaagagtattggttcaaattcgaagctgggcatgttacatcacaccgttaggattattgcttatatac

SEQ ID NO: 108243 - DNA, 268 bp, Glycine max
cggctctccagcgtcgtagtcgtcgtcgttgtcgttcttgaggacttacagcgtggatgatttgggggagaaattgaggatgttgaggccggagggaatgagaaatgattggttttctgtgagggagttgagtgagaggttagaaggtctcggaagatggaggaggaggaggtggagaagcaagcccattccaatacccaatacggtttcaataaagctgtgctagatcatgtcagaggatccctcgctcagttggatcaaaatcaaa

SEQ ID NO: 108244 - DNA, 106 bp, Glycine max
ctatgcgggcgttcaccgccttatccggtctcatgcataccacagggacaattcctaatgcgcttcctccaccagtatccactccattagcgtcgtttgattttcc

SEQ ID NO: 108245 - DNA, 266 bp, Glycine max
gcgacatgtgagcacccctatgaacctagaatcttcaaattgctctgaagctattagcttgaagtcaaatatttctgataatatggaaatcagaaacttgagtagtactcctaacttaaaatcttcaagttgcacgacttgatgaacatcaaatcaagtttttctgatcatcttcttgttaggaaacacgatgtgaaaaacactgattctcttgtttcaaaatctgattcctccgagtataccaaacataacactcctacagctgc

SEQ ID NO: 108246 - DNA, 116 bp, Glycine max
tatggagcttgttctgatcaagtttcccggtctttctgctgaaaatacattagtacagtaccatgcctcttgactgctgattttgagctgaaaatacattaattatctcctcgctt

SEQ ID NO: 108247 - DNA, 285 bp, Glycine max
cggctcgagcttttttccattctcatgcctcttttctacttgtaacacacccttttctcttttctcactaactcccctccaagaaattctgagagaatagaatagaaaagagggtgagtggttttttgagttttgatagaatagctgcatggggaatctggttgagattgctgaccaaggggtcaggattgctgcaaggtttcactctaattgcccccaaacaggccgtaagtctaccaccctccatccctctccgacaaccacggccaccactaccatggtggt

SEQ ID NO: 108248 - DNA, 290 bp, Glycine max
ttatgacttgcatatgcagaaagagattgcatcagaagagactatcagaaaattgaaagataaacatgatgtgcatgttcagaaagaggctatatcagaagatacaattagaaatttgaaagataaaaatgatatgcacatgcagaaagaggagacaataagaaaattgaaagaagaaaatgaagggcacattcagaaagaggccatatcaaaggagacaattaaaaaattcgaagagaaaatgataaactagttcagaaagagactagtctggaaatgagaattgcaca

SEQ ID NO: 108249 - DNA, 197 bp, Glycine max
caagaaaattacgacatgggtctagcagtaccatctttgtgtgttacttagtagcggtaagaaaggctttgattcctccacatgagaagagaaacgaccaacggttcttatttaaagcaaataataaatactgaaagacaagacaagagataaataataactagttgtagctgctggggagagtggaacataataaa

SEQ ID NO: 108250 - DNA, 119 bp, Glycine max
cggtgaatactctgcgaggattttgaaaaaaaaaggcaatatgttttggattttgagcgccgtactactagcaaccctattttattacgtgtgctacagaccttcgctgtattggaaaa

SEQ ID NO: 108251 - DNA, 116 bp, Glycine max
aggatttcttggagttaaggcctctaagagatagcctggtcaatgtcccattagcagtggatcactcactgatcttccgctgttgggtggggaattcaccctggtcgatcttgcaa

SEQ ID NO: 108252 - DNA, 119 bp, Glycine max
ctcgatccagtcgctgatgctctttcactcaagaggattagtcaagtttgaactgatgaacacgtgttcaaggtatggaatagctgctatgaggcccttcgatgcactgggaaggtcat

SEQ ID NO: 108253 - DNA, 292 bp, Glycine max
aaacttttcaccgtcaaattcaaggcggaagagtatcccattgtgtccttgttctccagagataacagctccagacccaaagcctctcagaatcaccacacagacgaatcacaatcatcactctcagagacactttcttctgcttccgaggagaaacgcttaatgcgaaagtatttgaaaatggtgaagcctctgtacgtgagggtttctagaaggtccgagaaggtcgacgtgagttctcctgagtccgctgaagcttctacggtggcggagaagattccgacggtagcag

SEQ ID NO: 108254 - DNA, 293 bp, Glycine max
ttcatactgatgctgtcatagttagaacaaggaacaaaaaagaggtcatttatgaaatctgtggtcataaatgcgtggtgaaaaatgtcaaatttattgtggataaacttcaatttatttgtgtagcattgtcgtccagtttgaaagcttgaacatcagcttacatgttaaacagatagttcttgaaaaatgttggccatttcccaagcgatatatagtcatactagtgtgtgatgtttgcatgagattttgcgaagtaaactactagataattttttcttggtaataaatca

SEQ ID NO: 108255 - DNA, 108 bp, Glycine max
gctcgatccgtggacgaaacagtgtaggagataatgtggctgcaccggtcgctaccggctcggccggtaatcgaggaagtggaggcggcgatgactctggtcgagaac

SEQ ID NO: 108256 - DNA, 174 bp, Glycine max
tactcgagccgattcggctcgagggctcgaggcaatctattgctctgcggtagtgaaatgtaatgtaaattcaattcgagatttgacttatacatttacaattctttcccattttgaaatggaaaaaatttgtattttcttggttgacatataagtgatataaccttgtttctt

SEQ ID NO: 108257 - DNA, 136 bp, Glycine max
ttcggctcgatgtgatgaagtcatccataccatcaagtctaaggtggaggcactatgctctggagtggtgtcatgggctcatatcgttaccagtgctgctgcgtgactctgttgcaaatcgtggaaggccaaattg

SEQ ID NO: 108258 - DNA, 116 bp, Glycine max
ggccacgcttgcaccagggaaacgccacggctctgatcgttcacgctaccccgttcagcacagcttcggccgttcaagtcttaaacgtgtcaagtggggctggacagtcctatgtg

SEQ ID NO: 108259 - DNA, 224 bp, Glycine max
gtcctgtatggataatattgtgtttactgtgaagttttgagcctatggagaccttagattatgatttaataagaacattatgccaaatttcaacttccgagatttgggaggacgtattttggatggaaaaaaaaaaaaaaaaaaaaaaagggggggccaccaacaagggaccccgtaaacccggaattaattcccgaaccggaccctacaggggaaccagcttc

SEQ ID NO: 108260 - DNA, 288 bp, Glycine max
ggctcgagcaactgtgagaatatcccaatcattcctatttcttcttgctctttcaagcctcgaggtcatagctttaagaaggctgctcccaacaagtgtggattcatggagaatgtgatgatggaaagcttgagcaccgacatgatcaatttctccttttaagctacctatagtttttaaaacaattggagaacaataacttcacttccttgtctttattccttcctttcttttttgtttataagataaaaaaaatgattggttggggacaaaaagataaggttgtta

SEQ ID NO: 108261 - DNA, 105 bp, Glycine max
tgattctggaaccttctaaactctccatacccatcctcaactaccattattattgccacccccactcgcgagtgtattggattgagatcttaaaagaatattttg

SEQ ID NO: 108262 - DNA, 228 bp, Glycine max
caattgtacaggtcagtccacaggtatattagaaacttgaatcatagggaaaaaatggcattttaattaaatttgtcaaaagtttttattttttatttttttatttgtattagtctctgatgttgggatgtacactagcatctgctgtaaagtggcttggttctatgtgtgtaacccacaagagctgatacactgacaatatgacattgtccccttgtgtcgggaaca

SEQ ID NO: 108263 - DNA, 124 bp, Glycine max
cggctcgaggcaattccatgtactacacgttctgatgttaaaaggtactagtacgatccttttaaactcacgaacatttttaaaattaactagctataatatatgttggtcacacgatagtgtt

SEQ ID NO: 108264 - DNA, 271 bp, Glycine max
gaaaaagacacgaatatctggtaacaaaaacttcatagatggaacgaacacttatagaactgccactgtcggtatgtctcttttcgtgattatcaacttaattaacttactactcctatgcatttgagtaaaaaaaaaaacttaataacttatccaataaatttattaaatgaaaccttattcatgactcagactgtgaagcttaccaaaatgagattaaaaaaaataaatttatgtactcattgtgcatttgggtaaaaaaaacataatt

SEQ ID NO: 108265 - DNA, 272 bp, Glycine max
ctggcatgttagctttggaatttgtttggatccaattgctacggtatgctaattggaacttgagttccatattgggagtataggattctagtgtggaacttataaggccttgggctctccaactacaattgctagcttttgtgatgtggttctcccagagtcttatgaaaattgtgttgtgaaccttagtgtaggttcaagtcacaggcttagacactgaaggctgaataaattttgcctgaaaattcatccattatgaactagtaatggct

SEQ ID NO: 108266 - DNA, 254 bp, Glycine max
ctaaatttgagtctcaaatgttttaactttattctaaattagtcacttattttaactgaaggtaaatttggttaactatgatcagaaatacattgacattttttaattggtagagataaagaatattttttatgtacaataaagagagtatttactccagaggatgtaaatcccttgctaaatattttttatatgaaaaatcttggttgttgacaggcactgcgacaagagttggagaagataggatgggcatc

SEQ ID NO: 108267 - DNA, 141 bp, Glycine max
actttcatttgacaagggacattgataggtaagttcaacactactagtatctacgatgactatattcataagtgacacataattgcagtaatttagtctgctatgcatgtagtcaccgtggctattcctagtgctgaacct

SEQ ID NO: 108268 - DNA, 289 bp, Glycine max
tcgagcgattagctcattctcgatgcgcagttccctacctctcatttcaggatgcacggcttgaagaatgtccagctcatcggaatatttggtattttccggccaccacccggcgaactctccggcggaaaagtccactttctctcagacttgtagtctattgagccaatccctcaaggaaaagggtaccttcggagaccttaccctcgggatgacttgcactgccgaaacaaacggttcccctgagacatcgtgtcactctgcaacaaccatggagttgtttcccacg

SEQ ID NO: 108269 - DNA, 202 bp, Glycine max
tgaaaataaaagataaaatgaaaattttgagccattgcataatggacacactttttagttactattattattgatagtggtgttatccgaatttcatccactactacggtggcttgtgaatcattgaatagaatttgtgaaccacggttgtcagtagaggattaagttattattttaatgattattactactattataattg

SEQ ID NO: 108270 - DNA, 177 bp, Glycine max
  unsure (1)..(177): unsure at all n locations
ccatttttacaattttatgtcatagagcttctttattcgttactgatncactcatatggttgtttgagnttaccccagtcacactccttccttttccgcctattcacttattctatcgcctcaagtctttcccttcgtacctttaccgccgncgccaccgtttccggagaagtcagt

SEQ ID NO: 108271 - DNA, 234 bp, Glycine max
tttgtgaacctgaattccggccggcaatgtcagaaattgttcaagatctcttgagaatgatgtaaaaggagatgtggagccgaagataagctttggttcctagatcttcctatctattttttcttagttaaattttgtgagccaaagatattttccttgtgtgtggaaaatctgcttactaatgtaattatgagttagcaggaatgttgtgccatagtttatacttcattgttc

SEQ ID NO: 108272 - DNA, 286 bp, Glycine max
  unsure (1)..(286): unsure at all n locations
catttccacacctcttactacttatngaggaggtttancttacgaatattatcaatttctctctctattttngactagttaattctctatttctcaaaaatgaagtaaaggtttaggcacctcataaacatgtccataaggttagtaattttactatatatatacacaacactcagtccatatatgcaggcacccaccaaacattctcacaccatagccatgaccaatatggaatccaccatacttatactcactcctctagtgctcgtcatgctcttctctctag

SEQ ID NO: 108273 - DNA, 281 bp, Glycine max
gtgaagtgccgccactctctcactctttctttctctctctttctttctcttcctatctgtctcacggtcaataaaagataaaaaaacttcaatctttaacaatccatcacacaacaaaacacccacacttctggtttgttttgttttgtttaaattattttgagagagtttcttcttcttcttcttattgttgttgttccaatggcttccgcaactgccccaagattcatcaagtgcgtgaccgttggtgatggagctgtagggaagacctgcatgctcat

SEQ ID NO: 108274 - DNA, 194 bp, Glycine max
tctggtcgattgtacacatgatgtataattgcttgtatgaacaaatttgtttcgggtgtatgtctataaagccttatgtttattttccatttcatattcttcccagaatcccagtcaatgtagcttgatggatgattcttaatggtgtttatggttgaattggggtttcaaaaagttcatttgagtttatgatg

SEQ ID NO: 108275 - DNA, 241 bp, Glycine max
ctcgatctgctcgagctgatactgctctagttgaattattatcatgttacaccacggattcttgctatctcaggtctaccacaatttgcaaggcgtctatgtacatttacaacgagtacttcattcagtaaatcgagataactctgtgggcttctccaattcgttcatatttttaagcatctctagtggatttctaattcgcaaagacaaaatcacagtatattgtcacatcgagcatctc

SEQ ID NO: 108276 - DNA, 121 bp, Glycine max
gtctacgtcacgtagtcttgaaacctcgttgcaagacctttaatccatcacctgaaagccttggtactgctgctctagcactgctctatgtgaatgttatcattgtgattgagaagctagc

SEQ ID NO: 108277 - DNA, 282 bp, Glycine max
cctttcatcagctcccggtctaaagatcagttttgagttattcttcactttcttgaaaccaacaggaagtggttatagtatttccttctatatcattttcaaagtgtgttccacatgcactttttgtaggattataatttgtggttaatattaagtccgcacaactcgttgtcacaatttttatgggtttaaccatgatttagcagttctaatcaggttttgaaatgcaacccaaactctcaaattttttaacatagacgaacaacttttagaagtgtcgtg

SEQ ID NO: 108278 - DNA, 279 bp, Glycine max
cggaatcggctcgcgtcgagcgctcgagccgctcgagccgcgttcaccaatttcatgaggggaaagaggaagtgcctttagcactcgtgcgaagtagaacggggcatgttcttttctgtcctctctctctctctgtctctgatcagacagacagacacgcgcatattacacatagatgttgcagagaaactctctctctctctctatctctctctctctctcaatatagctccaaagacacacagagtatagatggatcttcgaatatagcggttttaa

SEQ ID NO: 108279 - DNA, 168 bp, Glycine max
ataggatgatactggttagtatatgtttatttatttctttgttcatttaattcagacattcatcgtttttaagtatgtgatcttatggaagatttttgaagtttttgtgattagctgtattttcgtttcgaaatatattacatctcaaaagagttatgagacttgtgg

SEQ ID NO: 108280 - DNA, 141 bp, Glycine max
ggccagcaacattagcagctgaagcaaaaggtcaatcccgtgcgttaatggtggactgtcagagttcattagcttttggaagcaacttatcgatcccccaatccgctgtgcgcagatcgagggcgtggcctgtctgcgctg

SEQ ID NO: 108281 - DNA, 264 bp, Glycine max
ctctgcatcttcttcctctttatcacccttctcttcctttctcttactctcgcatcctcaattccctcactatttccgtctctacgattccaacctttgctcttggcgaacgctctctctctgtgtctccaactcctacccttctcttcttccttcactcttgtttcctcctctggtggcctcttttgtctcttcaaccccacctcttctacctttcttgtgtacaacctctttgtcaagtccttcagaaaaatcgaatcccca

SEQ ID NO: 108282 - DNA, 254 bp, Glycine max
tgtctacccttatctctgaccatttctttctctgaagccaactccaaaactaacagacagaaagaaagagaaaaagcaacccaattcctgattcaactgaaacacagcacacacaacaatcatcaatttctctacaaaaaaatacccccacagagagaaacaaactggaaacaacagccaaaacagaaatcttcacctcagcttcctctgttccgtccttcctcgtcgccgcgccggagcatctcgccgccttc

SEQ ID NO: 108283 - DNA, 125 bp, Glycine max
attcttaactcaacttctgctacccactatctgcttccaagtccaaccacgcttttcgctacagtcatgggcaaggtcaatatcggtatcaacggatttggaagaattggacgtttggttgccag

SEQ ID NO: 108284 - DNA, 118 bp, Glycine max
gtgatctgtttgcgagtgctccgatagctgctgctatcggtatgaagtgcgattgccacgatcggagtgatcagcactggctgaggtctttgtgagcgctagcacgatgcactaccag

SEQ ID NO: 108285 - DNA, 108 bp, Glycine max
gggcactgccatgcgcgagccaagacttgtgatcgctatccattgttagtggaaatgccacgatcggaacgctctgtacagtctgatgctcagttcgctctgtcccga

SEQ ID NO: 108286 - DNA, 149 bp, Glycine max
ctcgagctctcttgtctccggcagcaccaaaaccagccaacacttgaaatcagtatcgcattggtaccactacagaaaagatcaaaacaccctttacatcagtatcctcagttccctctttccctatcaaaacgctttcacacaacata

SEQ ID NO: 108287 - DNA, 147 bp, Glycine max
gctcgagcacaagatgagctgtcaactgttgctctgcctctgcatagagaatggtgtgggatcggggtcagactgggtctatctgtgtgcacagcaccactgtgtccctgcctcagacccttatctagaagagcaagaatcagtaca

SEQ ID NO: 108288 - DNA, 233 bp, Glycine max
cacctatgaaaaataggagtggatctgcacataagatgttactggaatgtattgctgggcattttaacaacaatggttggggccttactctattgcctcgtctggagaaaggtcattccatttcttaagcaacgaaagactttgaaaggaaaggcacatgataaaatatcattaaggtattttgattttaaggaactagagagagcaaccaagaattgtagccaagattgctt

SEQ ID NO: 108289 - DNA, 277 bp, Glycine max
attagatctccgtcacagagtgtgaggtctcatgatatgggatcaaattatagcgttgaggaagagagagaggtaagaggcaggggtagtggtagtctgtatcgaactaccggccagaaggaacaagagcaacttctgatgagtggagttgattttgttgagacaatcattgcaagaattgtttctgaacctgttcaagcaatgtctagaaagtttcatgagatgaccggacagtccatagtatgtctgaaggagggtattcgtgaaatcatgctta

SEQ ID NO: 108290 - DNA, 292 bp, Glycine max
taacaacgttagcgcgtgagtttgtaaaagtatagcagacaaaaggcatttcatggcgaacatttgtaccactaatgatttttgtcaattcatcaataaaaagaaaaatactggcaaaaaatatttgctacagtttggcgccgtaattttcaaatggggttctgaaaacatttttgatactttttatattctctttgatgtttgtatactgatttgtaaagtgtagataagcaaattgcaactcttttgaaaatggcgacaaactgctttgtattttttatgtgacgaccat

SEQ ID NO: 108291 - DNA, 290 bp, Glycine max
ctatgatcaagctaatgacctgaagcaaagtaacaatttgagggtagtatatatatctcattcacatagggtgaacgctattgtttgtcagttcgtagccgttacttgagatggattcaagattttagttcattagccaacaatttcagcatcactctaggaaacaatggtcatctgtatgtaatagttccagccaaggctcttgttctggctctagatgtcttgtcaggtaatgtgttgtggcagagatgtattgggccattaagcaaagttgactctgcacctgtagt

SEQ ID NO: 108292 - DNA, 289 bp, Glycine max
atctgtattatgacttcagttaggcctgcactatttgtatggtttggaggcttatgcatgctggtctgcaataagtagtcatcataattgcagttttgtccctaagaattctcgttctagagtgattgttgaccatgagatgcatattcatggtaattaaccagtagtttgttaagtaacatgggtacttcttaaccaatatttaaacattaaccatacgagtgatgaatagttcttaaactgaaatatgtttctttctatcgtgttttcatacttctgcttcattctt

SEQ ID NO: 108293 - DNA, 113 bp, Glycine max
  unsure (1)..(113): unsure at all n locations
ggcgccattgcccgtaccgccctgacgacgtctttttggtctaccctagcaacaagctctcgacgcgcgtggacgatagcggcgacactgtcgcgaantgggaccaaacgctc

SEQ ID NO: 108294 - DNA, 293 bp, Glycine max
cctcgagccgaatcggctcgaggcaagatgtttagaattgtatacctgatcctactcaataacagctggcgttgtaagctgcatccaacatcctatttaatgctggccgcacaccgggtggctcagcattactcattgcagtcaatggttttactggataatagtttaccagatggttctgggtcaagaattattgttcgcaaaacctctgaatgtaagcttccagttatccgccttgcagacatcccagtataattactcacagataacagtgctgtcatgaaggttgcaat

SEQ ID NO: 108295 - DNA, 286 bp, Glycine max
acaaacaatttttgtggtgactttgatcccaaatgccccgcctttctagagtctgtgaccctgcgaacataggggcatgcatccagtcggatcaagttttcaggaaatccagtgcatccacccccagcctgcttgtaggaatgtatcatagttttctttcttttttgtggttatttttttgttcattgtaatattattcattcaattttgatgttatattcctgccttttctgggggatgaactatgaactatcctcgtgtatgtggttgcatagtcctcatctcc

SEQ ID NO: 108296 - DNA, 281 bp, Glycine max
atccctagttcatggcaaccaaaccacaaactctggagctcacggttttgtccgcggagggtctccacgtaaggggaaagcccacgcccaacatcaaagtgttcgcggtggttcgcgcggagtcaatatcgagccacaccacggccatggtgacgacgacaacgaccaacgggagcgacaacggcttccagtacttgtggaacgacaagttctgggcggagcttgggcctcgcgcaaggtgcgtgacgattgaagtgaagtgcaggaccgcaacgggagtg

SEQ ID NO: 108297 - DNA, 278 bp, Glycine max
ctgtctttgcctatttggccaccctcaaaagagagtcttgggctacctatggtgcccttattcctgttgttgctggagttgtcattgcaagtgggggcgagccagggtttcacttatttggattcattatgtgcctaagtgcaactgccgcaagagccttcaagtctgtccttcagagcattttactttcttctgaaggggaaaagttgaactcaatgaatttgctcctgtatatgtctccaatcgcggttctagttttgttgcctgcagcacttata

SEQ ID NO: 108298 - DNA, 280 bp, Glycine max
tatgatgaagtggtataatgagcatgttgtgtggggtgataaagacctgaagatgaaacttttgaggaagggagtattgactcgcatatattctcccatggtcataattcaaagtttaagggaatctggagtcttcagttctgtcattgcatctgccccttcactttccaaagaaaactttctgctgtcaattgatagtagtaactcatcgagagccgtcgcctccgtaaccaccctcccttcaacttcaagaaaggttggaagaaccaaagaatctcaa

SEQ ID NO: 108299 - DNA, 287 bp, Glycine max
gagaaatttatagagagagaaagagagatgtgtttggtttgtggaataattggtgacttggatcgttgaatgagatattattgagtttgattcagaaatgaacaaagacgaaagcgataggaacgaaaagaaagcgcaagatattaagctttggggagttttcatcttcggattaatcggcgccaccgtcactgctttctccgaacgaataagacgtatgcaaagtgtgtttaatagagaaagggataagcatagaagatactacgagagctggaaggaaatggtgc

SEQ ID NO: 108300 - DNA, 174 bp, Glycine max
tgcacattcttcttcttcttcttgttctctttcactctctgaagtaagtgcagagcaattaataactcaagctttgagtcactccgtgacagtgatgatcgtacagttattgactattgagtgatgtgttagcgctctacggtctccagaaacgctaatgaagacatgaagctc

SEQ ID NO: 108301 - DNA, 280 bp, Glycine max
attacaatggtgtggtgactaataatgatgttctgccgatggcagacagttcagattcaactgctgaacagcaaattatgcggtctaattccattgaagcatctttgaataatgaaacatcagatagatccaagtccccggttgattcattggaaccaaataaagctcatggtaggatttcatcagcacatagtaacaatactgagaaagaccataaaaaatctacatctcaggctctttattacaaaggtgttggttatcacatggtaaactgtggctt

SEQ ID NO: 108302 - DNA, 311 bp, Glycine max
aggaaatattcaactatgtgggtatagcccttcaaccccatgtctttcacaagctccatcacaaggagtcattgccccaactccagaagtactgtcagaacagcaccatcgtaggaacctcagtaccaaagacataattctcatagtagcaggagttctcctagtagtcctgattatactttgttgcatcctgcttttctgcttgatcagaaagagatcaacatcgaaggctgagaacggacaagccacggggagagcagccgctggaaggacagaaaaaggagtccctccagtttctgctggtgatgttg

SEQ ID NO: 108303 - DNA, 212 bp, Glycine max
aagaaaatgaaagtttgcacatcactccatttttgttctataggcgttggaaaagcaaggaccatgcacggacagataaaaaaatggagtgaagaaaatgaaagtttgcacatcactgacatcaaaaaaaaaaaaaaaaaaaaaaaaaaaaaggggggccccccgacaaggggccccgaccccccgggattaattccgggccgggacccggg

SEQ ID NO: 108304 - DNA, 317 bp, Glycine max
cggaatcggctctctcgagcgattcggatcacggctcgagatttagttgaggttaccaagaatgctaagccacctgtctgtaaaattatggccttccacatgcaaatgtatacgcggcaagaaagggaaaaggagcgtgctaaaagcagggctgagatgacactgcgaaaagatgttaaggaagtgcgattttctgaaaaaactgaagcaaaagacctgaagaacaaagcagatatgattaataagttaatggagaagggttatcgagtgaagtgcaaggtatcgggcaaggaaaatcaggacttgacagtattatt

SEQ ID NO: 108305 - DNA, 304 bp, Glycine max
ctcgagccgaatcggctcgagcttctgttcttctccaccgttccctccaagaactcatcacacttggagcactctcccctcgccctcttctacttcttccgttttgatgcttcacgaacaagcttcccctacagttgcctcttggtcttctaatttttcagcacagaattttcctgcctcagttcttttaccagagcagcgtgatgaatataggcctcttctgcacatgtctaaggaagacaagacatcacaggcaatgttaagtacaaggcagatggatacagtcacggttcatgaagagaat

SEQ ID NO: 108306 - DNA, 293 bp, Glycine max
gaattagggaaaaaaaataattgtcaaaaaaatgtatagcagattgttggttccattgttatgtacagaaatatagccaggattagttttatgttctcttttcccattaaattttggttccaggcatctcaaattcctgttaaggatgatatcctgttgctgtagttgtattgcgccaatggcattattttcatttgccttggtgggttttttcacgtcaaaatcgtataatagacacaaaagctagtattattagcttcacttggatggatgcggctcctgcgtcctccctc

SEQ ID NO: 108307 - DNA, 300 bp, Glycine max
agtagtgttgaaaattctaatagcaacatcgaaaactacaaggcagaatgggagcagagagaacatcatcttgtcaactgcttaaagctaactgaagaagagaactcgtccctgggaaatgaaataaataggctgattcgtttactcaaggaaaccagcgaagaagctaatgccaagagggaggaagaaggccaactgaaggaaaatctgaaggaagttgaggctgaggtgatccacctgcaggaagaacttgaagaagcataggctgagagcatgaagttgaaggatagtctattggat

SEQ ID NO: 108308 - DNA, 304 bp, Glycine max
ccggaatcgggcttttcttagcattcatcgggcttcaaagcaaccaaggaatcgggctcatcgggtacagcgcatccaccttagtccacctcggcgcctgtccaacctcctcacgtgcctcactcgcacccgtcttaacggcagctaacggcaccgttagtttactacccggcggaaccgtctcgggtgatattctctgtctgatagacagaatggaaagcccgaccctctggctgggcctcgtgggctttattataatcgcgtactgcctcgcgaagaatattaaaggcgcgatgatatacgg

SEQ ID NO: 108309 - DNA, 301 bp, Glycine max
cacaaaaactatagttctaggcctccgtttggtctaagtagtagttgttacacacttcttcattcattctccaatggctgatttaggctcagccccttccaagagaatgtggtgttccgttcccgaaagaatgcagctgcacttggccatgcttgccttgcagtttggctatgctggattccatgtcatctcaagagctgcacttaacatgggcgttacaagcttgttttccctgtctatcggaacatcattgctttgcttttgctccttccctttgcctacttcttggaaaagaaggaga

SEQ ID NO: 108310 - DNA, 299 bp, Glycine max
ataatactaattttaaggagtaattcagtgtattacttagttggttgtcattaatacttgtttttcttcaggtgctttacgatggagacatgtccatgtttatatcaagaaatgtcaagtgccatattaaaacctgacctacaatacaaactagtagactggcagtagtattttttcatggggtcgcgagttctttcttttagataacaatctcatttattttatttttcaggttaaagttaagatcaaaagcaagcacgttggaggagccttctccaaaaagaacaaatgtaggcgtt

SEQ ID NO: 108311 - DNA, 294 bp, Glycine max
gtggattcatggcaggtacagctgcaactaagcacagtgacggtcctgaaagactaggggaagctggtcttgcactgcactatgctaacatcatcagtcagataaatatgattgcatctcgcccaactgctcttcctccaaacacccgagacacattgaatcatggtttgcccaacaatattaaggctgctcttccatcccagttgcaaccggtgctgacatgaaagagctctccatcactcagatcaaagctgaaatgggaaagattcttcagtggcttgcaccacttgccac

SEQ ID NO: 108312 - DNA, 292 bp, Glycine max
gttgccaccttctggaaaggaactgttgaagttagtgtgggacattatccgtgtttctttttatcctccatctgacatatctactaattcacttgatactttggtggctcaacacctaggatccatcccttggtctggattaataaatgatgagatcaatattttggaaagagatatagaatgtctaataactgatgatctggttgaagaactcacaaaggatatgttctaagaagtaccattttacacgatcattgtgacaataaagaattctgcacaaggagcaaggctt

SEQ ID NO: 108313 - DNA, 272 bp, Glycine max
ggctcgaggcggagtcccctcaatttctccccaagtaataaacggggaaccatcgacacccggagcatgagacggtgtcgtaacaaagctataaccattctcagctttcttcccagattctaaataaaacggattcggagttttcctcaaatcctccaaatcatacttctttaacttatccccttctctaagagacataggccctggcgtaggccagctacaggcgtataaagcacctcaacagttccatcatctttgggcctagaatccat

SEQ ID NO: 108314 - DNA, 291 bp, Glycine max
aaacgtgcacacattcctacaccacatcgaacccctttgcaaaagctcaagcttctccatcaccaactccatctcctccaccgcctctaccttcttcaccgccaccttccgccctccaccacccatcaccgccgtccacgtctccacgcccgccctcccgccctctccaatccgccgcaccagcctcaatcctccaccaccgttccgccacagtacttcatcgtctgtcagacagatccaacaacaactttgaagtagctccgatagtcttggtcttgatctggatcttcg

SEQ ID NO: 108315 - DNA, 283 bp, Glycine max
ggaagcacaacgtattccttcgccaccacaagtggacagtcctgtctctgtctcattctcggactcttcctcgtcggacgactgctgacgtgtcgatcgtgcacagccgtagtgtcgggctccatcccgttctactcactcgagtcgcggctcggtgaatatccgtcgggtcgctaccatccgctacgaggtggtgcagagactcacttccagatgcatgtcaggtttaactctggtaggtttcaactacgacacgatattctggcagtgctgcgagatgttg

SEQ ID NO: 108316 - DNA, 277 bp, Glycine max
gtcacatgggtctgcggccgtgctcctctaatgatcttgttcagttagctcgagaacagtggctcgccaggaggatcaataatccagtggcgttgtcgatggcgcctaatggaacgactcttttagacaagacatcaacgggagcatgtcaactatgcgagcaaaagttgagtatcctgatacttcaaagatggtgatcgatgatcccaagcatatacctggggctggcactcatgcatacgatggaatactgatagcgacaccacctgcttaggta

SEQ ID NO: 108317 - DNA, 270 bp, Glycine max
ctgagagtctcagtctcttgggaatgagtgcctccagaagattgattgatgcatctgaagcctttactggatatttcactccttatcaatccagttactgtgtggatagttccctggataagaccaaggccaaaggaaaggttcttgtgtgtcgacatacagagtattcaggggagtcaaagttggaaaagagtaagatagtgaaggaggcaggtggtgttgggatgatactcattgatgaagcaaatcaaggtgtttccaccccatttg

SEQ ID NO: 108318 - DNA, 276 bp, Glycine max
caacatatttggatccaagccagatgagtttgcagaggataaacagaacctctttgacattattcacatgtaccaccagttgaaggcacggcaactttctgtgcagtcagatgcaaattccttgatcacttaccctgaatatattcttccatacctagttcatgctcttgctcacaattcatgtcccaatgttgatgattgcgaggatgttggagcatatgatgatatataccggcagttgcacctaatactgtcaatgctactgcaaagagaaga

SEQ ID NO: 108319 - DNA, 118 bp, Glycine max
ctgcgcgtttgcctctgtctcggatgcaatggtggaacgtgtactatcagagcattggtatctgacaactcggtgtaaatgttagcctcatgatgctaatgatctcagaaagtgttgg

SEQ ID NO: 108320 - DNA, 274 bp, Glycine max
tctcgagccgattcggctcgagatggcctttgcctctggccttcgcaacaccagcctcaagtacaacagtgttggtttctacacaatggctaagattgctgttaccccaacaattgttcttgcggagttcattcattttggcaaaaccattgattttaaaaaggtcttggctttggctgtcgtgtcagctggtgtagctgttgcaactgtaacagatttagagttcaatttatttggtgctctaattgctattgcatggataatcccaagtgcc

SEQ ID NO: 108321 - DNA, 132 bp, Glycine max
attagtttcaaaattgtaactttgttatttgatacttataaattggttacgtatttggtctgaatatcccggatgtgttaagattatatgagcattttcctatttttttgcgtcaaaaaaaaaaaacaagaa

SEQ ID NO: 108322 - DNA, 201 bp, Glycine max
ggctcgagaacagtctggaacctggaaacgcagacatggatatgatcgtgcaaatgatgaagatgctattcctatcattgaggcaaaaccaactgatgatccagaggaggatccttttgccaaaagaaaagaaaataagaagaatagcattgaaaaacaggagaagaaatcgataccagacttggaaggagcctgcaaaat

SEQ ID NO: 108323 - DNA, 299 bp, Glycine max
agcttctcgccagaagaggatttggatcggagcgagtgtttttcactatcgatctggtttccttggatttggatttggattgaactctaataatgtggtgtgcggtgagagattccggtggccattactgccctaagaagaccgatgatttatgcggcgacgtttgtggccaggagtcaagtcaagtatcgggcatgtcaagagtgcgctgcattttacgcggcgtggatgtaaaaacctgcatatttctttttgctgttgtgccaatgtgcatctttggaatatacttgcatggacag

SEQ ID NO: 108324 - DNA, 298 bp, Glycine max
caaactaatttgttcgaatgtcccaccatactcgaattagtgtatattgaacgaattgaaagggatcttttgtctgcctagtcatattcagtgtcggctaggacctcaccaccgatttcatcaccaatctcaccatcgaactctccatccctcacttcttcattccctacttcactaccagaaaaatcttgcacatcgtcgaaatacactattgacaaggcaccctttctgcccacatcaacgtcaaagatgactcttttgtcatcagaccctctgatgtcctcataattcctatttg

SEQ ID NO: 108325 - DNA, 296 bp, Glycine max
tcaactatttaaaaattctatttttactctctcaattttcattgtccaattttactctctatttttttaaaagtaattttagtctcccacgttaaataaaaactatcaagtacttatatgtctgacaaaattacatgtcaacaacaaaataataggtaaaaaaaaaattaattttgtaaaattaacttcatgtcatcattaatttattacattaaaagatttttttttcgcttacaatggaaataagtttttttcaagtggtcatagaatgctcaaatttgagtgggacaaaaata

SEQ ID NO: 108326 - DNA, 285 bp, Glycine max
tacttcaagtgtgccataaggtaatggaaaattactgttgcaatcaaagtgattgattgttgcaccattgagaatgaggcgctacgtgtcaagattaattcatggcccagttggctttaatccatcatattcctttccgttgaattgtgagatgggttcctactgtgctgccagaagaactaatcgccaagcttcgttcagtggcaacaatgaatatgccacaagagcttttgcaagaacctctgtgtgcttcattggctgaatatcagccaaaggataatcctg

SEQ ID NO: 108327 - DNA, 288 bp, Glycine max
atttattggaaaactagcaaaaagaaaaaaaaatgttgagaagtcttcaactggagtctggttacagaatcatcttagctttgagactctcttccctgctaattttgttttcttcggttctgagtgctcatgggtatccttcaagagctcatatcttcatttatgcagcctgttctcaagaaaaataccaaccaaactcaccctttgaaggcaaccttaacagctttctgtcttcagttgtcagttcattctcggatgtaacttacaatagttttgctattggaaatg

SEQ ID NO: 108328 - DNA, 276 bp, Glycine max
  unsure (1)..(276): unsure at all n locations
agttaccaatggctccctcatcaaactacatttctttccttttcctcaccacccttttgtttgctcttcaaatcagtgcaagagacagccagttcttcagcaaagtcacccattttgacaaaaacagtgtcaaagagacagaacttcccaacaaccacctttcattccggagactgaaaacagctatggcctatatggtcatcatgatgagtataaccaagtcncttccaccaccaccaaccccacttcttaccacccctacaagaccgagtttga

SEQ ID NO: 108329 - DNA, 292 bp, Glycine max
atacaagctactctaatgacattattattgagatgtgtgtttgaataaatactaattgtgtggacatcgtcattgcatatcataatcttaattggccttgtgtgatattgatttaagggtgattcccctgtaaatttttatctgaaggagaaaagtctaactatattttgtggtttgagggtatgctagagctatggagttgagtatcatgttcttgttggatgtctagcatgaaatataaaagtcgagtaattgttgatgatgggaaatttagtgaattttccaagagagc

SEQ ID NO: 108330 - DNA, 185 bp, Glycine max
cactgatgagcaaaaagcaggaatcaggaaactcttcaacaatgcctaagcttgagatagtatagtatttgtcagatttccctctgggaattactttttaaattatgaagatgtaagatataccattaaactttggatgtttccatatggattgtaaacttagcgaaaaaattttgatttgattc

SEQ ID NO: 108331 - DNA, 287 bp, Glycine max
gcttgagagttaataagaaaattaatgatgcatctgtgtttcacatcagtccatgcatcaggcattatagtacaaccatacttgacccattgctccctgtggcctttcatcatatttgcagtatattcaacttccttcttcaggagtggaactctgatgtcatgatagctagtagtgggctaatgtggcccatattgaccaatggctgcaaccatattctcatagcttgtcaatttaatgagtatgaatgacaaacctgcttggtaccaagagcgagcaatatgttg

SEQ ID NO: 108332 - DNA, 282 bp, Glycine max
  unsure (1)..(282): unsure at all n locations
ttntgtttctgtttgtgctgggttctccgttttgagattcgcatctgggtggagggactagtcctgcagcgctcgtagcgcgtttgatctggaacgatgaacctctttctcggcagatggccttcttccgttcagtaaacctgtccttcgttccgatcgggtctattttcctaatccagaatggcgacgattacaagcttgatcgggctcatcaataagatccaacgagcctgcaccttgttgggcgtacacggtggcgagggcgttgtcgcttgtggaggc

SEQ ID NO: 108333 - DNA, 299 bp, Glycine max
ctatccatcaaattgcttagtatttttttaaatatttgttatatctttagagtttgggttatttagcccagcccaatttaattgtattttttttcacttggattgcaaacttaaactaggaaaaaatccattggatccaaatatgttaaaattgattggatcggattaaaaaatgccacagaccaacctaccaggttagttgctcggatgactaactcatacccgcgttacctaaacgtcagtagcatgttggcgtggagctggcgatccacggcaaaaaggcttgggggctctatgaa

SEQ ID NO: 108334 - DNA, 304 bp, Glycine max
ctggaagactggggattggcttaactttgacttgtgttgcagaggtggcggggaaagcttggtagagtttgtggtgaatctccccaatgggagtactgtgtttcagaaggcggtgtttactgggggagtggagaattctaagtatgctgaggaggtttgtgggagacggttacggcggtcacgggaagtgtgcagaggtgtgtggggattgtggcggataagtttaaggccaaggcgttgaggaacttggaggtgcagtaccattggatggtgaacacttcgtgccagcttcaggggtatgcta

SEQ ID NO: 108335 - DNA, 306 bp, Glycine max
agcagctccctgaaatatgacgtgattagaatgctgattaggggaactgattactcacattcattgtgcttccatgtttgtaatggatcttcacactttcacctttactccaagaaaacttggctctctttctgccctcagccagctgcccttattgtcaccgctggagatcaaacccagatattgagtggtggactgtacaagcacgtgattggaaggccaatctttaaaggagagaaagaagagagcatttcaatggctttcctctattctactcaaacaacgaagcacaattttcaaaccagt

SEQ ID NO: 108336 - DNA, 191 bp, Glycine max
tgtgggagtgtcagctccacacaaagatcatctcatccactaatagatcaatagaaactgcaaatttatagattttgtgctgcgaagtatcagcaggttagaaagtaacgagtgtatttggaatggcagtgcaataaaaacaaatcgattaagtttctgcctttataatgaagcaacaatttatcacttcc

SEQ ID NO: 108337 - DNA, 272 bp, Glycine max
tcacaattgatgatactagagtctcaaatcaaagaataacgaatcaggtcccaataagggggtaactgttactcttctggctacttcttcccagatgtcagataattcatgtatatccccagtttcatcctcctgcagcgagttttcctccataacgctcgtatcattccactgctgctagctgtatggagaatttggtgtttgatgatgatgacttcggttttcttgattcagacaatgaaagctctggagcactactaaatctggatgac

SEQ ID NO: 108338 - DNA, 249 bp, Glycine max
atgattgtgccctagagatgggataaaactcaaaatggtcttcatttcaatttatatggactactaatctaaaatgtttttgtgtagacatgtgataagatttaaccattttgccatgtcatatgatgggatgataagctaaattctttttgggtgtgtgtacaaatattttagattgagaatgtgtgtaaattaaactctaatagaagtagggtaatgtgacccaaagggaatggaattaggggaaat

SEQ ID NO: 108339 - DNA, 267 bp, Glycine max
ttactaccggcacatttggcactgcattgggcttctggaaagggagtcgccgccctgagctctggcaagagaaagtgtttgcatcggaggcacaaattatggaagcaaacaatgccatggcatggggaacactcaaagaagcagtagctgtagaacaatataaaaagatcacaggtgatgaggtgagctcaatggggtttgcagttcatttgaagcagtcttgttactggcttggtgcctcctctgatggtgttcttgggatactgg

SEQ ID NO: 108340 - DNA, 139 bp, Glycine max
tcgcacttcaggtcgagctcgagccgctgatatatgtgaatgtgatatttcagcaagggttttgaattatattcagaaaacatggaatctgattcaaaacccttgctgatatatgtgaaactgatatttctctttagcc

SEQ ID NO: 108341 - DNA, 288 bp, Glycine max
ataggctatttattctgattttgccactggctaaagggctgaagcccaagctagaaccctctacagaaaggcactccctagagaaacaaagttgaccaaaaaatttaaaagaaaacaaaaaaggaaagagggagagagagattattgctggagagagggggttttagtttgtctttggttgggttttagaacacaccgtgttcttctaccttaggctatttattctgattttgccactggctaaaataatcatgataataagtgtatcagtgtaagccaaagttttgg

SEQ ID NO: 108342 - DNA, 283 bp, Glycine max
ctttcactttcatttttctggttctgatttagggcacccgaactcggtctttgacttagaactagctctgatttgctccttaaactctaggtgagtgttgctcctatggttcttgtgcaactaataggtgtgttgaatgtgggaagagttcattgcgggtgtgctttctacaattaaagggccttgggctatcatctactagcaggtaacaccaagtggatagttcgaggactctttggtttggctgagatgcatttggtaggcgaagctccttgttcactag

SEQ ID NO: 108343 - DNA, 283 bp, Glycine max
ttccctccatgagcaccatggattcctcttccatctatggtgtctcacacagacacttcctcaccctcttccttcatttccttctgcccttgagaaggtcataaaggatattgatgcacttgatagtgctagtgagaaaatcacaggtatagtgctgatgtgaacatggcatgggccttggaactcacagataagctaggaatcaaaggtgctgtcttctgccctgcttcagcagctgttttagtcttgggtgagaacattccaaacctcattcaagatggga

SEQ ID NO: 108344 - DNA, 276 bp, Glycine max
ctaacaattctcattcaagtttcacctttcgccggaaaaagaaaaactcatcgcaacgtttagttcagtttccgatggcgccaacgctgaacctctccgccgtcggaattcctctccgtttctcttcctccgtcgaccgctccgcagctttccccggcggaactccgtccgcgccgtcgcggaggaggcggtggagacacggcggtcggcagccagcctctacgatgtgttgcgagtcgagcgagacgcatctccgacggagatcaagtcggcgta

SEQ ID NO: 108345 - DNA, 177 bp, Glycine max
attctaggacattttctattctagaaattcgtatcatattttaatactgctccttgatacaaatttcagtaactctaaatttggtctatggtaagttcaactttgttcttgatagtgccttcgtaagtacttgttcttcgatcttgtatgcttgagctagatttgcttttgcttagt

SEQ ID NO: 108346 - DNA, 253 bp, Glycine max
tcggtatgcggctcgtgtggattttggttctgctcgctctgcttcctgcgagtgtcttgcgatccggtgtagacgctgaatgggcggtcggcggctgcggcgtgctggagttatggctgttgatacctttctaggcacatctgaagctgtaaacgagggtctccccgtctagctgtgcgacctgatctctgatgctgtgctcgatcgtgccttgttgtggaccctgactgcttggttgcctgggagacttggt

SEQ ID NO: 108347 - DNA, 160 bp, Glycine max
ggccgccgacgagggagcacggcgacccgggaaggaaggcctgaccgggaccagcacgcgtaccagcaggcccgagagcgaggcgcaggagagcagggcggaagcaggggcagagctgtggccagggggaaagggtgagccgcgcacaaggccacacaac

SEQ ID NO: 108348 - DNA, 280 bp, Glycine max
gctcggtagtcggctcgtgtgtctcttaaacttctggtgctgcttgctggagctttctctagtgtggtagaggcatagtttggtgtgacccgaatgtggtctatgaaatctccatggctaagtctcgtgataacagaaggtgagtggtgaagtttggtttctggatgctggtggcgaggtgagggggctgtcccgttcccgactcgctgaatgttggtggcgttgtggtagggacgcactctggttatgggttgcgtaagggtactagtgtggctaggct

SEQ ID NO: 108349 - DNA, 136 bp, Glycine max
tgtcgtatagacttctgttgccagttctcctttcgtggcagctagagagatggcatactagagagagggggggtggtgagatgtctgatgataagattgtgggtggctatgacaaggaagtcaggctttcatgctt

SEQ ID NO: 108350 - DNA, 144 bp, Glycine max
gcacgtgaactcttcttctcattcacattcagttacgcgagcaccatcaggtgtgttcagttgctctgtattatgcaactctgttttttttggttccgcctaggctctgcaaatgccaatggtggatttggagggcacagaagg

SEQ ID NO: 108351 - DNA, 251 bp, Glycine max
gtcaaagaaaggctttgaaatgatgccatattgccccaaaagctcaaacactactcatagaatgacttattctggacaaatgataaaggaaagagaacgtgttaggcggtctgttgtcgatgcatgttcacatgaagttggttgtcatgatagaagaatggaagataaggagcttgaaggaacaaaagacgtgtgtatgatatctcgatacaaatatcgacaaagagttatgtccactgacaattacagag

SEQ ID NO: 108352 - DNA, 207 bp, Glycine max
agtcggaataggtcgaatcgagcgaatcggctgaccaatggagcatatccttgatagattaaccgcatgcaataactactttcctcatttaggttcactgttcaaatttaaaatttcgagttattagatatatagaactccttaatctatagtttatagatgttaatctgtatgctagagttttttctcgtgtttgtttggttgctt

SEQ ID NO: 108353 - DNA, 99 bp, Glycine max
gtcaattcccacatccccaagccctagttttgttccatttgttagaatcaaaatttatgcatacttcagacacctagtttcatatcatcattccacaca

SEQ ID NO: 108354 - DNA, 293 bp, Glycine max
cagagatgtacaaatggaaccagagatgacagatcttgggaaaaaattgtggccaaatgtgggggtcttccatcgcaaatattagacctgagcaaatttttttcagataaagatgtaacaaaagaggagtggttaagattgcaagagcagtggttaagagatcaaggtcaaggtcaaggtcaaaacccttggtctgaaacacttaacgcaatcgtcagtgacttcaacttaccttcatatgaatcacatctgaaatgcttatcttattttaagctatttcctgctaattttgg

SEQ ID NO: 108355 - DNA, 298 bp, Glycine max
tattaataataatattatatataaaggtataagcctaacaaagtagtcataataaatttaatcattcttttatttatcctattattataaacaacataaaacactttattgctcttgctacggtttatagataccttgtcactcatccttctaatttaccatcttaaacttcataaatataacaaataccttatacctcgtgtagaaacaaaaaataagccaacaaaatgataaaatacagtcaaagacaaacatgacaaagccttaaaatgctttcaacttagaatttttattaaag

SEQ ID NO: 108356 - DNA, 286 bp, Glycine max
ttggcacattgagagtgtgcagttaaatggtttaacatcatggcaacagatcatgtgatgtgtgcaatcaaaaagttcagaacctacctgttagtggtgacatgatgcgtttgtataacagactgctcatttgatgtattgttgggactcactgtctgtaattggaggatcagtactggttagtgattaattacctactgattacaagtgtcacggttttatagaaaggttgagtgaggctcattttgaaagaagccctagttcagaaccgtgatgtatttttctc

SEQ ID NO: 108357 - DNA, 276 bp, Glycine max
  unsure (1)..(276): unsure at all n locations
gaagaactagaacagttttagatacaccagcactgactcttgtacacttttgatgagtattattatagagtgcatattggtgagaactgagaagccacacaactcatcagcccacattccctctccctcttgtggcaagcttccaaacatatcaattccattggtagtatcatgcaagattctcagaagatcaactcacagttttctccagaagtatcatgtaattgacaaaaaaaccgannatnaaaaagtttgtggttgcttatattttcaaca

SEQ ID NO: 108358 - DNA, 275 bp, Glycine max
cttcaaatgagagtgaaacgagtttggagtgacactcattgttaatttgtgtatagattatattactttgccatataattttgggcttttgaatgtttccttcccctggaaaatttggataaaatttgggaaaatatggaaggaatccaatggagaattgaaccataagggattgcttgaccaatttggtgaatgttcgaatgtggcgcattacacttctcaaatgacacaatgtcacattgggaaaaaaaaaaaaaaaggggggcccgccgttt

SEQ ID NO: 108359 - DNA, 304 bp, Glycine max
ctcactggaaaaggagtagtagtggtacttaaatgccattaaaagttaagtgatcttttgaagtatgatacagtcggtgtgggtgtgatctatctatctacaacccctggactttttatcactcttgtgttctagctttgtcttttgatgattgggggttatcatttaggacttaggagtttgcacaaagtacaaaaagcagataaatgatgccccttactgcggaaagggcatgcctgtgtatctttgggggttatatagggtttttggctgagcagcaatttgttgttgttgtaatcaattt

SEQ ID NO: 108360 - DNA, 119 bp, Glycine max
atggatgtcacttcagctctcatcgtggccattctcagagagcaagaggaagaagtagtagatgctctcagaagaagaaggaacttcagcactcaaaacacctcagtcatgagtttcaa

SEQ ID NO: 108361 - DNA, 305 bp, Glycine max
aaaattgttgagatgggaagtcacagggaacttctcttaaaagatggtttgtatgcacggttaaccagaaaacaggctgatgccatggtatgatttgggtttctgtagcagatattctatttttcctctggcttctttttaaaggctgtaaagtgaggcagcaatttttttttcttgttgctgaccaatgtatttatagtgttatacaagaaaattggtgaagttctcagcaaagaaggaagctgcagaagttttggtttaaaatgcatagcggcttcagaaagatttcaccctacaggttctaa

SEQ ID NO: 108362 - DNA, 299 bp, Glycine max
tcggacgggcaggtggggattattgccatagagatcatgcctataagctccaggattacagccgaggcactgttgaaagatgagatgtgcgaggagattaatcgtatattaaaagcacatgggtggagtaggattgtcctcgtatcacactcgtacggaagcgtgcttgctgcgcatctccttcacactccacagactacgcagaagattggaccggttgtgtttgttgatccggtatctttcctgctacatctccctgatgtagcatataactttatctgtcggaagccagcccgggc

SEQ ID NO: 108363 - DNA, 105 bp, Glycine max
cgcggagtgatttatacgccaacagaaggtgtgatgatgacaggaagatatgcttcaaatgtagaggccaagaagaaggggtatccggtcaatagtgtaggatgg

SEQ ID NO: 108364 - DNA, 321 bp, Glycine max
ctcatcaccaccaccaccacgcaataaagttacatcaaaccacaacaactttttcacatcttacacaacactgtctctctctcttctctttctctgcgtttctctgaaaaaccagaacaagctctggagaaaccgccacaaaaaaaagaaaagaaaacgcaaacctaaccgcaaacggtaaccccattatgccatgcttcacaccacacccctctcttctattccttcttctcacccttctctctatttccttcttctctccttccaccgctgcaagaacaaattctttccattccttacgtatttcagatggagtcgagg

SEQ ID NO: 108365 - DNA, 309 bp, Glycine max
ggcggataagccatcggcaatgcaacgtgatgaagattgctcatgggatgaacggaactcagcattaaggggttctcctttctcgcaaagagagtttagaggacaccatggtagccctgaattgcattattctgataaatccaagctgagtgatagaaatccagaacccagtgaggatctttggattgggttcccagctcagttgaaggtggacgaatctattttaagaaaggctttttctccatttggtgagatagtgacgattactacatttccaggtcgtagttataaccatgttcgctttaggag

SEQ ID NO: 108366 - DNA, 309 bp, Glycine max
cgataactgtaaaatttgtctaccaaaacaggctggtttagaataagaaagccaaactgagaacaccattgagcatcttcagggtcagtcctccaagaaccgacacacagaacaatggcttgattaaagaattcaacttagacaaacaacccctctatatcccaaccaccaccccacccagccttcacaatcaaattccaaaccggagtatgcagtatcaattgcaagttatttggaaaatttaaattacattatccaaacaaggcatttggaaaaataaaggaaattcaattgcaaattattcaaatg

SEQ ID NO: 108367 - DNA, 300 bp, Glycine max
ctcagcctcgtcattggcggcactggacctctcgccgtcgagtctgcctccgccgccggcggtttggtgcagccggagctttacaccagcaaggactggatcaacggcgttcggttctactcgtcagcgttccaggacctcatcgccggcggctacctctcgccggagtcgaagactctgtgcgtggagacgccgaccgtccgcgacctattcgcgctgagggagatcggcgtgaaggatgccgtcggaatcgcgagataggcggcgaacatctcgtgaagttcggccgaggcgagcgga

SEQ ID NO: 108368 - DNA, 206 bp, Glycine max
  unsure (1)..(206): unsure at all n locations
tcggaatcggcnctatgtgtgaacctctttgtactctctgtctaagaagatgaagaagaagaagaagaagaagtagaatcaaatatccttgagccagacatgtacaggaacgctgcttcatgttttatggtcatcagtgcccgttcgtgcagcatcagcatgatacctggcagtgccagagttgcaagtaccgttgccacacaaca

SEQ ID NO: 108369 - DNA, 100 bp, Glycine max
aatgctggtcctgttacaccacccgagaggcaacacgcgtcattacctaggtattcgaattttgttagatgtttcttgaaaatgttgctttgttctttag

SEQ ID NO: 108370 - DNA, 113 bp, Glycine max
gaaatgttcacgtacctaccaaagacatttcgagccacggagggacactgggaccccaggatggaaatacaggtctcacagcgacatctgaagttcggtccaataccaaatca

SEQ ID NO: 108371 - DNA, 297 bp, Glycine max
acttatctatctgtccaagattggcttctttctagtaatcaaagtgttcaaaaaaccattttatgacttttggaatttagatgctttgacctagttaagaaatgctatagtaacgtaatttctaacacactctttgttattaggtgaaattcataagggacccatgtgtcacttccccatttattgagtcctgtttattattatgagactaagataaatttcactcgtgaaggaagagtaggttaaaagaatgagttataaaatatgttgctaacacctagcacttttctaaccaag

SEQ ID NO: 108372 - DNA, 174 bp, Glycine max
cggatcgagccaacaccaccaccaacaacaacaacaacagcgttgtaattgccggaaaaggtgctgtcaaggccatagcagttcactccggcaaactcttcaccgcccaccaagacgacaagatccgcgttcggaaagtcacacacctgtcccacgactaccagagtacgcacg

SEQ ID NO: 108373 - DNA, 281 bp, Glycine max
ctctctacaaacaatatcaagacaacttcatctaattaaccatgaatcaccaacaacaatctcctggtaagtctttcatatatttactttttatactgaatataattaattaccagcattccttcatcaaaactgatctccatcattagaaaaattctttctcactttcttaccaaatatgcatggttttaacttctcataatttaatgaatggcttgatcatattcatatttaggtgcttaattaaaaatcctggttttatattcaaaactagaattatt

SEQ ID NO: 108374 - DNA, 194 bp, Glycine max
tggtgaattgaaaacatccacatctctccttcggtatgcaactccaactgtgacaacaacaatacactctgtcacagtgtagagatagcgtactaagctgatgaatgatgaaggtacccttctgtagtatctctccaacgataatgttggtcataacaaaacaaaaataaatagtaaatgaaattttactcatg

SEQ ID NO: 108375 - DNA, 275 bp, Glycine max
  unsure (1)..(275): unsure at all n locations
ccggtactcgtttcgaccttcactncgcacatcacgaaccctcacttnccggcaaccaggtgatcccgcatcatnggcaggtcgtggctatacccnaggatccagcgccgccaagaaggtcacctcaaggagcagtatagccgccgccaantccccgtcgttcggagcgcccggtaccacaaggctggaatagacgccgagcgcgtcggcgccggtgcacccgataacctcgccgttgtcctcgaatatctcgtagccgatgtntgtggtagttg

SEQ ID NO: 108376 - DNA, 138 bp, Glycine max
tgctaattgatttccagaaataaacttaacacatcggattaagagtctaggcaatcctaaacggggtttaaaagtgatggcaattatcattatcaacccaagaattacctgttttataatctatctttatattcttat

SEQ ID NO: 108377 - DNA, 285 bp, Glycine max
gtcacattaaggttatgcaagcagctgctaaacttggactttcaatcacgattagtcaagtgggcagtgatatgctgtctactggcaccccttctgctttgccaacaattaataagaatcaagagtggcaacctgcaatgtctctaatgaagatggattacttcatcagttacattctactcttgtgcaggccatagattcttccaaatcagtctccacagcagattctctagttcctgttatgcaggattgtgtggatgctatcactgaacaccaaaggcttca

SEQ ID NO: 108378 - DNA, 278 bp, Glycine max
ctacgatctagggcttatgtgcttgggaaattggtgaagcctaagtactacaaaaccattatttgttccatcacattggatcccaaaaagctcaatgctgctatttccctcaagaaatcttgcacatatgattaatatgcatatgatggagaacaagtggaatgcacatgtaaaagaattatttgaagaaaaaaaattaataaaaatattattttatgattaatgtgttcttttgatgtgaggaaagaaatggtacagctcagagggaagtgtgacaa

SEQ ID NO: 108379 - DNA, 278 bp, Glycine max
ctctcactctctctctgtcacctatgaaagactgatcgttatttgagaatactttcaatggtctctacgatgatagtcttgatgatgtcatcgacatggagctcttggatttgccccttgactctgaggatgtggaaactgatgctgtggtcgaacaagattcggatgctcagctcagactccttgaagacccagcaccagcacttggagtgttcccactacaagaatcctctgcattctgtagacaaactccgcatgagaatgcgacactcggcagc

SEQ ID NO: 108380 - DNA, 287 bp, Glycine max
ctcgtgccaaaacaccacattggtagcacaacaaccttagcttgtgccctcatctctttagcctttgttgctggaactgccattgttgttggtggctttattttgtataggagatcttgcaagggtgatcgagttggcgtttggcgctcggtgttcttctatcctctcaatcttactgagcatgatctgcttatggggatgaatgagaagagctcaaggggaaatggtggggcttttggtaaagtttatgttgtgaattttcctagtggtgaactagtagctgtgaa

SEQ ID NO: 108381 - DNA, 212 bp, Glycine max
  unsure (1)..(212): unsure at all n locations
cacatactaaaagttctaatcataaatcacatatcttatatgataagtttattgttttnttctgaacaattcatacgaattaaactctaatttagaaattttttctaaggggatctttaattggttgatagtttatgagttatgacggcacatgaagttagacttttttttttttctttaaataaagttgtgacctgagcaaaatacggatt

SEQ ID NO: 108382 - DNA, 280 bp, Glycine max
acgcttttagcttttatccattgaatagcaagagaccccttttgttcccttttgttttttagtccttgaaacattcgtggcttctttgcagagctggaattttcactcttcaacccacattgttttgatcccaaatcagaaaaaaaaaaaaaaaaaattggggttgatatgatccgtaagctgaaaggttgaaactattatcattggtgacacccttttgcatgtcagaatttgaggttgatcaacgagatcgtttcgttcagagttcagactaatcatg

SEQ ID NO: 108383 - DNA, 287 bp, Glycine max
atttataatcttcaattccttttgcaagtaatcaatcctctccctcatctcttccatccacctttctcaaaaaggtttcacccaataaaaaaattgcattttcctgcatcttgccattcaacaaagggtagtcagtttattattgaaaataaaatgggacacttaaagtattagtgtaataaaccttatatagtaaaaagaatatataatagttgggggagaagaagtagctgttgaaacccaacggttacattggtgctctaaaaaaagaaatttttttcaggcta

SEQ ID NO: 108384 - DNA, 196 bp, Glycine max
  unsure (1)..(196): unsure at all n locations
cattatctcccaaaatctcatttccacgatcatcgtgtactgagcgnctccacgatcggtatcagtacttcaggttataagatttatcaaagtatgctgttgctaccatgtccgagcaagtatcgctgacactcatggaaaatacagagagcgacaatgttatatctgcagaggcaggacaagactttgtgggtgt

SEQ ID NO: 108385 - DNA, 284 bp, Glycine max
atgaatgtgtttttctgtgcaggcacattctcaatatgtacaatgttgccaacacaaatttaggaagtcaggtttcatttttcttttctttcagtgttttgatgtgagagacagttatgtaattccccttttcatatctcctgctgtattataaatggcagcaaaaaaaaaaaaaaaaaaaaaaaaaaaaaaaaaaaaaaaaaaaaaaaaaaaaaaaaaagggggggcccccctttatgaacccccccccccggggtttttttccgggggggtacccggggggt

SEQ ID NO: 108386 - DNA, 292 bp, Glycine max
ctagagttgagaacaagaacaaagagagcgtggtgcttccttctacgattccatggcgttcaagatcaggaagattggaacctaagcaagaagaatttgatgatgccttcaacatgatgctttctccttcaaaggaggaatctcgcccagtgaagtctcaaccttcacgtgcttcttcgcgagcaagttcggtgtctccttcgccttctttctcatcagaatcgcttgcgaagaactcagaggactcggtgaggaagaaggccttctacaagtcatgtcctccaccgcctcc

SEQ ID NO: 108387 - DNA, 182 bp, Glycine max
caagtatgttgcctttaaaacatgctccgagtcggtgtttgcccactgttatcaagtttgtctacttaataacatgtgactttaggcattgtgccactatcttaacagtgaacgtgtgctgcttgtattgtgtatatactggagaattttaagaatgcttcgtgcgagcgtgttgtgtatcg

SEQ ID NO: 108388 - DNA, 275 bp, Glycine max
ccgggacattcctccctgattgaggtatgctccttcaaacaagacccacccatcacgcatcatctttgtaccgtttgagctaatgcaccacctgccctgccaactgtcatgttttacagggtttcaccgccggtggtttcatttacattgctgtcgcgggagtcctaccacagatgaacgaccagaaaacaaccctcaagagctcagtagctcagctgatttccctggcaatggggatgctggtcgctctaggcatttctctggtagaataatct

SEQ ID NO: 108389 - DNA, 174 bp, Glycine max
cgagagtgaaggatagtatagaggaagttttgtggtttgaatctatagtatagtatcaaattaaattgttagaagatcgatcgatcgatcgatgtctctggtctgatttgaagtttagcatgcggcggagggcgcatcggttgagaattgcgccgccaatcccacttagcaggg

SEQ ID NO: 108390 - DNA, 268 bp, Glycine max
cattattctcgtggtgatatcaatatgtcttacttcaagacagacatctagaagagtcaatggcatgcttccccttagccatatgttatcggtttcagatgagatcaaggaaattaattttgatcaagtgtcagccaataatcatcctcagaatggagcttttgtgagtctgtatgacaggcttagtgacagggattctgaaaaagttttgatccatactaataacggggataatagcagtcaatcaggctcatttgttcatcttaag

SEQ ID NO: 108391 - DNA, 262 bp, Glycine max
cggggtaagctcctgtgaagtgacattatctctaagataaaattctttacttcgaaatggttatcccactgtgcaccatcccgctatagtgattatgtggccaatgttgttaagtggtggcaacatggcggatttttgcctaaccggcataggcgatttatgaagggaggccggctatggtggcgccctaggctgcaatggcatgtttatatgatggaattttggccttccgcagttataacacggtttgggggctggccgt

SEQ ID NO: 108392 - DNA, 256 bp, Glycine max
ggaggccaaagacgcggcggaggacgccggggaggaggaggagtccggccgccgcggcgaggggaagaagaagcaccacttcttcggctgatcgggctgctgctcgatcgatctacttgcgtacgtaggctgctccccaggaccagaaggagcatgcatggagggcgaacgaagtcacgggggtttgattgcccgtctatgtatatcatgtgtagttactgatgatgtgtggcatggtacttcgtacgcgtgtttg

SEQ ID NO: 108393 - DNA, 100 bp, Glycine max
aactcactcactggaagccttgttgtgagtgatggataggcttcctgcactgagcagcacgttgaaacctcttgagtctcggcgtagaattccacacaac

SEQ ID NO: 108394 - DNA, 259 bp, Glycine max
acttcggagagtaccaaagccatggatgaattgaatgtagatagtgcagcagatgaaccaagtgggagttataaggacaactttgctcaacaagcatcaccaaggagtacactgagtccaagaagcattcagagtgattcaattgatttggctattgatggagtggtggatacctcaattgagcaattgtatcacaatgtgtgtgaaatgaggagctctgatcactcaccctccgggctagtgtctactcttacgacta

SEQ ID NO: 108395 - DNA, 255 bp, Glycine max
cttattctctggctgattgggatctagagtctacagtgtctccacgctgttctacgctatcctgtgcacagtggcgattctttcgtcaatttactacgacgcttgggatggcaccggggcagagcgttattacgcggtactacgtgatcctcggcgtctccacgtacgcttcgcaggagtgatctgtagacggcttatgagacagcaggcattaagaatcaccccgacaaggcggtgatcccgcgaagtttaaag

SEQ ID NO: 108396 - DNA, 252 bp, Glycine max
catcttctcgccggctaaagttattacaggcagcgggaataaggagagctggccgtgtcggatcgccgcaacccacaggattccaaccttgaggtttctggagcggttggtgtcccatccaagctgcaagcatcatttgccatctctcttctttcttctagcgagaaccacaaccacccattggtacactacatataacgtaaaaagttcgataacgaatttgaccgttggtctgcaatgccgtgtaagaaa

SEQ ID NO: 108397 - DNA, 254 bp, Glycine max
gaaaatttagatgcagaaaggtaaaacaaaaactgccaagagaattagtgccttcactgccccctggcattagtgaccccaaatgatggtaccccctgcacctcccttcaaattcaccctcacgccccactcatgcttgctgcgtcatcctctccaatatcctgctgcttagtatcccctctgtttgagacatgcagaacatatttctccacttcacttcccaaactgccttattcctcctctcccttctgggg

SEQ ID NO: 108398 - DNA, 286 bp, Glycine max
acaaagctcaattgatgagggacgatccatttcctttcctccttctctatattgaccggcgcagtgatgccaagccatatagcatatatttcacaacaagaaaaagaaaaacctcagctgagtgaaatagtgaatggctatctctttttctgatactcttttggtaattgtttaattcatttgtaggtcaattgattgcaagcactttgactttggggaagggaactgcccttttggaactagttgtttctacaagcatgcatatcgagatggccgtctggagcag

SEQ ID NO: 108399 - DNA, 294 bp, Glycine max
cagtgatgcccaactaattaacctggtttctctgtactggatataaggcgattaaaccatgcaaacaccatggacaagatatggatcctctgatgtgcctcataaggtgtctccacgtgctgtacgccaactcaagcctactactctggacattgattctgcatcttctttaagtcaggctactaaatcatcaaaagatagaagccccaaagtcactgaccgcagatcacccagaagtccagttattgagaggtagcgccctagcaaaatatctgagttggaatctcaaatttc

SEQ ID NO: 108400 - DNA, 285 bp, Glycine max
caaacggatctcaattgcaaacgcaggaaaggtgtttttgtttcgcagtgagctgagcctattatcaacacgagcaataatttcaattcaattgaattatacccctcaatgcaatggtggtctgcaaatgtcgcaaggctactaagttatattgcttcgtgcacaaagttcctgtctgtggggaatgtatctgcttcccggagcaccaaatctgcgtggtccggacttattcggaatgggttatagatggggagtatgattggcccccaaaatgctgccaatgcc

SEQ ID NO: 108401 - DNA, 280 bp, Glycine max
agcttaattaagctaggttatcggcctatatggctattgattttaggcctgtgacctggggatatgtttcggctttgatccgggagtcattatgttaaacatcgttgtacatatggttatggctttatttttgtcattaccgagaggcgggagctgatggattggttgtattgtcgttcgtctaagggattaccttgataatttttatgtgcggtactatcagtattcagtagcccacatggatcgtattgttgactaaaaaaataaaaaagggggggcc

SEQ ID NO: 108402 - DNA, 284 bp, Glycine max
tatttttatgactacacccttagaacatgattacataggcttatcagaggctccatccatggagaaaagctgtgataagatatcctcttcagtttcctccaatctttcttctcaggatgagagcactacttcatctctgaacttcaaggagacagagctgaggcttggtctgccaggttgtgattctcctgagaacaacaacaaatcaggggtctctctttttggcaaggatttgcagaagaagaataatggctattcttctgcttcttcaactccttccaaca

SEQ ID NO: 108403 - DNA, 286 bp, Glycine max
acacgatcccattctcttcttcctcttcttcgcgtccctctcctcccttctcttcctctctttctctctcttcaaacgcttctcgacaaaaaaggaacaccaccaccatactcaaaaagttcccagcttgttgggagaggaacagagacccaagaagaagagaaagaagcccaagaagaagagaacccaaggtgacgacgccgccaattcgggttcgggttccgactcggggctccgacttgaatccacgtgccagtatccgtttacgtcttccagtagcgttatg

SEQ ID NO: 108404 - DNA, 281 bp, Glycine max
taggcagaccccagcgctccggaggtcaagtacatgtccatgttcagcttcgagaacgtcaacgcctgcaccatcatgtgatgcatgcatatgtatagtctctcgatcgtatcatgtgtagtagtacgagctagctagtgcatatcgatcttcgtactgtatcatatcgatcgaaagaaccttaatagccaatacaagaggaatgtgaattaagcaaaaaaaaaaaaaaaggggggccccccaaatagtgacctcgtcccccggggaataattccgggggg

SEQ ID NO: 108405 - DNA, 286 bp, Glycine max
aaaatactagaaggcctgaccagtgttcaatagccatgaaaaagaaccaactgaagggtgataagagcgcaacttggcacaacaagcgtgccattaatgagaaggtcaagtcttagattaggattgtcattggtagccgtctcactgagttgcgtctatcgtggccatagattgccatcactgggtactttcttgttggtcgtactttggattttattttcactgaagccgggtctagtaacacgttttcaacattgacacattcaaatgttcaactttatgtggt

SEQ ID NO: 108406 - DNA, 266 bp, Glycine max
ggctcgagaggaaaaccagcttgaggaatttatttgtcagttatcttctttgcaatagccacattcatattgtttggcatccacatatcaatacttccctggtttgcatatgttcagctgccatctttccatcaagatgccggtcaaatagtgtttctcttcaaatggggtattgtaaaaatgtctcttctgaaagtgtctttttgagagtagtgtgcaaggaatgcaaatctaagccccattttgtttttcaggagcagaacaca

SEQ ID NO: 108407 - DNA, 281 bp, Glycine max
aaaggctgcttagcagcaatgagatctagaacaaccctattctttcgtaccttcaaggtagcccttctcagccatgcggttttctgcctcttcatcttggtattcaggtcatccatattctcattgtctcctcaactcacctcacaaacaacatgtcaagctcagtcacaatagtaccagtgtcaccacaagaaacagaaaatgcaggcacgccatcatcatcatcatgcccaaattcacccgtgtttggaggaccatgcaccaaggcccctccatcatta

SEQ ID NO: 108408 - DNA, 157 bp, Glycine max
gtcttcctaaggagatggacggagagagtcgaattccagttagggttttctcatcatcatctactatttctcgtatgcagggacggttctccttctccgatttcaatttgattgaacgagtagtgttaagattatgatatttttgagaagcttcgtt

SEQ ID NO: 108409 - DNA, 270 bp, Glycine max
  unsure (1)..(270): unsure at all n locations
actctctctaaccatcgtatctgcaacttcaactaacttttatgtgagcacccacaatttctttcacgccttcacctgcagtaccttcttccttcaaatcaaaacaatttaaaaaaacccttctttttttcgaattaaataaaatgttacgatcctcgtaagctttcagcatgacacgtaattgggtttgtttgtttgattgttttgtgaaacataaggaagccgaagggnncagtgaatcgaccccccacaccagatgtggccgaaaat

SEQ ID NO: 108410 - DNA, 174 bp, Glycine max
  unsure (1)..(174): unsure at all n locations
ccaacttgttctcttctccatccttagggttttctctgctccttcgattttctctctttcacacttaccatcatccatatgctcttantgcattagtcatactccctccaaagctttgacttttgcctacaaccctttctgggtccttccctttccgctttattcgcagctccc

SEQ ID NO: 108411 - DNA, 304 bp, Glycine max
  unsure (1)..(304): unsure at all n locations
agccgattcggtacgaggcggcgagcttcacttggaaatctagtgaagagcttccgagtttgcgaatgagaactcagcnatgactcagagacggttcgttacatttttgtggccgatgctgaagttttagctcagtgacaatttctcttgctatgactttcaggtttatgctatattgaaataaattttcattgactatgggtgtctctgggaagtggattaaagcattggttggtctaaagaaatcagaaaagccagagaaggatggaaatgccagaagagcactacgggctttgaacggtgt

SEQ ID NO: 108412 - DNA, 302 bp, Glycine max
atcgagccagacccgggccgaacgatgacgatcgcgaatctcggcggcccactggccaagctcaatttccccttggtcgacgagtcgctcactctccagccggagatggctgcaacagaagagcagattaacaacgaggataatctcaatcaaggcatgggaatggactcgcacgaattctgggacaggatcaacgaagctgattttcatccgttcatgatgatgatggattttactggagattcttcagactctgctgccactgggtacactctcagttcctgaaattgatattccattaa

SEQ ID NO: 108413 - DNA, 297 bp, Glycine max
ttaacatattgcgtccacagctttaggaaccctagcctttttccgtgcattcgtccacaactttatgaaccctagcctctttccgcacattttgctctaccatgtttacacctgaatccctttgacagcaacaccctacctgttgttcttctattgaagtggacgaggtggacttcacggctccaacgccccggctcgaccttgcatttcgtgaagaaacacattgagctcatttcacataaacaaggtgagaaggaagctcatagaagattggctgccggtgatagttgtatgcaa

SEQ ID NO: 108414 - DNA, 167 bp, Glycine max
actctaagccgctttcttctccttcaactaccactcaccaacgtaggctcacctgccagagggagcttcgttacctcactgccacagacgctgagtcgccttcaacttcctctataaccgcttcatcccttccttcctttacagtccgcttcccattccgaccattg

SEQ ID NO: 108415 - DNA, 262 bp, Glycine max
gttttaagtagctatgactatgccaatttcatcaactaaaaacagttttcttatcttgatcgtatttatgatactatggaggagtgattgcacatcctccagaggatccaattcagtcactcttcacagaacacagactgcaccatcaccaacacctatggcgtctttcctgaccgaagacatttgccacgccgctgaagttatttcacccaaacacagcggaggagctcatatccgcagtggcctcagattcgaagaacaa

SEQ ID NO: 108416 - DNA, 285 bp, Glycine max
ttcgagccggttattatgatgcttgtgctaataacttcaattttttaaaaaaatatttttgagagcatgaggtgataatttgtacgtccatttgtcttactattcttttttcctttttgttctgtggccgtcgtgtgtattatctatggttttgattgcaccttcatctcaagtttgctgaaatgggagaaatattagtatcatctgttaaatgatatttgttggattggggacaaataaaaggtatttgcatgcattttctcttttggtgagtcttacagtgtt

SEQ ID NO: 108417 - DNA, 283 bp, Glycine max
ttcatctgctggcttcttaatgttgatgcttttatctaattatacaaattttgcttatcttttgttatttagcattttgcgaaaagtatgggtaggaaaatgtgaacgaataacatgcacgataattgaacaaagcaagcttgcacgtagcccatgtcgttctagttgttaatgttaatattcctatccaagctgtctagttgcatgtctattccatgtccaagtgagtgtccacttggacaatattacccccaccggcaccatttctgtatttactatgaaa

SEQ ID NO: 108418 - DNA, 279 bp, Glycine max
tgaaccactcctaatctctctcttttcaatgttgtactctatagcactcttggttaggagacattgtggtagcgtactcgttttccttcacttggtgttggtgttggtgccttccctggttggttctacttctacacgaggctttactctatagcataaccctccctctatttctgtctctgaggattacttgcatgaaactattacttaggaactgcagctttttcagttgtgaatgcttttttctggttcctatcattcaagtaacatcaatgatat

SEQ ID NO: 108419 - DNA, 124 bp, Glycine max
ctcgagccggctattgtggtggttgtgctgataacttcaatttattagaagaatatgattacagagcatgaggtgataatatgtacgtccactcgtcctacaaccctctttccctacttgttct

SEQ ID NO: 108420 - DNA, 279 bp, Glycine max
aatgcactctctctctcccaaaacgccatgagaaaaagacgaaaaagaagccacaagacccacactcgtctctgctgcagaacaaaatactaggagaagaagctgtaccacaaaggacatttcgagtacaaaaccccacaccttcatcttcaaatttcagaaaatgtgctacgtggggaaagcaacaaagatcttcatcttcattgtgacggtgctcgttgttctgggtctagttttgggattggggctccttcgccgccgccaccaccacaacactgc

SEQ ID NO: 108421 - DNA, 273 bp, Glycine max
gtggcagtagattggctcaaaggctaatatttggacatacaaaccatggggacctaagaaaatatttatctggcttttttgacaccacagtagggtaatgtttcactttatctcaatgttgctttttgacaatgcctgtctgaagtaacctatttcatccaaaactttttttgcaggaacaaaagagagacacgcagttacgttgaaatttctgagtctcttggtgttgataagccatcagatattttatttgtcactgatgtttatcaagaa

SEQ ID NO: 108422 - DNA, 261 bp, Glycine max
ctagcccataacttaaaaaattcttcaaatgggggatcccaatcattcattattaatggggattttgagaatccatgcacaagaaaatgtgatctatcattgaggttaggacccccttaatgtaccatcgacccctagttttgaaaatggtcagattcaggaaactgaagttagaaacaatctaatttgttcggacctctcagaacggtaaaaagttggagcttcaaggacaattatgtgagaatgcaccaacaacggtac

SEQ ID NO: 108423 - DNA, 312 bp, Glycine max
ctatgtgtctctctcttcaccttcgtctttctttcatttcaatactttgtggttcagaaactctgtacagttaatcaagcccaacctcacctcagctcacctcacaggttttagttgttaattcaatatatagatagaaatccaaggaagaagatgaagcagtctgccgtccaaaacgtcgtcgctccatcccacgatgagattagcgtggattgccccaagacgcgccgactcggcctcttcaacttccacgtgaacgatacccctgtagacccttctgctggcatctcagttgccaggctgagccatgtg

SEQ ID NO: 108424 - DNA, 315 bp, Glycine max
ttctggacattccatttgtgtcgaaattcctatgttgcaagctatttgacagtagggaattcattgatatactaaaatgccaatcaaaatgggaccttttattttttggctaaaacgtcaaataatatggaacggagggagtagcaacaggcccacaattaggaaaatagttaaagtatttagagagttgttgttagttagcattctgatgctgtaatagaggtaggatataaatagtgggagagaatgtaagtggaaggagttagttgttggttagtcttgggtgggagagaccaggcttttgattctttggag

SEQ ID NO: 108425 - DNA, 279 bp, Glycine max
tgtgacgatggtggctccgggtctcatcctcgcgagggtgccaccacggtatgattaagtgaatctttcaaaaaattgatactttttttttatatttttaaacataatttagattttttttattcaagatgtgaaatttgtttcatgaaattcatctacatgattattataaaaaataactaatatttgaacaagaaagagagatatataaacatttactgaattaacctgtgatgaccaaggtcatcgttggaagacactgagatgttgggtgaactg

SEQ ID NO: 108426 - DNA, 300 bp, Glycine max
gtagtagtgccgcaatctgtcagtgagctgtacactcgctgtgaagtggaacagcagcgcagcaatgaagtcattctactcattcaagacttactatcctatgaagatcaacatccagattcattgcaaactccacttgaaacactgtatcaaacactgttgtatcatcgtcagtacagtgcttgtctgcaagagatgttgagtcagtgtctgttgttgacagatgaagtgaagagtcaagtcgatgcattactgtcagagaatgatattggccacatgattgaattactagcactattg

SEQ ID NO: 108427 - DNA, 313 bp, Glycine max
gttttgtcaggttctgggatttttgaaaacaaaagtgaagatgcatggtctgatttcttttgccttctaagatttagaggtatcaaaatagaaaacattcatttgagaggatcatctgaccaatgctggtgtccatctttgactgctctttctgctaaagtttcctccaaaattgtaccagtcaatcccgcaatggtgactgcagtatcttcaatccttgattctctgggagaagattcattaaggaaggagcttgcagggacgcctgtcgatttgtgaaatggctattgaacttccaaagcattgacatgga

SEQ ID NO: 108428 - DNA, 299 bp, Glycine max
gcgaagtatggttatccaccatatatatgactaactgactgtggtgattgatcatatatatggtggatttccttccctggctgctggctctatgactcaagaggcttcttcagccatgttccctcaatctcaaggtgactctatgcatcagacctatgaccaaggatctatgccacttatccctttacacacggctccccaagcttcaacaggccagagtgcacactatttgtcttctcaataccccattgatccagcatcacagtctcagtgggacttgtcgggccagtcatccacct

SEQ ID NO: 108429 - DNA, 283 bp, Glycine max
cttattttcatggtatcagtagtttaggtttttcttttttttcaagcacattcccttttctctggtgaacaaatacccacagactgtgcctacgtcgtttggccaacaccgtgacctccattgcatgcgaaccaacccgactagagtcgcctccatcgtcgaccactgcgccaaagtcacgcccaagaccgccacctccttcccatcgcgtgacagccatgcacctgcatgaacttcatgcatggcacttttcaggaaagcccacccttcgacgacaccatca

SEQ ID NO: 108430 - DNA, 279 bp, Glycine max
tgtcactggagaaaaacacttcctgttgttgccacctactgatgttcatcgcttgtatattcgtgactaccctgctgccacttactcatattcttcggatacaggagagttcgatctggaacttgagaagccaacaaggtatgtgcctggtgcagtgtggatccttatccttctctggagaccatggataatgagatgaccaagtttcccctgtacttcaatggccctcggccgtttgaatgtactgtgaaggctggcgaggttctctatttgcctagt

SEQ ID NO: 108431 - DNA, 145 bp, Glycine max
gataattgttactcatgcgtacattgacacaggctctatatgtattcttcctatcgatccctttgaaaatttgttttctgggaaccgtgtgtcacgtgtttgtattgtatatcctactagatttgttgaagatagattttcagcc

SEQ ID NO: 108432 - DNA, 290 bp, Glycine max
cttggcctgaatgcaacgacggtctgtcctacgactacgtgattcgagcctctgatgccggggcgacactcatagagttttactccaccaagtacaagagttatgctcccttacaaggttggttgcagcgaataaaaagtgggcaggtttgatcatcgatgaatctgaaatagttgactacgtggactatatcatctgaatggctgtcattaattagtgtgtcatctacagataacagttgatggaggagttgttactgattctaacacagtcctcagagttggataagc

SEQ ID NO: 108433 - DNA, 149 bp, Glycine max
ctaccatcaccatcatcatctgttagctcctgaatctgtggttgaatcaagactaatctagcgttgagttattttggtggagtattagagccatagagacgatgcctattgtacatacagatatggattctgcattccacacaacatac

SEQ ID NO: 108434 - DNA, 293 bp, Glycine max
tgttccttctcaaaaaaagaaaatgaggcaaaaacagagaaaagcagaagcaagagctaagaaagaggcataagaaaaaaatgaagaatcaagtgctggtgggatatcaaagtctgggaaacggcaggcaaaacccattgatccggatccacgtggtgaaaagttgttgcaggtggaagatcctttgttggaaggcacaaaatacttgaagctgctgcagaagaattcaccagattcagtggagacgcatttctctcttttgaattatatatgagaaaacagggttttgcttg

SEQ ID NO: 108435 - DNA, 101 bp, Glycine max
tgatcttcgaacaagcgtgagtcaaacacacaacaacacctgcttctggttcagacaaccttaactttggtcgctcttcggttctttccaagttccaacca

SEQ ID NO: 108436 - DNA, 258 bp, Glycine max
gcgttagaaagaattggtctcactttctcttagggccagatatgtgtgtatttcttggtttcccactccctctttcatcttccgtagtcatcttctaattcaactgggacgagtatacaaacaagttcgaccaaacttgagcttaatttacagttcagagaatcaaatcctatttgaattctgtttgcttttagatcatagacgtactgggtgactgcggaaggatgtgtggagtttatgaatttgtcatcttgcttt

SEQ ID NO: 108437 - DNA, 154 bp, Glycine max
gtcaccatctctctctctctcttttgattatacgatttcgttttgcataatctaaggaacacattcaatcagacaaggtacatcctcattcattcattcctcttatctttttctctgtcaagtgctagtctatcactcgttgttgatttcattc

SEQ ID NO: 108438 - DNA, 287 bp, Glycine max
ttctcatttaattatttcaaccttaatctatctctcaagctagcaagcttgtacccatacttcttaatttgagagaccccaaagagagaaattaattaaggtatgtgctctttctcttcagaacagtcctcaccatatgatgatcttcctcttgttcaccctccatggccatccaagagacagccccagcaccttcggttcagcctccataaaagaaggagagcacaattgcaagaagcaagacggaggaaaaggatgatcatattgaaactgaaataaagatgaga

SEQ ID NO: 108439 - DNA, 247 bp, Glycine max
cagcgagcgagcgagcgctggaagaagaatattttgatttcgagaagaaggtttcgataaaggagacgatgtcgatggaggttgatccagccaaagtgcttcttttgcttcgcggtttcctccaaattcagcaacgcacggccgaagcatattccagctcaaatgtgggttctgactacatggcttccggcaggggattggcttacaagcagctctgcagtgaaatcagatagatttaatgttgctc

SEQ ID NO: 108440 - DNA, 145 bp, Glycine max
attcttggatcatcttggttacgctgcagatcagaatagacaagtaataaataaagatctaatggagactcatttggttttcttgcttggtttgatcttcactctagttgccggcgttggagcccaagcccaaggcccatccacc

SEQ ID NO: 108441 - DNA, 227 bp, Glycine max
gcaacctccctcttcacactttccctcctccgtcttcttcctctgcacgcattttccgctgcagcaactccaaagccgccagctcagcatcctcgaaatcaggtgttgcaatctggcatggatttcctctggagcgagaatgcgacgagccgcgcgcctcgcatttctccgtcgcgatctgcttcgccttcgccagttcgcggcagttcttcctttgacagattcgt

SEQ ID NO: 108442 - DNA, 253 bp, Glycine max
cgtacattttaggtattcagtattctttattcattatttgagtatttggagcagcatttcaatgtctgtttcaagacaattgtacagatggagtgcggacgcactaagactcgcgtctggggcagaaggagtcactcgtcttcagaccagctcaaactctgcagtgcttatagtggtgttcctgtatgctgtattcccaagtctactccaacttcaataaaattttaaaatcaaatgattctgcaactctttg

SEQ ID NO: 108443 - DNA, 146 bp, Glycine max
gttcatttgcattcgagtttcatttcactctcatttagctctcctcatcggatatacaaaggcttccttcttcgctgacgctctatcgcgatacactcccctcgctgcggttgcatcatcacctaatcacttcctcaccacgcgtg

SEQ ID NO: 108444 - DNA, 294 bp, Glycine max
attaaatcatatctattattcagagtacatctaacaaccttgagttgttcatttgctttgtaacattttggatggtatcataaaggcactctggtcagatgcacgaaggcatgggcacagttccaattcaggagcaaaatcaagcatcaatcagtggccttagcaatgtgatcaacgcgctatggatgagtgataaatcttcctatttggacaattttctgcgcagagtggtcagagagtggtggaacgacacatccaggacctagctcatctattttcaagggcaagggttgg

SEQ ID NO: 108445 - DNA, 292 bp, Glycine max
tttttaagcgtgtgatatggcgtatcaagtagtaaaggggagacgcataatcaatcaccacctgcgttaccactttgatttcttcatggatcaagcacgtcacaaaggactcaatttgtttgatttttgtttaattttttttaaaattaaaattgagttctggtcattgagattttttttttgtgttccataaaagaagctccttttcatccttttttgttaatgcccaggtggagtctaatgatggttcagctatagtagtcacacctggtgaatctatgacagaggctct

SEQ ID NO: 108446 - DNA, 296 bp, Glycine max
ttctgatgttcatcaagccaatatgtttgacatgaaaaacattggagttgcaactccaacattacaagaatggagcgaatccaaagcttaatctgtggaccatgcaacttttaatttgtacctcgggatgttcgatttcaaaggtgttggttgatgtttttggcatgttaaattgtaacgtgaagtgaacgtatatgtaatactgcattacctggtattgttgttagctgctctgtaaaatgaatttcgttaatgatttttaagaaattttagtcaataatacagtgtattgtctg

SEQ ID NO: 108447 - DNA, 112 bp, Glycine max
ggctcgagaaataagtccgagcttgtcgatgtcattgggattgttaagaatgtgtcttcaacagtgaccattcgtaggcagagcgacaatgagagtattccaaagcgtggca

SEQ ID NO: 108448 - DNA, 191 bp, Glycine max
attttaaggagacattctagtcctcacacatcaattacaagttatacagaaaatttagatcatgtgttaaaagaagataaagaaccaaagctacccttgatccgaaccagccacacctgatccatgagtgaccaattatccatgacaacaacaagcttcaaccaagattctactttcacctgactcagtgc

SEQ ID NO: 108449 - DNA, 164 bp, Glycine max
ggtaatttatgttgctgacatttatttcgaatctatatatatattatgctaattactgaggtgaatctccaattctgacgggagaataacgctgataccactgaagatttgtatattcattcaattgttctgaatagctgaatgtgtgaattctggagtttcct

SEQ ID NO: 108450 - DNA, 280 bp, Glycine max
  unsure (1)..(280): unsure at all n locations
cccccccnccatcctctctcccacccacacccttacccccatcctactcncccanccacaccctcatcctccttacgtttaccactctcctcctccaccccctaagaagccctacaagtacccttcacccccaccaccagttcaccctccctacattccacacccagtttaccactctcctccaccaccaccttacaagaagccttacatctatgcatcacctccccctcctaaccactattagcatacctcttatcgatatgaagaatatgtgcaacga

SEQ ID NO: 108451 - DNA, 269 bp, Glycine max
agtggatttcttgctgtcatatctgtcaatgtggtgatagcattttacatatatttggcattgagagaacctacggcggataaacccgagcctgatcctaaatttcttgcagaggccaaagctagcatcaatcagtctacaggggatgctcaacaaccttcccaggctctcaagaaagaacagtagatgtgatgcaggactaccagacggacgacgacgttcacttgacaagcattgctactagatccaggttaaagaagctccaagag

SEQ ID NO: 108452 - DNA, 200 bp, Glycine max
ggaggaattattttctactattacactcagtggacttttacttcaatcaccatttattttgggcttggatctttgctctctatatatggatgttaccaacatcataagaaagcaacaggggataaggttggtaatgtggatggagatgcagagcaaggcatgtatgatgcttctgcactcccagcaagctactaatccat

SEQ ID NO: 108453 - DNA, 163 bp, Glycine max
  unsure (1)..(163): unsure at all n locations
ccaaaaacactctgacacaacaaatccaaactcaatcgttaattanaacaacaacaatatctaagntgcacanattaatatccaacactctcaagctttcgagtttcaatctctggtcgactgatttggttcatttgtctaagagttatatatactttcattg

SEQ ID NO: 108454 - DNA, 296 bp, Glycine max
gtttcctagaaacttcacttcatgattcgaatccaccgtagacttgttctttgacttcaaaaattgcacgcgcaacttgtggcatgggtaccaatatatatactcttggtgcttgcttttatttttttcaagtcgctgtgttatactttattatctagctatactattaataaagataaaaaaacaattaaattaatgggtcaattttgtcagtacccaatgtatagaccactgtttattttgtgtgatgaatttcatgtgaatggcgtcaattctttgtagttacttagaataag

SEQ ID NO: 108455 - DNA, 294 bp, Glycine max
tgaaaaatgtccatgcaaacctacgaagatttggaagcgaaatatggaacagaagaaacgcctgaatcaatcctcctgcttgttcaaattcctgatggttttgcacgagagcatattggagccaaaattgagtacgagtttgcaagggtgagagttcatggtgagcgatcacttggaaacaatagaaggtcacgtttcaatgtattatatcaaattccagaatattgtgacattaatagaattaaggcaaagtttgatggcaaaattgtcaccatcacaataccaaccattcca

SEQ ID NO: 108456 - DNA, 289 bp, Glycine max
gaaattgggtcactgtttaaattaattatcattagaggctgtgtttagaaaaacattaatgtatgtatggatttgtctcatgcacttttttaagaagaaaaaagatgcttggttttttatggggagtgttgaaggttgaaacttccatgtaagggttttgagagctcagcgtgatttgtggacagcaccgaaagctgatttctcgactcacgaggcaaccaaggtatgaaagaacaaggttgctttaatggaggattttcggggttcatagttgtcctagtctactact

SEQ ID NO: 108457 - DNA, 285 bp, Glycine max
gccttgtctcttcttcgcctcaaagccagaattatttatctttagatcacaatgaatagcattggcaagctgggtgctatgcaaaaactgataaaaggtggaagagccatgcctgcagctgcaatatctgatgacagcgttttggtgaagaaaatagtggcagagcatagccctgaggggatagaatatgatgtcaggccacttctccatagttgaggatgttcttatatattccaccttgagttctgatagtgctacaacggctgcccttacacgtgctgatca

SEQ ID NO: 108458 - DNA, 300 bp, Glycine max
tgggaatcaagagggtaaaagagagagataaagtgctccatcaaagaggcatcaccactccccaaatgaggtatctgttacctcagttgagcaggctccaacaagtgcagatcttttgcatgatcaacgcccatcttctgggtctggcaaaaacgtaaaccataatcggtttcgaagaggacatgaattacatggagattcacagccaccaacccaagataacagacattataatcaacctacaaaccgggaaaggcagggcccaaacttgcattatgagtatcaccctgttggctcata

SEQ ID NO: 108459 - DNA, 283 bp, Glycine max
  unsure (1)..(283): unsure at all n locations
ctccctatttccttcacggtttgaacagttcctaaactaaaagccatggctaacccacccccagttcgtccatggttccgcttagcctctattcgctctacccctgtccctgctcctctnactgcccaagagtctcgcactactttgcgtctgcccgcatttagaaccgcttcagcaccatcatcaccacagactcagccaactcaggttcaagaacattctcaacctaacagattctcttcttcttcttcttcttcactcccaacttcacttgtccacaatg

SEQ ID NO: 108460 - DNA, 135 bp, Glycine max
gcatattctggcatttattaaaccacgtaacaattgctaactggggctgtgtctatgcatttcattttctgaatgcagaatgatcaattgagtgtgaacgcccattgattatgtgtatgatattctattttattc

SEQ ID NO: 108461 - DNA, 289 bp, Glycine max
ctgacattaagtttagggctgtcagttagatatgtaagtactaaacaaagaacaaataatgaacttatatacctcaattagacactacttttttcctggatgtgacttttggctaacatatccttagcagtgctggttctccacatccacgacataggcaaccgcttgaaaaaggaatatatgccgaagtagacctcagagcattaaatcttatctttgatttaactgaagttaaagaatcagtctttctgtctagagaaaaaagctcaacctttcaatctaccaagat

SEQ ID NO: 108462 - DNA, 289 bp, Glycine max
cacgcgaggccactgtctgctctgcccagcaacagaacaattctttacgggattggctcgctccgattgggcggggctagttctaaactctcagagggtcaactccgtttcttgcctagcaacagaagctttgcccgcacagccttgactcgcggccccagggcggagccagctgcgggagctggctctgctcagccagtgtccgaagagttgccagcttccgttccagagttcccttgtccgattggtcccggcctcctgggagtgtggccaagccctccctaaccca

SEQ ID NO: 108463 - DNA, 189 bp, Glycine max
atgctacttacagctacgattgcctggccttttgcttcattagttcaaattggaattatgctttcaactatcggtgctgctccttcagagcctgactggtgccccacgtctgtttgcagcaatagccaatgatgatatgttacctattttgaactactttaaagttgggatggcggtgaaccacgtgtt

SEQ ID NO: 108464 - DNA, 289 bp, Glycine max
gctcaagctgaaaatgcatagtccgtctcagagactcataggagccgaacaaatcgtcgctcagagaggaaaattgtgtgtcgtttcgccttcttctgggatctccgtcgtcgatgtggcgacagtgccgccgcggattttgccgatttgctgccggaagagttcgagccagtggggtgatatctggagctcttttgtatataagggatgaattcctagctgtagatagaaagacttggcttcacgttacaattcattggaatttttcaagaaacaattgtgcaagaac

SEQ ID NO: 108465 - DNA, 292 bp, Glycine max
gtttcagcacatggctgtatagactatttggatacacttctgttggattttttcagggaagaactaagtggaagtagaaaccaatacaagaatgaagaggagtttgagttggagacattgagaataactgaggattggataaatgggtcatttgcttcagatgcaggcatgctgacaaacatgcttacataaaggacatggagaggagagatcagtggagtaggttggaggaggatcaagaagaattggcctttgaaattgagacagctatattgcatagtttgattgctga

SEQ ID NO: 108466 - DNA, 249 bp, Glycine max
ctctacagaattcttcagtagagtaaactaaagtgggctgaaagatccgaagacaaacaagacttttcaatatgtatactctataagtattcaagcaggaaggctttgttcagtgttctagctgaaattctaaacgagcgtaactgcgtaagtgagttctgtatgtggttgatccatcaatgaatggccataacttaatcaagtcaaagtggtgtctttctttccgcttgctagtgtccagcaactggg

SEQ ID NO: 108467 - DNA, 298 bp, Glycine max
gatctttgtaagaagataatttgttgtttatactttttatcacatttacttatttatttgcttatttacttagagtgtatgtgtgctcacacgtgccaaggatttagaacacagaagctgtaaattacaatttagcaatatatatctaaaggttagaaagttactgaagtatgttgcacacagaatatgtattttaggttctttttgtttgttcagaggacaacttgtggaagtcttttttctccttctactatgtggatccagggctcaaactcatgttgttagggttggcagcaag

SEQ ID NO: 108468 - DNA, 219 bp, Glycine max
gagcgttctaacgtagcgctcaagaaggaggcactcgctggtggtgttggttgtggtggaagtggttttgctgatcatttgtggtagaggtaagtaagagaaaagagttgacaatgagttcagacatccgcagcatgagcacaagcaggaggcccatggacgttagatccgctctgatcgattttcctatcgtgatgcagcttacaggagagattcacg

SEQ ID NO: 108469 - DNA, 292 bp, Glycine max
atttcgtgcccacatgttctcttctccaaaatcctctcttttatatttcccctttgataatttagggtttggtattgtgatagagacacaataatttttgggaattcttgtgacacgggatagttggagaattttgttttgtattttgcttgtgaataggggttcaagggtattatgcttgctggattcattctcttgctgaaatgcagtctttctagaaagtttgttcaactgtccctttattggcgttactatgctacctactggagcaaaagagacccaattacgtgag

SEQ ID NO: 108470 - DNA, 100 bp, Glycine max
actcactagcctgatttgctcctttagcctcactcctgcactcttgtacgtcaaatcctgagaaacccatttgaaatgttaaatctcgttctggctaatt

SEQ ID NO: 108471 - DNA, 231 bp, Glycine max
ccgtatgataaattcttgaaagcagcgggatgctaatgacactaacctgcaatagatgccattttttcattctttgcaatgctggtaaaatgtttctttagatggtttctaccataaatacgtgaaatatgcgggagagtatttttttcttctttcttttgttgggagaggtggatgtttgtttccagcaaatgtatgattttgtctataaatatagtaatattatttgtc

SEQ ID NO: 108472 - DNA, 154 bp, Glycine max
ctcaaagagagttcagtatttatacaaataaaagttttttctttttttatttctggttttcgttttggaatggctgggatttgctgtggagttgttggagaagccgccgagacttcttctcccatcgcacccacctcacgcccttccacacaac

SEQ ID NO: 108473 - DNA, 151 bp, Glycine max
gtgtttctttactatttggttctgagttcttagaacaatactactatatttcctttgatgaacaacaacaccatctaattaaaactcctactgagtaagtttctttgaagtgtgctatatatcatacattctatcaacacctatcgtttat

SEQ ID NO: 108474 - DNA, 282 bp, Glycine max
gcttcctgtcaggaaatatcattctaagaatgatggtccaaaggttgcattcttcagtgatgatgaggatactccaacgacacccaaggctgatgctctgttcattcctagggaaaatccaagggcattgataatttgtcccatggagcaatggccaggaaaggtttccgagaagccatcaacatttaaggatagatccatcccgtgaatgagaatggtaatatcttttatattgattgtattttgtgttctatcctactcccactcgagtgttaggaatag

SEQ ID NO: 108475 - DNA, 276 bp, Glycine max
gccggattcatgatcttcttcgcgatctttgcatatccgagagcaaggaagacaagtttttcgaggtttgtggagaggttgattttcaaatccgagatagttgtccccgtaagttgtctctccacggcactctatttcatttctcttcttcaagtgccgtttctgattactccatcactggcacgcgttccttgttatgcttcgccaagaagtgtacaaggtcaagccaaaccactggagatggcttctcaagagtttcaggctggctcgcgtgtt

SEQ ID NO: 108476 - DNA, 276 bp, Glycine max
gttttggctaccacagacaaacacatgctgcttcctcatcaagcaattgttcaaatcccgcaagccccactagccattattcatgcatagcaccagaactgctctccccagagagtttaggaattaagctcaagcccatcagaacccgtgttgatgttcaattctaactttatccagcacaatacagccatggagcgagctaaatcattgcacataatataatatatagctagtgtaggatatattctttgattaatgattatgttggtggactag

SEQ ID NO: 108477 - DNA, 255 bp, Glycine max
tcgagaggggaaagtgtgggagagatctcattcgtagaaacggtgtgtttcgcccacgtggacggtgttgctaccccctcgtcctactaccggctgttaccgatagtatctatttttgatcataatcgttccgttattagagaagttgagaaaatggacggtcatatggaatgaggaaaatcagttctcactgctctatccctgatttggatgattccgatctcttacgtttgcttgagcaaccaaagttgaaca

SEQ ID NO: 108478 - DNA, 165 bp, Glycine max
cgttgacttgggttgaaccatgttgagccgcgcggcgaatggtgaagtggctggttctggttatagtggtgaggatgagatgtacgagccgctgtggaagggttgcgcgggaccactggtggatgttcctcgtgttggccagagagtcttctattttcacacaac

SEQ ID NO: 108479 - DNA, 172 bp, Glycine max
gcgtgcgtgagcgcggggttgggctcgggtgcacaccagatcccaatacaagtgatagtgagttgatacaagaggctaacccggatgccaatagtcagcacctccaaagctgtgtgaatcctagtgctttggatttgaatccatccactccgccaatcaccaatgagattcc

SEQ ID NO: 108480 - DNA, 178 bp, Glycine max
caaatcgccaaatgagctacacctccaggctaaaataatgaattggtctaaatagttatttaaaacacttaccgaaaaaaaaaaacgcctattctttaagggtgttgtttaatccgttgttcaaaccttagcatattttgttataggattaggtgtggaatagtcgagggtagagtgg

SEQ ID NO: 108481 - DNA, 278 bp, Glycine max
tgaagagatgctacaggggaacaagacccatagagatagtgatgtgggtttagcaaaggtgaatggggagttgcccatatcttctaacagtgttgaagaacctggtgcaaagttggatacacaaggagaaagtagatgagtggatgttgcaccaaggcaatctatggcctgaaactgatgcgtcagatgatcccgtaaaggccatgaaagagccactgtcaaggaaagtaccaataccatcaggcagactcagtccttacagaatgatggttgtggct

SEQ ID NO: 108482 - DNA, 252 bp, Glycine max
attatatcttctataatttgttggaagccactttgattatcaagcttcttaactcaagcattggaagggaagctatagcacactcagaaaatcgatgagtcccatgaccatgatcacgaccacgaccacgatgtttctttagacatgtcaagtgattccctgtggctaccagtgtgagatttgtcttgtgagttgagtttcgaccactgattttgatggagctgaaatcgttctcttcttgttctgcgtcca

SEQ ID NO: 108483 - DNA, 281 bp, Glycine max
gaaacttcgactaggaaagattctcatccctctgtgggccgggtatcttttactcccaataaggagggaacatctgtgaatcactactgtgggggttcaacttcatctcaatcggacagtagtgaatcagagtctactacaaaatcacatttatcctctgagaggaatttcgctaatcttcgttcattcatgtctaagcctattcaccctatgtcctttaatgacctaacaactactagggatgcctttgatcctgcagttacagattttgacagagtttg

SEQ ID NO: 108484 - DNA, 316 bp, Glycine max
caccaatatataaatgctggtcttgctattgcattatgctctacgtggctgaaaatgaatgggcatcttgaagactcgtacttgaaacatatacaacacactttaccagagaagttcataaaagggttaacaactgcaagtttgcaaggaagggctcagattgttcctgatcagttcatcaatgatgaaataccaaatgaacttgtcttctttttagatggggctcatagtcctgaaagcatggaagcatgtgccaggtggttttctcttgctattaaagatccagaccagattttgtttcatcagaaacttgata

SEQ ID NO: 108485 - DNA, 132 bp, Glycine max
catagaccctgtgttgcagcatacagcacactatctgtcatactctctgtctataatatcgtcattcagaatgtgtgtaagtgctagccggatgctacatgcgatcacagcggtcgatatgcattctctcgc

SEQ ID NO: 108486 - DNA, 153 bp, Glycine max
cttgtgtgcgaccactctgtctaattcagaagccttggtagcagatgagcataggattactatccacaaaacaaaagattcaactcttccacccattcttaatgcggctgagatgtatgtagcaagacagctagatgcccttgcgacatttga

SEQ ID NO: 108487 - DNA, 132 bp, Glycine max
gttattgataatatcatcaataggcttctccaaatgagaggcagaccagggaagcaggtggaacttcctgaggctgagcatcaagcagctttgtcttgtctccagggatatatttatgaggcagcccaacct

SEQ ID NO: 108488 - DNA, 175 bp, Glycine max
gatagattgggttatggacctaggagaggtggtgatgatgcggtttcaacgaactataccatctgaacagtcattgcccaactagttaaattgatgttattttccccccatagctcaagttacaaacagattgcaagttttgaatatcaatatatcagctggctttttttttggg

SEQ ID NO: 108489 - DNA, 137 bp, Glycine max
cggtacagagcttgcaagaactcccattgagctgaacaatggtgagtggaatcttacgagtgttgcctggattgggggtagaatcatgtccgtgacacacattccttcagggacacaatggctccatagtaggattg

SEQ ID NO: 108490 - DNA, 174 bp, Glycine max
gtaaacatggccaagaacttttatttgtttacttatagcgagtcctgtttaaattgattatttctaccattacaatcttctagtgcatttactttctttccttgcatttctttagagcagacagagtccttggaattattttcgtttgccgtttataagtttaattatgtgtcc

SEQ ID NO: 108491 - DNA, 223 bp, Glycine max
ctgctcgagctcgagcctgtaacaacaaattaaaacatcatttgaagtcaaaggaaaggaaaatcatagtctctctctcacagagtctctctctctctcctccatcgattgattgagagatttggagagggggagggactctgaggaataaaccatctctctacctctgactgtgctgagtgctgacagtgttagagatgtgtgggtgtgagtgtttttggtg

SEQ ID NO: 108492 - DNA, 302 bp, Glycine max
cttaatttctctctgtctcgtttatacatctctccaacctttcactttcgtttctcagttttattcgaatccctctctcaatctcctttccaaatggcctgcgttgtggttgcacagcaaacaccaactacagttccagacaatgtaacatcctaagcaccaaaggaagaaaccaccgaggcaccaacagaaacagtagaaaaaacaactacagaagtagccccagaggagcctaaagaagttcattttgagaccgaggaggtggtggcaaaggagacagaggaagagaagccagcagaaga

SEQ ID NO: 108493 - DNA, 189 bp, Glycine max
ctgcgatgctcttatgtagttacaaatctatgctgtgattcaatccatggctggtgtttttccagtgatctaatccacagctcaaacggtgaaactcttgcagccagtttttctaatttgtgggcaaaatcatttgggaaaaaagactcttttgttattgatgtagacttaataatttttttacggttt

SEQ ID NO: 108494 - DNA, 301 bp, Glycine max
  unsure (1)..(301): unsure at all n locations
aagagattataaatgcaagacgaagtatgaaacatgctgaagtaattatagccagatgggcagtggaagaaggacgtgggctggttgtgattgtgaacaagatgaaccttccaagaggcaaacaccaatcgtcatcctatgagaaggttatggaaattgtcccacaagaaattcagacaattatacctcaggtaaaaggaatcccagttgtattcatttcagcattggagggaaggggcaggacactgtcttgaatcaggtcatcgaaacatatgaanaatggtgttcaagattactacag

SEQ ID NO: 108495 - DNA, 132 bp, Glycine max
ttcgaaattttgggacttctgtgaatgcgtagtttgaatttaggttttgatggttgaatgtgagtattgggaagttaaaaagtggaaattctgaaatgggaatcacttcacacttgattcagaacaaaaata

SEQ ID NO: 108496 - DNA, 262 bp, Glycine max
cgcgcgaggtgttactggtaggtggtcactcgtacacactaatgtcgaagaattatcggagacccaataaactggacaaccttgaaatacggggcataagcattgcgtgatgtgacatatggtgcagaagcattcagggcggggcttgtgtccgctatagtgtgttactgtcagtgggagtgatactagtaggtagtcacttgtaccatagtctgtcactatgtatatatatcaataacttggacactggtcacttgacaga

SEQ ID NO: 108497 - DNA, 99 bp, Glycine max
tggaaagaaggcatattatgagtatgctggttgtggcatatgtatggacttttatcacttaactcctggttctggagtgctgttttccacagtcgagac

SEQ ID NO: 108498 - DNA, 112 bp, Glycine max
tagccgcagcagcctctggcaacaccgtgggctccagaaacggcagcgtttgggacgacgataacaggctactttgtaccagctaaacctccaaaacaactggttttgtata

SEQ ID NO: 108499 - DNA, 262 bp, Glycine max
taaacacagcagttacgcgctctttgtgtgtacgacccatatcccccccacgatgccctgtcatctgtgagagcggctcatagcatatcatatcacatgcttatccatagaaaacaactgctatggatacacatcagagggtagtgaagcccaaggcagagagccctataaacgagaacgagatacgcgctacttctctacgaaggacgatgaattacatcagctacgccaccagtgtccttcaggagaaaggatctagtga

SEQ ID NO: 108500 - DNA, 185 bp, Glycine max
atagcacagcgctgcgacgtgccgtgggctgtacgtctgtgtgtcgtatttgtattcagacgaaaccctaactccgcatcgcaaccatgtcgaccaagcaatgcagtgaagctaagcctttgaagaaacccaagtctgataagaaggattacgacgacgttgacatggctaacattcagaagaaa

SEQ ID NO: 108501 - DNA, 283 bp, Glycine max
attattttccttcacgatgaaaccagctacagaaacacctgtttcaaaggaaacaactcccgggttaaaggaaaccacaacaacacttgtttggtttggtgggtacggttcaagttttgattttgttcaccttttctgagcttcattggcaaggtagagagaaaggaagaggtggggctgattggtggaaaggttatggctttttggttttgtagcggaaaagtttccactcgcagaagacgagggaaagaacaacctaaatggcgggtgttttctttgaagg

SEQ ID NO: 108502 - DNA, 176 bp, Glycine max
aatacgtattagtcttagagacatatgataagatatgggtcgcttagcagagtcgcagttggtgcaagagatgggtctgtatgcagcaagcgcagaatgagccgcttgggcttggtcgcgggcctccgacaacttgaaccggattgcgaagcttcgaaaaaaggctttccacacaa

SEQ ID NO: 108503 - DNA, 107 bp, Glycine max
gcgcgcgctaagtcccacacacgtgtgcactgtgctcttctcaccaattctctatcacaattgtgttaaaaaaccactattggactcgcggtggatttgctaactcc

SEQ ID NO: 108504 - DNA, 273 bp, Glycine max
accaatatatgttgagtaaagggtttaaaatcagagtggcatatcgtgaataagcacaagccgcaatgttggttggttggttttgacacgttagttgcctttttaattatgattcacaacttatgaccataggccaacagaacagaacattgccccaatggtggcgacccatgactagtaaatccatgcttggtttcttggaagctcacgaattagattgtgttttagtgactggattgtatgtgtgataaagacatgtttgcacatgtcacg

SEQ ID NO: 108505 - DNA, 184 bp, Glycine max
acgcaacaggatacgtgaaatgtttgcaacaaactgatgatggagactcacacaagctcaaggttgctgcttgttgcaaacattatacagcctatgatttggataactggaaaggcattcagcgttacaccttcaatgctgtggtgacacaacaagatatggatgatacattccacacaacata

SEQ ID NO: 108506 - DNA, 253 bp, Glycine max
  unsure (1)..(253): unsure at all n locations
atggccaacagtcaccgaacacattcacctgagacgcaatntgcagcncgatatcaactatgagtgtgctacanctaagactgntctactgtgagntggtgcctttgtatgacttgattcatctctcctttggttgagtgcgcttatgctagctnacaatgctcgcgagggcttctttgaagaagaaggagaagatggtgacaanggtgaatttggcacagcctcctctgatncttatgatgatnctgattca

SEQ ID NO: 108507 - DNA, 280 bp, Glycine max
gtttattagagaaacactatgcagaagcagtgatggtcagtccttgtcaatgagtttgcacatttagttttcatcatctgctgaaaaatataatgcagcggttaaacagtttgtttcacctgctttcaatggtgacactggtgccatgtattttatattctcttttaattgagttttgttaactgtagcgcattgattgaagaatttcttttttctggtttataaattgaccaactgttaattcatagttgggaagtattgatgccaatatcatctcatg

SEQ ID NO: 108508 - DNA, 280 bp, Glycine max
taaaattgtagtggtatcgggctctgagaaagctattgggtttgtgtcagatggattgcctacatctacatctacatctacatctacatcgatgcagcattgtttcccattctgtgatgagttgaaagctctaacgtctgctacaaatcactcatacttcatgtacgcaccggactcatacttgatgcacacaccggacgatcctgctgcttattcctttgtcaaattcggtttatccatgaaacaacaggctgcgtcaattttttcggcttgtccctcc

SEQ ID NO: 108509 - DNA, 257 bp, Glycine max
ctaattctcaagatttgagacatctatgcctgcaaatggttagttactatatgcgtagaaagaaaatccacgtcgtggccattaaatgtgcagaagcataggaaaaactgaaaaagcttgcacaagcacaagtaccttaatggagcagcttagatcactaaattgtagggacctacatatcatttttcatttgttggcaacatatttgtatttgttaagagttgtgatgagatataaactcgacttgtacatgtaaa

SEQ ID NO: 108510 - DNA, 283 bp, Glycine max
gttcgattgattgttctgattttggaagtgttgggttttgctattgcaggctgagatagctaggagaatgcattttgagtatagcactccaaagaagaaaacttttgctcttcctaaaccgtttgatatagagggtgctggtgggtttgaggaaattgatactccaaatgccccattgaggaaacctaagtcaaagctgattggaaagaatctggctagcatctcagtggcattgttcgcttccgctaattaagaagaacagtgactggacaaggaaaaagaa

SEQ ID NO: 108511 - DNA, 276 bp, Glycine max
ccgataccttttttcttctttctctttcttttttctcaattggtgcgaaagaaaaaaggaaccgaatcgcattacaatagtggaaaacgaaagacagaaacgatgatgcaccagcaacaagaggtggaagaagaagaagcttctcctcacaacaaggcatccccttctcccagtttcagcagctactcgtcggagacactcgccgagatcgccgccagggtaatcgaggagctccgccacgaacctagttcactctccgacgacgacgatgacgcg

SEQ ID NO: 108512 - DNA, 115 bp, Glycine max
cgcgatgttcgcagcaagaacaaagaactaaagcacctgcggatttgtgcaggattgctcgctaggcagaactgtttgtgcattgtgtgataatctgtgatgaggtagcgcaaga

SEQ ID NO: 108513 - DNA, 228 bp, Glycine max
tggagatttgatgaaggtttatcaacgaaataagaaagaagaaaaacgttgagttatgatacattgtgaaagatactataaactaagagattatggtcgaacggggaggacttgaggcaaatcctcatgagcagagacagacagagtctgtagcttgcaatcagatgaaatgaactgagtattgtcctccattgaaattttgtgtataagggcaacagaacttgcgcc

SEQ ID NO: 108514 - DNA, 307 bp, Glycine max
  unsure (1)..(307): unsure at all n locations
atcagaccttccattgaaaggagtcagtaagaaaactctggattcttattgtcctaagcctgagattagtttttccaatcatcgtaggagagataagctagagccatccaaaaatttatccaagcaagattcagatatcgagcttgacaatactcgggtgagctcagatgaaaacagggtgcctgagatgtgtcaatgatcagaacagtgatcataggntgantagaaagcgagcgagnttanagccaaggtcaaagcactaaataggcatcagaaaantggaactattgaaagnactaaagagcaa

SEQ ID NO: 108515 - DNA, 275 bp, Glycine max
atcaagttcagctagccattcctggtattaatatctaatttgctttggttgatctttcaagtttcaacttcatcgttttttcccagggatatctggctgtcgtagttgctgtcctcgatagatattggacagatggcgctctgcttctgcttcattcaaagtcttcgcgtgttgttctaaacagagagagcaactcgtttccgattaagggtcttgtttcttttgttgtggtaatgctcgaatcggtttctcactgcattctgggtgatttaggg

SEQ ID NO: 108516 - DNA, 126 bp, Glycine max
attcagggtacctggtcaagagcgagaggtgcaaccagtggctggggagacaaatatatccaatgatgccgccatcagtgcttactcccttttgaacgctacagctctttgccgggcactcacagt

SEQ ID NO: 108517 - DNA, 233 bp, Glycine max
tgaacagatgaaaattgatgtccgcagattgaacgagagatatccatgcaagctttcttgagaggggtagaacgatgaggtggaacattcaccttgcggaactgtaccagaccatcagacatctcatgaaagcttggatgggtatctatagtcccatagagaacagatgaaaattgatgtccgtaggaattcgaaggctcgtagagtggagctgaagacaaggcctgatacac

SEQ ID NO: 108518 - DNA, 282 bp, Glycine max
tgtggctttgttgtttgatatgcgagcctattccggtagatagggaaccttctccgtacttctctttctccttttgatcgcaattcttcccatcatgtaaagtttcttccttcgttaacacttgctcttctctccctctgcttcttcttcattgaaagacctgggtggttgacttgcttggtcttcagggtctcagtgatgaggatcttcgctcgatggttttggaaggtgactttgatggtgacggtgcactcaacgagatggagttctgtgccttgatgt

SEQ ID NO: 108519 - DNA, 230 bp, Glycine max
cccattttctcgttggattcattgcccccattgagtccttcccctgctgctgttacctccatgtttgactcaatctcaactactgatatgtctgtggaggaaagtaatgtttcctctcaggtgccccctccgagagggcatgcccttcttcctcctaggaagggacagaggcgctctagtagtggttcccctttgggaatctctggttttatgcagtcttctccagttcc

SEQ ID NO: 108520 - DNA, 105 bp, Glycine max
tcgaattcggaagcagcaaaactaaagcccaaaaacccataccaagatgctcctccgaagccactgttgctacctcggcataatcgccgggctagcagtgttcca

SEQ ID NO: 108521 - DNA, 157 bp, Glycine max
taatagcgattcctatttcccatttacactaaaaatagtaaaaggaggacgatgcgatgaagaagcgtagtttctgattgaaattccacgcgatgtacaaatcaaaccaaaatttccatggatttgaatcggtggtgttcttccaccatcaacccca

SEQ ID NO: 108522 - DNA, 186 bp, Glycine max
acattgcggtgtcctcattatgcacatatgatatctaccgaacttacatagatcctaatgcaagtggaaagcaaatcctcaaagtgtcaaggggtgtcgtcctaggattcgggtgtatcatggggttgttagcagttatactgaacaaggctgaagttctttaggatggatgtaccttgcaatggg

SEQ ID NO: 108523 - DNA, 212 bp, Glycine max
tgtgaagtgggtgggtttgtgacagtcaagaagaccattttgaacaattcaggcagcgtcggtatcgttccgctagggttttggaagaacaatggctgctgctgcttctccagttctccctcaggaactcatagtcgaaatcctgtcatgcttccagtgaagcctctaatgcgattcaggtgcgtttccaaggcttggtatgtcgtcatttt

SEQ ID NO: 108524 - DNA, 107 bp, Glycine max
gtgggaatttgcctttgttgggatgcaatgttggaacgtgtacttacagagttgttgtgtttgagaacttggtttaaatgttagcctgtgatgctaatgagaacaga

SEQ ID NO: 108525 - DNA, 116 bp, Glycine max
cataaaagaggcatagctagagatagagaatcatggatagccctagacaaacacttgggagtttcgtagtggtaatagtactctttgctgaggtttttttgctgtacaactggtcc

SEQ ID NO: 108526 - DNA, 132 bp, Glycine max
cacagaggcatcggaatctggcgccggataacagccgctcacggcggggaagaaccatcgaaagtcgattttcacgatggagtggctccaaagactgcctctatcctctcacatctcggcctccgcactctc

SEQ ID NO: 108527 - DNA, 213 bp, Glycine max
tctcgagccgattcggctcgagggctcgagctcgagccggttttcaaggacaagtgctacaatgacattacgtaatcgacattatatgtacaaaataaccgatataaattgtgtttttttagtagtgtcaagagatgcagtggggtcttccacttacccgttctttgatttcaacagtaatatgcatgacaaatattttcactttgtacaatt

SEQ ID NO: 108528 - DNA, 300 bp, Glycine max
gaaattggaacaacacacttcaaggtaatcccttatgacaaagacaaattgaaaggatagaatttctcttgagattatctttagatacggcgacacagcctcaacttacttggcttccatgatgcttaaggttatttgcagccagtgatattttttttttcctttagaaggacaaaacaaaagttgagaaggaaaagtattagtgacatatatatataggtatcatgagcgatgaaagatcaaagccatggaacatatatccgtcctcaaaccctggcccatcacaaacaggagttgatg

SEQ ID NO: 108529 - DNA, 151 bp, Glycine max
tggtggagttgttgttgctggtttgataatctacattcaactatggtgcactgagaaaaaagggccagtttttgtcacagtgtttaatcctctttctacgatattagtggcaattctagcctactttgtctttggagagaaactttatttg

SEQ ID NO: 108530 - DNA, 150 bp, Glycine max
gacagtttctcatagcttgctcatcaacagtgattgctggatctgttgcctcttactattgggcccatggtgaagcatctcctgaaattccttttctttcagtcttttcctccatgaagaggcttttgcgttacagtcttggttctgtgg

SEQ ID NO: 108531 - DNA, 163 bp, Glycine max
ctttttcttattcatagactcaatgaaactctgaagtatgttagcagctaaacaccccaaagggcagtagtattgtagttaaaaactttgtagtacatgggggatgagagatggaggataataataataataaccacaacaaagcagatgagcagcaagatgt

SEQ ID NO: 108532 - DNA, 99 bp, Glycine max
ggacaatcaagccatttatgacatctgcaggcgttcactggccattgcgaggccaacctacaccacccgtactcgtttagtttctcaagtgatagccag

SEQ ID NO: 108533 - DNA, 244 bp, Glycine max
cctccttctctctccacacctccaaccactctttcaaacttccaaatttcaactcttacaacatatcaaacaaaaattccatcaaataatacacacactttagctgttgttgtgcacttcaaattaattaaacatgctagttcctcatccttcaatgctaattgcacctcaaaacaccgtagaacatcatgacaacatcatggaaggacagaaactacactttgatggatctttgatgccaaac

SEQ ID NO: 108534 - DNA, 243 bp, Glycine max
ctcgagccactcgagccgattcggctcgagactcactgctgtcataaaatttcctttatacattttttctcttttcctatccctcccctctcccctctctttctctctccacataccaaaccccaagttcccttataaatacacagaaagagtgtgaggaagttgtgtgagttgagtctgtgatgataatgatgatgatgatgtgttccatgtggatgtgggttgtccttgtggccattgctg

SEQ ID NO: 108535 - DNA, 246 bp, Glycine max
tggaagtcgtatcgtgttctcctccattcactattcggcgctctggcaattttccctcaaaatgtttttcatacaaggaatgagatatttgtaactcaatgcagcaagaatagatggcagtcaaagttgaggcttatccattactcggtttagataacaggaaagatcaatccctaaaatctgcaatataaatccttcatttcctgtcgtcatagtaatggaagcggcagcagtggacccttatac

SEQ ID NO: 108536 - DNA, 242 bp, Glycine max
tgaaatcattactaaaaagattgacttgtcatgttttcaacaaattctttcattactcggttattttcagtactgtgcagaaaacatgacaagtcaatctttttagtaatgatttcaaattacatcagaaggataattgtacatgaattatcaataacatcattgataataactcaattttgatagttacagatttacacattgctttctgcacagtactgaaaataaccgagtaatgaaag

SEQ ID NO: 108537 - DNA, 282 bp, Glycine max
actcggaatctgctcgaaccgagcgctcgagccggaagccatcaacacatgaccaaaaccacaacctaatcctaccctttctaccactactactagtccccaaccttcaaacaccaaccacacctctcatagctcaaattgattttcacggttcctgttaattagttgaggtggctgccccatatatacgctggtatgatgctcttctctcatgtagggttcatgcatcatgcatatggtatatatcacttgatcatgatttggtggtaaaggatcacaaag

SEQ ID NO: 108538 - DNA, 255 bp, Glycine max
cagagaaactagactattcatctgcagtcgttctccttgggtactccctcattttagccatcttacgaacattcagtattagggatgaggctaccagagtcatggttgctgctccattgattgcttttgtgaccacccacgtaatgtacatcaacttctatttactagattatggatggaatatgatagtttgcgtagtgatggccatggcacaactttccatgtgggcagtttgggctggtgttagtaaccatc

SEQ ID NO: 108539 - DNA, 251 bp, Glycine max
cttaaaagcaattatggctttcaagttctaattgctagaacgcaactacggacgaacaaagtctgcatctggtggcacagaaatatctactttgttcgtcaggagttgcgttctagcaattagaacttaaaagcaattatggctttcacttcgaatctttttcagatttctcagaactgcagttatcttgttagtttgggttatcatgattggatactagtgtgtaagttgtattgtcattttacagtttg

SEQ ID NO: 108540 - DNA, 124 bp, Glycine max
ggggcttggaggattatccacttttgaatgtacaagttattagcctaagaaaacgtgtcttttgtagccaaagatatgtacaagagttaaagtatataataaagatcggtatgtattaaggctt

SEQ ID NO: 108541 - DNA, 279 bp, Glycine max
gaagaacacagaaaagaaggcttttttttgccaacaccagttgcaaaactaatatcctttcaaacggatttgatctacaatggcctggtttctctcttttcctctatccactctcttttttccgtggctacagagtcctaccaccgtgctgaggagaccaaagacagtgttgaatcagcagtgcaacgtgctccttctcaaagcactcatggcagcgcactcttgctgaagaaactgggactttgcttcctgagtgttgcgtatgtgtgcatggttatg

SEQ ID NO: 108542 - DNA, 153 bp, Glycine max
  unsure (1)..(153): unsure at all n locations
caacaatcaccatgggagaggaagtagacactgcttttgtccaagcaccagaacacaggccaaaatcctcagtgatcgtggcagaaggaatccctctgattgatctctctgccatanactaacaaaacgaagacaccctcttggattctctat

SEQ ID NO: 108543 - DNA, 150 bp, Glycine max
cgagctaccagcaggcatcaacaatcgaggaagtgagatacctatggattcgggatttaccatactgggtggacgaggggtactgaggccattgttcggcaacacgggagaggtaatatccatcaaaatcatccgcaccaagctcacggg

SEQ ID NO: 108544 - DNA, 270 bp, Glycine max
aagccatgaaaacgctaccgaaagtccaaaacagacaaagtgcgcaaacctggtgacagcactctttagaggtgacgtgttcgttagcaattgccactgtgttgtttcgttcgtgttcatagcaataagctaagcacagcaaagaaaccaaatcaaatcaaaagaagaatcagaagaaagaagatgggaatggcggtggcgagtgacgatttgctgagcaagaaagctgcggcgatgagagcgtctctggagagaagccaagccatcaca

SEQ ID NO: 108545 - DNA, 269 bp, Glycine max
gacattgtgaagatgtcatgcaacagaataataacaatggtggtagcaacatcaaaattgaagaatatgtaagttctctaatcaaggatccagacttcaccatgtcattagctgaagcagttgcccgcaccatcactggccagcagaagcaacaagatctaaacctcaatttggagcttcctgaagagtgaaatcaatcatttttttcccacaaaagccataatgcaagtgtaaagatgaattttagttcagtgaattgtagtccagta

SEQ ID NO: 108546 - DNA, 242 bp, Glycine max
aatgatagtaaatagtatctttcacatccagacagaatcaccaaagataagtacaatgacaattaaaaaatatagaaagaatataaaataaataaataaataaaaatatataacacaaatgtcaatgtacttatctttggtgattctgtctggatgtgaatgatagtaaatagtatctgacttggaaatcaattttttttagagtcatttggttcgatcaaggtggctgagcttcagtgggg

SEQ ID NO: 108547 - DNA, 243 bp, Glycine max
attttaactcaatcttggttttctatcaagaggaatactagtactagcaagtgcaatacactcttgttaacactatcttcaacatgctctttgttattgagggaattacttgttatgttggtcccactaaataaccaggatttgcactctatttactggtgcgcactgcgcacatgctattaactcaacagtagagaagtttaatttctatccattgtgggtctaaaaattttatacagtcaa

SEQ ID NO: 108548 - DNA, 241 bp, Glycine max
tgcttgtagagggaaagatatagaccggattcctctcccaccgcctctatatggtgcagcatctttcaattcccccaaaacttcccgtcaatatagttctcgtcccagtgcaccatctagcagacatgatgttagcacgaaccctcctgcaacttctgcttctgataatcaggtttgtcccatttgcctcaccgatcctaaggatatggccttcggttgcgggcatcaggtaaggaatcca

SEQ ID NO: 108549 - DNA, 237 bp, Glycine max
tctcgagccgaatcggctcgaggcaacaagtaaccaaccacttgtacttcgagctggtggtacatggtggaagaccaagtaatggaagtatttttgttggtggttttgtattgggaggactaattgctggagcattgggttgtctatatgcacctcagataagcagggcactagctggagctgacagtaaagacttaatgaggaaacttccaaaattcatgtatgatgaagaaaaag

SEQ ID NO: 108550 - DNA, 130 bp, Glycine max
gttcttctttttctttgagttatttccctatatatacacacactcacatctctgtctctgtgcaaccaacagcctctgcttcttaattctcatcacttatgcctcattcttattaaggggtttttgttca

SEQ ID NO: 108551 - DNA, 249 bp, Glycine max
gtggtttgctctgctggtggaagacctcaaggtgaaggttgcgaatgttgaaagtggaggagagttcaccatctccagtgctgaagagatcatcaaggccctttaaaacccttgaatcctcttgttggctgtttaactgtctttaatgtttctagtatattcttgcatcaaaagagtctcacaccacacattaaagacagttaaacagccaacaagaggattcaagggttttaatgtgtggtgtgagac

SEQ ID NO: 108552 - DNA, 254 bp, Glycine max
gtagaaaagaaatcatatacagttaattttattgattctccatgggattaactaggctattctacgtagcgcatcattctcatgtgaaatttcatagtaaaggatttcttagggagctgtaacattgttattcatatctcaaattatttgagataatatgtcatatctaaatctccaattaaacctagttaaggagggagggctttggagttgaatgcattgctcgtttttactgaaaggagaaccgcgctctc

SEQ ID NO: 108553 - DNA, 259 bp, Glycine max
gtagtagcaagtacgtcgtatatgtggttgatcttttgctggttgtttgttttgttccttccaattgtcagatctgaatcaccggactcactcttcacactcactcacactgaatggcttctgacggcgaccatcaccaccaccaccaccaccatcaagatcacgatcatcatcatcatgatcatgatcaccatcatcatcacgatggagagggagagaccaactcatgggtaggtccggctgggacggtgtaccatag

SEQ ID NO: 108554 - DNA, 245 bp, Glycine max
aatgatatgaattatagtggtgcagggagaagatataatgcattgagaacttaaatcaaaaccttaatgaccaaaactccaaactagaataaaggttaaacatttaacaaaaatacaaattgtaaaattctcagcaaacaatacttaatttttccttgatgcattatatcttctccaatcaccattatatattgcatgatatgaattatagtgaaaaacaaggagaaaaacacacacggggcgcc

SEQ ID NO: 108555 - DNA, 258 bp, Glycine max
ggggtggttccagatgcagggcattcagccaatgaaccagcataactgatgaactcgtggctacaaatgagaaattgaaaaacataaccaagactaaaggggactcaagtgagtggacaggcaaataggaactcctgtagctttatttgaactacattcggattacttttgaacccgtatcttttggttgaatatttgtagatttgttttatttattcaaatgcattttttttatgtaactatgcattctcattgtag

SEQ ID NO: 108556 - DNA, 260 bp, Glycine max
gacagagtgttaggcaatcaacggcttcagattccactgctcgcggtccccaaagaccagttttttctcctggttcaaattcccagcaacatgatctggaagacaaatctcgtagacagacacacctagagagcaaccaaagccaccatattatggtcaacaacaacacccttcagataccatgtctgcctctgttggtggtggacaacagggctttcatctacaaaattttgacatgcagcatcccccacaagatcctt

SEQ ID NO: 108557 - DNA, 254 bp, Glycine max
gttgattttcttagagacccttgtatagaaattctccaatatgaaaagtatcaggagaaagtattgtcttctgagaaccagaacaattcagttcacacaaatcaggatccctgtggagcactattaaaatggatacttccattagataacactctcccccctgctacccgcccgttatctcctcctcaattttctttgaattcagccattttagaagttactccatgtctgcattaccccaaaatacaaattca

SEQ ID NO: 108558 - DNA, 257 bp, Glycine max
gtttgatcaaagtcaaaacacacccaaaaagaccaccattcgcaacctcttctctccctttcaacacaacacaagtggttttttgcttgctcaaacaagaaccagttccttaaacacgcggggatcgacgaacacccaaacagcatcatcccagtgacgacgatgacattaatgatcatcggaattcgagtttgttggaatttggttttcagacttttggatctgcaagatgaagtcttggtcactggacgagtgga

SEQ ID NO: 108559 - DNA, 248 bp, Glycine max
gatgtttagatatttactgtcatgtaaatgttcaattgatataataaccttaaaggaagaaaacaaagtgatatacttttccatttagaaagtgattgagcaagcattaattaaaagacattttgaacatggaaaaacctagcttagcattgaattcaaaacctgctgttgatcaatgtttataactagatcatcctataaaattatcctgatgcttcttgccataacaggcttcttaaccgggttta

SEQ ID NO: 108560 - DNA, 255 bp, Glycine max
gtaaaagttccaggtttcagcatggctcctagagatcttgcccttgcatcttcacctgatgtcacttctatggccctgaaaatgcaagggcaagatctctatgactgtgctttacatgaggcttatgccaaggtaaaagttccaggtttcagcatggctcctagagacttcaataatgaagctgtttttggtattcatgcactgtaatgccaaccctgatgatgttaaacaaagaaaattccacgtcatagatca

SEQ ID NO: 108561 - DNA, 245 bp, Glycine max
gttttgagtttcatattcatatgtaataatttactaaataaccaaattaatgtactaaattactaaattaatgcttgtaacttaattctgtatagccagcatgtgttgcggattagccatttgaaagctagtcactaggaacaatggattcttccttcggaagtgaattgtttttaatgatcgttagcctgaactgaataagtgaattgcatatatgtagtttgtataatgccaattgactcatt

SEQ ID NO: 108562 - DNA, 241 bp, Glycine max
ggttctggtatcacatgacacagtgaaactaactataaagggcatttgacaccaaagcacacatagcaacatcgcaacgtccaataaacacggccgagtctgaaaatagggtttgactttgatttgatcacgcaacaaacacggataaaggacaaggtctaaaggggggaagaaaacgacgccgtagcgcagtagaatagatcaagacgaaggatggtgctgaacatcaacgtggtggcga

SEQ ID NO: 108563 - DNA, 262 bp, Glycine max
gtattccctttatttgtttattttcctatctctctctctccacataccaaaccccaagatcacttataaatacacagaaagagagtgaggaagttgccccagttgagtagtaagtgatgatggagatggattccatgtgtatgtgggtggtccttgtggccattgctggtgctcttttagtcctaagatctatgctcaagaatgtcttatgaagaacataaacgccttaggcgtttgacatcctcttcaatcaatggcatgg

SEQ ID NO: 108564 - DNA, 133 bp, Glycine max
atagtttaaggaacactccaaaagcttttatttctgagatcaattaaacgagttcaaattcaacaaagcaagtgcattacataattagctctcgtttaattgatctcagaaataaaagtttaaggaacactcc

SEQ ID NO: 108565 - DNA, 280 bp, Glycine max
taaactcgaactcgagccgctcgagccgatttctttactatttgattctgcagactgcccacttactgcgtgcccacattatctgacttataagccctttgcccctaacccagctggaaattgacaaactaagtcagaagcgtccttagctggcccttttgaacttgctcctgggaggaagtttggctacttactacgatattgattctcaataccaatggttggattccagagtgaccatatgcctgggaacaagtgcaatggtaattctaatagtttt

SEQ ID NO: 108566 - DNA, 271 bp, Glycine max
  unsure (1)..(271): unsure at all n locations
ggcattagcattggtcatggattgtatattatgcctcccattactanggtcttgacaggttcttggcttggaaaggttgaagtctgaactgcagtcacgtgggttaaaatgtggaggtactttgatggagatgtgctgccaggctttttctcttaaaatcaactcccctggatgaacttccaaagaagctgattgcgaagaagtaaggagatttttgagaaggcagttatttctctgtacagtatttcttaactgtttgcaccttgtactt

SEQ ID NO: 108567 - DNA, 254 bp, Glycine max
gagaaacactgaatttccaattccggcgaacagcaaggaccggtggtggtggtggtgcaggcggtggaacgcgttcgttcgccgcttcagaagcaacgactacaagaagcactgctccttccgctacgatccgctcagttacgcgctcaacttcgacgatggaatcgccgccgaagaggacggtcccggatacaggcttctccgcggctttgcctccgctccgccggaaaccaaaacaaaatgattgagcatgt

SEQ ID NO: 108568 - DNA, 245 bp, Glycine max
ttcgagcgattcggctcgagggtgaccatgaccatcatagcggttcttctcgtcttcttctcctataaacaaaatgcctagcttctcttctctttgcttccacatttgactctctcgtcaatggttgtggaggctctagttcctcttcttgagagcaacatgcaagctatgaatgaagactattcagcttcatttaccagtaaaatgaagaaggaggggaatcacaaaacctattcttccaccag

SEQ ID NO: 108569 - DNA, 189 bp, Glycine max
ctcttcactcagtactcatcgcttacattggcataattcccacacatcatggctgagcttcactagcaggcaatacgccactaccacctctcgctaccttaacgatcgacaacatcaatcccgatcctccacctagcaggtcgtcaaggtcgctaccgccgtctcagcgggcggctccatcttgatcct

SEQ ID NO: 108570 - DNA, 249 bp, Glycine max
ctaggaaacaccactttctctctcaatattccttcatttctactcttttctttctttctacgctcactctcttatctcaacacacactcttctccttcttgccaaatggataacagcaccctgaacaatcccggcgacaacgccgaagacccgccaccgccgccggctcccatgcaagtctttgattccttccaaccgttccattacgccaacggttccgatgaaggagaagaagctgttcctgctcca

SEQ ID NO: 108571 - DNA, 161 bp, Glycine max
cattatttacccaccaaatgttatggtagttaaataatgttgaacgcctagttgactgtaactaccataacatttggtgggtaagtacagtcaactaggcgttcacattatttacccaccaaatgttatggtagttgactgtacttaaaaaaacataaaaa

SEQ ID NO: 108572 - DNA, 247 bp, Glycine max
tttcaccgccacaacaaccaccgcagccattcttcttctgcgtccaaaatcataatcttcttctgcctctctgcctttctcggcctcgccatcatcgccaacctcttccgcgcctccctctccactcactatctctccatcgccaccaactgggtcgacaccaacgcacccgtcctcatcctgaaactcgccgccactcctcacaacagcaacaacaagggaaaagatgggaagattgcacaaagga

SEQ ID NO: 108573 - DNA, 245 bp, Glycine max
ggagtgacaaatcattcaaacagcaagaatcttcaacaagggaatcaaatgcacatactttctccgaagccccaatctctgctggccctccttctctcaatgcttgggtccttgatagaggaagcttgagccacaacagaaacaacgggacaaatggccttagtgagcacaggttgcagcccattgaggaaatagcttcttcatccttggccagtatttccatcaataaagctgagaattcagtc

SEQ ID NO: 108574 - DNA, 249 bp, Glycine max
gaagaatggtcaagcaaagaattcccagaaatggaatcaaaagcctgcactggacattcgatctaatttcatgccacaattaaattactttgaaaatgatgctagactacaattattgatgcaaagatctcttgtaccacagcaaaaccttagattttctgaaattgggaatactttttctcaacttggtgattcctatgctgtttcttcgaggttagaccaatcacaagtcagtaatctaggcccatt

SEQ ID NO: 108575 - DNA, 245 bp, Glycine max
cgtagatctgttgctggttgattgttctgttccatccagttgccagatctgaatcaccggactcactctacagactcactcacactgaactggcctctgaaggcgaccatccaccagcagcagcaccagcatgcaagatcacgatcatcatcatcatgatcatgatcagcatcatcatcacgctggagcgggagcctgctccgcatcggtaggtaaggctgggtaggtgtaccatagccacgatg

SEQ ID NO: 108576 - DNA, 201 bp, Glycine max
gtctaatttccccccgaaaattccaatttttactttagggttttgaaatcccagctactgctttcgcctgatctgcgattagcgattgggtggcggcctctatttccgaggctgtgataagcttatctgcacctgaagagtgatgtgctgagacatggcacttaaagtttctgctggtaaggctgccgagattgcaattgg

SEQ ID NO: 108577 - DNA, 245 bp, Glycine max
gtggattgcaaccatccctcgcaataggcgaaaagtttttgagctcttcttctacactcactcacgacccatacccacttcattgtcttcttcatctttcacgtgggcattttctatgcatgcactatttccccggtttctacctcttcttggttgatcggtacctaaggtttttgcaatcaagacgccgagttcgtttggtttctgctcgtgttttaccatgtgagactgtagaactcaacttc

SEQ ID NO: 108578 - DNA, 268 bp, Glycine max
  unsure (1)..(268): unsure at all n locations
cttctctctctctaaccccttccttcataaaagagaaatcnacaagaaagagataaaagggtctcattcactctcacacacaacacaagactgtactaattctctcgtgtgattgcattctcaccaatgggtgctcgttgctctaaattctctctctgctggtggccttcccacctcaaatcaaaccttcacaacttgtctgataatgatgatgatgggaaaaggaatgagaaggatccttgtggagggttcagtgagtacagtttgg

SEQ ID NO: 108579 - DNA, 263 bp, Glycine max
gtagaattgtagacgcagacgcagcagatcagatcctctgtcttcaattcaagttcaagcaggtatggctcaacaacagggggacgaaatggagtatgctgctgatgataatgaaatggcggaagtagaagatgacatgtatttcagtggtagagtgtttggtgattcagagtccgaatcagacgacgatgatgaatatgactccatggttcgcttgtttctcctcataagcaaaacgttcgtgctctattatactcataact

SEQ ID NO: 108580 - DNA, 249 bp, Glycine max
gctgaaacaaagaagtgaaaataacagcaaaaagtaggagctgcagcagctcccccgaagcttatctcagcggcagactctgaaagctgtttgagtagcctcaacccggagaatagcaccaatgggagaggaggaaaacaaaccagaggcacccatggcaaaggagaaaaacccagaggaagaagcaacccaagagaaaaaaccggagcaagagtccaaagaggaagttgctgctgctgctgctgctcc

SEQ ID NO: 108581 - DNA, 259 bp, Glycine max
cctagcttcgtttctctctctctctctaactactctgtttctctctctacggtagatcggcggcgaggaggatatggacgacgacgacgagatccagtcgcatccttcgccggcgagcggatcccctccgtcgtcgccgaggtcgaacggtcggataacggtgacggtcgcggctccggcgccgcagcagaccaccaccgccgaatagtctggcattagcgcttccgattcagcagccggcgaaggggaacggcggagg

SEQ ID NO: 108582 - DNA, 264 bp, Glycine max
caaaatccctgctttcttcgctgttctctatatattatttttacttttgtagattcattattcattcattcattttaagaaaataataaacccatatttaagtgaagtatacctatttgatttgcctcattagatcgggttggctacgaatttttttcgaaacccttctctattctcaattgggtttccatctttgattggatttcattgccatggctccaaaggatcccaagcaagttgctgctgcttctggtggtggggatg

SEQ ID NO: 108583 - DNA, 262 bp, Glycine max
gaaatatctgtcactgcctcgagtagttcaaaagaggagatgcataaagacaatatattgaaagttgcaatccaggctgctttactcagaaggcctgaaatttacaataagaaagaagtatcttatcaaactgacgaggtttctacctcaggcacagagttgaattgtgaagtgacttcaaaagaccaagttttggtttccagcacactgaagaatgacatatctgctgatgaaacccaagaacaacaagaaatccttgaga

SEQ ID NO: 108584 - DNA, 246 bp, Glycine max
cagcaatcggcgaagacagaagcctaaacggtattcggagaaagagtttgttgaagcactgtcggataatgaggctgactatgacagcgatgatgatattgttggagaagccgtgtatgatgaagagtatctccagaaacgtaagcagagaaagaaggcttctagtagctctgggtctgaaggagatgaagaatatcattgggatgaagataatgttgaagatgaagaagacgatgacgaagattc

SEQ ID NO: 108585 - DNA, 224 bp, Glycine max
aaaacaatggaaatggaaaaatgatgacgaggttacaaacttgaatgtagagacacctctcccccatcttgacaggaaatgaataagcatgcatcaagtaaatatagggggactctacagtatacgagagacgctaagatcaattttgtaacctcgtcatcattaaaacaatggaaatggataaatgaaccaagcaatgatttcaagttgaaatttttgttgat

SEQ ID NO: 108586 - DNA, 244 bp, Glycine max
ggcttggggcttgccaccctaggcaacctgagtcagagcgaagaggattcatcatgcatttttggcaagattacctctgctatattggtagagtttactagaaagggttggatctgactggaaaaggctggatattgttgagtatggacagaaaatgtgggatggggtcttctcaaatatatttttttgcttggtatctggtctcgtttgattagtaggagcatataagagtatacttgttgta

SEQ ID NO: 108587 - DNA, 242 bp, Glycine max
  unsure (1)..(242): unsure at all n locations
ctgatacaacaaagagtctgagaaatgaaggtagacaataatggcgcggttcatgattctctccatttactattattatgatcctctctcttgctatacctatggtccactagtccccatttgctttttcagtttctttttcttgtctcttttgcctttccccttctctttttcctttcacacaacatactaattaganncactgtttcagtttctgctaacacctctcctttctccgtgtg

SEQ ID NO: 108588 - DNA, 269 bp, Glycine max
tgatgcaatgcttccaaagtgtgatgtgattgttatcaacacccctctcactgagcagacaaggtatacttttaaatttaacatctcagtcaatcagaaaaattattttagacttgaaatctcaagccacttataattttcaaaattattatcatgagaagtgcattatcagtattattcatatcacaaggaataaattgtttgatcatgttccagagatgagtagtaaccaaagatttctgtgattcaggggattgtttgacaaaaat

SEQ ID NO: 108589 - DNA, 268 bp, Glycine max
cgattatttattttttggtagatgcgtacatatacgattatatattttttggtagatgcgtgcatatatacgattatactgaccttttcagatttatatgaattatcaagagcacttattaagcgattggataagaggcatttgaagcaattccacataagcctttcttggcacgtatgtctcgcttgatcctcatgtaccaaaaaataaataatcgtatatgcacgcataggttgtgctagtactaaaattgcgtataaacttttat

SEQ ID NO: 108590 - DNA, 263 bp, Glycine max
tttttgttgagcagataattgctgggatagtggagcatcggatttctgaacagtttgcttctcaaacattctttgtaaatatgctttcttttgtagcacggacagtcaattcatattggggaacccaggtcagttttttttccttatcttctatctgcttttgttcactttcaatgctcaatgttcacaatctcgtcagtcagtggatttcatttatttatggttgaacactataattcttctcaaaaatctaatttaatttt

SEQ ID NO: 108591 - DNA, 270 bp, Glycine max
aactcaagcatagttattttaggaatttgtctttttgaatcagtcagttgtataagctgccttgatttcgtcatctactatactttgcatgcttaatgaagagttgtcaaagcccatctacttggagttctgtagtacttaagttagttatgatcttcccttttgactattaggcacatactatctgcatgttactttgtatttttcgtaccacccaaacaggctgatgtcgcatcatttggacatttgttttcaaaatatactgaacta

SEQ ID NO: 108592 - DNA, 238 bp, Glycine max
gtagtttgaatgtccatttttttgttctcctcttctacttttgcataaaaatgctgtatgccttaatctgcagaaatcatagggtttttttttttaggtgtatgctgtatgctaaatcttcggtctctatttccttcctaaaaaacctaaatgttctttaggaaggaaatagagaccgaagatttagcatacagcatacacctaaaaaacatttaggttttttcattttttggtgatc

SEQ ID NO: 108593 - DNA, 237 bp, Glycine max
caagatccgaatcgaggacgcgccgcaggagtcgccggaccgagtcatcctggtgattgccgacgccgcactcagctgcaaggttctgctgagaaacgaagaagtcgttgaggtgtcgaaggcgcaggaggcgctgctgaaggtgttcgataggatcctcgaagtggcagcggagatggaaggagtcgacgttggggacagggtaatgtcttgccggctggtggcggactcggcgca

SEQ ID NO: 108594 - DNA, 251 bp, Glycine max
cttgaactatatacaagataacctaagttgggttcttggatttggaattccttgtgttgccatgattattgtattgcttgttttcatgcttggaacagtgacctacaggtttaacattcagcagcgtggcaaaagcccctttctcagaattggccgtgtatttgttgctgctataagaaatcgccgatccaccctatcaagcacagctgtcaaagcagaacaatttgagttcctcaacaaagcattgttag

SEQ ID NO: 108595 - DNA, 253 bp, Glycine max
ccttacttctcactctctttccaaaacactccctttctctttccccttacccttcttctgtgtgtgatgatgtagatagagaataaaaagagaccagtgtgcagtgagaaagaggttggtcacttcttgtgtggctttgttttgttctttgtgttggaatttgttgatgggtgaagagggagaagaggtgtcaagagataaggaacagcaacacatgggagtttatggaaatgagtggttgtttagtagtttc

SEQ ID NO: 108596 - DNA, 253 bp, Glycine max
cagaaaagaaggcttttttttgccaacaccagttgcaaaactaatatcctttcaaacggatttgatctacaatggcctggtttctctcttttcctctatccactctcttttttccgtggctacagagtcctaccaccgtgctgaggagaccaaagacagtgttgaatcagcagtgcaacgtgctccttctcaaagcactcatggcagcgcactcttgctgaagaaactgggactttgcttcctgagtgttgcg

SEQ ID NO: 108597 - DNA, 251 bp, Glycine max
attttattataatgcataaaaatgcactctcctataaattattaagtgtgctttcatatgatttttaataatttttttttaattttttaaccagattttaggacactggttaacaagattctttttgttttattctctatgctgatactctctttcctaatttgatgatggaatggaattttatctagttcggttgtcccaactagaacattactaagttacataaagatgagagaaaaagagacgaaaaa

SEQ ID NO: 108598 - DNA, 244 bp, Glycine max
cgccgttcctctgccgtcgtcgcacgaacacccagcagagagcttcgaagccacgcaggcgggaacgaccagccatcccagcgtcgtcgttgcagtcggaaggttgcaccacaccaggccgtcgcgttgtaaggctttttagacagctgacaagagacaacaagatatggcagagaagaggcttgaacttgatgcaaaggacaatcctgagaattatgatattgaagagctaactggaaatgaa

SEQ ID NO: 108599 - DNA, 158 bp, Glycine max
atttgatataatgggtgagatatcatatgagaaggtccaaagctttatcaatatcaccatacaatcatcgtacacaaagagaattgtatggtgatattgataaagctttggagtttttcatttgatataatgggtgagatatcatatttgaatcggtg

SEQ ID NO: 108600 - DNA, 198 bp, Glycine max
gttgtgttgcttttccctcttgtagtggttgtagtttgaacttgaaataaatctcgagtggctatatttttgaggataacatccataattccatattatagaccaaaatgatcttacttacaaaatatagccactcgagatttattttgtaagtaagatcattttggtctataatatggaattatggatgttatcttc

SEQ ID NO: 108601 - DNA, 252 bp, Glycine max
gggctcgaggtaggtttttgcatttactttttttgcgctgattttaattttctaacatgtaaaaaatccagcgagagtggaagcaaaatttctgggaggaagaagagaaaacccatctgaaacccacccaaaatatatataaaaaaaagagagagagagagagagatgagagcgtttggttagatgtaattctcgtgagagaaaattccatttcagagatttattcttttgccacttcagatcacagacaga

SEQ ID NO: 108602 - DNA, 248 bp, Glycine max
ctcaaaaattaaaatatacaattttccaataaactgtataatcattaatcaacattatattatgtttctattcaacttcagcatccttttaggtgcagcatttgcattcaacagtccttgtctaatttttactttataataataataataataattgtagcaatatttatggctgagattgtgtccagtattttacaacttcagcaaccgaagttcacatctgtttggaataagcttcttttccatac

SEQ ID NO: 108603 - DNA, 249 bp, Glycine max
ggaaggaggtgtggagtgtttgaacaaaggagtaaaatggtatttttgaaggattttaaagttttataagagccagagagtaattatgatagggccaatagtaaacaccttttgttgtcttaggtaagcgcaaataagtgcagagggtatggaaaatgggccaggaagtggatgtggccttctagggttatgttagtgggtgatggaaggcattttatttaatttatagcttctctataaaataaaatc

SEQ ID NO: 108604 - DNA, 251 bp, Glycine max
agaatatacaaatttgagtgcggtttcgacgcaatagcgccaacagcaaaatctagttgttcgccgtttcggaatcagagggagagaagaatcctttccaaacggcgccgtattgtcattcacccctctctttaaaaggggaactctaacaccagaagaggcaagaatcccaataatcaaattcaagagattcccaaacttttttactttttattccctttttctcactatacaatacaaatacacattca

SEQ ID NO: 108605 - DNA, 268 bp, Glycine max
gaaaaacagaatcaagtatcgccttgttgtcttcctgttgttgacattatcgatgatgaaaaacagaatcgagtatcagaaaaggaagagaattggaaattgaccccacatggtgccaagagagatgccactttagaccttcttcaacttgataattcaactgtcaagaagatgagggagaccaaagaatttggtgaattaaacaatgaattgccattgcaaggggagaaaggatgtctcgtggtaggtggagtttggaagaaactta

SEQ ID NO: 108606 - DNA, 261 bp, Glycine max
gctttctctgcaacttccccttcgtttcctttcactgcacaacttcttccatagacttccctttctaactctctctcatctcactgttaccattttcagctcaaggagtattcttgcccaagtcctcgtttttctgatcggtaagcaatggttggtgcatcttggtttcgaactctatggaagattcgacggaaggatgatactaattctgagaaggcagtgattggagtgttagcatttgaagttgcgagcttgatgtcc

SEQ ID NO: 108607 - DNA, 184 bp, Glycine max
agataggcttacttcgagggaccatataggaactagacaacgggagattacgttgaactcccacgcctacctgttgacccatcagatgttgtacctgtcaaagctgagctggagaagaagaaggcttagcgagcttacaatagaccagcgtggccttgcttcaaaagggacaacgctgcaactt

SEQ ID NO: 108608 - DNA, 257 bp, Glycine max
tgaagaaacaagtaagtgagcgagatggggaacttattgcattacgtgggaacgttgcctgcctttatgatgcatgcattaattttgtcattgtacttgaaaatgaaaaagctgaactggttggaaggaaggttgaatctgcagatctaggaattaacttggaaacaccttcatttgatgatggcatatctgaggaatgcattaaaaccctgacagatagactgctgttggctgcaaaaggttttgctagtataaga

SEQ ID NO: 108609 - DNA, 259 bp, Glycine max
cgaggcaggcgggtaccctcctaacaatgcaggcgggtaccctcctaacaatgcaggatatgctcctcccaatgctggaggtggttaccctcctaacacgggtggtagctatggtcccggtggtggtgtacctcaaaataactatgcagggaacatgggagggccaccaccaaaccagaacatgggaggctttcaaccaaatgcaggatggtcaaacaatgctcccagtagagatgtgccaagcagggatatgggagga

SEQ ID NO: 108610 - DNA, 254 bp, Glycine max
gaaaggtgggtgatgaagtgaagagttctgcgattgcgaatggaagtgagcgcgaaggtgaaggtgggtgggtttctatggttggagggtttggttgaggcgtgttgccttcatcgcgttgttattctgtgtatgaggtcaaacaacctattgatgcgaactggtcagtgtttcctcttaaatggtttcatcttcttaggaagggtctgcagaaggagaagtgaaactagcttcaatttatttcaacacagtga

SEQ ID NO: 108611 - DNA, 243 bp, Glycine max
cttgcacctgtggcaattctaaacaagattagggtcccatatcggccaatagattctaagattattgcactttcaacagatcgtgacaaacttccttctggaaagcagatactagcactgactctgacctacaacatcaaattggaagatggagctcaaataaaacctcacatacctttgctaaatgacaggatatatgacactaaatttgagtctcaattttatatgatttcgactcaaata

SEQ ID NO: 108612 - DNA, 99 bp, Glycine max
gatgaatttaaacgtgtaattggttctctacgtggtcatgatgacaagatacgtgtggttttgaataaggcagaccaaattgatactcaacaactcatg

SEQ ID NO: 108613 - DNA, 240 bp, Glycine max
tgcagaataaagttagtaagcaaatttgctggcctcgtaatgaaaccgaaacatcactgcagcgcaaattggaagttaatggcaatcatgaaacccctgtgccatataaaatcatctctggaaacacatgtatggtgaacaggaatccagcagatctcaccataccagaaacagggaatatctatatgatcagaggagaagatctgaaattcgagaagaattttcccaaaaaaaggcctc

SEQ ID NO: 108614 - DNA, 100 bp, Glycine max
accgatatgccggattctacatcgccctctgctgcagcgtctgagaggaagagagctacggaagccgagcctgctaagcagctcgagtctagaacctgag

SEQ ID NO: 108615 - DNA, 265 bp, Glycine max
gctagtgagtgatggcgatgagggtgtgaattctaaaaggaaagaacagctgagctggtcagaaaatcaatggcatcatccttgggttttgagttcctgacgaagaagccttacagtcctccatcctgggcatcccattccaccctttaccttcccacttcttctctcttgcccatatggaaccttcccaatctgcccaccaataccgagctgtggatcaagcgagacgacctttccggaatgcagttgagtggtaacaaagtga

SEQ ID NO: 108616 - DNA, 252 bp, Glycine max
gaagaagccagcaacattagcagctgaagcaaaagctcaatcccttgcgttaatggtggattgtcagatttgattcgattttggaaacagcttatcgatccctcaatccgctgtgaacagtatttaatggagtttagttggatgcagatcgagggcgtggtctgtttgatttgaactgaatttcggattgaaggatctcattttcttggagcattaaagcagaaatttctagcatcctattctgttttaccc

SEQ ID NO: 108617 - DNA, 243 bp, Glycine max
  unsure (1)..(243): unsure at all n locations
atcgcgtttcatcgctgaaaatcagagccttcctctcgccgccgacgccgccgagatcgccgtcgcttaaggtttccactcctccgtcgaaatcggcgtccatctcttcctcctctgcttcgtcgtcgtcctcgtcctcgtcgtattgcagccctaccggcgccagtgatctggccggagagttagagcatcggcgccggatatagaccgcatcgnacantagantncgccgacgccggcggc

SEQ ID NO: 108618 - DNA, 192 bp, Glycine max
ctcgagccgattatgacagtgatgatgaatatgctcctgacagggtgccactcttgaagaatgctccacctcattatgttgttgatccaggatatgcacatggaaatgatacatggaggagacaagagaaattgggcaaggccaactcgttcaacataaccatgtacgatgagccaagtaaggcatgagagg

SEQ ID NO: 108619 - DNA, 163 bp, Glycine max
  unsure (1)..(163): unsure at all n locations
agtgctagtatgaactcacaatcaacagaattggtttatgacaatgcggagacaggcatttctttgcctgatcctggtgattgggaccctaattatagtgatgaattacttcttcaagaggactggtcagattaaagcagntttacaacatagttttgcagaa

SEQ ID NO: 108620 - DNA, 250 bp, Glycine max
aaaaaaagaaaagaaaggaagctatagacatagactttaatttttacaaataaagttgggcttttcttgttcaaagctataatttgcgatttaaccttccatagttttacacacactatcattcatttacaattggctttaccaggcgaaacgaaaatcatactgaaaaaatgctaccaccttattttcaactctaaaatatcaattggtaaattatgcaatcgtatgttttctaatgaattattcgtat

SEQ ID NO: 108621 - DNA, 216 bp, Glycine max
attaagacattctactgagtcactaagatgctgcacttgcataagtttgaatgcttgctatctataatatctatcctaggtgtgaagctttggaggtcgcagatactactcagtgaggcgctgctgaagatgcggctcaaccatcatgctgatgtggctcatatagctgatgcagaaatacctccagtacgatgctgagatggatctcttgactga

SEQ ID NO: 108622 - DNA, 249 bp, Glycine max
agaagggcttcagatcgttttatgcctacttctcaaaagcagggatcatgcaaggtccgatcatatatatttgggcgagatgacagcaacagcaggagttcaatattgatctcagaggattctttagatacgattcaaacggagagtcaaccaccaaaagcggcttctgccaagtttcaaagaaatacgcagaacaaaaacaccaccatgaattctgcatctaaggagtcaaatgtgtcgcttttggat

SEQ ID NO: 108623 - DNA, 253 bp, Glycine max
ctccctcaaataccatttcccaacaaaacaatttcaattccctttccttcctcaccagcccaccatcgaagaacccaagccaattctacagaaaccccccggttaccgggacccggactccaaaccaccgccacctcccccgcgaaagcccatgctgccaccctcgttccagcccaaacccaagcggcgaactgctgccgcatatgctgctgcaccttctgcctcaccatcctgatcttgatcctggtggtcg

SEQ ID NO: 108624 - DNA, 245 bp, Glycine max
ggaagacatcatggttcagcacttcaattttcttttctagggggagcatgatgtcttccaccacagattatagaaagtgaagtagtagcaactagcaaggccaattaagataagaacatgcaatacttgaatgcatcactttctataatctgtgttggaagacatcatggttcagcacttcaattgtctgttctacggggagcatgaactgagttgcaagctttttggttcgattatgtcaactc

SEQ ID NO: 108625 - DNA, 123 bp, Glycine max
gagcgtgcaaaggaaatgtgtactgatctgcagaatgcatcggatgatattaatttactgtcctcaaagttggatcacaaagaaagactggaggcagaaaatcaaaacacaattttgaatttt

SEQ ID NO: 108626 - DNA, 107 bp, Glycine max
cacgattacacggatgatgcgcttgaacatcgtctcgtagggctaagcttgctttacgagagtcaggtgcagcaattccttgagaggggctacaacaatgcactaac

SEQ ID NO: 108627 - DNA, 241 bp, Glycine max
gaagctttcctatgacatgggtttgggagctaaatgcagtgtcaagaaggtgggttctaagcttaggaagaagttcactgcctctgccttcaatctcaaccttgatttcataaaaaagaatagcagagtaagaacaagaagttgccttctgatttctctccaacaccctttaaaggtgcttgcaaccccatcttgaacaagcgatgggcaagagcactgaaagctgcctcaaaacagttta

SEQ ID NO: 108628 - DNA, 236 bp, Glycine max
tctcgagccgatatcggctcgagcacacgaaacgataccattcaatcatgcagcggcttctgatcctctctgggcctaaacagaatgcttttccgtccggagagatgcaaaatggagtctcaaatgggcgtcggttttatcaggtgtatactacgaggagcacaccctttcctgctttatctgagcgcgtctgaaatgataccgacattcacctttacaaagaatgacctggcttg

SEQ ID NO: 108629 - DNA, 268 bp, Glycine max
aaaaagtgaatccatgcttcctttatggaaatattcccggcgcattagtttggaggaattgcatagatcaattgatttttcaagaatatgtatagattctagtaatcatcaagctgatcttgtggcgggaattgcaaaagcttgcatcagctatggaatgctggggcgcaatttgtcgcagttatgcgaagaaattcttcaaaaggagggttctggagttgaaatatgtcaggacttcttagctatgtgtccaatagttcaggagcaa

SEQ ID NO: 108630 - DNA, 101 bp, Glycine max
agttctcagtctcacggtctccgtcgtgtattactccaaagttacggtgctgacggatagaacacgagctatgcagccgtcatgcacactctgctgcgatc

SEQ ID NO: 108631 - DNA, 260 bp, Glycine max
ccgccaatcgcaaggaggatcggctcagcgctcagacgcgaaggagtgatcacaaagtcacagctacccacagtgatctcggctatcgtgctcgagatagcatgaagcgcgcatgccggtgggggtctacacgagatctcgtcagcactgaccgtcttgcgcgtgagtattggtgtacagaacgggtcacgggagatgcactctgaccggggagccctctctgaatgctatcgccaccgggtatggcgtagtcgtctcgt

SEQ ID NO: 108632 - DNA, 266 bp, Glycine max
ttcctttcagtttctttctctccattttcatatctttcttgcatgcccttatggtaaggctttctcttcctttcatctttctctcaatttgcacacacacacaacaacaacaacaaaaaagctctttttacagtttgtttttgcagggtcagaattttcaactcactggtggcaatcttgttttgtaaaggccggtgaaaattatagggaagccaacttcataattttacttgggaaaaagacttgccatcattttcatcaacatc

SEQ ID NO: 108633 - DNA, 106 bp, Glycine max
atgaattttggggatttacctaatcaacttttgtgtcctcaatgagatggatatttgttgaacaacaattgttaattacagaaggcaactttcttaaagccggtcg

SEQ ID NO: 108634 - DNA, 131 bp, Glycine max
cgagatctacagtcatggtgatggagcttcaaagccagaacaaccctttctctattcacttgattaccttctttttgtttctcttgttcctgttattcaaattagttaagaaatcgagttccacacaacat

SEQ ID NO: 108635 - DNA, 198 bp, Glycine max
gtgatttgctcacaagaccagtgtcggtcacaccatctctcccttttctccacctgcaacgatgtcacgttaaggagtgccacacaacagcacaagggaaagaagcagcaagctctggagacgcatcttctggggaatagtgatcttcgagttcatcgtgttactggcagttcgtgatgtcctgggagtcctattgcc

SEQ ID NO: 108636 - DNA, 256 bp, Glycine max
atggacaattctattatgtctatgtataatagatgctactatgtttcatgtgatcgtatcggagagtataattgcttaagagactcggatacatagtattggtatcggatcgtgaagacaattcaaatattggtgcttcatagaacgaaccttaagtttgccttttcaacaaagaggcgtatggcagtatgatacattgtacaatatggtgcattatctgattatcagttcatgcggccacgtgcacgggacaaga

SEQ ID NO: 108637 - DNA, 252 bp, Glycine max
ctggaaaatactgtggtttgtggtggcacttcttctatgacaggttttgacgagagatatcagaaggtatctagcttcggttcgtctgctgttcaacctaccctcgttatgcctccagcatacatgccagaaaatgtagtcctgtattctgcatgagttggaggtgtccatagttggcaaagtggtattccctcataatcagcatatgcccgacgcagactatgtggaaaccggagcttccattgttcatcg

SEQ ID NO: 108638 - DNA, 243 bp, Glycine max
ttttctctctccttctttctaataactctgtgtgttcgagattgaagaagatgatgcatgctggacccggaggcatggcccaacaagcgaaccaacaatacgcacagaacagcaacaaccctacatgatgatgctgccgcatcatcagcgccctcagatgtgggccacatcagcacaaccatagtcccaatcggtggctcctcggcaactcaccagcgccgatgaggcacgtatcctctggat

SEQ ID NO: 108639 - DNA, 252 bp, Glycine max
tctgctcgagctcgagcgttctccttcttttctcctccatatacctcacctatttccccggatcatcatcaattttcaactcgcacctttttccttcgtttatttatttatgtgactcttggtagcacaggattgattatatctgcggacgtgacgctgagctcgattgagatcttcacaacccacgagtttcttaaagccactccaactgtctattttctgtgcaaaggggacaacaaaacccaattgcct

SEQ ID NO: 108640 - DNA, 247 bp, Glycine max
gtcgaccaaaaaaggttggacgtggggctgcaggtcagaggcctgcaatgccaatgaagggaaagaaaagagttaggacaaagtgatagtgctttagccaataggtttctttgtacaaagtcttatccttttggttataagaatatttttttgtttgctttaatgaagcacctagtctcatgcaacaaccaaaaggatctttgataagctgcagagggaaactaacaacaatatatggaatagttct

SEQ ID NO: 108641 - DNA, 174 bp, Glycine max
ggtttttctggcctctccattcttcttcttcctctgggtttttcacttgttggattttcttactctctttcattgtcaatggataaccaggatcaaagaagaactcacactgcagggcacgagagtcatggagttcatctgtgtcacaaatgtggatggccatttccacacaac

SEQ ID NO: 108642 - DNA, 225 bp, Glycine max
cggctcgagcggctcgagcggctcggcggctcgaggattttatgtttgtttttgcgagcgtaaggttgaggagaagcgatggtgggagcacggccacgggacatagatgacttgcccaagatcgccgccaactacacagcgcttacgccgttgtggtttctagagaatactgctacggtcgaccaacatatcgtccgaagattcctgcgaccggtcactaccgtg

SEQ ID NO: 108643 - DNA, 244 bp, Glycine max
gttgaatatcaccttaaaggtcgagagtcttctttgttaatggagacttacaggagccgtgtttatgttatgtcggacttgtatttgccacttgtttcagacacaacattacaattcaaaagcatccatgcgcttggaatttttatgtagtaccgttcccgcgttctgcctagcagtgcattagggttactgagcatgtcatataccatgtgccaaaaacatagataactgttccttctctctg

SEQ ID NO: 108644 - DNA, 244 bp, Glycine max
cacagagtgatgtctttcccaggttcttattagcttgcagcttgaagctatgtctgcatatgctcatcaaatggagcagcagtactctgcacctagtctctcagatgattctgagacaggaagccattatgaattagaatcaggattcttcatgaaatcgtttaccgcaacaatattcgttgcttcacttgtcactcttggagttcttctaattactttggtgatttccttggtgattatgctg

SEQ ID NO: 108645 - DNA, 120 bp, Glycine max
ctcgagccgaagtcggctacgaggccgatcgcagatctatagggtatcaattttgtcattctactggagccccactggccatagccgccagccagagaagcgtagatgccttcgatccta

SEQ ID NO: 108646 - DNA, 144 bp, Glycine max
gccctgaagacaccgaaacctggttttcgttcaggttgatgaattcgctctttaatgctcttctccttcgcaattgatgacaagaaagagcttcaatttttaggtcaaccaccacaaccctcttcatagccttgaactttaata

SEQ ID NO: 108647 - DNA, 243 bp, Glycine max
agataatggaagtccattagcgggcgctcagtatccacacatgcagaattctggacatcctatggggcctcaaacaatgggcaatgaccagggtgttggtatgtatatgcagccaaatgctaacagccatatgtcaggaatgaataaccatgttgggagcaatcaaatgggcttgcaacctcagcatatgcaaggtgttgcaggaccctacatgggcatggctccacatcaaatgcagggtgg

SEQ ID NO: 108648 - DNA, 245 bp, Glycine max
aagcgcacaaatccaccgccactccccgaaggaaccactccttggtcgtcgacgacgatgacgacgacgagtttgccattgggggttttagtcccaggaagagaaacggcttttggtcttttctctatctctcttccaaatcatccaaaaaactcaactccaagagcttcagagaccacaaccctccaaggatctctaccattaactcagctccgggaagttctagttctgtcaagcttaaagat

SEQ ID NO: 108649 - DNA, 245 bp, Glycine max
ctctcctccttctctctccacacctccaaccactcattcaaacttccaaatttcaactcttacaacatatcaaacaaaaattccatcaaataatacacacactttagctgttgttgtgcacttcaaattaattaaacatgctagttcctcatccttcaatgctaattgcacctcaaaacaccgtagaaaatcatgacaacatcatggaaggacagaaactacactttgatggatctttgatgcca

SEQ ID NO: 108650 - DNA, 249 bp, Glycine max
ggtcgttaaatctctgagttggacagacagtgataacctcaaatcatatcatttgctgtttcaatttccgtcttccacaatgttccacaacttatacaattccagtgtgtcgatctccgtctcggacgacgaacccgacgagctgggtcggatgcggatccgcgcgcggcggaagcggaagatactcgggacaggagcgattggctgaggaagctgctcctcaaatactggatgcttctcatcattgtt

SEQ ID NO: 108651 - DNA, 254 bp, Glycine max
tctaaagcagactgtgtttttggtggccactacacattgtcagatgacaaggttgaagctgcagtgttgtatccaggcatgcgacctactgttttgaggatacgcttaaggataaggggaacaacatcaggagctaacaataggatggatttgatctcacttgtcactagtggtgtaaacagtagtgaggcaagtgcacctgaggaggacattctgggagttgttgaaggatggcaagatgatgaaacacacaa

SEQ ID NO: 108652 - DNA, 253 bp, Glycine max
gttagtcattgtgggtagagactaattcgtcaactatagaatgtacatctattagtgttgaaaagacgtgtgaatgcttgccgtgtgacgaaacgcagggtcatcaatgagctttgaaacaaggcttgggaggtacgtattgcacgccatgaagaaagctaagaacagcaagccatggcttgctggccagacgttcatacttttcttttcacaataccttatcacttgaacctatgcctacgtacccgtttgc

SEQ ID NO: 108653 - DNA, 253 bp, Glycine max
aatacattctatcttatctattgaaactttacttaaatttaaatcgtccttcacaatacttatccattttcatggcttgatggaccaacaattgtcgctcgcataacgcgcatccctttcaatatatagtgattttccgtacacaaaactcaaaattttttccccactataaataatgccataatctctaaagtccgaatcatctcattctcatcaagttattatcaaataattaattaaattcctcgtggaa

SEQ ID NO: 108654 - DNA, 220 bp, Glycine max
ctcgagccgtgctgtggaaggatagtgaattggtgtttttttccactctaaatttctatagcttctccattaatttagagtggaaaagctatagaaatttcggcatgcaggtgcagtgttggctacttcggtgttgtaactttgtattcccaatgtttatgattcccaagttttgtatgacttgtgagtgagaaccacaaagcattcagactgttgaact

SEQ ID NO: 108655 - DNA, 140 bp, Glycine max
acctagtaagaatattgcggggttttttttgttattttggtaaaactcgacttcatatagatgaacagaaattattcaactactatcattttgatgttgtattcctccacttttctgagtggcagcatgttattattgaa

SEQ ID NO: 108656 - DNA, 253 bp, Glycine max
gcagtggctgagatggcagttcccacagctgcacactggtcagaaaaatacaacaatgtagtcaaacacggcataacccttctcacttgttcccttgaccacattgttgacattgctaaggcgtttaaacacggagaaggcaatgtgaatgaagatgaagcatgttccgtgggagactgttcttagagcactactaatagggtagctattttcttcataaaatctgcttctggttaggatttgttttgtgttt

SEQ ID NO: 108657 - DNA, 258 bp, Glycine max
ggaacatgaagaaggggtggtggttagggagagaaaagcaacttccttttcaaccaaatagtgccaacccactctttaactatttcccttttcaaccattgcttagatgctctctaagccttcatctgctatgcccacttttccttcttccatggtgagaagtgggttgtgcgtgtggccaaatgtgagacaactttgctttagaaaaggcattctatatgggtttatgcgattgttttctactccgttgaaaacgct

SEQ ID NO: 108658 - DNA, 252 bp, Glycine max
cttctctctcacaccgctttagaaactttcctaaaccctgctctccattttcccttgtctcttcctttctctctctacaaagagtgtgtgtgagagagagaaggatttggaattttggataactagagcgaaagcgtgacaccaccaaaaaccgaactgttcccagatctctctctctctctctctcttccaacaatccaaatccaaatccaaaaccctaccaacaccacactcaatcgatcgatggggcag

SEQ ID NO: 108659 - DNA, 250 bp, Glycine max
cacgatgacaagcctattttatctacctatctcccaaatgcctttgcgaatattcaataaatacaatgcatgaagccttgattttagatgtgtgctttaatgcatgggcataatattatcatcctatgtctagcaatgatttcattatgatgtctttttcttttagttcttttagaaataagacagtaggatagaaaacacctgcatctaacccctagcataatataaagatgagtaatgcatgagatat

SEQ ID NO: 108660 - DNA, 251 bp, Glycine max
tcttcttctcaattttttgatgaattaactctaatcgtatattgctagtcccacaatgaattaagtactgtgattacccacgaacaattgttttttccccttattcatacaaaagttaaattttgtagatttaatctgtcatgctccgttaaaatcgactttcaccaatagacgacgattgttttccctgcaattagaaattttttcattagggtttcagtgtttggtgatggatgatttctccattttgt

SEQ ID NO: 108661 - DNA, 251 bp, Glycine max
cttggtttaaaacagggaactgcatggccagctcctcgaaacgttgcaactcacttgcgttcttctcctcctttctcaatggagaatcaccaccttctacaaaataagaaatccgtataatcatattgggtgctctttgtgtgaccccatatgaagattttgctcttacattagcaatagctaatagtccatattgtcaaaatgcgaacaaccctaagcaaatgtaatgaataaaagagttttgcaatgaa

SEQ ID NO: 108662 - DNA, 250 bp, Glycine max
cgaatttctcggatctgatccaaagggtcaccgcctcttgcctcctccaccccctcgccaccgccgccgccgccgtcaaggaagacgacaactcgccttacgagtccgaggacaaccggaacgactcagaggaagaagaaaatgagaatgacgacgagtacgaggatgaagagagattggtggggcccttgaaagctttcaaagtaaaacagatggaggcgctgattgaacaaagtgtttgacacggtgt

SEQ ID NO: 108663 - DNA, 238 bp, Glycine max
cgtatatccatagattctatgctataccatcattttatttagtttataaaaaatacatcattattgaaagaaaaaaaaaccattaaagctcgtgtctgttcccactatccagcaaactcttttttatcaactatccatagacgaatttagaagttaataaaattaatttattggttgttatttttgtgacatcttgaagacttcagtccagcaaactcttgtttgtcaacttatagtt

SEQ ID NO: 108664 - DNA, 236 bp, Glycine max
gctggaattaaggttgatcctgttccggaacttaaaataagaaatagagcacgccgtgttgcagttaaacaatcagaggaggaggaaaccatcacaaatgtagataaatctgccaacagcttgcttgatggtctagcaatacagaaattaaataacgaggatactgacaagactctagaagtgcaaagaagcgacaaggaaaaagaatgcttctctttttcgtctctggagaacaa

SEQ ID NO: 108665 - DNA, 128 bp, Glycine max
caaagccaaataggcactataaaaaaaagagggttctcctccaaaacaaatgggattaaaggtctttggggccttttcctgagtgctttgtattgaattcattaataataatgacactgttaattcta

SEQ ID NO: 108666 - DNA, 239 bp, Glycine max
tgacaattttgtgccataatctattcttagtaatatgacaatgttatagtctgcaatcggatgatctgaggagtaatggcatttgatagaaagataaagaaacagaatatacatcttgagctaaattttcataattaagattttgatgatttacagataatgtgccaatatttattcgttaagaagtttagatttattttgtggagtgttagttttataatccattacttgattcatgc

SEQ ID NO: 108667 - DNA, 129 bp, Glycine max
acgcgcgacgtcgagctactgtatcgagctcgaatcgcgctcgagctgtctttggcatcttcgctgcaactctctaacttccctctttttacgaatctgaatagaaatggcttcggagactgagacgtt

SEQ ID NO: 108668 - DNA, 249 bp, Glycine max
gtttaaaaatggtgaatgacttatcccgctgttatacattggtaggtaattgttacagaagtcttgggtggtggtaaattctatgtccagacagttggagatcaaaagatcgcatccattcagcacaacttgcttctttgaacctgaaggatgctcctgtgcttggtgctttcaatcctaagaagggtgacatagtcctttgttattttcatgctgacaagtcttggtaccgggcaatggtaagttcct

SEQ ID NO: 108669 - DNA, 249 bp, Glycine max
tccttaatcacttttcctttaggacttgtctttttatccacaagctttaattctagtctatataatgcacaaccagatgggacagcttactgctactgttccgtcaactgctgatggttatggacaaccagtcaagggtataacaaagaccaagtctgagaatgatgaatctcccaaataaagcaatactccaattggccattttaccatatgactgaccaacatgtacatacttgaagatggaccact

SEQ ID NO: 108670 - DNA, 237 bp, Glycine max
aagagaatgtcaatacacagtgctttaccacccgcaagctccatccactgctagtaaaactcaagccaagaatcaagtaatcatgctagagttgctattagcatgaatgctgcctctctatttaccaagttaatccatgaataaagcttttactatgcatgtgtttatttttcatcataaaccgtccaatcatttgtaagaaaaaccagaaaattggtaacaatcatcatcatcttc

SEQ ID NO: 108671 - DNA, 230 bp, Glycine max
aattaattgaaattaaatcattctccataaacacatgacaatatcaagtaatatatacttgattccttttaaaataatacatatagtcttaaagtaattttacggtgttgtgaatgtttttaattaaaaaaaattataaaaatttctttataaaataatataccaattctctagatttaaaaaacacatgacatgaactgaagcctttaaattgtcaaatttatctttta

SEQ ID NO: 108672 - DNA, 245 bp, Glycine max
ctagttctagcaaagcgtgcgtcatatatggaatttaatgatgttttgagatccacaagaacgcagttagagcgtgagtgtggtcttgaagacatcttcagcgtgaaagatttacctgcttacaacatgttgagatgattgacaattgcctttcagttcaacatttctcttccttttttttttgtttcttttggcggagaatgttacatgaaatgtatctaaagcatttgtcattttatctctat

SEQ ID NO: 108673 - DNA, 165 bp, Glycine max
cttgaagttattcaagatctatacattgctaatcgatacaaagatgagaatccacaacataaaatgtttgaacaagggcattcataattgggaaaggtcaaccattttatgttgtggattttcttctttgtatcgattagcaatgtatagctcttgaagttattc

SEQ ID NO: 108674 - DNA, 248 bp, Glycine max
tccttctatacctcccctcgggccccacctcctccctcatccaacggcccagatctccccgctggattgtgttagggtttacgccaccatcatcaattcctctctctttacctataaccctctctcactcttcttttccccattccttttctcagcgcagtgtccactgctctctctctcaattccccttcactctcacgcgccgccgtggtttccgccggcggccactccctatccgcgcgcatcca

SEQ ID NO: 108675 - DNA, 247 bp, Glycine max
cctcgagccgaatcggctcgaggtctcctccatttctgtgcctctcctctgtcgttacgacactctctcctaaacggcgtaacggaaggagtcacgtgacgtgccgaagaaaaaggaaaaggttgatggctttagagcaggagggtcagaataggaacacaaacggcgtagtggatgctggagatgagggagggaaagcgccgaaatgggcatcggtatcttcctactgcagaaagctggagtgaac

SEQ ID NO: 108676 - DNA, 248 bp, Glycine max
tatttcactagctactactcttcttagtttctctgttgtatcattcttattgctatatcctaatcaaacttcactctcaaaatgagtgatcccacactagcacaacagcatctagtcaaagtccacacaacaacacacgtcccagttgttaccacacacaatcataaccaaacaccctcaataaatgcctcaggtgataagtagccgattgtgggggtgttctacaaagggaatgactatgctacatt

SEQ ID NO: 108677 - DNA, 247 bp, Glycine max
ctctacaagtctttccttgactattaaattcctatgatcgcattcttcttcgctcattcctgtgtgctgacatcatccccaacgtcgtcacaaggttataactcgtgtggtggtgttcctagggtcagcagttgaattgggtatgatactgtgtaatcacgagtcttccacggttgtactccatgtgcgagggccgttagagaacgacattacaaatgcgtttttgtcagttctataagtatttaaa

SEQ ID NO: 108678 - DNA, 238 bp, Glycine max
tcatacttgaaattccaacaatttatcattagaaacaatgaattggaaggagtgtgggagagtacctgtttggcaacaaattcagggtaattgtcttgaagcaattgtagggcatgtttggtggcttgtctagcttcccacttggcaagtccaggggaattcttgaggtcattaacatgaacaatggtgcatatgccaccagggttgaaatccagcttccttatactcttctccagga

SEQ ID NO: 108679 - DNA, 238 bp, Glycine max
tctcgagcgaatcggctcaggaagccctgtccatgcaacaagctttcaccatttctacaattctcttctcttccctagcacgtctcaccctcttaaacactacctcttcatctttcatggctacccatttgcacgtctccagtgaagaattcgacccttctccttctcttgcaattggacaacacgacctcttaatcgttggtcctgggattcttggtcgtttagtggctcacaattg

SEQ ID NO: 108680 - DNA, 239 bp, Glycine max
gaacattctagttccccctcttggcctggttttgctgctcctcatgttaccgccctatctgttattcaagattctccgcttcatcgtaagatcaatttttagtgagaacgtagcaggaaaagtgatactaatcactggagcctcctctggcataggcgagcatctagcatatgagtatggtagaagaggagcgcgtctagcacttgttgccagaagagaaaatagactcaaggaggttg

SEQ ID NO: 108681 - DNA, 275 bp, Glycine max
gagcatggagggaggagcacactgggggtgacaagcgggtttgcttgacgaagttgccacaaggagcatcaggtgagggaaaggagcatgcacacaccacaacagttacttctgctactaccacagatagtggtgctaatcaccacccaaccacaaccactgaccatgagaagaagagtataatagacaagattaaagaaaaattccaataagtataagtcagtgaattattcatgaatttaagctttgtttattttgtatgtttatctatgtca

SEQ ID NO: 108682 - DNA, 267 bp, Glycine max
gttttgatcgagatctttgcatccttatcaataaaatatcttgttacattttaagaagtttccaaaggttaaatttaagagctggaaaagggacattgggaccttactttcaccattagctcaatctcataacatttcaggacatcccaggcaagcaattaggtgtgttgtttaaggttgccacctgttttccttggcttcttttctttatcaacttttgctaactgcaaattttctggcttctgaaatttgtagtttgggatagct

SEQ ID NO: 108683 - DNA, 249 bp, Glycine max
atgacatgcctgtgcccaagaaacggcatggcccgccaagtgcttcacttgtggctgcggcagacctgcttcaacgaacaatgtgcagttaaaaaaaactggattgctacaaaaccaggaaactgaagctcaatgtttagaggacacagaaggagagttaaccggggaagcgttggaccttggtggtgagaaagcaattgagtcggctcgaactcttttgagcataggctttgaaattaaaccttgttg

SEQ ID NO: 108684 - DNA, 250 bp, Glycine max
gctttaaaagatcctaaaagcaaggttaaagtgaatccttcagaaagcaatcgtggatcaaaggagagatctgatagaaaaacaaataaatttcaatcaaaggtatcaaatagcaatcaaaagaaacctatgaactcaaaaagagagcaagaaaggaggcggcgagaagaagtagctggaaagggagaagaggaggaagaacacgcaggaagagggcacgaaaggagaaaagaagaagaagaaacagcac

SEQ ID NO: 108685 - DNA, 168 bp, Glycine max
catgttcaatgttcttatcctttcgtctctgttaatcatgcgtgtctgtctcccactatcatcagtgcacgtaccttgtgatcttccacacaacatacgagagatgatgatagtgggagacagacacgcatgattaacagagacgaaaggataagaacattgaacatg

SEQ ID NO: 108686 - DNA, 252 bp, Glycine max
ttcgagccggtattgatacgaaattcactgcgttgttgtcaagattgttggcacctgaaatcatcacaagaaggggttatgcagccaaaaggatccagagttcgaaaccttgtaattcagtggaattagaccgttagttgttcataattgttgtattctcattcaccaattggtaaagtggattacatcaacaatagaataaaaactgtatctggttcttgagcataaatcaatcgtatgttttttccgttt

SEQ ID NO: 108687 - DNA, 262 bp, Glycine max
gatcatctgatggatttaatcattatcgccataattctgcttcttttgttggaaatgacaacacatttccggttagttttgttcatgcttcatcacagcttaaatctgagttaaacacagaagatctacttttgactgaaaatcattaccatcccaggacaggataacttcctttatcgaaacgactattaagccccagcttgagtttctccaggaaaataccaaggatgaaattcttatacaaaatcaggcagccaaggaa

SEQ ID NO: 108688 - DNA, 260 bp, Glycine max
tgttcaacaacacctactgtctcatctactgtggtaggaaagcataatccacccacagtagatgaatccataaatgccctcacagccagttgggcctggtggtgttgtttcatccacatatccccgtccatatgttatgagtctacaggtggtacaagtaatgtgattcctgacagcagaaaatgggcccatcaaagtctggatcttaattcgggccctggtggtatggatacagaacggagagatgatagattgccttc

SEQ ID NO: 108689 - DNA, 259 bp, Glycine max
ttataataataactccattttccctctgtcttccccccctcctctacacaaaaatatattattagcatggagaaggtgaattttgtgaagaacggagagcttagattgcctccggggttccgtttccacccgactgatgagtgctggttctgcaatacttgaagcgcaaggtcttctcctgccctttgccagcctctatcattcctgagcttcatgtttgcaagtgatttggagcaagagagatacttctttagcacca

SEQ ID NO: 108690 - DNA, 260 bp, Glycine max
ttattccattccattccagcacaatacagtgcatacagaataaatcagtaaaatacaacatacagtatatcagagtcagaattgagaacaatcgttggtgtggaacgtgacaatggtggcgacgaacgtgaaggcagaaacctgtctctgatggacaagcgtcggcctatggaggctgagatgaactccatcatcgcccgcctctcccagcccggcgctcctggcctctccggaaatctcgtcgactctgagggttttcc

SEQ ID NO: 108691 - DNA, 264 bp, Glycine max
atcatttctcgcagaattcgagttccagtttcaggtttagtttgttgatggctaaatttggtaagttgcggagaaggttcgaggtcataggccaagcgtacatcttgtgtcttgtgaaagaaaaaatctgaaagatggtaatgtaatgaagagttcttctaaagcattggagaagaaagattgggaagattcaacctgctcagtctgtatggaggtcgcccacaatggtatgcttgtcctttgttcatcttatgataaggggtg

SEQ ID NO: 108692 - DNA, 276 bp, Glycine max
gattgatgttgtcatggattctgattgggaaagtaagagcttgtttgctgatgtgtcttatgattttgtgttcacctctggtgatattgatgctgagtttattgatcgcattctgaaaattgatggcattgtggctctcccgttggggtctaaaccgtctaattctgctttcaaagaacaaaataattatagagttgtttcccttaagcgatatggaactgctgttgttgttgcattgaagaaaactgggccagccgttaggttggtagattctga

SEQ ID NO: 108693 - DNA, 254 bp, Glycine max
tggatatattggaaatgtgtgttggatgaaatgagcatatcattttccaaaccacctgcatgacacttacgtgatagcccctcaggggaaagcccattatcacacccgagtggtcaatggcttcctggagcatctattaatccagcacagaattgcttaaatgtaaatggcaaaagaagtttgaatgatacagtaatattacggcgtgatgaacaacttgatgatctcctcctacaaaggatgacactcgagga

SEQ ID NO: 108694 - DNA, 251 bp, Glycine max
tgaatattctggaaaagttctgtgtttttcgctaagtgctgtgaatggtggggttgtttgttttagttagaatttgtttgattttaaaggttagaacttgcaatcttgaatgaggtttttcactaggatttgttggggttattagagaagagatattttgttggcagatctgtcagaatttgtagggtgaccgttgaggtgctttatcaggatcattttttggaaggaaatggttggaagcaatgggaatg

SEQ ID NO: 108695 - DNA, 116 bp, Glycine max
ctcgagccgtactgttttacaaaaacagtagtaggctatctttatttgtgtaaattacacttccaatttgaatagacatctaaaatagtaagtgtaagttacaaaaataaagatag

SEQ ID NO: 108696 - DNA, 110 bp, Glycine max
gagtttctgttgtactagattgttgaggcaagtgtttggtcattgattttggtataagggtagtgaattttaggttcaatagaaaaagataattctgatgaaaattgacc

SEQ ID NO: 108697 - DNA, 109 bp, Glycine max
cacacagtgagtcctgaagccaaattgattagtaaggataacttgcaaagatgttctgatgtatttatggatgacaatggtgatatagaagaagatgaaagtggatggg

SEQ ID NO: 108698 - DNA, 132 bp, Glycine max
attgttataaccctagctcggaagaactaccatctctcgtccattgtctgcgtctcactcatcctcaactcttcctctcttttcttccaaacccgaatctggattctcctctctcccgatttcaattctcac

SEQ ID NO: 108699 - DNA, 110 bp, Glycine max
atattacagagagaaactctttagagatagaaagtcagtgacaagcaccagaagacgtgcctagcacccaaaaacgacaccagattctggataaaaatctaatcttcatc

SEQ ID NO: 108700 - DNA, 100 bp, Glycine max
gcagctccaacttctggaatcatgtgaatgttgaagatctcagtgacaacactttctccatggctgctactactccttcatctacatacccattcggaac

SEQ ID NO: 108701 - DNA, 152 bp, Glycine max
atttgaacaacacactaccctctaattggcagagttgagttgcatcacatattaatgatgtggctttatcttattttcgcccagaaaataagataaagccacatcattaatatgtgatgcaactcaactcttccaatttgaacaacacacta

SEQ ID NO: 108702 - DNA, 149 bp, Glycine max
agagcttcatataaaggaagaacacatcataaattctgatactgaaattcaagcagatgagaacaatcatgatatttcagttggagaagtagatcaaacgcaatcagaacatgcaagccttgttactctaaatgatgctgatgatgagt

SEQ ID NO: 108703 - DNA, 258 bp, Glycine max
cccatattctctctcttacccggtcatccagtgacctttctccccaatatatattcctcttcccctccatctccccaagtcttttttccttcgtaacatcttttttctctttttcttcccatagcattctgactcatacccaaattatttattgtttgtctacgaaagcagtgaaaaaaaatgacagtggagcttatggggttccccaaaatggaggaacagaaggcaattcaagaagctgcctccgatagcctcaag

SEQ ID NO: 108704 - DNA, 261 bp, Glycine max
caagttcaacataactcatgcttccgtgcaccctcagcatcaaggagagactataatctaacaactagaaatatgatggttcatcccttttgatctgtggcaggaattaaggtcatatcatttagcagtgtgtaaaattgaagcctctagtgagactatcactgatgagcattcaaggatcataaaagtagcctaatggcatctcttttcctcacaattgaaacacatttttccctctaagagggatctgctacttagaga

SEQ ID NO: 108705 - DNA, 255 bp, Glycine max
cagaaaagaaggcttttttttgccaacaccagttgcaaaactaatatcctttcaaacggatttgatctacaatggcctggtttctctcttttcctctatccactctcttttttccgtggctacagagtcctaccaccgtgctgaggagaccaaagacagtgttgaatcagcagtgcaacgtgctccttctcaaagcactcatggcagcgcactcttgctgaagaaactgggactttgcttcctgagtgttgcgta

SEQ ID NO: 108706 - DNA, 203 bp, Glycine max
ggacctgacactgacactgtgctaacgtgcgcatcctctctctgtctgtcatcttcagtcccttgcagctaatgtttctttctttcttcattgaacacacatatcctaatccgacgtcgtttctcaaacacagctgtgctgtgcagggttaccttttccctttccccttttgctctcattattggcaaccactcttccaggct

SEQ ID NO: 108707 - DNA, 175 bp, Glycine max
aaatccttcacttgttgctcgtcttagtttctgtgttgtgtcatttttattgctatatcctaattaaacttcaccctcaaaatgagtgatcccacactagcacaaccacacctagttgaagtccacacaacaacactcgaaaccgttgttaccacacacaaccataaccatagac

SEQ ID NO: 108708 - DNA, 272 bp, Glycine max
ggacacatggagtgaacttaacgatcaggatggagtgaactcagggagtgaactacaggatcacgatgaggtgacctcagggagtgaacttcaggatcaggatgaggacaaccttggctcaggggacaagctacaggataagaatgaggataacatgagtgtcagaatgtgatcctcaggagcagaatgaggataatgtgacctcagggagcgaacttcaggatcagggtgaggactatgtcgactcgggcgatgagcttcaggatcaggtg

SEQ ID NO: 108709 - DNA, 338 bp, Glycine max
tttacgttttcgctgatcatgctttctttttttttttctaatttcattttttattagccttttttttccttctaaatgagaaccctgtccaccttactgagtacaccaaacccatattccgttaccacgataacctgaccctcctctttcatattctgcatgtagctccacatataaaagtgcttgttcataagcagaatgaacaaattaccttccaaccccttagccataagaacaaaccccaactcacttaagaaaccatcgactatttttttttcccatgtaactgcttttaaatgaaaaagccactttgacgcataacatcacattttaccact

SEQ ID NO: 108710 - DNA, 304 bp, Glycine max
gtccgagttaaataaataaatacagaagagaaaagaaatgaagttgtcaggtgacagaggcagctttatcttctttttctgacctcgcttccatcccctttcatagtaatgattccgtagcttactcttttctctgtctctctttctctttctcttttctctctcaaaacaaaacaaaacttgaatacatacatacatacatgccccttactttgcttcttcatctctctctctctctttctcaatattcaccagcccagcgcaggacacaaatcaatcaatcaatgaaatcgtgtttaatgcc

SEQ ID NO: 108711 - DNA, 379 bp, Glycine max
ttttctctttccatttccttcttggctagattacccacatctacgacgagtctttggtatgaatggatcctcatatctcaaaatgattcaccgttgtcatttcattctaactaatctctgcagaaccctctaatctctgatttcgaacgtgcaaagatttttgacttgaccggatgctggtgcggttgaaatctgtgtgagaaataggggttagacgcagccttcactatcctttggactccttctacgccatttggacccttgcttggacctatgtcacgggggatcctgctgtcatcgtctcaaacatctttaaaaacgtgatcggcgttgccgtcttagttaacattacgagcttctctttcttctgttttttttt

SEQ ID NO: 108712 - DNA, 430 bp, Glycine max
ttggtacatgaaaatttcttaatgtactccaagaagttaaatctgaacttatatgtgcaaagaaggtaccaggaccagggaaaagcgggtagtttgtactgcatcgtatgtggcagaaggtctgttttcttttatgctgttttattaaatggagcacttctgttcacatattgaataaggagtcctctagtatttaactcacaggtggagtcaagtacatgtgctattattccagggatcatgttttaggttcccaaactttggaagtaaaacatgttggttgtataattgttgtactttattaaggcagatatgtggacggtttgaatagcaccaatcccatgacaataggaccaaacatatggtaaactgctttgtgggtgaacatgagtctcaaagctctgaactggtgtctttgcttttgaatgat

SEQ ID NO: 108713 - DNA, 458 bp, Glycine max
ttcagctctcaccacctcaaccaccagctccaccagctaacaacacttcaccaccaccacagcgaaattcgccaccccctccagctgccacgccgccccggacctccccaccgcaaacttcaccatcccctccggctgcaccgcctcctagaaactccactaggttgccgccaccggttaattcaccaccaccgccggtggatgcacctccaccgaggtcatcgtcgccaccagcaccagcaccatccacccctccttctaggactagtcctcctcccacaccaagttctcaaccagctccaccttcaaattctacaccaaggtcatcacctccatcgccaccttcaattactaatttggccccatccccgccatcacgaattttgtcatcgccaccaccgccaccggctcagaatgggacagaaaactcaagccctgatggaggtggagatggaatt

SEQ ID NO: 108714 - DNA, 461 bp, Glycine max
tgttgcacttgcacgcccttctccgcctccttcctcacctctcttcctcttcaccaccgccttcaaccgtcgccgccacatttcgccgccgctgtacccctttgttccaaacaacaaaccccttctcacacctttcgccttttagccctccctctattatcccatggcaacaacaacaacaacaacaacaacaacaacggtggtagttggggcaacccctttgactcctccgattccaattcaaattcccaccacacccttttcctctccctgctatgctcctccgccctctgcttcttctgccacctcctccacgccaaactcgcaaaggccaaaactttgtctccctccaccaccgccgacacctcacttttctccgaacctgtttatgaagtcaaaggtggcaagtggaccaaactcgtccccgacctcaccaacgatgtctttgtctccgcacaaca

SEQ ID NO: 108715 - DNA, 483 bp, Glycine max
atataaagttagaaaaaccagttttaagtttagtttttgtataaagttcaaaacaagatcggattttataactaattaagcacataactagtttaaaatcagtttggcttgtaaccgagtctctagatcaattcacatatttgtattaagaatcaaattgttttaaaacatttcagttctattaagttctaaattttgcataccattaatacttactagctcattttattattaataataatgactaacttatcattgttatcaaaaccacaaactcatcctcatttcaagtactctggtggtgctagaaatagtctcattgacaattcaattcgtaaaagctttagattaaatgatcttaaccactaagataacaattagtaacgtaaagaaatgacattgaacatattatatataaataaatagtacaggattatagttaaaagagttcatcattagaattttagatggagctctcaattt

SEQ ID NO: 108716 - DNA, 266 bp, Glycine max
ttttccgtttggtgggactttttatttatttattttctaattgtgttctgctgacctccgttaattttttttataatttatttgtctcttattgttaattatgcttaatttaaattatcaggtggtgactacagcggttctgaaagtggcactgcattgccagggttgcctagacaggattggcaaaactgtgttgaaaaccagaggagtgcaagaaatggccattgacaaggagaaggaaatggtgactgtgaaggggacaatgg

SEQ ID NO: 108717 - DNA, 242 bp, Glycine max
tttacgcgtgggcggacgcgtgggtctcgctcgcttttctttattccaccattccttcgagaggatcttttattttatttactatcatccattcccaacacacaattcccttatgggaacctcaaaaaacattcatattttcgcttcttgcttgggtcccattagattatattccattgggtgttcattaattgaaagaccttgctggttcttactcgttttatggatattctaacccttgt

SEQ ID NO: 108718 - DNA, 287 bp, Glycine max
ggttcgagcttttccttttattggaatcactaccatatgatggtgataaggaataattttaataatgaacgcgtatcataaaaaccggtgggattgttaatgttaggtgctggctcccgtaatggggcatggcgcattgggccattactgtaatttgtcaccctcctttcctatttcatagcaataataataataataatactgacctctctatgttattattctcccaatcttttgttatttttaatcgaatgatttgttttaatttcattttcgtaagattcctt

SEQ ID NO: 108719 - DNA, 324 bp, Glycine max
tttccgtttaccaaaagataaagcggcgaggaatgatgattgattagaacgagatgattccttgaaattggcgacagcgaattggaccaaaccctaagcatctggtggtctgtgtcatcatacattcattttcatgccatggaagttactcctctctgttccccttctccaatgcatggtgtccatatgcgtcacaaagaagcgagattcttggcggtggcttctaccctctactttgatggaatgccattcatattgcaggagcgtactcatagaggaacaaccacttataaacacccaattttgaggactgcacacaatgct

SEQ ID NO: 108720 - DNA, 468 bp, Glycine max
aactttaattactctctttctctctcatctaatcatccatgttcctcttttctcagtcttcttcttcttcttcttcttcttcttcttcatagtctctcccttcttgtaatcactgatcatggtggcggctacgtttgatggattctccataagagtttccagcctcgaggctgattcggtttggttggagatggaaaattccaaatcgacgcagtgtgttcgagttgctgtcaaagtttggcctctgattacgtcggagcttatgcttggatgcaccgattgcatctccatggttcccggtgaacctcaggttcatgcattagcattgaaaccctgttatttggtgtgacctctcaatctaatggtgggtctccactctccactatccacactcaaaaggcaattgggggagttttcgtcctcagtatttttttagcggctcttttagtcttatatggattagtgact

SEQ ID NO: 108721 - DNA, 439 bp, Glycine max
gttacataggaaaacgaggggcttgtttggtttttctcccttccactgcatcattttcagtttttcactacttgtgatgctctcataccttgttctacctcattagttttgtgtgtgtgaaacccttggtagatacatggcagaaattaggctcacaagggttgagcaaggccaaaccaagattaagaatgttccaatagctgtcaccccagaagggttttggtgctgcccttcccctgtggtgtttcagaaaagcctcaaaactcagaatactctcaataaacacaaaccctcttcaccacccccaccaaaaaccagtgttcagaaaaagcctgtgcctgtgtctgtgtctgtgccagtgtgtgagagaagaactactacacctgccccttcaggattggtgctttctgatgaaaaacaatgtgcaactgctccagaa

SEQ ID NO: 108722 - DNA, 445 bp, Glycine max
ttcacgcgtgcgcgaagatcttcaaacaatcggaggtctcttggaagctgccagaagaactcattcagcaacaggttgcctaagaagtgcatgcaaaaatgcattggctaaggggaagaaaaggtcttgtgcttctgtctctaataacatcacagacttgctgttgaacttgaaggaagtaaatattgatactgaaattgccattgagaaaatgggattcataagttgggggaagatttgtagaaagccaagggggaagagagttgctaccagtaaaccccacttaatttttagcaaagtacataactaattctaaagttaaagttcatggacttttggataaggtttttttatgaactataggatcgtcttgtatatgtcgacatagacaattcatagtatatgagagtatgttagaggaatagaaaaggaacccttacttatg

SEQ ID NO: 108723 - DNA, 275 bp, Glycine max
acagccatgaaaggtatattgagtaagggtgattgaagcttattcatgggtgatgcatatgggagtctgctccttagagaaagaagtggcaaggagttagcatggaggaattgcactgctgtgaggaaaggaagaaatgttattggaggtcaaccttgggatggattaccaggccaagaaaggaaggttacaactgaagatactctcttctttgtgagcaaaactggaagactaatgaagttaatggtttctttgaagaagttgaaatggaaaga

SEQ ID NO: 108724 - DNA, 332 bp, Glycine max
ttctttccaaaaccagaaaatggaccttcagtgctcaccttattcacttgaggggcaacttcccaaatccaaatctcacagagaaaccctaattcaaaccctaaccctcccaaaatgtcctcgccgctaacctaccccgcggtgctcgacgacaaggacctcgacgacgccgcattgtgggccatgatcgactccgccacagcctcacactcctcctccaagtgcaagtccctcgcctccgccaaattccccatccgccagctcccttccccgatctcaaacccctccccgccgcccaagttccggaaagtcctccgggattctggcgacag

SEQ ID NO: 108725 - DNA, 377 bp, Glycine max
cacttcaatgactctatctctccgacggcaggaccattacctcctccaacggtggacctttaactttgttcctacgccaccacacagattcacaattaccttatggcccctgctgcgtcttctccaccaccaagcttcgctctctccatcagagacgaccaccgcaaagacgaggagagcaagtgcgcttaccttgtggtagctctctgcccttgtctcgtttgcttcgttcttctcttaattgcactttccatcattctcgttgtcaaattccatttcttttgccacacccctctccactccttactctacaaaaaaaactgctgattccccatctcgccactttttccgccttaccctcttccccttttcatgaa

SEQ ID NO: 108726 - DNA, 300 bp, Glycine max
  unsure (1)..(300): unsure at all n locations
aaataaaaacttgggtaaaacaggggcaatggagatagctagctagagagggatatccaaaaaataacataatatccccttttcttctctagctggttagggaagaggggtaacaacacaacgcaatacaatcagaatcagaaattcaattgtttccttatcagccgaaggaccctccctcaattacaatgggaagcacctctctcccctcttaaatactctgatgcgggttccacaatacctccctgaaaaaaccactngataataacgcattggcttatttatatatattaacatata

SEQ ID NO: 108727 - DNA, 364 bp, Glycine max
tgtggctcttggttttctcagaccaaactgggggagacgtttgtacttaatctggctcagtttcacaaaactgacaccataattcgtttactttagtaactgaaaaattaagagccaattcagtattctccctccacagatacaaccattttttttcctccaaacactgtctcagaaacagacttgttaaccattggtagttacattctgtttctacacccttttttataagccatcatcacccttccactggctttcatcaacaaattttcttcaatcaaagtaccaccactacttggtttccccaacccagtctccatctcagaatggagaatgtgagaataaggcagtggttgaaccttct

SEQ ID NO: 108728 - DNA, 143 bp, Glycine max
gtctttttttagttgataaaatttgaagtgtgttggcttaatttgattgctttttgcatttgctttatgggatgttccaatgtttccgatattgaatgatcaaattgactgattgccaacgaaaattcctaatattttgaact

SEQ ID NO: 108729 - DNA, 227 bp, Glycine max
cacttaccttgcttgcttgacaaagtacacagtgctgatgctcatcaaagttcagagttggcaacagaaggcaaaggtatgaagttttgtgtgttttgtttcatctgctactgcacctttattttttattttttatttatctgtctctagattaagtttcaatagtttttttttaaaagaaattatatatgaatactttaaaataatcttgtatcaaaatttcaatt

SEQ ID NO: 108730 - DNA, 363 bp, Glycine max
ccctctcgtccgcccacgcgtccgcttattaataatgaaatgattgatatccatttccttaccatagattagaaactgaaaaatgaggatgaggattggactcaggatacttgaagactaaccctgttcttcttaggacagtgtatgggttggaataaatgaagccgcagctcaaaattgctcttgctttagttgttagcttgctttggattcagcaatcattttgtgatgaaacttctgatacatctagcttaaacaagtggaggtgtagatgttctttccaagggaaccaaagctattctcttgctaattgttcaaaatcatgtgattgcttctcagattctgaagagagtgcatctgtat

SEQ ID NO: 108731 - DNA, 383 bp, Glycine max
cccttgcgtccggcttgaatgattcagcaggaaataaagacctgctttcacaggggtctggtagcagaatccccacaggttatatgcataccactctattgtctcaaactgatgtggaacaaatctcaccttttgagttgtcagaatcttctcctgtggaaactgatcttaatcgtgctggttctgtgaagtcaattaatgaggctactgaacatgctgaagctatatctttatcaggtgataaatctgttgccatccctggcaactcccaaattccatcgaatgagaacctagacaaatttgatggtgaagatgaactgctgtctgcaaaagaagttaaaaatgctgctgaacatcatgaagctcctgatccctacataaat

SEQ ID NO: 108732 - DNA, 152 bp, Glycine max
ccttcgcgtccggcaggcttcagccatgagaacggacacaattatctctctcattcttctctccttatttctccgaacccaatccgaggaatataacgctatcctctgatacgtttaatgatcaccatcaaggagaaagacactgcctggct

SEQ ID NO: 108733 - DNA, 463 bp, Glycine max
tataaaatatatgtcaagtgacaaactccatagctcttgtaagttgaatacaacccttccaatagttacgcaattgctatgggacaatgtggatgaattgaaaagatgctaccaccatagaggagccacattctaaccaaagcttcatcaatcctctattgaagattgtctcaattgcaatcatggttgcattgatctccacatgcaaagagaaggagatacctaaatgctgatctccacatctaatctctgaagataccacgtaccacacgcagcaactccaggttaacccttggcagccccgttaacgttaacgttgcatttgattcatccacaaaaggattttgataaacagtaaaagagcagagccaccaaaatggccgttgagggaatagccgttgatgcttcttcagccaacaatggcttcaacggcaagataacactctcagttgtcctcacatgc

SEQ ID NO: 108734 - DNA, 350 bp, Glycine max
tttatatgtttggtttgacttcttgttttctgctttcaagaaataaaaacactgaaatgcgttttcaaaaagaaatgtatttttatatttgcttaaaattacattccttgtcaccgcgtattcattttatccaaaatgaggttcctagtttcaactgaaaacactgaaaacgagattttattattttcagtttttggttcggctgagaaaatattttcactgaaaatgttttcaaaaatccaaccaaacacatttccatcaccattttctatttccagtgaaaatgaaaacagaaaacagtcaaaccaaacacccccttaattaaaaatgttgttggggatcaaaaacac

SEQ ID NO: 108735 - DNA, 521 bp, Glycine max
ccctcgcgtccgctaaaaaccttaatggaaaaagggtaaatgaccttaaccagtgaaacaaaagtttagggactaaatcaaatttcgaaaaagtttagtgactaaaaacttagttaacccatatttttattaggctcatgattctaataatttgtattcaattttgatgtataaggctataagttttttaagttatgtaatcatatgtctctgcctcaaaagatgtttgacctcttggaatttagtattgtagtcaaatttttttatgatatattaacacagaattgaaagatggtgtaaaatcattttcattgttagtagacaaacttaaaatcattgtatttctctgaaatgaattatgaatggctgatttgcatgaagtttgcaactatattgttaattttgagtaactcatggaaggggaccactatatgtagcttgatagctgattctttcaagcagtcaggcagttatgtagctcttgcagttggaggtttaaccatcaccagtcttaagtactc

SEQ ID NO: 108736 - DNA, 478 bp, Glycine max
ccttcgcgtccgaaaaaattgaaagaagaaaatgaagtgcacattcaggaagaggccatatcaaaggagacaattaaaaatctcaaagaagaaaatgataaactacttcagaaagtggtaatatatactgcaaattttatcaattatcagagggatatttgttttaatgcttaaattgcaactatatatttactttctcaactggcattctagaaaaatgattaaaaattagctaccatatgttttgcctttcttttacaggtttccttggaagaggtcatcaataatttacaaactgataatgaattgcagacacaaaaacatactagtctggaaatgagaattgcacaattgcaaagtgagaataattccttacttcaaaaagaggcgagtgattatgttttccctttaaaaagattaggaatcattgattttgagaatattatacatccagatatttaatagtatatcatatgta

SEQ ID NO: 108737 - DNA, 549 bp, Glycine max
cgttacgggtggactgggccaggtgtaactttgggtattgtatacatcacattggagtcaaattttaataaagactttaaaaatattgacttaaaaaaacaagtcatcaatatgggtaagtttctaaccactttctccatcaaataatttatttattatgtgttcaacatatttattactcattggtttgtcttttgccataggatatgagatgaggaaaccatgatttgaggcaaagttgctcacaatgcgatcaaagtttccacgagaagaaaattggttagaccaaatttccaagagaaaatggactcaggcctatgatgaaggaaaacggtatggacatatgactactaaccttgccgaatatatgaattttgttttgaaaggagcctgagcattgcctattattgtcatagtcaaggaaacatttaataaaataaatgactcatttgttactaatggcatgaaaatcatgaatatgataaaggcgggacataggtactctgaagaggtatatgtcatgatgcaagaaaattgacacgttactac

SEQ ID NO: 108738 - DNA, 215 bp, Glycine max
ttggagaagaaggttaaattcggaaaattcaacttttccattccaatcccattggtggaaatgggttccttggtccttaatcttttcccttttttggttcattatttccaatattaatctttcggttccatttttctttttttccattctaaaattcgttttccttttttccgctttcgcagacccgattcattctgttgcagaacaggcagggc

SEQ ID NO: 108739 - DNA, 526 bp, Glycine max
gacagagaactggtgacccacattgggcattggggtggcctctttctttgcttcttcttcccaattgattgaagcaaatccatctatcggagtctgcatgattgctttagcattttttaaaaaaattcttctgcaatctgcttaagaattcaagtgaatatctgaggagatttctttttgtagttttaagtatataatccttttatcaatctctacaatactttggttagagagtttttctctctttttttcttttgttttctagtaaaaccaaaaaaatccacatgtttgtgtttgttaaggaattaggaaaacacacaaacatgataacacaagccaacaaaacaacaattaaaacacacccagagagagaggtacagagtgaaaacaccctttaaggctttgctttaactactgagctactacagaagtggccctcctttttttttttcatttctagttttgtaccttcctttctttcttgtttcttctccctaaccattttttctctcgtctctcaagcata

SEQ ID NO: 108740 - DNA, 208 bp, Glycine max
  unsure (1)..(208): unsure at all n locations
ngttgagtcttaaatgtgctgattcaagctttggggataaaaatagttctcttgggggggatgttggaacaagctgtatggtttttgctccgccacaaaattttactggcggcagttctaccactgataaacctttagatgatgattttctgaaacctatagcaggtgtatgtgccaagagtgatattgctgaagcagatgcttctac

SEQ ID NO: 108741 - DNA, 295 bp, Glycine max
  unsure (1)..(295): unsure at all n locations
gcttcgtcntttgactttctctctccttttctgagaaattgggtattgaaatctattctgggttctagacaaaataaaacctttattttgtctttgttgggtttcgcgtgaaatggttagctgggttgtttgtttctctctctgaaacaaaaatctcatgtttttcttacaaattgggttgttggggtggtgtggtgtttaagattccagattccttgacttgatagaattttgttggtgaaggagttgaagctgaacttgttatagattgatgtgaggggctaagctaaagccc

SEQ ID NO: 108742 - DNA, 244 bp, Glycine max
gagataatgtcttggtgatttggggagcaaacgtttggcgattttttgaggcaccgtggtggttttgggggccgtggtggacgtacccgaggtggttattatggaagaggagggtatggctataatggacgagggaggggacgtggcatgcccagtcgcaatttgtaggtggcagttaatgtttagttatggacatggtggagaacaaaagcctaagtaggctcctctaaaagcattgtaatta

SEQ ID NO: 108743 - DNA, 293 bp, Glycine max
tctctcgggttgctcaccttatccggctggggaagatagcggctctctctctctatctctctctccttttttcttctgcttctgccagcatcttgcgtctctatatctctgacacaaactccattgatttgcaacttgtaagcaaccgaaaatgataaaaacaatagcggcgtttcttgagcattgcgaggatatctatatacctcctgttctattgtctctaaattccaacatgcctacactctattctcttcgcaccataggaacgactgatgggttccacagagaatgaa

SEQ ID NO: 108744 - DNA, 498 bp, Glycine max
tctggtttacactgtatgcagcgatatatattgcttccattctaaacaatgtgattattgagataattacaacttgtttattaattttacaaaatagagcagtggaacaacaacaaaggggaatagctaatggcatttctatgactgctatgtcagcattcaaagttattggtccagctgcaggtggtgcaatattaacatcttcccaaaagcggttaaatgctacattcctcccaggaacacatttgatcttcttttctctcaatgttgttgaaggacttggagtgttgttgacattcaaaccattcctaacaataaagaaactgcccttagagctattaaaatgatattaataaaattagcataaagggtgaagcatctcaagttcaattttatgcataaaggttgagattagagtaattacggatgactgttgttaatggatgttaagaaattaagtgaaagatttaatagcaaatttgtcagacaatctacaga

SEQ ID NO: 108745 - DNA, 187 bp, Glycine max
cccatgcgtccgcgggtgttctgcgactttgcgaatccgatttggtctcaatgccgacattcctttttggattcgactctttttttattctacttgtttttgatggaccgcaaagcctatgaccatcggcctgctcctccggcacatgctcacacccctgaatacttagccctccaggggaacacaa

SEQ ID NO: 108746 - DNA, 206 bp, Glycine max
ctgtttcgtgggggacacgccagagaggaatcagatcaccgctactctctctatgttcgaggattcaccggttttcaactatatcaatagtttatctcctataaagcccgttaaggctgttcccatcagtcagactttcaattcactgagcttttcatcccctccatcggttttcacatcaccccatgtcagctgtctcaaggaat

SEQ ID NO: 108747 - DNA, 355 bp, Glycine max
ggcggatgtttatgaggaggaggaggatggggatgaggagcttgtgattgtggctggcggcgatccgaatcagggcgcggaggagccggagtggggcgagaatgccaccctggccgctggagacggcgagaggaaggatgccgccggggagttggccaaggccggcggtgcggctgtgcccccgaagattgggtatagcaatcaaggatatcacccctttcattcgccttttaagtatcagtatgttaggcctggtgcagcactaatgcctggagctgctgcttctgctccaggagggcctcctggtcagattcgtcctcttgctaacatggctggtcgaggcagaggggactgg

SEQ ID NO: 108748 - DNA, 427 bp, Glycine max
tttttccgagcccgagactctttccctctttgatggccattgcctctccatcaaaataataaaaacacccctagccggaaaactattctccagcgaccggcagttcttcctctcctccctccacctctggtgaccggttttcctcctttgatttcggcagaatcatttacagcacggaaaaggatctcctttctagataatttggtgggtatttccgatgaatctgtctagcttgatgaaattttcaatcaatgtggtctgcgttaggtagggtgaatggatgtatgtgaatcagggaagaacaaagctccagagaccccaagagtaagaccaccctcggttctggcagaaaagaatgcagtcaccatcaccaccacaagacgctcaagaacaagggaaattagttctagatataagtcacctactc

SEQ ID NO: 108749 - DNA, 131 bp, Glycine max
cggatgtttgggcgcagagcgcggcaccaaatgaagggatttttatgagagcgaaggaggttaacaaagcctaaccaaaccccaccgtccccgaaacgggtcgttttgcccttcttcggaaccctgccttc

SEQ ID NO: 108750 - DNA, 512 bp, Glycine max
  unsure (1)..(512): unsure at all n locations
atttttactcacacccacaaaagatcgtgaaaacgcaacaaaaattacactgtagaaaaaataataacaaatacaagaatgtaacgtggttcggcacctcttacttacgtccacagaaccgtctaaaaaagtatttcactatcacaaaaatgattataaaattgtaacccacctcaaatagtgtatcactctacaaactcaagtaccccactcaatggttacaaaaaatgataacactctcacacagacatttttctctcaacaaaatgactttgtttcacaatctctcttctcacacactctcttcatgtgttgtttctccactaattctcgtctctatttatagtgaagattgctaccaactataataaataagtttttttggaagttgaaacaaaaataacttccaatgcatccattcaaataatcttcatctagtaaaatgcaatcttctactttacatttaaaccacttaaactntagtgataaaaattcaattcccaatatgcatg

SEQ ID NO: 108751 - DNA, 150 bp, Glycine max
cacttcgatcgcgattcacctccctgagggctttctaagctcagcctctggctttatcgaaccgcgagaggaattttgccattatttgggggtgactgaagcgggctatgattagaatggagagaggatgccagagttgagaagtggagc

SEQ ID NO: 108752 - DNA, 437 bp, Glycine max
  unsure (1)..(437): unsure at all n locations
tctagttctactccaattgcgccagtagttttcttgggcaaaggaggggaaggcattacttcacaaagtagaaacaaatccaaataagcaaagtgttttttgagggttagaaggcttactttattttcataatcgtctttttgttccttagattttcgagctttgtgcttccttccttaaggagttccattccactctcacgacagggcatttgagcctttaacccactctggctaggttgactgcctctttttactagcttggcatatactctgacactaagctntttgtctgcaattgcgtgattttccaacaaaataagtaccttccaaagcaaaaggtaaggttaattcatcctcttaacatacccttacaagtgtggaaataattgtctatgaattttgtgacaccatttatacattgccaaaccacacaaa

SEQ ID NO: 108753 - DNA, 275 bp, Glycine max
cctttcatcattcctcataatcgcacgctttctcttattctttctctctttttacacgctaatcttcgttttccacaccttcttctgccttggtttactttccagttccacccaaagcagccaaccaaccaacaaacaacacaagtcgctaactaatttcgatcctttttttttcttcttattcttgtttttaccacttatgtctatgtaactacttttattgatatgtgtgtttttgttgttgtgtcttggaattttcagtgtatccaaaggtg

SEQ ID NO: 108754 - DNA, 357 bp, Glycine max
ctgacgcgtgggcggacgcgtgggcttagataacatctcttccagggcaaggaggcaccaaggcttgattgtgttcatcttcccagaaaaactcaaccaaggggtacctgcccctttctttttcagcctaacttattggaaagggaagataacaatcacgccttgatcataacaacataagaaattaagcaagtggtgtttgttggttgtgttgttcattttgtctggacaaagataaaatgaacaacgcaaccatggcaccgtataatatgtcagatagatctctaatttgctacacgccactcatgacaacaacaaatggtttatggcaaggcgataaccctttagattactccc

SEQ ID NO: 108755 - DNA, 417 bp, Glycine max
cccatgcttccgcccacgcgtccgcccacgcgtccgctcttgcaggtttttgtatgctaatatttctctgtagtctgtaaaaatctgtgatgttgatatttttctcttgggagtgaaacttgaaagtgaggttcaacctagcattttcatctttctcaaagtatttaaatttgtgtctattctgtctgtctatgcatgttctgtgtgaagatgcaatggatgatttttttctggcggcttctacatttgtatgtaacaagatgattttattcaatcaataaaagctttacaggactgtatagtgctgtatgcaaatgccaactattcatttttaaagagttgatgttttattttgaagatcaatttagttagatattcaattctaatttgtgcttcaattttaaatgtagactctaa

SEQ ID NO: 108756 - DNA, 340 bp, Glycine max
cccactcgtccgcccacgcgtccgttaaatttgggtatctaaaatgaagctcaaactcaatgaaagctcggtctgttcaagcttttggtgggtttttgcggtctatgtctagattgagtcttgatcagatcagactaaaaaagtctacttttaatttggactcacaatttaaagctcaaatccttcatttctttaggcagatttgggccaagtcaggcgatccattttgctacctctagatgagaatgaaattgattcattagcacataggggtgaattggtattttcctcgtttgagatggggttgatgttaggcccctgtgtaatttcatcattttct

SEQ ID NO: 108757 - DNA, 403 bp, Glycine max
ccctcttttccgcggacgcgtgggacagaatcctaacctgaagcctcaggagagccatgtaacaggaggccgatcgtccaatgggtctcgtcaaaatattggggatagggaatcagccgcaacttcgaaatgccttgatattacgtcttctgaagcagcatatagtggtggtagtttccaattcaccgagaatgtcaacatgtcccaccagtccgactcgcagaaggatgcccagacaaatatgagtagtgaggcagattttggttgtcaaccctgcctcattaccaatggagggaagagtggtgaggagttctcgtgtgaaagcgaaacattcccaagctttgaccttggattttaacagtgggaagaaacccactgacgtatcacgtaacaattaacaacc

SEQ ID NO: 108758 - DNA, 345 bp, Glycine max
cggtcttttgggcggacgcgtgggtctgcacacaacttttgtgtcagacaaccctctgcagcaaagaaaactagcgtacttaaattctcagtcttctttacattgtctatgacagagtcgcacgtgactccgcagtgaaacctccactccatgggttgctcattgccctttgaagcttgaacttccataaagagcgagactttggctgcttctggaaatgagttctggtgttcagcttctgggtatttgcttggggctgcacttgacatgctccaccttcatttccggcaacataatgagtgttagaggagatgcaactttgcaagggactgttgccattgatga

SEQ ID NO: 108759 - DNA, 182 bp, Glycine max
aaacccattcataccttcagatacatctttttagggttttcaatctgatcccctcttttaaagtagcacacgccctcgatctgaatttcatttctttctgggagcggatatcattgggtcttaccgcagaatcggctcggcgtatgcctactagtgattagtaccaccactgtttccagcaa

SEQ ID NO: 108760 - DNA, 288 bp, Glycine max
actacgcgtccgctctgatgagtttaataaccacgcatttgaaaacagtttcttgaacaatcctcatctgtgtgcttacaatccaaacgtcaaccttcctaactgtttgaccaaaaccatgccacactctagcaattcattttcaaaatcacttgccctgattttggctgtcatcatcgttgtgttgttgaccatagcctccttggtcttctatatgttgaaaacgcaatggggtaaacggcactgcaagcataataagattgaaacgtggagggtcacctttattcc

SEQ ID NO: 108761 - DNA, 328 bp, Glycine max
gttgaccagttttgcataaaatctcctaatcatcattgttgcatgtgtatcatggaaataatgtaggacatcccctttatccccgaaccgctggccaaaccctgacatatatcatgaccaatcgttctacaagccttgagccaaaatcccagcttaccataaaccttgacccagggtgagaatgtcaatccttgccctcggaagaaaacacatatagaaggaaaattcccaatccaagaacgggagaagacacacaaggaaaagaaaattcccaatccaagaaagggagaagacacacaacacaaagaaaattcccaatgaaagagtg

SEQ ID NO: 108762 - DNA, 263 bp, Glycine max
gtgaaaagatacaagaatcaattactcttttgtcgtatacaaattgtgtcaggataaagaggcagagaatttctatttcattacgtaatctgtttaattttggttgcttgaaataaggcagatcttgaatttcaaaatgcctaaagttagaagattgaagtccccgtatactgattgtaatagaccatatccttacccatccaactccaaaaacattgagctgcataaacctatgaatttgttggcatcagctgatgaaatga

SEQ ID NO: 108763 - DNA, 270 bp, Glycine max
atcacgcgtccggttcgtcagggaaacatacgcccatttatagaagaagctgttctgcaggtatcaaattggggttttgaccttaaggaacttcatgtgcaaaagaagtgtcaaacaagaggcatacttctttggttgaaatccatgtacagtcaggcggactgtgaattagcaggatttcttggccttacacatatatggcagggactggatgatagggtggtcccaccatcagtgatggaatatatagaacgggttttgccagaggct

SEQ ID NO: 108764 - DNA, 317 bp, Glycine max
atgagtgaagtttctttgctgtcctggtacctccccttcaagttcttctctcttttttatctccttatcagctttttcaagttattttggtttctcatcaattaagaaactcacctaaaatataaaagaaacaagattgtgttgcttttctatcttttctttcccttgttgtggatctcgtgtaccttacacactgctgcacagtgctttttatgaaggcttttaagtgcttatcggttcctctttgctaactttcttctctggtgaagtgaagccatatctgtgcgaattgacattctgatgctgctgttgagaca

SEQ ID NO: 108765 - DNA, 303 bp, Glycine max
tccatgcgtccgcccacgcgtccgcccacgcgtgcgggcactaacatggattctccaaacgacaacagttgcactctcaagaaggagaagaattgcagtaacgtggattctcccaacgacaacagttttaactgccaagagggagaagaattgcagtcacatggattgtgcaaacgacaacagctgcactcccaagaaggagaagaattgcagtaacatggattcttcaaatgacagcagttgccctcccaagaaggagaagaattgcagtaacatggattctccaactgatgttgtggttga

SEQ ID NO: 108766 - DNA, 261 bp, Glycine max
ctttagtgtacaccttacgagacttaagaaaaacacaggacttgattgcactactctctgccccttacacatctgcatgcatatttgatccatgaaggtgacgtatttaacatataataaaaagccttaatgaacatgtacatcatgagcttatgaaaccaccttcaccgaccaagatcattagtgcaaaaacatggatatgctgtgaatgagagagatgatgttactgtggtcgcattagaaagcaagagaatatccctt

SEQ ID NO: 108767 - DNA, 240 bp, Glycine max
tcgttacttgtgctagtcattgtgtgtttcatttggaggtgcaagaagaaaaaacgaaagcaaaagtattattatccagatccttctcaaggaaaagcgagtaactattacaacagtgggcaacaccctctccctagttggcaagcaggttcaggtcctcatgggggtgaccatgttatgagggtacaacaacaacaaggaatgggaatgggaatgggaatggggatgggtatgggaatg

SEQ ID NO: 108768 - DNA, 275 bp, Glycine max
aatacttcgacatgctcacgtgatcacagcttttcatctgagtggtcagaaactaaattgccctttattgcttcctacgcttttctaatttgatatgtatatatcttgaaccatatttattttatattctagctatgactgattgccaatttggaatcgcttgctttcaaagttctttaatttctattttatggttcgtttttttttttttgtaataactgcaagttttgtgggtgtgatttgtgaagggagatgagaagaactggccgagctgt

SEQ ID NO: 108769 - DNA, 222 bp, Glycine max
atagctgaaaacttcctttcccagtgtctgttacaattcaacattcacgcttcaaagttcaaacctcacttcagattttgtctactggctgggagattaaatggtattggattttaatgttgaggttgctggctgaatttcagaaggaaagtgttcaaaggatccaatccatacatgagacgcaatggcaacaaacacactcatgttagcttcaatttgtta

SEQ ID NO: 108770 - DNA, 416 bp, Glycine max
ctaatagcaaaaaaaggagcaacttttttttcagctccaactgcaaattcttttgttgcctcagtgtgtattggcaactcaacaatcttcatttttctcactcttgttagtttctggtacccattttgaacagtgatgaagcatcatcataggtcaccacaccaccaacagctcttctgggcaagggtggtcatgcgcaagtggcttaacatggggagctatgagtctgattacagtgctgaccctgttgatgatgatgatgattctgaaagtggttcatacaatgaagagtggggaagacggtcgcggtttgcaaatgaagatgaagcttcatctgaatcaacagaatttcttccaaagttaaggaggcagaagtcatcaacttatagatctcagtttataaacaaaaaggagct

SEQ ID NO: 108771 - DNA, 432 bp, Glycine max
cataaattacgcgttgaaactttgatctaactgggtgttcccgccgaccctcctctctctctctctctctagaaaaaagaaaaaaagactttgaatgaaaacttgattgaggctcttttaaaaccaaaccaaacttataatctctcattatggtcttcttctgaaggaagagaagaagttaagaacaaaaacacaataaaagaaaagcagtaactctctttctctctatctctctctctttctctcattgcgaagtcgttctcttcaatggctaagtcaaagaacaatgccaacaagttgtcctacatatcagttccatctcagatcatcaactccatatcatcttcttctctgcaatctcttcttgactctcccaagaagtcctcaaggaacaccaacagcaggttctttatcttcttcaccaaccaccaa

SEQ ID NO: 108772 - DNA, 326 bp, Glycine max
ggcatgggtcctaaaagagtaaagtgatgatttgcttaggcttggcagtgacgataacaatatccttcctaaaagagttttgaaacaaaaaggccaaggaccgtaatagtagaaaaatatctgggttattgtttttttattgtgcgtgcgtgccaccaaaaccctccacttgtttgctaagtttattttcattataccccttatcctcttctgaatctatcatgtgttgtgaaattctaatgtcctaaaaaaactcttatctatgcctatgtctctgtctctgtcaaccgtgcctgcgttcaatactgtcacaatggctgaatcct

SEQ ID NO: 108773 - DNA, 420 bp, Glycine max
gtgtatttttgtttacacatttggtagaaaagatgggtaatgtttgtctgatctcaggatgatgcatttgagtttgctggcttgttgctttagaatttttatgtttagcttgagaaagattttgaatttggaaacgtaagcagttttgcttacattaatgattgtacttaataagcatagtttgctcgtgaacaagaggtgtatttggtctgatgacaagtccttgcttgggtgagtggatttcctacctattaatagccaaattgaattacatgtatctcattaattgttgtttccaatatggatagtcttctactctattgacattttttttgctggatatcaacttgacttatactttcatattccattgttggtttcgattctacttgatttcatttatcaagttaattccccacc

SEQ ID NO: 108774 - DNA, 426 bp, Glycine max
caattatttatccttaagtaaaagatctcaaggatagaattagggacagagattgaagttgtcgcactccatagtaagccaattgatccacaagttatggttgattagttacacttatttagaggcaaaccaagacgatgcaaatgtacatgtgtatacgtttgattctgaactatagatgcttaggagtgtggttgttgttgatgttatgtatggaaaatgggggcaatattgaataattgatattttttgtatgaaacagaaatagaagatgatgcgagtttaactgaatggtgttggcaggatgttgaatatgattggtgaagatggagtggcattggaattaaacttgagattgagattgagattctaaattctagtatgaaatggaaaaaaaaaaaatagttttcttggctgacatgattg

SEQ ID NO: 108775 - DNA, 335 bp, Glycine max
ttgatgcgtgggtagatggtcatagaccgtgatggggttctttgattctttctattcgcttgctcaatcatgtgaattctttaatttctctttctgggatcaaggtccctgcaaaaaaagaaaaaaaatgtaagacttttggatcaggggtcatcgggtatgttgagcttaggtgaatatacccgaattctgttgattttgtttaggttacttacttcgttgtatgtgcttagtttagcggcttatttatgatgatcccacttgtttgttagcgacagtaagggaatctctctttgttcatttaaatttgaatttcttgaaggagattgatgtgt

SEQ ID NO: 108776 - DNA, 270 bp, Glycine max
tacagataagattcatggtaaatgggcaggaacttttgggcaggtctggagtgctgggacagaaaaggaaggaaatggccccataaaatgtcgtgggataaagaaatatcgagaggcccatggagaaattgggactgcacagctggaaacacataaggtagcaatcgtggtgcaaatacggaactggttgctatcgaatcaatctgatcggttgagaaactgaccaagctatcgatttctcggaaaaacagtatcgtattcccattgatc

SEQ ID NO: 108777 - DNA, 325 bp, Glycine max
ggagtcatcttaagaattcaggcggttagtccgttgttcttttggaaaagggagaagagagacacaaaaagaattcaggcggttagtccttggcgaattctttttggcaaagggagaagagaataaaagatatatcacacttctgttttcaaggtttggaaaaccagaaaactttagaaagcttttgcaaaggaagaagaagaagaagaagaagttcaaagagattcaaaagttgtaaaagagtatgtggaaaagttgtttgtaaaggttgttaaagattgtaatgaatatttctaaatgcaagtcaaggtcttgctttatagac

SEQ ID NO: 108778 - DNA, 212 bp, Glycine max
  unsure (1)..(212): unsure at all n locations
ctctaaacaagagtcgntcgttatgcttgtttgtgcggctgtttctctcactggatcaagtgctgccttggggttctttgttggcatcgcgcttcacttgctcttgaaaccgagggaggtcgaatgccgagggctcggcttttgtggatcaaaccacaccaagtcttctcttgaggacgaacaagctagcttgattgcctagacaacaattt

SEQ ID NO: 108779 - DNA, 283 bp, Glycine max
ctattgaagcacttgtttcacaaggtttctattgattctttttttataccattttgaggtctagcaatggaagggagcattgaccctgcaacctcaagccttctgtgtctggaaaacaatgacatgtgctttgatgattttgattgtaatgttgcagatgaatctccttcattggaccacaaaaatcttaactttaacaatcagtatctgattaaggacaatcatcatggatcggaacatttgttggatttttctgtacagagcgatgaaactgttttgggtt

SEQ ID NO: 108780 - DNA, 370 bp, Glycine max
ttcatcttgtccgcggacgcgtgggtgcttatgaattatacaatacgcacaacctcacacttatgtttcaaacacgtttaacacattgcactacaaatttaacaccttaggttcctaattaggaatcctacactttccgtttaatactgcacataaacacttttctcaaggtaaacaccagtcagtttattgtataattcataaccaaatttcacgtccataattttaacatatcacaacatcgcaatccaccatcacatatttatgtgtatctcataactcaacacattcaatttatccattacacataatttcaatcacaatttcatgatctcaatataacaatttattacgctaatataataatttt

SEQ ID NO: 108781 - DNA, 290 bp, Glycine max
cccacgacgatgatgactactggtcccactacctctactttcttcttcctcctctcttctctcaatccccacccacctcgctccttcttcagacacaaaccactctttaacaacccctcccttctcctgcgccctcctttgaggtctcctcgacacttaacccgccgccgcctccgccgttgatgacaacatcgccttcgtcgagagcaagagcttcgtgtccacgcagggctgggactccgacacagtcctcgactacaaaatcaacgaggactagttccacaagatct

SEQ ID NO: 108782 - DNA, 409 bp, Glycine max
  unsure (1)..(409): unsure at all n locations
ttatatgagagctccctcagaatttcttaatgctcgtccatgttgcatattgctttttattttctttttacatatgtatgatgaatgttaagccattctcatgtgccatgatgttctgagcaattgtgtttttctcttgttgcattacttgtattctatctggtttgcttttatttttgcagagcctcttgtatacattcctctttgttttcaactgcaaaattatatctgaatcttagtgataattgaagcaaattgctcgttactttgcccaatgatgcacaaatagattgttgagcagctacatggtatctatcataacctgaagtgcacctttctctctctgtctccctgtctctctctccctctctctcaatatacctcttttcctctgngtgtgtgtgtgtgt

SEQ ID NO: 108783 - DNA, 489 bp, Glycine max
cattattgtttcagcaagaaggcgttggaacagctgaaaatgagtttgactttgatggatattccttagacaacattccagtttagaacagattctgcccgttctcttcctaattgcagtcgccaatgcagatagttggcgttccatttgaaccaaatcgcactgcaattagtttgtttggatcttagtttaaatttttcaacaaatagaatttaattgatgtaaaaaattcaggcttcagggagtagtatgttattatgatttagtctggatgcttaaaagatgaataacaacaaactttaaatgcatgtgtgcaaaaggcatatttgcaattttttggctgctttcgtttgccaaggttctagcaagcttatgttgttaaggtgtacatgaagacactggtttagggaaaaactgtagagggcaaggctttgatacacctgcagacttgtaggagcattttaactaataacacattaatgaaatatt

SEQ ID NO: 108784 - DNA, 438 bp, Glycine max
cgatttctgtatcccaaataacccaatgaatcatcatcctctgaattcaactcgctcgcacatgggaatcgattgatcaacatcgcccagatctacaactgccttcgactggacatcaactattattcattcggaatcgaagacagtgtcaggaggtttacaataactcacacacgctgctcaaccaattgagctagaccctcttgacacttccagaattgtttctgtgcaggctcggcaggcttgctaaagctattgagtttaggggtgatttcacaccatttgttttgtccaaaacgacaccttgtagctgttttaaggcacacaaatcagaaacttaggtttgcgattttctgtagaagccaccgacgtcttcaatcaagagcatccataaccagacatgaagttgaagacgacaacccagtcgcaaattgaatt

SEQ ID NO: 108785 - DNA, 85 bp, Glycine max
cggactcgtttgttaatataattaaaagtttttttttttaaataaaacttttaattatattaaaatatacataaaagttttattt

SEQ ID NO: 108786 - DNA, 169 bp, Glycine max
actttacgtgtcgattttttcctaaataagagaatgtttagtttcacctatttatgtgcgtttaccacttcggagtgcgacagaggtgtgagtgtcataggagaaaaaaaatgacagaggaacaaaccagaacggcagaggcagaatcagtaacaccaccacctgctgc

SEQ ID NO: 108787 - DNA, 378 bp, Glycine max
ccctcgcgtccggcaaggtccaatatagtgttttgtgtaggttacagtcactggcaacgttggttgttgggttcggatcccaacaacgttatagagaaaataagagtgaatgaggaacacacatcacatgacataacagaggaagaatgatgggagcgaggagaaggtgtatcttagccactctcgcttttataatgttaatgggcatcgccgtttatttcagactctgggctattcactacaacctttcttccgatgacacccaactcttaaggcaacagtttgatattgctaacagggaggcaatggatgagtctgcagagtggaggctgaggtatgatcaggaggtagataggacaaaaaaatgtttacaggagc

SEQ ID NO: 108788 - DNA, 367 bp, Glycine max
caaatactacaacaggtgcgtgcctctgcctcttctttattcttttctcaatatttgcttttttatgccttgcgaaatttggtgttgtaacttaaaaaaatgcatttttaaatcttaattttgtaagataatccttatattagattggtatcaactccctagttagtttttggcttgaattttgtaagagagagagagagggttttgttctgtgattgttattgtttttttattgtagttataggcagaagagaagagggtttttggagattttttactttttttttattggcaaatgttagtttgtttgttttgttagaaaggtcaattgagggattcgatcccgcgacttaactccctcccttat

SEQ ID NO: 108789 - DNA, 245 bp, Glycine max
aaattatcagcgagaactgtccaccctttttcgatgttctacttattacagaccccccttaattgatggtgctctgtatcccctttttcttctgcaagaactacaccaactaaaacctccttcttctttttttttttttggaggctggtgtgtgactgactttgtatgctccttctctttccaacccttaaggaaaaaaactaaagaaaaaaaagggagccatcgtcaggcttgtataatcccaa

SEQ ID NO: 108790 - DNA, 334 bp, Glycine max
ccactgacatgggtattgtatatttcatatctgatgatcaagtgttcggttttcgatacaccgtatctctgaacattttttactaactctgaactgatgtgaaccctctggttggtcatgactgatgatgtcatgtgttctccaaacgacaaggacttgtcgctgagtcctaatctagatatcacgatagatgatggttctccaaacaatgaacaactacttgaggttgaggatgagggcaatgagcttgagaatgaatgtgctcaattgactgagattgatggaagtgaacctgaaaatgggagggatgaaacaacaatagttgatagtcata

SEQ ID NO: 108791 - DNA, 166 bp, Glycine max
gaggtggttttgctgccttattaatgggaaaatcgtactatagattctgttgcataggcgtcgtctgtggcggttgtcgtacaaacgtggccgcggttggggaagaaactaaaacacggcttaattaaatgaattattccgttttttttttgtgattctctttagc

SEQ ID NO: 108792 - DNA, 273 bp, Glycine max
cccatgcttccgaaaatacctaatcagaaaaaaaattttttatttatgccgccgatggggaggaagccaaaggcaccacccaaatcttctctatccaccgagccacctcttaagcagcaacaaccaaaacccgaaaatccccctcaagaatacgaagaagtcgaagaggaagttgaggaagaagaggtagaggaagaggtcgaagaggaagaagaagaagaagaggaggacgaggaagaagaggaggaggaagaagaagaagaagaagaaaac

SEQ ID NO: 108793 - DNA, 335 bp, Glycine max
tataactaagttatttcttgtgctttgctttattcctaaaaccaaacatgtcgaacacatgcggcaactgtgactgcgctgacaagactaactgcacgtaagtgcttcatttgttttctgcatttgtgtgtaaagcaagatttacatatatatatatatatgtagttcatgttacaattagtcaattaccatatttgatctctaaaggattaatctgtataggacatatattatgcatacagtagactgaggtctgatgtatagcttgcatgatacatataaaggctgttttacttatatccttacatactatgccatgcagcaagggaaacagc

SEQ ID NO: 108794 - DNA, 355 bp, Glycine max
cccatgcttccgaaaatttgaaaaggaaggatttttcattgtatcgttgattctgtgagactctttgtatctattctctgtttaagaaaataagagaaaggaggtcctaggttggttatcatgggagagaccaaacaacttgttacccttttgacacaatttcaagaggcaatgaggatggtcaaggatatagtggaaaaaagcagatcgagtaaaacgagcaaacgattactaaggaaaaccctcaagaatatgactcctctactgcaggaaatcaatcaatacaatgaacacttggacccacccagagaagaaatcgacactcttatcaaagaaaaagacgccgtagaagaga

SEQ ID NO: 108795 - DNA, 487 bp, Glycine max
ttttatgcagtcaaaaactcattttggtactgtattcaaacgagctcttgttaatttaacttagaagccctgaacatccacaacatgattggggcatcaactaatttaattcattttctctggctctaagatttccatattgataggttatgcaagcagctgctaaacttggtatttcaatcacgattagtcaagtgggcagtgatatgctgtctactggcaccccttctgctttgccaacaattaataagaatcaagagtggcaacctgcaatgtctctcaatgaagatggattacttcatcagttacattctactcttgtgcaggccatagattcttccaaatgtatgttgcttcacaataatcaattaaatgtgattttctgacctcccaattgtattatatttgctgatagcttctgatttttacaaattcctcttggtttatatttatatacagccttgcttgtatctaatatgcagcagtc

SEQ ID NO: 108796 - DNA, 489 bp, Glycine max
gtatattaaagtctcaaatatttatcttaagttgcacccaaagaaggtattgctctccctttgcccttcccctcacagtctgcaactttatatgtttcaggcttttaggttcaagctcagtaatgcactattactgaagatgtttgatttgttaaaacttagaagttctgatttaatagaattactttgaaaagttatctttcttagaaagaacattgtctcctgctactttatatgttttctttggagtgtattaatcctcctctttcttttgcttttgcttcctttctaccgatttgttagatactattgcttttcatttcatggtcatttttatgagctttaaaccaatgattttatttttttgtttggcctttcatcagttacatttacccttttccttcatgatattgccaaaatgattatacgtttttcaactttttgcataattctctggtttttattttagttttatattgttttgatgaa

SEQ ID NO: 108797 - DNA, 336 bp, Glycine max
gctggtcgcgtgggttgacaccttccgcaaaacccgttccaacaatgtgcaaagtaaccaagcctctcaaccttctgtaatttatgtggaagataataataattgccaggaaaaaactatgaacaaacaaacacaggctgaagccaaaaggggtttggcgcagatccgcgacccatttgcaaaatatgctgctttagcttaaaaacaaagcgcgaactcttgaatcaaaggagggggtgaggctgaggctctgagacctactcagtcttttgcttgtgaaagggctgctgttttctttctttgtgcgattgagaaaaaaagctataacatgggggg

SEQ ID NO: 108798 - DNA, 301 bp, Glycine max
gacgtagtttccaataaggtgggtggggaaatacctttcatcgatgtacctgtggggcatctgagatttctgtaagcaagcttctctaaattataaaatatgctgcattaaactataagtagaataagtaatttatcttctttctcccaacaatcataaaagagatgaaactcatctaataaaaaccaatgcaccggcaagaatatcagcaagtgtggagtgaaggaggtattattttaatatttaccctcaagttgagtttgggtttagaaagaaccatgttagcagacacatacaaaaa

SEQ ID NO: 108799 - DNA, 260 bp, Glycine max
ggcaaaattttggggcggcgccttttggttttggaagcgcgacgaatcatgctcccgcgagcggcgctgccgcggatggcgcgccggctcagccgaggcagagggttcgagcgaggagaggtcaagccacggacccacacagcatcgctgagaggatacgtagggagagaatcgccgagagaacgaaggccctacaagaactggttcccaatgccaacaagaccgacatggcattcatgctagatgagatcatcgattac

SEQ ID NO: 108800 - DNA, 405 bp, Glycine max
gtgtgaaagatatgagttgtgcttgagttctattcaaattttaagagcttctacctatgtttaaaacaaaaagataagtacaaaacggcagtacacttgttgccgtaccatgcttgtagttgccatgataatatccctataacaacaaaatcccaaaaataaaaagcttcattaggaaaggattcacaaagtaaaacactgatgcaatttccaaatataaatcaacttcaaatcctttattttctatttattggtgaacaaatcaaaagaaacaaaccaaaacaatatttttcatagggatcattaactatggaatgcaaattactataaaagaacataacaaagcaaaaatgatcaaaacataaaatgtcaattcattccattgatcatttaaaaaaatagaag

SEQ ID NO: 108801 - DNA, 335 bp, Glycine max
tgttctttgtgcttcattcttagtgatgtctttttcttttattccacaatgattcagtgaaaggagatagtgctttgtgtgccttgaagttcaattacccttcaacctctggacttaattttcctttcttcttcccttcattccaatctgtcacccatagtgttttctagaaccacaaaatgcttcaacaccaaattgttcagccccctgctatgctaggccttgcaaatcctaactccctatcaattccgaaccctacccctccaaagctccctgcaacacagacccatcacccccaagaccgcaactattcaaccccttcttcagctctcttg

SEQ ID NO: 108802 - DNA, 416 bp, Glycine max
tccgcggacgcgtggggtaagagccaaggagaaaagaaaaaaaaaaagaactggactccttcaattagtgcattgtttcttttcttcaagtaagaagactccttccttctctccttctttctttctttctttcctccttactcagaaagaaggattcacctgatcattattattattatttgtttcatgttatgagaatattatctatgtatatatagatggtagcaagaagacattgttaatttgagagatggcgagttacgaggctattaagaactttgatgatgatgatgatgatgatgatgatgtggagatggcactcccccatagccagatctctgaatcaagatctgccactgtttcttcccccattggccaaactaccccgcttcacattcacaacattattgaggaac

SEQ ID NO: 108803 - DNA, 411 bp, Glycine max
gttcagtttccctcctttccccaatacacgacaacgcacaccttaattccccttcacatccaccttgtcccaatctccaactccttcaacctcctctcctctgttttcttttctatctccaacaacaacagtgaccaaaacgacgccgtttccgaggcttccaaaaaccgcaattccgaactccacacacacatattctccagttccattcctttttcttcttccttttctagctctttattccgcgtgcgcgaaactattattataacgctgattgcgacgcgaattaatctttatccgttgcgctgaagcaattaatgtggcgtccacttcacatacgtggatttccaatcccgcttcattccgaaatccacactacatcaaagttgaaactctattaatctgattcca

SEQ ID NO: 108804 - DNA, 274 bp, Glycine max
gttctatattgaagtgcaaaggatcatgcatgcatgatcactgaaaattgaaaattaacaccccctcctccctcaaaaggaattatacatttttgacttttaggaatcggatgtcaaaggagcaacaaattattttccttggtgtatgattacaaaatgtggcaggggagttcacttggatcatattttcattggttatcactctttctttgtaatgatgcattcactaaacactcatattgcaaattaccaggaccattatttcagacaacat

SEQ ID NO: 108805 - DNA, 490 bp, Glycine max
ctacgcgtccggaaccccagttcaaagatctagacatcctatagcagaaccctcaatagacccaacaattccagcaagccaaactcctccagtagacccagcaaccccagtagaccctgaaccgatgaccaagaaaaagaggaagaagaaaaggaacagtgcaaaaaatgaagggttagaatctgagaaacacaatgctgatcgaattgcagaaaccccagttcaaaaaactgaaggatccacaactgaaaattctatgggcagatgcaatgttgagccagctggtaaaaccctggttcagattactgacactctcagagtgactaaatccccctttaaacatcatggtgaaagttccttgagatgccgggcatgccgacagcctggtcatagattccaacaatgccagcggctgaaatgtctttccatggatgaggaagtttgcttcttttgtggggaaattggacattcccttggaaaatgcgatgtg

SEQ ID NO: 108806 - DNA, 481 bp, Glycine max
atctatcatctatttttttttattctttttgcatgggaatttatttcttatatgtacctccatcctatgtgtttttgtcccttttttatgtatttatttgaaatacatctaatccccttttttgctttttttagattttttgttttgtatatttatatttgtatctttcattccctttttgttattgccatctttcttggtttggggtggaaaatattatggaacaagttctggcaccgcagagattttgggataggtgtgtgtgtaaggggcatattaagttagagcatggcatgagaggcgagaagagccactcttgatcatttgatcttacatatatagctaaggttatatttaagcaggatggaatgattgagattagcactactgacgccgtcacctaatacgctatatatatccaagacttactcctgaacgttatgggaaagggaagttactggcatacaggttatggaaaaga

SEQ ID NO: 108807 - DNA, 447 bp, Glycine max
cgattttctctttccctcttcgaagcaccgattcagggaacgaacgaacacacgcgcgagcacatacactctccctcagtgttagtgtgatggcgacggaagagaaagagaagggatacgaagggggagcaggagggaagtttcggaaacgccccttccgcagcaggatccaaacgacgccgtacgatcggcccccaacgtccctcagaaaccctagcaggaagaacaacaatggttggttgtcgaagctggtggatcccgctcagaggctcatcacttacagcgctcactctctcttctcctcgcttttccgcaagcgccttcctccaccaccttcttcagagacggaacaggaagcgaggaacaatcatctggaagatgccgtctttgttacaaacaacaattcctctggcacacagcaaggacctgttggcggaagtgatgctc

SEQ ID NO: 108808 - DNA, 395 bp, Glycine max
cttattcgtccgaactacctacataaaagttgcgtgatactattacccattatccagcagcagcagcatccattgttttacacaccatacctgtatcattacaatagaatagtagaagctagtataaaacccttttctttctacattctctccctccctcccttctcaaaacttctttttcagttttgattattgtcacagtctgatactgcttctgcttctgcttctgtgagagatagtaatagtaatagtagtatagaatagatccctagctaggcatctaacggtttaaaccacatattttgaaaaagggaccataacatatcagtattcagtagtagtagttgatggcgatcgtttagtctctatcacatcaacacccccctctcatattt

SEQ ID NO: 108809 - DNA, 319 bp, Glycine max
ttcttcgcgtccgcccacgcgtccggttttaaatgcaattgattttctgcatatatgaaatgaaatctagatttaattcactgtgcaatccggaggaagatttaattcaatttgtttggttctttgaaggatttgaatatcttaatgagttttcaaaatgagtaaaatgaaagatgatttgaatttgatgctggacttcacttaatgctcttgcaagcaaaggaagagttacaatatttgatggaacactttgtctcttgagaaaattcactaaaccacatgagttttttttattcaagcgcattgctttaattatgga

SEQ ID NO: 108810 - DNA, 247 bp, Glycine max
ccattttcatacacaaataagttgctttatattactgcattgctttgagtggatcccgcataatcatattatcaatttttcattcatttaaccaggggtgttagaaggaagtgggtggttggacccccagattgaaaaaaagatccttaccttgttggatcaagctgagaagtattccggaaaggcgaagggataaggtttacattggttgtggagctgggtttggtggtgacaagcccttggctgc

SEQ ID NO: 108811 - DNA, 397 bp, Glycine max
ggagaggaaaaaaaaaaaaagcttgtgctagagaaatgttagaaccttgtttctgatttttttttcctcttcgattttgatttttttttctgttgtagtttttgttgttgttgctctctctattttcgaaacgagattggagctctgactttgtggtttttgaattttattttttggattgttttttccaaattgctgcatcgagcttgcaaatggaggtttggttcctgtcagtgaagctctgaaggatattggtatgtatggaaagttatacctagtgctgagacagaggctttgagggttctttgatgcaggaacaggttgtcgttccatttctttaaatttgctatgaaatttttgattttgagcttttcatttctgtcggggggctggagtt

SEQ ID NO: 108812 - DNA, 363 bp, Glycine max
catctgctgctagtgcaagtgagtctgctgttaaggacaatgaagtatctaaaccagagccttctaagcatgcacctttggtggactgcataaggacacgctgggcgcgtgctgtctgcagctggtcaggggatcctcctagtatagtttgagaggacattatttggagtcatttgtggtggttcttacaagtgtttttacagggaaagcactattggttcagcaaagagtagatacagtttttatgtaatttgatgtggtacctcgaggcacatgaacagggaggggttcagatctccaagtttttatgtaatttgatgtggggggatattattagtaataaacgtgaaaacctgttcttgt

SEQ ID NO: 108813 - DNA, 206 bp, Glycine max
  unsure (1)..(206): unsure at all n locations
cgcagagagagagagacaaaggtcacgttggatatgtagcacaactgcttcatctnctcttctctccgcttccaccaccactcactcactcactccactccctcacaattcacaatcctcacgttgcctcattcacatgaagctcctcttgcgctccgtgttttcgctctctctctgaatcactcatccttataataaataaattc

SEQ ID NO: 108814 - DNA, 368 bp, Glycine max
tggcattagtagaagggtttcattttgtctctgttcttttttccgcgcagagatcataggaaaaaaactattagctttgatcatacgagatcttgtccatcaccagatttaatttgttatcgtaattctcctgtttttaattatatcttgaggccatcccattgcaacacactcataaaaaacccctttttcagtctcagattattgttacaacaagtgttatccacttttcacagtcacagagtgagaaaaaagcaaagccagtgaaattgtgtgttgtgtcgtgtgtgatatatagagagagaggattgggtcacggaactttgagaaaatggcttctattgatgctcagttgaggttgctagcac

SEQ ID NO: 108815 - DNA, 230 bp, Glycine max
caaacaaacttcattacaaacacattcgttcctctctctcttcttcaatttcgatgaacaacaacaacatcctcgtcctcctcaacctgtaccttattattcataccctcttgtctcgcgcgcattagtgtctcaaatctcaattccaattccctttcctctttttttggacacacttacacacacatacgttcatatatacgttaacacgttcgtaagttatatacagt

SEQ ID NO: 108816 - DNA, 183 bp, Glycine max
tttatttttgatgtgtccttacattaccaggggggttgctctaaagcataacacacgctttatgtgttctgatctgcaccacacactgatccatcacatagcatcataccttctcaataattcaattgcacggttctggaaacctgtgatgtgaatctcagccgcacattacctgctacctta

SEQ ID NO: 108817 - DNA, 138 bp, Glycine max
ttcctatgcgtccggccacgcatacggttttaaaagccagtattaaccggacccggaggactctgcaaccataaagtaatatcaattggggctgcatcggccacatctttacgcatttctagtaatatcaaacattga

SEQ ID NO: 108818 - DNA, 403 bp, Glycine max
ccttcttttccgcccacgcgtccgcggacgcgtgggctggtaccctagggcggggagctaggggtggtcggggaaatttttcacctcataatgcatcacatgatgctgctggtagcaagaattctggtacaggaaaagataatggaactccacaagcaactgagaaagttgtgccacctttgtcagcttctcaagggaaaatatctaaagaaaaaagttctggaacaagctctgtacccattaatgccaatggtccgacaagcgtaacttctggaactactagtggtactagtccttccccttcatctgctggaactggagacagattgggtccatcttcttgcgatattaataatttgaatagtgctttgccttctgatagttcaaataaagttgcaacagt

SEQ ID NO: 108819 - DNA, 181 bp, Glycine max
atgatgctccaaagggttgcagggtgctggatccagttgctactccatttgaacttgttcaggtaatagaagctgtgaagaagggagacggggcaaacaatgaggatagtgatgttaaacagacaggtgatgacatgaaaaaagataacaatgaccaaatgatcgatgctatgggaaaaca

SEQ ID NO: 108820 - DNA, 256 bp, Glycine max
ctctctactctctagggaggcacttccttcctatgcattttcttcttagccacgccctacgacgtcgttcgccgtaagctctcttcgtttctcttaagaagagaaaagggtttgtttgcatatggacggtgacgagctcatgaatccctctgagagcagcaacttgggaagtgattcttcggaaaaggagaaaattttggaagatgaaacggaggatttgcaagatgggttgaagttgagtgtggtcactgaggaa

SEQ ID NO: 108821 - DNA, 389 bp, Glycine max
cctgttttggttcccaacaagtcaaagtcttcttcagctttgtggtgaaaacaaacaccaaggggattcaaattcaagttctgattcctttgtgagtgccttacacaagtttaggtttggtttggcatcataaaagggacataaagcaaaaaatagttttgtggggagcaactgttggttatggattgggatgggaaagagtttgcttgggatccacgtgggttggagctgctggccaatggtgaaggccagaagagtgaagcagcttcagtggatttgaggcttggtggggaaaaaatagccccagatgttgctaaagacacaaaagaatcgaaaaccgtgtcatcgccatctggttcgtcgaaaagatcccgccttcagaatggatc

SEQ ID NO: 108822 - DNA, 351 bp, Glycine max
tcaatatttaaaataacagaaaagaaaacgcacgtgacaattttgtttcctatctatgcaaagaataaatcatctgtgttttaactttattgttataatattatagcattcttattagccataaggaatcctagaaaaggggaatggaaatattctatgttttgtcacatccatttcttgaaaattttttagaattagcttctttgtgtcttgatcttttctgggtgttaaattattctgaatagatagatatatttacaaccatccgtgaatcttttttcttcatttttgttaacaaagaatattcaaatttttaatccttctgtaattttctagacatattttatttac

SEQ ID NO: 108823 - DNA, 450 bp, Glycine max
gaaatgtgtccccagttatggctgggaactcatcaaacagtgtgaaggaagagaatatggaagacatagagaggcatcagattgagatggatgagggagagtttagtgatggactcccttataagcctagtttgatggatcagagtactaataaccaacaatctgaggacttctttgctgagttgggagaaatagaagctgacccacttgaccttttgttcacacaaggttttggtggtgctgatgatcaaagggaatccaaggccttagatccatttcatctctttgactggtcaggagacaacaacaccaacaccaacacaagtagttcatttgaagaacctaataataagagaaggttataacaagacctagaaaaaaaaaaggcatgcagcacctccctcacaaaagaccttaatattacgatgatcatgcttttaagttttattt

SEQ ID NO: 108824 - DNA, 429 bp, Glycine max
gcgtgggtctaaccaaagtataatatatagcacattaaagttcataatactttataataaaaagtggacgcttgcatgagtacataaaatatttatacattatatttccactagccatcaatcatgtcgtaatacctgttgaggtgattcagtagactcgaagccgtgtcttattctttatggtttttataagcatatgacatttttctttttggaattatttattagtccaaattcttgcttgcataagattaactcactgcagcttgtgaagaattaaatttagttaccataaatgattttgcattaatattctttttcctttttgatatataaagatgttcttaaaatgattatttttctcgttttccaaagatgggcaacgagggtgtacgtgaacaacgatgaggcctgttatcacggaagaaa

SEQ ID NO: 108825 - DNA, 413 bp, Glycine max
ccctttcgttcgcccacgcgtccgcttttatccaaatttcactccccaaagtccctgtaattgaaacatccagaaattgttcaatagtattaaatattttcacaaaataattacccctacaaaatgtgaccaaattttaaacttataagaagttttgttcaccttctctttatttcattcaaaattgctgcccactttcaaaacttagaacccttgcttcttcttattttcctctcaatcttcttttttctctctctcactccgtgttcctctttctcgcagtagggtttccagcctcgaggctgattcggattggttggagatggaaaattccaattcgacgcagtgtgttcaagttgccgtcaaagtttggcctctgattacgtcggagcttatgcttggatgcaccgatt

SEQ ID NO: 108826 - DNA, 453 bp, Glycine max
gttttattttttaatgtcaaagccgaaagagacgaacgggttatgccttaccaaaactctgttcacagtgatgatgctgagttcagtgtaggtcaagagatgaaacaactatctggtattttccctgctgttggatgtcagggtaatgatttctttaactgcgaggatggggttacaattgcaacaactcagaaagccaaatattatcaagatggtgtcgatggagctgccaataactttccaggaaacatgggaaatttgaatttaaaaccattagacaaatctttgtataatgcccagacatctattgccagtgggaagcagtataattgtgttatgagtgaaggagagggcaaagtaatcgaacatagaagtattgattctcatctttcaaaaggaagtattgagacatctaatactgaagacatcaatcaccctgcacttataagtcga

SEQ ID NO: 108827 - DNA, 394 bp, Glycine max
tccgagtaacattcagtttcacttcagactctactcttcatttcttctgtctctacaatctcgaccttctaagtaaggttctcctgccactgcaaacagtgaattttcgagctgttgtgttcaatggcacccttccagaaaaaatcaaagacaaaaaagaagaccaagaagttcaaaaaacacaaacaggtgagcatggtccccattgagcccagaaccagtgagaccgattggtgggactctttctggcacaagaattctactgtcccaggatatactgtacctggtgatgaggcagaagggtttaagtatttcttcagggtgtcaaagactacttttgaatacatatgttcccttgtgagggaggatctcatatcaaggcctccatcaggac

SEQ ID NO: 108828 - DNA, 438 bp, Glycine max
  unsure (1)..(438): unsure at all n locations
gcttcattctgtccaacctcaaccccaacaaccgatgcaaatgcttccttatcagcagcctcatcctcaaatgcagcattcacaaccacaaattcaacaaccggttcagaagtatcctgttcctcaatctcaagttcatgcacaactgcaacctaatgctccaattcaacatcactctcagctccccgtgcctcctcaccagcctgtgactcctaatgtccagactccagtgcaaaatgcaatgtcgcattcagtgacagggcatcactcttatccccaacctctgcctcacccaaatatgcaacccagagtccctcaacatactatgcacatgcatcctcaaagtgggcatcaaccccaggcccaacatcctgtccagatgcagaatcagtttcctccacaaattccaacagcacgtnctaatcaatctcatgctat

SEQ ID NO: 108829 - DNA, 269 bp, Glycine max
aaatttgttatgtatagtgtgttttaatctcaacatgacagcattgcacctagatgaatttgctgaaaatatgtatatggcagtccgtaatactaaggacatttgaatttttcatgccctttgtggcgtatctctcactgatgtcaattggtgcctgatggagccgtggactctcatcatccatttgagttgcattcgggtgtttctgtggaacacatcattcacagtgtgctcggaacaactttgaagtagttggttctagatcgcga

SEQ ID NO: 108830 - DNA, 423 bp, Glycine max
tttgtctcgtgggcggacgcgtgggatacaaataaaaaacaatggcgccaaaacgaaaaccttcgtctccaatctccattggtaactgcgagattacggtcgaggctaaccgcttcacctgcaactccgattcaaacggcgtcgtaatctctcttccccgaagcgggaagatcaaagtgtcagcagtggctccaaaccgtggaagcgcttctgaggatttgaggtctggcgataaagaacacgagttcgtgctagttaatcctaaagatgttgatgctattagcaaatcttaccttcaggaagtattacagatgtatacgacagagctacctggaatgaattatgccgcgaatacaggaaagcaatcaaagtttcttgagagatgtgtgactaatgggaaatatcgtacactacttatcaaat

SEQ ID NO: 108831 - DNA, 338 bp, Glycine max
ttccatgcgtccggcttctttgcgtcgccatcgtaaggttcttttcattttatgttatattctattgtgcctttttattttttttttatttggcttttgggtattatttttttccctttaaaaatttcaatcgatagtaacgcatagacattgacagtgaaagaagtgtgcttttttgcctgtttctctctgggttctgagctgttttactctccacattctctatatttgtcttgaacccaccacactctctcttctctcaatttggattcatgggttctaactccatattgaaaaccattccttgatgggtttttctgatcaagttaaggtaaggg

SEQ ID NO: 108832 - DNA, 391 bp, Glycine max
ccctttcgttcgcccacgcgtccgacaaatacatcctgtgactgctgctttaaatagtcaatgtgggtactcctcagacacccttgaaccaaaacaagacaaggctttgagccatgtggaatcacattcaccaagctcatcgtttggggaatactttcagaaaagctgcgatgacagaaattttgataaccaaacatatctgggaatatcaaaataagtcaaggagaagcatatttgcctcatgacagaggtggtactcctgcttctaatagatttccatcaaatcagtctgtgcttcctactgctggtgttagtcgcatgtttgcttcgagatatgtttcaagatttctcaactcagaatctgcttcttcaagggaaaaagtatctcaat

SEQ ID NO: 108833 - DNA, 406 bp, Glycine max
ttttcataaggaaaacaagcagccctcccacatcctcctctacactgtcttcctcacgcgccagcagcggcggctgcggaggctggggctccgcggatagcaccaccggtgcggccacggccacggtggccgagaaggagaacaacccacctcaaggagggttagaggttgttggacaggcaagatgtggactgggaatggaggattgggagagtgtgttgtctgagtcaccaggtgaagatcattccattctcaagttgattatgggggacattgaggacccatctgtgggtttgaccaagcttttgcagggtggaagtgcctctcaggatgttgaattgaatgggcttggagtgggttttggtttggtgaatcaaagttctgtgcttgaccccattcctagtgt

SEQ ID NO: 108834 - DNA, 440 bp, Glycine max
ttagtttttgtggtctttggcaaagtctccccttatgtatgggggggatgtgcggaggatcgatccaaccacatacgaacttatcacaaatcctaccctgctagagattaattactttagctcaaacaatatggagtttccttacatcacaagctcaattaacttgaagcaccctggagggaaagaaagaagacttaagaaaggaatacattcattgggtttgactagctgcagtgaatcaaaggcgaggggttggtctattgaaagtcttaaccaagatcttgaaagaatctgttggaaaaagggtttagaaaacaagcatcaggcccctttctgcgtacacaaaagagaacttcaattcagattagacggggtgagtatgtatcaagaggactatcgagggaaacatcaattatttgcaactgacagaatgaaatttt

SEQ ID NO: 108835 - DNA, 340 bp, Glycine max
cgattcgggtggtggcaataatggtaggacaataaaaccccttggggttgacatatcaaagaggcagcataaaggtggacttagcaagggcataattgctattattgctctttcagtttttctagtagttgttttatgctttgttgctgctttggcattgttcaagtacagagatcatgtgagtcaaccaccatcaaccccacgggttttacctcctcttaccaaagcaccaggtgctgctggatcagtagttggaggtgggcttgcttcagcttcgacatcatttcgatctaacattgctgcttacacaggatctgctaagactttcagcatgaatgac

SEQ ID NO: 108836 - DNA, 383 bp, Glycine max
cctttataggtttggatgtacaagctgttgaaacaataatgccacgagatgcaagttgtgaagacattgaggttgataagaatctttctttcctcaatgggtatgttcagcagtctttagaaagaggtgctgaatcctatattcctgaggatgtgcgtgctggaatggggaatatgaaaaatttcagaagccaagatcatcatgaaactttgcagcatggtctaagatttgaggcatatgaagttccaaagcctccaatgcaaccgaaagttactccagtttcatttgcatcttcagcagacattgttccagtgcccgaggtattgtcttccagggaggcccaccatatctcgtcagtgggatcaacttctgaggctggatca

SEQ ID NO: 108837 - DNA, 335 bp, Glycine max
gttaaccaaacacactgacccacccaccacagtttttaattgattgacaccgtaaaacatgtttggatgggtgttggatcaagtacatccacgttcttccaatgcattttactattgcttgttgttttataaaattaacatgatttttttttttacagaaatacaattttcatcagtaaaccaaacagttgatgtttacagggacaatgaccatttataatttttaattggctgacactataaacatttttagttcatcaaaaattaaggtgacaacaactatatatgttttgatgacttaattattatcattaattttttaaggcatggtgatt

SEQ ID NO: 108838 - DNA, 442 bp, Glycine max
taagaatctttgggttcctccattacaggctttcattgtcttttcttcttaatttctctgcaaacaaaaaaccaacacatacatacaaatcataatggatgctctgtgtttacacagtagcatttgtgggatagctccgtcaatttccattactgcatctgcacgcgccaatgattacgcgtcacactctcaggtgaaagctgttgggagcttctccttgttttccagattctcttttagattccctttgaagtccttttggccacgaccaccaacggggaatgcctccggttaccacggtctcgccgtcgacgacgacgccgttttggcagagaatgcaacggccgagacagaacgaggagaaggagagggacaaaatgggaactgggttttgaagatttttcatataaggtctgtttggagaggggaacagaggagcgat

SEQ ID NO: 108839 - DNA, 410 bp, Glycine max
cagcgttgaagttcttatttgaaaaaaaaaaatattcataaaagttcccaaggttaaataaatacctcttatctagccttcagtactcctttgcttgtagaaaatgttcgaggaatcaacaaatataaaagattaccttgagcctatgcaattactgattcattctatgttctttctttttctgcttcaccatcaactgttacatagaaaaaagcatcgtgcgtgaactagaaagaaatctgtgtcagctatgatggatcgtggtcaagagaaaaccgtacctgctggctgtgacttgtctctgaagaagaaggagcttttttctagtgccatgaagagaacaagtgaatggattttttctcaggagattccaagtgatgtcaacgttcaagttggggaagcttcctttt

SEQ ID NO: 108840 - DNA, 482 bp, Glycine max
gtaatttttcatgttttgggggttttatacatatatgatgtgtgaagtgatattattggttgaccctttacatgtcaacgatgtggatattagtgaagacataattgatggatagtgtgtatcttaatggaaaatcattcatgtattgaacaaccaagaatggtatgtaaatgtaactggataagccagattgacgattcaaaggaaacgtggaaaatggcaatcaaaataaaaaaaatttggaatgtttttagaactccaagatccaatattgaaatgatcttcatggaccagacggtgcgaatttctttgtttaggcgctaagattaatacaacggttcacagttatgagattctcttataatttgcattgctgcatattgaaatgatcttcatggaccagacggtgcgaatttcgttgtttaggcgctaagattaatacaacggttcacagttatgagattctcttataatttgcattg

SEQ ID NO: 108841 - DNA, 415 bp, Glycine max
aacccatttgcctgcaagggagagtagttggagtgtaaggcgtaaagtttcccatggtaacatgaaagaggttgtttcggtccctcggctatcgtttccaagggtttattcggattccatgttgtgtcttcgtacatcagcaaatgcaattttgtctccatcctcatccctgtcgtcatcttcatcatctatatcatcatcatcctcaccgtcttttgtttctccagattccattacttctgattctagcattcattcaaagtttttgtcagaagtgtccccagactcttcatctttgtctaatttttctagtttgtcaatcacatcaaattctacttctcaaccagtgtctcacagtacagatatccttggtgtcaagttatcacatcccttgtttcagtcagcctctttacca

SEQ ID NO: 108842 - DNA, 435 bp, Glycine max
tcgttgattcaagaccccagcaacgcccaacccaccgagctcctccgcctcggcgccacctccggtcgaaccggccatttcgaccacatcctcggttcacccttcagaccctccaaccaacaacaacaacccttcttcatgtccgaacaacccaaccaaacctaccaccaccccgaccaaaacaaacccttccaacaagggttaatgcagcagttgtctgatcaccaccaccttaacaacaacaattcacccttcaaccttccttttctctccagcaacacagccaacgcttcgttctctgaacacttcaacaatgccaatggaggaggcaacaacaacaacaacaacgagggcactaactacttcgctacttcaagtgcaccttctcttttcagcaacagtgccaatgccaatgcgaatgcgttatctcacatg

SEQ ID NO: 108843 - DNA, 458 bp, Glycine max
cccatgcgtccgcccacgcgtccggttattcttcgtgtcttgttgtgtttttcatctgagatgtgtggaggagctatcatctctgatttcattccggcggcggcgatcgccgggtctcgccgcctgaccgccgattacctgtggccggatttgaagaagcggaagtctgacttggacgttgacttcgaggctgatttcagggattttaaagacgattctgatatcgacgacgacgacgacgatcaccaagtcaagccctttgctttcgccgcctcttctcgtcgtaacttttctctctcatttctttcttatgcaaaattatcactctttactctctttttgattttggaacattaaaaaaaaaaattcatgctatggaagtcaattttatttatcaccatgtgctttgattttcgtttacggagttgatcactgggatttcccccctcttagatctg

SEQ ID NO: 108844 - DNA, 186 bp, Glycine max
tttttttactatgaatattgtaatgaataatgatgtataggaaggacggtgtgtttcgtgttacatacttgatagagcagtttctacagggagagaatattctgcttttgttctgtgtaaaagcaggtttggatagtgtgaacaacttcttgtacctgaatggcaaattgttgagtcttagcttgg

SEQ ID NO: 108845 - DNA, 251 bp, Glycine max
gtcaccactgcacatggaccaagcgatttgacagtccttggactgtgccaaattggaatcttaagggttaccctgacttgatgactgtcaaaactatgattcaacatggaccattttttgtttgtgatactaaagatgatgaagttaatggagttcaaaatggtgatgctttttggtctgtccatccaacaaatctgggggggagagactttgatgtacaagcggatcagtcagttgttcagaatagtcta

SEQ ID NO: 108846 - DNA, 384 bp, Glycine max
tccatgcgtccgagaaacatggtggaagaaatagacacccccttcagatttacgcgcccgctggtccattcgcaactacgatgctgtgagcttcagactctgaagagagagagagtcgtcggttgagtcttcactctctctctaacccgcattgtgttcggttgtgttctgtttcagtttcagatcgtggttcgtggttcatgaagtgaagttgtttcagattctaactgttctattccctcaccaagaatcatgggcttgttctgaggtctgattagcttgttaattgggttggagaggagaaaacattgagttaaaaagagaagagagaaatgggagctattgctggagaagagctgttgaaatgggagaagatgcaaggag

SEQ ID NO: 108847 - DNA, 360 bp, Glycine max
tttactcgtgggcggacgcgtgggtttcgatgttaaacttgatcttacagtgtgtttgcattgaataatcacatagtagtcggagcaccccactaattgtggattcaagagttgttacttagttgcatttgatattttcttaggttttttccttcgataatgttaattattttagcctctctaatcccctccaaatcgatcacaatagaatatgattcaatttattgcgtaatatgtctaacagttgcttagcaagaaatatttttgttatgtgttcttctcatattgatccatatgagaaattctgacttagattgctatatttaagatggatttcgttcttttaaattgaattcttat

SEQ ID NO: 108848 - DNA, 468 bp, Glycine max
acatgaaagcaagcaactgtcgttacatggttgtatatcagtatgggtcagctgttttgtttaatattgaggatcatgaagtggaaagttacctggaattagttaagaggcatgcatctggtttacttcaagatatgaggaaagatggtatatttcttcagagaaactaatcaatcgtatagttcttctgaatcctgttgcatatgtgtaataagtaacatgttctgtgtgattagattatgcaataaaggagaagccactgcaagttgaggacatgcaaggaggtccagactacatagttctgaaatcgttggatactgatggtatccgtataattggaagtgtattgggacaaagcatagctctggattattttgtctcacaggttaatatgtgccaaatgtcatcttctttccagtactttgttagccatttgttaacctgaaggaaaaagacaacccttaaaac

SEQ ID NO: 108849 - DNA, 313 bp, Glycine max
tttctccaaacaagccctaaatctctcttctctttcttcttcttcctttaaccatgagagagatcttgcacgttcagggtgggccaagctaaggcaaagcatcaaggacctcaaggagaagaataagagaacggaatatttaggtaatcgtcattaaacttaataataacatatttgttaattgttcttgaggattgaccaatggaaatgacactcacacgttacgcagcatatatagttatattacttgttgtatcgcccttatagaatttattgattcaatggaaattaaagaaacacagaatttcgatgt

SEQ ID NO: 108850 - DNA, 421 bp, Glycine max
cggtctcgtgggcctcagactcagggtttccactttccgctcacatggaaaatcaaagagatccggtatttattttttcattttaatcctttgactcttcggattctccgatgatttcatttcacttttgcctccatttgataatcgttgcccgcaattaaccgaccctctgtaacgcaagatcgcatgcatcttacctgttttactgatttggttttcagctacttccacgtccttcaaagttcttactttaactcttgtttttgtgaattgcaggtgtagaaatctcgtttctcagtcatcttaatctcaatggaatctattgtgagtttgtttctacatactctcccccttctattttatcccaccatcaaattttaccacttttaatatgactttatgaagccttaaaattttttaa

SEQ ID NO: 108851 - DNA, 423 bp, Glycine max
ttttcaagcttcatggacaaaccacatactcccagtgggcaatctgaaaatagatatggtcagttttcaactccctgtgcaaagattgcaaagggtaaagcagccgaaaggcgaggatttctcatttcttcgttagatattctccctgcatactttgaccaataacaaaatcctgttatgagcctatctttttggcctgacttgatttattgcccactttttatgcgccattttttttctctgctgaagttgggaatcactcacaataacttccacatagcaggggtgtcacactgctttttttttcttccctctactcttgaagcagttcgttcccacattgtatattggcttgcaaggtatcacacattccactacctttgattgtctgcgactgccaaaagaaaaaaaaaattatctttt

SEQ ID NO: 108852 - DNA, 269 bp, Glycine max
gaacttctttagaggagtgggattacagcggtatttgcccatcctgttacttctgtggagccttgctgtttgactgacactactcaaagcagcaagagaaaaaggagctgcccacaattaacgtgatgaacatggacctgctcttaaaattcgactccctttgaggaagcatacagaacctgaagaaaccaaatacaaatctaaattacaattggggtcttcttttgtaagtgtgggggcaattgcagattccttcactaaaactaccc

SEQ ID NO: 108853 - DNA, 412 bp, Glycine max
cggacgcgtgggggccccacctgtggagcgatatctgcatgatttgcttcagtatgcgttgggtgttctgcacattgttacattagtacctagcagtcgtgagatgattgtaaatgtaacattaagcaataatcgcgttggtatcgcggtaattttggatgctgcaaatatagctagtaatcatgtggaccctgagataattcaaccggcattaaatgttttagtcaatcttgtttgccctcctccttcaatcagcaataaaccagctatgtttgcacaaggtcagcaattcgcattttcccaaacatctattggtcctccctcagaggctagagatagaaatgctgaacgtaatgtctcagatagagctgttcactctaccagccagattgatcctagggagaggagtggg

SEQ ID NO: 108854 - DNA, 284 bp, Glycine max
tgttatgcgtccgcccacgcgtccggttttcttctatgtctttctacttcatttggattccaaaggtttcccagttaatatagtagagtatgtaggaagcaacattaggtggctaagtaccttagtttgatttgaggcctttctgagtttttcggttccgtggatcgattgattcatcaccatgcctttatatgagttataccggctggccagagagaagcttggtaaagaaactaccagcacacgtgctcctgatcaatgttcctcgccagagaatgattttt

SEQ ID NO: 108855 - DNA, 362 bp, Glycine max
tcgtattttactgaaatgataactgtgcccctccgtttctgtctctgaatctcttgctcttcctcgccagtcgcgacgcctccgacaacattgcgatgcaactcgcaaatgttgtgccctttcaaggcacctttctcaatagaagaatgaggtattgtagttttgtaccttcgaaaatgtgttaccggctcaagcataagttagcagagaagaaggttgcgcgaggtgtgggaagcggttccaagttgcggaataaggtagctgctcttatggattataaccttcctgacctaattgggaatggaagccgtgaaaagaaatctaaaatgagtccaaaagatgcattagatgatctggacatc

SEQ ID NO: 108856 - DNA, 210 bp, Glycine max
agtagttcaagacaagcatatgacttggtcggatctctgccagtggcaagtaacgacgtttggctgaattagttatgtacattgtttatgagttgatttgtgtaaagcatttacttatttaatggtagttgctttgtcatgttttttacatgcacaaaagatgttttccctgatctctcctatcatttggtaactttggttacacagttt

SEQ ID NO: 108857 - DNA, 118 bp, Glycine max
cacattgttagttacaagaagcccacaatggaggagaaaaagttgttatcaccaccactggtgttgccaccactgccagctcggactgggtcactatttaattctgaggaagcaaaac

SEQ ID NO: 108858 - DNA, 318 bp, Glycine max
tcttctattacatcgttaacacaaaagaaaggggaatcgaagctggaatcagagataaacaatcttttaatcacctctgaaactcaaatcttgatccattcttgtagaggaacaatgagaacagagtcaaagaagatatctaagtcttcgtggccaaaattagccgtgagaaagtggctcaatataaagagtagtgctgagcggtttcactcagactatgatgcaacaacagcaattgcgaaggaaaggagaaggagttgttccgaccgagatcgttacgtcgtcgtaccggatgatttatcaaaggggtgggtgatg

SEQ ID NO: 108859 - DNA, 398 bp, Glycine max
cggtttcgtgtggcaaattttccctcattcattctcctctcctttccccttcctcacaaatcacttcccttcttcaataccaaatcaaattccttctcaatttgattctcttcggccatgtttgcttacagggttttgtcccgttcctctgccatcctttctcgaagcttcacccttttctctgtttcacgaaattcccaacctttctccaccaccctgtccaataacttccattccctccttcacccatctcccaacaaggtaaccgcacttcgaaaacgtgatcaaaatttggtttttcggtatttttagtagtgggggggtttatctagggttttagggtttattgaaaactctacagctttggcatttttttatgccctgtgtgagtttagttt

SEQ ID NO: 108860 - DNA, 416 bp, Glycine max
cggctcgtgtgcggacgcgtggggcttatgcaaattgggattgcgttcttcgttatgcggttgctccggcccggaattccgctacccgggtcggatcctcggtcttcgacggtgtttgtaagtgttccttatagtgagtttttgagtaggatcaatagtgaccaggtgcacaaggtggaggttgatggggttcacattatgttcaagttgaaggctggtgttggaacaagcaacgatgatggtggtgatgttgttgcaagtagtactagcagtactactaggttgcaggaatcagagtctttggcgaaaagtgttgcaccaactaggaggatagtttacaccaccacaaggcctagtgatatcagaacaccctatgagaagatgctggacaataaggtggagtttggttccccaga

SEQ ID NO: 108861 - DNA, 395 bp, Glycine max
ttttgtatccaacagggaaagcgtgttcattgcgcgatggaaatcccgcccttttcccgtttctctctctcatctcactgcttttcccttttcattactttttgatcgagtaaggtgaaaaggaaggaagaatggaacgttgaaatttaaaatctgattaatgatatataggaattgtatttgtattaaactttacttgctcggaggggaagaagaagagaagggttgcaactatatattctattctgttaagctccaaaatcaaaattccctctctaacctaacctccatcctccattcaggttttatgtttgtcggaagagttcaatcaaatgagtttaaccatgatagatctggggatttcctttctgaggttggtcacgagccctgatgca

SEQ ID NO: 108862 - DNA, 357 bp, Glycine max
aactttcattgctttcactttctgaatgctattctttttgctttttaacctttgacataacaaattctttgatggggtgccttgtcatatcttgattgtgtgtgtggtctttggtggtggttcgtggttgtaccgtgaattaacaatttcagcctttggtgtgtggcttttgctgttgtaatgaaacttgtaactccctcatcacttgctctttgtcccatgttttctccaaaattgtttcttaatgtatgttgcagaggtagaagactgtctttttctagtcttaatctgactgataccttaattctcagaaaggatcagctatttactattgcgtttgcttatccataaagatga

SEQ ID NO: 108863 - DNA, 407 bp, Glycine max
gtgcctagtttcgtagtaaaatcaaagttccggttccctccgcagagactggacgatctcgcgagccatgaatgctagacggttagtatagatcactagtttgaatcagactttgaaatttattatctcaaggaggattcgttaaaacgcgatgatcggtatttaattcgtctctgctaggctaggcaatatttgttttgtaattccagatctacggatacggcgtggttatacgatttttggatttcaatctgatggtgaattgattagtgtaattgattcgtgaatcttagtttcggagctgcgatttaatttgttgtgtgttggatttgctcaataggagtgaaattgtggggaaggaagtagctggactggtgaagtatagatagactgatagagactttagc

SEQ ID NO: 108864 - DNA, 430 bp, Glycine max
tttgttatgaaaagaaagagtagaaagaacaaagcagagcaatccttattctgcaattctattccacccacacccgagaaggtaaaaaaaacaaatgatttggctcacaaatgtattaccaaaatgttttttttttttttacagaccttatctatatacaagagcaaaattaatctgttgtttcacacacctgtactaagaacacaaataaatcccttggagcccttctaaaatagtatttcattgtgtcaaagcctggtgctatatatgtccaaaggctgctgttagcttctgcgtgtccttggagaagatgctagaattttgagattgttgttgttgttgttggtccttggaatcaggcactattattgaccctaaagtgttatcaggtaccaaatgtgtggctggcctaatttggttgcacaatgat

SEQ ID NO: 108865 - DNA, 289 bp, Glycine max
gggtagttgcggcgatatcattgaaattgcatgtggaggagatcaattatgctgagaggattggtgtgaagaagtggatggacgagaatgatgttgctgggatggtggatagttacactacgaagatatatgagactgtgtctgatcagatagatgggttggctctgcagtataacatgactgaatttgtgactggcattaagcattttgtgatatccaatccggttaactattcagcaccttcgaaggttttgatgactccctcgccgtatgcagagaagttcttgag

SEQ ID NO: 108866 - DNA, 248 bp, Glycine max
  unsure (1)..(248): unsure at all n locations
tgcctangtaaaaaaaaaaaaaacttagaaaggagaggggggaaggggagaaagggaaaggaccatgaagggggaaaataactggttactgggattaccattcccttgattaaaactttggttcgctttttcttttcattggttttcttccttttctacccctttgatcttatgcaatcttcccttatggatccctttgatttgattcgcaaagggggttaattggttgagatcttgtaaagggtttg

SEQ ID NO: 108867 - DNA, 403 bp, Glycine max
tattaactgattaacgagaatggacaaggaagtggagcttggttcccttgaaggtgaaatggccacccagcacatttcacaaccacagaagcgcaagggtggtcttgttaccatgcctttcatcattgcaaatgaggcacttgcgagggtggcaagtttgggccttttgcccaacatgatactgtatttgatggggacctacaggcttcaccttgcccaagcaacccagatacttctctggtcccatgctaccagcaatttcacacctgtggtgggtgctttcattgctgattcttatctgggtcgattcctcgctgttgggttgggttcggccatcacttttctggtattgattttcttgtacttttttttcgtgtttttacttgaatcattcaattttaga

SEQ ID NO: 108868 - DNA, 456 bp, Glycine max
  unsure (1)..(456): unsure at all n locations
tggctanctcacctagtttcctagatttgtctataaataaaatgttaaacaaggaaaaatgaagggaaagaaaacgcttgaatttgttctcgcacccttgtctcctaagttgccaacctttctttttgggctttgactggaacagttcatgcctgaatttgttcctggaggacttaccaaagatgggttttatgcttccattatcttgtatatggaaatcatatatgccgagttacatgaacaaaagactagttttaggttatgcatttcataatttaatcctgcaccttattattttgtgatatttgtgagataaatgaaccagcaacatcaagttgtgttcatattgtgctatgagtggtaagtccagtaatgctgcaaaatttatttccctttctaggtcagtagttttataaagaagtggatatgtgatttttgaactgaaatttgaatttt

SEQ ID NO: 108869 - DNA, 406 bp, Glycine max
cccacgctaccgccgagtcggcgccatgttggtccccgaaggccgtgaaaccgattggatcttctccaccgaatcgggccatctccaactcctcttcagctcccctggaatttcacgtttgattctcataggaaccctcttcaaagaaggtactttaactcttcttcaatcacgtgcttatcaccgttccttggagtgttcattgcagcatcagggttttgaggtttggtcaaagcctcttcttttggctttgtctcctaaatctttgttcaaaaggggcattcctgagataccccttttgagttatgaggatagtttggtttctagtgtggtggttcatgaatgtgttgggtgtcatgttggtgaaatgttggttgggaatgttgaaattgaaaatgagagtgat

SEQ ID NO: 108870 - DNA, 330 bp, Glycine max
ccctcgcgtccgatgcatactaggtgcagatgttaatgaactcttcagtgtgcctgatctagctgaagctcaggaccatgaggactattgcatgaacctgtagattgatgagttgtatatgcatacttcttaggacagtaagtaatgaagtatgttaactagctgtgtggagttgataaatatctcattttaggagagctttgaatggtttgatttttagaaaatagcataaattaaaactttaggggatttaattttccttgatgctctttttgatcattgtttacactctagatgggtaatttcatatgtatgcttgtgttggagacc

SEQ ID NO: 108871 - DNA, 265 bp, Glycine max
cccactcgtccgcccacgcgtccggatagatcaatgtttgtttttttttaactatctatgtactacaatacactgactccaaagggtgaagataatctaccatggaaccaacttccgttgctcttgccatggaatggagcattcaactcgaaatgggtctgcggtctaccaaacctggtgttcctgtcaaagccatatcagaaatggagcctcgccttcagcgatggagtagagagcctgaatttggcattgctccctatgccat

SEQ ID NO: 108872 - DNA, 319 bp, Glycine max
tcctacaaacaaaccccttctctctctaccacctttactttctctctctagggtttcgtcgcgaactctcactctcgctttcgctctgcttgtcacgattgtagggttccaatcctcgcgcgaattgcatcacagtctgtgatcgaccgagttttgattcttccccttcctcggggtgttgaggtttataccgtggcgggcgaatgttgctgcttgatgcttgatgatagttgctatggacttgaatgcctcgccggttccggaggaagatgaagatatttttgaggagaagatacatgttgaagagtttcatgaacct

SEQ ID NO: 108873 - DNA, 310 bp, Glycine max
ttcatgcgtccgcccacgcgtccgtgttttttgactgtttctttttcccttcctttttggtttctagtcctatctcagccttcctaatttaattgttgccttttctgctttgtctaaattgtcaatcaattgcaaaagccatttatatttgctctattctgtttactcatttgaatgtctgttcagaaatgctgaaagatgcaggtctaaattgattgataaattcatcacaaccctaaattgtcattttctgcttttgttatgttactcaaagtcaacctttaggtgtttggatagatgtatggatata

SEQ ID NO: 108874 - DNA, 445 bp, Glycine max
agtctctgcgggtctttgggggctctttctctcgccgagcgccttactcttcagggaatttcctcactcagattccagctgaaaattgcgcagtgagttcacttcaaattcagagatgattaattgaagttttttgcaataatagttcaataactgattcctgtctctaattctgaagttattacttttaaaggtttaatggctgtgtcatgacttttgtaactttgcctactgaagtgaaatgatagattttttgaactcttactgggatccttctaagaaacttgcgtgccacatctcaatttataaaatacaaatatgcttacatggtggggaaaatcatcatcaaaagaaaccaagaagaaagcaaataaggaaagtttctttgacacacttgaccgaaaacttagaatttcatccaaaggtaaagtaagcattagatctg

SEQ ID NO: 108875 - DNA, 349 bp, Glycine max
ttctgagaatccatttcctgggggtccttgtggctagccatgccaccttgattgcgctttaaaacatgatggttcgggaattgccaaggatggtgagcatcccaagcttgatggagggttctactgtgtctcttgcgggaaagtaaatgatttacttggatgctggagaaaacaactgatggtagcaaaggatactagacgcgtagatatactctgttatcgtgtctccttaagccaaagacttttacaaggaactgaagtgtatgaagaactttataaaattgttgatgaagcagtgaagaaactcgaacctgaagtgggtccactcattggctcaccggcgaagatt

SEQ ID NO: 108876 - DNA, 345 bp, Glycine max
ttaagaatgattacaattttttactttattgttgtttttaatgaaataatgaagaaattaatatttttgtaattttttatcagcagaagtcaaaagaagaatatttcaaatgctttagaagaaaattaatgcaaaaattgaaagaaaaaactctgaaaaaaattgaaagaattggaccgctcccttagcgcacaagaccaactcagcatgcatgctcgcttagtggctaactcacgcttagcgtgaagaagacccacaagacagcacaaggtcgtacttagcgcgaacatcgcgctaaacacatgattaaaccgttattctcactaagccccagagtgcgtgctc

SEQ ID NO: 108877 - DNA, 298 bp, Glycine max
tgccaaagaaatatgatctttgcaaattggtgcatctttatggattctttgattgccccatatcgtcaggcatatagaatatggtgtcttacactcatatttcataagtttgatcttctggttaaaaccaagcatcacactagtttgaatatcgacctcttataaataatcctgcaggaatgagtaaaatccttaacctataagcatgaagattccatcattctactaaacaatgtatgggcaaatatgccaaaatggtgtgcctatgatgttgaggtgaggtgccaagaaaggggtc

SEQ ID NO: 108878 - DNA, 406 bp, Glycine max
agctcaagaatctggtggttgaagaagggattggaacgttacaggggttgactatccttattacttgagattggggcatcgccctcttttagatgatggaacgattgtcgtttgcacttttctatgcctgtctacttaagttagttggtgattcagagcatataaatggggatcaataaatctgacacccaacttcaaataattaataccagctgacatgaaatgatcacacttttgttttctgcaaagctacaatgattgacactctaattcaagttgtggtaacaaccccctggtgtgaaaggacggctgcacaagtctctcaccattatgagagggtcatatataaacagccttggagcgtggcctgagagttacatgctacattaaatcagccatcatgctc

SEQ ID NO: 108879 - DNA, 220 bp, Glycine max
tctaatctatttaataaatgcttcacctatcgatataaaaacattgggacttcttccaatattagggggggttgggtgcacttcaaatagttacaaagataagcaagaggcacttcttttgacacctcatgcagcatcattgatgatcatcgaagaactagtaacttcatttgactatgccacaaataacatgcatttggccaccatcaggtctccacat

SEQ ID NO: 108880 - DNA, 341 bp, Glycine max
atacgcgtccgcgctcactcactcactccttgggttgttcttttctcccttggcttcctcatccatcatcgctatcattagcaaattaacaaagacatggggtttctcttcttcttcttctccttatttttcttctctccaaccactttcaagatgtgatgctgatctggggtgttgctggttttcccttgtgatcgatttctcttgtgttggtggtgatcaagaaagtgtggttaattttgctttctttgctgatccgtgcgtgtgtgtgatcttgaaaaatcaatccaatggaagaagatcaagaagtgaaacacatgtgcaagttctgcagcaagagc

SEQ ID NO: 108881 - DNA, 276 bp, Glycine max
gaagtcatgaacgtgcctcccgaatccctcgacaaatccccttcctcctccgctccccctccgcctccgcctacgccgccgcattaccctccccggcgaagggaccggcgagacgacagggatttcgatcgccctcccaaccgccgcggcgattactatgaccggaacgcgtcgtccccgtcgtcaccgcgagacagagacccgctgccaccgcgagacagagaccgagacagagacagtgacctcaagcgccgccggagccccagccctccccac

SEQ ID NO: 108882 - DNA, 394 bp, Glycine max
  unsure (1)..(394): unsure at all n locations
attacgcgtccgcggacgcgtgggttcttatgcgaacatattgaaactcaacgggggtaaggcaaaagngagagagaaatggagaatgcggaggagatgatgcagcaaaacgacgaggttttggcggttgaacttccagctccttccgggtggaataaactgggctcctctcctctcctctcctctctttttttattattctatgggttgcgctatcaattctacacactccctctatctctttaatgtattagggcgctcagctttatttattttgcctacacctttttggatctcctctcactctcactagtctctagttaaccatctcctttagatttctactggttctgaaaaaacaaacaaagtgcatacacatttcctttcaattctg

SEQ ID NO: 108883 - DNA, 403 bp, Glycine max
aaatttttcactttatccaagcccctctgttttcccccaaccaaacccaatttttttcactcacaccactagtctaaaacagaactcctctgtttctcccctgttcctttggacccttccattgtggataacacaaaaaaaataaaaaataaaatgtcttactcaagtgtctgtcaagggttgcaatcaagtgtcgaaccctggctcatggaaccacgtgtgcttaaactcaagttggctccaccagggtccaaatccaacaacacttccacacactctccagtgactccaccacccagcaacacaaacgatgcacatggaaaaaactggagtttctttcaatctctctccaacatttctcattgcaaggagccacacattgagaatgtctacttccaccctt

SEQ ID NO: 108884 - DNA, 456 bp, Glycine max
tgtttttccttcttaaaattcatcttcaattcaattcggtctctctctgtctctgtcaccgttcctcattcgcatggagaacgacaccgccgccgccgctaacaataacaccaccgccgacgccgctaacaataacaccaccgccaccgtcgtcgcgaaagcaggttccggaggagtgaaatcgaacaaccataacctagaagaggagcattccaatttgaatggcgaggagcagatggcagaacaagtggaggcagaagaagaagaagaagaagaagaagatcgacaagccgatgaaggcgaaggagaagaaactggatctgctgtgcccaacccgcgccaaccttccagaacccctttcactaatctcagccaggtcgatgctgacctcgctctcgctcgaacccttcaggagcaggaaagggcatatatgatgctgagaatgaataatgatgg

SEQ ID NO: 108885 - DNA, 314 bp, Glycine max
ggggctctctctctcgccgagctccgcactcttcagggaatttcctcactcagattccagctgaaaattgcgcagtgagttcacttcaaattcagagatgattaattgaagttttttgcaataatagttcaataactgattcctgtctctaattctgaagttattacttttaaaggtttaatggctgtgtcatgacttttgtaactttgcctactgaagtgaaatgatagattttttgaactcttactgggaatttcatccaaaggtaaagtaagcattagatctggaggatcacgtagacattgcaatgacac

SEQ ID NO: 108886 - DNA, 316 bp, Glycine max
ttaaaaagagataattgattaatttgattgagtgatatattatgaaatgaagagagatatagaaaaaaaaaagaattgttgatgtaatgtttaaattttttttattgtcaacataccattactcttttatctatattgtgattgtggataactttttaattttgtttttgttgtgtttcactgttttctagtcccaaatatgagtcgaggttatcatactctgtcgtactggtggtagtagtaggtaatgatagcgaccaaacttttaggtggacccaccttcgccaaaagtcgcatgtggtttacttgattattt

SEQ ID NO: 108887 - DNA, 363 bp, Glycine max
gcactggtggcattcttcaacaatttgcaaggtactgcaaattcaaaccctttgtctgcaacttttgaggactgtggttacaatgaagttcctggtaattggaatgctaacaagtttcctaaagctccagagattcatggaactgggtgtcagccttattcttctttagcaaatcttgatccaaatgaatggacatcatcaaatctagcaaacatggccaatcatgctaaccattcctctagctttagtaaggaactttctctaagtctcgcaacatcgacaaccacaggacaatgctcagaggtaagttgctctaatgtgaccccatgcatgaatggaaccatgtcaggcttggagcaagcc

SEQ ID NO: 108888 - DNA, 372 bp, Glycine max
gcctggtacgaggtcgccgccagcctcgcccccggtgcgccggagcctcaggaggagccgcagcataagcaggatgaatctcaggtggaaaaggatccttttgccgcgagtgatgcaattaacaaaccacaagagcttgttgaagggttcaagaaaacaaaggatccttctagtactgatttaacctcagctttggaggggcttgatgtgaccacattgccccctcctgaggctactcaatccacgcaaataaatgtggagggttttgaagggaactacggcggagttgagtttgggcatgaacaagcttctattggagaagcttttgaaggtttcaatgatgcttggggtggtggacttgatccttctgag

SEQ ID NO: 108889 - DNA, 155 bp, Glycine max
ttggatatgccaatttggaattgtgaagctgctacaaaggccaaagccttctttttgacactaatgacatgctacaggttagatgcctccatatagctctctctccctgatgacgtcatgtagatctggggctgaaactgtgcctcgattatttc

SEQ ID NO: 108890 - DNA, 380 bp, Glycine max
actactcgtccgctgcaccatctgtgactaaatctggagctggaaactcagcaactgtacaaagtgggataaatctcaatgtttcacaaactgaatctgccagtggaaaacatgtggactctggaaacatagtcaaagatcaggcaatgagaacaaaaactgcagatggcaggtctgagagaactgaaagcattacagtgacaaaatctgatactggccacataaaactcaagagtagttcaatggtgaatggattggatgctcaatcatccttggccccgtcttctgtacaatctgggacgtcaaaatctatggaaaacccaaagcaggtggaagaatccataaatagagcatcagatgaacatgggacaagaactact

SEQ ID NO: 108891 - DNA, 439 bp, Glycine max
  unsure (1)..(439): unsure at all n locations
ctccctcngccctcaccgccaccacaactaccaccacggatggctgtgacggcgacggcgacggtggaagcgaaaacctactggtgccacgagtgcgacatgagcgtgtccctgactctcccaccctcccctctcctctgccctcactgccacacccacttccttgaactcatggactccccaagcctctcccaagaaaacgacgccgaatcatccctcttcgatgtcgtttttcaagacgcactcttactcctcaaccctaaccctaaccctaaccctaagccacttccctccaaaccccttcccctcccctccctccacgtcaccccctccctcctctcctccctcgaccccaacggcgtcgttctctgcgccgtctgcaaagaccaaattaccctcaacgcccaagccaaacaattgccctgccaacacctctacc

SEQ ID NO: 108892 - DNA, 454 bp, Glycine max
ggctgatggtaatacacaaaacataactatttactgtgctattctctctaccacatcacacgcaatttgacattgtcgtgttcctttgcttttaaccgataaaccctcctttcatgttctgtaactccaaatggctgcgttcgctaaaccctcccattcccaacttcgtgcccaaagggatcatcctcttcttccttctacttcaacttcaacttccagcaacttcaagctcaaaacattcactttctcccacaacttgcacacacttcacccgcgttttagaaaagctaaacatatttgtgtctcgaattctgccactaccaccacctccctcagcagcaaccacaacccaaactgtcatatttaccaactgtgccttcttgggaacttggaccgtgccatgagctacttagactccatgcacgagcttcgaattcccgttgaagatgatgct

SEQ ID NO: 108893 - DNA, 377 bp, Glycine max
cctagaaaacacaaaaaacacaaaaccctaaaaaaatggcacgtcaacttgttcttgcactcatttttgttgccataattggcatggccatggctaatgaggccccatctgcatccccaaaggcttcaccttcaccaaaatcatctccttcatcatcaaaatcatcacctgccccatcagctgagtctccgttatcctctcctccatcccctacctcatcagatgagactgacatctcaactgcgcctgctccggccagtgaccccatcgagctctacgctcctgagcccgagccttttgaggaccccttcaccaccccggaggagaccgacccggccgatgtcaccagcggtgcctctgctcttcgattctctact

SEQ ID NO: 108894 - DNA, 405 bp, Glycine max
agtcattgggtgagtcacccgctgcaacccaactggtgcattttaagaaagacaaaaaggggttggtttttggttttggttttggtttggttaactccctcttcctcttctactctcacccatggtctccgaatccgaactcatcggccgcctccgcgagtttctccggagctccgacctcaacaccaccacaaccgccaccgtccgccgtcagttggaggccgatttcggaatcgatttatccgaccgaaaggcattcattagggaacaggtcgacttgttcctccagaccgaacacaaccaaccacaacaagaggaacgccaaaacgacgacgtcgaggaacaagaagaggatgcgcctaataatcccgaacaaagccaaccctccgattccaaagaagaaac

SEQ ID NO: 108895 - DNA, 368 bp, Glycine max
  unsure (1)..(368): unsure at all n locations
ggctcnaaaatctgtcattcagaaagatttggaaggtgtgctttgaaaacaagcagaacatataattcttcctagcattttggatgttgaagatctttggccattctttcatgaagactctattaattttgcccaacgtttaacaagaagtcttaaagactccagggagaagcaaaggaatttagaggctcagataagaaaaaaaatgaagaagtttggcaaggaaaaacacagtattatttattcaccagaagaagaggtggttaagggttttcccgaagttgagttaaagtggatgtctggaaataaggaggttgtgcttcccaaagctgttggtctccatctttaccatggttggaagaaatggc

SEQ ID NO: 108896 - DNA, 339 bp, Glycine max
gagagagaaagagaaatctgggttttttctgttgttctctcgaaagagttcagctgcttctactatttctacttctagggctttctttgttttgctttgcttaaaagttttgcataaaaataaataaatatttttctttttcttcttcttctgaaaaagcaaatcccttttgcttaccgatcttgttctcattgtcttccttgccgtgagaattcggcttctgcatcttcagataagaagggggaacttctctattttttgcggcatatcgtggtttgtaaagactgtttctaggtggagattcattaattgacactaaggtgcaagagaaaagtgagt

SEQ ID NO: 108897 - DNA, 361 bp, Glycine max
agtggattataattgaggacgtcttacgggtgctgttaattttcaatatagctgccggggaaatccatgtcctccacttgttatttcgtcgagctttgatatgtacatgtcgagggagttgaagtcaactttggttttcttccattgatcttttcagtaatgcgccttgcattatatttaggtgaatataagattgcatagaaacatcatctacatgttatgaaatagcatttgtatataaatactttatcgggatggtgttaatttataagtgctatttcattaccatgtttatttataattgaggacgtcttacgggtgctatgaatctacaatatagctgtcggggaaatccatgtcc

SEQ ID NO: 108898 - DNA, 181 bp, Glycine max
ggaattacacaccgtgccccaatgggagggctagtcatagaatactagaaagtcagcaactgacggttatgtgctataatgcccctgatatattttacctcaaaatgcaactttctccgtgcagtttcacccgatccaacatacgtgagctttttgctgaaaaaggccggtgctggaagtg

SEQ ID NO: 108899 - DNA, 99 bp, Glycine max
tggtcgcgtgggcacactcttaactccaccctgttttgttattatccgcacccaacttacatttacgctcacatttcctaaacccactaaggattttca

SEQ ID NO: 108900 - DNA, 403 bp, Glycine max
ttaattctctcctcctctctttatgtccctttttcttcttttccccctacctatctccaccaattccaccttcatcttcctccccatcaaggactatctatatatacatctaggtttgatcatctatcatccttatcatgttaaccatatagctagctaggtctattccttgcactcatcacttgtatatatacatagttttaaaagtacatatcatatagtaatgcatcatacataacacttctataaccttaggattagttatagctaattagaatttagagagagagagagatggggcaaaaaagcttgattttgtatatgtgtatgtttaattacactcatgcatcttattagttaattgcatgtttaattgtgttacatcatgcatacatatgtgtat

SEQ ID NO: 108901 - DNA, 187 bp, Glycine max
ccaacaaattacaaaggcttgtaaggatgcagataaactttacaaaaagcttacccatgtgaaacaaaaaaatgatgctcctgaaaggcataggcgtgatgggtgtttgggactttttggccgtaaagtcgatactttagatcactatgaaaggagttcgggtgatattgaacataatgtgagaatg

SEQ ID NO: 108902 - DNA, 334 bp, Glycine max
gagggtgtgcattggtgccacatatgctctaaaatggtgaatccaatgagtgatgatgagaacatatgcccgttttgtgagacagaatttttctgaggtaatggacaacctaagggaccagaatgatgtttttgacttaaggtcagcttgggtgttctcgctttacgccccaatttttctcggtttgatgggtgctttcagcccttccctagcaagaattgctccacatggaggcagcagcagctcaaggggtgtggaagaagaggttgagcaagagagggaaaatgaacttgtgcttgggagaaggagaagaaccttaacttacatgatgcac

SEQ ID NO: 108903 - DNA, 356 bp, Glycine max
gaattattttcaaaaggacgagcgagtatgtactgggtgtacatacatataatgaaagtttaattatttagacgatcacgatagcttttcagtacttccaagtaagtggtgattcacatacttttactttcatcatatgacctatatatacacacttcttgttcttcttttcatatatctctatgtctctcacgtataatttctttttaaaatctaatgtatcaataacactactccaaatgtttagtactttagtagattcatcattcataacccaggatcaataatagtgaatataaagtcatgcacagcattcttaattttcctgtttttggttccactttattggggacaac

SEQ ID NO: 108904 - DNA, 224 bp, Glycine max
aatgcgcttcttgctgattctttactgtttatatccttggttaatgtggtgaggcctctggatcagtaattggagccgttcaatgggatgggacttggtgaaatggcagcctgtgggagttcgatgccattgtattgacacaatggaaatgtgcaaatcgcttgttatgacatcaggataccattaattgcaaaacaatgaagaggtggatttgagttaatatg

SEQ ID NO: 108905 - DNA, 369 bp, Glycine max
ctcgatccaatgtccttgaggctcagatttcatgtgttagagctgaacagactcagttaagttggacccttgaaaaggagagacaaagggcagctgaaagcaggcaggaatatcttgcagcaaaggaggaagctgacactcaagaaggtcgtgtgagacagcttgaggaagagattagagacattagacagaaatacaagcaagagttacaggaggcattgatgcaaagggaacatcttcagcaggagatagaaaaagaaaaggctgctcgatcagagctggagaagactctacgtgttcattcttcaccattatcagatcaaactcctactacaaagctaaattctgcttttgagaatgggaacctgt

SEQ ID NO: 108906 - DNA, 393 bp, Glycine max
atttttcaacatttcatttcaccgccaattcaaaaacgagaaatggtgttcttctgcttcctggtggaccagcggcgggaggtgcagcggagcaagcctgcggcggggatctgctcccgctgcggcggcggagccagcgtggccgacatcaagaccgccaccaggttctgctatgtccccttctactggaagtcatggagagccatcgtttgcactttctgcggagccgttcttcgctcttaccaacactagatccattcatatgtactactaataggttactacgagtattatgtagttataactagccacttcttaattgtgcttcctgattcctattattatttgctaacacatgaggagccatcgtcatatcatgtattcattctaact

SEQ ID NO: 108907 - DNA, 419 bp, Glycine max
  unsure (1)..(419): unsure at all n locations
ccctcntttttttcctttctggttaagaaccaccctttgtttctctcaaaacatcaaggattgttgtcctgaatcttattctgctcatctgcatatctcatctcccttaggatggccaatgaaagtggtgaattaccagtgaccccagaagttactgagtcacctggggttgaaataagaggacattcagatggcaaggctagttctggaactagtgttgaaaaagttgttcccaattatctcagagcttccactggttcttgtcatgatttttgtaaatacgggaggaaacatgcatttgattcgaaagaaagatgttctatacctaatagagctacaagaaaacagcttcaccacagttcagaaggtagtgttggtgggacaatgatgtcatttgctaggctcagtgcatctgtgga

SEQ ID NO: 108908 - DNA, 407 bp, Glycine max
tctcactcgtccgatggaaggcaggtgtgagaattgagaagcacaagcacatggttttcaattggttttgttgtgtgtattgcagcgtgagcaacagataatataataccatattttcattttatttagtaaatctttttgctgtaagaaaaaaaaattatttaataagctgtgcgtataattagaacaaataacctgggcacgtgtgggggaaagatttgcacgctgttggtgcaattcgtgggattcgtaacatatagcacctctccttccagtttgatgtttaaacatcaaagcttcaatttgtctacttgaaggggtgtgtttaaattttttatagtaatttgattagacctgttctatttttgcaggataatgattaatggtttgcttctatagcatttgag

SEQ ID NO: 108909 - DNA, 382 bp, Glycine max
tttgtcgtagcgtgaacggcatggcggagaaagcggcggcgccaccaccgtcgaagcctcttacaactcaggagtgggaaaccctaatcgaaggcttccagaacggcgtgcactgcaaatggagctctctggatcctctcttcgatccccttctctcctctctgcaccggaaggacttccctctctccctcaagctccaactcctcgtcttcctcgacgaattctctctatccttcttcacctcacataaccacctccaccgtctcgtcgacgcgctcaaaaccgtcgttcacgcgcccctcgaagccgccgccccttcagcttccaccttcaaggaccaattcatggtctccaccaccttaattctcatctgcgcatctga

SEQ ID NO: 108910 - DNA, 353 bp, Glycine max
tatttgatgaaaaaaaaaagctattaagaaaagggtgttgaagaagaaataaaagcagggagcatagttgatatagatttcctagtgcaaagggagaaaaattctcattgttcattggcgtgaataagagaagaaaaaaaaaagctattaagaaaagggtgttgaagaagaaataaaagcagggagcatagttgatatattgttattgaaatgcttttatgtttttgttttttgtatatatttggactttcaaaatgaaaatttgtaccataatatatatatatatatatatatatatatatatatagacatatatatatccaatgtttttactgactttattttattgtttc

SEQ ID NO: 108911 - DNA, 263 bp, Glycine max
cctacttgtctcaaacgaatgacgcaagcgctgagtgcttaaccttcttcaccgtttcgtttcgccgacaacgtacgaacgaagaacaattcctcatttattcctattgcttgctaaaatatatatatagactctgttccttcattcgccttttcagtttcaacaacaaaaccatcgcaaaacatttttcattcctttgaagcatgccggggttaacgtgcaacgcttgtaacaccgaattcaaagatgacacagagcaaaag

SEQ ID NO: 108912 - DNA, 369 bp, Glycine max
tttggtgaaagggacgcggattcgaaacaccagtgtgatccttcaaccctagtaccgcggagccaccctttgtccaccgtggtcgtcgttgaaggaggtcgtcaaccgcaagttgcagccgcaccaggtgcaaaacaaaacgtcatcagctttggaaaccctagcgtgaggcaacatcaagtgtagcaatggttgatgtccataagttgatttgccaaacctgtaacaacgtgggtgttggtgatggttctgatggctttttctactgccttcgctgtggttctcaatgcgaggatgtgatggacaccgctgttgatgacgatgatctcttcaacaagagtgctgtctacttgcctagtcaccaacgcc

SEQ ID NO: 108913 - DNA, 486 bp, Glycine max
cccatgcttccggtgcgcctgtgcctgttcgtccaactccgtggatctcgccgtcgcggaggctactgtgtcctttccgactctgcatcattttcaggaatttgaaggtctgcaatctcctcaaagccttcgagaaacaccctgcacccgtggacccttgctgaaatcttccttgctggaactgcattttatatcataatgcctaggaaaaataacctaaggaaaaataatgcaaggtttgttgatgaagaacatcatgatgaagtggaacattgcgatgaagaacatcgtgatgaagatgtgcatcattatatacagcaattaataaattcactgaataaatctcaatctgaatcacatggtactgagtctaatcatttgaacaattcagctagcactaatgctgaacaaggttcgttgaaaaccagaaatgttcgtgggcctaccttattaagagatatatggaccatgcctccagggaagaca

SEQ ID NO: 108914 - DNA, 436 bp, Glycine max
gtagtaatagttctatattgaaaatccttaaacgtacgccattcctataataataataagtgacactataagaatagatacattgtcaaagtttcattcaccaactccttttggtttatacagagacagggagacaagacagagcagtacaggttactaccaatggctaccaaggtttatattgtgtaagacgttctaactttcctctggttttgtcctactttgatggttaagtcttaatcactttactattgtatagttcatatgaagttttaaatcctcgtatcctgagtctgctttattttctccatatataattaatgattgatggaatgtttttatttaattcttctcctttgttgattggatcagattattactcttataattttatcgagtatttgtagattgatgaattgggtaggagtggtgagtc

SEQ ID NO: 108915 - DNA, 339 bp, Glycine max
gggtactatcttcgtttctgctccattgttgatgctatttcttccactcttggcaatttaaccaacctcactggtctctatctctctgacaacaacctcattgggaatgttcctgggactttgggacaactcttggcccttttggttcttgatctttccaggaattctcttactggctccgtaccagcctctttcgcctttctttcgaatctttcttcccttgacctgtctgctaactttttgtcgggggcggttcccaccggcatagggactctttccaggcttgagtacttgaatctttccaacaatggccttgcttctttgcctgcccaattgggg

SEQ ID NO: 108916 - DNA, 434 bp, Glycine max
attcattccatcttaccttttaatggctgggaatcaaataggtatatctatatatcaattttgaaaaaaaattacgaaaaaaaattttaagaagaaaatttccacatgccattgatagtggtggaaacacatgctgttgattcttaatcaggccagaatcttaacagtagtgaccaaaattgtacctttcctttttcctgtgtttcattgtaggtgtaactcttgtactggggaatctttgtgtctggcccttagctttgtttgtctgttttgcttggccagactcagagaccagaaatttcttcatttaatatgtttttcttttggaaactgttaagttatgaagcatgaagacatagttatatcccccatatgcaaggagacaattaattaattatgttgaaaatattagttatttttagtagtatcttatg

SEQ ID NO: 108917 - DNA, 116 bp, Glycine max
accacacgcactcaaatcccttgtaatgggtctgtttgggcggtaatgtgggctgcaatcgggatctacctctctttcgtaggcgtggtcggatctctaatcaaatcctccaatcc

SEQ ID NO: 108918 - DNA, 139 bp, Glycine max
aatggataaagggacccggattcggaacaccagtctcattcttcaaccctagtgccggggagccaccctttgtccaccgggggcgctgatgaaggaggtcggcaaccgcaaggtgcagccggaccaggtgcaaaacaaa

SEQ ID NO: 108919 - DNA, 288 bp, Glycine max
gaagtagataggagtgagaatgtaggaatggagtgggatagtgtggtgttggggagggaagagagggatgaagcagtagttggaagtggagaagttgatgctccatctttactggaggagtctgttttggatagtagagctcagaaagaagtggggactgaggttagcaatgttgaagatcctagtgtggtggatgttgacgttgagtgcacaaatgcaccagatgccgaggcctcagatcacgaggtgaataatgctttacgatgcctgttagtaggagagaatgta

SEQ ID NO: 108920 - DNA, 379 bp, Glycine max
ttgtttttatcttttttttttttggtaattgaatggtatgattttttcattatttggaatatacattcgtatcatgattacatatctaaatattacagctactttaagttaggtaaagtcatgaacacaaatcttcagtatttctgcaaaatagaaagagatatcactatctccattgacagtttggcactttatgtaatctgtctgtgcttttttggattaattattatgattactatggttacaagatggcttcatatcttccacactgttactggcatttgataagattatgaactcaaattttcactgtcactgcaaagaaaaaaaagatgatccccatctctaatgacactaatatcatctatctccgcattct

SEQ ID NO: 108921 - DNA, 321 bp, Glycine max
ctctcgcgttcgcacttctccaacaatttgcttgcggggacttggtgaatccaaaaacaggtatcatttacaatgcaactcaacttccttccaatttgactgggattgaggttgcagcattgagattaaggagtggaagtctaaggagaaaagggttccaggcatacaatgagtttgaaattcccaagggactcattgtgagtccttatgtggaaaggcttgcgttggtgtcccaaaatctggataataggtccagcagttactactaccctttgcctaattatacttatttggctccagtgttgggactactagcttatg

SEQ ID NO: 108922 - DNA, 457 bp, Glycine max
ccctcgcgtccgcaggtttaacctcaaaaatttgcgtctccaattccgatcaaaatcgacgaaacaagggtacttaaccctccaagcagcaaaccctcaccgttgctggaatttcagtgttactgtgtgattctttcaccgtttcactattaatactactctggacattgactctgcatcttctttaagtcaggctactaaatcatcaaaggaaagaagccccaaagtcactgattgcagatcacgcagaagcccagttgttgaggctcttgattcggaaggtggttctggggacttgttagggtgctgctgaggcatttcatcactcatctctgtggtgttgaatttgccccttccaacatagacagaagaaagcactggattgagggttgagtgcttgttgttgcttgctgctgctgctactgcttctgcctctggttgtggagactatgttgga

SEQ ID NO: 108923 - DNA, 400 bp, Glycine max
ctttttcgtccgcaaacacggtggatagcacgtgaggagttaagagcacacggggggatggcaaaaactgttccaattcacggcgttgacaaactttcagacaccacccaggtcgacaacgataagaatgctaaaggcgaaaatacaccgggcgagcaggaaagcgataataccaaaaaaggcaaccggatctcgtatcaaagtagtcgcgttataaataaccatggtactcacaatggtaatggcaacggatcctttaacgagaattgcactcagactcagaccacacaacaacatttctactatgcgcgtaaatagtttaacaattatctgcgcagtaatatgatcgatctactactatgttatgctatatgcattaccaataggggtatataataaa

SEQ ID NO: 108924 - DNA, 261 bp, Glycine max
tgtgattgctgttcctccgaagctgcaaggggcggaagccgttctcgaggaacgggtctcggacagtgcttctgaaggctcaattggtgaattctctgtcccagtgtctgttaatacttccagtctgggttctcctggccattcctcgaatgggatgccgtatactccttcttcctcaccgccatctcctgtggtggcaaagtttactgatgcagctgtttgctctttgtcggagaagaaggaatacccaattgatccatc

SEQ ID NO: 108925 - DNA, 150 bp, Glycine max
aaaaaaaacgaaaaaacaagttttatttaaatttttttggaaccaatgtcatgatgaataaataaagcataatcaattcgaaaactaacatacgaggcgtcattatcaaaattgattttattagacaaaacttaaaaaagtcttaatttg

SEQ ID NO: 108926 - DNA, 412 bp, Glycine max
tgtttgatgtagtataagtgaccaagcacaaaaaaaaaaagaaaaaaaaattcttatttaaatttttttggaaccaatgtcatgatgaataaataaagcataatcaattcgaaaactaaaataagaggagtcattatcaaaatttattttattagagaaaacttaaaaaagtcttaatttgaaaaaaaaattgttttgaaaaagagagtcaaaattcatttatacataggaaaagatattgataatgcatgacattctttgtaaaaatgtctataatagatcatttaaggcctaacaactttggaaatatataggtaaaattatactaaggatcctttgtcttattgtgaaaatttgttttggtcctttatccttaaaaaaaattattttggtgctttaacttttagctttg

SEQ ID NO: 108927 - DNA, 256 bp, Glycine max
ttgttcgcgtgggtttttttttttttttttgggtggttttttttaggaaacaccggcgggcaacatgtatggatacatgacttaaaagggtgtttaatggaattggttgaataaaatacataaattattataaatctttaatattatttttgattcttacaaataaaaaaaatacaataactcaataacaagactagttgatggatgtaataataagcagccaccagtcattaatgtaatgggtggcctacgtata

SEQ ID NO: 108928 - DNA, 212 bp, Glycine max
ttttctactgataatggggaagatttctttggtggtctttccagtcctaaagctgatacccctgtatctacttctgctggcaactttgttgttgcggaaaatgccaatggttcaaagaaaatccaagatgatgtggaagtggaggagagcagtgacccttcatttgacgacagtgttcagcatgctttagttgttggggactacaatggggc

SEQ ID NO: 108929 - DNA, 306 bp, Glycine max
cccatgcccccacctccagtgcacccttacccggacgcgttacccacacccacagcggtgagcccacaccctcaccctcaccctccctatgtctaccactctcctccaccacctcctaagaagccatactactaccattctccaccacctccagtccaccaccacccttacccccatcttcacccccacccacaccctaatcctccaccacctactaagaagccatactactatcattctccaccacctccagtccacccccacccttacccccatcctgacccccacccacacccttaccctcat

SEQ ID NO: 108930 - DNA, 412 bp, Glycine max
ccgcttagcttagttcggtggttgggggatgccagtgtgtctgtggcccccaaaagccatcaacgaaaccgcatgtcggggaattcttctcattccatagttcgagtggtaccagatgagactcttcacttttgttcagagcattctcttgaagataaaaaggaagagaaaatgaggatgaggaacaaatacaggaaaccaacaactttacgttgcaatgcagggagcagatgttcaacgtctgttgtggtattgagcttgttaggatgcttatatttgcttcatttttatacccttattcatcacagagatagaaatggtgaagagtctctattgcgtattagtaatcatccccaattccgtgaacttcaagaagtggaagaggaagatgttcaaatccccccaccaaggg

SEQ ID NO: 108931 - DNA, 278 bp, Glycine max
tttttctaaaattctctgcgttttcttcggcggacaacccttctctgattcgggcttaatttttgtttctcttcttacaaaaccttaggtcttgctctgtcactcactgtgatccttttcctcaatttgttccatttaacgttgttgtcaattttgcataattaggttgttttttgtgctcatgaggttccagttttaagatctatatcttaaagtgtctctcttttttaaaaacataagaacatataatatacatatgccgagttttgctttactgc

SEQ ID NO: 108932 - DNA, 296 bp, Glycine max
cccatgcgtccgaggacaggaatttggtatgatgggggctttatttaaatatgagggagtggtatcgaaagggcaagaaatggaaggcagggagagagtctcctgatctcagttacactccttatagatcttcctcaccacaggtgagtgatagacttctatcctctgacttcagggcaaaatcattgcaggagaagacaagagggacttctatgcagaatggaggaaaagatactatgcctttgaggggaaaccatatgcttttaagaggtgaagaaaccgaatcagactcctct

SEQ ID NO: 108933 - DNA, 159 bp, Glycine max
accagctcttgaggcttcaattgactatcaacttaagatattgacagttggcatcacatatggaggtccagcgctcctccattacaaggatcaattcaaagaagctatcttcttggcttttgactcaccatcttggaaggttaatggggctgctgatca

SEQ ID NO: 108934 - DNA, 432 bp, Glycine max
ctttttcgtccgcccacgcgtccgggaagaagaaggttcttccagaagttattttgcaaatgattttttaaaatgcaatatttttttaataatttcatttctaataaataaattacggtataaaataaataatattattatacataaattattagtaaacataattatgactaatatttgtaattccttttttacgtgcatgtaaatttaaataataaattatgtgacaatttagtataatttgaatcataaaaattaattaatttgtatattttataaaaaaatataaaatatttattatgataacatttaatttgtattacaaaacttaatatataataaaaatagttttaattttataacaacgtcaaaaataaatttaattttataataataactaaaaataaaataaaatttaatacatacttaatg

SEQ ID NO: 108935 - DNA, 259 bp, Glycine max
cccatgcgtccggcaatttctttctctctccccttcctcggattaaaacttgggagtgtttgtgattattcattattcccaaatgaccccacctcacacttagtgttatgataacttggaaccttttgcacgcaagaataagctgtatacacgcaagaatagcactattatttcttcattttctattgttgttgttggtcaaagaagtagcacctgagaaccctgaatattcaacctgtgatatggggtacctcaattc

SEQ ID NO: 108936 - DNA, 174 bp, Glycine max
cccattcgccccacctgcagtgcacccttaccctggcggtcacttacacccacaccctggcccacaccctcaccctgaccctgcgtatgtgtaccactctcctgcaccagcttctaagaagccatactactaccattcttcaccacctgcagggcaccaccacccttaccccca

SEQ ID NO: 108937 - DNA, 387 bp, Glycine max
caaaggaggagagagagagagagagagagaggagacacagacacaaaggaaacggaaaaagcaacacacaaaaaaaaagaggtctgtgcctcctcttatatgtaatagctagtttccgagacaagaaaaaaaataaaagtaaaaagagaacatggattatgaaaacaacagttggatttgggagggggtaaactactacccgtgtgtgtttggcggtctaatggttacagcagccttgctgggcttgtcaaccagctactttggtgggattggggttccttatttatcgctgccatgttcctggtctaatttggggattttccaccagaaaaaatctgggaagaggcgcattcgggtgtacatggatggctgttttgatctgatgca

SEQ ID NO: 108938 - DNA, 315 bp, Glycine max
tttttaaccttaaaatgattcgagccattgcactggttttgatgggccatctgagggaagagataaaagattcatcacttatccccaatatggttaaatctacttcttttttagatgcttgcaacctattgaaatgtagcaatgaggttgatgcaaatattgatgagctaagtacaagtcttggtgctgatatagaaacttttcttagaagtcctccaacatccaaacaaaagaagcagaaagttggaagccgagaatgaaaggtttgcagttattggaggatctaaaatttctagcttatccttatggcaacac

SEQ ID NO: 108939 - DNA, 177 bp, Glycine max
ttcttagcacaagtcatggaaagaataatggcggggagtgcatcaaaggttgctgtcaacctcttggtcacttaccccattgtcattccatgcctcgaggctggcatagctgagttggatgactatctcaaagcccaagctgatgaagcacaaaaaattgctcttgaggcctatgtc

SEQ ID NO: 108940 - DNA, 467 bp, Glycine max
acaagatggttgcattgcagagattgttagaaccatatggcatttgtgaggtatgttttataagttttctttcacttaccatagtagatattttgctgagacagttgacttgtttaaattccttattccataaatctccggaaccgaatttggtgcatttgcttcctcaaatgtatctcctgattctgtccaagattgtttactcaattgctattattttgttctgaggttttcctttgtttcacgggtcagaatattcataccagaggaaagaagtcagttttgatggtcttggctagatggccttgttttcttttgatgctctgtagaggatgagccccctacacacgcagttagcatgtcattcttacacgttgatgttcattttttatcatctataaagcacaccagtagtagcctgatgttcattttttatcatctacaaagcacaccagtagccattattt

SEQ ID NO: 108941 - DNA, 467 bp, Glycine max
cccttgtgtccgattctattaataatacaaaagacagaagtttgattcttgcttgaatcattaattgtatcatagaaatgtcgatccgtgaaaaagtgaatagcattttttgccctttcacatctgggtgtccctagaaattccctttcaactattgtacccattgtgttgacttatttgatagttataaagacattagaatttactgatttagaagctaaacctatttttcaaattcaacacataaaattaaaaacccaaataattttcaaggtttgtatactttgcatggagctggatagaaattataaaggacaattagtatatagggtaggcctaatagtaaagtcggtaaaactctcacatttagtatccaaaaagtaatttcacttactagataatttttttaaaaaatagtgattaattcataaataatattattttattaagcgtgacttaatattttt

SEQ ID NO: 108942 - DNA, 431 bp, Glycine max
ttttcttatcttttagccttttttctgtaaaaaaaatgtagcttattttgctttcagaaagctttataatcaagatgctgcagatagagcttgtagctgaaaagtagtttctgcataaaaattaagcaaaactatgtgaattatcattcacaaacacccatatgcagtacatcttaatgcagccgtttctcctcttgagggcaaacgacatctaattctgctagtcactctgcaacacccatttgcataaaattttcattaattatctcaatggaataaaagtcaattcaaacgttaaaatggcaggtttgtatacttaactctgaagtttctgtcaatgtctttttttaggttagtggaatattggtatgtgaagctgggtgcatattggaaaatataatgtcattcctggacaatgaagggtaatcctg

SEQ ID NO: 108943 - DNA, 399 bp, Glycine max
cttgttgttgagtgaaggaaacggtaggaagctaattcgtttgtgatggaattggagtttggagaaggaaagtaagagaaagaaactatgatgatgttttgggtagtggcaacattgggattggatagattagcttctaagacaaggaaaaatcaataaaatggagtaagaaagagcatagttaagctttttctttctttttcctttctcaagcctagtggtattttttttactgcttcctcttcatcttccttaagctgcaacatttctctttggtgattgctcatattggcacatgttacatgcaatgcatatccttgttttacttgaagagtcatattaaggtttgtacaataaatagcaattgttgaggagctgagagaactcttttaacatgac

SEQ ID NO: 108944 - DNA, 266 bp, Glycine max
aagccatggttatggaactacattatgattatgagtgtagaaaacgaagaacgagaatggatgttctatcaaaaatgaatcaacttaaattgctcatgcttaacaaggtcaactattatggaaatctcaattatatttcaaatgaattaagatatctatgttgagataaatatccttccatgtctttgccatcaggtttatattcacatcaactctgccttatagcaatattaaacaattatggaaaggcacaaagttattatata

SEQ ID NO: 108945 - DNA, 139 bp, Glycine max
gtttatttgtaatttatttcaaattatttgtaaagggcaatcatgttgctcataagagcaatttgagcatttgtttgtctgtctgaagtccaggatcagattgttttaagtcgccattaaataatgctgttcgattaac

SEQ ID NO: 108946 - DNA, 471 bp, Glycine max
tcctctcgtccgaaataatgtaccatcggggggtgttcaacaacccactggaagcctttctagtggaagatttacatccaacaatctcccagttgcattgtctcagctatctcatggaagctcccattcaggaatcaccaatagaggaggattgggagtaaacccaattttgggaaatgcaggtcctcgaatcacaagttctgtgggaaacatggttggaggagggaatattggaaggactggtggaggattgtctgtgcctgctctcgcatctcgtctaaatttgggtgcaaacagtggatccggtggtttaggtatgcaaggaccgaatcgattgatgagtggtgtgcttccacaaggatctccacaggtaatttcaatgctaggaaattcttatcctagtgggggtccactttcccaaagccatgttcaagcagtgagtaacttgaactcaatggggatgttgaatga

SEQ ID NO: 108947 - DNA, 443 bp, Glycine max
tgattgaagatttggtgtgatggcatctacaggtcggtggggtccgatgtgggatctctcaaccgtgtcgtcgtggccactggcgtcgtacataagtcctcggtggtccccacggaggttgctaaggtggtcggggatgatgagtgtctccattgttgacgagttggtgtggagagtcgtgacggcgttcgagtccgtggctctcgtttccatgctctgcttcttcttcttgttctgtggctgcacattctgatcttgtgactgcaccttgccacacccaatcttccttccccttttctcccattttcaattttgctatgcttctttttttcgggaatgtaaagtttgcctgatgctattagaaatagtagaactagaaagacagtgcctgaacaaggttatagtttttccagctattgttaatggttctcttaaaattcata

SEQ ID NO: 108948 - DNA, 408 bp, Glycine max
tttcgtttgccatggaagcagcagcagcaacgggagggtcttctcagagaaagccgaggggaaaacgagcttcagcaaaaagcgatcccgaacttgaccgtctcgactcgcttccgtggaactccgctcttcctcaaaacgacgacgacgacgctttctccttgttcattggctccaacgaactcgaaggaggttttctttcgctcgaggagattgatgaggctgagtatggtttgagtattcccgaacctgaagttgacaagaggaagacgaagaataagaagtctgaacagaacgaaaatgtgaagaagcagcagcaggatggagttgacagtgcttgtagcgacgacacggtggtcgaagcagagttggatgagagtctgaagtctaaagagaagaagaaaaaga

SEQ ID NO: 108949 - DNA, 483 bp, Glycine max
ccctcgcgtccgcttctatcactcttctcacttgggagttagtttgttacttggtcagaggtggaatcgttgggtcttaatgggtcccttttcactatccgttatggttaatgactctgccatttcattaccagatacttgtacgaaaagaaagcagaacttacttctgaaaaattcttttgcatcagttagcatgggagatgaaaagccatttgacttcctacgcattttatttgagggcgttattgcaggaggtacagctggagttgttgttgaaacagctttatacccaatcgacacaataaaaacacgtctgcaggctgctcgcggaggagaaaaactaatattgaagggcctttattccggattggcagggaaccttgttggtgtcttaccggcatctgctttatttgttggagtttatgaacctataaagcagaaattgctgagggtatttcctgaacacctgagtgcttttactca

SEQ ID NO: 108950 - DNA, 474 bp, Glycine max
tcctcgcgtccgcaaaggatcatactattcccagcactagcagaactggaggtgaaagtttaaatagaaatgctgtatgttcgccatcatggagttttcgttgggatagttggggccgtgttgctggtgaaattgaggatccttcctttcacacatctcgcagagtcagcagaaatgtcagcatggagttaaaagggtcattaagttctgagagaggcaatttatctgattggggaagcaccctggataattctgtaacacctttgtctctgaagtcccctgttcgggagcatttggttacaagtcagatgactccatcttcagatctatccatgtcaagtaattgctctgcagtggtgaagaatctgattgaatcaccagagattgcagaatcttcaataccaaatcgttcagtaccttcagttttctcaatccctacgacagatccaatgactaatcataattatcacaatc

SEQ ID NO: 108951 - DNA, 432 bp, Glycine max
gcgtccgtgcctctctgcgagacaggggatcttacaggaacacttgggggggaggctagagattcaattgtgttcttgccaaagtccccgccgtggaagctacattgcatattggtgcagctttcactcagccagttaatcattggcttcggtctagtgatagtgatggtgctgggtgttccaggactggtttctgtcttttgaattcaatgtacgacagctacattgctactactttaaatagtttcatttggttacttgcggttcactctaattttgtgtaatgtgtctcttagtttatgtaaataaactcgttcgtcttgttgcttttcaactcgcttatggagagaatcatggcttttctctcccatgatgtatgatagattacttctgtagcgcatttttacataaaggcattaatccttttaactg

SEQ ID NO: 108952 - DNA, 516 bp, Glycine max
  unsure (1)..(516): unsure at all n locations
tctttttttgccacaaactgatcggttcaattatataatagcacttatcctcttcacaatctctcacacaattgatagagcttcttttctttttgaaacttggtactagttttgtcattccttttgaatcaagctgcaaaattgaaaaatcccatgtgttttttgctttgtttgtagacacaatttgattttagttacttcactagcttaggacagcttgaagaatattagagcatctggaatttccatcttcacactctctcacacaacacacaaacattgctaaacagagtttctttctttttttttctttttgtaacttgctacaagttttctcaccccttttgaatcaagcttcaaaattgaaaaatccctttttttttcttttttgctttgtgtatagacacagttagactntagttacttctcactagctagttacaagatgaagaattatagagcatctgggattttgaagttgatagctgcactgaggtcaatggcaaagtcaaaatc

SEQ ID NO: 108953 - DNA, 205 bp, Glycine max
cggttgcgtgggcttagctgaaccctcacctcaagggagcgtgctaactagactgatggcaatccctacagaaccaaattattctgctagctagctagtacgtcaaataaaataaaataatcaactatggcattcaacgggacccaacagaaatgcaaggcttgcgacaaaactgatcacttggtcgaagggttatctggcgatg

SEQ ID NO: 108954 - DNA, 350 bp, Glycine max
gtatgtagtttgtctgaaagggtgcatcgttggggggcttgtttgagtaccaggcagagtactgaggaagttcgaggggaagcaagagctgcagagagggttaagcaagaagaatatataaagaaattgtagagggaatgggctgaggccaagcaagagttaaatgaagagcgggaaaatgtgcggagattcacattagatcgggaccagaccctaaaaaattctctgagacaggatgaggatatgagcaaagagttagctaatgcattgcgtgcagttgcatctgctgaatcaagggctgctgtggctgaggtaaaactctctggtcttcaaagaaagatgggttccac

SEQ ID NO: 108955 - DNA, 304 bp, Glycine max
gctgttgatgatgaacacccttaatcaaatacaggggacgctttcaaataaaaagggtttttgccaccatattccattttcttcacggtggttgttacttgttattgctgtgcgaaggtgaaaaaaggaagaacattggaggaagcgacggcaaagtgttgctggatggaagtggaggataagctgatgaggctgcaatctcttctattcggcgcatagcgcgctctagagaacaacgactttttctggggttacatgctcgcgcttcgtctcctcggattcctcgacgtgaattcccactcca

SEQ ID NO: 108956 - DNA, 404 bp, Glycine max
cgtttttgtgcgtgggcattgcttccgcgatcagcttcttcgttggttgtgttagggtttccgaagtttcactttcccttcgtttcttctcactcaccacatttcttcatcgcaatgcgtttccgagaccgataattgacactattcaacgcaaagtcgcagttccatcatagttttgtttcgcccaactcgcgaaatcgaaagctttatctacacggcacgacgcgttgttcctttgtgagaagctggagatggcgagaaaaactagtaactgtgccatatgcgagaattctaatcaagcttccatttgttccatctgtgtcaactacaggttgaatgagtataatacttcattaaagttactgaaagaccgtcgagattcgttgtactcaaaattgagcgaa

SEQ ID NO: 108957 - DNA, 447 bp, Glycine max
cagttctgctcctgctgttgtccatgggcaggagcagggtcttagtgacccagttcagttgatgagaatgtttgcagaaagggctcaaaagcaacacacttcttccaatcattctcttgttgatactccgccagtgacactatcaggtccatctggacagagaaatgactcgggcaatgcttcagcagcagctgcccatgcatggatgtctgtcggggcaggagggtttaaacaaggacccaacaattctagttcacccaaaaatcatatatctgcagattctttgtacaactcaacaagagaattgcatcagcatatttcaagaattcggggggagtttccctctggtggaatgcctttccaaccatttcaagcaggcgctgtttcacagtttcccaaccggcctatggttttccctcagttagcatctgctgaccaatctagatt

SEQ ID NO: 108958 - DNA, 427 bp, Glycine max
actctgcttaaaaagaagacttgtgagtctgaagcttcctatcaatccttttatcttatataagttccataagatgagtttgtgaagcatgctcttgtcagttccaattactttgttatttctaatgcactgtgattccaaatactttttaattgacagctgtgtctagtcagtaaacggaaaataatttgctattctttctagtttaaagcacagtagtcaatagtgaatagcagtgtggagcagccggcctaaaaaacactatagtggatagcggtcgtcccgctattttaaaccctgaatagatatgatattacacaatgtatatatgctgaaaatgaacagagaagaaaaagatgggttttcactcttcataaatgctggagattggctgggaaactcaccaggaaaaagatgggtcactgat

SEQ ID NO: 108959 - DNA, 199 bp, Glycine max
ctttgggggcgaaaaaggggggctttttcgatttgcacggggttcaacagagaacaacaccatttgtggattgctgtaaactgcattatttggctgttagctaatggacaagggggtgccacctagcctcttcgtcaatgacggttctttcatggagaggttcaagcaacttcagcatgagcaggagaaagggaagaat

SEQ ID NO: 108960 - DNA, 491 bp, Glycine max
  unsure (1)..(491): unsure at all n locations
tttctttgcgtccggcacaacagacctcctngggggggcttcgttttgacgcggggggcattccaccgctcgcatactcgggccgggtccagctcaaggcgctgctggaccggcccgagtcagtggtgggacgacacgtgatcgttggtggatgggtgaagtctgctaaggaggtcaagaagaaggcggcggcgcctccatcatttgcgacggcgacggaagaaaccaccgacgccggggaaggagggaagggcaaggacgtgtcgtgcgtggagattctgcagtcgaggataccgctgcttcggagcttattggatgtgttcggaggaggcggttacgtgcagcgcaagaaacgtgagaatgtaattgtgccgaatcataaggttttgcctcccaaagcttctacggcgtatctgcttctaacggatgggtcgtgcgttccaagccttcaggttgttgttgattcttcagtagccacccctagcagactt

SEQ ID NO: 108961 - DNA, 482 bp, Glycine max
gtgtaaatcaagttgttaaagcagcctcaagggtggctttgacaaatggtgttgggtctagttcccagacatttggaaatgtagctgtatcgttcctgttgtaccaagagcagaacaagggatgtggtttctttatccatgtcagatgtgatttagtgtccttctcatttcaaatatatttatttttaaccccttatggtgatctatcttagattgggaaaagaattaatttctccatttttatccttggttaaacctatatgtcttctcatgctcatcaagtaagaaggattttaatcagtagtgtccccattattgctctctaattgattattgagttgtgggaaccaaatgtgtaaatcagttgctcaagattaacacttagtgttgtgacttcaggaggcggtcacattacaccagaggtgcagagattagttgtccatttgtgttcttcaaattttcaactgacaccaacagcagtc

SEQ ID NO: 108962 - DNA, 536 bp, Glycine max
gtttgagtgccagttctgccataaggtgttgctgggaaggcgtcgctacaatgggcatgtggggatccatgttaggaattatgtgaggaaagttgaagatttgccgggtcaggcaaatgtccaggggacagatgacaagtctcctgtcagggggcaggatgtgcctttaaggatatcaaagatggatgccctcattgaaattgctcaaaactctattatggaggattctgtcactgaaccccatagttcagctaaactgaataggattcctgcttcagatattgctgttggttacatagatcaagacagaaactctgagtctcctatcagtgaacagaaaatggaagatagcatgactggaaataatgtggatcatgatttggatgaagaattagtagaggaaattgatgatgataaccatgtgattaatgtaaagatggttacttttctggataacgtgggtttgttatctgtaaataagcaggatgttaatgtacctgagacttctaaggtaaaagatgatgtgccattgacta

SEQ ID NO: 108963 - DNA, 416 bp, Glycine max
aatttaatgtacgcatctctcttttctttaattgggggggcttgttatataagttatgagggtaacctatttttgcagcaggttgtgacgccgccgtctgttgtggcggtgatacagtataattattaagagacagggtgagaacaacgatggatatgtgtaacgtagtgcatgcgttaaagcccattctgctaatggtgctggtgcaggttgcaaatgcttgggtcaatgttctctacaagctcgcgcttaacgatggcatgaacttgagtatcattgttgcttaccgttatgtttttgcaactgctttcattgctccacttgctttcattgttgaaaggttcttctttgcattatcattattattattattattattattattagccttctggtcttggcttggttttacttta

SEQ ID NO: 108964 - DNA, 454 bp, Glycine max
ttttatatcagctgctctttatgttgattaattgtacttaatagggttaaaaaataacttttattgataggagactatgtgtgtttgaatgtaaccagttatattcattcattttaatttttctgttttttttaaacacattgtaattttacttattagtttttgaatttacagaatgctcctttagattttggtactgatgacttttatattgcaagaaagagtagcatagaatcccatctgcagcaaattcgtgatggcatggctgaggagtttcttattaagtcatgggaaacacatattggaacaacatgtagaggagttaattggggctgccattctttagatgagcttcgcgctgatgtttcttgtgttgggggcacttgcttggcatctctctgcaaacttctggctcaagactatcggagctgatctagtggaatgccggatttgc

SEQ ID NO: 108965 - DNA, 367 bp, Glycine max
tgcttgattgtgtagttaatttggcacgcatggctgtggtttcatatgaaaaccaccaggataaattcactaatggagaactactgaaaggttatgtgtcttcattgcttatggatcccatgtgccttgaactacaccagtaggagaagctatttcacatataaatgtgtaacacatcttatatcctgctatacgttcgagaagatgtattaccatagtgttatgtactagcaagcataaatagatatgaaaaagtgaactgctgttaggaaagttgatttgtcctacatgatgttccatgtgtgagttgagaaaaatgttgtttgtatgttgttgtttgctcaatgctcaatgtgctattggatac

SEQ ID NO: 108966 - DNA, 435 bp, Glycine max
ctctcaaacacaaaaaaacaaagatcattattccttggattttcaacgctattatggtatttgtggtatcttctatctgattcagcatcatggttcagctaatgaggtctgatacggataatcactgtctgaaaaaggagaagttggaggttcaagatgaaatcccccctcttcacactcacaagcgacccaaattggaatctacccctaagcagtgtggtgcaagcgatgaatccatttcaatcccaccagcttcatacaatcccttggatgagccaagccctttgggtttgcgtctcaggaagagtccctcccttttggatttgattcagatgaggctctcgcaacaagaggaatccaaaaagaaagatcaaaaggcttctccttcttcttctgttgctgctgctgctgctgctgctgctgattctaaactta

SEQ ID NO: 108967 - DNA, 470 bp, Glycine max
ttttattagtgatacataatgagaaataccatgcgctcataagatatttatttgaaagaatttgccaaaggaaataatttttaaaaggtagacattggaggtgcatctcgcaacctcatcattgtcgaattaagatgagaatggaaattagaaacaattgtgatgcgaccgctacaaaggtcgttggaattctacaattgatgaaaagttctgactgtgaaggagataaggataaaaatatgtgcccattagaacacactggttttcactctgccattgaagattagaggagccagaaaaccaaacaaaaaagaagaaggatttgaaaaaaaaaaggtgccaaaagcaatgatagggtaaaaattgaaaggtgttgattcaagtagaattagaatattaaagttacaggaaaagaatgcttgggggaagagagtgtggcctaaggacatagtcgtgcatgagataaggat

SEQ ID NO: 108968 - DNA, 287 bp, Glycine max
aggcaactgtcacaccccattggctgaaatgatgatgaccacaacgaagacgaggtacaaacattgtggaaaggggaatataggacagaaaaagtttctggtggaaaacacaaaaagatgccttcaaatgattccttggcaaaccactacaagagttgcattcaatcagatgatactgaaaaaaaaaaaaagatcaaaaagacaagggaaaagctaacacacacacacacactattgtaaattaacggggattgatgcactcctcccaagactttccaaagatttga

SEQ ID NO: 108969 - DNA, 192 bp, Glycine max
aatagaggagctgaaatgtgctgttttgccgtggcaaacagcaagattggtgagaagtttttctcacaaatgatatttttttaaaaaggaacaagcttattgatgcccaaaaacaaataactcattaaatttctgtgtaactttttatcccgtagctgacaagtaaacatataatattatccctattttgct

SEQ ID NO: 108970 - DNA, 197 bp, Glycine max
acaacctcggacatgctcagttgaggactgttccataaaaagggagttgaaatagtatttgaaggcatctggtttcatcaagagagatagcacacgcgcgcgcacgcgtcagagatgagttagatcagcaactggagttctgtaagcagctctgatctcatagatgccaagcttgaagagcatcagttgtgtggatc

SEQ ID NO: 108971 - DNA, 403 bp, Glycine max
tcctcgcgtccgcccacgcgtccgctggaaaaccatttaaatcaaaaggatggcaaaagggattcctcagaagctttgggaaatgaaaatctcatgaccaaatcaaatgtgaattacacttccattgagaagctgcttagcaataataggtttgctagtcagctggtggaatcaacaccaaagaacaaacctatccatttcaagtgtgatccttctaaatccgattctgcttggaaatggttggaaaggaggatgtcagtatcatcaaaagatattgcagagtgcaaagaaattagttctctgatagagcactcaagggaaagcaaagatagcactcccatgttttaattcgaaatgggtattacatctgaaccttttccccaagcagttgactcgaagctca

SEQ ID NO: 108972 - DNA, 342 bp, Glycine max
tttcttctgcgtccgggaaatccgcgaccccgtttcccgccacaaactctctttcctccccttcaccatccaaaccatggaaccctcctccgaatccatcaacaaagttgttaaatttgctagggctaccggtgacctacaaactctttctgatgttgatatcaagctcatagctttgacttatactttggagggtcaaattcatgggacaaaacatatcagggatgcccctcctcctgtgcaaatggtcaatgtgaagaggttgcctgagaaggacttgcctggatggggttctaacgtgcccaatttggatgagtgggaggcgttggaacatgccgagga

SEQ ID NO: 108973 - DNA, 476 bp, Glycine max
  unsure (1)..(476): unsure at all n locations
tgttacaacaacacgttgaaaatcgaggattattccaagacccatttccccaggtcgattttctcacgtgccttcaaacctattcccctcaagatggattctcgttgcattgatgacaacaaagaagacaatgaaatgaagtctgctgaaggatttgaagatatatttggagatccagaagttctgcctcgtgttggagaggaataccaggcagaaattccttcactaattacaacaccttatctttctcagcttgtgaagaagacaagagattcagaaatcactgtcatcgagcaagagtctatgtcactaggattgcccattcctcttaagtgggcacattgcaaatttgaaggtagttgtggttgtgggctttcagaatctttcacaagtgaagcggngccaattatttccgagaatgaatgtccagaagttgaagtgacacttcagactgtttacatggtggagagaaaaat

SEQ ID NO: 108974 - DNA, 439 bp, Glycine max
ttctgaactcgattcgattcgctattgccggaaaatgagtcctccggcaagtgtccggtgatgatcgctccctcgagaggttgttgaggttatcgttgttgttcttcgaagtcatggtttcgatctgaggtgctgtcagtgctcacagcgcgacgctgttgagttgaaatttcgctggttttgagttgctttgtgactaattttttttctcggcaaccaaacaggaggattcaaaatttgcactgattaattagtaaagttttggcgctctcgagttcgttttgtagcatcatcatcatcaccataccttgttcagattctgctcactttcaccacaacggctttactatttaccgcgtttcgttttcgtgtcaccgcaaataatgaaaggaggtgttccctgtatccactcctcgtcagggaagatctgaagcagtgc

SEQ ID NO: 108975 - DNA, 437 bp, Glycine max
tcttccaaaagaaatgcgttcgtgaccatgccatgtctgctactaaatgcgctctctctctctctacttttctatttaaaacccttccgtttctctattcctctttcagaagaaacctcaaaaacaaacctctcttctctttctctctctctctctctccgcaaattgctgaacctcttccgtcctcacttcaacgcagaagcgttcgtactttctagaacttggcgtcattcagattgcccactctctacgtacccgcattgtctgacttataagccctttgcccctaagtaacccagctggaaattgacacactaagccagaattgtctgtttgctttcagcgtccgctgatttccgaggcgtctccttagctggccttttgaacttgttcctgggaggaagtttggctacttactacgatattgatattcaacg

SEQ ID NO: 108976 - DNA, 427 bp, Glycine max
tcttcacgcgtccggatacaatcatctatgagaaagactaacttatgaacctattgacattatcattagcaacttttctgaagccaacaactacttgtcttatatcctgcctttgctactagcttatcttccatcatcattttaaaaaggatataggaaacgagaggtgaaaagcaggttatgttgggtaatttgcactttttctagtattgtaatattgaaagtaaatagaaaaaagacttgtagcttcaacttcatattttgacctgggattaacaggaagcatttcatctgctgatgggcgtgtcaaaaggtcaacaacttcctctaagatgaaagatgaatcatctggaactaatgaagatggacatgaagaaaactccagggttcgccttcaacgtgttctagataatcgtaaagctatgct

SEQ ID NO: 108977 - DNA, 256 bp, Glycine max
gtggaatggagacatggcttaacacttgatacactatcaccttattgaaagggctatactagtaggtccgcaatcctaggtggatgtgggaaaaaaatgtatgttcatatttgtaaaacgtgatgcgatccaactcataactttaaggcatcctagcggttacttaaaattctaagctatagttataaaaatctcgtccctgttattgctgcttgtcagcctctatttttatttccggccctggcattcttcacaa

SEQ ID NO: 108978 - DNA, 428 bp, Glycine max
ctctctctctcggaagctccaccagctgttgaagactttaagttgttagctgttgacaatttgaaaacgagaaggcagtgaacaaactttgagttcttctctcagtagttcttctcttcaaagtcacaaaattctgttttagttatggccaatgatccattttttgaagctcaccacagaacaagacaacaacaacaccaatgcatgatgatgatacaacaaccaaacaatgatgatgatgttgtcccagaacacacatgtgcacaacaacaacaacaagagcaacaaaaccaatctccaaaattggctgcttcttccacttcccaaaatgctacacctgtgctacctgcttttgttgccttgctgctccttgttacttcaattgccccagcagcactctgccaccctttgcaaggtagtaaccacac

SEQ ID NO: 108979 - DNA, 401 bp, Glycine max
cgaccataatgtagaaaattctgagtctcagcctgacaaggatctctccagttcccaagcagaagtactccctgaatctgaaacccaagcttctagtggtgatgcaaatgaagggacattgcccaaatatgaattggacaacgcagaagaacctactaacagtgagtcactgggtaacaaccaatcaagcaatgatgagggcccacacagcaatcagcatgttgagtctgaagcaccactcaacaatccatcagcaagctctgaagctccagctgatgataatgttgttagttctgaagctacccttgagcagaaacctgcgtctgaggcaccaccaagcaaccagctgctcaattctgagacacttccaaataatggtgtgctacattctgaacatcagt

SEQ ID NO: 108980 - DNA, 424 bp, Glycine max
gagaagtttcatcttctgtctctccgtgcccctccctttcgttctcccacctccactgctgctgcaagccccttctctctttccaattttattcatgtttttggctatttgggaattgttgtgtttgactatttaattcactttatgggctgctattggcatcatgacattgtgagagcaagtgcacttcctcatcacaacggaaaacgaaagagaaaaggagatttgagattatttaaatatccttttcataaatcttgtttatcttctttagtaataaaagaatgactacttctcccatgcgtcaccttcacgattttctccaaatttcattttcaaatttaataggctaggttacggcgacgttaggttgcaggcctcataggtcacgttgctgaagctcatcttcaaagacccatgttga

SEQ ID NO: 108981 - DNA, 395 bp, Glycine max
gttttccttattttgcttgttagattcggggaggatcaaatttcgtgttgagtggttgtggttgtggggtttcaaaaacttattggggattttaaattgggttttctataatttttgtatccattttgcctttagctttctttgggtaccattgcatataaggtaataggaaaaagtttccatgtttattgtgtttaaaacattttcctgcggaaaaatcggttgattcagatggtgttaatactggtaagtttcagattccaattggttcaattgtaatagggcttcttagtaaaaggggcttcgtggttaagcttctattttgcctaattgcgtctttgttttaccctgtctttctaaatgggcaacagctctgtgctgatgtgttgattgat

SEQ ID NO: 108982 - DNA, 363 bp, Glycine max
ggcatgcggctgctgctattggtgacttaatttttatttatggtggtttacgtggtggtgtcttgctggatgacctacttgttgctgaagatcttgctgctgctgaaacaactgctgcttcacatgctgctgcagcagcagcagcatctaatgtacaggccggacggctacctggacggtatggatttattgatgataggacaaggcaaaccatgcctgaaacagatcctgatggttcagtagttttgggaaatccagttgccccccctgtaaatggcgacatgtatactgatatcagcactgaaaatgccttgctcccgggatctaggcgaacgagcaaaggagttgagtatctagttgaag

SEQ ID NO: 108983 - DNA, 420 bp, Glycine max
tttagttgattccagacatgggtgtttttataccccaaaaccatgctctgatgaaacaatttaaaaattgggaagtgctttcttgatagatcctaatacttttttttaggatgtttagcagcacagttttcgtgttgaaaaatgatctgcatttgagccacatcagctgcaattttctataatatcaaaggatcgtggagaaaccacaatgacaaccacactttaaatccttgatatatatatatcaggagcaacttatgtaatatgaaagaagtttatcttgaccatttaatcttgcttgatcaaaaatcaaaattacttcatttcttctcttatgctcccactggatatgttccatctcaatctacattgtatatatagaaaccaatactcttctctttgtgctactctatgtctatt

SEQ ID NO: 108984 - DNA, 411 bp, Glycine max
ccgaaggaaagcgtattcagttttgaggttatttactcccaccgatgactgatcatcattaacacctttttctttcttcaattatcccaaacctcttcttcttcttcttctttccctatcacaaaaacgcgtcaacaaaacacaaaaaccctattatcaccacacacttccctttcttggatctgtagatctaacgctgttgcatcacataaccgttcctctgcaacctagtgctgttttcactgaaattcaacgcttgaatttcttggattttagtgtttggactttgatttgaaattgattggtaacaatagaatatgtgtgtttattattagttatttagttatataatactaataggtgagggagggtttgtggggggaggggttggagcatccatttgtggatgtg

SEQ ID NO: 108985 - DNA, 408 bp, Glycine max
tccacccaccaaccccaactacctcttcctcaagggaacaaagaggttcatagacagcgacagcctctgaatctgttgtctcctgattctggttcatccagtggtggggttgcagacaaggattcattctcatctaaattcgggtggagatctacgaagcagctgtttggaactccgattaagaagttattagctgaagagatgtcaccgagagctgaatccaaaagaagatcacctggtgtgatcgccaaattaatggggcttgatgggctgccgttccagcagcctaccaataagcagcataataagggtttgtctgtaaaccaacagaagacagcacaattagaaaaaacacgcagcaaaggagtgctatatagtggtcaatcttctaggggatgctcaaaggat

SEQ ID NO: 108986 - DNA, 290 bp, Glycine max
catcagttctgatatctgtaagggatgccacataaacattagtttccttctttgtgccagattattgcatcttgagtgtaataggacttgaaatgtgtggacgaaatttgtcagcagaaatccccgtaaaacgaagggaatataagaaaataagttaaattccttaaaatctttgttatgcatggctctgttccagaataggtagctataatgcttgaggaaatatttttctgtggtgggatttgtgggtgaagtgtaggattgattgttaggtgtaatacaattagggg

SEQ ID NO: 108987 - DNA, 327 bp, Glycine max
tgtttcggacttttgactcggagaactatcttgccaccacaatttcccggcaattcctttatttgacttcactatccattccgattccctacctcattttttttaatattttatttcctttgcttttcacttttcactcattcctcttctcgctatattcatcaataatcactacaagagagatgcatcgccggtaacctaaacaacctccacggcgaccgaagcaatgatcacgcaaccaccagacgctgcccccgccgtcgcacccaactccggcgaaggaggagagaagaaaagcataaacgctgagctctggcaagcttgtgc

SEQ ID NO: 108988 - DNA, 236 bp, Glycine max
ctttgcactgccagtctaatatgctgaaaagtgaaaacctgagatctattgaagcaataggttgggaaataccttatctctatgaaaagcaatatgttaaaagatacacgctgcttgtttccaaaagagaaaaaaaaggtacttgtggcttggattgaaattgatagagatatctgagaacaagtgtgagatgtcttatgttggtacttggtagatgatcactgttacattatcta

SEQ ID NO: 108989 - DNA, 126 bp, Glycine max
tgcccattttattggaggcttcatgcggagctatcataatttaagagatgcacgattagtacataactatgtgtgctaggtgaacgtttggctctggcatcttaaaagggacataaagcaaaccat

SEQ ID NO: 108990 - DNA, 405 bp, Glycine max
  unsure (1)..(405): unsure at all n locations
tcttctgtttctccttctctttgacacatgtagatacatgatactaatgatgagattcaaaataacttgattttaatggcttaagcactattttctgttatattattttttttagttgtaggctaccttagaagagtagtataaattattttttcaatcaaatagattgcatcagttgatcggagtatagtaaatatggtgtgcaatagtgctaaggtaaaagcttggagttgcaatagtactaaggtttctggtttttagttactccttcatgccgtgnacagttaacttggggtcctgtctttatgataagtttaatgtgctaagctgtttcaattttggtatgtgtaaaaagatattcatgaactgttgattaataggagcgattcaacacttatggatata

SEQ ID NO: 108991 - DNA, 230 bp, Glycine max
tctgggacgcgtgggtgggcgtggaagcccaaatgggcctttcaccccaaagacactcttgtcacgttacgctattctaggcgtaccaatacccaaaacgacaccgttattacctactgcgacaccagttactgcgaccgtgagaaagacgcaagtgggagccctgtggtgaccgaagacaaaacgatgcatctgcggaagccggttgaggaaaaagaccgagggtgggc

SEQ ID NO: 108992 - DNA, 486 bp, Glycine max
tttatgggttacttgctgtggggctgttcaaatctttaatttttctttgccaaggtgttctcgtgactgaactgttaagctctctaatctatttctttctccccttgataaattaaaagatgcaaaagttgtgtatgtcttcttctgctgattttttaacatgaaaatcttgaggtttttttaaattctaatgttccttgcataagtataacatggctaaccggtttttacttttaagtcactttggtataatgactttttgttaggtaagtaaaatctatttcttaaaattccttcatttgcctccattatttggcatctggtcagaatatcttgataaaagtagtggttttacagaatatacttattttgatccagtggcatgaagtgtttgtaattattctgcgttggtaaaggaactgatatttaaagtgcttgtagttattgtggagtttatttttttgaagtcatggaatgtactaataa

SEQ ID NO: 108993 - DNA, 421 bp, Glycine max
ctctcgcgtccgctctctctcgctcgctaccgcgaactcgatcggcatcggcacccacccgaggggaaacgcgattcccttttcccttcgcaactccttcttcaggattccaattccatccctatatgctttctttcttattttcaatttagggtttctctcttatttcatcttcttccttttcgtttcgcacgcaaattctttcgttcttctccttttccctccttatcttatcttcttttccccttcccctttgaatcttcagacctatcggttgttgacgagaccaaaaaacaaaaacaaaaaaagaagagagagtagggatttcgatttgtaattttatttttgttgttctgtggatatattcgattctattttccgtcctctgattatattctagctgttgtttttagggaaatta

SEQ ID NO: 108994 - DNA, 311 bp, Glycine max
gtcactcgtccggaaaaaatgtaaatgaaatgatactgggaagatagcgtataatacatggcgcgaaaccctagatgatagttagttccaaaagacaagggtatactattacgatgagatgttctaccccacactaaagtagagtcagtgaggctggttgagttcatgtgaagaaaactgcggagtgtctaggtggtgcaatcggggatggggagatggaggaaacttatcttattttgatttcagcatgacttatgtggaagcaggaatgatgcgttcccatcttgtaaatgtatccttgcttgttggtg

SEQ ID NO: 108995 - DNA, 458 bp, Glycine max
tgctaccaccaccaaaccaaaccaactcattttgttcttctctaattcccttttttttttatcatggaataaggaaaggagaaacagacaaactataccaattccccccaaagccttgtctctcttccaaatctacaatcaaatcttcaaacaccttttcatccaatccttaaaaatcgttacaaggaattatcaaaatactaaatttctcaacatatctatctaagaaggttttggacacttcactaacatcttttgatgatttccacttttacatcttatggtgtcagtatttcttaataggcatttgatttctagatcttgtgacttgggctcagttacgtagatgagatggtgtagatagggaaactaggcttttccatattgtcattgacttttatttaatgaattatttgttggtcagttgtgtatgagactattgaagggatgatggtatc

SEQ ID NO: 108996 - DNA, 312 bp, Glycine max
tctctttggttttcttcttagatagataagccagcgactgaatccgatggcgaatgagggaagcgacattgacgaagtgaactatgcgttggatggcgtgggagaagaagaagaggacgaaaatgcagcacaggaggaggatgacaatgacatggaagaagatgaagaggaatatactttcaggttcaaaaccgggatgaatcctttggactttgttgatgataatgatgattctggcattcaaccctaccagcggttcgtgcgtcttgaacgggaagcccttgctgataaaaagcgaaaagcacctgaaca

SEQ ID NO: 108997 - DNA, 494 bp, Glycine max
tccacgcgtccgcggacgcgtgggagaaggcagaactcttggagaagttgatgaaaaccagagactctttatcagctccactaaccaagacacttgggctgtctataagctttttcaaaattaaacaattattgctaggggacatgtccaagtcttctgcaagtgatcttgaagtctcttgtgttcaaatgtttgaaatgtattgcaaaaaccttccgctttcaaaagatatggatccacaagagagcatgcatggtgaggagctgctttcaatgatatgtaatattttggtccagttattctggcgtacccagaatgttggctatttggtagaggcaattatggttttggagttcggcttggcaatacaaagatatgtgtcacaatacaagatcttgctgctgcatttgtatagccactgtggtgctctatcagtggcacatgaatggtataagtccctggaagtcaagaatattttgatggaaagtattttg

SEQ ID NO: 108998 - DNA, 154 bp, Glycine max
ttcacgcgttcgtccacgcggacggccacgcgtccggtccagtggcttgggaagtggaattggttcattgacagtgagagctaggtgggtatgagggggcgtgatgcacagtaaaatgagatgatggtgctgcgttatatgtgaaacggagatc

SEQ ID NO: 108999 - DNA, 461 bp, Glycine max
tctgtagactctccaaacagaagtacgtactgcgcggtcgtggaagcatccgaatccgttgaataggaagcctttgatccactttctgagagcactgaatcatagcaccagcacctgaatggagtcatttgaatgggaactcgtagagttatgcattgaatcggagcatgtttaggatatcactacaaggcaagtgaatgctgagataaaaaaaaaaaaaacttcaacttcttatgttccaactgctagctagttctggacgaatatcataggatataacatgtgttggctttgatcacactataatgatgggcacctattgcaataacctactgtgcaacttttatcatccaaactactcaataaccaatgatgttaccaaattttgtcgagttctgaccagaggaaactcattatgccaaaaccccgtttattttggtttgcgtaaacaccgttttgat

SEQ ID NO: 109000 - DNA, 302 bp, Glycine max
tgtcctaccacgcgtccgcggacgcgtgggtggcccacttgttcgtagtaagtaaattccactccatatgttatgaagttaagagaacactcagaatgaataatattgtcttagttaatctcagttaagttcctaatggtatgcgattgaatcatcttgcaaaaatttagtatcaggacatttttttttctaatattatcacgtaaaattatttatatttatttattcattgttacaaacttcaattttaataaagataaagacgaaaaaattccaataatttgtatgccaaacaaaatgga

SEQ ID NO: 109001 - DNA, 391 bp, Glycine max
tttggaggttgaatagaagtggtttggtgtttgcgcgttcacttgtctcccctcccctcctgcaattacccaagcgatctctctctctctctctttgttacctaatctatcatatcatgaaacgctcaaacgacgacgtcgccgcccccgtctcaaccgccaagccagtgttcttaaccaaagcccaacgcgagcaattggctctccagcgccgccacgaagacgtcgccgaccagaagcgccgccaggaacagctcctctcccgcaaccactcctccgaccgcgacagagacagagaaagggacagagaccaccgagaccgggaccgtgatcgtgaccgagaccgggacagggacagagaacgcgagcgcgagagggcacgcgatcggga

SEQ ID NO: 109002 - DNA, 440 bp, Glycine max
ttccacgcgtccgggggaaacttgaagtgccatcggataagtggtggagtttgtttatttgattgattttgcaaatcaattgaatgattggatccccaatcaccccacaaggtattcgtatgtatactccgttgccttacttcattctatatggaacttcctcaatgattttggaaaatatatgtcttcaatcaatcattctgaaagggtctaacccaaaagtttttatcattttggaaatgaaaaatggaaataaatttgtttagtatttcatttctaaaagggtcttcttgttccattagatcctactattactagttgttattctttatgttttaacaatattgtttttttttttcttttttgaaaggcaaatctaaactttgcattaatgatgtaaatgatagtttaacaatattgttgtgaaactgtgagcagta

SEQ ID NO: 109003 - DNA, 232 bp, Glycine max
gccacacctacaccaacccatgataaaaataaaagactgctcaattcctgttccctcaccgtttctgaacacaccttgtcccacactccccatcatgtcccaacaagggctgctcttaaaagccccacccttcaaccacagtttcaatcttgagcctttgcaaaccatgtagtgagggaatccccatctggatctggcttcaatgcccccataagaaaaggggtgttggctg

SEQ ID NO: 109004 - DNA, 446 bp, Glycine max
ttttccacgcgtccgcccacgcgtccgattctttcttgctcacacttgcgataccgacttcaacacaagaacaagaaccatctgttactttgcgttgcgatatctctctttttctctctttctgaaactcaatttatcaccaaaattctaggattttgtattgactgcaccggtgttggtgttggtgttgcgagttaggttattagaagattcacagagaatttctgcatctgcttttgttttattgcattaaaggaaatggagttgcgaaaatccttcatctgccactgggttttcctttttgtcatcgtctttgttcaagtagtcaatggtttttatctccccggaagctatatgcacacttactcaaataaagatctcatatacgctaaagttaattcgctgacttcgattgaaaccgagcttccctacagctactatgacct

SEQ ID NO: 109005 - DNA, 432 bp, Glycine max
tcttccacgcgtccggtgaaattggtgattatgatgagtatgagaagggtgagatggatgagcttgcttgtaggactttggaacgtcggggttgccctcatgggcgccttcctcatcttgctcactttccgcctctgtcatgcctccttcttgcttcccttcggcctggtttccttcgccgctttgcttagggttctgctcatgattcttaccgcttccgcccaacaagccgctgccaccctcatccttcaacactcctcctccgatctccttatacgcctccgccgaagggccatgtataagaaatggctctgcttgagtcgatgttccgctgtcctcatcgtgcttcaatttctctctgctgcttaccttgtcctcacctcttcccaccatttctccacctctcattctaatcaccactgtcttttagaa

SEQ ID NO: 109006 - DNA, 173 bp, Glycine max
tgtacacgcgttcgctcacgcgtccgcccaagtgtattatcattagtctttagagagagtttgtgtgtgttattgtgtgtcaccttggtgcatacaacacaagatggaagaccaaaatggtagtggtaagttgaaccactggctgctcaaggtgaagccttaccttgctatat

SEQ ID NO: 109007 - DNA, 360 bp, Glycine max
  unsure (1)..(360): unsure at all n locations
tcccacgcgtccggttgattccttctgattctgagacagaagaaggaagaaccaataacagaggaatccaagttcctttctagggaccgcgattcctcattcattcattcatatgcttcttcaactttctcctctcttctccctctaactcaggcgcattatatctagctagcactcttggtccaaggaaatagagcgaatgttccactgtggaattaacttattttgaggcagattctttcatctcagggangattatagcacagtgcctgaatcctttttagtgagttggcatcaatcatgttgggtgggatttgtaaaaaaattcgcttccacaatgggaggctgcgcttcaaagcc

SEQ ID NO: 109008 - DNA, 395 bp, Glycine max
tttattatattgtataacacttagtgttttatggccttgtttgcttgttgagtagatccattttactagacttaaattttacaatatcagaattatgtccataattgcgtgtttaaagctgattttcaattgtgccctttactatataatttttcctgctgttgagtatgaaaggcaaatgagaatctgatatcaagataagtaaactcaaattttgagcattattctatttttttttataaatcagaagtcatagttagagtttctcttggaaattcatgctccataagagtctaatgctttatgcaacatgaacagggtggtgaggatgaatttggatatatgcttgccaatatactcaaggaaaataatgtaaacaatgaagggatgcgttt

SEQ ID NO: 109009 - DNA, 431 bp, Glycine max
  unsure (1)..(431): unsure at all n locations
tttggaggctgaagaaagtaatgagaagaaggagccgttgaagtttatgacttggaatgccaacagctttctccttcgagtcaaaaacaactggcccgacttcaccaacctcatcaccacttttgatcctgatctcattgccatacaggaagtgcggatgcctgctgctggtgccaagggcgcgtctaaaattcagggagaaataaaagacgatacaagcgcggccagggaagaaaagaagattttgacacgtgcactttctgctccaccttttgggaacctatcacgtttggtggtctcttgcagattcaaagtatgcagggacagcactactggtgaaaaaatgcttcaagcanaaagtgttgttttcaatcttgataaattagcttcaaagcatgaaccagatgttcgagtaatcctagttgaatttg

SEQ ID NO: 109010 - DNA, 244 bp, Glycine max
gtaaaagatagatagatagaaagagagagatataagtgagttgtttcagtttctgtgtgtgtcagtaagtgcttctcttttgtccattttttcttctttctcgtgtgggaaaatgctggttcggagaagggtgatgagttggagaagggtggcgaaggcccttcaagctctggtagctcatgtcttacttttcaccttcactattacccttgctctcaagcttgatcatgtcattcgtcactca

SEQ ID NO: 109011 - DNA, 301 bp, Glycine max
  unsure (1)..(301): unsure at all n locations
tcggacgcgtgggatatatttgaaatgataaaataagatgaaagaaattaatcttaattatacagtgatttgtgattacagttgtttcacttaattctaatgttgagaataaatgatttcaagttaattatatatttgggttggtaaagataagattttttttatttagtaatttttgaattaaataaatattaacttttaactcctaaattctgtactaaatgagaaattatattttgacatgattaaaacccaactttaaaatttcaggnggtccaaaaataataattctttttattga

SEQ ID NO: 109012 - DNA, 214 bp, Glycine max
aattccacaagccaaaatcatctgcgagacaccaacaaccgcaaccacatattctttatttattggtacagcctttatttatttttttcattgttgattaacatatatttctttttagaagaatcaaaggttgagcagaacctagaatatttaaaaaaagaaattgtttgagaaatagaaggtagtggtagtggagtatgtgtgtgtgttaatt

SEQ ID NO: 109013 - DNA, 326 bp, Glycine max
tcttccgttgacgcgtgggagcatcccaagttttagaatcaatcaaacaaacctcagtaccaagaaccctatgccttgacaaaccctaacgttgatttaaatcgtttgttcgcacttcaatctccaagtcataaatacactcttctctccccattcactcgcattggcttttggtagttgaagtctttcattgttgtcaaattcagatcagtcttgaaaactttcattccgccaccagcattctttatcttggtccaaaaccttttaattcactcaggactactcaggcaagtgatagcagctctgggctttgagggctagaatcc

SEQ ID NO: 109014 - DNA, 376 bp, Glycine max
tttccgctccaatgaaatgctgagagggtcccagaaagcagagacagagagcctccgttggagcgtgaacaccaagctctgaagttgaagtgatgtggtgtactcgggaaagcaatcaaagctcagaaaatttaaactaaatagagtgagtgtcagtgaactgcgaacgtgcactattgttattgttgtatttgaagcacggatctggatccgttggaacaagcacacaacacagcataaggaaaggggacactacttctactacagtaccactctcgcgcttgaaggagggaaggatggaagggtctacatagagtaagtgggggcatggtgattgaagccaatataataattgagacttgagagggataaaact

SEQ ID NO: 109015 - DNA, 359 bp, Glycine max
  unsure (1)..(359): unsure at all n locations
tttcccattacgttctctaaaattcactcccaaaccctaaacctcacaacacatagaggttcgcttttggtcagtttctccgccatcgcagtagcacttcacagcttcactaggaagaagctagtccatttgattactgtgatattgncacctcaaccactcacaaaagtctctgaggtccatggggaggtttatcttttatagaaggggggcaaaaccaaggaaatttcagattggtgattgatgggaccgacattcatcttttgctatgggatctaacagcacttggcttaattgattagagcaaatgatatgtatgatggagttgaggatggctatgacagctcatgagatgacat

SEQ ID NO: 109016 - DNA, 364 bp, Glycine max
tttgccgccacaacgcggtttatgttctgctgctttcactcttctgttcaaacttcgaaatccaagtcgcagttgcgaaaccgcaacacaaactgcgatagcgccgccccgcaccggggcgatagcggacgcgacggccgctccttcaatcctccccgcagcagaggtcattgtcgcggcaaggggccgctccgctccggcgcgatacttagatttgcattagcatcaaatgaatgcgaattttgggccagggttggtagtcctagcaggactgtctacagcataagcttttgtccgaagccttttcgtgttaattttgtgatgtatgcactcatttctatgtctaagagtgtgtcggggaatg

SEQ ID NO: 109017 - DNA, 349 bp, Glycine max
tccacgcgtccgatccttcttgttccttggttccaacaaaaacaaaacccctccaaaaccttcatttcccaattatccttccttttcaactcttcaatgacaacaatctgaacccacacctacatggcttcttcttcttcttctcttctcccaaggtcacacattcccacacccctcatctccaaaatcagctcctcccccagaacatggagcctcttcattctcacatacccttcacaccccaaaaacaacaacaacaacaacaacaacaaaagactattcctttcccccaccaatgcagtgtacactcaaagcccctacacccctttcacaccctccaagaccgaac

SEQ ID NO: 109018 - DNA, 128 bp, Glycine max
tgttcttttaatcaaactcaccgttaggtgggcgagacagagaacaaggcaacaaccgcaagcacaaactaattagcgtaatggtgcaagttaccacccttaaattcctcatgcgtggcgccgccacc

SEQ ID NO: 109019 - DNA, 224 bp, Glycine max
gcagaaaaggttgatgtggttgcagttgtagtagtagatagagaccaccaaaattacaatattgcagttgcagatcgtaatttaaaaccatttctctttcatactattcttgtattacttttttaagtgaacctttttgcttgctttattcttcaacctgttctcagtttaccttttttatcttaacattaactgttagcactccctaaactactggcttcgag

SEQ ID NO: 109020 - DNA, 257 bp, Glycine max
ctctcttatagagacggggcggccgtaggtgaggtgaatgttatagtccgtcgccctatgggccggggtcgtactcgtcgtagtcgtccaccgtgtcgtcgtcgtctctccttcagaagaaacctgctacccactcggagcctcttccgatgaaaactctgattacgatcgcccccagtacacctcttacgctgaaccctctgcttatggcgatgaagccctggccactgagtatagcagttactctcgccctaagc

SEQ ID NO: 109021 - DNA, 172 bp, Glycine max
tttcgttcacgcgtccggtccaacatcttgcttaccgggacgatttctgagtcgggtcaatttgatacttcccctgcggcgaagtctcagaacaacttttggactatgtggagttcctctgggtccgtgtggtttggagccggcaaacaatggaaatgcgcaacatatgaag

SEQ ID NO: 109022 - DNA, 290 bp, Glycine max
  unsure (1)..(290): unsure at all n locations
aataacntttaatgaggtgagtaactcctttaactatatataaattaaggggtatatatattattagttgctcacctcatgttgttgctcatctcacgaagaaactcattttagattacttttttcctttcattatgtgtatgctggagcggtggactggtagctacatagattctcgctatgatggggcatatgatcatgaggtcttttctcaggtcggttgtgtgttgtaatttgtaacgagatatccgtaacacaataggatcaaattaaccgtgttttgttgtttc

SEQ ID NO: 109023 - DNA, 145 bp, Glycine max
cccaatagctgagttcgcttttcactctctttccgcacagcagaaataaaaaccccttcttcctcttctccaccatcgttcttcagctgatgacgacgtcttttggaccagccaccacctcagcgccgcttaaggaccacaaagt

SEQ ID NO: 109024 - DNA, 121 bp, Glycine max
cccacgtgatcgctcctctctcctacgtgcccacagttaataatgggttttttaactccatagctcccccttcttcgctgcatccattttcacgattccaatccatttaaaaatagaaagc

SEQ ID NO: 109025 - DNA, 328 bp, Glycine max
ttcattatttcacaactttgggcaaaacagctttactggcattcagttattgccaatagcacgtgacaggctggggaagaagagcggttacacgtttcttgttggtgaaaataatcttacaggaccttttcctacttttttatttgagaaatgtgatgaattagaagcactgcttttaaacgtcagttataataggatatctggtcagattccttccaattttggtggaatatgcagatcattgaaattcttagatgcatctggaaatgaacttgcaggaccgattccccttgatttagggaatttggtctctcttgtatctctgaac

SEQ ID NO: 109026 - DNA, 145 bp, Glycine max
  unsure (1)..(145): unsure at all n locations
ccttatggtaanttatgagcctaattaagttccccacccgccaacctttcctaccacaacctacccttttgaggtcgggttgcttggcactaacgtaacaccaccatgagtttgaattgccttgcctgtggccaaattcttcaaa

SEQ ID NO: 109027 - DNA, 307 bp, Glycine max
  unsure (1)..(307): unsure at all n locations
cccacgtgnccggcggcggcggggtaagaccgttctccgatgcgaattctagaaggaggagatcggtatcggtggttcggtaccaaattagcgattctgagagtgacctggaccgttctcagaattctaaaagtcgttcaaatctgaaaaagactgatgttggaaacaagctaatgcacaaacctgtcgcttcagatcaaagaccagtgctaagaaagtccctaagccagaaggatttaagggcatatgatggttactctagtcattcttcagttctcactgatgatgaaggaacaagtgctcactc

SEQ ID NO: 109028 - DNA, 264 bp, Glycine max
gccactgctagttatgatcacactattcgtttttgggaggccaagagtgtctcgttgctaccgcaccatccaatatcctgattcggtttaccttccttctcatttttttttaatttttttttccaattttgttggtggtatttcaaaatttatatcatttttaggcttctcaaatcaaacctatatctaatactttttctgaccactagatgatgagacacgttatttttaaacatttatatgaaactggaaaacaaagttgaa

SEQ ID NO: 109029 - DNA, 130 bp, Glycine max
cttttgggtaggggaaggaataagttcggacagattggagttggtaacaattttgattgttgctctcccatgctagggaactttccccatgatcagaaagctcaaacgatctcatgcgggtggagacaca

SEQ ID NO: 109030 - DNA, 430 bp, Glycine max
gttgaatttggttgttgttcccaaatccaaatccaaatcctggatcaaagctgaaacatttagcgtcctcaggaaatgctcgtgatctcggttttgcagtccctcacatcgctctgcagattctagatccgtcacagattgcaccaagcagaaagcaaatctgataagaagaagaagaagatgtatatggcatatgggtggcctcaggtcatccctctggagcaaggactgtgtccctctgcacagaagattgtgtacctcaaagtcatcaatcgcacgttgctcgttgtctcccccactcactttgaactctggagcacttcccagcatagagtgagattggggaagtacaagagagattcagattcattgcagagggaaggagaaaacttgcaggccgtgtggagccctgatgccaaattaatcgcta

SEQ ID NO: 109031 - DNA, 224 bp, Glycine max
  unsure (1)..(224): unsure at all n locations
gtgcctaatantccctcagattatgataaactagatccacttcatgcaacctcacaaacaaatattaaaggggcacagaaaaaagctaagtccaaaaaacaccctcaaggtgcacgtggaggccatgttgttgctacccttcatggctctttgactaggttgtgtgacacaaagtggtggaacctatgccaacatggggcaagaataaaaaccaagcagatcaa

SEQ ID NO: 109032 - DNA, 432 bp, Glycine max
atatgcttcctcttcaacccttcttctttccatcatctcccaccactttcacgctgctctggaatttacaacactaactcacataaaaccaaagttaaatgatgaatttcattgtaaattttcaattgaaatctgttgtggaaatttcctttgttcattgagattttttcgaggtgcagaagattttccatttttgaagatatatttctcttcagacgggttttgaaactctgaactttttgcaagtcgtacgtgacaaggacgatcgctacttggccatcgtcgcagacagaagctcagaaatgtttcctacagctttgaacaaagttttagcaggagcagacttaggagatagaaaaatcagctccttttccccttagtttcagaaggaattgattgctcgacgattgctacttttttaaggaacgggtt

SEQ ID NO: 109033 - DNA, 352 bp, Glycine max
ttttatctgtattggaagaaactataataatctgaatgaaatggctaactttttgccggaggagcaagtgatctatcatttctaataagtgtcacaataagaatttctaacgagtggacttatttatgtgtctcccatttgtgtgtcccttttcaaattcagtcctagacctggtcatcaggaacattttctgatgtgcatactttatcaactaagcaaaactctgttttgtcaataacaaaacctgctaaggatgtgatagagcagcagggaaatgatgcagttatgactcatgatgactcgcgaggaagccattcaatatttatgatggaaatttggcctaaagagacac

SEQ ID NO: 109034 - DNA, 202 bp, Glycine max
tttcgtccgcttgtctctctctctctctctctctctccgtatttatatgttcagttctttgctttgacatctttctcaaagaatctcttatcttcttctatttccctttgtctcaacctcgatttcccccctattttctgattaactctctacacgatcttatctaccaataataaaaaattaattcctcaattgattcttt

SEQ ID NO: 109035 - DNA, 190 bp, Glycine max
ctgtcacgtggggtgatatttccccctctcagagactcaagtttggattcctttatctctgcattgaactactagcaggatgcagggagtcaatagttgggtctgaggaaccagctctgcaatatgtctttgaccatgagactcgtcgcactatgcttcatagctactcaaccccattatttaatgcctt

SEQ ID NO: 109036 - DNA, 180 bp, Glycine max
cttagtcaaaagagaatagatgatggttacttgttgcttgtaaagattgctatgaaagcatggcaaatctccgacgcaaaatacatatctgaaactgattgataacctattggaaattgggaaatttgaggaggcacttgacctttcgtgtttgatgatttcacacacatttactccatt

SEQ ID NO: 109037 - DNA, 236 bp, Glycine max
acgcttggctaattgggactactggatatgtgctttatgtagctgccaacttgaaaccaaattggtatacattggttcctgcatctgcgtatcttgggttttgtgcttccataatatgggttggagagggaacatatctcacttttgctgcacgcagccattctacagataacaatttgcatgaaattgcaggaattggtgacttcaatggggaattctgggctgtgtatgcactc

SEQ ID NO: 109038 - DNA, 196 bp, Glycine max
cttacgcgtccgggggaatgatacagacaggcttgcaatttggatcccagatgccaagggttctgggccttctggcagtaacgatcaaatggatgctaaatcaaagggggtttccatggaaacaaatgcaagtgcgccgctgccggggatccaaaaggagaaaatgtggttccgtaaagaggttcaagaaagaatt

SEQ ID NO: 109039 - DNA, 226 bp, Glycine max
gtttattcgttgtacgaaatgtccagaaaatacctctccatcttcttctcggtgcaattatttaccacaaacgagatgaaagaaagaaagaaaaaagggcaagctaaaagaaacaggtatgaatttatgatcttattctgatcctaaatttatgttcggcttcttctttctgacaatgttggaacttcagcattctcggttctgcaactgacactttcagcatagg

SEQ ID NO: 109040 - DNA, 317 bp, Glycine max
cttatacactgtatgaaatacttgctcagtctctggatattaaaatgttgagtccaattgtgaatctagacaaggattctagcacttttgattctaatataatcattaagggggaagaaaaagaactccatggaacctctgaaagctctggaagctcagaacttcttttggagcttcatggaaagagatcagataatcccgaaaagattgaggaattgtctgaaaaatctcttgttagaagtcctgatttgggggctatcatccatgcacctgatcactctgttgagacaaaattatcagaaacatttgataatgac

SEQ ID NO: 109041 - DNA, 274 bp, Glycine max
gatgtagcgaaagcacgagatactgagggaaatagaacatcattagatactactaggaacttagaggattactcttcttgattccgaagttaaatttataggcgtctcttcaagcctagagtcggaacatagcctcgtgcattgcatgctatatttctttcacaaggagctaatccgatggtgcatgctcaatattcaatggatgggaaccatgaaactgatgtacatgattcacgattgagggatctgcctggccgtgatggcagcaaacagc

SEQ ID NO: 109042 - DNA, 394 bp, Glycine max
cgtactcgtgggtgggtttgtgagcctcacgcatctctacttgtctaattcgtactttgaaggggatatttcttcccaaatctctcacctttccaaattagtcttgcttgatctctctggtaatgattcgttaaggtggaacttggaagagattgctccaaaaaggtgaaaatggttggaggtcaactcaataaaaaggtgaaaaggaagacaaggatgagatctaatgaaaatggtagcagaatgaattagttgatatatggcatgactgcagaatgtcttgttccatacctggcatctttgaaaaaaaacttaagggcaagaactttatcacactgcattgcatgggagatctggttcaaagttttgatgtaatatgaatgtgttatatata

SEQ ID NO: 109043 - DNA, 321 bp, Glycine max
acctccacgcgtccggagctttgtagtttgagggtgatgggaggatgtctcagtgtgtgttgctcggcccgaggctgtgctacggatgaaatatgggcgatgaaagaatataaagtggactcgtcctggactaagtccattgttatccctaacaatgggttttccccaatatgcatcaccaaagatggtggaattattggatcaaaggaagtggaagattagagaaacttaatgacaaaggagagctgcttgagcatttcatatatggtggaggtgaatggttgtactctgtcaatctacagtctgctatgtatagagaga

SEQ ID NO: 109044 - DNA, 377 bp, Glycine max
ttgtcatacttgtaactcgcgtagtgcacgggacagcttaaacgacgccgcgctgatcaacgactccttacgtaaacgacgacggtgtcagacaaacggtgccggttggtggtgccgccacgctattacgctaatcgtatccatcaccctcatcaaaacccctcctttctcttaatttagaaaccctaattcagaagaaaaaagtcaccttctccagaatttgcgccctctgcaaggttaccaatggtggttggcggaaggcagaaattctgccatataaacatgccattgtggcctatggcactgttatagcattatgctggcgcactataatggttatttaataacattgggccaatgctgtatgttcaaatcaa

SEQ ID NO: 109045 - DNA, 325 bp, Glycine max
ttatttctcacctggcggtctgcgaaactcggcggatccccagcggttgaagtcgcggtggtgcgaggaatccctccatctggcgacagaaccaagcgactcggacctctcgtgcttcctctccttgaagaagtcctttcgatcccaaggcaatggttcaggcggcatcaaaaccaacccaatagcatgggcagccacttaaaaaacaatacctagggttcaccaccaagcccgcagtcgccgtcgcacacgcgaatcccaacctccagatccaacaaaaataaaaaaacaaaacctagggttcacagagctgaaccacacgacg

SEQ ID NO: 109046 - DNA, 288 bp, Glycine max
tcgttgacgcgtgggtggagcaacactttacatggaaattatcacagttcaaatggcaagatctacccttacaattcatcatacccctgttggccaaaccaaggcagtgtcttcacagattcaagctccatatcttttgctgattcacctgctgcgaaacctgcttatagctccaacaacatagtccctcggttcaggcgccagcaatcatgctccattgagttcaatttcagtgatgtgactcagaaaaagccatcatccacagccttggattctctcaagggcatg

SEQ ID NO: 109047 - DNA, 209 bp, Glycine max
cttcccgtgtctttgtttttcgcacattgaaatcgcataatttggattcaaaatacgcggttcagcgcaggaatgaacgaacaatttatgatgagaagaagagattagagaggtggatattcattaattcgtgtttgtgaatttgaatttgacactggattgaatggagtctcagagtcagagagatcgcaaggcagatgctcttggag

SEQ ID NO: 109048 - DNA, 160 bp, Glycine max
ttcactttccaatacacaccctttctccacctctccaccatccatttctgacgccgcagcccgaacccgcctcttgaactccatccgcaccctccaatccgccgacgccgccgtctccgtctccgtcgacttcttccaccgaatgctaaccccaaacccc

SEQ ID NO: 109049 - DNA, 274 bp, Glycine max
ttgtccaaatgttgactttattgtataggtttttaatcttatatttgaaggactatacttattcaaagacactgtcggagaaacatgtgttgagctacgggaacgatgaaaatggtggaggattggaggtggtaacactcccttgtgggctagtgggaggcgacacccttcaatcttctacacccgttagcggagtagtttgtatcgcacagatcatgcaagatgcaagggcgtacatatcactcaagttcctaaagaaattgctggggaaaat

SEQ ID NO: 109050 - DNA, 209 bp, Glycine max
gaactcaactgtagcatactggcgatgtatggttcacaggcaaaaatcctcaggcttaacttacggtcttccaatgaacttcaaactccttttctctttgctaactcttcaccaggtatagacattgcaaagctaaaaggcagcagattgaagcatcctaccccagtgggtcaccctgaagaagcaggtacttgtgtcacaagaaacat

SEQ ID NO: 109051 - DNA, 255 bp, Glycine max
cacaaacacagacacaaacaaaaacagacattagttctccgttcagatttgcgaagtagccgggaaaaccaaggaattcattcagatctgatgaaatcgaacccaatcatggtgttgcgaaacagatttgactggattgcagtgttccaacgaaggtactcaaccgatgaaggtcgacggtggttgcaaaggactgacggaggggcagtggtggcgcgggtttgacggaggtgcggtggtcgcaaaggattggcg

SEQ ID NO: 109052 - DNA, 68 bp, Glycine max
ttgcatcaaatacaataataatcagccttagagaatgaacatgacactttttcagcggtgttctgaat

SEQ ID NO: 109053 - DNA, 347 bp, Glycine max
ttcaaaccttcatcttctttctccttcccttcttttttctattttttttatttttcctctggcgcttttaacacattgctactaaacaaaccccaactcgaagaaaagaagaacaatctgttccatcacaagctttttctcctgccccaaacggtttcaatttttgttttctggggagatctggttgatccgatccacttggggttggtaaccgcgtaacgacgccgttttgtgtttaggtttttggactcgttttctgaaacctcgtacaaaacatccttggaatcgtttgatgttacaaatggagacgctcgtggttgtggcgcagcataggaaccaatgttaca

SEQ ID NO: 109054 - DNA, 271 bp, Glycine max
acaacattattatgtattggaactaattatgctaattaattggttattaaaaattataaggccatgtttggcgaaaccgatccgcgaccacagttcatgcaatcggagccgagaatgtcgacgacggaggcgctcaccgacgacgagttcacgatgcaaagcagtagcacggtgtcaccgatgagcccttactactacgagcagggaaggttaagcggcgaaggctcgtcaatgacgatgtcaccgtggaaccagacaacgaacttcccat

SEQ ID NO: 109055 - DNA, 364 bp, Glycine max
tggagataaaacggtgtggttcaattgaagaggtagtctctaaggagggaggtgaatcacatgaggaggagataatatttccgcagctcaattgtttgaaacttgaagggttacgaaagctgagaagcttctataaaggaagtttattaagtttcccatcattggaggaattgtcagtaatggagtgcgagtggatggaaacattatgtccaggtaccctaaaagcagacaagttggttcaagttcaacttaacagatactcagatgctatcaaattggaaaatgacctgaactctaccatgcgggaggcatttgggaaaaagttatgggactctggaaagaaatatgttgacctcaaagatag

SEQ ID NO: 109056 - DNA, 430 bp, Glycine max
tgtatttaaagaggctatgggttatgaacagtccagggtggatgattgcctacaagtcacagatgaagagaaacaggatggttattaaactggtaggcaattccaggagtgaagaagtggagaatggggacatgtgtcttactgtatattttttgtctgttgaggttcctgtgtgggtactgttttttgctctcggtgtctcatctgacaaagagattgtagatctcattggttgtggcaatgatgatgtcagaattcagaatatcctctttgcatctgttcgtgatgctgatgagaaatgtggagcatttcgaagagttaggaatgctgttcaatatttagaaaaatgtgtaaaaagtgttcaatttccaccttccgaatctatgcaggagtgccttgaaatgtatgtctttcctggaattagtggttt

SEQ ID NO: 109057 - DNA, 180 bp, Glycine max
cacttcttttatctgtttcacaccgtgtaccaccatatctccaccgcacgcaaccgcgccgtgttgtcgtcacctacctatccactatgctgctgccactgaccaaggcttctgcattttcatacatctccgcactggtttttgagaccaacgaactgaggagaacgcgtggtgtgaagg

SEQ ID NO: 109058 - DNA, 438 bp, Glycine max
aatgtttgcaattttattatgaatttatctttgttggactagactaggagttatctacgattcaattgataaaacctattctctgtacatatatagtggtaatattcgacagaataattcatctgattatgtgtttttatctgtacattgtatgcagaggtagaatgtagggtaatagaagaattttgttctcattttctttgttaaagtgaggaagcaaagctcaccagtaaactaagctttcatgccactcgatttgaataaggattgattgtttgaaagtcaacataaatgacctgtgattatgcatgaaatgataaaatgatcatttgcagaaggttcatatggactgattgatgagtctgaagcaagtatcattcagatttcagtttaattattctaatttagttcctctgggagagaacttctgtcatggga

SEQ ID NO: 109059 - DNA, 303 bp, Glycine max
taatggttagaactcccacagtcgtttccacggtggtgttcctgaaacagtgggggccgttcagttttaattccttttgttggttattctgttgactatgaagcacttgaggaatctacgttagtctcatcacgatcgtgtgttctttattctaggttagtgaggctcttgcacttgcaggccttgagtcttctaatcttattgttggtgttgattttaccaagagtaatgagtggacaggcaagaattcattcaataggcgaagcttgcatcacattgggagaggtctgaacccttatgagc

SEQ ID NO: 109060 - DNA, 344 bp, Glycine max
cctgtttaataatattagctgcaaaatcacacgggggggttctaccacacgacggggaaaaaaacatttatgaatatattcaaatagaggtttaaatacagctttagtctttctagctgataattttatctaaaagagatccaaaattaatcataaccacaatatgacaaacatttatatacaaagaagcacatacccaggctttctgcatcttcattttccacgttcagtgagtgaaactctgattgctaaagtagttggaaccaaccctacatagacagtatattccatttatttccttactacaatatgttaataatattaaaaaataaataaataaccat

SEQ ID NO: 109061 - DNA, 396 bp, Glycine max
aaagttcaagcggctgaaaaaaggcaggagggatattgaggaggagccctctgggctgtctgatgaggaggagcttgttggaagtggtaaagctgggcgaactgctgaggagaagcttaaacgcagtttatttggtgatgatgaaggagctccacttgaagacattgctgaagaggaggagcaaggagaagaggaagaggatgctgacattgaagaagagcttgaaaaccgtggccgggagcaagagaagcttcagaccgagctcaaaaaattgcagaagttgaaggagtttaaacctaccatgaatttgcctgtgttgaaagataatgaagaaaagaaggataagaagaagatggggtgctctgagaagaaacggccttctccaccttacatttt

SEQ ID NO: 109062 - DNA, 379 bp, Glycine max
  unsure (1)..(379): unsure at all n locations
gtttttggtgcaactttctatgctcttcaaattggggtgattttgaagagactaagaacattgaactcagttcctgggaatgtccactaccactgcagtttatgaaactgctgcactgttgaacattttttatgtcaatcttattggtaactggaatttcaatttctccaatgttgacaaatatatcaatttgttttccttactgcattgtaatattttctttttaggcaaatgctaactagtgccattagagcattggtttaactaaaggagaaacttttttattaggatgcgcaaaattacactgccaatgacattntttacactctcctatgatcttcaaaataaatattttcttctttttagttccttattcaat

SEQ ID NO: 109063 - DNA, 292 bp, Glycine max
gcgcagcaggcaggtggctattgaaaagcgctcgcctgctgtgcacgcccgaagctcggtttgcagattcgaccactcaaaccctaacgcttccaacttggaaggccttcgttccagaagatatttagcaaacacaagttgttctaaatcacatcgccggagcttattagggttacgatggatttcgatgagcatgagtatttagagaacgcagctgaaaaccctcaagctaagcacagggctaatggtggggacaaaagtgcgaaacctgaagagagagggcggaatggga

SEQ ID NO: 109064 - DNA, 377 bp, Glycine max
gctttttgaccgcattaatttgggaattgtcaagatcaatgagcaatgcactcatgcactaccatgggtgggtccagtgaccgcaaatgttattggttctaatttgaacaagaacgggtttcgagatggccttctgaggatgttagtgagagaaggaaaagtgaaaggtgatgctctggggaaggtgctggttatggaatcagagtggctggacttgagagatgacattgatgtcgtaggcagggaagttgagagaatgtttgtagatgatttagtgtcagagataatcggtacttagaaattttgtacccgtgatcacattattagctcattaagatagtgtttccagttttttctcttctttcttttcttttttc

SEQ ID NO: 109065 - DNA, 434 bp, Glycine max
ctttttaatgcttttatatctctaacgtgtccatggtaggaaaatcttttgggcataaaggatggatggacaaagcacaggccataacttgtactgaaacttttagttatgaaaaataggagtgccaaggatcaaactattgactacttggtcataaggcttttgtactattttgagaaccaaatcttgctaaaagcttacagccttacactcttaggttagtcacccggaatttcttttatctaactgttcacaatatttctttctcctggtttagttataattttggttccaattgtcttgattttaattcattattaaagctgagttttcttttttataattcagctcttcttattgagggattttttttaagtgtctctatatttggtgctaggaataaaagattgacatatttttagcattgagaacac

SEQ ID NO: 109066 - DNA, 340 bp, Glycine max
ctaatctccaccggggccctaggcatggttatgggtttgaaactgacactccctttgctctcgcatttcctcctcaaccaagcccctcacgtgtggaccttcctcctcacgtgcttcactcccccttacctctacatccttctcaacttcatcgtgctcctcccctccgaccccgtcatctacgccctaccacccgccgcagtccagatcctcgctccggaaaccgccaacatttctgccgttgtacaaacggactacaacgccgccgcctctgagaaatacctctacgaaacgaaaccgactctcagctacgacaccgctactgaaggtaacggctctg

SEQ ID NO: 109067 - DNA, 367 bp, Glycine max
ctattctttaggaattagggaggtaaagacttggcgggtttggtcatacatgtacattatattcgttaattcttcaataggattcttgtgaactaaaattgtagctgtgctattatttttggttttctctgttaacacttggattgtacagacagacaggccctaatgccttatcatacaggcgaaggataactctccgcccatgtcttgtatctgctgatgttgctcactttaaggtctatgaaatgaaatttaaggatactaagaacaattgactgggaatatcggcaacggagaattatcactcgtaaaacagaatatcttagtttctttgattaaaacagtatattctaacctcttaatttac

SEQ ID NO: 109068 - DNA, 393 bp, Glycine max
tttatgcgtgggcgcccccgcatccaccatggcgtgtccaaacacatttttggttctgccgcaaagtgtttgcgtgtgactctatccaacggccacgcttccatcatttctttcaacccgcttgttttccacgctcttcattttcaaaacaaagatcgaagaaaagcgataaatgccgatgccgcgtctggatcgggattagggccctagggtttttgttcgctccattcggttctgcttcggatttcgatcggaaatgtccgtaccttattcaccgacccgaacctccgggtatctcgacgcgctctctcaggcgatccacaagaaacttcagcgggcataggctaattcctcgcagaggcgcaatttgttgcaggagctgtttgcggacat

SEQ ID NO: 109069 - DNA, 150 bp, Glycine max
ccgttttgttcgccaagaagaagccatgaacagaagaacgactttgcttgcacaaacgctagtgttccttttttgactcaacttcttaactctcttactctcctaaataacccacaaaacttcttcttatccatctacttctttacaact

SEQ ID NO: 109070 - DNA, 352 bp, Glycine max
ccacccattccttttcaggtagggtggctctcattcaattatccggggggagttacaaacgatttccaaccctatcctatcccttttccttgtcacgccatttccctaatttcagctttcttcgtttcaatcattcccctttctagttaattgcatattcttatcctaattacgatttttcaaacagagagatatagagagagagagagagttctatttgctgctatttcgcccccaattctatagaaactatgataatgatatagaaagaagaatcaacgtgagttcgctggtttaaaaatgttattcggggtgggggattgattaatgattgccctttgtttccatgtat

SEQ ID NO: 109071 - DNA, 359 bp, Glycine max
ttgcttcagatcgcgagcggccgccctttttttttttttttgctttggcaaggaaggagcattgattaccaatttactggctttagcttatttgtaggatacaactaaaggatccatatctttgaaaatatgactaaaaatcttataataactatgtaagtttttaaaaaatgattgcacgtgaaactgtctagaacaaattagacagggtttaaggtacaatttgctagggagaggaaaggaaaaacaatgtgtcacattcgtgctttacctatatctccaaaagctcttaacggttcaaaattccgagaactatattgatcattctcttttctttaaagctccaccgagcagtggag

SEQ ID NO: 109072 - DNA, 88 bp, Glycine max
tctcttacgcgtgggcggacgcgtgggtgaacatcacataaaaacaatacaataagaaggaactaactttgctcatggttttgtctgc

SEQ ID NO: 109073 - DNA, 420 bp, Glycine max
ccgattgtgagaataatagccccgccgatggtgactcatctttgctgaatggagctttggataatgtttctccaaaaatttcagttccatgttctaacactcagatttgtaatgctaagaaagatcaaaccttcagctctgtggatgttgaagctgctttacctccatctaaacgcctccatcgtgctttagaagccatgtcagccaatgctgctgaagaaggtcaagctcatttggaagcatcctcctccataatgacatcaagtggtatgcgctgtatatctaatggcaagagatgtccgagtatggccattaataatcaagaaggtaattgtttagagccacaaaagttggatacttgcaacattgattcttctcatatcaaagtgtatggtttctcaatcagttcaaatccaatga

SEQ ID NO: 109074 - DNA, 403 bp, Glycine max
ttccttcgcgtccgtatcatcccacaacaacatgcaagaagattttattattaattagtactttagtgagccaaacaggttgatacatctggttgagttttcttcctcacaatttcagctctcaagtctttcatttgttggaagacaatatgtaaattttattttaaatcctcaccaagagagtgagagggatggaggcgtttccaagagaccaacgaggttcgctcgaagtgttcaacccttcttcttcttactccaccgagaagtcggtgaactcgcctgtgcgtgttcaatccacgtggaagacgtggattgacgagttaccggaacaacaacaacaacaacaatgtggtggtactaacgaggtgaccgccacgtcatggatggcgcttaaggactccgc

SEQ ID NO: 109075 - DNA, 346 bp, Glycine max
tttcttcttacattttccatctctttcccgggaaagggttaatactaactagctttgcgtcctttctcgatcaacttgattttttattctatttttgtccgaattgttgagaattttcagaaaattcgattaatgttcttccctctatgaacatttttcgttcgtttctcgtttaactttattgattccggatcacgtctttgtgttcaattacttgacgttgcttgcatttgcaacatttctgttcaattaggtaaaaagatgaatctgaagaacatgaaggttccgaacgttcgaggtggcggggggatctctgcgctgctgaagcttgggattgttggcggaa

SEQ ID NO: 109076 - DNA, 365 bp, Glycine max
ttcatatacgcttcccaaatcccatagaaacacaggcaccatcacatcctccactcactcctcaccgagaaaaaagaaacagacactaatatccgatagatccaatgggaaagaaatctttgaagttgccctctcttttcaaaaccaaagaacccccaagaaatcaacatcatcatcatcatcatcataatcataatcctaatcatccatggcaattcatgccctcttgtggccactcaaagaccctctctttccgaggtggagatgatgacatgttcaagacagttaactctgtgttcttcgacccttcagctgagagcactattgaaactccaaagtcatggttcacaacctcatctgaatct

SEQ ID NO: 109077 - DNA, 203 bp, Glycine max
gtttcatctggctgctaaagaatgttattggtgccaagccactaaacccaaacacatagccatagccaccctaatttcactctcactttcacttccacacctaattcctgttcaattttcaatccctactcgtttgttctattggcaacgcgaagaagatggggttgtgattcgtaattggagaactgtggagtggaggaggg

SEQ ID NO: 109078 - DNA, 447 bp, Glycine max
tttatcgtttttctttagctaggttaaatgcatggtatatatgatgacgcagaaaattcacatgacttcggcagtaaaccaaaattaatggttgaaggaggctcaattgtgttttggaaatttaaattttagtgtatatatcttaacattcaatattgcttatgatgccactaacgcctcttctgttttcatcatccagtgcagaagcctgaaaatcttacttctagacaatttagatgtttaatttctttgttttagaattgaagcagcaccaatcaagcatgattcaacttccgttatgttgaccaatgtctattacactgaacaaccataaattatataacttacctgatgggttattagacttggccattttaaaattgtatgttgctgtatgacagttgtcttcctctcgtatcatccatcacatttttgttcttgaaaatt

SEQ ID NO: 109079 - DNA, 337 bp, Glycine max
tccttctcgtccgcccacgcgtccgcccacgcgtgcgcccactcgtccgattttgttgttgggtgagtgtgttgatcggattggattggaggcaagcaaagtgcaaatcaagcgattaatcaatcttcggggtacgaaatttgatgtttgttgggcttttatgaatcacaattaaatgcatggtgtgatctgaaaaggcaaaggagaactaaaaaagtgtggaatcaattgaaatcaggcggtgctgttgaattctgcaatggcatcggcagcgcctaatgtcgatctcttcgatgcctattttcgccgtgcagatttggatcgagacggccgtatc

SEQ ID NO: 109080 - DNA, 246 bp, Glycine max
tttcccatttcataacacctggacgttgatattgatttaacatgtttaggcacctatgatgcctccccgtaaggatctatctatatttcttgcctggctaagtatttggtctcagatgagcttcttgtcattatactttgtttgcatagtcgaatagagacaagagaaaagagcccctaaacgttattgattagcctactattattgacaattatcaagaaccaggaaaagtgaactgcttctagg

SEQ ID NO: 109081 - DNA, 395 bp, Glycine max
gtttttgcactaggtaccattcttgatgtgggatttgattcatgtagaagtgttggtggagatgaagaatgtgatgatgatgataagtttagggctgaagttagtatagttaagagtatgttaggtgttgcttcagatggtagtccattggtgagggcagaggtagcagtggctctagcacgatttgcttttggccacaacaagcacctgaaatctattgctgctgcatattggaagcctcaagctaattctttgattaattccttaccttcattggctaatataaaaggttcggttggtggatatgctaaacagaaccaacacatgccttatggaagtatcgtttctcctcaaattggtcctattagggttggaaatgacaattctccagtgat

SEQ ID NO: 109082 - DNA, 244 bp, Glycine max
atttctgtttgttgctgagcatatgtacctttaaccagagtatcttgtttgggttttagtcacaagaaattctgcttggacttgtgggaagggatttgcagcttagcctgatgtgttttttgaatggcacaagaatggtccaggtttggtattttagagaaggcactggttcttatgttcatcttttcggggatatcttatgaaactttctgtttaagttcatttgcagctgataatatttgca

SEQ ID NO: 109083 - DNA, 295 bp, Glycine max
gttgttgcggaaaccttaggtgaccttcgcgattcatctgttggtggtgacttcatggtctccactggttgcagagctatgttgtcgacgtggaagtgaaacggggttgatttgggagataatggagtggttgtgagagctgataaccgatcaaggatgacgtcaagcttggcggtcatctgcaaagtctaggtgaggcggtctatagcctctttaaggcggtccatggtggtctggtggctgttgtgagcaggtatggttggagtcaggtgtaggggttctggcaggggaagag

SEQ ID NO: 109084 - DNA, 474 bp, Glycine max
  unsure (1)..(474): unsure at all n locations
atttttaatcttctataatatatatatatatatatatatatatatatatatatatatatatatgagaatgaatcaaattatatcgctataattttgataactattacacaaatttataactttcaactgaataatgttttcttaaaatttaccattggattgaaagttcgtttcacataaatcacatatacaaaatttcatattaatttaaaatcatttgttactttgttcatatagattaaaatcgatgtaatataaacatttcaaattatactaaaaatatgaataaattgatgaccttcttgttgttgttcaatttaaaaaaaaattaatacaaacaatcttgataatatataaatataattcaacagttggatcaataaaaatcatattttgtgtcaagttataaaaataatataatagttgtcaaaagcnatatatatatatatatatatatatatatatatatatata

SEQ ID NO: 109085 - DNA, 334 bp, Glycine max
ccagaagcagaaatgagcagaagagaataatgcataaacaagccttgatacgttccctccatcatctcaattctcaattcacgaaccctcgcgtttctggtgttgctattatcgcgaaaagaaaaaggaacggtaggtggcattagtagcactatgctattgaaatttgaaaggggaactaattccttccccaatacgaattgatctaatccaaattccgggataggaataatccgtttccgagaaatgctaatttggcaaagctgcattttcgtttgcgcctctgcaattcccgcagcatctgattccctcacaatgtccaccacgcctattt

SEQ ID NO: 109086 - DNA, 314 bp, Glycine max
gtccgcggacgcgtgggtaaaatttctaatgttcatttaatgcgcatgtaaatttaaataataaattttgtgacaattaattttgataaatcatacgaattatttaatccgtatattttttttataaataaaaaaaattttaatgcacaaatgataatttaacatactttttgggcattaataaaaaatgatgggtgcacctagcaacacccttcatcttactgcaaattcttcatagccagatggaggaagagagtaaagaaaatccaataccagtagacaggtgattaaagaggaaaatgacaatgaatgaa

SEQ ID NO: 109087 - DNA, 379 bp, Glycine max
acgcattcaaattcgctgaaacccttcgacacaaccaatggctgcttgtctcagtctctgcactcctactctgtatcggcctagagtatgcaaacatttcaaattgctcaatgggtcacataagttctcattcaatggatatgggttggatttggccgttgtcctacaaaactctaatgctgctggcagaattagagctacattaacattcggaggaggagacttaggatcttatctgaagagttctgatgttgtgaccaatcgtttcggaactgggacacagttcgatgcggtagcgtttggaacgctgggagcagacacagcagtgccagcaggcagtggtttttctgatgatgaatccgagcatgatttcgatagt

SEQ ID NO: 109088 - DNA, 363 bp, Glycine max
ctcacgcgttcgcccacgcgtccgcccacgcgttcgattagctagcatgtagcatcgtccccttctccaaagatcgtataaccttcaatccatcttcatctccggtgagtcaagttgcagctactttggcatcgtattttctgggtcagttctgtcgaattccttggtccaagactttgcagctgaaccaacagcatggcgggtcagtcctccaatgaaggctccagtactggaaacatttcagcagaatgttccgattcaactgttcagctcaatatcaagactctagattcccgcatttacagttttcaagtggacaaaaatatgcctgtttcattgttcaaagagaaaattgcaaatgaa

SEQ ID NO: 109089 - DNA, 264 bp, Glycine max
atagagcaagaccattagccaggcagatgattgcttccattgaagaatttttgccattgttctgtaaatcgaaggaatcattggatcgttacctaattgggagaaccaaagctgtcaccgcagtgacttattcctcgcatttttgcattgttactcaagaaattgagcagctggtttctgaaaatttcaagaccattagggattttaaggatcgctttcttgaactacaggagcatgatttggatagaagcactgccagaaaag

SEQ ID NO: 109090 - DNA, 357 bp, Glycine max
tggcattgatggatcaacaaaaaacattcatattgtccgacaagaaattccttccttcattgtttgcatctgcttttcgctcatcctgtccaaacatcttggagcctcgaaacatcttggtacctcaagatatagaaaaaaggtttgaccagcctacaaaaataaaaattctcggcttcattttgggttccactcttaaattctctaactacgggaagctaatgattttatctttattcaaaggaattgggaatgcccttatgcacattccagaagttgggccattgttgtcctcttttctggagcagtactatgatgagctcaataagtcttgtccaaaattgtcaaacactgaaa

SEQ ID NO: 109091 - DNA, 397 bp, Glycine max
tataattcgcgacacagctcctttaattgagtcagcaagagctctaacaacaaggctaaagcgggatgcgcgagttgtagaaattgaaagtgacagcgatcagagactcctgatctgtcaaaaacctttctttaagagacaggcaaattaattcattcatgcccagaagaaattagaccataatattcatatattcatttttcataatgttcatttattatcataatgctccgccatagaaagtggggattgaaaattttggacagaaaagaaagccgaaaaaaaaaacaagaggaagaaagagtgcattctcgtcaatgataccaccacaactcctatgtagccgtaaggcatatacatgggacctttgaattatcaaacgaggagcagagcagag

SEQ ID NO: 109092 - DNA, 156 bp, Glycine max
ctatagattttgatagctggaaaaatgtagatagagaagctagagagaagagaaaagaaagggatgctgatttagaaggagataggtctgatcagcatagcacatgtcttgacaaggaatcaaacgatcggtgtgctgatggagaagggatgatgg

SEQ ID NO: 109093 - DNA, 257 bp, Glycine max
actcgccggttctgcttaactgttccaacattctgccatgtccaacaactggagcattaggtgctcaaagcttatataggaagagctgcacaaggtgcaatcagtaaatggacgaggaagaagacaaaagcttctcaaatttctctttccaaacccgatcaggacctcctgcttcatccacagcaacataccagtcttgaaatgtcacagttcaaacacaacagccatggagttttcaggaggccacgaaacaggat

SEQ ID NO: 109094 - DNA, 398 bp, Glycine max
ctactttactgacacttagtccccggaatctcgaatttccgaccggtcatatttccgtcaaagaagctgacacaacccaacctttcttttcttttcttttactcctttcattgattctcatatatgatctctttctttacacccaataataaaagcaattgttggctgaagctacaagtgcaatgaatttaacctttgcagcataggaaattaaggtgaagtggaaaggttcagttcatagttgaagttggcgtagttggagcacacagacacagttgttgcaggcattaaaagcaaaggcagcagttacaacaatccgcacggatatatacatggcgtaaagcacaagaactacttggcaagtgcaatgaaggatccagtggaggatcaagtgaaat

SEQ ID NO: 109095 - DNA, 381 bp, Glycine max
ccttctttgagctcacacgcatcatcatttcaatcaaagaacgtgtcaagttactactccaccaaggaaaaaaggaaagagggtactggtcatggagggccactagagaagcaaaagaagttcgagtgcttaggaatatacttgattctcataagcttagcgtttacggcgttttgggggaagctttttggtattattttgacctcaacattactctactttttcgctgtttgggactcaagttctccatgccaaaagaggtttcctagttgtccaagacccagacaaagtctacaaggcaaggataatagaaattatttcacgggtcgaaattatcacatggctatggtcccgattaattttcatgtaacacgtaattga

SEQ ID NO: 109096 - DNA, 506 bp, Glycine max
tcccacgcgtccggccaaaaaagattaccaccaggaactaagctgcaatcttcacttcctgtcttgtctctgtttcgatctctttcccaacgctttatatccggggcggccttcatttccctcttctataattcttcacaccacaaacaaacaaacctctttctctctctcttcaattttcttcacattactctcattagttcccccatttccatttggaattttgtaacacttcacgttcttctaggctcaaccattcttaatttgcaactaaacaagccaacgtgactacatagattcctcttcaataagatttatggtgtgctatgagtgatggtgttagagaattaataatttggacccagttacaagttgtggagaaagtttgcattctgacaagtttgtgaatgtgggaatggaagctcgcatgaggaagtaccggcaagtgagtccagagagggccaaggtgtggacggaaaagccctcaaagtaccatcagaaccgga

SEQ ID NO: 109097 - DNA, 318 bp, Glycine max
ttcacgcgttcgcccttacaaagtgccggctgtctcagaaagcaatgttgtcaaatagcggctatcacggcgctatcacgctatagcgtagcgggttttggagaaaacgcaattgcaacggcgtcgcgttgcggattccgcgagaatcgcgatccccggagtcttacgcgtcgcgaaaccacgttgggtcgtggctgttgcgtcgtcggtttccgacaaggatgaatccggagagaaactgcatcgacggcgacggcgcgtttagggttcatcgtgctgactgctgaaagaggaaaccgggtcggagcggatgcgggt

SEQ ID NO: 109098 - DNA, 462 bp, Glycine max
  unsure (1)..(462): unsure at all n locations
ttgctttccaaaaatgtagcaattgatctacaaacaagtggtaaaacttcaaacagcttgccagaatctttgtcaaaagacaaaggtaacaatattaataaaataaattctttgaaaaatggtacaattgatattcaatcaagcaaagaaaagtcaggtagtttgtctgcactgtcaaaagtcaaggaaagtgataacattagtttctcttctatcaaagatggaaaacctgaaagtatttccagcagtttcaacaatatggctctcaatgtaagatctggaaattcatctggaaattctgataatactaatgctaagggaactcgctcacatgtttcttataagccagaaaaatggatgctccctcaacaagctgaagatacattgactcagctgaatcttgcaattgttggncatgttgattctggaaaatcaactctatctggtaggttactgcaccta

SEQ ID NO: 109099 - DNA, 342 bp, Glycine max
ttcgattcctctaagcataattatttaatttgttttggagggtattttatcattttcaataaatttttctactttatattttgtatcttttgtttaagtaattatattttgagttatttttctgtttttgaacttatatatatatatatattattaattatttaatatatataaaaaaacattagaatagtggtcatcccgctatccactatcctatttttggggttggccgctccgctacgccggtattgacaattatgatttaaataggtctattgagccaaaaagactttttgaatgactagaaagactaacctttttaactaaataagcttttaaaaa

SEQ ID NO: 109100 - DNA, 303 bp, Glycine max
gtcatgtgaggacaaattggaggtgaagaagatgacaatatatgctatgcaagacgtgattgaaaaattggaggaagcaaggtccgggaaaaccaaggtttcagagtaaatattatctgtaacagatcatagccaattggaattgtaaattttttgagcaattagcttatttcaggtgtgatgatgttggggtctatgtattgtgactgtaagaatggttctatatttttgttttgcaaccaccacctgaagggtatacatgtaattgccacgtagtttactttttttgagcttctgaataga

SEQ ID NO: 109101 - DNA, 359 bp, Glycine max
gtctatctctcctgaataatccttaaatttatgaaattaatgaaattatatatgtaggttgtaaagtattatattcattaatttagtctctcgattgatatattttactagcattgagagactaatttgaaaaaaaaaatccaatacttcagttacaatgtagcatgatttctaataatttaaggaccaatatagtttcattagttttagaaatattttaggaggaaggataaaaatacttcacgatcattgttagtcttgttcagagaacacgtttttacgtttgatttgtattttttgccaccaaagatataatttaatttatctgctatattccatatggcaagaaaagaaaatac

SEQ ID NO: 109102 - DNA, 420 bp, Glycine max
tttacgcgtccgcccccactttgctcattcttcacctctcttctctctctcacttccactccactcttctctctctcacatcatgaactcttcttatatgctgcaagctggtgcttcttcttcttcttcttcctcttgaacagtgaaatgggtttgtgatcttctgtgcacccaaacgagcaaaccaacatgaagcatcatttaacactctcttttgagtccaaaactgaaagccttttgattccttcatcacccttcgaagacaaagagaaacccaaaaacggaaacttcgtggttgttgctgatgatgatgcgtttaagcctcaggagtggtcacccttcaggtccaccaccaccttctcagtcaaagactgtggggataacgatggcaaagaggaatcattttttgattcaaaggcc

SEQ ID NO: 109103 - DNA, 478 bp, Glycine max
attcatctcctatgccttttgatggtgtttctcagcattcaactgttgggaccataccatcacattcacacaccccttggcagggaccttgtatgaatgaagctggtcccacttacatggaccaacatgagcagaactcagactctgaacacaacaatggttcatgcatctccttgtctgagtcagcaaattttccaaaagtgcctcagcattttggacgcaccaccatcacccaatatcatgccttgaataacaatgactttggcaccttcacatatgacggctacaatgtaagcaacaatgtctatgagatggacaacttcaaaacgcctactacaagggtggctgaggatgcgcaatacccaactggtgattgtcaaatggtaggaagcaattgggtaaacagcgattttgcatgtaacatgtggaacatggatgaattgtggcaatttagcatgttacaaaaaataagatttta

SEQ ID NO: 109104 - DNA, 359 bp, Glycine max
ttgtttcgtgggcggacgcgtgggtgctgccaatgatgatgttataacttgtatcttcttttgaagtacgcgctgtaggacactaaatgcatgcacttctcccaacagggattcgaaccttggtttaccatatcatagtagactaaccccttttgctaaactcaaccatacctggctgtttttcatgctatgatgatgagtgggatggggaactcaagagtgttaattctctctctgcttgttcttgcaacctttcagcaagtggtgtccgatgagcaccaacccctctcaaaagttgccattcataaaacaacacttgctcttgatgaacgtgcttatatcaaagccactcctagtgt

SEQ ID NO: 109105 - DNA, 340 bp, Glycine max
cgcaaacactgcgcaaagaaagagagagagagaaacacacacagagtaatgaagagacagagcagcgcggtgtcgccgtcatcgtcgcggcgagaaactccgccggagaagattcacgcgaagaccatcgggtgcatgtccggcattctccacttcatctccagctccaattcccgtcgctctcgccgcttcctcacattcggaaagaggcagattaataagaatcccgcttctacccccgccgacgccggaaatttgccgccggaaaatgccgccgccgatgactggaggctgtcgtccgacgtgcccaggagtccgactttgccggcggagattcgac

SEQ ID NO: 109106 - DNA, 203 bp, Glycine max
tcggtgagcgggcaatctcaacatgcagaatcagcagacatggagctactaaaccttaagcagaacttgtcagaaactctgtctcttgtggacgccttgaaaaaccaagtaagggattgcaaagagtctgaagctcaggcccaagcattggtcaatgaaactacggtgcaacttgaggccgcataaggaactgttgagttcct

SEQ ID NO: 109107 - DNA, 404 bp, Glycine max
ttgctctcttcaacccaattctcactcactctttctctctccctcttccattaatggcttctcttccctcgaggccttctttattatagctcttgcgtccctttcgccgttttccctgggaatcaatatcaaattcaccttgttttcaaattttactccataccctcttcaaaaaaatcatttttttcccaccctttgttttctgctcatcaaatttcatcactgaaaacacattccttctccctcagtattcttctgtgtgtgagtgtcgttcttggatggagtgattttgaaattctgaacaggaaaaaaagaaaagccaaaagagaatttcccgaagttttgtttttctcttttttgatcctcacatggcttttttctaatccctttatttatttatttat

SEQ ID NO: 109108 - DNA, 182 bp, Glycine max
ttggtatctgaccaacgaggctggcaagaccatggctagggttttaaacacttctttggagctcagcaccagcgcatcggacatagcggacggtgagtcgaatatctataggggtcttatcttgagttcctttagcatcaacaacaacaggaagcttctatgggagggagctgggttcccta

SEQ ID NO: 109109 - DNA, 283 bp, Glycine max
gttggttcctagtactgtgtagattgcttggaatgctgctggtacaataacaataatattaataatggttgagagaaccgtgtctgctggctccaccatcaaggttgtttccaagaagtccttgtgtggattcttcacaatgacaacgttgctgttcatgttgtcatggctgtccgttcttcggtccactcgctccgaggcttcgcctaactcaaatcttgtgtcttccttacagccacctcaaattttgatcagtcagtgcagcagcaaaaacacatggaag

SEQ ID NO: 109110 - DNA, 405 bp, Glycine max
tggtagttgcatatataaaataccggattccaataaaacaaagttgcattttgttgccacccttggttcacaaaattgtcaaggtgtttctttttgtgcaaaatccttgattccggggaaagggaatacggaaaatggcgaagatatcatttgtttttatgctgttggctctgccattatgtttagttttgggccaagaagattgggaggatcttctgggccaaggaggattctctcaagatgctttgaacaaggcccaggcagctttaggtgctgcttctgcccaagcagctgtcaatgattattttggacttgacgactcttctccggaagccgtgcatggagaacaatcattcttggctgactttttagacgccgacaatagtacaagtaacgacaaaggag

SEQ ID NO: 109111 - DNA, 422 bp, Glycine max
cagtgagatttcatgacaataaggagctgcaaagagactttgggtctctgagtgctcttgaagggtccaaaagaaccaattgcaaggcttatagtgaaagttatgatggctatgtgattggtggtgaagaggatgtagcagacatttcaggggtagaagaacctgctactaacaacgttgtcattccaggtctgccagatgggtcaaatggtgctccaataagtagttgcttttgggagtggaagcctaaacttaacgtgcactatgagaaggcagggtgtgagaacgtggattccccacatgttctctttcttcctggttttggtgttggctctttccattatgagaagcaactcaaagatttggggcgtgacactagagtatgggcactggattttctaggccaagggttgtccttgcct

SEQ ID NO: 109112 - DNA, 259 bp, Glycine max
ttcattcgtccgcccacgcgtccgggagatgaccgggatggtagggagtctcatcgagggaatgaccaggatgaaaagcgaggggagacagagagtcacagattgcatcatggtgatagatggcgtggaggtgatgaggacaggcagaaaattaatgatcgtcgtgggcgacatgattcggaggaagaggattacagggagctggccaggaaatcggaaagggatagagataataatagggatagggataggagacaga

SEQ ID NO: 109113 - DNA, 221 bp, Glycine max
ctggattattcctggtgataagcctagaagttttaaattgaaagagttggttgccaaggggaaaacactttatgttagtggaaaaagaaaattaagacagaagattgttgctgatgttgtcgaggcattaattggtgccttcctcagcactggtggtgaaaaggctgcattgttgtttatggattgggttggtattaaagtgagttttaataaaataccgt

SEQ ID NO: 109114 - DNA, 313 bp, Glycine max
gatgaattatgaaaagctcttgccttgagatgctgcactttgtcttctgattttttatgtaaattagatggggacaacttccccgagaacctcgagtttgctaagggatggggacactgaaatccagatgtgcaacagttgttgtagctctcataagaggcattgcatgccacttgtgttaccaagtccctttgctataacctactcttcgggaagtcttggcagcagcaagttatacatttacattgctgtttctgcttactgattggaattgttcagatgtatagatagaaatttatatttaaatagagaa

SEQ ID NO: 109115 - DNA, 382 bp, Glycine max
ttcatttcgtccgggcagcgccgtgctaccctgtcgccagagaaaaccctctcgaccccctcccctcaaatgctcccttctcccttcttccaacaacaacgattcactctcaaacccttcttcctgtcacactccgccgctcttcaaagccatagccatctcctccgccgcctccatcctcttgcaatgcacccctctctcccccttgttgcctaaccccctcaccaaactcggcggaggcggtaacaccagtggcggcggcggagatgatgggtggttcggcggccatggaggaggcggcggcggcggaaatggagggttctggtccagaatgttcgccgtggtcgccgacgaaaaccagcctcaggagtgggattcacac

SEQ ID NO: 109116 - DNA, 375 bp, Glycine max
ttcgtttgaatggtcaacaacattaccccttgtgttatttaccatctttcttggcttttttattttctaccactatttggtggttacaaataaagaccaaaacagggagttaaattcaaaaagttttcctcctaagaagaagaaagcacgcaagtcagtaaagaacaatatcaccgttgacaacagacaggataaacctatgtcatcggctgaggaggatatactaacacatatggagacaaacactgatacatatacacagatgcaagttgatggacgcagaattggtaaactgtttgtatcaaacaaagaaattgctaagggaagcaatggtaccattgcttttgaggggacatatgaaggccgagttgttgc

SEQ ID NO: 109117 - DNA, 327 bp, Glycine max
ttcactcttccgctagttcccacatcctctggatgaagtctttagcatttcacaagagaaagtgtgtgtgtgtgtgcatatgttgtccctgaaaaatggttccaaaatttggtggtggagtggatgatggagggactgggcgcggaactaggcctatctgaacatcaccctcctttccttttgaaactgataccaactgttgggagtcaccttctttcaactttgttatggtcaggattgtgtctcttgattttggagtttatagtcatgtagtttcttggtcttgtgtcttctataactgtgatagctcataagggtccaaccttc

SEQ ID NO: 109118 - DNA, 424 bp, Glycine max
ttgctctacactcctcgtcgcgaatttccatgtgggtctcactctcttcaccagctatggcatccgaggagccaatggatgctccccccgcgccgaatctgctttccgaaaccctaagtgccgccgaattggtcgccgatttgggcggtgattacgctctgttcccgcccggcggcggttctaccgagttccggcagctcgacgacgacgtctcgtcttcgctttggtcgtcggcgttggtttcgaattcgcgcgtctccgcagtggcgccggaatcgtggattgctccacaaggaaattggctcttacctgaaaatgaaggttcagacaatgctgaatctgcctctgaagtcgtgccttctaagatgggagcagggcttgtgaatcttggcaatacttgctttctcaatgctattctgcaatg

SEQ ID NO: 109119 - DNA, 352 bp, Glycine max
ttcgtcgttattaggtactattgaatggtgagaatgttcacctgaccaaatacaactttttctctatctaaacatatatacagatattgctgggatctgcgactaatgctaaaggatcttctttttctaaatatcgggatgcataaaacgatttggatatgcttagtacgttaattagatcatgacgcaactcattgaagcaaacccactcaattaagctcacagatttaagtgagcagaatgtaacttcacacatgggagaatcgtttcaaggtggattcttggatcccaaataagatctgggtcttgtaagaagggactgatgatcacaactcgagggacaggggaaaaa

SEQ ID NO: 109120 - DNA, 333 bp, Glycine max
tcgttttgatgccgtggctatgtaaggatggccaaatggaagtatacatttctgataaccaatatccattggtatcttatatacaccagcagatcatacttaacacccggaagagatcacagatacaaaaaggggatatgggaatatagctaaggtctaaaagaggattcatgaactgaagtgtcgagtgtgacctctttgttcattgaatcataatcattcagtctaagcaagccgcttagcgcatgaagtcacattgaaagatagttgtcacgaggcgcacatcctgtgcttaacatgcagtcacttgatccagttgtgcaagcgcgctca

SEQ ID NO: 109121 - DNA, 342 bp, Glycine max
ttcttttccatgcttgtgttgttgcattgtccctgaatttgtacttgattctgggacgtcactcagtctgagtctgtttctgcaaatttcaaaaccctctctctcgttactcgccatcactagcgagtgctccttcttcctcttcgcgaaattcgtatgcgaagaagggttgcgttctctctctttgccgtttttgtttgtttaattttgcgtagctttacgaggttgaatttgagctgacgtgcattttttttgagttttgtgcagaggtagggattcgcgctcctgctttctcagactgcctaattatcttttattctgcgaagtaactgagagattgaa

SEQ ID NO: 109122 - DNA, 383 bp, Glycine max
  unsure (1)..(383): unsure at all n locations
tcgttcacgcgtccgctttaagctacgaaagattgtccttgaccatggggcaaaacccacgcgtccgcccacgcgtccggtttcttgtgaaagtacactttcatgacctgttgcattttatagttgggccaagtgtgtattttgtagaaattaggctgatttagaagtgtggttttcttgtctaaggttaaggaagcatgcttgtatttatttattataaatgttgttatcaagatcctgcatcaactagaaatatgactaatgtagttcttataacttataaggcttgggcagttctcacttttcaagtctgttttggngngtggaattaggcctaagtccaagttctaagatagtatgatagcctatcctagatgtctatt

SEQ ID NO: 109123 - DNA, 388 bp, Glycine max
ctcttttccggaaaacccaccgcaaccttcgcggtttgcgattccgcttccggtttcaccgtgctcctcttacacacagcatatgggaaaaactagttggttgataatattggttacctgtttgtgcctgcttgcattttctgatggtagagaactcaaggttagacataaaaagcctcattaccaatacaatcatacgcttgctacaatattagtggaatatgcttctgcggtgagttttatgggaattttatatgttcaacctttaagatgtgtaggcaaatgatttagaattgtttatgtgtatttatttggtttctaatcttataaatcatggaattgaagggttagccatggaattgaaggggttagtcatgaatttgagagt

SEQ ID NO: 109124 - DNA, 417 bp, Glycine max
tttactcgtgggcggacgcgtggggtgagtagtgagtcaaaggcacattttacttgagaaatgaatactatagacaatatagactgagcttcctaccgtgagtttgtgattatcactgtttctggaaccttgaattttctgtaaaatgagcagtcactgcttcatcatactgtttcactgacataggttgtgacaatttcaaacactgatagaccaatgtgcgcaaacaatcacaaaggcacgcatgatcaatgtgtagtataacaattaacaaattgtagcagtgatgtcccctgttctgactgatcttctctatattcttattgatgtgcccttaaatcttatttttcttttctttttcatttgtatatttaagttgcatgtttgccattttgcaggaagaaaaagttgacagct

SEQ ID NO: 109125 - DNA, 74 bp, Glycine max
tcgttagttcaagctctcagcatcctatttgtgggtaatttttttaatttctattaaaatattttgtttatctt

SEQ ID NO: 109126 - DNA, 262 bp, Glycine max
gggtgcccatgcgtccgtttctccaatgcataattgctatactttgttactactatatatttcatgtgcaattaagtacaaaccatcagaagtataattatacatgatatttttcaacaattgtgatacaaggttttgaatctatcacttcttgtaatttacaaggtttgaatctaccacttgtaatttcttctgcgtataaaaggaaaataaagaaattagcgtcaaaatgttgggctgtgttcagcagctccatagtgtc

SEQ ID NO: 109127 - DNA, 383 bp, Glycine max
ttgctcttttgcattttgaaactggagaaaaccctagaaaccaaatcctctctcgcattgccatctgcctccataatgataacactatgcttgctacaatcatggcagacatcatggtaacaaaggagatcgaggacaccgcgctacgtctatgcgtcgatctctccactctcgatctcgacgccattcgcctccctcccggcgaagattgcggcctcttgagccaccttttctcatgcttgcagcctcttgagcaagttctcgaaggagaaacgtgcttatgctgattccaccgttggaattggtggaaaaatagaacctaaaaaagcgagtaccaaggaatttgttagcaagcttacaaaactcatatggggccttaaagc

SEQ ID NO: 109128 - DNA, 401 bp, Glycine max
tcgttcatatttcctcatcttcagtgtcttcctcttcctttgttatctcaatctcctcttcttctatacctgctttctcttctatattttcctcctctgcaactttatcacattctttttatacactgttgatggctgaaggattattattttgaacttattgctttcatcatacataaaaactaggaagtcatttttttttaaaacagcatatagaaaagactgtttaatttttcagtataaggaaagaatgacttataaatcatcaactttcaactatcaacatgtatgaaagacttgtggtaaagttagagaaagaggggaatatagaagagaaaagcaactgcagaagaaaaaaacagtgcctgttaagtggatattcaaagaaatcaaagatgaga

SEQ ID NO: 109129 - DNA, 315 bp, Glycine max
gtttagtgaacttttcaatgtcattgattgattctggctgattgaattgattttgttgctcaaacagtttaaatggttaaatttaggtgttttttgagaggtgggatttaaaatttgttgaattgtgtttgtctatgatttcatttgaaattccgctgagagcggtacttacatttagtgtttgactgtatttttaataggattgtctttgaataaggaaatttgtgggcaaaaagaaatgattgcatctgaatgatttggggatttttcttcttctgttaaattggtttgaaatggttattcaatgattatttt

SEQ ID NO: 109130 - DNA, 308 bp, Glycine max
ccgttcgtagcggcccttttttttttttttttggttcgttttttttttttgggacccaaaaacatccattaattgaactcggataccagctccaactttttcagcactaaactttaagccgccagggaaaagctcccgtttttattaagggaaaccggacctgaagaaaaccaaagagataaaaagatcaaaggaggatagatgcacctatgggtcactaaattctgataacgagatacaagaagggtgtgcaacccacatgtaactttgtgtctatatatcccatgagacgaaaaggtccttttaaa

SEQ ID NO: 109131 - DNA, 354 bp, Glycine max
ttcttgacgcgtgggcggacgcgtgggcggacgcgtgggcggacgcgtgggcggacgcgtgggcgcttcccctgctagccaaacccacgtgctctctctctcctttcttttcttttctgtcttctctcagggagaaaacccaacctacccgaaaacggtgtcgtttctcggaacgttttttagagagaaaaagagagaaagagagaaaagagagagagagagagttgtgttgcggtgatgcggaaacgttgatcccaaatgcacccgtacaaccggctaccaagcagcgggcactcgacgccgtcgccgccgccgtcgccgctccgctcgccgaggctccgccacgcagggaag

SEQ ID NO: 109132 - DNA, 344 bp, Glycine max
ctgctttatggttgctgctgtattacatgtgtacctgcccttgtttgagtaattgtcatgttttgggtggttcgaatttgcggactttgtgtttatttactgttattctttctgatttcatttgggtgttgactgatttatatgcttgttatgaatatggatgggtttgaccattttgatctgtttaaacttaattagtcttttaacttgaagtctcagagaggcaccgattttcagattctgttttatttgttcactgcccttttgaactttgtgtatgatttgttcgagtgaatgtacaaaacccaaaatatcaaaatctgtaactggttttgtgaaaattg

SEQ ID NO: 109133 - DNA, 314 bp, Glycine max
ttacgcgtccggttttgtggtttggtttcgcattgcatacaaaatagctcaaaaggttaagactttaagattccctgcatacaacaaacacttcattcttttttcttctttttcacctctcttgggttggctgtggcgtagggactgcgttttcctctctgttctgttcttttgttttgctatgatgagcacccgcaaaagggtcgcacccggtttctctgtggcacagtgaagatgatttcttttttaattgatatgctgctgggatttggtggcttcttcaagtgggtttctttttttggtcttcccaatgg

SEQ ID NO: 109134 - DNA, 376 bp, Glycine max
tttctcctcaaggaaccacgaaactaattcacttttcctattttcgattggcttaatggaattcccttgtttaggatgctattcaaatgttccgttatccctttctctgcttgtattgaaattgggtttaactatgccctcatttttcttaatcagattgaaacttattgtgaagaatgaacgtggattttggttttgtgcttgtgatgtgaatcattttccttcaccctcgagtcacttgtacttggatatgtgcttttacctctctatattctggctttgtcgatatatgttaacatatggtttggacagtgttacgtgctttaccaaacatgacctctgttcacgaccttactgataatgaagatgatggaca

SEQ ID NO: 109135 - DNA, 104 bp, Glycine max
taggaactcttgtattgatcctttctgtgttctatctgattctgtactaccatatattttgaatcttttaaataaaagcagagcaagttatttttttttctttt

SEQ ID NO: 109136 - DNA, 265 bp, Glycine max
  unsure (1)..(265): unsure at all n locations
gnctcgttctctttctctgtgctcaaattggggcctctctctttagggatccaagagtgtcttgaactactccagaaccctctctggattttgacaactttgggtctaggacagcactgacccagaaaagaaggtccaacacgtccctaagagaggggatagaaagaaaaaaatagacactgtacgtataaaagaagaaagaaacaaagatataaggaaaaagggaaaatatttggagtaaggaagatctaaggcgatatataaa

SEQ ID NO: 109137 - DNA, 179 bp, Glycine max
tcgtccactcggccggcgccccttccctccgagcgccgtttctgggcgccttattgcagccaatggggagaggaaatgggcctcataggaaataggaccagatctgaaacacagctggctcaaagaaactccaaaagcaatgacactgagaatcacgtacaggaacaaaacaccctgga

SEQ ID NO: 109138 - DNA, 79 bp, Glycine max
tcgttttggtctaaacaaagaaacgcatgattcactagaaacattgagtacaagctcaataattattttttttttcttt

SEQ ID NO: 109139 - DNA, 322 bp, Glycine max
tactaatgatttggtccacgagacgacaagctctgcaagggtgacagcgtggtcgtcgtcgagtccgacaaggccgacatggacgtcgagaccttctacgacggctacctcgccgcaatcgtcgtcgaggaaggcggcgtcgccgccgtcggatctcccatcgcattcctcgccgagaccgaggacgagattcctcaagccaagtccaaagcttcttcctcctgctcttcctcttccgcacccgcacctgcaactgcacctgcaccagcaccgccggtggaatctcaaccggaaaaggttgcggcgcccgtcgcggcggcgg

SEQ ID NO: 109140 - DNA, 381 bp, Glycine max
tcgttgacgcgtgggcggacgcgtgggggagaatgtactcaattttccctcagatgctttactgcctggtcctgtttctcagattcaacaggggtcatgggaatggaatttattccgaaatgaaatagacttgtcaaagatagatggtgatttttccaatagaaaagtttccattgtttatgctgttgagcatgagttggcaagtcttaattattcaacaagcatctttgagaatggaacagaggttccactgcgagatgaactaacccaattggattgggatattttgagagaaattgaaatatctgaagagaatgaaatgtttgaagtggaagaggctgaagagagaagggagaaaggtgttggcgatgggatgatata

SEQ ID NO: 109141 - DNA, 392 bp, Glycine max
ttcacctccgcttcagtgatcttcatcttgttcatagagatatgtaatgggcctagtggaatgtttgaccactcaaagttggttgaagatgcttggccctgggcatttgaagcgttgagcttttcatgtggctactttgcatatgatcagtgggatatgcttcgttaccgcttatataatggttggatcccatctatccttgtgcatcatctggttctacttatttgcttcactcttgctttgtatcgaaatgttaccatcaactaccttattctcactcttatctgtgagctgcattccatctttcttcatgtgagaaaagtcagacgaatggccggtgttcgggatgcaaagagcattcttgttaggttagagtggtttctgaattgggt

SEQ ID NO: 109142 - DNA, 423 bp, Glycine max
ttgttagtttctactatctgcttcttcttcttcaattagggttttccccttctccgagatcagcgccaacatcatgaacatgaatatcttcaagaagaaaacctcacccaaaggttcaccccttttccctctttttctctccaaaattttccacattgttttttttttatcaattttttctgtttaaccttccatgtttatcctaaagcttaggatttgcgctttgaatgagaagtttgttttgtctctgaaaagggaaactcgtttctttagtgtttgcttgctggggaaaatttgggtaggaaaaagattgggaacttcggatcggagaaacgttggaattgggtagctgtgtgctagattggatctagaatttgtttagaagaaacatattgctctttagaattcttagaaattatgggt

SEQ ID NO: 109143 - DNA, 261 bp, Glycine max
tggagatacctttgcatccaaaatagtctgaattggacttggaatctaatccatgcatgaagcaggatgtggcaactaatcaatgcatgaagggaagatgtgagtaactctccctcaatctgcaactaaaaggaatcaaatgaaatactttcacacgtttcacaatggccacaatcaccatgccccacacagcctcaatcaactctcgagcacacacaatcataccctacaagactgatgagtgcagtaactccatgtctc

SEQ ID NO: 109144 - DNA, 321 bp, Glycine max
aatactcctccgctcctctctccggttttcaattctcgttttgcctctggcggcggtgctgtgaagtgaactaagtaacaccgtgaaaacggctctctttccgtgcgttggtttcatgagcgacggtgataaatttctgcattctttgtatccatggcattgaaagttgaaacattgaattagtaagggttttgtttggggagaactggcatcagaagctagaatctgttgttatgggcttcaagaggggatttgccaaaaaagaaaggggcctcttcttcaaccccctatgtagtcaacctacttgcattatttttggat

SEQ ID NO: 109145 - DNA, 375 bp, Glycine max
aataagttccaacgggtcagctcatgtggattgtccatctggagagtcccagaacacagttggtagcaattggaagttagtgaatttgaataatttcagctctgttaggacaacagttaatggatttagtgaaggggaaatgtattacaggagtgatgccaatttctctaccactgtgaacaatgatattgataatgtcaatactaactctcaaaggattggagttaataatgataaggctgggctagccttatgtgatgaagacctggggctcattgaaggagacatgtgcgcttcatcaacgggggtggttagggtgcagtcaagaaagaaagcagagatgttcttagtacgaacggatggatttttttgtgc

SEQ ID NO: 109146 - DNA, 311 bp, Glycine max
agaaaaagactgatcaactttctatttttcttgcaatgatactagtgtgttctaaagatcagcttggtatatatcatgaatccattttcttttagttcaagcttttggaacaattagtaatgtgacatgatatactttattctcttttcatttttaattcaagtagatgttaatccctttgtaataaataaataattattatgtctttctgtgtttgttattttatgctattcttgttcttttatacattcgggaccagggattggttaggttccttggcttgacttgcattgccaactggtaatgcaagt

SEQ ID NO: 109147 - DNA, 419 bp, Glycine max
ttatatgtggtgttaagaggttacagtggctacagttcatggtgggtgttgaaggtgttggagaaggttttcgctgcaacacaacatggtgatggtggaatcaatggagcaccagttgctatcactattttctttggggccaacgatgcttgccttccagatagatacggtgcttttcaacacgtgcctctccttgagtataagcagaaccttcactctattgtgtccttcttcgtgaagcaatggccaacaacacatattctccttataacaactcctccaattgatgaagaagcacgtcttagatatccatatgcatacaatccacagggtcttccagagaggacaaatgaagctgctggtgagtatgctacagcatgcattgctgtggctgaagatgtggagtacctgtgattgat

SEQ ID NO: 109148 - DNA, 395 bp, Glycine max
tttcatgaccacattgaatctagtgatggttttgatagaaagagcgaagagcgatctggtatttttggattgcaggatgtggagtctggatctgcagttcaatcatcttcctctaaaagtgaacataaccttggtaaagctgttgaaaatgttaaccaagaaattacctcacctagctcaggtaattgctgctcattttttaatatcatctgaaaatttgaattcagtatgatggtaaatggacctgtctgtttatcctatccatccaacttacagcatttatcttgatattcgtctatcaacagggtaaaagtaaaactcaacttttttctggctacgtttatctcaaatattacttacaaacaagaaagccgtatagttaaaaaatgctgagt

SEQ ID NO: 109149 - DNA, 363 bp, Glycine max
tcataatgaggcgaaagagagagagagagagagagagaaccttgtcagggggagattgggccaagcggtccatgaaagccttgcgttgaagaggggagggagggggcaactgcgggacattgaggacgatgtcgacgcagaggttgctcagagtggcaacgtccacgtgtttccaactattcggtccaacgttggaagggagcgaggaggaggggctagggacggcgatttcgaggcttctgcacccgaatgcgcgattcagaggcaaaagggttggccaaatgggtttttgttttggtttggaaatggaagggaaaaaggagggtccatggagatggtggattctcgctctggctgggactg

SEQ ID NO: 109150 - DNA, 409 bp, Glycine max
ttgattacaccagcatgtttactaactctagggagcttgtgagcaattctcttgcggttgtttcgcagttttcttccttcttttcgatcttccaaggcgccggggggattcatcttccttgggagactaccagtgatgatgcactggcacctactgcttctggttctgcttctggtgccggtgctggtgctggtgctgggtctgtgttcggttctgatccctcttcttttggtcttggttatgcttctgctcctgctggtggtgttgctcttgctcctggtgttgctcctgctcccggtgctgcccctggcccagttccttctttgcctgctggttcaattcctgcatggacgggctcaagttctgtttgggccggcccatccgagttcttgggatcaaatgaaaagcc

SEQ ID NO: 109151 - DNA, 222 bp, Glycine max
acaagcagagcaaaaggaaagagaagagagagagacagagacggaaaggggcacagcagggaggcactaaccagaaacggaactactaaagatggaaggccagcatcatccagcgctaagggagatagaaaacctaaaacaaagcctaagcagaaagcaactcacaatactgtaacagtgaaaggccccctcgggaagcaaacagagcaaccaaaaccagca

SEQ ID NO: 109152 - DNA, 362 bp, Glycine max
atcgtataattgaagaagaatctgatgcaccaaaatatcacatatagattcatagtttagtttttatttatcatttaacacacacaaatatagcggaggctgaagcaaattactacaaaaatttgttggattaattcttcatcaagaacaaccatatggcagatgatgatcaatttcaagcaagtgggaactggtgggaaacatcaagaagcgtgaggtatgagagcggggcatcccagtcatcttcctcagccatcaccaacacaggcaacaactttggttggcaaggttcggatatggcagacatgaagccaaggtcttccatggattcttcttctgtggtttttcatgacacacagaat

SEQ ID NO: 109153 - DNA, 241 bp, Glycine max
tttgtaatcaaccccaccagtccaccactctctgtctctctctcttcaatgctgcaaccttatttggattttggaaaagcttagctaattaagaagcataatacaccctcttgaataagcattttggtatcttcagctaaaaatggagagcagctgcattctggcttttcttttcctcctcattctccactcaagtacaacaaaagctgccttcagtgttggtggtggagttggtgtaggt

SEQ ID NO: 109154 - DNA, 231 bp, Glycine max
cttcaaaaaccagccacgcgccactgatgctagattcacaccacgccgttattttttttggtttgttttgtttctccgttgccccggattgtaaattccgggtcgggttgtgaccgttttttacgacagcgatgggcgatcttcttgtgaacggcgtcgttttcggggaggatcgccccttgcgcgtcctcgccttcgtcaccgccacttccgcctttgaatcccgaaccg

SEQ ID NO: 109155 - DNA, 222 bp, Glycine max
gcaaacgaaaggggaagggggccagaaacaggacgggaccgaaccaccccccagcagcaacacggagcggatgggagcacgcggaaggagagacagggacagcaacagagcgacgccgcccaagaagagacgaggagcccggacaacaacaacgggcacaaccacaagcaacggccaggcacgcacacgaacacgaacaacaacaacaacaacaacaaaagg

SEQ ID NO: 109156 - DNA, 122 bp, Glycine max
gcgaggcccacgtggtccacgcgctggtgcgcgtggacgacacgcacgaggagtgcgtgaagcagctgagagcctccgagaaaaagctcctcgaggcctatgctgcatcggtgaaaggggtc

SEQ ID NO: 109157 - DNA, 373 bp, Glycine max
aaaagagagaaacttgattgatgatcatcaatcttttcacaaaaatcatccatgagtgttaaaagcttttaatcaacatcttagttgtcaatttgttagatctcacatttcttaattgggcatggaatttttaatctcccttttcttgggtaaggaataaaatgatgatcacttgttattatgcaaaattcatatcagattcagaggctattctggtgggttcagcaagaaatctattacttggttaatctcccttttcttgggtaaggaataaaatgatgaccacatgttattaagcaaaattcatatcagattcagaggctattctggtgggttcagcaagaaatctattacttggttaatctcccttttc

SEQ ID NO: 109158 - DNA, 155 bp, Glycine max
attctatgcatctttcattgttcatattagggatgttgtaatcacatgtcattgtctgccaaagacaagtcggtgacagatttgttttaatcgaacatagcactactgcttctttagataacactatgactctcggatatgcacatgcatgcatg

SEQ ID NO: 109159 - DNA, 208 bp, Glycine max
gcgacacttccctccccactctcacacgtgcgcgctgcctcgtgtccctcctcactctccctgagaagatcctccttctctccaacaacgcctactccatcccccgcctaggcatccccgcctaccagtggtggtccgagtccctccacggtctcgccctcaacggccccggcgtctccttcgccggcgccgtcccctccgccaccag

SEQ ID NO: 109160 - DNA, 241 bp, Glycine max
aataatctttataggccataaacctgcaattatcagagaagtgcacttaagaaagtgcatgtaagtttcgtcacattcaaaattcgaagaaataataaaaataatatatagtagtatataataactattataatgggaatacctcattttgcatacacttttttagttggaggtttatggcctataaagattattgaaatgaaattggtctgagaagaactctaaaattatgttatctatt

SEQ ID NO: 109161 - DNA, 285 bp, Glycine max
ttacaataatagttatgtcaggatggtggcagttattggggttttgaaactatatcatatatcaacttccacctgtattgatgcagattttccagcaacactgaagcatttattgcttaatgaccctgatactcaggtagttgcaaattgtttgtctgctttacaagaaatttggaccttagagtcatccacatcagaggaagcagccagggagagagaaactctacttagcaagccagttgtatattaccttctgaatcgcattaaggaatttagtgaatgggc

SEQ ID NO: 109162 - DNA, 393 bp, Glycine max
ttccatcgcgtccggcgccgcctcatctcttctgctctctcattacgctctttcctccgatctcaggtttgattttttcttcatctctcttcatcttattattcatctcgatctttttgcttcttcgtatcttgtttttgtttcatcatcttaataataattttagtgattcacattgttgtgctcttttgtttgatgcttttctcatcaaactttgcatcacgcgtattgatctaagttttgggggggttttgaatgcaaaccaccatacacgttatggctattccttgtccgatgctattgttaaggactctaggctgctcgacatgtgttttctaggttttctattactattctgttatgttttttgtgctattacgataacgcccctgc

SEQ ID NO: 109163 - DNA, 195 bp, Glycine max
ctcactcgtccgtggacgcgtgggttcatatactattcacgaaaaaaaaccatattgccaattaataaaaaaattatagttggtacataattcttaaaataattattataaaattaaatgaaattttcatatataatgatctttttattggatgacaaaagtaaaaactctttatactataaatgtattggctat

SEQ ID NO: 109164 - DNA, 146 bp, Glycine max
tctcacgcttccgctggcgctctcgtcggcgcactcttgggagcacactctccggagaacactccgaggccctaaaagactacctcaaggactaaccggggtccttattgtgcgttggggtgcacgagcagtaccaaaggggctac

SEQ ID NO: 109165 - DNA, 451 bp, Glycine max
tcttacgcgtgggcggacgcgtgggctcgagtgagagaaaccctagagagagaaacagagagaggaatggaagagcaaatcaagtccgaattcaaaagaagtggtttcggcctcgaagacgaacaagaaattctcagcaaatgtgtcacttactgcatcaactacagtctcactccttccgatctcgtctcaagctgggaagtttattacctcaatagacagctgaacgaaccaatagtacaaaatactgaaattgatggctttctgttgcatctacaaaatgagaagaaagagactgttataaaggaaaaggaggaagctggcttgcatatttactctatcggagatgtagaaatgatcttaaataatgatgatgatacaaaggataatactcccggaactccaataaatcatcatcaagatcctttatctcctgcacttgatacaacat

SEQ ID NO: 109166 - DNA, 390 bp, Glycine max
  unsure (1)..(390): unsure at all n locations
tttaatattaaaaacaatgattaatatcataagcaaaataaacttatgaaaagtttgtttcattgattatttatttatttcgaggaatatgggattgggaaaaattactctcaagtttattatgaggtaataaaacaattgttacaaactatgtctacattttttaaatactcaaaaataatatttgcatgttatattctttgggaaaaaaatatttttagaattaaagaaatcgttcgtgaaacaaatgtcttgtaaaccaagatttagactttttaaaatataaacgttaaaaccaaaatcaagacanaatgtagaaaaaaatgtatttaaattaaaaaggaagaaaataaaaaaaatcattttatatgatcatgactcatgagctaa

SEQ ID NO: 109167 - DNA, 262 bp, Glycine max
tctggcaaaagaggattgctgccaagagtagctcaatcactgcacagtcgccatcacagctatccaagaaacaacttccaacaaaactttcaccaaactctcgtaaagggtcaaaatttagtgattcagagccaggagcatcctggccccttcaaagattccccgtcagaactgcatctgttggatctaatgattctttgaaagcctcaaaaaccagcagattgatttccggaagccacttggatagtaacaaattaagtcg

SEQ ID NO: 109168 - DNA, 214 bp, Glycine max
ttcttatttttcaaaagctgtctttggaagctgacaaagaaagtaattggttttctaaaataaattgaaccaaatatgttcttgaattatcccatgtataaatgtattaaaaaataacaaagtcagatttaaaacttaaaagtcaactgcatcatctaaaaggctttaaagcttgcgtgtcaaacagtggattgctgtaaactgcattatttgg

SEQ ID NO: 109169 - DNA, 364 bp, Glycine max
tcgtctacgcgtccgcccacgcgtccgcccacgcgtccgtccacgcgtccgcccacgcgttcgggccgcccttttttttttttttttttttttttggaagatataacgaaatttttttgcccatatgccatgtaattgattttctctcaaaaaagcaataagcaccggttctcagttagaacacagctcgcggctactttcaaagctaccacctattgacaaaaaaaatccaaaagaatcaaaatggaactgcgtatggcaacgcgtatattttcacctcaggcaagtattgtgcacgaggccacatagaatttgaaagctgaaagacattagaatcaaacttctgtttctttgagacgggcct

SEQ ID NO: 109170 - DNA, 234 bp, Glycine max
ctgatgcgtgggcggacgcgtgggctgacgcgtgggcggtctcgtgggcgctgatcaaggcgaatttcaccgccgacggagcggggaggctgaaggagagtgtgatggagaagcttaaggaattcatgggggattatacggacgacacgcttgtggattatgttattgtgttgttgaggaatggttggcgcaaagaacaagcaaggaatgatttgaatgttttttgggagaaaa

SEQ ID NO: 109171 - DNA, 204 bp, Glycine max
caggagctggagctccaattgtggggatagctcccctagtaggcgctaatgggggatataaaggcgacactggtgactggccgccgcggaccatgtactcagctccaagggatgaggcatctacaaaggaattttcagatcgattggctcgtccaacaggaaacattggaggagtgataggaaaaggcggtatgataatcaatc

SEQ ID NO: 109172 - DNA, 261 bp, Glycine max
tctttaatggttatgggatgcagcagcaacagcagcagcatcaggtgccaccgtataataatcaaattccggttgccggtgctggcgggtatggccatggatatggtaattcacagatgggcgggccggtttctggtgattatggtgcgagggtgcctcccagtactggtggggggtaccctgatggctcgcagtatggcttccctccttcatcgggccatccgccgcagccgcagattccgatggcgagacctcctggtg

SEQ ID NO: 109173 - DNA, 188 bp, Glycine max
atcgttcacgcgtccgaaaaaacgaacccggttggattcattccaaaggtcattcactggatctggggttccctaagcacaccataattttattaagaatgagtggcaatagcagcaacaacaacaatataagtaaaagaatctctgtgatgatatcacactatgttagatccagcaccatcatggct

SEQ ID NO: 109174 - DNA, 153 bp, Glycine max
catgactagacaggttgtatggcaccacagggaaatataacgccttgcaattatgcagtacatttattaagcagattctcatatctaaaataatgattaccataaactatgacggctggactaaactgtaaatgtagtcaggaataggatgtg

SEQ ID NO: 109175 - DNA, 220 bp, Glycine max
gccaaggtgcataggctggcataaataagttgagagttctgtgcttgccggaaaataaacatatcatgccgtaaataaatcatggatggatcgtgaatgttagagtattatgaaattggtcctgaatttctatttcttgccttttattgaattgttatcttttttgtatttatgttttttcttctcagttgcgaggtaaatgaaaaataccatgaaatta

SEQ ID NO: 109176 - DNA, 347 bp, Glycine max
tatttatttcgtttcggtcagtttagtgttaaaggagaatacgtattatgggaaaaaactctcccttcgcctctccagcttcttcttcttctccgttttctgatgctttttctcaaaggtgtgtatgaggatgttgttttgctgaattgtttgtgggatggcaacagcaatacaagtagtgatgaaggagatgagctaaaataatgggcgatacttctcttctcacttgttgtttgtcaatggagaatcaccacccatccacgctactgtccatggattctagtgcatcttcacatgaggaactggatttagagatgaacacacagatcataccccccgatatcaat

SEQ ID NO: 109177 - DNA, 403 bp, Glycine max
  unsure (1)..(403): unsure at all n locations
ggacgcgtgggcggacgcgtgggcgttcgtttgggatcaaaatcttccctccgcgntttagcaatcggtagagagcgagacacggaatttgaaaattcatccaaaaactctccctctctacgcggcgcgaccctcacttcggcactccgcactgtctcggatcactcgctctctctgttggttctggtcatttctgatgtttatgaatctcacctaatgtgtgaatatgtgactttaaacttgttttgacaactggtctgtaaacaagattccaaaatttgataatactgtagctcataatgctagtaaatgagtgtcatatgcttgtaattttgagccaatatccatctactcaatctcatatgtaatctcaacatgctatttctttcatgtttctgcatta

SEQ ID NO: 109178 - DNA, 259 bp, Glycine max
  unsure (1)..(259): unsure at all n locations
cgagaaacagaaacctatttttattttttatntctatatcactgacagcgacagggagaggggtagcttttgtatccatgatatgaatatgatgattattgatttgattatgcgtccagattttcagttcaggtaggatcactttgacagtttgacttgtccagcaccaatttctggtattactgttgtctgagttctcaagagttctttcacagaaggtagatgggttctagaatcccatctcataagcttagcaatg

SEQ ID NO: 109179 - DNA, 328 bp, Glycine max
ctttttcccccctctatccctattgtataaattaaaatcattattatctgcatgccatatagtatctcttttgcaataaataataaatgcaaggggacaacaaagaagctgtattgctttcacttcctaacataatatctatgtcccagttgcttcttctgcagctcctcaaacactacaaaccacttcaagacaaaaacaacaccccataataataataatatcaacaccaacataaacagccacacctattgtgtcacaaaatttgagtctcatattttgtgctcttaatagtgtgaagaaaaattcccaccactcctgttgggaa

SEQ ID NO: 109180 - DNA, 177 bp, Glycine max
cgaagcagaaattccaaaaatcccagcatcaacatcacaaactaacaacaacagtacaatatttaggatcaagaagccaaaactagattccgcgatggtcgttgattgtgtgcaagagagtcatgtcgagaacatgggaaggtgattgtgggtgcggcgttgcgacagctaacagat

SEQ ID NO: 109181 - DNA, 271 bp, Glycine max
gcattcattcattcatatgcttcttcaactgtctcctctcttttgcctctaactcaggtcttatccaaagcacttcttattcaagcacttcataatatatttctcttcttattcaagcacttcttatggtgatcactgattcactatcgaattgcctccatgtgaaatataattgtaggcgcattatatctagctagcactcttggtccaaggaaatagagcgaatgttccactgtggaattaacttattctgaggcagattctttcatct

SEQ ID NO: 109182 - DNA, 175 bp, Glycine max
ttggctccactggtgaagcatctaatgtggatgaatacctttggctgatggggagagctctctacaagcctatcattgaatattgtggtggtacagaaattgggggtggatttgtttgcggatcactactacaggctcagtcattagctgcttttagcacaccagctatgtgctg

SEQ ID NO: 109183 - DNA, 217 bp, Glycine max
ctttaaatttttagggtttcgttctctcactctctcttaagcctcttctcccactatcgattcgatccaattcctttggtttccttcctctggatccctatttttttctcccgaaagcaaaagaaagagaaaattaataatggccgtgtccctgacgcagagtgcgataatggagatgtgcagtgcgaattgccccgagggcttgcaaccggtgctg

SEQ ID NO: 109184 - DNA, 466 bp, Glycine max
gtccgcttttctcaacctttgtggccctgcaatttaaattttcccttctattaaattctgaacatctctctcctctgggctacgttaacgtcgaagcggttatttatttatttacatattttttaatatttatatttattactgctgctctggcactcgttgcattttgcgcttctcatgttattcaatttttgttccaccccactgcggcgatactgttccaaaaactctatctttttaaggatttttcgtggatttgaactctgtttgataccttgttcagtatggaacccatggcggttgtgttggatgtgagttcggacgaagaagaggaagtggcgtgtttggaagacaagaaagggaggaacatgaccattgattttgactgggtgaaggagtttctggacatttcggacgaggaatcgaacgaggttgctgtgatgcacgaggtgaacaaacctcaacg

SEQ ID NO: 109185 - DNA, 396 bp, Glycine max
acacattttcagatggttcaacatccgcctgcgaatagttatggcagtgtaggaagtcatgggagctataatgatagtgttgggcttggaagcagctatggaagttacggagagagcagtaacatgtttgcttactattcacctattggtccatctggtatgaacatgcacaatcagggaagtatgtcaatgcttgggaatagtccggatgcaaggaggagagttaagtaccaacctgggaatgggctggggataagtccgtcagctggaaattttgctcccctgccccttggtgccagcccatctcaatttactccaccaagttcctatagtcaggtttcagtcagttctccaggacactatggacctacatctcctgcaagaggaacttctcac

SEQ ID NO: 109186 - DNA, 114 bp, Glycine max
ttcgaagggatggacgaacacagaattcatggaggatgtcaagcttcacgctatatggatggacccagctgggcctaaacccacacactgctggggacctacctaaaagggggg

SEQ ID NO: 109187 - DNA, 343 bp, Glycine max
cccttctcttttgttttcttctgggggtattttcgctctgttctgtgtctcacttctctttaggggttcaaagcctcccattccaattcaaaccctcctttcattctatttcctcacctcgattcccagtattctcgctctagatttcgggtcacgcggttgatttctgatgcagcagcaatttcaatctgattgccgtttgcaagggttggattcggttgtggatagcttagaatcactttttttctatttattttttattttttgacgaaagaggaggtgcagttgtggaccgtgtttcaaggttcagtagtgagtggcttgtgatgattttgattatgat

SEQ ID NO: 109188 - DNA, 456 bp, Glycine max
catgatttcttcctccacattcctcattttcttcaattattgcattcccacgccatcatagaaacaaaacaacaatactaacaacgatagaaaatttttaaaatctaattaactgactttcattccgaactttctctcttgttttttgggaaaatcgaccgtggacgaattttcccaagaacgagagaggaggtgacgggatttgatattgtaattttgaaattttaatttttctttcattttgcaatcattgttcctcaacttttgttgtcctctcatcatttcattttgtggtttttaagtcaaaaaaggaacaccaatgttgggaaatcatcacaagatggaaacttgtttttgaatttcattggtacgaacatggtgcctgtgcattgatcgtgggtcattattaggctctggaaagagagacaacagagagatagagaggaaaacgtcatg

SEQ ID NO: 109189 - DNA, 387 bp, Glycine max
tcttatccgcgcagccatctctctctgatagtagctcaatgacgaccactactattcttggggctgctagtgtttgaccccttcaccgttcactgtacacacacaattcatataagatgtaattcattttcacccaagttgttgtattctgtttccacttgctatatataatattgtattttgtttccacttgttttatcttttgcttttattttcatcattgacagtgcattcaagactttttcttgatcacaattcatgacttattctatatctcattcttctattgctttatcccgtcaaagttgaaacactccaattatatcacaagtgggtcaacaccattttcaaattccagtcttctccctctctagctatgacacctac

SEQ ID NO: 109190 - DNA, 478 bp, Glycine max
tcttctgggaagattgaagggaagaacgtgttctactggttccagaatcacaaggccagagagagacagaagcggcgtagaagggaaatggaggaaaataataataacaatatttctgcttcttcttctggtgaagggttgaaagagacaggttgtggagttaaagagacaaagaagtgggcatccacttcaaactgcagtggacatgcagaggaatctgctgcactggatatagcagaaaagggatctaatgggtggactcagtttgaggggaaagacagcatacaagttttgatgaggagaaacatagccgaaaaacaagctaagttgcaggaaattatggaaatgccttgtttccctcctgttactatggaagcatcaactcctacaacttcacacagaagaacaacgcattataacacacaacttttaacccctcaaaactataaataattaccatcttcagtcatcaacagag

SEQ ID NO: 109191 - DNA, 401 bp, Glycine max
ctcacgcgtccgcaaagatatagtttcaaagatggagcccagtagctccagtacaacgagttcatttggaaaacccttcttgaggcgccatttttcgttgggatctaagtggagccggtccctattggagaatgattctgccaggaagaagggcttttgggcaagatatcgcaaagactgagctcccctagccatagcttttagtcgcacgagctcttcaattatactagtaacaccaagttagaatttaatattttctatgcagtctagctttagtaatagtttagatttatttcaaattttattttagcttgtcaccagaagttctaaccatgttgacgtggttcatattaattgtatggatgaagcgtcttttggcagaatcagagccttagcaatga

SEQ ID NO: 109192 - DNA, 359 bp, Glycine max
ttagatccaactcaactgaattttccgattgcgtaatttaaacaattaattattattattattattattttttgctgcgttcaggtaattctcaacgcaaaagtgctgcgatgttcgatagcgatgacgatagtagcgtgacttcgtcgtcaactgctctttctgatttgatgtcggtgtctggggctgaagatgttcaatttgttcaagattcctttctcgaccaagctctcgatgcattagatgagaaaaggggttccacgagggagaaagctttgtcatcgatcattgacgctttcaatagcaacatgcagcatgagtttgtggagaagaaatttgctaccttactacatcaatgt

SEQ ID NO: 109193 - DNA, 442 bp, Glycine max
  unsure (1)..(442): unsure at all n locations
agtgttccaaacaaatgaatttggtgtcacatctaatctaaaacattgaacaaaaaataaggatccttgaacaaaaaaaaaatctaacttaaaatattaagacatgcatcaagtgtataaatattatctatcattcaacttccattcatacttaattgtaagatttcctcacttacacttatcacttcagcacttaaataattgttataatgattacttgtatattgcaatacatgattaaattatataatagaaaaaatacagcattatatcaaaactaaacccttaaaattatgcttaataacttggttaacaatcatattgaaaggcgtttatttgcttaggaactgcttgatatcatgatcaaacccactaattttttttcataattaactctcattntacttataaaaaatgttctttcttatttaaaaattacatt

SEQ ID NO: 109194 - DNA, 437 bp, Glycine max
  unsure (1)..(437): unsure at all n locations
cgtactcgtggggacagacacaaactgatgggtcttccttcaactccacacccctaatccaacaccaacacataacccttcttcattctcaccttcttcaattcccactacctaaaaacaaaagatcttctctttttcatttttggggaacacccttttactttttttttcttctttttctcttcttcctcttgggttattggctgttatcatttgatctgaaggttgaattgcagagggttattgatatgatttatctcttggactcctctgttaccagccttcattggcactgatttggttacctaccatgaattgtttgggattcatctgctgccagtacggaggtcgagagatctgttcttgttgtcgttcttggatgtatattatcatgtcctggacnttttctgtatgccctgcaaaggaaatgatgattg

SEQ ID NO: 109195 - DNA, 393 bp, Glycine max
ccttcgcgtccgataaaatgtgtccatattatttgtctgattaggaagtttgacaaaacgcaaaagtgagggagaatagattttctatgtgtttgggagcaccacagtcactaaatcagaatccccacccaccactgggtctgagaggagacagcgaaagaggaagcagaggggtgttttttggcgggtttgtatttcatatcaaacttttccagggttagaatagaacccaacataagaaaaaaacaaagacagagcgagcgagagagaaaggggaatggaagaggaaggcatagggttagctgttggcgagagccacagaactccgattaaaaatcagcaattgcatccaaagagccaccgccaatggtccctcgccgcacgctgacgacg

SEQ ID NO: 109196 - DNA, 306 bp, Glycine max
  unsure (1)..(306): unsure at all n locations
tggacgcgtgggtgattcagggaaaccaagcctataaagataagcagtggcagaaagccattggattttatacagaagctatcaaactctgtggtgataatgcaacatattacagtaacagggctcaagcgtatctagaacttgaaaggtagtgtcttgctcttgctacttgtcaaaattgtcttgcaaacatcttgatttgttctctctgttgatccagttatcttcaagctgtggaagattgtacaaaagcaattagtcttgacaaaaaggtgactntcttcatagaatgtttttgcttagaag

SEQ ID NO: 109197 - DNA, 341 bp, Glycine max
tccacgcgtccgcaaaatgcttgaatttaatgcagttccactttcacctcactcacatcattttctccctcattttcaacctttctaaagcacaatcctgcatggagccagttcccgcctacatcacccaccacagctgggagccttccgtcgccatcaccgtcgccgccatcatcttcgccctcctcctcatggctatcatctcagtctacctccgccgttgcgcccagtctcacatcatcatcaccaccaccaccttaccctgctcctgctcccaggggatcaacaaggacctcctcaacacgttcccaacgctcttttactccaacatcaaggacctc

SEQ ID NO: 109198 - DNA, 446 bp, Glycine max
  unsure (1)..(446): unsure at all n locations
ttttacagccccatcagcccatacctaaggctggtacttcttctcctgatgttaaaaataaacagaaagataagttacaagatagggagaaactatttgaaggtgggaccaacaatgatgatttaaagccaagacttagaaaacctgaagaaattatggctacttatagaaaaactgaggatgctgcttcagttgctgcccaagcaagaaacaagcttatggagaggcatgaaaaattggagagaatcagccaacgtactgctgaactgcaaagtggagctgaaaattttgcgtcattagcaaatgagcttgttaagaccatggaaaggaggaaatggtggcaaatatagcaaaaaaatgtctgtatgaattatgtatttatcgncttgtatattatacatatatttttgtggctgttggcgttgtttttgtttcattttagcaaa

SEQ ID NO: 109199 - DNA, 120 bp, Glycine max
gttgtgatttctgctggttaagcatcttggatatacttctgtgattttgggatcacagatatgaccaaaagtgcagaattgtctcagggaaatggtggtgtttctattcccactcctatt

SEQ ID NO: 109200 - DNA, 282 bp, Glycine max
cagcaatagaatctcagatacaagaaagcactttgggttctcccatcttccttcaatccagtggtagccagatttgtccctcccaagatagcagtgaacctcctcaagcattcctctcagtttcccaagaatttccaacaatcaatcaagacccttctcattctcaaacagatcacatcacttctgcaaatgaagctgaagacaatgatgaatgatgatgacattgaacagttaatgcagctcttggggttatcagaggtaaaagaagaaagggatggtgat

SEQ ID NO: 109201 - DNA, 232 bp, Glycine max
tcttttctctttctttttcaaaaccctcgggctgactttagcgcctgaagggtgcccaacaatgtccgcgccggcggaggctccttccttcactgcctctcctccgtcagagactactccctcacctaactccactggcctctctcctgcgcctccctccaccatcaatgccaccgtttctcctccgcctgcggaggcgggctcccctccgaccagtaccgttaacagcggg

SEQ ID NO: 109202 - DNA, 296 bp, Glycine max
ttgtcttgcgtgcgcccacgcgtgcggttgggtgcgtattttaagctattttcttctcttaacacaattgggtgtggcaattgccataggcaccaaccaattaacaaaggtatatatatcatcatatcatcaccaaatgaaaaatattgggttgctttttcttgcggtggtggctactttcgtggcggcagccacagctggtagcttttaccaagactttgaaataacgtggggtggtgagcgtgccaaaatctatgagaatggaaaccttgttacactcttccttgacagagcct

SEQ ID NO: 109203 - DNA, 359 bp, Glycine max
ttcgtcttcttgttctgaacgacttttcaagagaatgaaaccatggcagtgaatgtatacggtccccactgtgcttccaccaagcgggtgctggtttgtctggttgagaaggaagtcgaatttgaggttgtccctgttgatgtcactaagggggagcagaaggatcctgagtacctcaaactacaggttcaactcttgtattttcctttcttttttgttgaatatgttttgtcttcgattctttatcttctgattcatgttctttattcataatatctgcagccatttggagttgttcctgtcatcaaagatggagattataccttatatggttacactttgtgcttctttgttctgtt

SEQ ID NO: 109204 - DNA, 278 bp, Glycine max
tgtctttctttgaagcattgcttccatttgtgagcgttgaaacagttcactcttcaaaccttcttactggatctgcatatgcctaccgcttcgatctttgatccttggctaagttagttttgtgcaatttattcctgcggtcccttggaaagggattataatgatttggagaaccaactttgcagagagttgcaatcccgagagaattggggaggactactggccctacaaggcgttctacaaaagggcaatggacaccgtaggaggatgattcctta

SEQ ID NO: 109205 - DNA, 205 bp, Glycine max
tcttcctcttgagtagagatctgttgtagacctggggtttactagtgaaaaagtgagaagatgggccccaagatagcactaggtcctatgctgggcatgctccttttgatctcctcggaggcgtcagagttagctactgcgcgtggtgggggccacctgggtgctggtgggggattctcacgggctggccgtggcggctcccctt

SEQ ID NO: 109206 - DNA, 242 bp, Glycine max
cccttgggaaataagtgggggtcaggagatcttgcctgggaaaggaaattctgcacttcaattggctcagttccatggcgaaagctattagaaagcaagaagtatatgcacctgtttgaacatgtggtgaactgggatgactctgccggcaaagaggcatttgacaatgcaaaaacaaggtatcgggctgagatcaacggtgttccctgcaacatttcgccacctgatcccaacattttcat

SEQ ID NO: 109207 - DNA, 304 bp, Glycine max
ttagagtctaagggtttttaccaacttctggatatgttacttggggttggggggtgtctaatggtgctgattgctgtacaaaacaagttgagtttcacaagggtggagttcatagtggatggcatggtggtccttttattacttcttctcccacttggtatcgtgtttaaagaataattcaaaatttggaagaaccaaaaccaaaacttcactgatgctgctgcttcagttgttgaattggcacagccagaagaagcaccatctcattcataaaggaaaaacaacaactcatgcttgaagaacg

SEQ ID NO: 109208 - DNA, 206 bp, Glycine max
aagaagaagatggcgaagactacccacaggcgtaaccaccaccaaccaccgacgccgattcactggaagccctttccgccaccaccagcaccgcattcgacacctcaaccgaacccccgaacgacgcccgatcggagcccgacccctctgacgacctctccgaagatgaggccgactccgacggctccaagaagtccccgaaatcc

SEQ ID NO: 109209 - DNA, 185 bp, Glycine max
gacaagacaaacgataccacagatttccagtccaagaataagaatataagagccttaatctgagttaggttcataaaggggataatagccaacctatctaaactatgcatttattgggctaaaaaaaccacacaccaagtcaactcaaaacttgaagtgatgaagtgcagagggtccatcaagac

SEQ ID NO: 109210 - DNA, 338 bp, Glycine max
  unsure (1)..(338): unsure at all n locations
gtgggttctgtttcaacctcatgngtcatgaactactactacccatgttctgctcctttgcggatcgtgtccgngagtccttctctttctctctttattttttcttttaattgtttttttaataatctttgtttgcgttgattttggattaaaataaacaaaattcgtggatggatgattctggaacatggcgtgtctgatgatgatgcaaccgtgtgggttgttgttttatggtttgagtttgatttggtttttgtgatttgtgatttgtgctgtgtatggatctttgatggggttttgttttgtttcgcttgggtgcttttgtttgtgggtttttt

SEQ ID NO: 109211 - DNA, 276 bp, Glycine max
  unsure (1)..(276): unsure at all n locations
gcgtgggnagatcgcgagcgcgccctttttttataaganaacccacccttttcttcgcacaaaactgggaatatttcatatcaataaggattgcggcaaagcccgaaagatacaacattcattagggaaaacaggagttgggaaaaataaggggagaggggttgaggaagaatcaattgctcacagagcatgctaaaacatctaaatattccacacacgggtattgaaacaacccaatatagaaaatttttctttggggtattataaaagcagaac

SEQ ID NO: 109212 - DNA, 304 bp, Glycine max
  unsure (1)..(304): unsure at all n locations
ccacccccttcattcccgacccgntcgtcttcgctgcttcgcgtcaacacttttcttctcttctagttaaggtagtgttcgggaagatgtcgagtcacggtggttcttctttaaggaacggttccttgtccaatagccccacgcgggccaagaagaaagcctttggctctgagcattcaacgcctgactttattgctcgtaaaacctttacctcaccgcgcaccatgggagagagaactgtgaaatcattgcggctttcaaaggcattgacagttcctgaaacaacaaccgtctatgaagcttg

SEQ ID NO: 109213 - DNA, 347 bp, Glycine max
tccgcccacgcgtccgcccacgcgactgcctcacgcgtccgccgtttcttccgcgcgaaccgtgtggcaggacctcattggccgtcactgccccatcttcgcagtgaatcgcgaggtgttgatgcccatacccaagcccacgggttacactggtgcggatgcttataaaatatcgtttcaagttggcagggaaaagtttttaatcccgtggcttcttgtggtgaatcgaaaaagcacggaggtcccaatgattgaagtagatctgaggtattcaggaagtgatttgcatggtgtcacagctaaagttgtggatatgcctcatcactatgttgaagttcatcctgaga

SEQ ID NO: 109214 - DNA, 354 bp, Glycine max
tttaaatgtttacccatgtttgtctaatatttcatgtgctgcggtattacgctcgcttagctattgctcattacttctgtatttttggggtcattctatggtagtaatgtttggccataacccctaaatcctaccatattttctacagtgcaatggggtcattctgatgatttttataattgatttttcatcctggaaggctggaacaaagaatatgtacttagttagataagcaaatgatttagtatggatgatcattattatgcaccaactttatagtttgggtagaagttctgatgagactgactatctgcattcctattctttaatgatcgctattattaatattgggac

SEQ ID NO: 109215 - DNA, 101 bp, Glycine max
accgagcccacagcggccagaagaaacactaagcgacccaaggatacaaagcagactcagcaagaacagccagcgcgtaagccaaatggcacgccacgagc

SEQ ID NO: 109216 - DNA, 311 bp, Glycine max
gcggacgcgtgggtgcgtgaggagttattaagcttatgagttaatggagtgatactaaatcagctccttccttttgattgaagttcgattatcatgttaaatttttcttataagtggcatgcatcaaacatggtttattttcattaggatttaaatagttatatcctgtggacaatccttgaaataacagaacataaaccatgtgaaaactgctcaatcttgctgtttctgaggttgaggtttcattcaatttccagcaaacccagattacagggtttccaatcaattgccagttatattaaacgagacca

SEQ ID NO: 109217 - DNA, 237 bp, Glycine max
aatctcgccggaaaattgccctacgctggccggaatctccaaattttccgatttgaaatccgaattgtgattctgtttttccttttctttttgccagtgtttgagtctttagaaacagccaaaaataaaaaaagaatttgcttttcttctttttatcctggagtgagattgcaaggaaagcaatgcggagagaggagatgaaatttttgaaaagaaatctcgagatcccttatttct

SEQ ID NO: 109218 - DNA, 236 bp, Glycine max
agcgagaactaggacatggtgtaacaggcattgagcaagtgattcaatcgaatatccctattccgattcaccacatgcctctccgatctaattcctatcccatcagcatcgtttcctgaatggagtgaaatgccttttgcactgtgttagacacttgggggctgaatatgcataggttgtatcgaatagctaactcttgcaggcttggtgatggttgaagtggaaccaaagctatg

SEQ ID NO: 109219 - DNA, 296 bp, Glycine max
tgatctcaaacaccgaactttatttttctccaactgtttttaccacccacgagctcaatctgttagatcagtgttcactgtttgctgatttttaatttttttctctgattggtgtttgtttggttgcacaaattcactcttttttcaccagggggtgtttttttttttctgtgtcgtataaatttgaaggattagaagatcctcttttgatcttcggttttgaacggtgtttttgggggggtgtgattagttctcttctgatgttttatttccaatcactatttcaaatatcacct

SEQ ID NO: 109220 - DNA, 141 bp, Glycine max
aatgattaacttcgatgtattgattgggagtctgtatgatgattacagtcaaaaacaggaaaataagatttggtgcatcgttcactattttcaaaggataagttctgaaatgcccaagggtattgtctgatttgagcgaaa

SEQ ID NO: 109221 - DNA, 165 bp, Glycine max
agaagtgatagagaagtaagatgagaagaaagagagtgagtttgaagataagaatgagtaagagacttagcaagaagcttcttccaccttatgcttcctatgctctggttgccattgcgctgcttttgttaggcgttctcttttactctgtctcctctgcttcat

SEQ ID NO: 109222 - DNA, 293 bp, Glycine max
tcccaattcctacttccccaggggtggtttaaccctggaactggtgtgcgaatcccttgctttcaaaggcaagggcctctgctaggtcacccaaaccggctttgttgtcctctgcgaccgccgcgtcacccgcaaaaagggtaactaactctccttattgcggcggctgcaagacgcaaaacttgtcctacgaggctcagctcagagccaaggaggagcaggttcgcgacctgttgattcacgtaggaagattttctcgcgagcaactccaactgcacggggctatcaagccc

SEQ ID NO: 109223 - DNA, 311 bp, Glycine max
gtccgcacaaatcgcaaggcacggggtactttctgttcgattcgagtttgctctctcgctcccgttctaaaccctagagcacgctctttttagggtttatatttcgattcctccttgatttcgcaattcgaatttcgcacgttgtcggatatttctttttgatcgaattctcggttccatggatctttcgagtctcgctgatatactccaggccgctctcagtcccaatccggacgagcggaaagcagctgagcagggcttgaatcagtttcagtatgcgcctcagcatctggtgaggctgttacaaatca

SEQ ID NO: 109224 - DNA, 256 bp, Glycine max
ccctgtgtcacaaaacacaaactgggggtcgtgttaattctctgccggttcaaatacctcctttctcgggaaaatcttcacgctgcgttttcccgggaatttctcgttcccccgttcccgctaatcgtttcagagatcgaaaccagcgtttcaatctccgttcaattccctctcctttccgtttccccgcgagttctcaaaggggaaacacaaaaaataacaaccccactagtataccttcgttctctcattccct

SEQ ID NO: 109225 - DNA, 270 bp, Glycine max
gttttatacagatcaaggatgagtatggtagcggggacatacgagaaattcatggggggctacacccttcgctccaattcccaaaccctaaaccctcttttttcttacccttcccatctctcctccatcaagtccgtcgccgtctccggccccgtcgtggcctccggcggcgaggacgacaccatccagctttatgacctcgccgccgccgcctccctcggctccctccacacccactcagccaccgtcaccgacctctccttctacgcc

SEQ ID NO: 109226 - DNA, 352 bp, Glycine max
ccgcggacgcgtgggctatggggtgggtgtgcttgatgtgtcatcagaaggaatgaggccaatcaaggggattccggtgtatcacaaccgatcattccctttcttgcccttggaacatacaagatcagacaaggatcatcatgccaaaatgtgtttatatcatcacatgcctacatatccctctttgtcctcttcttgttctcctctatgcccttcttcttcttcttcttctccagctgcaccctacttcgtcgcgaccgcagcaacagcagggggtctggatcccatgtcctacctgagctgctcaggtgggaccacaaaccccgcggcgcatagggctgcaacagccaca

SEQ ID NO: 109227 - DNA, 350 bp, Glycine max
cttgtattgatccgaactgatcgcaaatacggagggctataatcaagcaaggagagtcgctttgacgggaagcaaggatttccgctgcaattggaaaacgaggaacaaaacggcatgaagactctggagtgtcctgctttagaacggcttaacgatttcttgggtaatttgaatctgggagaacgtactatcaaaggatgccttgaagcctatagatgcaaacatgctggatcggataaaaaactctctatcagtttggagacagagattcttgagtatcttgggaaatcatccgacactgattcctcctcaccagatcaaaccttattaaccagaaacagccgaaagac

SEQ ID NO: 109228 - DNA, 399 bp, Glycine max
tttattcgtccgcccacgcgtccgcccacgcgggcggatcaatcaatcttctctgggttcaaaaacattccaataatggagtctttgtctttttctttgcactcaaacctccattcccttactttgctgcaacattccaatcaaaacaagaagcgccgcaaaatcacacaccaaaactccttagctctcactccctggacttcccatacccaacaccgcctctactcttccaacgggctgctcgcgctccgccgcaacagcaaccctaccgcctcccttcaagtccgcgccgacgcagaccgagttctcgccgccactgccaaaggccgaactcgctggagccgcgccattctcgcaaatacgttcggccggtggaggaagcagaggcagaggcaccac

SEQ ID NO: 109229 - DNA, 433 bp, Glycine max
cttatatcgtgggcagagttgttcacaaggagcctagacgtagtggagacaaggctatgactttgtgttttgtggagtttgttgactccaaatgtgctctcactgccatggaagccctgcaaggctacaagtttgatgataaaaagcctgactcgccaacattaaaaatagagtttgcacactttcctttccgtctaccatctgatcatggcagcagcttatcaacaagatacacactgacgggacattgatttcttgggcgagaatgtatttgagggtgctcagatgtcagatagagatattcaattttagattccaaattttaggttaggcctgcccgctgaatatagtatatggatgcaagaattctggctacaagacaattttttaatctagaatatttgattattggcattggatagaaatttcatta

SEQ ID NO: 109230 - DNA, 337 bp, Glycine max
gttatttaacgctgcccctctactccaaatctgggggcgagatcaacccttaaggggcgaagaacgtcattattggcgtcttcgtcttccttggccatggcccacttcatcgtcctagtcgacggcaaaggagagagaatgggagaatggtgcttgctgcggtagtggaacaaaagaaaagaaaagagggaaggaatgatagaaccccgttctcgatcccattatgggtcccgaaagagagtcccctcttcgactgatcgaacgcgtttcagtaccaggtattctcgatccctttttgacttggatgcgaaaacttcatcttttaaccaaagggata

SEQ ID NO: 109231 - DNA, 186 bp, Glycine max
gagttggataggactactctatcactacagctatatgaacaatataagaaacgatcaaaacaaagtagatgatcagccattagtttcagttatagctacagtacatttcatttcgggtggagataattcttaagtgtgttcctcaaacaagtttcaccacatttgagtgcatgaatatggaggaga

SEQ ID NO: 109232 - DNA, 357 bp, Glycine max
ctctttatggatgtccaaactgggaaaacaattggatgacaagggtcttctcattcttgctaatcactgccctctactctgtgatctctccttgagctactgcacattcatcactgatgttggtctccgttacttggcttcttcttccaagctctcatctctgaggttgaatttcacaccaaggatcactggctgtggcattctgtctcttgttgtgggctgcaagaacctctccagccttcaccttatcagatgccttaatgtcagcagtgtggaatggcttgaatatcttggcaagctcggaaggctcgaggatctctccattaagaattgcagggccattggtgaaggggactt

SEQ ID NO: 109233 - DNA, 261 bp, Glycine max
cgtatgcttgggcggacgcgtggggctaggcatggttcgcctgttttaaatgaagagggtactttggcaactccagatattgacaaaggaagttgggtctctgaatcttcatcttctgaggttcaattctctcatcagattatcctgtgcctccccccatcctttttaattaacaatattttagtgtatgcttgttgttctgagtgaggtttaattataggtgaccatgtgtgtaatatatgatactttggaaaattttgg

SEQ ID NO: 109234 - DNA, 170 bp, Glycine max
agcttgagacgctgtaggttctggccggcacgccggagctctaccgggacctcgtaaaccttaacgtggttgcctccatggttggcctgctcaaccacgacaacaccgacattgccatcggcgttgtgcaggtgctccaggacctcaccggcgaggacgtttttgacgac

SEQ ID NO: 109235 - DNA, 380 bp, Glycine max
tttttcgccgtttaagccctaactcttcgctgcgtcactcgccgtttaaaacccgcactcgttagagcctgtgatcggtcacaacagatgggtggttatggaagcaaagagacgaagggattgagttgggtggaacccattttgacatttgctaggagaaacattctacccttggctctggttagtgcagtgacattaggattaacatatcctagtattggttgtgttgctgataaatacggtgtgtcaaaaattggtccatctggtattttgttatctcaggattgatgttgcgtagtgaagaaatcggtgcagcagttgaagcatggcctgttggactctttgggcttgtgtctattatatttcttacaccatacttt

SEQ ID NO: 109236 - DNA, 372 bp, Glycine max
gcttaggtccgtttattccctccgtgccgtatctcaaacccctcattcattcattttgtatgagttttttcatggaatccctacaattcacaccacagtcctaccaactccaattccatttcatgaacaaactctctcccaaattcaaacccacaatttcctccattcacttcaggaccttttgtgattcttcttcttctccttctactaccctcacccaaacccagaatccgagtgaccctcaaatcatagttcctaacagaaagcgtagggtgaaggcttcttctgatacccaattcaaagagaattggttggcttcactctcttacccttttccagaaaagacgcattttttgagtggagagcatgaac

SEQ ID NO: 109237 - DNA, 312 bp, Glycine max
cgtgggcggacgcgtgggagactctacaatactttgttgtcaaaacctacctcaagtttttgaacaacctctatttcaccaaatgacataaaaatcactagaccaagagttaaaatatacgccttaattatcctcattgatggtttcttcatggaacaattattcaagtcaacaacgaattcctttcacacacaaaagaatgttgaattctcatcttcaaggttttagtaaagcctaagaaaagcttttatattgctattgtgaagagaattcgaagaactcataaaatttgtttaacatgtccaacaacaa

SEQ ID NO: 109238 - DNA, 190 bp, Glycine max
cccattcgtccgcggacgcgtgggtgcaattctacgggtgtccaccaaccatgatgggctgcatatacaagtagaaacacaatttgaacaatctgagacaatgcatcacttcagaacataaatcataataatcagaagggccaaaaactaagatcaaaataacaacaagagtcctatatcttgagcctcc

SEQ ID NO: 109239 - DNA, 315 bp, Glycine max
ccctcgtgaccgcccacgcgtccgcccacgcgtccggtgcaccttgacagctttcatccttggcagcccagccgtcaccaaccggtcggcagtagcaacgcagaggagatcactcgtagtgaatgctgccaaagctgttgaagcagaaaaggtcagttatgacaatgacatggatggtagcaatggaaggaggaacttgatgttcgccgtggcggcggctgctgtttgctttgttgctgggatggcagtggcagatgagcctaaaccaggaaccccagaagccaagaaaaagtatgctccgatttgtgtcaccat

SEQ ID NO: 109240 - DNA, 282 bp, Glycine max
ctgtcgcgtcgacctattcgtccggttttttctgtgaagctaaccttgttttgttattggcttatatgtgaagatgagtcctggacttcagtttcagattacattacatggctttctactgcgggcttcaatggggttcttgatgcctggtggtatacttgcaattagattgtcaaacagagaggagagtccaaaaaggcatagagttttgttctatgttcattcaattttgcaggcaactatatcttagtccatattacatcataattttggattgattgt

SEQ ID NO: 109241 - DNA, 267 bp, Glycine max
cggtctcttgggaaaattcttccaaagaagattgtaaatatgagttctcctctcatccatgaaatcaaagggcaagcatttcggttcttgaaggagaagatgaaaactgcaaggctagcgctcacagatgttacaccagtgcagttaatgacagaagaagccacacatgagaatccatggccaccagacacgcgttccacaagtataatagcacgagctgccttcgaagtggatgaatatgagagaatcatagagattttgcatcac

SEQ ID NO: 109242 - DNA, 513 bp, Glycine max
caataagtggaagaaaatctctttctgtctattttgttttgactcaaatggcaaggtcatgtctacactgcatcagactaaccctacagaaaaaataattgttctcaagtatcaacgtgcagcttgagcttcatcatctgagttctgatgataatgctaatttctgaaagttgccatcattggaagctgcacttaacatgacagtttaaaaatatagctcttgtttttggatcctacttctttatattcgttttaaactattttgtttttcttttgacttgtgcacagtcatggtttagggctgataagttctttttaacaatggtgccatcaattttttttctcatctattttctgctttatgtcccccagcctgcctaacttggaaaatgaaagatgtattttgcatccacatggaatatacaatcaaactttttaatccgagcctagaaaattttggctggatgattttgtgaatctcatggttttttttttctccctttacttatgttc

SEQ ID NO: 109243 - DNA, 85 bp, Glycine max
cgcaataatatatgtgacaatgatgataatccactggtcttttgtttcatccaatcacaggaaaaaaaaaaaaagtaattcgtat

SEQ ID NO: 109244 - DNA, 180 bp, Glycine max
tttaggatgaggactaacactgcgccgaaggattccaatttctgatgctgctgccacacttttgtgcattgatctttccacctgctttgttcccttgcaaatgaaatgataatattttcaatggtcacaacttacaagacttgcagtgttgatctgatactttattgacttgcttgaaca

SEQ ID NO: 109245 - DNA, 346 bp, Glycine max
gagcttgaaagcagttattgaatctgatggcgaatggtgagggaagcgacattgacgaagtgaactatgaagaggaagaaaacacagcacaggaggaagatgacaatgtcatggaagaagaagaagacgaagaagatgagtacactttcaggttcaaaaacggcatgaaccctttggactttgttgatgacaatgatgattctggcattcaaccctaccagcgattcgtgcgttttgaacaggaagcccttgctgataaaaagcgtaaagcaattgatcactgccatattgaagaaccaccttctaagatggctagggaaggagatgttactggggcaaaaatagc

SEQ ID NO: 109246 - DNA, 346 bp, Glycine max
ccctcgtgatcgataaaaaatattattattattatgagtattcataaaaaagatatgagtagtgtataaatctcagcgttgacaataaaggacagttaaattcttaaattatggtgtaaaagtaaaataaaatataaaaaaaaagttaattgaaatttataatcagttttaattataacaaattaaaaacaaaaacaaaactcttcaattaaacaataaacatccataatttgtggacttcatttatgttcatattagtttagcctctttgaataggaaaagtgattaacatcctaaatttgtgtagtgtctatgaccacatatgttggttggtaatgagaaatga

SEQ ID NO: 109247 - DNA, 465 bp, Glycine max
ataaggctaatatttggaaaaaccaaccatggggacctaagaaaatatttatctgggttttttgacaccacagtggggtaatgcttttttttattattatattcccccttgacgattcctgtctaaagatacgtatttcatgcaaaacttccttatgcaggaacaaaagagaaacacgcagttatgttgaaatttctgagtcacttggtgttgataaaccatcagatattttatttgtcactgatgtatatcaagaagccacagctgcaaaggcagcaggtatgaacatttttcctagtccataatctaatagttaaattttatccaccttctcttaaacttgttacattatcaataaacttagtccaatgtttggtatatcttaaagtaaactgaaccatacacttaaaaagtgtcgcatgattatagtaaccgattcatttcaattgcaatgaagactttata

SEQ ID NO: 109248 - DNA, 379 bp, Glycine max
tgatgcgtgggcggacgcgtgggcggacgcgtgggctcttttagatggtccagtgacttctccccatcttactgaagatatccctgttttgcatctagatgaaattcatgaagatgaggaaacatataaatcagagttggagcaaaattcagaggacattggccaagtaggtattgttttaatacatgggtttggtggaggtgtcttctcttggcgacatgtaatgggacctctagctcggcagagtaattgcacagttgctgcatttgataggcctggttggggattgacttcaagactgagtcaggaggactgggagaaaaaagaactgcctaatccttataaacttgaaagtcaggttgatctgcttttgtctttc

SEQ ID NO: 109249 - DNA, 237 bp, Glycine max
tctagtgatcttaccttggaagaagctctggatgttatattcaatacaaaaatatcattttctagtactgataatggaagaagtaatgggaatgaaatggttcttactgatatatgcttgggcatcgcaaatgatagaatgcttcaaatcaatgccatttgtgggctctcatggataggaaaaggtttacttttaagtggtcatgaaaagattaaagacatcattatgatttttttg

SEQ ID NO: 109250 - DNA, 205 bp, Glycine max
gaaacattcttgcagcgtttatctcataggtctgcttttggatttggagatgaaattaagaggccctgaggttgcatctaaaaccttctacaatactctgggaaactgcagtgttcttatatccaacatgtttgggccattagagcaaatggctttagcacaatcatcctgtaagaggtgtctattccgccatgtctggtggacc

SEQ ID NO: 109251 - DNA, 164 bp, Glycine max
ctctaatctgggaggaggagaagaagaagaattaatttcaacatttttgttgcaaccatgaacaacaccaatgaatgttgttgcaacgatgaaaatgggaaaatcgttgttggggtgcccttagttttcaatttcttcgataagaacaccaacaatattgagaa

SEQ ID NO: 109252 - DNA, 191 bp, Glycine max
tcaaatcgggcgaggcagcagcttctgatccactcatagcaaatacccaggagggtacctttggtcttccaccactagtgttattgttgttgctaacattaccgcttctcgtgggattagtagatccatggttgactgtgttagaattggcagttaccgttggtctcccagtcattctacactcccgagca

SEQ ID NO: 109253 - DNA, 300 bp, Glycine max
tcatctcaaaactgctttacctttacctggcctatatttcccagctgtactcttcttgctggtttgacactttaagtttaaatatagaaaaaaaatgatgttatgagtaataattacgtgtgactctgcagtacctacatacaaccaaatctgagtttgcttaggttgctcaccagtagattgtgggagatctcatgcaccttaatcctaccgaaaagaaagtcaacttgttttagttagcaaaagtaaaattctatatttgctatgtagctactgacaactgtctacagcttatagtgc

SEQ ID NO: 109254 - DNA, 113 bp, Glycine max
acagccgtagcctcgatctttaggaaaagatttgaagattcgcgaaggttctgttctgctatggatgttgtgtctgaattggggaaaatcgtttcagcttgggggtgcaacag

SEQ ID NO: 109255 - DNA, 161 bp, Glycine max
aacttttaaaatgagcaggggagttggttgtcttcagaaaaggaaggaacggcaaaatcttagcttagcacccagttttctgttcttattaactgaagatgtgaacataaacagatgatgcttgtgcttacatgtttgctgcatgcaggtactttgctggt

SEQ ID NO: 109256 - DNA, 148 bp, Glycine max
cccttatttagccttcacacactccaaactgtgaaatccatttttagcagagtaaaaaaaagtgagccagtgtgagagagagtggtcatcagtcatcaccgctgattgattaagatgcagcaatcaaacggctctgattcgacgacta

SEQ ID NO: 109257 - DNA, 133 bp, Glycine max
atcttaatatgtggacatggaagaggttgaagatggtagaccatccaagaggaaaggatctactccgagcataagccgatgtcagaaattacttctggtttgcatcgtggaatatatcatcaagggaaacttc

SEQ ID NO: 109258 - DNA, 376 bp, Glycine max
tttgttgggtctttctctataaccatggactcgtccaatcgcattcgaccaaataccaaattttcagaatggacatacaaaaagtgggaaacattacacacgaattagacaaaaagaataaaaaagaaaactacgaaatacagatgtacacaaacaatgccttctactaataataaaaaataaataatatgtacaaatagaatagtctctaattcttgctactattgctccctgagttaaaccctgtaagtttttcgccggtcacctaatttgcggggatggcaggtagtaactttttcagctgaacgttgatacttcacctttggttcaacgaacaaatcatcatagtaattagataacacgtactgagcataat

SEQ ID NO: 109259 - DNA, 377 bp, Glycine max
gctaacagggagggtctttgataatgtattgatgaaaatagaatttttattttacaaaaacaaccgaatgagaaaagttacaatgtttcacacttttatgttcctacctagatagctatctccttatatcgtttcggtctttgtacattttcgtagtcctccgttcctaattatgtgcaaaaaccaaaagaagagaaagaaagcttaacacacttaatacacctaaagcctaaattgcatgctcttcagacggtgaagctccacaaggaaacctcagcatcatcctccacaaagttccagacatccctaacattaacatatgttacaaaagtaggtgatcttaatggttcagcagccatagtctgaagccactcatg

SEQ ID NO: 109260 - DNA, 325 bp, Glycine max
  unsure (1)..(325): unsure at all n locations
tttgtttggtcctctttttttttttngaggaggttttttttttgttttttttttttttaaacacgccctaaaatttcatttaataaaattaaagatatttcccccccccttggtcaatgaaaacaaattaagttaagggctcattataaaagggcccctaatttcttaataaaaatcaaaagctgggtgagaacacacgggggtttgtttacaagaagggcttccaaattaaaaccatagacgggggtccttcttttttaagacccaaaagcgaaaaaaaggaaataacaattccttttctttgggggttattaacattaatttg

SEQ ID NO: 109261 - DNA, 487 bp, Glycine max
ttttattaaaaaatacactgatcaatttcttaatcaaaattttcaagaaaaataggtaatataatataaccgtttttaaaccaacaatgtaatacttttaaaaacggttatattatattacctatttttaaaagtattacattgttggtttaaaaaaaaagtattatattgtatggaagtgattaattaaatcgtgaaagctagagaaagtgaaaaagaaaaagatacggacacaccaaaagcaagtaaaatttaacacgtttggttttttcaacttgaatgtatttttgcatagtagtccgaaaggagtgatcttcgtgtctggcctcgcgtgaaacgggtcggaaggataataagggacatgtttggaatgacgcttcccatggaaattgctcattgcatcttaagtcttaacaatgcacattatggacacatctcacatgtgacatgttcttcacattattttatttataaataataaataaac

SEQ ID NO: 109262 - DNA, 359 bp, Glycine max
aacccaaacaaattccaatgccttaattttattttcctctaaaattaagggagacggcgttggtaacagccaacaaggtgaggcgaagaaacagaaaaaactcaacaaaaaaaaaaagccaaatgaaatggagcaaatggtgcggcaggaaactatatttttatgctaaagggttataccgaggctagcgagtctcttttacaacattacattaactctgctacaccattttgcagcccatcacttaaattaacactactgagtgaacaaaatctggaagcaatcaagatgaacaaaaaaaaaaaaaaaggcaaccaactttgccctggttacactcactaatccaaaaatcttatgta

SEQ ID NO: 109263 - DNA, 385 bp, Glycine max
ttttttttttttttttttttttttttttttttttttttttttttttttttttttttttcccctcattacaaaacaggaaggtggcaaccttttcacatttaaaaccttaaaaatgagaaagaaactgttttactacaaaagggggatacaatttttggggatgagagatgtcatgaaggggaaactttgtccattattccacgagcaaattccatgacgggatgaaaagaccgaaaactttcccttttttttttaacttacggggaggtacaaaaaaaaatgtttagaactatatggcaatcctttataatcagatgaaatatatccgaatatgaatacattgacaaaatacagatcctttcagcttaacacttaaatgaactcc

SEQ ID NO: 109264 - DNA, 232 bp, Glycine max
  unsure (1)..(232): unsure at all n locations
tcctnttctttttcttctttttttttaaaanaanttttttttttttttttttttttttttttttttcgacccaccccctaaccgggatgggaaaaagctttaggggctttgaaagatcgtccaaactttgaaaagaaacaagcgatggggaacttgcatttaaaaaccggccttgggaaaaaataaaaaaatttaaggcccctgtctagaaaaaaccggggctttggaatcc

SEQ ID NO: 109265 - DNA, 360 bp, Glycine max
aacaaaagggtgctggaacagttcatcccaataatttgattataataaataaaaatctaattgactatagatttacaacaagaatcagcctttcaggctagaaagaaaatgaagatgcaaggggagggatgatttacaataacaaataacaccaccctcgtattctctcctatcctcaccaatttatgtcttccatatgaacaaatttattgcacagtatcaaggtactcacatcttttaattcagtatatattggttcacttaattttatgaacctttaaataaatacagaaggcactttctgtatggattctttctttcactatcctggacatgcgtgggaacaaaaatggaacacac

SEQ ID NO: 109266 - DNA, 355 bp, Glycine max
gtttagcatctgtattctaaactcactttctggactttagttatcttggtgattggcccaacatcactcacccaccccactcattttttggtttcactctttacttttactctcacaaactccttccttctcatgttcatgtctcaacacccctgaagaaggtcacaagtgtattccattgtgtttgtgtgcaaccacttcactttaatagtactttgttcttgcacgaaatagggacacgaatcacaacccttgaacctccatggctgatgccaccaagtatgttcccatcggtggtggcaatgtggccacggacctcaagagcctctctttcattctcaaaaccaaaaaaaca

SEQ ID NO: 109267 - DNA, 306 bp, Glycine max
ccttcgcttcggacagactgtatctcctttctgttgatgatgatgaagatcagtgcatacgcttgctttctttctgcaagaaacataggcaaccatctaatgagccttctgttgctgatgaacgtatggtccgagttgctggtctatgttcagactatgaaccaccgcccaatctgtctggttgtgctcgaagtgagccatatgattactttggcaggagaggtcgaaaagaacctgaagcacttgcagctgcatcgttgaaacgtttgtttgtggagaatcaaccttacttagtaggtggatact

SEQ ID NO: 109268 - DNA, 310 bp, Glycine max
  unsure (1)..(310): unsure at all n locations
ttgttttttttcttttttttnataaatttttttatttggtggttttttttttttttttttttctttaaaaaccaatggttgggacaccccccggtgaatttaatgggtaaataaaggaaaaaggaattggctccccttttttgttttttatggggagggctaaaggcggacccttttactacaaaagggttcccctttaaaatagccattaaaaaagccaagactgattttttacaggggcccctttttccgggaaaatttacatcaactttagataaccggggggggggggggggtccccttaaacttt

SEQ ID NO: 109269 - DNA, 287 bp, Glycine max
tcggatcgtgtaactgctagtggaggtgaagttgggagacttagcattgttggtggggctgaggtgagcatatttatgttgtagttatacttttttcatcctaaaatggaagaaaaggaaagatcttccatttgtcccctacccccttacagcatctaacatgggaacattccatttagcttatccttgttttaaagtttagttctaaaccattgcagattggtccccttcgttgctggccaggaggtctatgcctttctaggtcaataggtgacatggatgttggg

SEQ ID NO: 109270 - DNA, 276 bp, Glycine max
cctaaaccatacagtacattaaaaacatgaaacgcaattgtccttgtgaggggcaaaaaaaaaaagcttccatttcattcacattaatgaaagtttgatgtcccccaatttaacctaccactccttgaaacatatatgacattatgagtaatgcaaaataattacatttgtagaaaaaaagccaaagatttacacccattccattcacatgggggtattatagctactccactatgttattacttgcgccctcaaagggaatattccctttgagct

SEQ ID NO: 109271 - DNA, 349 bp, Glycine max
tcgggtatatccttagctttgctcattttctgccaaatttcttaactttataacgaattcaaagaccccttttgggtaattttatttggggtatcgatgtcagtttattaactccttttgatgtgtgtttttctgttgctttacctacaaacgggtaagtgtgatttcagtttaacgtattggatttattttcagaagctatagttacaatttccacattcaaaacgtgactcttccattcttatcatgatctgctgtggaatgctatgaatcgataatttgtggtgtgctctaaataaattttgcagattattgttcaacgcttgaaggagaccaatcctatagctgc

SEQ ID NO: 109272 - DNA, 320 bp, Glycine max
gggactcctatatctcaacttccttcttatcaccaaattgctacaaaattctaaaaacgtgtttaattaatacttttacaccaaattataccccgctctaattttcttattatatttgatcatatacgaacgtggctgaaaactcgttgcttagaatttcatcaggcgtaccaaagcgtgtagatcacgttctcttcccttcattatcccatcatgtttttttctgtttccattttctcccttcacctctcgaatctaccatgcgtttgtgaccaaagccaaaaacgctttaatgggtgatttaggaaaagaaatgagag

SEQ ID NO: 109273 - DNA, 244 bp, Glycine max
aaaaaaacccaccctttacactttttttccacaattaaaagggggggggaaatttttaaatgggccgagcttaattaaaaagaggggcatgcctaatttccttttttgaattttcccaaccaaccagcgaaaaaaaacccaaattccaaatcatgccggggattcccccttttcaaaaaaactggcaccagccttgggaacaaaaaaagctggcataagagttttacccccaatttcaaaattt

SEQ ID NO: 109274 - DNA, 361 bp, Glycine max
ggaattcgcattttttattcattcataagagaaaaaacaatcgtaacgaatgtaaagtaaggaaacaaaggtcaaaaagggcgaccattcggcgcttttttggtaattaattaatggagcaataattgcctgatgaaataagaaaaagcaaatgatcactcagaacgattttggacggggtggagaaggggcggtgccatcggcggaagaccaagcgggcggagagggggcgaacactccgtccaacccgaaacggccccactcgtgggagggcactccgccgctgccctcagtcccttccgtcggcgctttgctgccgtcctggagacatttatttggttaatttatttccaccaaacaa

SEQ ID NO: 109275 - DNA, 311 bp, Glycine max
ttctgttatatatttaaatggcaaactttccgcctaattctgacgaagagttcgaccgtggcaatttttcatcattgtcgggaatggtcggcatgaaccaacgacacttggactggttaatgaaaaacatatcccgcgaagacatggccgaactccaacaaaggacggggcaatgcgcccgaaagtgtgctgtgacgtatggaggtccgatcgtcgtcgttaccatcggtttcctcgagtttttgcgccgtaaacagaaccttccgatcacagcgccgcgctttttgatcggctaccccattatgtgtctc

SEQ ID NO: 109276 - DNA, 388 bp, Glycine max
  unsure (1)..(388): unsure at all n locations
caaagttccagcaaaggataaagcaggcttttgctcacattatgatttgatgaagcagttttcagtgttgcttaagtatattatttttgtgaggcacaacaaattgagctgaattgaactgngttttgaagcctgaattaaggtgacaatttcctattttgggtggcacgggcatataatctgatgagtaaggtttgtgattggaacgtgcagagtattatttgattgatattgtgccccctctctcgccacggttggtggctatagaacatggagtttcaatgcacattggtttggttagcggggaagcaagtgattcttttgttttactcaacgagatggtttttttaacatttttttgttactgttgtatagggcagtttattct

SEQ ID NO: 109277 - DNA, 429 bp, Glycine max
tttaattcaacagagatttagaaaacctcgaaaatcctttatggcctcggaccaatgattcctagaatttataaaatttaatccataaaaatttttagaaaaatgcatcagtctggaaaataggtctttttgaaaaattaaaagatggcaaaatggcggagtgccgcgaatgcaaagcaaatggaagagccaaatatgaatttggcctgccagacttcagcaccaaatcgctcaaaaatcatcttttttcaacaatccatgcaaattcggaatatgtcaagaattttgaagaactggagaagacaaaaaaggagtccaaagaaaaagccgagaagaaacagccgacgatcgaaaatttaatcggcacgaatttgaccagcagcggcattttgtctgtggctgacaaacgaattatcaacatgataacct

SEQ ID NO: 109278 - DNA, 428 bp, Glycine max
cggacgcgtgggcggacgcgtggggcgaagccgaggccgccaatcaagaggctgctggcggcgaagccgaggccgccaagcaagaggctgctggcggcgaagccgaggccgccaatcaagaggccgctgacaccgatgccaggaagcaagagctcttcgaagcaatagaagccgatctcaatgagctgaaagctttgcatgcaggcgaacaagccgctggagccgagcaagccgctggagccgaagaagccgctggagccgaagaagccgctggatccgaagaagccgctggatccgaagaagccgctgcagccgaacgagaacatggagccgaacgagaacgggaaggcaaacaagaacgtggaggcaaacgagaacgtgaaggcaaacgagaacgtgaaggcaaacgagaacgtgaagccgaacaa

SEQ ID NO: 109279 - DNA, 347 bp, Glycine max
ttacgctttcgcccacgcgtccgcccacgcgtccgacgagctaaaggagtgtttgacgacagaattagctcgaaaatatagtggtcgtgacactgaaaacagtgactcaattgagttggtcactctgaatttcacaactgaacttggtcccccagctaggtaatacattcactgataccaaaaaaatgttcctgaaagcagtggtgtgtttcaatttctgtttgctgtacctgaatttattgcagttttgcatgctcaattcttgtagtcttttattcaatggattaatttttctgctattttattctgatgttctgtaaccaagcataagcaactgtactatggtc

SEQ ID NO: 109280 - DNA, 421 bp, Glycine max
ttctacgctttcgcccacgcgtccgcttcctcttgggctttgagtcactttctatttccacaaaggaaagtgttcattcccagctacccttatataatccataattctctctctcctcttcctggtttggactttgtttaatcacgtggaccgttagagttggtgaactcttcttttcctcacactacttagctgatcttcatagaagacttgcttcttttaccttgagatggggggaaacaatggaaaaagactgctggcaaaccaatgcagtgatgagtccgtcggatatcatctctagaactggcttactttatgtgattggccgccagcattttccttatgatcttctgatgttaagtcaacggaacagactttttctcttcaattttagtagtttaaccgcaaatgttgcagactt

SEQ ID NO: 109281 - DNA, 432 bp, Glycine max
atgacgttttggcggacgcgtgggttcctagacaatttttcagtgattccaaagcttcctgtgctaagaagcctgcaaaagttttgacaagaacattcagtttgagtttggtgagaacattgaccaaaaccactagtttcaaggcttctagagcttgttctagaaaatccaccagggctgttatgtgtgcagatatgggtgcaccacagagagccacttgttcttcaactttgaaggactcaaagttccctgcatacctcatgcttagccctgggggaactgagtcagagggaacttcagccatgaaggtttgcccttacacatattgttctcttaatggtcatcatcatgctgatttgccaccgttgaagagcttcgtgtctgcgaggaggctgcttttgaagatgcagaagcgtgcaaagcttgaagctc

SEQ ID NO: 109282 - DNA, 285 bp, Glycine max
cttacgctttcgcccacgcgtccgcacacttcttcctccgatccaataaatggcggaaccgtcgtccaccgtcgccaccgctgccaccgccgccaccgcttccaccgctgatcctccggcgccagtgactaaaagctgggccgacgaagcagacgaagaaaccaacaacaccttcaccgtcgagtcagaaagctcctccattaacctggaagcgttaaccatcgacgataaagaaaataactcttccaaattcttggatgatcccgatgattccaatatccaagc

SEQ ID NO: 109283 - DNA, 397 bp, Glycine max
attggtttcttcttctgggtgttgcttgaatccgtggaaagttcatttattttcgattttcatgcgaccaggttgtgcaagatcgcttatttatttatttatttatttatttttacccttttggatgtcaaatttcatgtgcttcccttttgcaagtttatgttgttcagctttgtttttataaggtggaccttttattttcattttgatgctgcagaggttttggttttgagttccaaaattttgtctttgtttcaaacgggtgaaagtgatgctgtcctgtagttttttttttctttctgtttttccaacacatattttggtgccaatgttataacaccaagttttggggctgttttgtcttgattcttgtttcctgagcttgccttttagaagc

SEQ ID NO: 109284 - DNA, 472 bp, Glycine max
ctattggttttcccttcgtggctacgcgggcatttgtgcaaccaatcaaccgtgtaccatcacctcgcttgtacgcctcatcctgatcagtcgccatgaaaattctgaccaaggaagaagcagaagccgcctaccatgaaacacttatgggtggtgcccaaggtgcagcttatggtttggtcggcgcaattgctctatcacttgtgctgcagcgtacttcacgcggttaccgccggctgactctgccattgaaagtattttttgtgacctctctcacttcggcaacttgtgtcatccaagcagagcgtcgaatgctccgtcacggacgaatcaagtaccaccacaaacgagcgatccttcctgagggacagcatcagcaagacacattagctcataaagagatcgcccccatcccttttcgacagcaagtgaccgattttgttaatgagcgccgatggctgatgattggtgg

SEQ ID NO: 109285 - DNA, 341 bp, Glycine max
gttttctatcaggtttcagagcctattcttgacgcacagggatggcagagagtatcatccatggcggccaccagagcactagctatagccagcaactccacatgctttctgcgtgcaaagaaaccctttgtgggtggctctgttctttccctcaacaacctcaattttcgtcgtactaggaggccttacacctgtagagccatctacactccccaggttgtcttcaaagaagaaggccaacccgaagccctcgattatagagtttactttgccgacaaatctggcgcagaaggcgaatacctggcatgatattcccttgcggctaggtgatgatatctata

SEQ ID NO: 109286 - DNA, 434 bp, Glycine max
ccttttcgttcgattttttacatcacccttcctttgtttccatcatttcgtgataacaacaacaccctctcgcctccaacacacacctcttttttttctttttcttttaagggtttagcttaaaccaggattttgggcaccgatttctctatgggagaagcaccagcattgcttgttgatgacgtgcaggatggggctctgaatggccttgaattgaaaaacgtaacttgcaaaacaactgctacagttggcgataaggcgggttcgtcccactgtgcggggcaccaaacctgtgtcgtgcaatggcctctcagctgtgcctttggaagaccgaatactgattcttaagaagggttctaagccagatgatcaaatatggttcctggagattgacacccaatatgttaggcagcagcaaaaattttggggtctga

SEQ ID NO: 109287 - DNA, 490 bp, Glycine max
gtaggtaccgtgatccaaagactggccagccatatgctacaaaagaagcttttaaaataattcgagaacggtatgactattctgtttgcaaattgtgttttccgcatttccccttttcacaaattttatagaagattgactaaactatatttttgagaatttaagctaatctcttgtttttgttttcctggagtgatttggtcaaatattccagacgaaggtgacttctggatcagtcctaccccagtgaaatgttctttattattattattattgaagttactataataaattttttaaatcaataatttcatccctgcacctgacattgttttttgttagtcattacatgaaaaaaacactacagtttagtcgatacatgaaaaaatgtttacaaattgcttcttgttgtttgttagtgtcatgatggtgttaaattaggtccctatgctagtatacttggcaatgttttttggtttagtctctatga

SEQ ID NO: 109288 - DNA, 421 bp, Glycine max
cttgacgcgtgggttgtatttctctgcaattattattataatgtgtttcggccggaagaagaaagggaagcgacagagttcgccggagtacaccaaagtgatgcccatttctccaacaacgcccccttattcgccgcccaagaagcctgatgatgctacattatcgcccctcgagcagaagccagttgataaatcgccgcttacgaagaaatcgaaggcaaaatctccgttcaagaagaagcttggcacgaaaccttcaaagaagaaggctggcgccaaaacaccgttcaagaagaagaagcttggcacgaaaccttcgctgaagaaggctggcgctaaaacaccactcaaaaaggagccggaggataaatcgccgcttaagaaggagccggaggacaaatcgccgcttaagaagaaactg

SEQ ID NO: 109289 - DNA, 443 bp, Glycine max
ttactctctatctttattattgccattaaatcttttgatagttataaaaatagttttttttactttaatttttttatttaaatgaaaaacttaattagaatattttgagaatatataatttcataccattatttaatcataaattatcatacattgtaatattattaaattttgtaataattttttaaaattatacttaaaataaagtttaattaactgtgattttttttacgttaatctcataaaattaaacttttataatacttaattatgcattttattatttttttttctctttttatgtatattttatcttaatataaagtattcattcaatgcatgcttgcttcttaaatactattatctttttatagttaaactcttttgcatttattgagtaatggatagattttttcggtacaacaacggatacattgagaata

SEQ ID NO: 109290 - DNA, 407 bp, Glycine max
gtttgggtttccgccggaactgagggacatgttgttgcccaacaaaaagggcgtcctcgttgcctctcccgcagaggacaggaagactttgaggtccaagcaatgcactaggggtatttactcttttttttttgttatttaatttaattttactaaatggggcatgcatttttttattattggttaaagaagacaattactgatgcttgttttcttcggttaaatcgatattacgcaaaagggttgattttgtgtgtggatgttttctgtctctaaaactaaaaatttgggataaaagaggaatggtgctgttaattttttattagttgctaaaaggaaaacatggttttgcttgggaaaataggtagtgagtggtgctttttttatttctggcaaggtttttttaa

SEQ ID NO: 109291 - DNA, 357 bp, Glycine max
ccactttccacctttgactgtagccattcacgcttgttcctctcttctttgtccttcctcacacttttctctcttctccctctctctctctctctctaacttttcagttataggattcatctccaatctccatctcttctcagttctctctctattctaagtaagtttttcattttatgcatacaccgtgtttttggtttcccaggctaaggaaaatttattggcaattctggaattggtatatggttcttgttcaacaggtcaaggattagtcttcttttgctaagtttggtgttcgggaatttttaagctttctttttgttttttttaaaaaaaaaacttcagttcaaaattgag

SEQ ID NO: 109292 - DNA, 440 bp, Glycine max
tcgaattaacacctcttcttccacctccatcaggccaaactattcttcaagttcaagcccaaaaggtgctgaagcagagtccaacatcaagagcaagagaaagagaagctttggatcaaaacctagcaggagaaaaatgtggttcatgtatgtgtttgatgaggaaaagaaggaactgggtaggcaacaagcaccaggatcatgcccttattgccaaggcaaggttgaggccatggatgttgagatccagtggagactttgcttcttgcccatgtgcttcaagatcaagaggaagtttttttgtacttcatgtgctagacgtttagaattgtattattaaacaacaactacttctaattattattattattattattatacatattaatgatactattattggtctcttcattttaattatattctacatataacccccc

SEQ ID NO: 109293 - DNA, 361 bp, Glycine max
tcgcttacttatgctcactcatcggaaataccgtctcttgcaatttgcatccgtttctggtcgggcactaacaataagtccggaattcaggcagctcagttctgtttcgtccatcccatcaaattcgcataaaacctcaaagtcagatggaaaggcgcccaaatcgagcactctttggcttaatttgccctccaatgcggaagaggatgtgcgaacacgtgttcggagctctttcttcggcacttacgtcgctttgttattcccagccgccacttttgctttgggttgttggcaatggaaaaggcacaaatggaagaccgaactcatcgaaaaactgaaaattgcaacaaaaactgcacct

SEQ ID NO: 109294 - DNA, 510 bp, Glycine max
tttcggctagattcaaggaaagctgtttatcttcagcatggagtttttgattcatcaatggggtgagtattttatctctatatttgcttagtttttacttgattctgttattagtttacttatgagttaagagagtcatactgtatagttgtgtttgaaaagctcaagttttgaagaacaaaaggttttgccttagtgttgttatgatgtcagaataagcaaaatttgtgcagtagattgagaaaagcttttgttgcattatgaactttatatttaagtcaataggtgcatgaaccttacattcttactattagtagggtagaaacagtctggtaaatggaattggctttatttactaaaggccagagcatttatagtatttgaattctaaactcactattgagcaacttgtcgagagatttgtgcatacccacttaaaattgtgtttttattgcactatttgcttgggatagtaatatgtctctatgctaggaattgggataaaaatgg

SEQ ID NO: 109295 - DNA, 386 bp, Glycine max
  unsure (1)..(386): unsure at all n locations
tcgctttcattgngccactcccctaacaactcctttcttcctctttttcacgatctcgatctaccctcttcttccgtcccatcgttgtactgtcgctcttcctctccctctggtgcggcgatctgcccttactccgctgtgtcgccactcttccttcgttttgccaccacactccatctccctctagtatggtgttctcatttgttcaaatcctgatctccatctgttgcatcgcttgtcgctctttctccctctcgtaagtgtttctttctccctctctgcctcttcattttgttgaagtttggttttgatgtggcttcgatcactacctttgttgaatctcaaagtgttgcctccaatcttgggttttccctacaatcttgggt

SEQ ID NO: 109296 - DNA, 445 bp, Glycine max
cccacgcgtccggtatcttccgtgccaataaaaataaagcaccagtagcaatcaactttgcttctcacttctgtgtttgaagcttctgtgaggggaaaaagagatgcagtttgcaggttcaatagtttcaactttcaggcaatagaaagagttctttttacacggtttgagttgagaatccagtatagactttccgctatggcagcaggattggaactcatacccataggtacaattttgacagtggtaactaaccaagtcttgaagacggctcatgcagcatctgatgttcttattggtaaagaaagcttcaaggccctttcgacacatctatttgatattgagccagtgctaaaggaattacagcttcaagaattgaatgactctcaagccgcaagggttgctctggagtctcttgaagcagatgttaagaaggcaaacaatt

SEQ ID NO: 109297 - DNA, 521 bp, Glycine max
atttgagttccaaatttgagtacctaagaaggaaagcgcacgaaaagttaaagtactcaaaggattcgctgctttattcatgcacgtagtgtagtatttatagactattacaatagctaatatcctttctgttatgacagaaagatcaaggtttggtgcttgtctcgtacacttatacgtaatcttctagatacttgggcttatatagtgacgacacgtgtgggtttgttgcatggcgctgggtcacgtactgatgcatggtgctgagtcgatgggtcctttgttgctatcacaatccgaccttgtcatctgagagaagcatatatatagacgactaaagcttgaaggaaaagtctttaagagatcagcctcgaggctcttccggtagatggaccaaatatgaatcttgtgtgcatcactagtttgcaggtaggttaaattttgttgtcagcaccttcttgttttcaacatcttgatgttcatttaactggagctagctagtgaatgtgaaccgatatttg

SEQ ID NO: 109298 - DNA, 287 bp, Glycine max
tcgcttaaaagtgctcccaatcgcgcactttgagtgcatttgaaattgttccggtacgcggctgtaaactctccaaaagttcttcccgtcggcctgagttttgcgagtgttgtcccatccctcgcagtggccatcgcgtctttgctgactccgatttcatttacgtatttggcggatacaacccatttcactctcctgacagcacttacactgatttttggcgcttcaaccgtctcacccatttatggcaaaaatgcggcctttcctcctctgacccaacgactcag

SEQ ID NO: 109299 - DNA, 162 bp, Glycine max
cccacgtgtccgatggcgataggaccagttacatcctaagccttttcttaacttggatcctcggactctatgtcttgcgttgatctactggcatggatgggaccatcgttgatctcacacactatggtgtaacatatgactgctgtcactgaaagaaaggaa

SEQ ID NO: 109300 - DNA, 356 bp, Glycine max
gttttcttcattttctgcttcaattgcctgagatttcgtctcaaaatttgatgctgtgatccaaagggggagttgctggttgctttcactgtgaatctttctgcaggttctttgaatcacacatctagttttctttggtgagaagtaagaataagagaaagagagaatttttgaagatgggagagcgttgtagacatttttccattgaggaattgccatcacatttggttttagaaattctgtgctccggcaggctcagcgcaatggaccttgtttgtttagaattgactttcaaaacatttggtggtagtcatggtttgcaccctttcaagttcaagtccttggttgcctttgct

SEQ ID NO: 109301 - DNA, 374 bp, Glycine max
cttatccctaccacaacacaagccaaaacccaaaccttcaccttcgctcgccactccacacgccattgcaagccccgtgctttctcgctccttcacgttccacactcaaaactcgaaaccccacttacccaactctcttaaacttcacaaatttcccaaaattttcgacccccttttgcttccaaaatccactaccagtcctcctatcaccactgatttcaaccgttgttccatagcttggaaggcagaagaagatggagaagcttaacttggcactcgtttcttccccaaagcctttgatgttgggacatgttcctgcaagagacgttttcagaagaaaacacttctcttttgggagggtcttaattgctcct

SEQ ID NO: 109302 - DNA, 208 bp, Glycine max
tttcgtccgtttttgttcataaattgtttggagactgacgttgttggtgtatgaaatttcgtgctcaaggacgcatctcaggaagctgaagaaggaaaaaggaggataagatcacacacatcacaattcacaacacatcacatcacttgacaaagaaggaagaaagggaggtttgcattacaaaaagacacgccccaccccttccctt

SEQ ID NO: 109303 - DNA, 335 bp, Glycine max
tcggttcaaatcacaacaggcattttcactcttacagctctcagttggctattggcctctattcctttctcatcttgttcttaaaagtgaacttaccctttggtgagaatttcctctccagtgcccctatgatgaagaagctctaaaaaatgcaatcttttacttaatttgatgcataatagctggtggggggatcagagttttgactcttcactgcgaaacccgctttccaacagaattatcagggaggcacggctaatttagaagatgaccagctgccgatgctgtcagatctagatgcacaaccatatgatgaaccctcggactctaaattc

SEQ ID NO: 109304 - DNA, 296 bp, Glycine max
tcggtaaatatctctgatggaacctttgatgcactcaaagctgatgatgctggctgcatggagcctcagttgggcattgttccttgcagcaatattgctgtagacgcatatactactgcaagcattatgcagggaaaaccacacggatgtgtatctgatcctcttggtggaaatatattaaactttgtgaaacccagtgatgatggagttaataaagcaaataaaacctgcttaccagagacagctcataatgaagttgaaatattccaaactgaatctatggctctgtccaaatt

SEQ ID NO: 109305 - DNA, 118 bp, Glycine max
ggcggaatccgcgatcggttatgaaggtgtcgagaaaaggatggaaatatgcttattgcagccgggactttttgctgaccctcaaggaagggggataagggctattacaaaagaccca

SEQ ID NO: 109306 - DNA, 148 bp, Glycine max
tcggttcaaccaactcaaaacaccgtcacacgcaaccatatgcaaggccttggcacgtgaagttcacgcacacgacgtgagatgcattcaacggccaacgacacactggtcttctctccctctaccttgaggcatccttggcggacct

SEQ ID NO: 109307 - DNA, 284 bp, Glycine max
ctttatttttatacacatttgaaagcataagagttacaagaatgtgataaattgtaacgacttatgaatttgccgttattgtcattgtcatgtattactcacacattggaataagtcaaatccctcataacaaggggactcaggaggtgcacgatgactgatcccatcatccatccgagacaacagattggtaatcatcctaattggttttggttgagtaagagagatctcctaatgtaaatcattttaattgggcgagagtaagaaagatgtcttaggatcat

SEQ ID NO: 109308 - DNA, 269 bp, Glycine max
tcgttcttctttacctatgaaccaattcaacaacacacttcatcacaaaactttctttattccatttcttcaaacttagtttatatatatatattaaactatttctcttgtgccatgggggcgcggtgtttcttcatgtgataaacgctgaaaaagaaggaggagggtctatttcttcatcatcaagagaatcacgacccggtcttggtgacataccagcgcgttgcgactgctgcttgatcatgactcttgatccaccctatatttgc

SEQ ID NO: 109309 - DNA, 112 bp, Glycine max
tcggatgcggctatggggagagacgcaacaaattcgaacaccctgcgccgaagccggtgccaaaaattgcgcacggcagcggacgaccggcggcggaatggggccacaaaga

SEQ ID NO: 109310 - DNA, 117 bp, Glycine max
tcggtttttatatatcatcgaaaaatatatactttttgttgcacgggtcctgtgagaatgattgcttgagcgaacatgtgctaatacatagcggagaaaagacattattattgggaa

SEQ ID NO: 109311 - DNA, 269 bp, Glycine max
cgcaggagacccaatttattgacgcaccctcaggtcgaactgatcccgacaaaaccgtcttagcccttggccgaggcaataacgaaggatcagctgtaagccgctccaggcaagccgtagacgagggatgcaagagcgtgggtttcgacagttctcgcggattccagactgtttccaccgttggcgatgggaatggtaacttcgtctccactgcgcaagccgagtgcacctgagcattgtggtcagtcaaggagcagcaagccaacagc

SEQ ID NO: 109312 - DNA, 308 bp, Glycine max
  unsure (1)..(308): unsure at all n locations
gtctccctcgcgtccgctctttgctgntgctgagtctgatttgaatctcgtggatatggcgtcggggaagacatctcggtcgagaagcgcaatggcgagtgccaaggagaacggacctaagctcgaagaaggtctcaatcccttcaagtctgataaattcgatgccgagtcctatgtccagtccaattgctccctcaacgataaggaaattaagcaattgcgcacatatttggtggacttgaagaaagcgtctgctgaggagatgcgtcgaagcgtctatgctcactatgcagctttcatacgaacat

SEQ ID NO: 109313 - DNA, 400 bp, Glycine max
  unsure (1)..(400): unsure at all n locations
ttgctatcnttcacacacacccttcttcctcttcaaatggctcatgttgtgttaaaggttatgactatgactgatgacaaaacaaagcaaaaggctatagaagcagctgcagatatctatggggttgattcaattgttgctgatgtgaaggagcagaagttgacagtgattggtcaaatggacacagtgaaaatagtgaagaagctgaagaaagtaggaaaagtggatataatatcagttggacctgccaaggaagagaagaaagaagaaaagaaagaggagaaaaaggaagaaaaaaaggaagagaaaaaggaggagaagaaaggggagaagaaggaagaaaaaaaggaagagaagaaggaggagaaaaaataatagagacaatacttgactatcatct

SEQ ID NO: 109314 - DNA, 315 bp, Glycine max
cttgacgaataaacgtgcggccagcgctggcgagaccaaaccactgcgacgctcggcacggattgcggcacagaaagcggcgaaggaaaaggcagccaaacagaaagctcgtgacggctccaccgcgtcaacgaagtctgctggtcgtggtcgtcctagtcgctcgccgaagaagtcaggcccgaaaagtcgtcgctcgcccgccggtcgtggaggaggacgttctcagacgccgcgcaagaagaaacaaccgctgaagaagaaggcgccgggcccgcgcagtcgcactcctggtcgacgcgtgaagaaaccgtc

SEQ ID NO: 109315 - DNA, 441 bp, Glycine max
ctcgcacttgttaagtacgaatttgtcgttggagtattgctcagcgcactacttctgcttctgttttgtccacattccagcataacaacctcgttcacctacactcatacctcttcagacaacatggcagcacctcacaaagtatacgacgccatcatcatcggcggcggcccagccggcctctccgccgcccttggtctgtcgcgcatctgccgctcctccatcctcttcgattcaggcgaatatcgcaaccaaggctccacagccatgcacacgtacctcacgcgggacggcatcgaacccggcgatttccgctcgacagggcgcagggagattgagaggaagtactccgcctacgcgacattcgtcaacaacaaaatagtcagcgtaaagaacacggacatcttgccagactacaagggcttcgaagcggtcgacagc

SEQ ID NO: 109316 - DNA, 144 bp, Glycine max
atttcgacaagcgcagggagaagagaaccgaaagacaaaggaccgacgcgaaagcgaagctgaagatgatcataattgggtggaagttgttgtcggaattttagttcaccagcgcatttcccacacgaataaagggcattcact

SEQ ID NO: 109317 - DNA, 172 bp, Glycine max
gtttaacctaaattgaacttaagaaaatttgatacgttgttaatactcggattttacttcacaccacctgagtattttcttttgttttctataatcaaacttctacttatattttgtaggagtgcatgtgttaattattcttaaataggttaagcattgatgtttatttaca

SEQ ID NO: 109318 - DNA, 144 bp, Glycine max
aagcgacaagcgcagggagaagagaaccgaaagacaaaggaccgacgcgaaagcgaagctgaagatgatcataattgggtggaagttgttgtcggaatttgtgttcaccagcgcatttcccacacgaataaagggcattcactt

SEQ ID NO: 109319 - DNA, 469 bp, Glycine max
gtgattgccatgattctgcaggtctattatggctgggcgagtactttcacatgcagaatttgaaatttctgaactcggtagaagcgctgcgcaagtggaattgcgcgtttctgtttggcgggtcagttttcctcctccttttgggcttctaaaagcctaagataaaaccaaagccccaaaaccaactcttctataactaaatcccaaattgtgaaaacacaccctatctatttattctcaacttcgcgcaaacactcccttaaactctgctgcccaaaccaccacaaccagagccctcctctgctgtgtcagatttcttctcccccacgtgtgaggtcaactcttgttcctttgcagggataagtttatcttcggaacaatggtcgaccttcaagaagagtgttcctgccatagaggaagctatcaaaaagatggaagaaaggataggatcggagcctaatggtaagca

SEQ ID NO: 109320 - DNA, 381 bp, Glycine max
ttttggcgttcgacctgtaccttgatcttgcttctggtttgcacttctgcaacatcttcactctggtcaacctctgttctgcttgtgttgtggaacgtccggagagacagaatgatcgagtgaggacgtggtgcctgatttttctaagcaggctttctaacagacatgcagattgcacaggaatggggtagctttgttccattgatgatgtctctttttatgcatagctttatttctacctttgctgttttgtaggctctcttatccttcaaattccttaaaattccttatcttgatcttaatgaattccttcttttattaaaacaattagcatagagtaatatcatggctatgtagaaatctggtgaaagatggacaggg

SEQ ID NO: 109321 - DNA, 433 bp, Glycine max
cttacgcgtccgaatactcaaaggatttaaaatgacagaggccgacacagatgatgttggtacgaagtgtaacttctcgttcgcattcaacaacatcaatttctcagaccgaattctcaacattgaggttatacccgaccctcatttcatccgcgcccaatcccattctctctctaccctcgctccaaatcgtaagagacgcagactctctcttatgaaaggtaactttgagtctttcacacacacacacaaacacttcaattctgcttcttaaattaaatttgctaggtctaataatatactcaaatttaccacatgtattactatattctgttgtctttgtggtatcccaaccctagacgctctccaattggtttattgaatattcaaattcgggtgtgattcttgggaattgggaagcaaagtctttact

SEQ ID NO: 109322 - DNA, 438 bp, Glycine max
ctgtcttccactgtttactacctcacataacataactagttacagctcttcctgatctgtctcctttgttgcttttttgctcttttatttatgaatatcattttgtctagtactagtactagtactaggagtccaagttgctcttgggttatgaatggatggtgctgaaaggcggtgaagtaagcatgtctgagaagaaaagggaagtgatggtggcgattccacatgagggtggtgctgaatctttgatgccaaagcagcagagcagggtgaattcgccacacagaacattaaacgacaacgaggttgctgcaaagtcgccacctttgaactgtgcttcccctgagataaggttcatgccaagcccaaacaagcccccaaaagttcccacttccaatgccatcctcactcggagaaaatcactcacaaggtcagtgt

SEQ ID NO: 109323 - DNA, 433 bp, Glycine max
tcttgtagttattcaacatagtaagttatgtattatgattatgtgaaattgttggcagtttaaacacaaaaagatgtaaatgaagtgattgctttaatgtgggtgtttagttttcctttgactctaacggctgcagagtctcgctaatgggagtgaaaccacatgcttatgaattattgatagatattgttcaataaggcatcacatacatgaaaacaactactcttgcgaccttttttttttcttttagtcttgaaaaaaattgttgaaaacaaattaatgaaatgcgacctatgtgaaattttgatcaagttatgtgtgcaactgtgtatggttgtggatcttttattcttttattctcaagcgtcaatattgagttggttcaaatggcaaagttgattccttctttagcttgttttaaatggatttatga

SEQ ID NO: 109324 - DNA, 401 bp, Glycine max
cggtctcgtgggggcgagagtaaattttctaaaaagttttttcttacgacaattcagcagcgatggcgccaagcggcgattggctccattttaattttggtcggcatttttctgatctctgtgtccctttactttttactcggttcaatcatcgaaatttacataagaaagacttccgtcctcacagaagggaccatcattttgtctaaatggtccgacccgacgtatttcatccgcacccaaatgtacaccttcacggtgcgcaaccccgactaaatcacccatggggccatcccttcggtgaagcggcaagggccctattcgtttgaccaaattcaatagcggaaaatccaccaaattgtcaatggaactgtgcagttcgagacgctgcagtcctacca

SEQ ID NO: 109325 - DNA, 354 bp, Glycine max
cccactcgtccgcggacgcgtgggtgctaggacttggactgtcaagtgtaacccagagtatgatggaatgatcttggttctctctcgctccctctctctctctttgtctctctttcacacacacacacacagagggatgtagatcctctgaagtgagcttgtttctaaagcgaagggtgtatcgatccttgatttatgttaaagtggatggtgagcttatccaactaaaatttgaaggtggatacacccttaattgcttactttacatataaacttgccttagagaagctttttcccacacccacatgtgcacacatacaaatatgcatttttaatgacttctaaatctcttgc

SEQ ID NO: 109326 - DNA, 409 bp, Glycine max
cgaagaaaaacctgcgcctcacggtcaaggcttacttgaaatcggaggaaaagaaacgggataaggagcgctccgtaagcatcgccggaaagcccgaaactcccgtcactccaggtggcaccgctccggccgttgtacagtctatagaacacctcatcgatgctccggagcaggcaacgccaggcgccccaggagatactcaggaatcgaagggtcagccacaaggtgacgcagctcagccaagcgaggcgccccagggcgatggcttgcccatgcccgcggatgacgcgcaaccctagggcgaaattgcagccgaggctcttcagaaacgtgacccgaatggccaagaccctgctgcggacccaagcatcggcgacgtagatgctgagaacaagcaggatggaaaaga

SEQ ID NO: 109327 - DNA, 397 bp, Glycine max
  unsure (1)..(397): unsure at all n locations
gaccggctctgatcgtttcgtcctttcctaacgactttggaatggaaattgccaatgttgtttatgttgctcctgacgagatcctttaccctgtccctcgttcgttgtacactttggatccgcttcagcgtgcgtacatgtcaaaatctcagtgcaataagatgaccactgttcagtcagaagactccgttgtcactgtccaagttgattcgaaagcgtcgaaagtcacttgtatgatgaagggcgggactggcttatttggactggataagcgcgggtcggattggatgatggatgtcgatgtggccgtctccgatgagcaacctcgtcaagtctttgtttgttctcctttcttgccgggcactctgatgaagactntgatcaacttaaacgacta

SEQ ID NO: 109328 - DNA, 397 bp, Glycine max
caggtggatcctcttacacaccaagtgaagctatgtgattttggaagtgcaaaagttctagtaggtcttattttgctttggtatgcttagttttatgtccatcttttttcacacaccattgtcttttgtatcgacaaagtattaacttagaatgtcaaccaataacctatcaatgaccataaagttttgacagtttagatgaagcaggtctaatttttactttgttttggtttttcagtttcttgtgtcgatgtcttgttctgctcaacagcaagctgtggagctctctgttttttcctttttttcaagatttctatcataccagtgtgtgtgtgtgtgtgtgtatacatatattgcaatctttgcttttttggaggtttttatcatgttctgcatg

SEQ ID NO: 109329 - DNA, 427 bp, Glycine max
  unsure (1)..(427): unsure at all n locations
gaaaaacacacctttctgcagccaagttctcgtggatttggtggtgttgttcgggctgctgttacggatatacaagttgttccccatggttttctttcttgcggtggggatggaattgtaaagctggtacggctggacaatcacctgcgtgcccatggaattgagttatgatacttctgagatcctttgtgttgatgacaactctactatgctgcaaatgcttcacgacagtggtcatcatcggtcagaggttatcaaatctgcattattggcttcgtcaacagcttaatataagaaatgtgaacattgctgaagccaccatccattttgaaaaaggattcttcattggtatgttcagatatccaaaacaactgcaacttgggcaagccatacatccnggaacataaacatctcatgctagtgaacc

SEQ ID NO: 109330 - DNA, 398 bp, Glycine max
ttgtgaatcaatattttcatgatgaccttgatcatcatcagtcattatatacctgatgcaaaattctggggtaatgtctggtatttgcacttgtctttctatagcttcttgttttcacaaagaaagcattgacatgctattcacaattgtgttggggatgaaggtggtgatgataatgtaatttttggcaagaatgagtgacctataaatatgctgtcttgtgtaaactatgttcatgtatgcaggacaagaagctgtcgttgagaatgcacacattatcatcaattgtctgattaagcttgtgggttaccctcataagatggtatgaggaattccctgtactagttatttactgctgaaatttgatgacttaatttgtttatgaagttacttttatt

SEQ ID NO: 109331 - DNA, 236 bp, Glycine max
gccattcgtgcagcaccggatcctctcatttctccggcgataactctcccttttccggcgaattcaccgcttcctcgatatgaatcccgagtagtacgttcaatttcccccttttcgatcgcgttaacaattccattcattttcgcgattgtcgttcctgtttttcaaaagggtgtctgtggatttgcccaatttgttcggattggttgttttccgggggtgggggtgggggggtg

SEQ ID NO: 109332 - DNA, 466 bp, Glycine max
tgctgatccaccacttttccttctcttgagattctcgttacccttttcacactaaacacagtaaactcactcatcacttgagaattcagattcatttcatttcgctgtcgttttgctcacaccacgccgtttaccgaaatgacccctccaacgacacccaatgcctctccaacgcacgacgctcccttcttccaaccggcgacggttgttccgccactccgctgctaactcccccgccgccgccctcatgtcgtcggaatccaccgccaccgcccttaatctccggcggatcctcggcgctgcactcctcttcttcctcgtctgtctctcgtgcgtgctgctattcagaaacgcctattactctgtcttcgtttcctccaatcccttgtctcgtttcaccaccgtttttccgcccaacgattccgcagcggtaaccaatgaatattcacttgaaaatattctgagt

SEQ ID NO: 109333 - DNA, 354 bp, Glycine max
cggacgcgtgggcggacgcgtgggctacacgctccgcgccaacgcctggaagacacttcccagcttgccctacgcgctctgctgcgcccgtaccatgggcgttttcggaggaaactcccttcactgggtcgtcacgcgcaaactcgaacccgaccaacccgatctcatcatcgccttcgatctcacccacgacatcttccgcgagctcccgcttcctgacaccggaggtgtcgacggcgggttcgagatcgacctggcgctgttaggaggctccctctgcatgaccgtgaactttcacaaaacgagaatcgacgtttgggtgatgagggagtataaccgtagagacagttggtg

SEQ ID NO: 109334 - DNA, 345 bp, Glycine max
catctaccagatacaaggttgttgctggaattcactgtgaatttacagaaaagatccatattattgggttcaaaacttctctggtattagccgtcgatggctttaccatgtacaattgaaaaggtcaactcgtgttcagaggagactcttatgggcccgacacccgcgacagacaccaactcgaactcatggatcctaacggacgtagtgtgctcacagttcagcaaaagaggtcgagtttgcatcaacggtgggaaggcttcaaaggggagagaatggacggtgataaacccatcttcagcgtgaggagagcgtctatcataggacggtcgcgtgcgagtttga

SEQ ID NO: 109335 - DNA, 442 bp, Glycine max
cggactcgtgggcggacgcgtgggtgatcattgacaggtgtaataaacttgaaaatgtttttccttcttatatggtcggaagttttcttagtctatgcgacttgaaggttactaattgcaagtcaatggaaaagatatttgacctcaaaagtgttggaaaacgtcgtgcttggaatatgatcaccagtttgcaaaatgttcatgtaaaagcactgccaaaattggagcatgtatggaatgaagacccaggagggattcttagattcacatatttgaaaaagatatgggttcaagaatgtctcaaattaaaacatatatttccagtttctatagccatgaatcttaaaaatcttgaataccttgaagtctggaattgtgctcagttgaaggaaattgttttcaggggggaaacaatcaaagagagtagcgttctgtttgagtt

SEQ ID NO: 109336 - DNA, 201 bp, Glycine max
atcttgggcaccataagattgtatataaaataaattatggtgtgttgtgtatgttgtgcaagacctggaacttcacctttctacgtacgtgtgctgttaggatgcagtgtgctttgatgatgctttgataaaaaaaaaaaatataaaatagggaaagcaataaagataaaaaaaaaaaaaaaaaaaaataaaaacaagagg

SEQ ID NO: 109337 - DNA, 341 bp, Glycine max
cccacgcgtccgtgcaaagaaaacattactccaattgtgcctacaagtaatattcaaacagatgttttggctgtgggaattatagcggggcaaaagactgatttacaggctgttgaagaaaattaccagtatagagagcatgtgcaaaggtcaccaagagctgatatggaacctaatgatcacaatatgaagaatgatttgcttgctcggcagaaccttatgtcttgtccagccagtagtgatgaagtcactacaagtaatttgaataacgaagtgattgaggatgtacctgatgcattatcagatatgttttctcaagggatggcatctgaagtaccgga

SEQ ID NO: 109338 - DNA, 90 bp, Glycine max
gttgatgagtgtccttttgcatttgtgaactagtatgtaatattttattcacttaaataaagcgcattactatgtgcaatgagtgtgttt

SEQ ID NO: 109339 - DNA, 424 bp, Glycine max
tttcctgtcacactattacggatccaaagtgttcgaaatcggaataatggtggaaataggtctcaacttgaagatgtaaatggatacagagtttggcaggaagtcccagtgcttgtcattgttagcatgcttgcctatttctgtttccttgagcagctattggttggaaaaatgggaactggtgcaattgccatatctcttccattttcctgtgtattgggtctactctcctgcatgacatcatcaacaatggtgaagagcaggttcatctggatttatgcatctgctcagtttgctctggtggttctctttgcacacatattttactccgtggttcatgtgcaagcagttctgtcaatccttctggctacatttgctggctttggtgtggtgatgagtgacagttctattcttgtggagtttt

SEQ ID NO: 109340 - DNA, 337 bp, Glycine max
acgcattgctttcttctttctgagtcttcagaaaccctaaccgtggtttcagaatcttcattagggtttttgtgagagaaaaccatgtcgagcgcgttaaactggagacaccatgtcgtgattcaatctctgttgtcgcggggcccactcagcgagaaggacttgcacgccatgtttcaagacctcacaaagcgaaacccaggcactgagcggcaactgtttgatagttttattctgaaaataaacaaggcgcttagttgtgctaattttgagttgcgtgcttgcatagatcaatatgatggccaagtttactatggagtggtgaatactgtttctg

SEQ ID NO: 109341 - DNA, 446 bp, Glycine max
cccacgcgtacgctggacaacctggacgcaacagcggacaaggcccgcctggacctcccggaccccagggaggagctggccaacctggtcgccctggaggacctggccaacccggacagcccggagcaccaggagttatcaccacctccgtgcccggaccgaagggacccccgggcgcacccggccaacctggacaacccggagcgcctggacagcccggcaaacccggaaacgctggtcagcccggggcacagggcccgcccggacatccaggacagcccggatctcctggccaacctggaagccccggacctgctggacctcccggaggcgacgcggcttactgtgcttgccctcctcgcaacgctgtgctcatgaagaagatgaagaaggcatgagcaagccgatgaagagggatgaaaagcagacgagcagcaaaaagagat

SEQ ID NO: 109342 - DNA, 436 bp, Glycine max
gggtcgacctgtgttacaaggattattagctatagatcacttgacaaaggagagaacatggatgtgttccctgacttttgtatctattttattctaggtgcttggctgggcacgagcaatgcccaagttctctaatgatcttgtgaagtatgtgcaaacttttctggagaggacttatgaaagatgccggactgcatacatggaggctgttcttgagaagcagagttatatgcttattgggaggcatgatattgagaaattgatgaggattgacccctcaagtgcatatttaccgaatctgcttggtcagttaaatgtggaaagtaattcatctgatgccgaaacaattgaggctgaattagaacttggtgaattactgctaaatttgcgtcctattaaacaggaaaacctaatccatgatgacaacaaacttatt

SEQ ID NO: 109343 - DNA, 247 bp, Glycine max
attctaatgatatggttgcttgctgggattctggggtatgaagcctttgatagaatcattgatggtcctaaaaatgaggatggatttttaacggttctaggttctggcttcgagcttgtggttactatcatcatgacattgttattgtgtcatgatcattggcgcagacatgctggtcacagtcacagacacggacatgactggctatggccacagtcatggatttacaatgtctacccattgtgat

SEQ ID NO: 109344 - DNA, 245 bp, Glycine max
gcgtgacaaacaattcttaaatcttcgcctacagcaacttcattaccaaaccaatgacggtttaagaagtggataagacttggtctctaacaatggcattggcaaggattgctagggccaacgtgagaagatcaggaggtgcttctggcagttctgctcatgagaaggatactttcaatgttggaggatacgcaagcagatgcaccataccttgccatgcacattttgaatcaaatggaaagttt

SEQ ID NO: 109345 - DNA, 382 bp, Glycine max
ggctaatctgatgaggactttgctgctggcttacctaagggaatgactgaactcaagatctgcagggccatcttgattgtatcagtggattggctgttggggggaggtatctattgagctcctcatttgataaaactgttcatgtatggtctttgcaggtaacacttaaaacacgacaacatgacaatattctattgggtgcattcaaatagcataatctcattcataatcttggcatgacgatgctatcattattgtttcagtcaatgcagcagatttagaagaaaaaaatcttttataatttccaataaatagttcttcagtttttttccctactgacaccagttagcaaataccttctgattaatatttaatgacaata

SEQ ID NO: 109346 - DNA, 273 bp, Glycine max
gtttgagttaaattgtgttcaaagcaacaaattgaaagcttaagtagctcatattccaacattatggaagcgaatagagccggtcaaattgcgccaaatacaaaggctgaaaatcatgggaacgcacggactgaaattcgacagcctgcgaatacgacattcagaaaaggtcacagaagagcccattcgatgccatccaacgcacagaaagcggacaaaacaatggcaaacggaaaacaacaaacgatcggtgaaaagcaacccgaacacaaa

SEQ ID NO: 109347 - DNA, 331 bp, Glycine max
cctttaccacctccaccaccatcaacaccaataacagcagcataagatttgaagctaataaacaattgatggatgagtattctggtaaaagaggtgtagatgggatggtattccctagaaagggaatgagccatgtatttagagatactgctaatactagagatcgaaatcgtcaaatttgtagccgattgggttgcagtagccgagccaatcttcccaaagttgctcaagtcagatgttctgaaaaaggtaaatctttgaggccttcataccagtcctcttcaagtagcaagggagcaattggaagttcctctagaactactagtaaccc

SEQ ID NO: 109348 - DNA, 324 bp, Glycine max
tttccctcgcgtccgcccacgcgtccgtaaatatgtaagttattttactttttaaaccaccgaagaagaacaagattaaagaacgcttggtgagaaaccattaaaaaatttgtagatctaaattactcgtatttggttgtcaatgacatagtttggtacatggtcgacctcaactaggaggataaggcttgtctcgtgttgctgtatgagttgactaatcatggagaaaaccatatccaattcataagatattctctgttgccattgtgtgcatagaaaacctttgcaatcctatattgcttgtgcttctgtatatagagacta

SEQ ID NO: 109349 - DNA, 491 bp, Glycine max
acgttacacaaatcaagtgactgcaactcttaaaccctttgtagtttaaacctctggtctagtctggtgcttattgttgaaaacaacacaaaggagctcctacgaagatgcagggtgccgtaagaaaactaaccaggataatttcacacagacaagttgtaggttttcgttcctattgcactgacaaggttgttgttgatattggacaaccaacctccgcgtctcatccgcaggtttattatagttttccatttgtgtttatattaaagtttaaaaaacaaaagtaaaaaaaaaatgtgaaatgtaactagaagtatttgaagtgtctgttgtatgtttgacacaggtacgattgaaatgtttgggcttccttgctttgcacaatgtgctattgaagtggtatagagcatttagctaaactattgtttgttaagactattttttttttttttttggcttggtacattatagctactaaaagatggggatct

SEQ ID NO: 109350 - DNA, 461 bp, Glycine max
gggtgatcttcttcttacgcttaatttgatttcttgttttgttggctagtctcggagcatgcaatgcaaagacaagtgaagaattcagcgacctggttcaggggcgcccagagtcaatgatggatcatgacttggagaccgctgctttgggggcttaccaggacaagcctagaaccttccccaacatgcgcactaaaccttacacccctctggtcagttctttccttcctttcaatacggatcaagtcgccaccgcaaccacttcgccatatcaacaaacgcctcttccttcttactcctctcctccttcttctcttctttgtatatcttatgcttgccttcttccgtttttctgcagatatttcgtattttacttggtatcaatgatcgtgtcctcttcattcttttgctcctcggcttgggagctatcttttacgtcggagcttctacttctcctatca

SEQ ID NO: 109351 - DNA, 455 bp, Glycine max
ggctttttgcttgaagcactcagatctaccagaaaatagaagcatcttgccattgaaaggctctatcgcaggtacgaatgatatttcagaagccaatggctttccagtggcattgccagtgagtggtgaacagagcttgaaagattgcaggaatggaggattagcctctgatagtagtcctgacaaactgaaccataatgatgaactgccagatggaggactatctgattgcaggttaagtgctcatgacgacatgttgggatgtggtgctgtgccccaacaagatgttggagtggtagggagagccaatgagaatgttgatgcatctgactctctcagttttgcacttgttttgaagaagttgattgatcgaggaaaagttgatgtaaaagacgtggcattggaaattggcatttcaccagatacattaactgcaaataccaatgaagcttata

SEQ ID NO: 109352 - DNA, 486 bp, Glycine max
ctattgtgaataaaattgtgttgcttgtattgtatgtgtttaatgtttgactcacaaacaccacagaagacttgcttcagatgaataatatatgatgagttatgcagatccaaagcaaaatagaaagactttggatcagcttacaccagacagactacttattcagttgcaagactctcgtgttagttgatccaaagtctttcttcaattcgagtttttgttctctataataatcctatagcagaactgtgaagatatatgtggttattatcccaaaaagaagtaaaaatagaaacaccctgatatcaaatgccaccgtttattggtttgattgagaaacttggtctaaaaatttattaaactaatgtctcccattatccataaatacctttcaatagagtccttctttcacctgcagtgtctcaaccgtgaacttggaagttggatcccctgcacatttaaaggagctaaggatttggaaattat

SEQ ID NO: 109353 - DNA, 484 bp, Glycine max
gaatatcttttcatacccgaaaaacgatgggccaatggtgcgccgagaggcagacaatgaaaaagcggcaaaagcgcaacccggcaaagaggagaagcaagcggtgaaagcggaggagaaagaggaagaaaagccgaaggacaaaaaggaaaaacgcggtgcagaggcagaggagcagaaagaaggaggagaaaagaaaggagaagaaaagcccaagggaaagaaggagaagcgcgctgcagagaaagaggaaaagaagacggaaaacaaagaagcagagaaaaaagagaatgaggagcaaaagcctgctggcaagaaggagaaacgcgccgcagagaaagaggaaaagaagacggaaagcaaggaagcagagaaaaaggagaatgaggagcaaaagcctgctggtaagaaggagaagcgcgccgcagagaaggaggaaaagacgtcagaaagcaaggaagcagagaaaaaggagaatgaggag

SEQ ID NO: 109354 - DNA, 426 bp, Glycine max
attcacatggccaagataacccaacctttgttcgtagatgttattggttgcttgataagaatctggagcacatagtccttgttcattatcgtgacacacaagagttacaattgcaaggttctcctgctacacccgtaaattcaaattcaagttctgcctctgatccagctgcatcttggattccatcagaagacttggattctggggtgaacagtgcttatgctgttgagcttaatgacaatttaactgccaaaagtcatgagcagaggcttcatgagattaatacacttgaatgggatgacctagtggttccaaatgtcaacacttctactacatctaatggaggcaacgtcccatattcatttcaagaaaatcaaagtttactgagtggaagatttggcaatgtatccagtaatccttcagcag

SEQ ID NO: 109355 - DNA, 364 bp, Glycine max
cttgtttgagtatttctgtctgaagtatttttttgttataatgatcaacaaccacgtcaatggggcgaatgacgtcgacatggaaaggaccgaaaacgaaagttttggtgaacttaaccagcgactgattgcgcttaaagcggagaagaacaacaaagagagtgccactttggcggtcaaagtgttggccttttttgtcaactgcgacaacctcagtgctgcccaggattttgtggaggcgttgaagaatttgcccgagtcggcctcaaacagcgattgggcccggtggttttattatttgggacgcatcgaagcgttgaagggcaccgacgccgagacgtacaaagcggcagagaaacatttt

SEQ ID NO: 109356 - DNA, 380 bp, Glycine max
tttcatttccaaactcaacttccctgaaaacgttaggctcagacacactgagactcttcagggttcacgtgcttcaagcaatttttatgacaactcttattcgcatgttcatgatttacccgtgagcctctacgatcagactaccatggcttcttcatcaactatatctatgacttctccccaggcaccaccttcgatttatcctacgcatctactaccggcatggtcttctggttatgcttataatagctcctcttcttctgcctgatgtaaattgctttttatttcgagtcgacataggctatacttttatctcacacaacttagtttgtcattatatctacctatgtttgacactaaactgagttttacttggaagc

SEQ ID NO: 109357 - DNA, 481 bp, Glycine max
  unsure (1)..(481): unsure at all n locations
tcggttttaacgatgggaagctgccattcaagactatgaaatgctattaagagaaaagccaggggatgaggaggtggcaagggctctgtttgagacccagctccaactcaagatgctacgcggtgaagatattaaggacttgaaatttggctcaaatttgtttttcatctcaagcaatgatcggtttagacattatgtaacatcacctggtgagtaatttttgactgtgccttctagcaaaattatattcggcattgcaaataacaaacactgaccagttgtgaacaaattgaacagggatgtctgtggtactcttttgtaacaaggcaacccataagcaagtgttgttggtgttggagcaaacctgcaagagatttccatcagttaatttccttaaggttggtaattctcaatgttataggcattgtgcccctatattcttaataaaaactagttacattgnctcttacttataattgat

SEQ ID NO: 109358 - DNA, 375 bp, Glycine max
cagatatcgtgccacatttattccttttctcatttctgaacgccacacagacaccgttgataaagctatctatgagtttttcggcttgaacagtttttctgatcagtaagaatggaggttgctgtccccagacaacatcagccaaaaaatcagcacaatgaggataagatagagttctcaagatactcaaaacattccagaactgttcagaggaaagctgacaaaatccctgagtatggtcacaataaacaagaactaaaaggggaagaaactatgagatgtttaaagaaaaataacgctgtaggattggagactacaattacacaaggagaacaagtaaatcagcctactaaggacaaaatcctaaaaagctcg

SEQ ID NO: 109359 - DNA, 473 bp, Glycine max
ttcgtccgtttaattttaaagttttgcttttcttattccctctgctttcatttatcacttatggcgcaattttgccaaattatgaggcaacagcaaagaatgggcccaacgaaacgccaaaatttcaaaacaacgatttgattggagacaaatttatgaaatgctgcaaggacaatgaaatttcatgctcagaggtttgcacttacccaccacctgctttttcattttctgaacaatggtgtatgatgacttatatttcggattttatcaagtgttacaccggcggacataacaacaccgaatgttgcgaagaccatggcgttgttggcatttatggggcatgccgggacttttgtgacggcacccaagcgtatacgatgagtccatcatatttggtttgtggcccagtcacaaacatcatctcaaagtgtaaccgtgactccattaaacacaatgattgagaacatgagagt

SEQ ID NO: 109360 - DNA, 402 bp, Glycine max
cttttatctttctttctttttccacccatggctgacccctactccaatttcttctcttcttcctcacccttcttccgtttcaaccacaaccaatatttcccttcttcaaacccttctccacaacaccaccgcaacttcatcaaccacaccaaaaccaacgacaccacccccacctttttccactaccaccaaactactactactttttcttctttgccaccttcacctcctttgagagaagaactacccctcttgaggctgagtcctacaaagcaagaggaggaggaagaggacctgtctaattgcactggagcagccatggatgtggaagagaggatccaccttaaagaggaagaagatgatgaagatggcactactaatgtcactggtgcactccacata

SEQ ID NO: 109361 - DNA, 503 bp, Glycine max
ccctcgcttccggctaaccaaagaggcaaaggtggccctcttcccgtactcttggattggacttttctggaaagagtttccttttacttgtattattctcatttcccttttctgatgccaaactctctctctgccgtggtctcgactcacaataattaatattccaccttcttccccaaatcgccctccctcatcacccctatttactttctttcccacttagtcatggacttggatgcactcctaatactcatctttaaccatcactctacaacgctaacaaaaggttgttctgagtaattatctttcttttggactcctcgcgctgtctatttccttttcgacccagagagagacagatagacaggagatgctttttcgatttcgttaacgtgagaaagttttttaagaaagagatgcttgatgcttattggttttggtctttcctttccttttccccccatttttaccccctcgcatttttatttattaattaatcacat

SEQ ID NO: 109362 - DNA, 206 bp, Glycine max
ggatgaatggcctccgtccatggtaaatgatgaagtaaaaattccaaatggatttgaggaagagtctgtaataaattaattgatttagatactagatacagaggcacggaatttataattcttaatttaaatttcttttttttcagttttaaaagaaattctctgtaaaatcccgtcatttgtaaaattttgaatattcagaatcc

SEQ ID NO: 109363 - DNA, 208 bp, Glycine max
cgtttgcgtggggggaggtacatgctgtattcctttattatctttacagtggttatatcactctaagaaatgaaccgggggaaacttgcataatcagaattatacactgtacttggagggggtgttagctctatactattggttgtgcttctaaccttcattggatatttggaggaaacaattggcgcaagatctggttgaggagctg

SEQ ID NO: 109364 - DNA, 477 bp, Glycine max
cttttagtttcatcattttttgaataatttaccagtaaggcttgattctagatacttttgctacattctctgcaattgcagatattcaatgaccttgttgctatgggtatatgactatatgcatatgtgttaaaggttgaagattggaaatgatccttttacattggatattgttctctttgctatttatttctacctttcactatttttattatttgttagtttctttttattctactgaagcagtagaatatcttatgcaggatttctctatttgttcttattgtcaatagctagcaatggtagagtaaaaacaacacttccatcaacatctaatagtcttttgacttgagacaaaaagttaaactagatccttcctcccctgagcaatccttgattgtgttatttttcttacaccaaaaaattttcatctgcaaaatatgagctattaggtgcttttgcaatatatgcatcagc

SEQ ID NO: 109365 - DNA, 356 bp, Glycine max
tgtttttttggagaaaagatctcagttagggtaatccaaaagctgctgaatcattggttgatcctgatgaatatcctaatttgtttgatgattggcaagttgcactaactgttgaatctaaagctacggaagcaagaggtgcttaccctcctgcatcggaatatgtgaaccaggctgtttaataacatattacccttgttgaagcttttagaaacatgcagatagaagaaggggatcagcctcttgagaacggggactctaaccatgagttgactgaacaaaatggagaagagacgcataacataagaacggttccttttaatgacagaagaatgattccttttaatggactacat

SEQ ID NO: 109366 - DNA, 475 bp, Glycine max
cagtgtctgaaaatatggtatttgaaatcttgttatgcttaatcggtgttagttgtttatcttgtaacaccgattaaatgttcagaccgaatacaaactagtcgaattcaaataatacattagctatttactactttgaaataataaattgcaattcttttatattttacattgttatatttacttaccggttcttgtgtaatgttatgcttcaaatgctttcttgagacgtttattctcccccattagtttgtgttattttgtgatgctctatggtatcaaattattataatttatttataaggtacaaataatgtgagcagatgtacttagcatgaataatttaggtgctggtgtttactaagccttctgtagttttcttatgaagaaaataatatggttaccttgttaaatttatatagatgggatttctaatctgcatatgtttttgttggttggtattttcttagtttat

SEQ ID NO: 109367 - DNA, 146 bp, Glycine max
tttgtttattattcttttttcggtgcttccatggacgaagaaaaggtgcacaagatcttgagcaagatcttcaagaacggcgacaggaacatctactgcgcggtgttgaacgagatgatggcggagctgatatccaaaatgacatc

SEQ ID NO: 109368 - DNA, 467 bp, Glycine max
atcagatcggatgattcacctgctgtcgttagtctggcttgcggcagtctttcaggcattgcatcatcaacaggtgagcagtcaaaatggaattgtaacttgtatttttggtgttccttatcatataaatattcttggtaacttgtgaatttctgatgttccttctcagataagtagtgttgataatttgctttttgatgttccttccaaatgcggttatgcacattcttttggtattttaccattttctatctgtgtggcatcagggcactcaatttagttttgttgtatcaaatgttaaattacagttaagaatcctttagtcaaactattgaatttgctcaacccaagaacatcaaagaagttaatgtctgtagtggtttactatgctttcgatgcagagaaagagagtttggtgcaggaactgcaccaagtatctaaccagactgacccatagaaccagagac

SEQ ID NO: 109369 - DNA, 322 bp, Glycine max
catgaaactaaaggtgaagattgccagaaacaggacgggaaggaaccattttaagcagcaacactgtgctgatgggagcatgtggatggagagtcagggtcagtagcacatctctgccttgcaagatgagtttcggagccctgataacaactctggccacaaccacaagccattcccaggcatgcacatgaacatgaacaacaacaacaacaacaacaaaaggctatggtgcttatgctggtgtggactctgacttcacagtgcaaaaacatcatgatgggcatggcaacggcgtacgagccatgcacatgaacatgaacag

SEQ ID NO: 109370 - DNA, 439 bp, Glycine max
ctcacgcgtccgcccacgcgtccgagcaggaggtcgctgagctacaacaagtcattgctgataagaaagaacaagaagctgccatgctgcaggtcctagtgcggctagagcaggaccaaaaagttactgaagatgctcgcagaagatcagagcaagatcttgcagctcataaatttgaagttcacgtgcttcaggtttgggtactcttctatatgtttcatgtgctacttagtaggcatccttttaatgctattgcctgatacaaaagaacgcaagcacaagtagttaagaagtaaaataactgatatactccaaatctcgttatatctatcatattctttcttattcctcttctcttggtaatgctcatgggaaagaaaatattctctgctaattggttgtttttagtttacaatgggctgtggatgaaggttttatt

SEQ ID NO: 109371 - DNA, 228 bp, Glycine max
cttaaactgacgctaaaaagtatcttagagagatgtgtggaggcgctatcatctgtgacttcattcctgacgcggtggcggccggggctggccgcctgaccggccattacatgtggcctgatctgaagaagcgtaagaatgacttggacgttgacttggacgctgacttcagggattttaaagactattctgacatctactacgacaacgaccgccacgacaagccct

SEQ ID NO: 109372 - DNA, 162 bp, Glycine max
ttcgtccgtttttccttaggacctgaaaaacacagccatggggaaccaatcctctttaaacaagatagaaactcttcctatcgacacaccattcaagcttccagcatagataccagttcgaccacaaggtggtggatttgctactggaaccatcgacatagg

SEQ ID NO: 109373 - DNA, 429 bp, Glycine max
cattaattgcattagggctgctatatctgcacaggctaaatgccctacctgtagaaaaaaggttacaaagaactcactaataagggtgtttcttcctgcaactagttaaaggatctctatccaatcattaattgaggagaatcaggatttaggaatgtgagaagaagcttcattgtactctgcagaatgctgagtggctctgttgttgctgacatgtttgttgtagcggatgcttatttattttcaaggagctgtttctcctcattaatttgtcatgtaatacatagggatgctctgttttttatttaaattgttcataaacctcagtttttttttactttttatatttattggtcaaagaataatcttataaacaatttatgaatgtgtagttattttttttttttgtcataatatcaatatgaaata

SEQ ID NO: 109374 - DNA, 400 bp, Glycine max
gagttgaacaacagcaagccggtggagccgaagaacagcaagccggtggagccgaagaacagcaagccggtggagccgaagaacagcaagccggtggagccgaagaacagcaagccggcggagccgaacaagaacaagccggcggagccgaacaacaacaagccggtggagccgaacaacaacaagccggtggagccgaacaacaacaagccggtggcagcacaatctcgctcggccaatgccaggaacccccaaccattgagttcgccgccggtctcgagggccgggccgcagacgaattcactttccgtcctgccaaccctaacaccttcggcggccaaaacaccgccctcaacccgttgatcatcgtcaacttcctctgcgaccgacttaacgacag

SEQ ID NO: 109375 - DNA, 110 bp, Glycine max
ttcgattgatcaaaagcttattacaacacttatacatgcgtgcaaacagcagagcttgcattgtggcatgaagcgttggatcaagggaggcatcgaaggatcaattgggg

SEQ ID NO: 109376 - DNA, 233 bp, Glycine max
ggccacacccctgtgaagctcatgtattgcgttgccaaaaattgaacctttggatctctcactgatatacttgcatgattaggaaattagcaaaattgattaatctttggatttttccaaccacgaggaggtgacgggaaaaaggggaaaaacactacgcgttgagtagactcttctgttggatctgtttaaggtgtctgaggaaaatatagggctagaccttcctaacaacg

SEQ ID NO: 109377 - DNA, 301 bp, Glycine max
attcggacgcgtgggtatggctccatcatgtagaggttttttccttctgtggcaacatcattcatccgttagaaccagaaaaacatattgcagatggtgcgatatgtgtgggaggctgatggattaaaaggctattacaggggtgtaacacctggggttattggatctcttgctactggcgcaacatatcttggtgtcatagaggccacaaaaaagtggatggaggattcacattctatccttatgggccactgggcacattctattgctggagctgttggtgatactctagggtcttttg

SEQ ID NO: 109378 - DNA, 228 bp, Glycine max
caattccatggtctcgtttgggaagtatagggggaagagttttgtatcctagctgcaatatcaggtttgaattgttccaattctacaaagacaatgacaaatctgggacgccatcatcaccagaaagaagaaaaggcaagtcgcgaataattatcttgattgttgtgttggcaagtatttctgtgacgttattctttgcagcttactattttctacataaaaaagcaa

SEQ ID NO: 109379 - DNA, 446 bp, Glycine max
  unsure (1)..(446): unsure at all n locations
cttgtttcttaactgtggaatggaatgagaaggttgctgcgccttctcctccaccgccaccatgccggcaacgcctccctcctccgatctgatcctccaccgactcacctcctccgactgcgaaatcaagctcaaagccattcgtgaggtcaagaaccagatcatcggcaaccgcaccaagaagctctcctacatcaagctcggcgccgtccccgccctcgccgccgctctagcccaagctgacgccgattccgcctccggctccaccctcatcgtccagtccgccgccgcactcggcagctttgatgcggcgtcgacgccggtgtccgcgccgtcctcgacgccggagctttccctcatttaatcagactcctctctgccgctgacgacaagggtgtggatgccgctgcacgctctntacgaatgatttatcaatcaaatctagc

SEQ ID NO: 109380 - DNA, 350 bp, Glycine max
gtatctccaagaacaataacatatgctactctacggatggaacttgaaaggaagtgctacattgagccatggagagagaagcgagaccctggtcaatacttcatctgataatctgaaacaagaatgagtgagtgagaacaaacaaagaaaggaacgacagatggtgggacctagatagctacattgacacatgaaaggaaaagggaaaacacgatgaaggtgcggatgatgacggaaataataaaaagaaacaggataagaaggagaaagagaaggatcacaaaaaggaaaagaaggataaataggagggtgaaaaagaagattaaggacaggatggtgctaaggaagtg

SEQ ID NO: 109381 - DNA, 107 bp, Glycine max
acgctttgggtatagggatttcgctttggcgacccaggaggatgggattaatggcgtgtccggcattttcaatattgggaaccggatcgggcatgccggggcggatt

SEQ ID NO: 109382 - DNA, 359 bp, Glycine max
cttgaattttcatgagaatgtggtgagacatgcccagtcagcttcattgatgcctggcagtgttttcaatgatgataaaccatttaccgatggttctcaaatggctgatatatatcagcataataactcatttgggcaaaagagtagtgacttacccgaaatgagtataaaaacacaagcaggcagaagtgaagaagattttgtgactgacctatatgatgacagtgatttgaatgctgaaaacaattatcactttggagatgcaaggacaaatagacaatctaataaagtttccttctttcatttcattactccaactgatgatcacaatgataatttggacttggatgactggaata

SEQ ID NO: 109383 - DNA, 365 bp, Glycine max
tttacgcttccgcaaaaagtattcagttcagttgatattttagaaagtttgatgttccattttctagaggcaatattgaatcaaaaaacttgattaatgctgtgaaaaatagatggccaaattatctggtcttttatggagtcataatgtctaatagagtcttcaaatgtcttcctgttctgggatttctctgtttggttaaaaaatatgaattgtatacctgccactcaattatttctttatgcagccgatagtaagtatccaaaactgtgtattcgtatgacttatgagatgatatttatattttggtattacattctgtttttcacttggttcttatagtaatattttctccaatgtagatt

SEQ ID NO: 109384 - DNA, 422 bp, Glycine max
ttgggtgagaaaatttcaagcacaaaaaatggcggagaagaaagtggtcatcctaggaggtggtgttgccggagccaaccttgcaaaaactatacaacatcaagccaacgtcacccttattgatccgtgagttctctttttctatttgtagctgctataccatggtctctttgtagttcaattcatgttattttctatgtttaattgaattttcaatgttgcatacaagtatttatgatccatttcaaacaatatttaagtgtttgtgagttgttacttaagaggttaattcaaaagtttgttgaaataagttaaaaagaaaaattattacctctaaaagtttattagaagtcaaaaaacttattctgctttggtaagtttaactaagtttataaccttacctatatggactgaatctagca

SEQ ID NO: 109385 - DNA, 235 bp, Glycine max
cttacgcgtgggtttcgcagtacactgtttgggatgaaatgggaacagagaggacactatttgattttctataaatagccaaaacgctgggccacaacaacaccatgtttgatgacatattccaaatactatcgaactttgatggaagattcttgagagagaatctttctgagaagggcgcagatgtggatcccagaggctgcgccgtactggatcattccctcaaatccctaga

SEQ ID NO: 109386 - DNA, 404 bp, Glycine max
tcggttaatcgcacagtagaagcccgagaaacgacgtcgctgaagctgtgctgaaataacgagacattttgtgccctaacctagagaaaacctaaaagcctcgttggcggtagcggcagtgacaggagaatgggaaggtcgagaagaaagtacaagcaatcgagaaccaaggtccgtgtgggactccctaagaagaaccctaggcttttcaaaccctctttctccgttccacccaagctcttgcaatccctcgaccaagagcctcaatgggacgaccaaggcaccgttaacaccaactactcctcctttggcgttctctctgaccctaactccctcaccgaactctcttccgatcctcaaaccatcgattccggcagcgatctcgaagaagacgacttgaaatc

SEQ ID NO: 109387 - DNA, 274 bp, Glycine max
gtgacgcgtgggcgacaaacaattgtacgggtcagaatatattcagtagctcatgccttgcaagaagcatcacacgcgttagcgcacatgtaacctccactagcactgacacggaaactagcacccctgctgtcgatgctgccagcaataccagaacctccactcaagactaacattcatcttccacaactgcattcttgaaagtgggatctacccctagagcaccaacaagtttacttgcgtcatttacgggctcacaaccgctagaaaacaa

SEQ ID NO: 109388 - DNA, 381 bp, Glycine max
  unsure (1)..(381): unsure at all n locations
tgaagttgttctatgcatcaaagatctgaactccccaggctttcatccttccatggtttctctctgggtcacagactcatttgagagaaaggacaacgagagagattttttggcccagctgcttgtcaaggttgtgaaatctcaggatggacccttgggtcaagcccagctcatcaaagggtttgaatctgttctcagtactttggaagatgcggttaacgatgcccccaaagcaccagagtttcttggccgtgtttttgccaaagctataacagagcatgtagtctctttgaaagagattgggcggttaatacatgagggtggagaggaaccggngagccttttaaagctggacttgcagctgatgttcttggaagcaca

SEQ ID NO: 109389 - DNA, 202 bp, Glycine max
cggacgcgtgggcggacgcgtgggcggacgcgtgggtgaaattctgagttctaacgccactaaccctatgctgacgcgacttcttgagaactgtaagagtctcaaatatctggttgatgagtgtccttttgcatttgtgaactagtatgtaatattttattcacttaaataaagcgcattactatgtgcaatgagtgtgttt

SEQ ID NO: 109390 - DNA, 381 bp, Glycine max
gaagtttgtgtatgcctccatatagttctgtaaatagagcataaaatttcacgggttttattctcaatgcagaatccaactatggagttggagctcgtttttccacttcggaatagagcaattggaggttaaaattttagtttaccttccataaacgagggaaggtggtgaagctttggtatagtggaccgacccattaaacttttgttactttagcaagttatgtaagtgtcgatggtggtaatattaaagagtctaccatcgaccacagccagtttggcactaacagcttctacatggcgtggaagttctgtgtttgaaaagatcgttaacgtggtttttttttatatagccgagataatggagtagagttacagggac

SEQ ID NO: 109391 - DNA, 280 bp, Glycine max
gcccgccagacccgctcgctggaggagtcgtgccccgattgttggcccgacccgggcgcgcacgcgtcacgcgcgcaagccgcgcgcccgtccgtcacggccggcgccggttcatctacagaccaattttgaacgggctgtttctttgacgatttgtgtacaggcataatgtgtgaaccgattgaagctgttaaaatgccaaaaaaattgtggcacaaaaagaaaaatcgtttttatataaattttatttaattattttgaataaaatatttaattaact

SEQ ID NO: 109392 - DNA, 349 bp, Glycine max
gacctttcatctagtttgtgtcgttttgcgcacggaggagggtgtgggtttcaactttcaattcagaacgaacgattccttcatttcccgagtgattcaccgatctgataatcgattgaatttagggtttgggagatggcgtcgagtgtgttgaagagcctcctcctgagattttcctcatcgaggaacacgacgaccaccagaagtttcagcctcgttacccctcaaatcagcaaccacaccgccaagtggatgcaggtttttctggctggcatatcgtggatatccactatataaatttctcttgtgccttatcaacgcctgtctggaattagagaattaaagatca

SEQ ID NO: 109393 - DNA, 81 bp, Glycine max
gagactcttacatttgtgaactagtatgtaatattttattcacttaaataaagcgcattactatgtgcaatgagtgtgttt

SEQ ID NO: 109394 - DNA, 327 bp, Glycine max
tatttagtcttttaaattttatgctcgcgcgagatgccgagtccttggcgctcgacatgaaggtagtgtttggatccaacgcaagtgaggtgtggaaagtgatacttgcatggaaataagcagaaagtcacactttcttttggtactggcgaaagacgtttagaaagttgtcaacaaatcgcgggtcccacatgaaagcatttctctccaaaactgacgagaaaagccgaaaaggggtgaaattgtagatgaaaattccatttaagaaattgcccctaacctcgtgggatgcatgggagaaaagggttttcaacgttctatgacacc

SEQ ID NO: 109395 - DNA, 293 bp, Glycine max
gcgtgtcccacgcgctcgaaaagtggagatgaaatcgatcgatacgcccgcgccggaagaggcttctggggtagggcctcaaaattgatgggggaggtcgggcctgaagcgcctcttctagcgccagatcttcggcgtcctcaggaactcatcggcggcggagaagatcgcctaccccgacgaggagtcgccgcattccgccaaagacggctccgctgatttcgagccgagctcggtgtgtctggcgaaaatggtgcagaatttcatggaagagaatcacgagaagcactctg

SEQ ID NO: 109396 - DNA, 284 bp, Glycine max
gcaaatatgaatttgggccaattgacattgtttgccatccttgcggcactttttgtgggtgcgccggtgcaaagcggcgtattgccacctcagccgcagtcgcctcaaccaccggagccgccgcagccaaaggcaccggcaccaccaagctacgaaccaccggagcccccaagttacggagccccgacgtcaccaccgacgtcttcaccaccaccttcaccgcctgccccttcaccggcgtcttcagcgtatgagccaccagagccgccaagctacggagcccc

SEQ ID NO: 109397 - DNA, 304 bp, Glycine max
gaacttgcttcttgtgaacagtcatcttttgtagatcagggaacagtgctgcccatgtttcccaagctcttggcagttatttattttgatgcaatggcatcttattatcacaattaaatgctccactatgttgaaggcttgggtaactgatgagatcgtagcctaactctcttacggcccttggaaacagtgaatgcagacaaactatggatagtgatatctaaaattgattccaatgtatgtttcattggaagtaggggtgtctgtttaatgctctaatggacgaggtggatgtaacatgaat

SEQ ID NO: 109398 - DNA, 168 bp, Glycine max
cccacgcgtccgcccacgcgtccgcaaagaaggaatcacacaagagaaattttgggtggatcttggtaatttaaatttggtccaaaaatagtaagaaaaaaaaaccatagttcatttaattttcatgtacttgctaacggtggcgcaccaaagggggtcaggtgagtt

SEQ ID NO: 109399 - DNA, 259 bp, Glycine max
cccattcgtccgaattaatgcactggcactcattagtttctatcctcaatatgtttaatgtgaattgtgagtttactagaatgatgtgtttctctcctatcgtttttggaaagtatgtgctagacatttggagtgaaagaataacggatcaaaatctcagacttagctaagaattcgaattagtgatccacctacaatgtcattgtgactatttgtaaggttctaaactgtcaaataatatgtatattggtgtttgagc

SEQ ID NO: 109400 - DNA, 166 bp, Glycine max
tgagttgaaccaatctttgtaggaatttggtcatctctcctccatgtaaccacatcatttcatttggatttttcacttcgaccaagttgcatttaagcttggtttcaatgattgatactgtttgttgacaattgtaacttctactactaatagttgaattttcaag

SEQ ID NO: 109401 - DNA, 421 bp, Glycine max
accttccaaagctctttctctaaggtttttctttttctttcttcattcacaattttttactcattcttgtcatgtttcctggctccataaaacgaaagaacaccaataaaaattgattttttaatccatagttctgtgtaatttaccatttactgtgatgctgtgacgaaatgcagtaaagggtgtcttcatttttgtgcagatcgagctttggaaaacttgaggaagcatttgagtaacaaccccttttcagatccctgaagggttgtgttcatttgtcgaaataataacaacttgcttggaacaagcataataagcatggcaagcgcgttgcagcttcagggggttcaagggaactacctttgtgtgagtgtaggaggggcttgcatcattgcaagcctcaaattgggtttgcagcatt

SEQ ID NO: 109402 - DNA, 413 bp, Glycine max
gcgtcgtcgtttaacgggaatttggcacccgacgcttcgcccaccgcgctcgccatgaagcacaaccccggcatagccctcgattggactctccaagagcaaactattctcgaagaaggactctctctaaaaaagaaaattgcaagagaaggaaggatgattttccaaggaaaagtaaagataaaaaggtttcggatcctgcagtgagatcatctcactatactgctcaacccaatgtttccccatatgctcctgctatgactatgatggacaatgatgatggcatctctcacatagctattggaggccccacaggtgagctcttagagcaaaatgcacaggccttgaataaaatctctaccaatcttgctgctcttcaggtgagttcattccatttttaactgatttaacct

SEQ ID NO: 109403 - DNA, 423 bp, Glycine max
cccacgcgtccgcggacgcgtgggcgagcctgccgccggtcgctttctggggcacacccgcgagcgagacaattgattcgagcttccaattcactgctggtccacgcccgtcccacagcccgccgcattttcgagagcacccgcccttcgaccaccttcacctccgtaccagcaccaccgccgcccaattcaccctccacgccatcgcaaccatgcagaaggtcatccaacggacggcaatggccaagcgccaggcggcccgcaaggcacagaagatcgcagagctggacaaggccttcgacaagaggcagaatcggaaggagctgcagcagattaagagcatgaccaacaagaccatcgttgacgcccgcaagcgccgccgcgaggactggctactgggcccattggccccccgccgcgatg

SEQ ID NO: 109404 - DNA, 377 bp, Glycine max
catggattcaatgcaaacattccctaatgttacatgagtcgagaccttaaacttttatattgacaccgcgtcaatgtccgctcctgggaggactttacctgttgttggttggctggttgcccttaatgcccagagataaggcattataggaggcagaatggacctacgggcgaactcttggagccgaggaaatagcagagggggctggagacagatctaagggatttgggtttgtcacctttgcttctcaagacgaggctgagaatgccatataagatatgaaaggaaagacattaaatggacgtgctatctttgctgattatgcaaagcccaatatcaacactcgtggagaaagtccaattgccagaggatccagt

SEQ ID NO: 109405 - DNA, 103 bp, Glycine max
ggtttatctgttgggccacacatggtgctgacaggcttgttaagagccagcagaggctcacgcactatgaattactaaccaggacggatatctgacaataaat

SEQ ID NO: 109406 - DNA, 450 bp, Glycine max
atgaaacaagagacatcctctgttattcggtcggaattagggcgtctgtaggcgctgattctgattggaagtatgttacgcagtgaattaaattttgttgctttgtctcaatctcctcccagtcctatccattaagagaattaccagatccattgttggcaccacttggctgattatacgacaaattctacttagattaatttggttcttttatatttagatctaaatctcattaccccagcatcattccgtccacatagagctcacaattcttgaccgacacagagagaatgcatgcagccaaattgttcagtaatgtaacatgtgaatactcttctcaagtgagcaacaaaggtgggagtgagtgctctccaaatgtacgagaaacttgaaactggaggttagtttaacatttctctaaaatattgggttgtttgacttatttattac

SEQ ID NO: 109407 - DNA, 188 bp, Glycine max
tttacccattgctcgaaacaaggaagcgctgctggggctggttgatgtgggcccgacaatgcatcccgctctttatgaaatcgagaaagtctgctccatgcttgcgcataagaagctgatctatagcaaatatgatgaagtgggactagtcttatgtggaactgaagacactaattatgagcttacta

SEQ ID NO: 109408 - DNA, 111 bp, Glycine max
tcggcttctcttacaggtggaaggcccattcgggtgggtacatttgctaataccattgtgcacattggtccagacatgaattcacggtttcagtttttgaagtaccactac

SEQ ID NO: 109409 - DNA, 102 bp, Glycine max
ctttaatatctggttgatgagtgtccttttgcatttgtgaactagtatgtaatattttattcacttaaataaagcgcattactatgtgcaatgagtgtgttt

SEQ ID NO: 109410 - DNA, 316 bp, Glycine max
gcggtttgttttccattcattcatttcttatcaatcgcaaaggctttcgcggccatgtcactttgactgattccaattggcccaattcactcgggcgaatttgcgacctttgccaattatgggcgattgaaaggctttaccaaaacaaattaacccatttggcaatgctttgtgagcagaaaacatatcaaattgcggatacttatgttggaaaggataaacccaaaagcattttctaatttactcttttgacttttcccttttttggcatttcattcaaaatttgcactttttttgatgcgttccgttccaatcc

SEQ ID NO: 109411 - DNA, 379 bp, Glycine max
tccctcgcgtccgcggacgcgtgggcgcaaaacagcgtgaccccgaatggtctccctatgattttacctagtgagaatgacctgacttactagtgtgtggtttgtcttgtcgtgtactcctagacacccaacaaggtttttcactgatatggtaccacattacatataggattgagtcttagtatatctattgcataacgtttgtgtattgatcgatattgattgatttaatgatattgtgttttgatctttaagtacataaatgatgtgaaaatgaatgaggcgtgttgtgatgtgatgatacgcgacaaagtggtggaatgacgtgagctatgtttaaataagttatatttccgttatatgatatgtatatttacat

SEQ ID NO: 109412 - DNA, 288 bp, Glycine max
gaaatcattacgttggaaaagcagatgaagcttcttgaagaagaagaaaaggaaaaacgtgaagaagaagaacgcaaggagaggagaaggacaaaggaaagggagaaaaagcttagaaggaaggaaagactaaaaggaaaagaaaaagaaaagaagtgttcggaatcaaatgatgctcttggttctcctgaaatctcaaaggaagaattgtctgcagttgctgatatggagcaaaataatcctattagctgcaggagtttagttattgaagcaaatgaaactaatcta

SEQ ID NO: 109413 - DNA, 115 bp, Glycine max
cccacgcgtccgtgattactttggagggttattgatttctttgactcatttattttgtaattatctctatttatttatttttaaatgaagagaagtatagaatacatttctttag

SEQ ID NO: 109414 - DNA, 214 bp, Glycine max
cccgaatcagcagtcagcagcagaaaccatcaaaatgtatgaatctccgctttattgttctttccccaattttccatcttcgtttcctcaaattcctcttcacagtgcttctttcttccagaaaatgaaccccaacgatttccccctccgaagagaggcttgtcgaggcctctgctgaatcggtgaagaggtgagcgaaggagtggttgggatt

SEQ ID NO: 109415 - DNA, 419 bp, Glycine max
atgaacttgaagaaagaggaagattttactgactggttggatgatgatagtgctcaatttgttgatggttggattccaagctcggatcttgagaaactgatagggcttgagtgccaacattttgcattagatggtggtttcacggatgattttccacacccttaatttgttcctttatgaaacaaatatgaatagcgaaaatttgtgatttaatttttcttttttaggacaatattgtagatcaggcctccctatagtccctaactccctatttaaaccttcgatcagtttcctgggtattttgaattgcagttgtgattatatcacgatttttacattgcggttaaactcgctgtaatttgcaatgctatggtgaaacctatacgagccttgatgttattgcaatttcaagcaaacac

SEQ ID NO: 109416 - DNA, 168 bp, Glycine max
  unsure (1)..(168): unsure at all n locations
ctgacgcgtggggttaattagtgtttcaaaacttgtattttattaaaagcttgagccctttagttatagatagatatagctntaattgtggttatctagttatcgttccttttgctgcatctgcttttgattggtcttgatgaaatttataacaataatcatacctgt

SEQ ID NO: 109417 - DNA, 413 bp, Glycine max
  unsure (1)..(413): unsure at all n locations
ccttgctattgtttttacaacagaatatggctcccagctgtgtacatctttctaatccttaccatcaatgtacccaagcttgctcccaaaccaccaagacttcaggttatggcccaagtactgtgacagatggtcagctttcaaaaaagataaataaccaaaaacgaacgtacccaggttgtcctaaagcatctaatccttaccacgagtgtgatgacaattgttacaaaagattatcagattcgggtgctcctcctcctataaagctcgtcaagaaaaagaagttaggtttgaaaccagaaccccctgttcttgacagtgttcctgcctcaaaagttgnggcaatttacctatctgatgcttcaccacaaatatcacagtattctgagaagaaaaaagtggagacagaaaac

SEQ ID NO: 109418 - DNA, 341 bp, Glycine max
cttacgcgtgggttctgttacaatttacaatggtgatgcaccgttttttgatacttcatttgttataatttatgtgctgctcgtttcatgtatcttgggtgacattaccttgatgtaattttataccgtatgttgtgtaactcgagttttatttatttatttattatttttcattatatcagcacacgtttcctatatctgcaagtgtctgaatagcaatacttgtcaaaaaaaaagtttccgtatcattacagtcacttcttgttgactatttgtattcattttattctcactcttataccttcaatttttatttaataattgtattaataactttattt

SEQ ID NO: 109419 - DNA, 384 bp, Glycine max
ctccattctctctttccttccccttttcgagacgacaagatggtgaagaagagcaagagtaagaaaactctttttcaaacccttcaccaccgtcgttgtataatattaatgttttttttaatttaaaaattatttttttgtggcgaaattgttgtgttgaagagagtaagagcaagagggtttcgctgaagaagaagtacaaggtcataaggaaggtgagggagcacaacaggaagaaaacgaaggaagcgaagaagcttcgattgagtgggaagaagaaggttgagaaggatcctggtattcccaacgattggcccttcaaggagcaggaactcaaggccctcgaggcgcgaagggcgaaggcaattgaggaattggaacaaa

SEQ ID NO: 109420 - DNA, 115 bp, Glycine max
gcatcagcagtgctatatcatttttcacaatgagaacaaatggatcagggctgcaatatgttctcattgtgaaaaatgatctagcatcagcagtgctatagaaaaatttccaatt

SEQ ID NO: 109421 - DNA, 288 bp, Glycine max
ccctcgcgttcgcccacgcgtccgaaaaggccggcgggaaagacctgaaaagcaaaaagatttccccacgttaggccacacaagaaaacgacttcaatttctctttcctaacctgcaaaaaccgtcacgcaagcaattgtgcgtttctgaagcgagaatttgatttgtgagagtggcattcaagaaccacatcgcaatgggaagtgaagagatctcaacctcgctctgcgaagacattcccaatctcctctcatcattcgtcgacaccttcggcgatttctcagtcag

SEQ ID NO: 109422 - DNA, 406 bp, Glycine max
ccctcgcgtccgcccacgcgtccggggaggggaagcttttcaagtaagcctcccccttctttgggagtttcttaaaatagtgggagtaagacagggactatcatgtaacccctcatcatgtattggttttcatggctcttttaaggttttctcaatttggatggtttatgaggattttaaacatccaaacaatgggaaagaaattcattaacctcacatactcttcctctagtccattagtttaaacatttgtttccttctccttttgtcaccttccaactctcaaacatcacagcaagagtcatcctgattactctcattgtagcagcacaataaatcctttttttatattcaagtttttatggttctagttgaaatagcaatattctaggcatatatatgcttt

SEQ ID NO: 109423 - DNA, 347 bp, Glycine max
tcgtttttttattatgctgcgattatgaagtcaaaactgcatgagtacaggttcgtcgtgtcttggtttgtttaatttatggtttttatctaccttttgttctgattcccttacttgaaatagaaccctttacctacattttctttttgctttccaaaacgtctatgattatatatttgtgtcgtagcagtggctcactaggtgtttcatggcatctcctatgttgtttgcaaagtgttctgcctttctatgttgtttggatttatatctacttggtgtatatatacatttgtttttatgtacttggtctatatatacatttggtgataaacgtctattttatttat

SEQ ID NO: 109424 - DNA, 113 bp, Glycine max
attttcgttctcttgtaattagtttgtcttttgaatatgctgtttcactttcatttttgtgtataattcgttgagctgtggcagatattaataaaattttgaagcgcgctctc

SEQ ID NO: 109425 - DNA, 354 bp, Glycine max
ttgtttctcccctgctttcaccacctgattgagttctctttgtcatcccacaaaaattgttaccaccaaaagaaaaatcaatcatcgctctgatccccgcttgctctcttctctgatttttgttctgttctttctacaacactaaatttaagatgggtaggtctaaaggaaacaactttggcatccgattctgtttttgatttgatcggtgtacagattctaaaattttgttctttctttaattggacgaccaaatctgtgaatctgagtcctgaacttggatcactctgattcgaatctttctttggctcacacccatcttgttatttgtcattaatttcctcggaacaagaa

SEQ ID NO: 109426 - DNA, 391 bp, Glycine max
gtttacttttcgaaacacatcctgaaacagaaacacaaccaacggaaaacacaacgctaactacagaaacacatgaagaggagaagacagagacaacgaaggcaacttctgaaacacatcctgaaacagaaacagaagcaatcgaaaacacaacaataactgcggaaaaacatcctgaggaaaaaatgaaattaacggaaacacaaactgaagtggaaaaagagacaacaccaacagcaatcgaaacaaatgaaactgaaaatgaaatgccttttgagataaacacagctcaaaccgaagtaaaagaaacggaaacagaggaaaacacaacagaaacggcaacacaacaaggggaagttacaacaacaacaacaactgaacaagaaacagc

SEQ ID NO: 109427 - DNA, 142 bp, Glycine max
cttacgctttgggcggacgcgtggggagaactgtaagagtctcaaatatctggttgatgagtgtccttttgcatttgtgaactagtatgtaatattttattcacttaaataaagcgcattactatgtgcaatgagtgtgttt

SEQ ID NO: 109428 - DNA, 346 bp, Glycine max
gttcgattttttttcacaaattgtttttgcttttgcctattttgcttctccatctccaacaatcccaagcttgcttttcacgtggcaacagtggcgaaccgtcggatggcaatcccgaggcccaggggctaaaatcggaaaacgatgttcggactgttcagttgaagaaggaaaaacaaacggatgaaacggaagaggagaaagacgaggaaagttcggcagaacaaaaattgccatctgaattggacccggaatttgtgaaaacttatctgcgagaatttggtcatttgaagcacaatgagaatggcctttcccatggcgttaagcattttcaacgctttttggg

SEQ ID NO: 109429 - DNA, 108 bp, Glycine max
ttgtttttgcgtccggagcgtttacgggagcgcttgtttgagagtgagagggacagattaaaggagaaagatcgggaacgattgctagaacgagaactagaaagggaa

SEQ ID NO: 109430 - DNA, 370 bp, Glycine max
  unsure (1)..(370): unsure at all n locations
cccacgcgtccgcgccaggcaaaaaatggaactgtccgagaagggaggagtcatagtgagtgtctaacatgcgggaaacttccgcatcaattattcattcgacattccttgaatttagtgttccatcggagcgaaggttgaaatggcgatgtcctaaacgcgaacctgcgacgcctccgccacgtcgctaacagaacggaaggatatgaatgagggaagaaagattgtgtttctcaatttgacaacaactttgtttaccattttctaattaattttcgtaatacatccaccaatttacaattattttttcacatcttttgacttgtatttcaatttctcactttacattaaataaaatgaataccccana

SEQ ID NO: 109431 - DNA, 422 bp, Glycine max
tcgcttaactttggataaacttacatatcctaaacatttctcgcccagtatctacctaaggtcccccgagttgttgcatctccaagtattcctcgtcctgcacaacttcgatcagcatcatggccgatttcttcatcaagcaggagcccttcatcaaacccgatcctgaggcgtctggttctcctgcgcaagtcgacgaagaagatctgtatgaagatgccggcgacctcgaattctacgaaaaaaacgctggcgctttcgagcaactctacctcgcgcgcgttcctcgatacatgtgggaggcttggtctaaattgacggagcgactcggcgacgacgacgagattcaaattggcactctgcgaacatggaatgaacaaaagccggatggcagtctagacaccaaacttcgcatgcttctc

SEQ ID NO: 109432 - DNA, 420 bp, Glycine max
tcgattttaataaagtttaaattaaatatattaatttattttatatgaccaccataacaaaaagtgaaaagcacaaaacaaaatgagtaagcgaactgttgaacaacaacgccagcaacagaacatgcagaaaaagcacaacaaattggagcagtttcgttcaaagttagatcagattgaaagcgaattgatggaagtgagtgatcagctgaaggatcaattggcgcgaaatgatcaatttcgaaaagggaaaggggaaattgaaaaaatgccaattgaaagggaaggcgaaaatagattaattaaggagagaatttttgtaaatgccgccaaaatggagcaaaatcatgcgcaattacggcagaaccaaaaagaagtcaattacgaatttgctgagattatcaaatttttcgacatttg

SEQ ID NO: 109433 - DNA, 414 bp, Glycine max
ccaacactttcatttgaatcgatcaatccttctgttggtccaccaatcatggcggcctctatttctcaaacttcaatccttttgctcctacttttttatgcatctcacattccaaaaagcgatgtctaataatcttagggaggctcgttgcaatgagaaggatcgacagacattgctaatcttcaaacacggcattgatcgggagccatataacatgctcgagacgtggccaagtgaaaaagactgtcgtgcatggaagggtgttcagtgtgacaacaccacacgcggagatgctgaacttgatctatctacacactctctggaaggtgaaatgaacttagctttgctggaacacgaatttataaatcacttggatttgagtatgaacaactttaatgctattagcattccatc

SEQ ID NO: 109434 - DNA, 333 bp, Glycine max
ggccgccctttttttttttttttttttttttttttttttttttttttttctataacaccaaggaagggataaattcaagggaactagcaagactattggtttataaatttcacaaacttcgtttttgcacctcaatgaagccaaggttctttacatgggtgtttctcacccatataaagaaggggggaaaaaaaagattaaaagagaaaggggcaaaacagaattgggggaaaaaaaatactatctggctatctggtcccatcgttttttcctaaaatggcccattaaggggagcaacactctctttttgtattcccagatgcatccccaaca

SEQ ID NO: 109435 - DNA, 495 bp, Glycine max
cttcaattcaattttcccaataaaatgatttcccccaaagctggaagtttaaaagaaatttttgtatttatttcaatattttcttatgaactgtttttaaaaacactccaacatattaaaaaatttatagtaatatattgcaagttttaggttttaggtttggatcttaatgtctcaacattgtaatttttaaaaatagttggacaaattacagtttttgcaaaagcaacacttgggcacagtaagtttttaacattcatgagtaaggtgatgcaaaaagattataaaaaacatgggactatgaaaaattgttataaataagaaaaacttgcatggtagagcgattagctttatgggactgcaaatcttcttcaaactcccatttgatgctttacatcataaaatctctcattttaatttactgcataaaattaaaatatgaacttattaaatactaattattaccttgagcgtttttcttgcaatggaaatata

SEQ ID NO: 109436 - DNA, 122 bp, Glycine max
tcgatttggtttgtctatcatttaacaaatcagtttgaaaagcctaatttcaatgttccttcaatgtcaaataggaccttgtaattttaatattttaatggaatttcatattcacatgttct

SEQ ID NO: 109437 - DNA, 408 bp, Glycine max
ctatatcattaataccctatgtgagattttgttttcccagctcccactattctgtttccattatagttgtacaacttgcgctgcttcattctcccactttcctgctgatttctgtttccataacaatttcaaaacctctattataataactcttgattattctgaccttttctcacaatactaatgagagaaacctgtttatttcaaagttggacctgtgcaccttcagttttatgtttcttggcacagtaatattcatggccacatatgagtgtgcactctccctcgcccagtgtgtaaattgattttttcttatgatgttttacagatatatttcaatgaaatacccgatgagatcattgagaaactggttgatgagggaattactctcaatgttgctggggggct

SEQ ID NO: 109438 - DNA, 420 bp, Glycine max
cccacgcgtccgcaatagcgcatagagagagaatcaaaattcaaaacccgaaattgatataatttatcaacttcaattgagacatgcatctatggccgacaaagaatctccgagattccttcaaggattcatacctcaaaaggctcgaatggaactaccagagaatgaaagcggaaaagaaccaacaacaatcctcgacggaacagaaacttctggaaaacgaaaaccaggatcatggcaacaataacaacggtgacgcacccaacctcctcaattgcgaagctggctcggtctcttccctgttccaggaattgttgttggttctctcctgctgctactgctgcttttgctgtggtggtaagtaactaactaactatctctctagtaagtaataaccccttttgattcttggcttattta

SEQ ID NO: 109439 - DNA, 373 bp, Glycine max
  unsure (1)..(373): unsure at all n locations
cccacgcgttcgagtacttccaagagaaaacatcgagcagaagggcctaagaagggtaactcaaaaaggatcagaaagtaagatctctgagtgtttccagatgcaatcatttttaaagagtagaaaaagccgagcttcaagaacaaagatgaaattcaattttatagtgttctaatgttctataacttctgaagtgggggctctaaggttttctattcatctcttctttctttcgttcgttttctcttttgttttattggatttataaatacggtcgaacttgttagaggttctgtgatatgcttttttaggtgctgttcttgtaacttatattgggaccataacatgttgcgttcttatctttnacatnnna

SEQ ID NO: 109440 - DNA, 416 bp, Glycine max
cattttcaacgccacaccaaaaattccactgcaccaccaccctccccatttgtacttttcttctcattctctttccactcccctgcattctgcacacaatctagtactacttttcttctcttttattttttcagatttcccacttttcttattctcataaaaccgttaaatttacactcttttttttttttttaccttctaaggctttacgtgcttctgggcaaccgcataaggttaaactgttaagcatatcattgaaatccttttgggattggaacttgatatgatcatttgtattggggagtaagaccttgttacttttgcaaatgctaaattttaataggatcagaagtcagcccaggacaaccagatctatgtctttgggaggcatggattacgtggatccaaaaaggaaa

SEQ ID NO: 109441 - DNA, 437 bp, Glycine max
gttgaatgattgctaaaagttccccattttctatgtccttgtgtgtcaattgcatgtgtttcagaaacctcgcttgatatttgtttgttgaatcactcatcattctgtcatgagtaattgtgattcatagttatacttctcattttcttcaggtttgttctgtcgtgatagcatttcacatgacacatggatcaatcctttcttacgaatataaatatttggtgaatggatggatttgcgattcacttttttctagctgagatcaagaaggattttgcacccaaaattatatatcctgtttgagttgcattttcttgtcttggaaattaaaacaaaagcccttatttgcgattgttcataattctgaacctcgggaaaaaccttaaatataaaatcaagaaaagaagcatgaatcttggatttgtcatatacatata

SEQ ID NO: 109442 - DNA, 408 bp, Glycine max
catgtttgagagccaattcaactccaaaagccgaaaatgtctcctgttattgcccctttcgtcctcgccatcattggcatcatcgccttgcccaccatcgaaggcgcagtcgggcgtcagcaagtcaagctgggcgagcagtacaaatacgagaatgtgcccggcaaattgatggtcaagcgacaaactgcggccagcaaggagccccagtatttgttcgccggtcaaacggcatggaccacggacggaaaagaccgctttggccatgccgagttggacttcgccactggcacaatgaccatccccaacttctccgagaacgacttgggctcctacaccttcccgcttgagcagcccaacttcagcgcagtgaatgggcccaacggatgcgagctgcagggtgtcggc

SEQ ID NO: 109443 - DNA, 418 bp, Glycine max
cccacgcgtccgctgtcttgattttttttccacttcgaatctctctaagatcacttttatttgtgttggttgtgttacctattatttggattggtttctaaaactgacaagttggggttgtttttttcctttgaaatacaatctctaactttggttgctcttgttctctttcttctccccctacccttttttataatcattatcaaatataaaatagcaattaagatattaatagtacaatagctgcatcataaatatctaaattattgaattttggtggatttttttcatgtagtagttacttaagtagttaagttattccatttttatgttaaaatacactttttatttttagtaggagcttacgattcatgttatgattccacaatttacaatttttcacccccttaaacttaag

SEQ ID NO: 109444 - DNA, 429 bp, Glycine max
gtggagagaagtggagctgaggaagaagaaccggagggagatagagatggagaggatgaagattttgaatatgatgatgaggatgatgaatttttgccagaggaagaagaatattcagatgaggaagaaatgggggggagaaacaagaaaaacgagggcactgttgagttggttggccttcttctttcagatcttcttccagattataagagccttaggtcactaccctctactctctttctcttctaattcttcttcttcttcaaacgcttcttcctcttcctcttccttcaaacctcttccctccgttgagattgctgaacacgattcgcctcctccctccgccctcgaaatctcaccacttgattattcccccgccgatcattccgtgccaaaactcacggttgtgctggacttagatgaaacact

SEQ ID NO: 109445 - DNA, 373 bp, Glycine max
aactccactccgatactcattgagaaccaataacctcaatctgatcaggcacatatctctcaaaccatgggggagacacatgaaattccccaccacaatctagctgacttcgagccttggctcggatatgccactgaagggcaagcagttggtggtataccctttgaaaacactttggagggccctcagtttcgcccgcaaccacaaccattgcattttgcggtgggaagagcccctcctgctatggccgaaaagggaaaggcggatcatctagaggaaaggctcagggccattgaagaaggtggagattattcctttgctaacctagaagagttgttcctagtacccaatatcatcacccctcccaagttca

SEQ ID NO: 109446 - DNA, 154 bp, Glycine max
agaatattggcccattattttggttaccaatcaccatacctggtgttagtaaccaaaataatgggccaatattctggttactaacaccaggtatggtgattggtaattctttttttttttttggttttgaatagtttatccagatttcacctca

SEQ ID NO: 109447 - DNA, 450 bp, Glycine max
ttttgttattgatgtatctgatggaacatcagacataaattctgaggatggttgtttaaaatctgtacgcaatgactatgatgagcatgaaggagatgatgatttttatatttcagaagttcttaaggagaatgtgaatggtagcatggttgatgatgaagtggaagctgactttgaggatgatatagagggaagtgatgtccatatagaaggagaaacaaataacagttctcttcttcttggcatgaatgggtctgtcacctctcatattttgcaaacaaaagatacaaagaaagcaacccatgtgacttctggagaaaataaatggatccaagttcgcaagggaaccaaagtaattgtccaagttgtcaaagaggaccttggtacaaagggtcccactctgactgcttatcctaaactaaagagtagattctgggttctgattgcatg

SEQ ID NO: 109448 - DNA, 116 bp, Glycine max
  unsure (1)..(116): unsure at all n locations
ttttgtattatcttgttaagcctcggagtcatggaagttatcaactgtgtttatggatgtgacagaaactgttttaacatttctgtttcgatgttgccttgatattttttttgntc

SEQ ID NO: 109449 - DNA, 324 bp, Glycine max
attgttttgttaatttttgttatattatataattattatacgtttattatattacaccaataaagtgccgttggtcactggatctgtctggttttagagagagagagagagagagattcataggaagagaaaaacgtgtggttatgtgattgaggaagagagaactgagaaggcattgccaattctcccagcaaatctgaggccaccttcggtagagattgtttcattttcataacaaaaaaaaatgagctctaaccttatgagtgttgagctggtttgataaattttgtttctcttccaatctatttattccccttgattcct

SEQ ID NO: 109450 - DNA, 442 bp, Glycine max
aataaataagagaaagagttaatgtcctaaggtatcagcttctaacatttgaagctcaaattggattattctctcacatgtttagctgcaaacttgattgattatttcctgctacttaatcaatacttcaaaccttggtcaaaggtggggaattaagcatgtcccattttcatactgaagtctgttagttcataccagaaccgagcaagtttcacatgttattttttggacttgtgatttgtttgacttgttgcattatatctgataaaatccagagcactgaagagcagaaaatggggaggtgaaaggaacactgaactctatataatttgatcaaagcagttaaactccttccaagcagagaattaactctgagaaacagtaggataatagttatatagttagacaaaatgaagaagacaactggaggatactctggaga

SEQ ID NO: 109451 - DNA, 473 bp, Glycine max
cttcacgcgtccggttctacatgtatctttctcctggagatattcagagtcacaaggtattcaaaaaggacatcatattcattattgacatcagtggtagtatgcggggaaagctaattgaagacacaaagaatgcactattgactgctctctctaagcttaatcacgatgattcatttaatattttagcctttaatggagagacttatctattttccaaagcgatggatttggcttccggggatgctgttgaaagggccactgagtggattaacacgaactttattgctgggagtggcaatagagatgctatccaatattcaaagttcagttccaatagttttcctagttacagatggaacagttgaagatgagagacaaatttgtgctatggtaaagaatcgaatgatcaatggagagtcaatatgccctcgaatttacacttttggcattggttcattctgcaatcatta

SEQ ID NO: 109452 - DNA, 432 bp, Glycine max
gaatagcctagaatagcgaaagaaagtgttgctgctaattccatttcagtgacccctaattatgatggaggaattgaacaaaccaatggacggatcagcaaccagctggttatccgatttggtaagaaaaaaaaaaaaaaatcattttcattcttccattcttcaaatgcccaaatagatgatcataatccataaatcctttaacccttttgtgttcctcttttgttttgttttatttataggaaatggatgattacaatttatttccagatgaatgtcccttgaacttgaacttgtttgatgaccaagagtttctctcacaagacattgctagtgcccttcaagaacagacacagaccttgcaacaatctttgtcttcagagtgcccttaaaaactgtgagcaactcatccaccgatgaaaccacttttga

SEQ ID NO: 109453 - DNA, 394 bp, Glycine max
tgcaggtgcggcaagtgaagagagtccacgccagggtatcgacattgttgagcacgcgagtgggtggcgcgtgggagaggtttgcgcatagcaaagcaataacacagtgcgacgacatagcgcacttgtttcgttgatcaccgttcttcacctgccggtgacggaattcaaaacacccgcctctctctctctctctctctctctctctctctttctgtcaccagaatctgttccattcatcttctctggtttcgattccaattcgctgggggaaagaattcgatacagcgttttcgtaattgtgtagtggaatttcgggggtatctggtctctttgtattgcttcgttttcacgttttttttatttgttgcgttactttactccatatcgtatc

SEQ ID NO: 109454 - DNA, 292 bp, Glycine max
ccttaaacgccaacacatccatctcgtaacggaatctgaaatttccgtcgtcgaagaatgaagacgaagaagcaagacacggcgaagctgatcaccgccgaggatttcgaattcgtcatcgacaaagaaagtgcgacggtttcacataacattcacaacaattttacctctccaggtttctactttccgattagggttttaggattagcattgttgaggcatattatgatggaagatgattcataaagcaaccaaaaccaatcgagaatactttgattccgagtgaaatgcg

SEQ ID NO: 109455 - DNA, 383 bp, Glycine max
ctttgatattgagaaacatggtaatgaatctcatggtcacttagaagatcatgatgcagaagctgaagctgaagcagctgcttcagctgttgctgttgctgccattagtagtgacgagattgttggaaatggattgggtgcttgttttgtccctgcttcagatggtaaaagttttgtagctgcagatattgatagggtagtagcaggagtaggttgtgagcagcaatcagctaatcaatctagatctgaggagcctcttagcgtatctcttccagcagatttatctgttgagactccgccaattttcttgtggcctcccttaccaagtacccaaaattcttcgggtcaaatgatttcgcattttccttctgtccctcctcatt

SEQ ID NO: 109456 - DNA, 384 bp, Glycine max
cccacgcgtccgcccacgcgtccgcgattccgctattctcatttctcaaacatgacagcagcgttccaagaaggcggcggcggcggtggcggtggtggtgacgatgacgccaccatcgacgtgcataccacgcgcggcactcccatccgctaccttcccctcgaccacctctactccgccacctctccctgccgcgtcaccgccagcggctcctccaacgtcatgtcgaagaaaatcaaagctcgcaaactcaccctaacgcataacaaccattttaacaaccacgaccagaagaaaacggcgccatcttcttcttcgtccctgacccttgctcccaagccccctctcctcttcgtctactcgcggcgccggcgcaagaggcat

SEQ ID NO: 109457 - DNA, 110 bp, Glycine max
atcacgcgtccgtccacctgtatggaccaaacatggtatgagcaaggaggcagggatgattgaggggctttgtggaggggaggaaaacttgatgcatgacaggacacacc

SEQ ID NO: 109458 - DNA, 242 bp, Glycine max
cttattttttcttccttctgcacattttgtgcaatatggtcgttttcatttccacccctctttattcgtggtgtgtcgctattgcgctcgtcttaatgatcatctctcaatgttgcggctgttctaaaaagaaacaaaagaaagctaaagagccgctgaaagcaatgcctactcagaaagcggaagaggcatctacagggagcgagaaaacgggtcaaagcgttgtttctgttaggccaccc

SEQ ID NO: 109459 - DNA, 139 bp, Glycine max
  unsure (1)..(139): unsure at all n locations
tcgnttttatgttttagatgctccgttacaaatagctaacggggggatgagttgagaacttgtgagcgaagttttgtttaaattttagttatatttgtaatctttttgcttaataagcaggatcgtacgttgagacttg

SEQ ID NO: 109460 - DNA, 364 bp, Glycine max
ctttttaaattaacttataaataaattattcacttgtttaatatttgagtttgacgatttaattagttttgaaaagaataatatatactttatatggatataaaataatactcattggctagaattttgggggccacatattatatactgggaaacgtatatggaccactttaataaaagtggaaaacccattaatgggataatgggtattacagggtcaattgatgaaaattaaggaccttatggcagtactgtccgattcaaatcaattgatgaggtaaaaagcaaggaaggatcccttgaatattgtgccttaaacaaagatgatccagcagcatctttaagttcctgaccagctatttat

SEQ ID NO: 109461 - DNA, 217 bp, Glycine max
ttctcgcgtttttggacgcgtgggcaaataggtaatccaattttgtcaaaatctatcttgttatagtaaaacagtcgttttaagtgtactgtttaagagctttccacgctccaaaaagttgtattatagataagatagtcttggactcttgatatcaacttcaaaaattgaagaatgatattacatatttttcagtaaaaagtaatattactgtgcc

SEQ ID NO: 109462 - DNA, 151 bp, Glycine max
gttactcgtgggccggccaccagacttttttatgaggcgcttgtgattccgcttcacgcccatcggctcttccaaaacacacttatccctttgcatccaccaaaccagtactcccaaaacacacagacaccacctgcattggggctatcac

SEQ ID NO: 109463 - DNA, 373 bp, Glycine max
  unsure (1)..(373): unsure at all n locations
ttctcgttactcgtccggnttgaggaatattgggttttccaaagtaataaatgcattattcgaatggtaattgcacaaactgacgctgaagtggctgcttattgttagccatttcgctttttggtcacgcattggttgatgacctcgcctccgttgggacactttcccgacgaggacggctgctggcaaattcgcaatttggttgagaaggactttgacgatgtcttcgaactgtgcagcaaggcatttccgctggattatcccttggattggtacaaatctgtggttgctggccaattcatcagtttcggcctctttcgtgacgatttgttaaccgcgttaattgttgctcaacggaaacaaattttcgagt

SEQ ID NO: 109464 - DNA, 283 bp, Glycine max
taccgcctattcgcccgcggacgcgtgggttcaattcctgtacagagaccaaatggaacagccaactctggaacagaatcttcaacttcatcgacaatgccttattctcagagccaaactgtcgtagtagaaaatcctatgtctgttgattcgagtgggaaattggagaggaatgtcgctgtgggcgttacaacagataagaaatgatacttgccacatgaaaacgttacacaagtgtaaagggaacatcatttgactcgacaactgctggtgcttgaaaata

SEQ ID NO: 109465 - DNA, 438 bp, Glycine max
aatttaataatccacttattgattaacacttgcttttcttctttcacctatcgcattctaccgccgtgagagcgtagtgcaggctgctaaggcgaaagcaccggtagctgaggcaccataacatcatgagcaagcgcgattaatccccgatacagagattcaaccacgattcaggaacaaaaacgaaacaacctccgattcgtattggtagcagctggaatcgtatcgaatcctgtagagtaaacagcagcagcaggatctgcatacgatatgatgcttcttcggagaattatcgctgcatgtcctcaatcaaagaggatgttcagctcttctgttacccatggctatgaaagtgctattcaagaactcaacaaggaaatggaatcggtattcggtgaacctcctacaaatggactagctagctctgcaagcaatagt

SEQ ID NO: 109466 - DNA, 403 bp, Glycine max
attattaggctgttaaaacctcactactctgaaagctccaatttggaggaggcgtcgcctgaagagtcctctctccgccttcgtccgtcgtcgtcgatcatcgcttatgactgtaccgtctctctgtttctgtctctggtttattcgattcgattcgattctgtgaatccattgaaatatagaattctctctctctctctctctctctctttgattatcgctgattttgattgacggcctcgctctgtgtaaggtcatttgaaattgatggattccaacaattggagacctaatcaaggtactaaccccactatggatacaagtgattggagagctcaactaccaattgattcacgccaaagaattgtcaacaaaataatgaagacactaaaaaaacatcttg

SEQ ID NO: 109467 - DNA, 327 bp, Glycine max
  unsure (1)..(327): unsure at all n locations
tttttacgcgttcgtaccaatgnanggcgctacagcgggccaaagtgcgcttacattattcaaatcaacggaacccccgcagactgatcaaaatttgctttacggcattttacaacgcgatcagttggtgctaagcgatgaatttgaaatctggacagctgcactccggcgggccgacgaagagtgccgtcaaaattccattgaacgttccgctgcaaatcgccgtgctgcgcttggcccggcactgtgcaaaactcgtgtgccactaatcacattaaagacatttgcgaaggaaattgttccctccggcattctgacattggaaga

SEQ ID NO: 109468 - DNA, 443 bp, Glycine max
  unsure (1)..(443): unsure at all n locations
ccgtacaccggggacagaacggccaacccggacagtcggcaccgcccgcgtctcctggccgccccgggccccagggacctcctggacccgatggacagcctggcaaccccggagagtctggccaacccggccagcccggcaaactcacccaggccccgccctccctcggaccgcctggcccagcaggaccccctggccagcccggacagcccggcgagaacggacagcccggccagcctggaaaccccggcccgcaaggataccctggcgacggcggaagccccggccaacccggcaaccccggaggcagcggcgagcccggacagcccggagcacagggatcaagcggccaatgctaccattgcccaccgccccgcaccgnccccggctactgagtgtgatcagtcgaccaccgagaattggagaagaacccccactgatga

SEQ ID NO: 109469 - DNA, 176 bp, Glycine max
aaacaaaagacgggccaacagatgcaaaacaacattcatgttcttgtccttccataccctgcccaaggccacataaacccctcttgtccaatacgcaaaaagattatctccaaagggtgtcaaaaccacagttgccaccacccactacactggcaaatccataaatgcacccaaca

SEQ ID NO: 109470 - DNA, 165 bp, Glycine max
ccccctccctaatccaactgttgtgtggcggcctaaaggctacagcagccttgctgggcttgtgaaccagctactttggtgggataggggtcccttatttatcggtgccatgctcctggtctaaactggggatcctccaccaaaaaaaatccgggaagaggcgca

SEQ ID NO: 109471 - DNA, 281 bp, Glycine max
tgtgtccgtttctgcgtccgcccacgcgtccggtcaatccttatcttgaccccaaggcctcaacccctcttttcaccagcactataccccaaaatgcgtttcagctctttcgctcttggcctggccggcgtcagtgccgccgctgccgccgcagttcccaccatccttgagatggacgacgtcgtcctctatggcgagggcaagacccagatcgtgaagcgccacgagtggcaggctatggaagaagagcgcctggcccacctcaatgagaaggtccgccg

SEQ ID NO: 109472 - DNA, 279 bp, Glycine max
  unsure (1)..(279): unsure at all n locations
tcttctcggtgntaagcaggttgttttgcgcttttctagttcatacaaggttcaggttgtgtttgtttgttggtgttgaaccacaattgattttaactgtacttgtttgttgatgttgttgtagtttgtggtggatcatcttcgtcgttgtggtgactagtgaggagtgcaggactatacctatctatatagtgtatgaaaattctggggggtgaagtcgtttttggggtagttgatagatgttgaaatccttgacggttgtttggtgaaatgagggat

SEQ ID NO: 109473 - DNA, 137 bp, Glycine max
  unsure (1)..(137): unsure at all n locations
tgntcgttggatggaaaagaagagggngagaaagagaaaagccaggttgacgcttctgtacgggacattgagatacaagaaaccacacctgaaggcgaaaaagatgatgctgaaatggatgctgggaaggaagcgaa

SEQ ID NO: 109474 - DNA, 347 bp, Glycine max
cctacgcgtttgcggacgcgtgggttccttcacacacttccttcttttccttgttcttcgaacaagctctttctcattccatcaccacaacttccgatattgcatcttcaactgttttggttacattttacgcgtaataactgattgtttctttcgattggaaccatcgctcgaagagaatctccggtgacgtcgaagcaatattagtttactgtatgtattagttcggattaataataataaagcgcataagtgataacaacaacaaaaaaagaatatctgagttgaaaaattgctagaagaagattaaacgcgatgttggatcttaatctgactgccgagtcgac

SEQ ID NO: 109475 - DNA, 261 bp, Glycine max
tcgacgcgtgcgaggacgcgtgggaattgattacttccaccaccacaccatcaccaaaacactaacctttatttaataatcgccccaccaattgtggctatagcaaaggaaacaacatcggtgccttggcaggccagagagcaggccccggtttgcggacatgttctctgacaaatactttttctctcaattctgagcagaaaacttatagccttgtctgaggataactctcttcatcggacacaacagacaagaaccaga

SEQ ID NO: 109476 - DNA, 245 bp, Glycine max
ttctcgctctctcgtccgcgcacgcgtccgcccacgcgttcgaccacgcctccggttaggactctgtaggctgataaagacaacactcataccgttggaaagaaggacgctgctgggcatgttgcttaatttagttcttgctacctttgtcttgttgagtattatcagagacgggagtgcagggatcactagctatttcattctggcagagtggccggcagctgacatcccccttgatcatgaag

SEQ ID NO: 109477 - DNA, 452 bp, Glycine max
cctctactggtgatcttttaacaagcactaaaccaactcttttggatcagccacctgtttctgctacttccatggataggtccagcatgcatggattcattagttctagagtggatgcaacaggtcctgggtctttcccggtgaaaagctctgcaaagaatagagatcccaggcttcgtttcattaattctgatgcaagtgctgtggataacctgtctacattgataaataatatgtctaaagtggaatattctggaacaacaatctcaaggaaacaaaaggctgctgaagaaccttctttggatgttactgtatcaaaaagactaaaaagttctttggaaaatactgagcataatatgagcgaagtaagaactggaagtggtggttggttggaagagaatactgggcctggagctcagttgatagagaggaatcatttaatggacaaattt

SEQ ID NO: 109478 - DNA, 277 bp, Glycine max
gatttatgtctccactcggcatccaattcgacgtcaacacattggcatccgcccgcctttcgcaaatccagaaaatggaactatggactccgttcgcgtccagcggtgtggaaagtgtgcgctcggcccaagtcaatctgccgcttcaggccgaactgaacgccaactcggaccagggcatcagcctaaaggcgaacctgcccaagcagaagacgcagtgggccagtgtccattccctacccatcaccttcactggaaaagtggaccaaaacaccaa

SEQ ID NO: 109479 - DNA, 169 bp, Glycine max
attcatcgtccgtttatgggcaacaagggcatggggataccattgaccggaattctacaaagattatcgaggcattgagagtggatggatctgctgggccggacatagaatcctgaaacactgatctataggcagggaaaagaggcgtcttcttatctgagagaaatgc

SEQ ID NO: 109480 - DNA, 371 bp, Glycine max
  unsure (1)..(371): unsure at all n locations
nctgtctcgcagagaggaatcagaagggaatgggctctcagctcgcggccagagccgccggcctcaaagacatctgccccatctgcaaggttttcgtcttttctttcttattcgttcttcccatcattcttatcattattttctaaaaaaaaattgaattttgattattgggtacctctgaatttgattaccctgtctgcctgtaatcacctggcggtgttattaactttgtattgtagtcattggctgttgggttatgttatggcattaaatcagccgatctgggctttgtgattattactttttttctttctgctttaagaaaataattatttgtatttttctaattccaaagtgacgctctttcagca

SEQ ID NO: 109481 - DNA, 375 bp, Glycine max
aacatatagctttctatgcccacaaggagcagaaaaaagaaatttgaaaattgtgatccgaagttaataaccccaaggttcctgaacgaccctaaatgccctagccttatttggtgcatttccactagggcgcaagccattgcgattttagttatgtgtgggtggatgttgacagccgcatatcaatcatagaaaggcatgagcattgataatgctctgagctcataatgtgcttaataaatagacggattcttccaattccgaactaattttttctgattgactgtatgtttgtgttaaatacatataaaaaacagcttactaatgtttcttactatgtaagtattgttagactgaatgtgtggctataccatt

SEQ ID NO: 109482 - DNA, 257 bp, Glycine max
gttttagatgatagaagggaatacagtaccagatatcacaatcgagaggccagggatagagataggagtagggatagagatgtggatagagacttgcacagagaaaagaaacaagaggaaactagcaggggtaaagagattgagtgggaacacaaaaggggaaaggaacgtgaaaggagccgtgagaggtataaaagggatgcagaaaaagataggatcagggaaagggaagaggatggtgacaggagacaagaaaa

SEQ ID NO: 109483 - DNA, 104 bp, Glycine max
  unsure (1)..(104): unsure at all n locations
tttcgactccacgtgtctggttttttgctacgganctcagttcatagtgagttttagtatcgctataaaactttacaataattatacactaaatttcatagcac

SEQ ID NO: 109484 - DNA, 283 bp, Glycine max
ggaccggaggtcgtatatgttcacgtcgcagaaggtcaacacaggttcacgaggtgaaactctaattctgattggagaacagaaccaagagctattaaggaagtgcatgtaagttttgttattggagtttggagaaaacttggatggagttctttatgtgtatttgatgttgctgttctctaattagaattggagtttcacctcgatgatgattcacataaataagtgtttacatggaaggtcaacagaggttctggaggagaaactctgattctgatggaag

SEQ ID NO: 109485 - DNA, 210 bp, Glycine max
gaactgaaagccatactcaaggagctgaaagacaaaagatgaaacttggcttagaatcagccacacgttgagttacacataatagcaaagataagatgagtgctatgcatagtcccgtactcaattactcacatgtggagcatcacctaaagaaaaaccaagacatggattcaagtattggacattcacaacaacactgttaccaaccca

SEQ ID NO: 109486 - DNA, 307 bp, Glycine max
cccaacttcagattctctctctgccactcttggcaactcaatccaagctctgggtcgtggctttgatgtcacatcggatattaggcttctatactgcaagggtgctcctggctcaaggcttgttcacgttgatgaggatcacaccaagaaccttcttctttcgcatgacctcgttattcccaatgtctctatggatgttgattggtcacctgggaaggatggtatagagacgacccctgtgtatagtttccacgagatggcgaaatatttcaatgagaggtcaggcataacaggacatattccactg

SEQ ID NO: 109487 - DNA, 393 bp, Glycine max
  unsure (1)..(393): unsure at all n locations
cccacgcgtccgaattaattttattaattatattaaatttctcaattatttacattattattttttatttctttatctatttaattatttttcattaatattttaaagaatgaataattgaataaaaaaataattaatatatttaaaaatcagaaaaaatcttataaaaaaaaagaaaaaaaacaaatttgtttatgaaaaaagatgttgtaatcaggaatgaaagaaatactactgtattaagtactagtatcaaccaacttgcatttttctttttaaaatttttgactggaccaacttgcatttttatgagactaatttatgcaccttttacttaactntttccccctcctctttctctttctcttgaaggaaattatcaatataatactt

SEQ ID NO: 109488 - DNA, 457 bp, Glycine max
atttagtggtgtctgttctattacaaatagttggtggtactgggcatcttaatgctactgatcttgatggagtattttaatgttgtgtttctacacctggattaccctcttctcttttctgggtgcagatttcgagttcctgtagatcagagaagggctgctaatggaggctttgctgctaaggtacttctttactggtttgtgtctgttttctagttttgtatgctgtattcaagattaaaaaaaaatgattttagtagtgtaaccataaaaatgcctttgtatggctatgtctatgtggattattggctaattttgaatagggcggtgtttatttacatatttaatctttttcaaaagctctttctatttaattttttttttagggtaaaaggacctatttaattttttttgagggtaaaaggaccttgcagaaataaggaagctatcactcaat

SEQ ID NO: 109489 - DNA, 439 bp, Glycine max
attttatctcaccagtaatcgctctgaaagaccaaatcttgtttcattagactactttattgttgtttgagtctagtctccacatttgaaacatcaaccgttaaacccttggccaaatctctgacatgaaaattctaagtgtaactgtgtttagctttagcctctcatgatctcatcttatgctctgcaaattccatttcaaaaagcagctccgtttccctccaatcccttattcatttgtcactcaatgcacccattcatggagcataatcagagcttctgtgccatttcctgatgaaacccatttcagggaccctcacactgttcatttgttttgtgccaatgccctcaaagtttctgccaaaagggcccttcttcctgaagggaaacagctacatgcccatttgataaagtttggattttgccatgttctgtccct

SEQ ID NO: 109490 - DNA, 205 bp, Glycine max
atcgattttgtacaccatttaagctgacgaagatctagatgcagggccaattaagtactagggaattgaggaggtataaggttgatctagtggtgaaagaagaaggaaagggaggaaaagccataggtttgaatctccggttaataaaaaactaacatctgatatttatcgacaaaaagagtactagagaattaaattccgtttc

SEQ ID NO: 109491 - DNA, 434 bp, Glycine max
gccggcctttacggcacagcaccgacagaaacagagcaaaagccaagccctgtaaacaatacgataccactccaaaaggagttggaaagcgacaccacctatgatgacactgacacattcaaaatgttcatgggcaagagtttgtccaagccggtggccgtcatactgatgcgcatgttcgacgagctcggcctgaacacggacgagtttgatgagcgtgccgtggaaatgctggccacattcccctttgagcaggccaatttcatcctcaaagagctcaaggactcgcaactgttcggtgtgcagaacaaaccacaatatttgatgtccgtcatgcgcaactttcgtgaacgacttcgaacaatgggcgtccaacaggcgatggaattgccactgatccccggcccggacccggaaagcatcaagacattaat

SEQ ID NO: 109492 - DNA, 482 bp, Glycine max
cctacgcgtccgatcctttttcgcttttcactttcccatacgcgtctccttttcttctccaccagcatcaccactgagtcacactctccgagtcatgaactcactcttcacttctccgtagcaaacaaaacactctcacacgacaaagaaaaataaaaacacacacactgaatactcattcgcaaattatgctttcccggtttgcccctcgctccactctctatttcccaatctccgccacccaaccaaaacccctaatcggcgccaaccatacctcagcaagattctgctcccgataaaaaaaagaaaagccagaatccaacttcaattctttctctttattcggtattttgtgaaaaaaaaaaattaccatttttttattgttttttctgtgaaggaaaaaaaagaggagaggaaagtgcacagttttaccatggaacctaccgcagggaagcccggttctctccggaaccttctgatac

SEQ ID NO: 109493 - DNA, 299 bp, Glycine max
actcttttgttttttatgttcttgtattgtaactattatgattattattgtttttattatgtatttatttatatgagttggaataagagtttttaagataaagattgattctgaggttttatgagtggtgggttttgctctttttgggatttgttggactgaatcaaaatagagatctttgttgagtgtgtcggtgtgaatgcttcgttctgctgattggaactgttatcttttgtcaatatctgtgcatgctttgcgaatgagaaatgactcctctggggtgtgatttccatgcagag

SEQ ID NO: 109494 - DNA, 386 bp, Glycine max
ccttacccgattcactacccctctgcttcagcttcggcttcaggttcgggttccattcctccgcctctccgctgatttccctctcctgtggctgcgcacaccaaacccctccggttcggttgagtccacaacaagggtcatcgcaagaggaggaagagtctgttttcctttaccttcaacctatttccagcgaaaaccacttcgaccgtgtcctcgccaaggctcaaacgctcgacgaaggtgtcgttgtcgtttgaaaaaaatagtttatgctagcagaagcaatcttattagttgagcatttgaactaaaaagcaactggtgacacacttggatggaggccctgttatgatcaagacactggtttgtttgatggagaaatgtgt

SEQ ID NO: 109495 - DNA, 120 bp, Glycine max
cttgagaactgtaagagtctcaaatatctggttgatgagtgtccttttgcatttgtgaactagtatgtaatattttattcacttaaataaagcgcattactatgtgcaatgagtgtgttt

SEQ ID NO: 109496 - DNA, 433 bp, Glycine max
tgttgaaggagaaagagaaagagaaagagaaaaagtctaagctgaagaacaagatcttcaaaatactgccaaaagctgctgcaatgagcgtgacattccaaaaccctcccttcagcccaggcagggatcacaagtgcaaacactatggaggcaaagggttcttctctggccccatgattcccgatgaagccagaagaaaggcaaagaatggtcatggcgttgaaactcaagaacccacttcccccaaaatctcctgcatgggacagatcaagcacaagaagggaggggcaaagaacatgtccatgtccatgcctactcccagagaccccgaggtaaagaaacacgcttccaagtttcagaggatgttgttgttccacgcggagaaaccaaaacagtctgatgcggatgtggagagtgagagagcacctgcacc

SEQ ID NO: 109497 - DNA, 367 bp, Glycine max
ggttatccatggctgtttataattttgactcttgctaattgtggttttagatttatgtgttttggatgatgttggcttcttaatcattgtgtattcgttgtttttgaataacaaaacggttagagctagacacgtgttttatgatttttttctttttcttgtgtgtgtttgtttggataagttcctttttattggatctgtttgtgggtggtgttgattttgtggaccatgtgtttgatgttggctgttgcaggggtttttgttcatgaaagaattgaatatgccgggaattgttacaaacggggttcaagatgaaggggggagtaatgagatgaatggggaccaggattcaccttttaaggaaccc

SEQ ID NO: 109498 - DNA, 346 bp, Glycine max
ccttttcgtccgcctttttctctctacccttcattctctctctacctccacactctcagaagacaacagaagtaggtgaaaagcaaagaaccctttcttctcttgagattttccacatcaccaccggagacaaccactgttgcttgctcatcgcacctaatctgcctcaaaatgtgcgaaaaaatcgccaaggaagtgacggaaaattgaaaccccagtaggggaaggtcttgcctttgttgtggcttatgtgaggatacaatcaagttgggattttcgaaccctaggcgctgaaagcttgaggtttttcagtcagatctcagcgattttggtgctgtggcttttg

SEQ ID NO: 109499 - DNA, 431 bp, Glycine max
cccattcgtccggggccgggaattcccggtcatccgaggtcccggtcccgggttttgaaaagctcaggtcccggtcccggtagggcaaccgggaaccggaaaaacaagcactgaacaaagatggctctgcgataaacaaatatcgggtgcacccatttgttacggaatcgtaccgaaaaatcatggaatccggcgattttgagcaattgatcatggaacagggatggttggactcggctgaccaatggaactccacaatccttgcccattgggctgaccaaagtttggctgaactgctcgacaaaagcttttcaaggcttcaaacgccaaaattgcgttgggaatcaatgaaactccgaggcagcaaatggcgcaacacgaaaaacatggacggcggacaactgctgtgtgaacagccctttaacaaagat

SEQ ID NO: 109500 - DNA, 356 bp, Glycine max
ggtgttgcttttacatcgaccctcgtgtctatgcttttaggtgttactgtcctgataggcctcatgctgtcaaatgtaccaatacaggtttaagtgttgtaatcctatgcatgttgatgattgggttgctcctacattgcaaaagaaaacacagttcctcaagtggtcaattccaaacaagaaatactttttctattccctcctcaccaaatgcagaagtcgaaagtggcagtgtgtactttggagttcctctcttctcctacaaggagcttgcagaagcaacaaaccgttttgaccttaataaacaaattggagatggaggctttgggactgtctacaatgggaaactcaaagat

SEQ ID NO: 109501 - DNA, 328 bp, Glycine max
tcgcaattccacaagaccatggctccccaatttctcatcctgtcccttctcatctcatgccaagccctcacttcaactaccaaagcctccgaagacaccggtttcgtcggctcactagaccgagcaacgctcggtctagagaaaaaaaatcaagttagccatttccgattctacttccacgagaccttcaccgcgaacaacgctaccagtgttcccgtcgttccagcgttgcccaagtacaacaccaccacctccttcgggacggtgggggtaatggacaacgccttgacgacggggccggagcgtagctcgaagctggtggggagag

SEQ ID NO: 109502 - DNA, 313 bp, Glycine max
aattatcttttagtgcgctgtgatcgtgttgtaaaaactgttcgtcctgggaagaaaaagctgtctacctggcctgcacatttagaaattctccctgaacaagtattttctgaaaatgatgctgtatttgcatggacgtttggaaaacgccatccactctggcagacactcctctcattcttctggcctgtgttaacgccggctatttgcttatttcctgtgtaccctcatcggtgcaagctattgatactttactcatgcgctgggatccgttttctcattctctctctacttttgataagaggtacaatat

SEQ ID NO: 109503 - DNA, 370 bp, Glycine max
tcggttttatgggatgttgatggaaaccatggactacgaagaaagagacgattttgctgataaagattttgcaatagagcaaatgcatattctaatgggaggattaaaggacttatccacgcaagctaaggatgaattggaatccaatggctcagctttacaagataataataaaaactccaccctaacttggttgctagatacaatcaagaaaatagataatggagaagctgagcctcaaagcttttaccataaggatctcgcattgattgaactaaaggataaagtgaagccacctatggatgcagcagaagaagcttcaacctctggtcatcagttgcaagaaatgatgagagaaatattctatgat

SEQ ID NO: 109504 - DNA, 277 bp, Glycine max
gcttggccattgaacgatttggccaacggtggctccactgtgcgtcctgccggtgtgctgttgatcgcggcagctggtgtgagcagctttatgcgttattagttctcaggtgttgcggcattttcagtcggcgttgattgcacagtagtctagtatatacaaagcgtaattaatagtctctgattcgtgcaaaaatttgtaacaaataacaagctgatcagcctaatgctaatatatagactgtaaatatatacacaacgaagccaggtacatgtca

SEQ ID NO: 109505 - DNA, 356 bp, Glycine max
tcgatcattcaagagacaatgttgtccatctggaaatgaggcattgcctgcaggaattgtacccagaaaatctaacttggaaatgtggcccctgtggagctcgggtataaacaatagaatttcaaagcagccattgaacctgtttgcagtaatggttaagaagaaagaaattgttaacaaagtcagcacatggggaattccgttgtgtagattcaacatgttagctagtgcaataggagctaagaagaaacaagttgtcaataaatttgtcgcaaaggatggagcagcaaaggcaatgtcaaacgatattcctcgcataaagtatgatgtttttgtaagctttaggggctcggaca

SEQ ID NO: 109506 - DNA, 419 bp, Glycine max
tcgttcatattacacgccccgtgaaagatgattacagagccaatccaattctaacggatcctgccgacattatgcttaatatgacaatcctacatacttgattggaacttgttttatcttctaatgaatatgaggctcacaattgatcatcatcatcatcaacaagagaaaaatatccaatacacgatgccctttattggttgtatatatatagagctacttatcaaaggattctggcttgtgaaatggatgtaaatttcctcaagcagctcttgctcgaattagtagaatggccactggtttaagctgacactttgcccttgcttgcttggtactacctactcttgcacttgaaattcaaccatgtaaacatcttacctgcctctgccattataagttccttgatgttgattggagta

SEQ ID NO: 109507 - DNA, 301 bp, Glycine max
tcggtcatggacaagcactctcaccttgagaatgcgcccgaggccatcgacattgccggctttcgcgtctttggcctgtacccagaggatgctgagttctacacaaattaccccgaggagaagcgaaagaaggtcttccgaaaggttgacgttcgccttgtccccatgcttgcagcgctgtacttgatttgccacattgatcgtgccaatattggtaacgccaagattgagggcatggttgaggacttgggcatgtcgggagtgcagtacaacactgttctctccatcttcttcatccctt

SEQ ID NO: 109508 - DNA, 343 bp, Glycine max
tcgggcttagagagaggcagagtggaccgacttgcgtgtttcagttgataggcacaccacaacacaacacacagatctcttctttaacgtttacttttggtgtctgagaagaaagaaaaaagaaaataaaaatagagtagaggctctctaatcagtgagcgatcggagagtttggtttcatccttgctgtgctgctcagatggattacaacaataatgaccagtaaatcatttgtttcttgtttatctgtttttatttattttactttttatttttatttttgctgtgattggtatggctaatggatattaggtggttcaggaagtcaatttgtgagattata

SEQ ID NO: 109509 - DNA, 202 bp, Glycine max
tttgattctttgtatagcaaaaatgataaaaaccaatagctcacaggattgggctgagccactaatccgtgttcagtccttattcgaaaggagcacagattcaatccctgagaggtatatcaaacccctcagcgagcgtccatctgatgatgttggtgctgctgatgatgatgatgatgtcaacatcccaatcattgacctt

SEQ ID NO: 109510 - DNA, 374 bp, Glycine max
  unsure (1)..(374): unsure at all n locations
tcgcccatatccccaattcccccaaatccaaccaaagagaatcaaacacacaaaaaagaaaacaaatttgtagcttcctttcttcaatgtggcgaccgtggggcaaatcaactgttcgaattcacagcgcgtcttcatcaccctcttccacattctcttgttcttccttcaaagacattcaaaccctttgcctcgacgaacccccacaacaaaaccagcatcatcaacaattaccctctccttcccccacaagaaaaccctccgttttccaccgagtccgactcgccaactcgctcctccgaacctggtcaactcacctncacccccaaccccaacctcccaaactccccgaaccccccgaatccgaacctgat

SEQ ID NO: 109511 - DNA, 154 bp, Glycine max
cggactcgtggtttgacgcgtgggtgagaattgatgagatgatgatctccccccactcccctccggatatctttgtttttcctgttgatgtatctgttttcatcagcagaagtttggatgacgattattgctgattaatgagtgaagctagcac

SEQ ID NO: 109512 - DNA, 447 bp, Glycine max
cttggcaatataataaccaacaaacttggtcaggttccaactcttcgaacaaactaactagctaggtgagaaaaagagaaacatgccttgcctttacatcaccaccaaccttaacctagatggagttgacaccaaccccgtcttttctgaagccaccactgctgtctctacaatcattggcaaacctgagaaggtactcataaaccttaatttgcctccctttctttgccatgtaaacttataatcacatgatctgtctttaggaacaatttttttttttgagtttttttagaagcgatcataattttctaaataatattgaattacacactcatcccgtacctgtgtaagaatatccttgttggggttgacacgaatttaatttgcactcgcggcttgctttattctatttttggctggtagagcatgatatatacttctcaatac

SEQ ID NO: 109513 - DNA, 477 bp, Glycine max
ccctcgcgtccgaagttaaaggtttaaggatgtatctttttttttatccgtaggaattgaacacagtaccaagggatttacaacacacgcacaccttgcttaaccaaccaagctagacacccttggtgtttaaggatgtatcttatacctcttgggtgtaattctccttttcttgttatgaaatatcttatgctattaagtaaaacaaaaaattagtctatccatgtactaaatgatgctggttttggtttatatttccctagcattttacctgttcctagtcatttataatctataacaataacaaagggatacccccatttggtctacaaattttgttagactactttaccctttaactgctttccaaaccactcactattctatttcaaactttcatgtcaaattgactatatattaaattgttaaaacaaatcaaatttaatactttttcaaaataaaaaatgcagacagaca

SEQ ID NO: 109514 - DNA, 419 bp, Glycine max
gatttattttgcttgactggtcgtgaaaactgcctctcaatgtggactttctgttgtgattcaatgatggagacagatttgaagaacgatggcagtttcaataatcagtctgagagtaggtgcttggactgaaattcattaatgtttttgcggccaccttgtactgattagtcacgtggaaagctgtctttatacttgggatttaaagttgtcttcgattattatatacaacaagaagaaacactggtgaacttagccaaagaaaataatggtaggcatctgttagttggttgactagacggacatggacgtgaaagtattattgaggccctctcgaggataaccaggactgctttaagagcatttcactgtaacatgctaatatctaaatatacaatattattaggtttattggagat

SEQ ID NO: 109515 - DNA, 390 bp, Glycine max
ataaaaaaaatacccgcccggtcctctcccagtacccggtaaacccgcacgatgaacgacggcggaagccgccaaagcgacaacgcaaagccactcgatttggaaaacctgagagttgtctccgccgtggggcgcggcgccaagggcgtcgtattcctcgcgaggaccggtgactggtcttcggaagagtgcgtggcgctgaaagtgatctcgaaggcgctgatcattcaaaagaaggcgaagttaaacgacacggaggagtacacgagggtgtcgtttgaagagcaagtgctgcgtcgtttcgaccatccgcttctgcctaagttaagaggggttttcgaaaccgatagggtcgctgggttcgccattgattactgtcacggtggcacg

SEQ ID NO: 109516 - DNA, 444 bp, Glycine max
ccctcgcgtccgcccacgcgtccgatgccattggaaaacataagttgcggcaggagcaagtgcaacatttttttggtctaagccctagagaacgttctttgtcttccatattgcagctcaaggaacatggagataccattgccttcagttgctctgaactggatttgattttatctgaagttgagaaggtggaaaattggaagactagatgcatggataaattaagaatgttggtccaaaatggaaattccctacttcatgcactggagaagataaaccagactctagatagatcattgtttatgtatgacaaattgcaagatctgaaggaacaaaatctatgtatatgctgctatgatgattctgaagatcaggaatttcttacatgttccacttgcatggactgctatcatctgcgatgcgttggactaacagaaaaagaca

SEQ ID NO: 109517 - DNA, 424 bp, Glycine max
tgtcgtccgcccacgcgtccgctttggtaaggaaggaatgagacattattgttatacctgtctttaaactgttacaattcaatcttaatacaataatgattgcacttattatcaagatgaggtaaactcccatagtcccatcatatcttcttttctccgtaaaacattactaacattttgtaacacttttttttgtatgttttctaaattttcaacactttgtatttttaagtttcttattttatactaaaaattattctttatccctcaaatttcaactgttccgcctctacaaattaaattgacatatattatcattaaaggaaaataaacttttagtttgctctttcttggaaactagcacgtgtcatttttaacttgctcttataaattctaattgattatgcacatatttttataaatt

SEQ ID NO: 109518 - DNA, 343 bp, Glycine max
atttgtcacatcaaggttctggctctctaaccccagattctataagatccacaactcaagctagttctcttccaagtcactgggtctctattgaagtgtctgcccaagaagtattcaattgtgtggaaaacatggcaggggcatggactaaaccactttcaaaactcaaaactgatgcaccgggagaagataattcatgagaagtccttgtcaccgatactcccagtgatgcaccacatcagaccgctgacgatggagatgtggaaagagctcatcataaggatgaatgtataacattttctgctgctaaagaattcaactttgataatgcagaaggagggga

SEQ ID NO: 109519 - DNA, 417 bp, Glycine max
ggctgacaaatggttcggcaagagtcagaatgggtgctacagatgtaattgccagtgctaaggctgtacttggaaagccaagcttgttgcaacctgacaaatgaaaagtctctatatatattgattgcagttcaactgcagagccagcttttgaggttgcatattctattgcttttcctccttcatgtttttcaactttacataccatgaacattgataacaaaacaaataagttaatccttaaaagctttaactgaagttagaaggtgcattggattaataagctttacattttcatcagtaatagtgttttccattattatgttatttatcatttttgttctgtaaataccttctaatgtttcaaaattactattttatttggtgctctatttctctgtcttgtatatagggtag

SEQ ID NO: 109520 - DNA, 429 bp, Glycine max
cactttttgagatacatacacctcacccttgattgtttacgagtgtcaataacttatgttatgtaggaccaacaagctaaaatacgtagtagctgatgtgatgtgcatgcatgtattgctctccgataacatgatactgaaatcttccgataaaatttccttttaatgattcaggtagctgacatcaaaaggatgaatgggttagccacagatcttcaaatgtttgcactgaagacattgaaaattccattaccaggacgtcatccgccatctccttctcctggtccacatgaagaacctacaaaatcaggagatgctagcagtgagaggaaacccctacgcataggtcaatctgccatgaaggaacctctccagtccttaagactgaaaccacctcaaccgaatatttctccagctatgagcatttta

SEQ ID NO: 109521 - DNA, 397 bp, Glycine max
cacttacagaaacacacaacactcggtttcggttcatgctcgaagaggtcctctcgattcagatcatccacaacacatcacaacagaaacttcctctggcaaatctaccataacccacgtcaaatcctcacgaatctcaccgacccattccctattatcatccatctccaccgatcgctaccattaccaacagcagcttcatccattctccacgcacgcttcttccttttctttctcacaccgcgcgttcgtgttcttaatgcagaccctgattgcaacgaaatggacgtaaatttgggaggtgcaggcgcggtgacagcatagcatagcatgcagcagcagcagcagcagggagtgagcgtgcgaagagggaaggaggagcagcagcatgtcaaat

SEQ ID NO: 109522 - DNA, 326 bp, Glycine max
ttttgtcatctttgcagattcagagtaaatatggttttgccaacaaagaatcttctttcaaaaggtctatctccgagacaactttggagcggctatctgagctatttggttcattttctatctttcaacagaggggagagcctaaaggtacaacttgatgaacattttctgatctagggtggagaacttacttcgggtgtgtttggacacacacatatctaacttcttgttgcttctagtagatttagagagagagaggggaggttccaaacacacacgacataatagccaaatgctttattaatctttgatacgtaatttttcag

SEQ ID NO: 109523 - DNA, 397 bp, Glycine max
tcattcaacggccgaagtggtggaccagctggtgtacgcgattggcaaggagccgaaccgggaagtgcaggcgtactgctacagaacgatgaagaccatggccaactcgcagaagccggacgagacgcaaattgccaaacacgtcaaatcgtcactgaaacagttggcaaatgccgtggacgagcagcagttgcgtaccagcggaaagtggcagttcgagcagttgtacaacaatgcgcaacgcgagggcgtgttcatgtcttttgtgcacgcggtttcgtcccgctccgcgctgcccgcctacgcgcacgtgcagttggactcgcacttcaacgaccattatacgtacaacaagctcaacatttacatggtgcagcaggaagccgagcaatggtac

SEQ ID NO: 109524 - DNA, 293 bp, Glycine max
ctctaatggcgttcatcgtatccagcaaggttaaccaatttcgctattccacgcgccttctcttctcacaccttcttcgccatggcagaccctccacgcttttaccacccttcttttctcatcttcaaccactccatcaccctcaccaggttcactttcctttctctgttattcacccctaaagagagcaacaaaaaaaaaaattcaatttttacacataaagtccattgctttgattctatctatcggtcttcttctctcacctcaattgggtcagcttcaattctcattgg

SEQ ID NO: 109525 - DNA, 440 bp, Glycine max
atatagaagatgttgaggaagctgtcatgaaacaaataggcatatatgatcaactggcaaaggatactgaagagtgcacatcctcatcttcggacacaagcacgatgcagttggaaaagcaaggaggacaaacgcaaagaaaaaagctaacagaacaagctcgaagaggttctgaacagataggaaggttgcagtttgaggtgcagaacatccagtatattctgctcaaactggctgatgtgaagaacaacaaatgcaaaaacaaaaactctagaccaacaggtgtgttgctgaaggactttattcgcattggaaggaaaaatagcagaaggcgccgtaaggggtgtgtttgtggatgttcaaggccttcaactaatgaggactaagtcagatacagtatgttgtgagtacttttttcgtttgtgatgttttctataaca

SEQ ID NO: 109526 - DNA, 472 bp, Glycine max
tttgttcccttttggagacatcaagcacctttctgcgggtgttgaagtggaacacattaaagaacgaggaaacaattcaactggatattggactggttggtgaagggtcttcatggcatggaaattatgagaagaaatattgagaggacatataaaccttcactgttttctttatcttcactgtttcgatctatcctttctcacatggatcattatgatctatctgcttgaagttgttcagatcactaacaatagggttactctgttttgtatacattattattattactacatttctattcgaacaatagcaatgtgagggttttacagctcatcttggttgcttttaatgtttagagagatagatagaagaagaggtgaatatagggtctgcttttgttcaagtcatgcaatggcatgtatttatgaattcttctgtcaggagtagatacatatctatctatcaccttta

SEQ ID NO: 109527 - DNA, 400 bp, Glycine max
ccttctatttttaaaatgagaattgttcactgtatatgtccacacacacatatatatggtgggacttgtgactaaacattgttcattaattgggaaggagtattggtatgatacctttataaaaaaggggtgagtgtataaaacattgttgataatgctttcattttgctccctcccgattgatttaattatcatgctaagtgtctctgggttatcctatgcccacggaggcacttaactttattgcttatggattttaaggcttggtgttgaaatttaaattgagttttttcttggctacttatttaggcttaatataattatttatcaagattgattgcttacaatccaatctctgatataaaaccacctacaatccgattagggttttatctttata

SEQ ID NO: 109528 - DNA, 317 bp, Glycine max
caatttttgagtataaaatgaactgctccttcttcctctgtctcttcactgttcagctgattctgctcaatttcgcagtcgaaggaagagaagatgatgaactgaagagaaagaaacgcaacacggacgtggacgtgctcggcctggtaaatattcacgcgccgtcgcgaaagaatgtgaacgtcgacgttggcggagaagaaagagaccgaaatgacaaattggtcaatgtgaatgtgcagggacacaggaaaaatgtgaacgtcgacgtgggaggagggcattattatgagggaaaagtcgtaaaatacgaaagg

SEQ ID NO: 109529 - DNA, 348 bp, Glycine max
tcgctttttttttttctttttttttggataaaatatttttaaagcacaactgttataagtattataactaaagtcattaaggaactctgagaaagactgaaccattcgaatggaacactgcataaaaaaacttttacaaccaatcaaagaatttatcattatgaaaattacaaaagaaaagaaaaaaaggaaactccaaagagagcccaaaattggagtctggatcaatccacagggaaactaaatctctttaggctgtgttgcactctgaaggaaggccctgtggaaatctttgagggtcagagcagcacttgtggatcatgtaatgcttctgcacccacttgagcc

SEQ ID NO: 109530 - DNA, 463 bp, Glycine max
gtgcgttttgtttttttgtagaattggttagccaaccacaatcggttgcgcaagcctgtgaatcggacatgccacactcccttatcgatcgatcactcggccacaatatctacttcaatcaccgtcactccttgtcctaatagtgatggcagtcgtcagtgtgacgcccccggtgacgataagtctctcgagcggagtttcagtcgctgtcgcaacggcagccccggttctctaccggtttcgaggtggagtagcagcccgtccccttccccggctccgactccggatatgcgcggctatagcctgagacgtacccaatcgcctttatggcagtgtcagcctcaacagcgccaacaacgaggcacaccagaaccccttttcagcccagacgagggatctgagtcgcagtctgcaacgcacactactacatggagtacggcacacacacaccctggtgccacta

SEQ ID NO: 109531 - DNA, 394 bp, Glycine max
cccacgcgtccgctttgtttatagtgaattaatgacgcacatgcataacaagtgaaggagtataggatttgttagactgtaggtcaatgacatttagaaatttattcctgatttgttatcaagaactctagccaaaatggaatatgtgaaatcgaactttgagttgatttacctgtttgataatgtatttcacataatttaccttcaccagtggtccttgacataataagttgagacctaaatagtgattcttcattttaaacagaatgatacaactttcagatatattttgttttttaaagtgacctttgttactgttgttgtatccttgttaccatgcaggctgcattttgttgtgtcatttacccatgcctagttcttcaatacatggggc

SEQ ID NO: 109532 - DNA, 104 bp, Glycine max
ctctccgatttggttgctgtaaatttatctcgccactctgcatccctgtatcagagccgctctgacattcctgataatattgccgacaagattgcgagagggag

SEQ ID NO: 109533 - DNA, 420 bp, Glycine max
actctacatttattatcaatgggtcagagccgtgtgtcaagcaactgtagctgcaacggtcgcggcgggtactggacgttgccccttggcgtggattacgtgctgcgcgaaagccatagccattcgtggttatgagccatagacgcgctctgtaactcctgcacctctaggaaccagcgagcgcccctccaccagggttacatgagtatggccaggataatcatactgccagctggctcgtcccggccaacacctttagaagcactaagcagccttggctgcgttcgcagtcgaatcgctctcgatgttgccaacctctggaaatgttttgaccttgtcgagcgtttcttttgacatgctcgcagttacggtagcaacacaatcaagtctatcccggacatcagcgcctgctgctttcag

SEQ ID NO: 109534 - DNA, 483 bp, Glycine max
  unsure (1)..(483): unsure at all n locations
cgccgccggagcgaatggcggtgccacttcaaacgccgcgccccccaatttgatgccgcagaacggtgctgagtattcctcgctttatgtaattgtggcggctctccagcaacaacagcagcacaaccgttccgccgctcttcagcagcaactctcccactcacagcaaatgatcgacatcgaccgaatgcgtccgcccgtgccccccacggcgttggtaccgccgccgcactattcgcacggcgccgcgcatcataacggcacgtcaattgcggccgaattgcgtcattcgctgcacgcttatcaggcggcgctggtggcggcggctgaacgcgcgagggaggaacaacggcagagacagcagcagcacctgcagagaacgcggagaccaaccgcgagcggcgctgagaggcaaagcggcggcggacgaatgcgcggcggnggaggcgcggaacagcaaatacatcaattttggaactctca

SEQ ID NO: 109535 - DNA, 333 bp, Glycine max
cccacgcgtccgtccacgcgtccgcattgaatgggaggttgaaggaagaaaaagtgatagcaacaatgctaacgtacgtgagttacagaatttgcataatttgacaactttggagatatcattcaaagatacttcggttttgccaatggacttccagttccctgcaaatctcaaaagatacgacatattgattgggagttggcagttattttatttatggtatgttggaggtctcgaaagaacactcaagctcacaggcaattggtggacgagcagatcgttgttcaacacagtcgaggagttgagctttgctgaattaaagggtgttaagga

SEQ ID NO: 109536 - DNA, 395 bp, Glycine max
ccctcgcgtccgcccacgcgtccggagagagaagcagaaggctcttggacaaagctccaagctctcgctggtgaaagactgcgagactcgctggaattcgatcctcctgatgcttcagcggtattcacagctccgggagccgctcgcagccgctcatgcccacttctctcaacacctcgatgctcctgacctccaacagctcgatgcggtcacgaaagtgctgggtccactcaaatggatgtcgaaccttttctcgactgacaagcaaccctacttcggctccgtcctcgtcgttgtttgggttgcgctcaaacgccacctcgtcagccttccagaagatctcgatttcattcgacgcatgaaggacgctatccgcagtcgattgcaagagtgga

SEQ ID NO: 109537 - DNA, 386 bp, Glycine max
cgttcgcgtgggtgctggtcgatgtgcgtgtgaatgtgatgtatgcaaagcatagatccttcggtattgggcggttcactgatcaaccgatgtcaaagctgtctgtcaaatggcagggcaaacgtgtgtcgatgcccgagtacttcaccttgcgatacggcatcaccatcgacttccctgattttcctgccgttattccgaacactccagtgccaaaaggtcgtccagtagagacgttccccattgagcaattagtcatcatggaggatcagcgcgtgcctttggagaagatggactcgggcttgtctggaaagctcttgaaagctaacaccgttcctccgaatgaacgaatggacaagattctgcagtgtgcgttcaaaatgaat

SEQ ID NO: 109538 - DNA, 363 bp, Glycine max
attcattacacgcttcgctttttttgcagctcgcagagtagctctaaacgattcggtttggctctgaactgttttgcgagcttcattgggaggagtttggggatttgatagaaggttgtgtgatagagtgaagcttggacatttaagaagagatggaagaaatacgatcaggggttgacacgcaatctgtctgttacgtagagttcatgagctatctgagaatatttaaagtaccaggtaggtttggctctggagagctacttagattccaaccaaggggggatgccccccatgacaccttcttgcgtggcaggagggttagcccaatcatcttcgcattctggaattttctttcaaggagat

SEQ ID NO: 109539 - DNA, 304 bp, Glycine max
cattttcctccaacttgttggtctctctgtctctctctctctaggatcccttccttaccattctttacttctccccttttacttgaccccttcaaggtggtgccaatgtgcctgacatgtacttttggaggcctttcagttgcttttaaacttttgaagtgatcacatagttatcctctaaagcagtattttgctggtgattttcatctgcaatggagttctgaatctatgatgatgggatttctcatttgaacccccagagatggacaagaaagagcatattgcaatttttactactgctagc

SEQ ID NO: 109540 - DNA, 432 bp, Glycine max
gtttgttatattcattcaaagtcgttgattttccacatctgatctcatggccaacctcaacatgctcctccaacaattcttgcatgtgttgttgctccttctgatccctgtttcatctcagcctaaccagctcttctatgatggattcttgggaagcaacatcatgtcccttagaggagtagcagaaatagagtcaaatgggatactgaaactcacagatgattcaagtagagtagtgggtcaagctttttatccaactggtttaaggttcaagaactctagtgatggttactacaccgggggtgatgataattcaaccaaacagaatctcacgctcacaagtggggaacccattatagcttgggttgattatgatgcttctcaaagagttgtcaatgttacaatttctgaatcttctaccaaaccaaagag

SEQ ID NO: 109541 - DNA, 429 bp, Glycine max
ccctcgcgtttgcccacgcgtccggcccatcagaaagagaacggctcggcacttgttttgctaatatggaattgattagcaagacgacgccggacaaagggaacagcaacaacaattccaccaacaatttgccgactgaacaacatggaaatgctaaaactggaattttgcttcgattcaaaaaagcgtccgatgttaatggtgttttctcttattccaccggaggtggaacagcaacaaagttttcggctgcacttgagcctggcagcgtggtcaccgtttccactgacaatgcctacgccctgctgatcgccaccattgtttctgtcgatgtcttcgaatgttccgtaacattgcgctccgaaaaggattttcccgccgaatttggtcagcagcagtcggttctttaccacttggacaaaaatgacg

SEQ ID NO: 109542 - DNA, 162 bp, Glycine max
catttttggaagctgtatgtgctggtgtgcctttgattacatggcctctatttggagaccagtttttcaatgagaaacttgttgtgcaaatactaagagttggagtgaaggttggggtggaggttcctgtggagtggggtgaggaagatgagaatggtcttt

SEQ ID NO: 109543 - DNA, 145 bp, Glycine max
gctttgcgttcggaactttgcggtgcacagaatgatgcggtggtgcaaatgattgagggaaaaaaacatgggaaggctcataggaggcccattgaggcgtacattgtggctaatgagttgattaatgaggtcaatggtgatgcta

SEQ ID NO: 109544 - DNA, 381 bp, Glycine max
agctcacgcagcgcgagggaaatgtcgtggctgtgctagaaagtatgggcagcaaaggatcggtcgtagtgaatgggactctcgtcaagaggagtgccagctgcgtgcttaactcgggggatgaggtggtttttggtttgctggggaatcattcttatatttttcagcaaataaatcccgaagttacagttaaggctgcagaaattcagggtggtgctggcaagttttttcagtttgagagaagggccggagacccttcagctgtggccggagcttctattttggcttctctttctagcctcagaccagagcttacaagatggaaatctccatctcagactgcccataaacctcagcagggtactgatgtttctagtcatt

SEQ ID NO: 109545 - DNA, 437 bp, Glycine max
gtgttattcccaggcaattttgttataggaatgtccaattatgatctatattatttgcagtgtgcattttaatttgaatatttttagtgtgtatctagctagcttctgttttctgataacagataactgcaagcacataacttggatgataacttgtttctttcatttgctgagttcttgatagtaattatttcatttcatgttttcatttcagaaccaaagaaatcaaccacgaagcaatttgatcgaatagataaactatttgagtcatatgcaaataagtcattgggtttgattgacccagacgggattgaagcactttgtaaagatgtgcatgtggaccatacagatgttagaatgctcatacttgcttggaaattgaaagctgaaaaacaaggttatttttccaaggatgagtggcaaaaagggctcaaatg

SEQ ID NO: 109546 - DNA, 405 bp, Glycine max
cgggcctgcctgacaagacaagtcgagacactcgcagcctgccagcccgccagacatgactgccacccgccaacggccgctgcgcccgctgtcgtctgccaccgacctgaccgacctcaccgagtacaccaattccgccctcgaccccgatgaaccacgcaatgccgacggcgacgacattgcagactttgaatccgagacgcagagcctgacccccagcatctgggactatgtgcgccagtatggcaggacctaccaccgctacatggcaggagcgtacctctttcccaacgacgcgcgcgaagtcgaacgcctcgatatgcaacatgccatcatcaaggccctcttcaaccaccgcaactggttcgccccgctgaagcgcccgaagcgcatgcttgatattgg

SEQ ID NO: 109547 - DNA, 240 bp, Glycine max
gttcgaagaagcttcagctacagctgaaacagaggctccttcgatctacaatctatcgcgaataagctctcattttctgagagggctcttgctttctctctctcagtatctctctgtgtctctctctctcaccgggattacaccatttctgcatgatgatctctgctaccaaactcaaatgcagcggtttttacaggaaaatccctagagatttgactgaggcggcgatatcaggagccg

SEQ ID NO: 109548 - DNA, 344 bp, Glycine max
ttggtttaatgatctattggtttttgtaggcggtactttcccttctttgctttgcgaatgcttttgggattattactatagcaaatttggaatatttagttacttggaaaagcttaaaaaaactcaactcttggtatgggtaagtaagtaaaggaactgagtattttccttgcactataagctcccttctctagcagaaacctatattattctcttctcttggttgggtcatttttcggtatgcttgcattgaataattttgccgcataaatgtgattaacagaaagggaaaaggtccatttttttcaaccattccttttttcttttcttttttccaatttggg

SEQ ID NO: 109549 - DNA, 103 bp, Glycine max
ataggcagtgtgtgtttagaagtatagccattgagattatgcggggatacataaacagtacgtgtcttttggcatatgttatgatatgtttaacatgagtgaa

SEQ ID NO: 109550 - DNA, 120 bp, Glycine max
ctcacatggatccgagggaagggggatgactctcttttactccaaattcagggtttgccttagtcattatccatttattcatgtgggatatcctttgccttgaattgtattgaaaattcg

SEQ ID NO: 109551 - DNA, 101 bp, Glycine max
tgcttaattgcgtgcctaaatcgccgctaccgaacacagccgtagacttttaattcattccgctgcgtttctttctgtgcacttcaaagttcaaaccctag

SEQ ID NO: 109552 - DNA, 108 bp, Glycine max
cggtctttctttttcgactcacacactctgccctgccgccggcaatttcctcggctccggcacccaactctgccgacgaccacttgaatcacaaccacggtcacgtgt

SEQ ID NO: 109553 - DNA, 130 bp, Glycine max
tctttctctcactctttcctcagcatttggcaacatctgcaaactctcttctccttctctctatctctcactctgcagcaaagggtaaagtaaaagacttcattcattcacaattgcattatttccagag

SEQ ID NO: 109554 - DNA, 317 bp, Glycine max
ttcttctcttcccaatcccaatccagggtaactccgattgatactttgctcaatagaaagatagaaaacagaataaggtctcccccaacaccaagcaacaacaacagcaaccatcttccacgaaactcactctctttcttcttctcaaaatcactggtcattaccatttgaccatcatcatcatcacatctttgaaactctataaaccccatatgaatcacatgctttccacctcgtaacataatatattattcattcttctcccttgttttttctttcttcattccccattaccatggttttcctttccaccaccc

SEQ ID NO: 109555 - DNA, 140 bp, Glycine max
ctttataggaagaaaaaacacagcgagacattctcatcctcatactctcttcttcttttacgaaagcaaaacgaagacaaattactcaaaattaatcccaacccattcttcgcctccaagtgtttcaaatcaaatttcat

SEQ ID NO: 109556 - DNA, 99 bp, Glycine max
ccctgcgtccgccacattaaatatgcgcattgcgcacgaagcaccagcagcactacttctccgcttcttgctagtgtgcaccattgtcgccttgcgtgc

SEQ ID NO: 109557 - DNA, 314 bp, Glycine max
gatgaaaaaaatgaaagaaaaagaacaaaacacttcactccccccccccccctctctccatttccatttcttctttcttcagcttcttcttcttcttcttcttattctgtttgttcgctatagggttttctcgattccgattgcaatccctcttgtgttccttttgcaattccttcacccttacgcacggaacccagctcctcctccgcgcgtgatctgaagccaaattagggtttccgcatgagtcctcctccaactgaatccaacgccatggaagacggcaagcccatgaatggcagcgaccaagccgggtc

SEQ ID NO: 109558 - DNA, 241 bp, Glycine max
ctgacattctccctcactctcttttcagttagggtttgcagaacggtggtgaggttgtggattcccaaattttgaaggtaatttctcagaagcagaagaagttgttggcacttgatatggctcgaaggaagagtattgctagcagaaaattaactaagcgtcaggtgtttaagacagttagtgattaagttggctttaggtgatggaagctgaaatggtgggatatagttggcaaacaagc

SEQ ID NO: 109559 - DNA, 376 bp, Glycine max
gcccttcacatttaaatgcacatatgagggtgctaagcctcaaggatcatattatccaccgtgctactgataggagacgtggagttgtagaggatcttcatctaggcatagagttatctatagaagctgtcttcgatgttgttcacaaggcagcacatcttcttttttcgccttcagaagcttttgggacattattcaggttgttttcatctcatgaaagtgacactaaagaagattgtgatggtgttgaggacacccccatttatacagctacactaggagagaatgacccaatgcctactgagaggaatgtcaagtatcagcctctgaatacagatgcccggacatgccaggatgtcataacagaccttgggta

SEQ ID NO: 109560 - DNA, 210 bp, Glycine max
cgttttgataacagactaacaggatgtactgaaagtgtttgtggaaaaaaaaaaaaaaagactggtcgagctagtgatgtactagtgttatatttggccttgtgagactagggagtaacgagaggggtcaaaatcattctacattttttatcttattgggagtgaaggtggtaatttacttagttgaaatgtacatatctccagatgata

SEQ ID NO: 109561 - DNA, 398 bp, Glycine max
gagaacctcgagaatcgtgaagaagaagcgcatgctttctgaggattccgatgcttcagcttcttctcctccggcgaggaagaaggcgctgaagcagggcgatatgcagttggagctcttgaggatggtgctgaagagagaggctgagaagaacaaaaacaagagcaagagcaagaacaagaagaacaataacaaaaagaagaataagaagaaggacaagaggaggaaggaggaaaaagaggaattgtgttacactaaagaagagttgagaagagaattgccaaatggagtaatggaaatctctccggcttcaccgacgcgtgattacaacaatgtaggttcgcattgcgatgtcaaagttggtgttgatagtaaaactgttactccgcgttacttta

SEQ ID NO: 109562 - DNA, 312 bp, Glycine max
accacgcgtccggattctctaattccgatccttccgtaggcccgcagatccgttttgccctattgcggagatgaagaaccccaggaagaagaagagaccgaagccgcagaagaagcttgagaagaacaaaggcgttgctgctgctgctgctgatgttgccgagaacgaaaacgaaaacgaagaagaaaagagaaaacgcagcattttggaggcactggttgaggccttctccttgtcttcagtcagggaagcttccatggactataacattgtcggcggtgatcccgacagggctttggagatcctaaggaa

SEQ ID NO: 109563 - DNA, 418 bp, Glycine max
cccacgcgtccgcaaaaacaaaaaaagaaattaacataaagggtatctttttggtcttcaatttttgcaacgcagagacacatctcaccgacccaattgaagacccatttcagagttttcatttttgatcctctccgttcacaagaagctcaaaaactcaaaagggtagtggtggagtaacacaacacaacacgacattaacacagccatagaaacagagaatgagagagaataacaacgaggttgtaatcacggcgggggaagaagagaatcacgtatcgggagggcatcttcgtcattccagggacggaatctggtggtcagttgcgaaatcattgccacgatccacggcggttctcatcttccccgtcatgctcatcatcggcgcgttgacttacacgcgcacgctagacacaca

SEQ ID NO: 109564 - DNA, 381 bp, Glycine max
gctgccccttccatacatctttcaatttgctgctatgaagttctctgtcacatcgcgcatcgccattctggcgtccgttgcatattcgcagggcgccacttccacaacaactgcaactggatcaacaacgggcaacgcgacaccaactaccagtggggcgggtacaacgcacaccgttgctgttggcggaactggcaacaggttcgagccgcataacacgaacgtggaagttggtgatgtcgtgatcttacaattcagaaccaacacccataacatcctccaatcggacactcaaggcggctgcacgaagtccaccaatcctgccgtgaagcaattccctgcttacggactcgccgctcagggtcagacctggacttacac

SEQ ID NO: 109565 - DNA, 436 bp, Glycine max
cttatgttggtgcagcaccatatgtctataaatccttaattagacactactttacttggagcctatttacaaggacattaaacatgttcagtgagaagagcacacatttggaatcatgatgaggatagcaaacttggtgatgtctctgaccagatgacaagtcaaatacaagaaaagaaacttgaagcatatcaagtattggtttcaagtttataccgcagtattttcatgcctttacagcaaattactgacaacttcagtgagaagagcagaaatttggaatcagatgaggatagtaaactttttaacgtctgtgaccagacaataacgacaagtcaaatagaagaaaagaaacttgaagcatatcaggagacagatgatatcgctggttgtgacaagacagaaagcagttacacaaggcttactattaaaaatc

SEQ ID NO: 109566 - DNA, 313 bp, Glycine max
cattctctgcaatactactcaacgttttatcagatcatcaagaacggttcctgttcaaaagccatctgtaccctcttctaagcctagtttctattgtggtactcaagatttgaattctgcccatcaaagttttgcacgactgcatagtggattctttggaacacctcacatgttttctattgttcgacttctgggatcccgatcattaccttggcttattagagcttttcttgatcacatatcaaacaagattactttgcttgaaccaatgattacaggattacaagattctttgccaaaatcaattgggctt

SEQ ID NO: 109567 - DNA, 450 bp, Glycine max
gttgaaagagagagagagcgtagggtagcagagaaagagaaaatgaagaagtcttcgggaagcgcagctgacaagaagagggtgcgacggtcctccgccctagatcccacctccgacgcccctccaagggttagggtttctaattcccatctctatttttttattcccaaatctctctctctactctgttgctctcattgttaatctgactcgacgtccattttcgttgcttcggaaatgtctctgatcaaattttcgatttcaattctagggtgggttttgggtttcagtaatgtactgattggaaccgcagaagaactatgagcatgtgtgaaataagttatattattttgtgactgtgatagtgtcaaattttcaggtcaatttttgcattcctccggatagggttttgctgcgaacatagatttttcatttttcattttgggaagc

SEQ ID NO: 109568 - DNA, 314 bp, Glycine max
acgcgttgcctttgtagaaaagctcagcggcgttgcgcaccaattgacggacgatgagaagagtgccttccgtcaaacattggcaccctacaaaattccaaaggctgtccaatatatgccgttgccacgcaatcaccttggtaaagtgcagaagaatgttctacgcgcgatgcccgaactaaaagaattatttgcagtgaaaaaatgaaaattatttattaattaatttttatatatttagataaattgttaatgtagaaaatgaatgaatacatatgtaacaaaatcatttattgtaaaataaaaggactaaa

SEQ ID NO: 109569 - DNA, 406 bp, Glycine max
cctacgcgtccgcccacgcgtccgcaggaccctaattccacggtacaacgaagcttcttattgtgctttgtttggggttttatagcttttttttgtgaggttactgttttagtgttatttacatggttgagttctgcaagtttttttttttttttttaagaaaagaaaaaacaacagttggtaattgcaattgaagccaaaatgttgaaatttgtgggttatctgcactgcgattgtgctcggatttggctacaattttttgcggtattaaggattgtgaagaaatggcaattctgtctgcaaccgcagcaattttaaaaccttggagttttgtatgataattgttggtgttctgctctagcttcacagttcacacatggcactgaatgtgcaaagtagggatgtg

SEQ ID NO: 109570 - DNA, 106 bp, Glycine max
tcgcttacatgagacactgtacgctacacattatatttatatctggccaacgcatgtaattgtaagtgtctttatataacctgtgatctgtgacatctttttgcat

SEQ ID NO: 109571 - DNA, 418 bp, Glycine max
cgttacgcgtgggcgtatcccccccccccattcattcattgctcatttcctttgaaccgtttgcccattttccattggccaaccatcaaaaaatgaaactgtctttgttcctgttggcactgttcggaattgcgctcgtttttgttgcggcaggagactacggttacggtggatacggcaagaaaaagtacggttctggaagccacgaatacggctacggtaaaaagaagcattacaagaagaagcactacgacagcggatcctacgaatacggaaagggcagctatgggaaaaagaaatacggcgactacggtggcaagaaatatgacgactatggtggatacggaaaggactatggatacggcggctatggcaaaaagtacagctactgcagcggctcgcatgagtacggaaagag

SEQ ID NO: 109572 - DNA, 436 bp, Glycine max
cccacgcgttcgcaggaacatggtggtcttgatcgagatgatgaggtaatagtttattgtattgtaactgaagttattttatttcattaatttcagggattttgagaaccacttttgctctttaaaatatcttgtttcatttggaaatttggtgactgtgtcactctcattatggtggtcatccataagtacaattgtgttttgtgccctgtaattttactatcttgggccattagttgctttacttttgtagccttactatgtaatcaatcaacatatattgcaataggaaactgggtattttatgacagaaaatagggagaaaccctcatttcaaagatctgaatcacaagttcatcactgtaagtgtatatgagtgaataactctggttggctttataactagttagttgacagttgtgtttagttagatttc

SEQ ID NO: 109573 - DNA, 409 bp, Glycine max
tttatctgcttccttcaagcccagcacggtcgcgtttcataaggctctcgaagctcgccagcagcttgtgaatgctttcgtcgcggtttcatgcagaatcgcgttctggattcttttaaactattttttgttattttccttagtagcacaacaacaattgatttagtgaatcattgcaatgctcactgggcgtttgattttagtcctatagtttcttgttcatggttaaagaatcaccatcaaaacagagaaaggaagaggagaaagcattgttcgcggtccgtcagactaagaaacgaaggcccgtaacatggtcctggacatgagtgttgcagaatcaagaaagagataggggtagggaagcagaaaattacattatgaatcctttttagtcgtgaatatttttatt

SEQ ID NO: 109574 - DNA, 161 bp, Glycine max
cttacgcgttcgcccaataagaatgatcgttcaatttctgattatggagtacgcagacataacttcaatcgagtgtgatcagtggtataatacaagaggaacgtaggggaagataaagagacgacgataaaacctgtagggcgggtgcatgaggggaagct

SEQ ID NO: 109575 - DNA, 353 bp, Glycine max
gttaattgttactgtacgtcttgtagtcccatcaagccaagttggttgtttgataggaaaaggtggagtaatagtttcagaaatgcgaaaggcaactggggctaacataagaataattgggactgatcaggtgccaaaatgtgcatcagataatgatcaagtcgtacaggtttggagattatacttgttttattttattttgcaattaaaacatgctgaagaatgcttttgattttctcagtgaatgtgattctgtgtatctggcaactttataaattgttcccccttaaattaaaataaaatttctcatccttcatcatgctaatttaataacgatattcccaggcttttct

SEQ ID NO: 109576 - DNA, 296 bp, Glycine max
cttacgcgtgggttcaaactaaaacgcgaggaaaagaaaaaggaagagtcggagagcgatgctggttccgaattagaaactcagagcgtcaacaccgaacagtcatttgatgatactggcagagagaacgctgcctcggattatgtgatggattggattgggaaggaggtgagaaaagaaaggccgaacgaggtgaagaagaatggttcttcttctgctgctgctactgcagcatcgagtagtggaacggtggagaagaaaagtaggaagaaattggaatggtgggaattcatgga

SEQ ID NO: 109577 - DNA, 214 bp, Glycine max
tttcgtttacgcgtccgcccacgcgtgcgcccacgcgtccgctttttcttttccaacacaaaaaaaaaccacacacattccttcttccagccctataagtcttacaaaattcccctacacattcatgcttgcatcgcgttctctctctctccctctctttctctccctttctctatcatacttattctccctcgcgcgaaaggtatgacctaac

SEQ ID NO: 109578 - DNA, 428 bp, Glycine max
gtcatctgtcatttcgttcactccatagaattgcagtcaggaacacactacacaactaagaatcacaccacactctgacctcaacgttttcaacaaccatttctcttcccatcaacggttcaacgcatcactgcacaatcacttccttcttcaaatacttctcctctcatcttttgtctcctttctcttcaatcaccgttttcccaaaacaattctcttctcttctaattctcatcacgcaaccgcgtaactaaaatctccgtttccgttcaattccttcataactctcctccactttttattattatcattatcattatttaattatttattaataatagtagtaataatttcattcccctctttgcttcgagtttaatcaaaatttcaatcatgcagcgctctcactctctctctctctagagagc

SEQ ID NO: 109579 - DNA, 245 bp, Glycine max
gattaatcaatgaggaaccgagatgtctagaaacctcaacttggttttacaatcgcgtcctaacagtttttcattccatccaacaatcttttcgtaaactatatctttagtagaatgaagacagatagtacatgattgtacgaaaaagatattaacttgcatttgtgtgaatcatagttgttaaatgtactaaagagtaaagacagttttcagattctttaagcatgattcatagcagcttcacc

SEQ ID NO: 109580 - DNA, 479 bp, Glycine max
  unsure (1)..(479): unsure at all n locations
tgcatcttatgcctcctgaaatagcaagtaaccatgtgcagcttcccatgcagacatctactgtacatccttcaggtaaggaacatgagaaagccactttattggctgtccaaaaggagactcatgccgaaagaaaagctctccttaccttacctaaatcaactgtggtcaatccaccatctttagatcaaagaatagaatcagaaaatccacaagcaatgaacagtttgaagttacataaactacttggagtttctgatgcatcaaaagttattaagcagcctagaacactacttgcaccaagaaggtccttcaaccaggaaactctgaataaaaatttgcgagcatcaaaccttgagaggaagcttgaaagagctggtggactgagcaactggctgacttcactcggactgnggcagcttgtgagaatttttcaggggaatagtctcagtaagtatcagctggtaaacctaaccatg

SEQ ID NO: 109581 - DNA, 280 bp, Glycine max
gtagctcctgtgtctcatactgccaacagaaatggttctaataatccatgacctcgtattacggaaccttctatcaagtctgtgcatgctaagcaagaatatagaccccttgaggctcccagcccttctaacaataattctttgctgaatactaatgaaatcgaacattcgcacgagaataatgatgttcctgctggagatgctaaaagtgagataagatttcaaacctctgatgtactggagaaggcgcgggctgccattgcttctgcagatcgtgcat

SEQ ID NO: 109582 - DNA, 412 bp, Glycine max
ctgacacgtggactaaaacatgggcgggctattgtagtttctacatgtgccgcagtggcatcaattttgactggtgtacttgctgggatgcttgctttgggtgagcgactcccttcggccccaaaagctcgcttgttacttcttcttggatggtaataataaatgttatgctattatttctttgtgcatttacatcccttgctttataaagctgatctacgcagaaatgaactccactcttctatacttcattacatctgcaaatagttacatttcattttcgagcattttctgttctgcttctaatctttgatgcaactctttttctgatttggctgagtatatatatatatatatatatatatcaccaatgttatggtaattctcgaacaagatagacaccttcatgttc

SEQ ID NO: 109583 - DNA, 183 bp, Glycine max
aatttttacttcagctttggtacttaaaagtaactagtatttgcttaggcaatagtacttgaaacagaaattgtaagaaatggcaagaaactttccaatttcaatcgtgttttagactcttagttccgccaaaaaaggtataatgaaattcacaatagaatatattatgttctactttgcatt

SEQ ID NO: 109584 - DNA, 143 bp, Glycine max
ccttcgcgttcggaaaatgctggatcctctgcatgatctggaacttgtgtcctcttgcgcttgtacggttgtataacccactaaaggaaatcacgcatgaccctgttgttgagcatgctctgcctattcgacaatttccacac

SEQ ID NO: 109585 - DNA, 230 bp, Glycine max
ttcgtccgttaaaagggggacacatcaaggagaaaagaaaaacgccagcaaaagaccttgatcttctctattgataccattatatgatgcggtctttcagactgaaacttccatgtgagtctcatggacagtccctaacttatgtgtaatttgaaactcagctcctccttttgtaattggaaaggtggaggaatatgaggcactatcttcggaatctagtaaaatatatt

SEQ ID NO: 109586 - DNA, 422 bp, Glycine max
attcaaagcttccaactttcgtgtctggaccaaacacaaaccattctcaccctcccaggcttcggtaacttaaccgtgaaaagcatcgattacgaaacccaaagcatccgagtcaacgacccagcagggtgtctcccgaaacggttcttacacaagtggaacctttcggatgattcaccttttgctttaaacccattgatttatggaacaattccgtttaacctcactttcctacgatgcccctccaacgtgacggactcgtctcaattcccgtcagtgccaatttcgtgcctgagcgataaaagcaactactcgaccatagtttcgtggtcacaacctattatatcatcacccttgttgtctcaacagtgcgaggtcatgtttcgggctcttgtccctctgccggtgttggacacgcccat

SEQ ID NO: 109587 - DNA, 323 bp, Glycine max
gttttggaagcttgttggtgacatgaggagtgccgggtttgagatggaagctgcgacgtttgttaaggaattagggcggttttgtaagaggagaatggtgaaggatgctgttgagctttacgagtttgctatgggcggtgcaaataagcctacggtacagtgctgtgtctttctgttgaggaaggctgctgctgggaaagagttggatacggatttgttttcaagggttttgaaggtttttactggaaatgggaatgtgtctactgattctgtggctaatgctgtgctgaagtatttgaccaatgttggtaggactggggagt

SEQ ID NO: 109588 - DNA, 131 bp, Glycine max
ttcacgcgtccggttgccgtcaatctgaagctttccctgatttttgtggctggcttttgcctgctgaacatcgccgtctcctattccgggaagtcgttcacaccgacagaaaagggaccgccaggccctcc

SEQ ID NO: 109589 - DNA, 177 bp, Glycine max
gattcgcgtgggcggacgcatggattgcatctgttgcgccacttgggcaagatattagctttccgattaaaatggagaatcgatctagggagggtggacatcatgacaacatttactacaagggtttagacaaaacccataatcataagaaattcgccaccaaaaaccaaaggcaaa

SEQ ID NO: 109590 - DNA, 411 bp, Glycine max
gtattgtaggaagcaactccgttcttcagcctctcaaacgcaacttcattatccaattgccttcgcaaaatgtcggggaagcgaaagaggaagttgaaattataatagaagaaaaacagttgctgaggtgaaaactgaaaatttggagctgcaatcctgggctgatctccctgctgaactcttagaatcgatcttgtcccgattgattctagtggataacatccgggcttcttctgtttgcaagagatggcattctgttgccagtgatgtacgtgtagtaaaccaatcaccatggcttatgtattttccaaaattcggtgactgttatgaattctatgaccctgtgcagcataagacactcaccttcgagttgccagagttgaatggatctagagtttgttatacaaaaga

SEQ ID NO: 109591 - DNA, 314 bp, Glycine max
cggtctcgtggttcggacgcgtggggagaatctgatggcgcctccatacaaatgagattgtctaacagcccagctgctcaatttttcctttttctggaacagtggactgattgacaccttgctggagtttggggattgctgagactcatcatatataacgaatatgaagatgggaagacaaccatgtgcatttatgaaaagaaagccagtttgaaggaatactatggtgtgatctttccctctacactacaactccacagatgaatcagtgatgtataagaaagaaaacagaaagattctatgtgctacaaagt

SEQ ID NO: 109592 - DNA, 434 bp, Glycine max
cggtcgcgtgggtttgataactaaaaggaaaataagattactctgtttttatataagctataaattgttttcataaactatcatgaacttattaaaatgagctaaaaaccacttatggacatggttaaattattttcgtaacttctctcaaacacatatataaaggtttatatgccataagataaatccaaataaattgtttatgaactcccaaactggccgtttattttagaagagtcaaatcaataattgataatatgttcatataatgtgatattcttaaaaagaataatattgatgatataagatacaaaaattagttgtgcgaaagtgaaataacctgactattctatttatattagaggataattttatttcaacatctcctttgaatagtcagattggtctctatacgtaacctttaatgggtaaac

SEQ ID NO: 109593 - DNA, 247 bp, Glycine max
tcgccttttcgtgcgtgttgaaacggctgatttgagtccaagcaaacgaaaattgccacaaaccacgagctctggttcttgctaatgtgtttcacatttagatatatgagttgtgatgaaattattgcatggcgatatgatatgcgggtaaaaagggaaggataaaaagagcactattatgtttacgtgttatattagggtatatagatagggcaatgacaattacttgactaactacattagcatt

SEQ ID NO: 109594 - DNA, 303 bp, Glycine max
tttgacatttatatgtctgaactatttcgtgtgggacaatctaatcttctctatgaggccaactatttatctgttctcataagattgctcgtttaggtctagtcttccaaggaaatgtttttcttttatgattggagtgtttgatttttttttaatcttctgttcattcttttgccaatgacgagagaactggtaaatgggtaatgtatgatttttttatgattacagaccctactgccttccttctgaggccttgactttaacggttgtgattatctattttttgctggatttctttttgag

SEQ ID NO: 109595 - DNA, 231 bp, Glycine max
tcgatgatgtgaagatgttttcagttccaaatcatgaggatgattcacatcatgttgtacaggatatgaatcatcctcatgatgtgaagatgttttcagttccaaatcaagcaatttcagtttgcttggggaatccattcctgaagaatcattttgcagctgctggtcagaagccgatacttgggggaatacctgttaccacatctcattcagttcttccctctgctgttg

SEQ ID NO: 109596 - DNA, 198 bp, Glycine max
cgtgttctgcgtgtgctgctacagcgcgcgtgaaccggcgaatatttatgttcgaattgctcgattgcgatggctaggaagatgcttatcgacggtgaagctgtaattgctcaaggcggtggagaagaagtgttgaattttgatttcgactcgtttattattggggctggaagtggtggcgttcgtgccgctagattt

SEQ ID NO: 109597 - DNA, 136 bp, Glycine max
catttgggaaatgtcatattcactctgatggcttcattttataaagaagaatcagggatggtccaccaagaggtagctataccatctgttcctgctccagataagctttctgtcgatggaagagctacgggagaga

SEQ ID NO: 109598 - DNA, 418 bp, Glycine max
tttcttttttgactcgaataattaaattaaattatttatcaataattgaaactttttttcgtttcgcccccagaggggggaagtacgcattttgagtaattaatctaggtaattgatttttgtttattccttcttcattctcatctcttcgattcattcttcttcattctccttttttttacatggtaaacctcgattaattataggaaaattagaaacaaaaaattttacaatttattatttcaagtgattgatgtttgtttcatcaagttttcagtcatttttgtcaagcatctaattaatcagacagaacgccagacgttattaatgcccaggaacatactttcggatgatcgagtttcttcttttcacacagtcacgtcaccaaagaaattcactaaacgcctaaaggaagaaa

SEQ ID NO: 109599 - DNA, 192 bp, Glycine max
ccacgcgtcttgccactcgttcgcccacgcgtccgtgatgaagcaggtgcaggggaatgataaatctggatttgagggagggaataggaccgaacagcagcggtggtggtgcggatggcgacgatggcctgcggatgccggagaatggacactccaatggaaattttcttgttgctcaagatactaacctga

SEQ ID NO: 109600 - DNA, 99 bp, Glycine max
tctcggtcgcgtgggctttgaggctccctttaacacgcttttggcccttcattcttacaagggtcaaatgggagctggtagacctgcgaagaacaaagg

SEQ ID NO: 109601 - DNA, 363 bp, Glycine max
tcgctcttccccacacagaagaacagagcagaagaagtagaagctaaagaaatagaaagaggagaaagcacataacagttccacagaacctgaacgttaaacaccaccaacacgatctcagtctcacttccatcttcacctccccaaccaaacaagccttcttcttcttcttcttcttcttccctacaactttctctctctaccatttttctctgcacaaatggaaatgatagctctctacaagcttgagtctcgcgggatagtgtagtcccctcgagacttttcaacttcgttgttactctctcgttctttcttcttctcactctctctctctctctcttccttttcttcttctttctctct

SEQ ID NO: 109602 - DNA, 248 bp, Glycine max
ccatcactgtttttatcttgccctcaaatgtgccatagaaacaaggacaaaaaaatcctatgttattgaagttagcaggtttggagttccataagtagaaatggtaaatagacaatctttgcgcaacaaagcctcctaccttgattctgtccttctcaaccccattctcgattccgacactttcaatcccaaaaccttcaaacaacacccaccaacaccaacacctacacctgcttgcggacaagtag

SEQ ID NO: 109603 - DNA, 244 bp, Glycine max
ctcaattgacatgatttcaacaacttagatgctgcccttcacctcaataactcatcctcctcctcctgcctctactcatcggcaacctcatcttctgctccactggagcttccttctgttggaatatcacagggagaggggctctcttcattggtggatactattgaatccaatgccgcaacccaggtcactggaggcttacacacagccatggacgatgagggtatggcagagatcagatcat

SEQ ID NO: 109604 - DNA, 320 bp, Glycine max
ttattcgtccggcagcttagtaggaatctacactcttcaatagttgaaggaaggttcccagagtttgtatgctactttctacgcaaaatgttcccgaaaggtgatgttcctgaatgggtctgcgatgctacggaggtggctggaatcgacatttattcctgctgtgctccgtttccatcatgccaagaagatgatttcaaaaacatgcccgaagaagttagtttggtgaggtaaaaatgatacacacggtccaacagaaacatttgagagatacactatcgctttactatgattatttgcggcataaattctgtatactg

SEQ ID NO: 109605 - DNA, 481 bp, Glycine max
ctgtcgcgtgggaaacaaatggctgcattgtgagttctttgtccccttcaacctcatttcaattctctctctcccccattcttacttcaccttctcctcctcctcctccttcttcattcccttttctttctctgcactccatctttctttccaaaacccacccttttctattcctcttcctcttcctccttttcccttctttttatttccttacactcacaacatttcccttaaaataaacataaacaaaccagcactgttcttgacccccaaaaaaaaatctctactatttattaactatattaattcctccataatataatcatttgttttccttgttttctgttttctcttataatatataaccttcttttatctattttttctggtttgcaccttgtgactgtgagttatatctatttatatttatatatcattctctcttttttttttggatgtgtctatggctggtttggattta

SEQ ID NO: 109606 - DNA, 430 bp, Glycine max
ttttagcatattttgttataggattaggtgtggaatagtcgagggtagagtggaaagtaagaagaaatcagcatattaaataacaaattgaatacacaagaaaaataaatgaatgaatcaacgggtggctcttttaagggatcaaagaaaaaaggaaggaaagaaccaaatatttcaccctttaaataaaaagaacgagtcaacggatagttgggtggactattgaaaaatctgtgtgaaatcagctagcagctattggagaaacattgtatgaatgtatatatctaagtcaaaaaaagaaaaacaattacgagttaaatgtcaacaatattgaattttggttggatcttcacccattttctgtgacttgtccctaaataattttaattcatgtcagggtggacaaaaatgccgacggaagaatcaccca

SEQ ID NO: 109607 - DNA, 187 bp, Glycine max
actttctttcgtccggggtcttatacgaagaataatggatgataatcagcgggatcaagaggctgatggagcagattttgcaacgctggaagaggaggctgcagaataggaggctccacgctaggaaatggtactaaagcacctaatgactgcatatgggaaaattcacagacgaaacctcagaatt

SEQ ID NO: 109608 - DNA, 245 bp, Glycine max
gctttctttcgtccgcccacgcgttcgaccacgcgtgcggatgtcagaaaccgcttgcgcaacaagaggtatgttgacttgtttgatgacatatggaatgaaaaattctgggatcacattgaatgtgctgcaattgataataaaaatggaattgggatattaatcacaaccagggatgagaaggttgcagaatattgtaggaaatcatcatttgttgaggtgcataagctagaaaaacctttaac

SEQ ID NO: 109609 - DNA, 457 bp, Glycine max
cccattcgttcgagcaacctcacaatcccaagtttccattttgacgataacccactatgcaaaactaagatcaaaaaccaaaggaagctcttttggatcataatcaccgacaacgacgcctccgatgaagaacaaaacaacccaacaaaaacaccaagagtgaagagagaaattacacataaaaaaatcgtcatcgttctttgccgctgggtaacaccatgtttgtaggtggagcttctgtgactactttcaaggagcttgcgtttttactttgaattggtttaattcctctcaaaataccacaacaaaaaaatgagttttgttagaaaaaatcaccaggtcatggctatgtcatcattgctagaaaaaaatgagtttattatgcatttagcggtattataaagtccagaacttgaatcgaaaagtgtttgctatgaatttctaatatctcttttct

SEQ ID NO: 109610 - DNA, 197 bp, Glycine max
cctacgcgtccgagccaaaaacgcataaattaggtgcgtgttgtgaatcccaatctcttggttgccacgaacagagagagagaaaaaaaagaaaggtatcgtataggaagaagaagaagctctggattccacctcttcccgtccttcgagacggttgttaggctgcttgctcttcagggcttgaggataggactttg

SEQ ID NO: 109611 - DNA, 338 bp, Glycine max
  unsure (1)..(338): unsure at all n locations
gtttgtgactatgaatttttgcgggccccacagcaatttcatcccgcactcgcctctctcttattctacgtcttattcaccaatttcgccccttaaagaacagcaacaagtgaaatgcgctgatccttccgtcgctgacctggggaagacaaacgttggttttgggccgacgaataaatcaattctgaagaatccgacgacacttttcttcaaggaacaacacanaaaatttatgaaaagcaacgaaaatttagtcgactcggtcaaaaaggcaacggaaactacggcggcgcgaaaggaagcgctaaaaacagttgcatttggactgacaacacgcc

SEQ ID NO: 109612 - DNA, 335 bp, Glycine max
cagaagtacaggacagctagatatatacctgagtcatctgaaggtactcaagtaacatatgcattgtattatatattccttatgtatactgtataggtaatgttttgcgtgttagttaggatgaggagatcattggctattgaataaattttggatgtatgccaagttgataattctcatcaaatttcatattaattggatactagtttggcgtatataaaaaaaattggaatttacataaaatatgcttttcaaacaaacaagaaagaaaatcatctattcaccttatattagatatatagtacgttattgaatggtgtaagtgaagtcttaca

SEQ ID NO: 109613 - DNA, 257 bp, Glycine max
cggactcgtgtgcggacgcgtgggagagaaatagaaaggcatatgatcttcttcaagttgcaatctttttagagagagagggttagaagaacaacatacttgagatctgtcactttgtttgagttcagatcttcaaagtttccttccttgttcttttggtgcaaaggatcaaattaaggaatgccaaatggggaggaaggggaattggttttccagtgtgatgaaagctctcagtcctgactcaaaggagaagaaag

SEQ ID NO: 109614 - DNA, 264 bp, Glycine max
ttttcttttacgtgacccaatcgacggtcctggaattgcccataaccccccgccacgtcagaatctccggcgaaagccaccgcgtcttcgccacctccgacctacgccccgcgggatccttctggatctacgttgtccccctcgaaaccaccaacaatgagaacctcgaagccctttactgacaagtaaactaaactaaactcaaccattttctgaaattgaattacacaaactattattgaaatactcaagcacatacaaaca

SEQ ID NO: 109615 - DNA, 421 bp, Glycine max
cccattctttcggtcctttcctttttcaatcaattttggtactctgcttgtgtttaagtgtaacttcataatattcttgccactagatcttggttacatattagacccacccacttgtgaattttgctaataaacacttcgggccaagattggtcaatgtgtctcttggaatcaaagtagtgcaaggaattctacttggcaaggttaacttttgtttctgtgaagggagaaagtttggaaattgcatgtttccaaatctgggtcttgcttaattcttgtgcctgggtttctatctgctaagaatctactgttctgccccagctgtggattttgggcctatgatttccactttcaaacctccaatggcatgaactgactgtgatggaggttaggggaaatgagcatggttaggacatttatg

SEQ ID NO: 109616 - DNA, 422 bp, Glycine max
gcagaggccacaacgtttttcattagaaattttcagttccaccacattctctgaactgaagaaacctcttgcgctgtggacgcagcctccggcgttgggcattaccgccattgaagctcattcacgctttttttcaccgatcctcacaagactagtgcgatttgtaacactccgttgtaactttgacgcaaccaaactctcgtacaattaagaagaaaaaacgaaaggcatgttcgttggactgttggtggagactgagatagatacgaaggctgctggctgctgcacaagctcaatcctttttaaactttgacgcaaccaaaccctcgtccaattcatcttcactcagtactctctatgccaatgccccacattgtaaattttcggcttttcttacccttccacacactcaaaaccaaaac

SEQ ID NO: 109617 - DNA, 419 bp, Glycine max
cccattgttccaaagaaaacaaaacgccaaccccaaaacccacaaactcaccacacatacacaaaatcgagaacgcacacgaccaaataagaggaagttgttgttaggagccataacccaaaccaaaaagcaaaaacaaaccctaatggttggttttagtctttttaattaatttaatttctttctctctatatgttatttaaaaaatataataattaagggattggatttgaagaggctcgcgggtgtttggaagagaaagtttatggttaaaccgcaatatcttatttttctttttcttttcttctttctcgtagcgtatggaaaaccaccaaaaccacaaggtagaaccagaacctgacatatagaagaaccataaccaccgtcaccaacagcaacaacaccgtaacgaagcgtgg

SEQ ID NO: 109618 - DNA, 246 bp, Glycine max
ctttattagcaattaatctacttgccgtacaattcttgaagcacatgtgagcagcacccaaatgtcggacgagccaccgtcaccagcatcgccggagacgcccaaggagccggcaacgcaggcgatagaagtgccgctaccagctgtgccggagacgaccaaagaaccggcaacgccagcgtcagaagtgccgtcaccagcagcgcccgagacgaccaaggaaccgccaacgccagcgtcagaagt

SEQ ID NO: 109619 - DNA, 385 bp, Glycine max
cctaactcaaccttgcaaaaccagcttgtaaggttagggttgcccccaaattatgtacactactttggccatatctttagtggatgagggactaaaccacatccctcgaggctccaattaaggcagccccctaagaggccacaactaatgtgggctaaggggacttccaacctggagcatggcacatgcaggtggcctaacaatagtctctaatatcattttagaatttacggtttgggtttaactcaatattatgaaactggcttataaggtgagggttgtcactcacttatttgcaatgtgggactaaaccacaaccctagaggctgcaattaaggcagcccccgaagaggccgctactaaggcaggctaggggagaccgcaa

SEQ ID NO: 109620 - DNA, 239 bp, Glycine max
gctatttcttcagaaacttctgatcatgttgatgcatcacaaaaatctgcgagctttaatctttttcttgaagaaacccctcagtacttgtgcacaaactggtgtgcaaactaaatgacctgtcaaacagttcactgagactaaaacactgaaagcattgcttcttaataatggcaaagacttgcccatattgttatttggaagagcaaggttcactctccaagatagcggcttttcaa

SEQ ID NO: 109621 - DNA, 397 bp, Glycine max
cggtttcgtgggcggacgcgtgggtgaatatataaagaagcacaaatgtgttcccttggaagatcttgctgcagaatttaaattgcgtacacaggtattctatttctttcctattttattcctttatctgaatcagcgtatctatttcttccattaccatttcatttttcttatattggctgctgctacaagttttatgggagaaacagttaactaacaatatattatgctttgctagtatgttttatggtctatgtgcaacatctattgtatctattttatttttgtaacatatatttggactagggttttgtagagttgaaagaaaacaagaaagagttagggaaaacaaagatttgacgagagagaatttggtactccaccaattacttagatt

SEQ ID NO: 109622 - DNA, 135 bp, Glycine max
gttgttttttatgtctctgatgcgatgctatatgtcgcagcctttcctgttggcattccaggataggtggtatttatacatcctgtgcacactcatggcctgatatcatatgatccctcaacattgatacccgct

SEQ ID NO: 109623 - DNA, 148 bp, Glycine max
caaagtagtttattgtaaaagtgaaacacattacatgctccttttgtagactccattaggcaacttcaatgtatggcatgtgactgtgactgtgtattggttaatgttttgtattttgagaaatgagaagcatttaatttaattcttt

SEQ ID NO: 109624 - DNA, 203 bp, Glycine max
aattcaagccccccacaccgcgcgtcccagaacatcagcacggcacccgacgagcactattgttgatagcaagacgaagtagcggctagaacaaagcagagtacagcggcggcccgagagccgacgtcggtcgggccttccaatccaccacctcgcgcaacagcagcggcagcagcagcagcagcagcgcttctgtaacacgc

SEQ ID NO: 109625 - DNA, 336 bp, Glycine max
caaactgttctgtttaaagttacaacattgcaagcagttgaaatctttgcctgagctcccttcacggattaacaattttgatggactaagtcaagcaggattaaagatttttaactgcccagaattagttgatagggaacgctgcactgacatggctttttcatggatgatgcaattgtgtaaggtttgcatgttcctcctttgctcctgccatctctttctctctccttttttgtgaataggaatcaggaaataacatatagatgtctctgctgtaccaggtgttatacacatatccgttctaccatgttagtggaggtgttactccaggaagtg

SEQ ID NO: 109626 - DNA, 355 bp, Glycine max
agtattagtagtagtagtagtagtagttttttcctttcaaggttccttcgagcacttcttgtgatggggcttgttagtcttcttgttttgggaagcttaggtagtggtgaaggaacaatacatccaactacacaatggtctcaagaaagggtcaagcatgaacgagtggttggtagagataagccggtggaccgtgcagaattggacttcaactacatgagcaaaagaagagttcccaatggaccagatcctattcacaacaggagagctggaaattctggccgaccacctggccaagcttagttaacaaggaaagttagacaagcttcagcaaccttgcagaagatgacacaaa

SEQ ID NO: 109627 - DNA, 386 bp, Glycine max
tcccagcagaacctgattcaggactttgagaaagaaaacaaagctaatcaagtatgcactggatcaagagatgggaaagccaaagtgatcacatcttccgaggataaagtgaaaagggaaacattatatgtgggttctagaactgcacctgagtcgcaaaggggagatatgtctgatgggcacccattccatgcatctggcaatgatgttcccaagtttgtgagaaatccagttgatgttagttgcaaggttggatttaattgcagttcagaaagtttcatacctgatggacaactcagtgagtcaggtcctgtgacaacaaattctagcaaaactgccactagcattctggaagaagccacaaagctaaaagattctgcagatca

SEQ ID NO: 109628 - DNA, 139 bp, Glycine max
gaatacaaacacgttttttcactgattcatgttccatttgtcattcacttgaaggcagatttcataaggatagaacaaccaagcacatgaattattttatctcatttcgtggcaaggaaagacacaacttgttcacacc

SEQ ID NO: 109629 - DNA, 358 bp, Glycine max
tctcttcttcgtttttctttatgctgattttcacccagatacctactcttttttcgatttccagttgataattatgttgagaactgagaactgagattcatctttgctttgctttactttttattcttcttatgttgcttgcagcatgaccaaaattaactaaactttaattaaattttgtgatttctttgctctgttgaccgagtaattatagagtgactacacaggatgggattatctgataataaccattcttagaagtcgtttttagtttattgaactgtaatgatttccccatttgtctttgcaaaccagggttttgtcttgccagacccaaagaataggttgctcctttgga

SEQ ID NO: 109630 - DNA, 312 bp, Glycine max
aagtgggtgaaaaaatatccaccaccataaccaatggctttttggctttggatctttggtcgaaaatcagatctgattgctgacgtggatcatgtgcgccagcatgtcctagtgtctagatattttctgaaaccaggatattttcggtagccgttggatccgagggcttttaacgttggtgtctcatcccacgccgttcgatcagtccgatgttaaacttaacgaagattctgaattctgatgctctagtgcgattccatgggagaggtggtcatcatgagtggagagaagaagtcagttagagtggagggg

SEQ ID NO: 109631 - DNA, 306 bp, Glycine max
cctttttattgcagatggtgttttttacaaagttttttactttttcataatttttagaacattttacttttgtgattttgaaagcttgcaagtgtctgattattatctatttgtgcttttgtatccggagattagattctgtcatctgcagtgcactagtactaaggctctgtgatgacataatatcatgaattgcctaatgaatgtgcaaaaaagagttttgggcaccgctttgcagatctgacttcacatgtttgggctgccagtatcacccatacataagtaccatgtttggattttgattat

SEQ ID NO: 109632 - DNA, 236 bp, Glycine max
gatcttgacaactattggccttgctacttttttttgatgagagatttttatttatttaattaggcataatctattactatatatttagctttagttggatcagctaccataaaattgaagttctgctattttcttgtgtttcgaagttttatgccggataatgacgaccggtatggtattctagtgatcgtgtaccttttcaatccaataatattttaaatgtttgtttatcgatt

SEQ ID NO: 109633 - DNA, 385 bp, Glycine max
gaaatacaccgttgagggtgctgtcagccactcatgcgtgttaaatatgtcaatcgatctcagggacacaactgtgcctagcgggaaccctgaaaaatggcactcacctgatggctatggatacacaatccacccactttgttattcatgaaacagaaaaagaaagttctgcgtgatcacgcaaattggcaaatcaggaattgatgaagaaaaagagaagccttaaggttgggagggaagttttacctggaaaagaggtgaagaacatgacagagatgaagaggagaagaggaaccctgcaattgggaatggacatggggagaactggaatgcaagaaaatggtggttgttcgaggaagaaaggttttgagtgtgggagactgac

SEQ ID NO: 109634 - DNA, 278 bp, Glycine max
cccacgcgtacggtcctaatctttaagatcctcagatgtcaaacaaaaaaaaaccaacaaccttttcctttgggttagtgagctcacgttgaagttgttagttcaaagacttttactctcttcactgatgacgagtagagactattatgggaaggttctggggatacaacggattccccaccgctaaacctctcagtggttctgctaggagttgcactaaagttcacaagaagggcattgcacttggtagatcagtggaccttacaaagtacagtggc

SEQ ID NO: 109635 - DNA, 138 bp, Glycine max
cccacgcgtccggccacgcgtccgctgaatagcaataagcttgttgaagagtctaggagttttctttgccctttaattcaactcgagtggaagcagcgaaggaacttggatctccaataccatgcgatgatggacacc

SEQ ID NO: 109636 - DNA, 392 bp, Glycine max
ttttgacccaacgcccaatgaacagatgcgagaccgagtgaagaaggacatcatcgaggcggtggaacgtcgtcaaaatgcgaattcactggcaaacagagacgaggaggtggacacgatcaagaaccatctgtcgaagatggcacccgacccgaatctgaacaaactcatcggatcgcggaagcccttcttttacacgcccaaggaatttggggattggcgttccgtcatcagcagcgttttgcgtaagcaatatgtgctccaactgttcgaggcgctttgccccgaattcaccggctcaaatgtggtggatttggcagtgaaaaatccaagccgtgccgacttcatccaaaagtcgctgaacttcgtcttcgatgccgaaaatgaacttt

SEQ ID NO: 109637 - DNA, 348 bp, Glycine max
ttcctcgcgtccgggacaagataccacttgactcagcaatgaaatgaacatgtgccatggcacatgtttgtatcaacagtgaagaggctacgagtgttgaagagttctgagctttctgcttttacccttggcagtaagcaggacaagataccacttgactcagcaatgaaatgaacagcggtttgaggtttttgttcacctgctgaaactcgaagactcatctaatttgaagttttggttcttttgtctgatgaaaagatcatggaatgaagctagttgcgtacattacaactaagtaatgtgatgaatgtgttttttttttaatgaagatttgaaatgtttatgggt

SEQ ID NO: 109638 - DNA, 527 bp, Glycine max
cctattcgtccgagataacttagatcccttagtgaaacgtgctgttgctgcagcgtctgcagttccagatcttcaagatcgataccacaagatccctagttatattgaatcaaagctattgccatttcagcgagaaggtgttaggtttatattacagcatggaggacgtgttctcttagcagatgaaatgggacttgggaaaactttgcaggcaattcactgcctaatattaaatcatttccatacgtccactgtgcattatgatgcatagcagtgttttgcttctttgcaaacaaacatacaattatttgtgctagaagttaaatcttggcaggatttctgcttttctatctaatatctattggtgggttgtaaattttgttatctatcttctacaaattaagaagtgcatcttagtgtcttagatgctaattggctaatgatagaaaacatcctgaatgatacagtaaaatatgtaacttaattaacaattaacactagtacacataaataacatcagtcacagt

SEQ ID NO: 109639 - DNA, 417 bp, Glycine max
ctttttctatccccccactttttcccaaattatcaataatatttctgttatcggcaacagtgctagctgtgcagtgtgcaccaaccaaggattgtgttttcttaatatttacagcaaacgttgtttttcgagcttggtaaatattggactgtctaggattattgtttaattaacttcaattgtggttattcggagcacaatacttggattataatccattttgcttcatcgcttgcttccaagtcctgtctcgtttatatttgagactcaagctagtggaaaaaaagattatcaaagtttttatagaagctagcaaatatggaaggtggtttttttacaccttggaagaatgagccttggcaggagttagcttcagaggacgtgaaggaaagtgagcaattgatatcgttgccaccc

SEQ ID NO: 109640 - DNA, 429 bp, Glycine max
ttgttcgcgtgggcggacgcgtgggaaaaccacaagttagtatctattaattaatcacgatttgttgttgcttgtattttattagcaagctaggaacaattatacggttcttatcttgactaacaaaaataaatagagtatatatatatatatatatatatatatatatatatattcatcctagctagcttgctagatcaagatattctttttaaaaaaaatatcttcaagtgacaacaaacaatttttgttttgggtggtgcacgggactaactagaaggaacattttcagttacagattgttagacaatggaccacatagagatgaccatattgcctttctctcgtgtggaacttccaacaacttatgaatgctataaagccattggttggtgaccctagcaaagggttaggtgaagcttttatgga

SEQ ID NO: 109641 - DNA, 285 bp, Glycine max
cgttgacgacagcaacgagatcggcaagtaccagcagaacgtgcagccatttgccatgcttgcgcttcggtcaaacaacgtggacaaggcgttcattgctctggacgaacatttgatgggggagcaaacgcgacgcattctgaatggccaggagaaagccgactgggcacttctgctcggccaaggaaagcagctgaacatggtcattttgcagaatctgaacgaaaaggaggccaaaatcccaacttcggtcggagtgcagttgcgcattctcaactcaatgcc

SEQ ID NO: 109642 - DNA, 177 bp, Glycine max
attgtattttttgtaaaagtcaataaactcaccatgaagatttgtaattaaatgactctgttaaactttttcacagggcatgacctattttctctatgcttaatttaaggctcattttagttcttttaaaaagttatttcgaaatcaagcctgttagtaaatatattattttaagag

SEQ ID NO: 109643 - DNA, 404 bp, Glycine max
tttacactgcttcgtgctccatagataattaaggacttaatttaaacgtgataacagtgtatggcagtaggcaaaaaaatctgccatatggcaccaccatagtggacctcccttcacaaattacctatggcagtaggcaaaaaatctgccatgccattcagtcatggcagctatggcgccaccattcaacaacaatgtgtcagaccaaagagggaggtattaaatgtcaatgcttccaggaaatagaacatgctgtggatgtcagatactaaattcatacagaatatacaaataatttgggccatcaactagcagagcagataacctaagcagcttgaattcgcacctagttatccatgacttgctatcaactttcatgcaatgtagaaatttcaacttggtgc

SEQ ID NO: 109644 - DNA, 429 bp, Glycine max
ctcagactcgtattccagtttaagaagcgagtgaaagagtgtatatcattactcgtttagaaaaaggtatccagaaaggaagaaaaaaccttcaaagagcgcatgcctagcatggagataggtggcgaaaaagatcagttcaataaatatgcttgtgcatgtgctgtagtcgcttccatgatatccatcatatttggatatggtaaaatattcaattccatcttactctttacctcgccttgttgctctctttatattattcaatttctactattttgttctctctgcaaaaaaaaaaaaaacaagatatatatggtccatttattatattagaaattacggtatatatattatggaaaccgttattaatttattggtagaggaattccatatatattttggataattatttacagtgaatagtaatat

SEQ ID NO: 109645 - DNA, 428 bp, Glycine max
cccacgcgtccggcatgattatggaaaatgttaacactttaatttattgagtgattatttaaatctgtacttgcaccaactagttttactgaaaatctgattttatcccaatggtctgttttgatacatatagtttatctgatcccactcagtagcataagtcttggttgttgtcgttaatatctaaatttttcattaaaattagatgaatgttagcaacatactctaatacactcattttaacacactctactattggttccaatttttttaaaactacaaaattatgagagagacttgttgaataagaagtaagacccgcaaaaaaaaatgtgatttcaaataaatttcagccagtagtggagagtgtgttcaaaagagtgttagaatgtgttactaacatttctcctaaaattatgcaattttat

SEQ ID NO: 109646 - DNA, 358 bp, Glycine max
cgagagtctttctttcttgtaacttcaacaaacagcctcagcggaactctctggggtgttggtgttgctgagggatcttaggcaaaggtgttgatgatatgggagcgtgtgtttcaactccacaaggttgcgtgggagggaggttgagctcttccaagaagaaaaccaggaagaggaggagagagggactcagaagaagagttacttctcggctgtgtaaggaatcattggagaaaattgatgtggcagggttgcctgattgttcctttgccaatcccactttccaaggaagtattgaagaggcatggtttgattcggttgcagtatttgactctgactgtgatgatgattatcagag

SEQ ID NO: 109647 - DNA, 440 bp, Glycine max
tttttacaacaatcacttttgtggttgacatagacacactcccgagaatagtagcacgggtgcatcatgggattcgtttggtacacaggtttcacctgtctcggacttgactcaggattattacaataatgtcacggctgggaataataacaacaataaccctaatcctgatcagtattaccaacaagcacatgatcaactgagtttcttagactgcatcacaagcccatcagggttgttcgatttccaacccatggaaccaaacaccccgtggatttatctgagtaatgttggggacacgtccaacggtttctggaatgttgaaaacatgttgctctttcaacaattgtctgacaacaacatgtgaaacattcggaggagaattcatggtgaaaaccgggacgaaggggggaaatattgttaaatttacagatgattaa

SEQ ID NO: 109648 - DNA, 141 bp, Glycine max
cccacgcgtccgctttggtcaacgaaggcttgcaaagtcaggacagctttggaacatggatgaacatcatgtcggatacaccatgttccatagatgaatcagctcttgaagcaacaacttcttctgtccagttaccaggac

SEQ ID NO: 109649 - DNA, 365 bp, Glycine max
ttttctcgtccggtcactgaggggtaggcacttaatttgaccaacatcatccccaaccaaaccgttatattagttgatatgatcattacagttacaaagatcaaatgtaatgtaatgtaaattaacagtttgtttttttttttaaaaaaaaaaacatcacttctaaaatagtaaccataaagggcaaaaaggtcctttcagagtcacatcgtctctcccctaatttctgggaaccacaaatttattgggacgagcgtgcggtggaattcattctcgtgacactccaccacgtggctcaatgtggttggtccattcttctttacaatcacaaattcacaatatctcgtttttcttttctccgtttc

SEQ ID NO: 109650 - DNA, 441 bp, Glycine max
atcctaccttcagaaactagccagattgttaaggaacggcttttgaattttgtaagatcattatcaacagtactggcctttgcctattgtttgtcaagtgtaattcaacaagtgcagaaattcttagccgagagtactgatgcaagtgaggcgagaaatgtctgtatcttttctttttgaataggcaactgatattatagtctgatgaagtttaaacatgataaatatattgtcaattccatttatgtttttacctgctggctgtcataaatttaattgctattattatgactccattgaaacttgatttttcaatcagtcagccagtaacattagttggcaatatagttgcccagctatataatgatgcaaaattgatcagcttttggatttagcatttctccctatcaatttgttttacacattctgaagattatcaat

SEQ ID NO: 109651 - DNA, 332 bp, Glycine max
gctgccccttcgttggaccaattcgccgcataagcaaaacccttccttcacgttaacccccaaatcataaccctctctctctctcttttttttttttttcccctcaccacttggaaactgaaatggtatataaagaaacaagttcatagagatttgccatgagaataattccctcctgttcttctgcacactaaggaactaattgccttcaattctgataaattgcgttgtaaggatctaatatgagtagcaatgatcaaacttctggtgctagtctctacattagggctttaattcgcaacgctgctgctggtgcctctgctggggcaata

SEQ ID NO: 109652 - DNA, 252 bp, Glycine max
tttcccacgcgtccggaagatcttccctgagtatgtggagaagtacaaccagcaacagctttctgtgcaggctgctccagagagggtctcattggatacgtctgccgacaagagttcaaggccaggtttggaaaagaaattacaatccactggagaagacatgaaaagagtttatgggtcgaaggaagtgaggaagaacataaaaccattcccaacggggatgatgttattactctactccatctttggggt

SEQ ID NO: 109653 - DNA, 312 bp, Glycine max
tggtttgagatgctatttttgacgattcttctatttctttttttcttctccaatgctgaaaaattaacgtttgttggcggacattcattcaatgaaatgggagaatttcgtgtgaaatttcgtcaattggaggcggacattgaggaactgaagggcaaaaatgaagcaattcaaaaaagattggtcgagttcgaacagaaactgtcgacaagcgcaaattatacgcgaattgtgagtggacaagagatgattcgaattttggcgaaaaacaattggaaccaaacggacagtcacaaggaactgttcttgttt

SEQ ID NO: 109654 - DNA, 386 bp, Glycine max
gtagttcatccatgcaaaatattaaaagtcattcagaaaggagttgacacagtctcttatgaggtagcttggcttgacaaaaacaagaatataagagaacaagcagaagtcagtgcagaagatttggtgcataagaagccgctttttagtagaaatattttgaagtcttttattcgtgagtctacatatcggaatgccccttgggttttacatgatgaactggctaaaaatcatggaatatcaactgacattcctgaagagttaagaggaagggttttttacaaagatggacttttagtttgctccaagaaaaggaaacacgaggaatcacgggaggacaccgatacctgtaaaaagaagttggatggtgcacaagtcgatgattc

SEQ ID NO: 109655 - DNA, 326 bp, Glycine max
cccacgcgtccgctcaaattattaaaacacagcgataattcactcacatttttattttatttttactgatgatgatctcatgtgctgctgctgcctcttccttactggaattgcggccgagtcgcagccaccaaatgactcccaaggaattatgcgaaaatgatgatctctgtacagccattctcgtggatacaattttgggctttcagacgcataaaatgagcttagatcataagccattggcagaagaagaacggaggcaactcattgaaatgctctccaattttgtggacaatggccacgcacttgtactgacacagtcactt

SEQ ID NO: 109656 - DNA, 344 bp, Glycine max
cgaattcatagaccagaagaggtgctggtaaattgggtgttaagaaaaatataatcttatgaacaaaattcacccatagcttttatctgttttaaaaatgtttcttaaaattaggaagcttgagtatgtcttacatttttgttgtttatttgaatcgattattttctcttcactttttagtctcatagaaaaacaattgatttggggttttagtaaacttgtataagaccaaattggggaatcttgtttctgttgtaatatactcctttgcattctcttagccagatgtaataattacagatagatttcttccatgtttggtttccatattgctgaatagatgc

SEQ ID NO: 109657 - DNA, 436 bp, Glycine max
  unsure (1)..(436): unsure at all n locations
gtttcctactcttgggaacctaaagaaagtaaaagatgttcctgcggtgcttcaatgggagattccgattcacatgcccaacaattccttccccgaattccgtacagatgcggattcatatgccaactacaactgcagttacactaatgttacatctgcacaatcaaaatcgggttggagatgtacatgcaaatatggcttcaagggaaatccctaccttgaccaaggctgtaaattaggagtttcttcaagcctcggaaccgtcattttactccttnggtttgtggtggttgcataaagttataaggaaaagtatagcaacgaaacgcaaggaaaaattcttcaaacaaaatggagggtatgttgttaaaacaaagactctcttcaggtgaagttaatgttgacaaaattaaactgtttagcctaaaggacttac

SEQ ID NO: 109658 - DNA, 436 bp, Glycine max
  unsure (1)..(436): unsure at all n locations
gtttgacattaatggaagctcttcttctaaaagaaattctgctcctgtgagtgtgaatgggaaagttgatgtttgtaggaatcagccttcagcagtaaatgggcatgtgaaagattcagcttctttggagaatggtaaggaagattcttcattacccaccaggaatggcattgacgaaaataaagtttctgttgacaaattgaaaagaaaggagtcaacagtttcaaatggacacactggtaatcagacagttgatattcattctgtaaagtcagatctcaaggaagatactgacagaagcaggataatagcaggtagagtgcctgacaattttaagcaagaaagcaatggcctcaacaacaaacctacaatattgnggaataagagaaaactacagggggacccatgcattttacttgcacatgatggtcagtct

SEQ ID NO: 109659 - DNA, 341 bp, Glycine max
tttccgttttctctctctgtaaacacaaatcctaagaagaagaagaagaaggaacaatgatgcgttggtagatcgtgatttggtgcgcgatcattgcaggatcgatgcattcgaatttcgcaatgacgaaggaatcatttgagaattgatttgagaaaatcattactatgtctgaattggtggcccgtacggaccggcatcattagcggtacgagaacggttatcgtcttgtttctgggtgtgttccatttagatataaaagttctaatgattgtggagactctagttctgagaagattgttgaagtgcttatgataaattcaccaagcggacctggtctt

SEQ ID NO: 109660 - DNA, 325 bp, Glycine max
gtcacttccgcctgcttttgttgctgttggtgccaatgacaataatgttcagcgtcattctgctgataattcttctcaaaggcaacccaaagctgacagttgtccgcccgcaattccttcttccaataacccaaatgggcggcctccgaagaaatgaatgaattaaaaatttgcctgcagcattatgttttgaaatgtaaattttttaaaattttcttttcatcgaatgtcatataacacacttacacatcatattggtattcttctcgttttgttgttttgtttttaaaaaatttttatgtacatgcccaaaaattggtgttct

SEQ ID NO: 109661 - DNA, 251 bp, Glycine max
cccttttgttcgtccacgcggccggattactgtttctgtgtgttcattttaggtggtacggctagaagaatgtccagcttatcggaatatctgggatttaccgggcaccacccggagaactctgcggcggaaaagtccactttctctgagacttgtggtctattgagccaatacatcaaggaaaagggtaccttcggagaccttacccttgggatgacttgcactggcgagacaaacggtacccctgagac

SEQ ID NO: 109662 - DNA, 478 bp, Glycine max
tgtgttttatatatctcttttaaccaagtttttttttctgacatatatgatagcgagtaaaactttgatcaactatgctcaaggaattcaattatttgcaactgtatataagattttgtttgtgttcttcccaatgcattttaactagcactaatctatctccagccaaaaagaaaataaaaacaagcaaaaacggttctgaacatagtgcatggctagcttgcctatactactgcgcccttgcatgtaatatgtgatgagttcaagcttctagggtacattctgcttatcggtaactagtagtttaaatagatatatagagtaataatatagtatctatagcgataccttgtattcccagaattgctttagataatttttcttgaaacaatttggcgtagagagagtttagttacttttcatatatattgctttcagtttatcacaaagtgatgaacaccagcgcagaatattttga

SEQ ID NO: 109663 - DNA, 459 bp, Glycine max
cggtcgcgtgggtttgagaatgctgtaacggtcttctattttatggtctacaaattccttttatattattaatcaatcaacatgattgtgttttatggtatttcatcatcaaatgtttttggtagagtttcctactatgtaaggagggattcaaattcatgagaacaatgcactccatgtgatcttaatttttactgtgttctctttacaggcatgtcatctggaaaaagttcagtgacaagtttccagggatcacctgtacctgcaggactaatggagggtggtctgattgatgttcaacaccaactcaatccatcttcaagtgacccaaatgcacctagtttagagcctcacaaaattgtacagcaggtcactggtttagatttgcctgcaaaactgagaagaggtgcaggttaattaatgcaaatatagtgacaccagcaatgtcattgtcatatg

SEQ ID NO: 109664 - DNA, 433 bp, Glycine max
tgttgggatttactgatgttcactacatacaaaaattaaaggcaacagatacagttgttgtctaaaagtctcaagtcatgataaaactgtatctgttgcctttaatttttgtatgtagttgggatttactgatgttcactttttttagcatgttcaaaagtttgatgaactatttaatatgctcaatgctatttgtttgctccatctctcttttcagtgcttgttctgtggccagggcttatgataagaaatataggataggatcatcaggtatcctatcctattctaattccattgttggcgagccaataggatagaataagtttatcttattcagctttttagttcaaaatttatcatgtggctgggcctggattaaaaaagtaggataggatagataaaaatctcccccactcaccctcatccccaacct

SEQ ID NO: 109665 - DNA, 476 bp, Glycine max
taaatgaatcacagaccccaaagaacttagaaaccctaaccgagtcctccatcagtcatattcccgacgtttgttcagaatgattgatggtagcgatcatgcaacagcagcagcagcaacaacagcaacagcagaacccctctgcactggtgccatttcagctcaagaatccccaatcctccaccacaaccgctgccgccgccactccccttaggtcaccctccgcccagtcgcagctctcctcgccgctatccgtcgtcccgcccctccggcaatccccactctcctcgcatccggtgccggttacgtctgtggagcccgctctgacggcggtgccgacgtgtccgctggtcagagtccggctctcggacattgccccctatgaaggggcaccggcggggccctatctcagagcaatggaagcactgtgtgggtctctgttgcggcacaatgctgcgttgatcgaattggggaac

SEQ ID NO: 109666 - DNA, 163 bp, Glycine max
cggacgcgtggggtatatacatgattccaccatcgacaagtatttaattgaagtgtaaattattttgaaaccataacttggttactacaaaatggcactcttttgtcttatatggtgtaaaaaaaaaaaacatttttttatgtgaaaacaagttgaataagac

SEQ ID NO: 109667 - DNA, 479 bp, Glycine max
tttagttcatggtaatgcacattcgactagccgttctcgctgctgtcgtcgcagcggctgccacggccgccgcccaaccacaatgcagcaactctggatggttggaaatcaaagatcaggccggactgcagagcctacagggctgcaccagttttaccggatcaattaagctcggaggttccgtgtcagatctcagcccacttgcaggtcttgcgtccgtgtcactcagtctgaacatcgagggcacaaagttgaccagtctcaaaggcctcgaagcgctgaaggaagtgaatgacaagctgtatatcaaggcgaacccctctctgaacagcctagccggtctcgagggactgaatggaatcggtcatggcctcttcgtggaatacaacaacttgctctccgacatcagttctttgaagaacgtcaaggtgatcaaccgtgatcccaacatgtttggcagtcctggcgaaccttcgttt

SEQ ID NO: 109668 - DNA, 337 bp, Glycine max
ttgctttttctatgggttggcttagtcggttcataactgccgtggctttcttagccatcggagtgatattctcaccggagacactggggtcaaaatcaaccacactttccacctacctcaaactcgctcaccttctctgcttctccaccgccttcggcgccgctctgtgggtaacattcatcggcggcatcatcatgtttaagtacgcatttttatttttatcatccctaattttatgtatttattattcttagaatttcggatgagtctaatttaactccaaaggctggctcaagtgacaagggctgtcacttatatacactgttttaatcatatg

SEQ ID NO: 109669 - DNA, 375 bp, Glycine max
tttggcgtgatattttcaattatcgatggacgaatgggctcttatccatctgagcatgtggagaaatttttgactttggccatgaagtgttgcgaagatgagccagaggctcggcctagaatggcagaagtggtcagagagcttgaaaacatatggtctacaatgccagaatcagataccaagagagctgaatttatgtccagtgattctggcaaagcagacagtcacagtacaccatcttcatcttctgcctctgcttctattatgaagacaccttttgtatcaggagatgtgtcaggtagtgaccttgttagtggagtgataccaagcatcaagccaagatagaactatagaagttgaaaatgattaccttca

SEQ ID NO: 109670 - DNA, 330 bp, Glycine max
gttagttatggggttgagtttgaaggtgcaggggcaagcaaagagagcaaggtcaatggggatggagggagggatgtgaatcttggtgatagcaattatagctttggggaggctgaggcattgagtgatgagatggaagaagagtctcggtatgttgcggagattttgaggatcagggatgttctgcttaaccctgaagatgagtctgaggctgtgttatttgattcattgaggcggcttcagatgatggaactcaccgaggactgtttaaaggcaactgaaattggcaaggctgtcaatcctctccgaaagcatggatcaaaagatatt

SEQ ID NO: 109671 - DNA, 323 bp, Glycine max
gttatcttaaacttagtggtacagatgccaagctcacagtgacagttacaaatattgaactgagagtccattacattagttgccacttgccagtggcttattctaaagcatttaaaggaactacttttggataggatgccttgactcctttttgtagataaccgatatatctgaagtgcaaccttggttaagttttgtatatgtagaacagagtcccttagttttataataatctatatggaagtctcttttaatatatatttcttgtgcaatcaaagttaatggaaagggcattatataatccttgattccacgctaatgct

SEQ ID NO: 109672 - DNA, 401 bp, Glycine max
  unsure (1)..(401): unsure at all n locations
cgtgcctacacctgttaggccgcttgttgacgcacgacattgctccttttttcttccgctgtgctcgttgttcagtgcctttagtctctttttgctacaacgtcatggataagtcagtacccaacccccctgctgcaacgcccattgctaagaagccggtctccctcacaaatcttgtgctgggagcggccattcaaacctttgaggtgtctacgctgggccaaccttttgaagtcataaaaacgcacatggccggtgggttgatgcgataaaccaaaagtgcaatgacatatcatcatgttcaaaaaaacggaaaaaacgcatgattggaccatacttcgcgtaacctagtantggcgtcgcgtagttgtcagaaattttctctcgtcttgaaaacttat

SEQ ID NO: 109673 - DNA, 468 bp, Glycine max
ctcccctgcaatcgacaccaagtattgaaacatcaacaacatccaaaactagcagaggcggtgatgacttcttttcttcgacgtcgtctttttgaaatcctaaatcgtcattcttgcacaactgtggcgtctacactatagcaacaacagttttcaaaccctaagaactttttcttccaatagcttctttcgcagctatagtcacccccaaatgtcaagaaccctaacaatgtcttcttccaaccaccaccttcgtcttcccaccatatatcacacacctccttcaagaaaccatcgaatcaaaagagggaaactataaattgagtgtggtgtcgaatatctccttctccaatcccttccactaatatcctagttcgaagaagcccattggtccatggtcaactttagtatcaagcgcctttgacccgaccacttagtgccaggttcgacgagagacaggtgtggtcg

SEQ ID NO: 109674 - DNA, 339 bp, Glycine max
gtccattgccatagccaacgcttcatctcccaaattccatcggcggtgccattctccgtccgtctcccccccccccctccggtgctgcttttcctctgctcttccgctgatctcactccctccccaccgtttggtcctcaattatttctcattagtgccattttatgcttattccttcttctctccgcttcatcatccgctgtcattcttcagctgctgctgagtgttttttgccttcgtttacaattcatttgaattagccgaggttcactcggttctcagccagcagaatggccaactccagtggccatgacccaatcgcgcggtggctcactcggc

SEQ ID NO: 109675 - DNA, 425 bp, Glycine max
gttgtttcctctgcatgatctggaattcgtgttttcagaagatctggcagcagcctgctttttctctcgatctctttgtccccccctctctcttcttgctcttgagttgtatctccttctctcttacgcgtcttcatttccactcacacacacaaaaacacaaatacactctctctatctatattgttggcgttctcagcactttctctctctaaaagattaggaccagccgacggtggctgccttctgaaggaatcaaagtgcacacacactgcacgcacaaccccccaacactgtcttctcctctttcactttctctctctttaaagaagggaaattcggtgttcttattgcttttgcccgcaattgggaattgcgtctgtgggggtggggaaaaaaaaaaaagagtgattttggatcttttg

SEQ ID NO: 109676 - DNA, 447 bp, Glycine max
tccacgcgtccggtgaatttgccaatttcaatggcagttgtaacaaacagatgattgttttgccgttggacttaaattatcggaagccgattgcctttccgatcagaaaataagtgcgcgaatattttggaatactttagacacttcgaactttttccattgtcagtgttttccattaaaggacaatcaaaaacactgaaaagaacgggggaaaatattaaagggaaacggcggggattggttgaaggaaaaaagattgtgttaagagttgctcggaaaagttcaaaagctaaaaaagaataccgacaatgatggatcatcatcatcttccaaagattcatcatcgaaagattcctcatcatccaagggatcatcttcgcacaaggattcatcatcaggacattcatcagaatccaaagaatcacattcttccaaagattcatcact

SEQ ID NO: 109677 - DNA, 443 bp, Glycine max
tctacgcgtccgcttatctgaggaggaatctgagtccgagtcattggatgatgatgatgatgactatgagacgcttgtcaattctagaaggagggacatggagttctttgatgccttaattaaggtgaagaagcaagatcctattcttaagcaaaaagatgttaggctctttgggtctgatgatagcagtgacgacgaaagtgatgagaaggagaaagttaaatcaaaagacaagaagggtgaaaagccaatgtatttgaaggatcgtggtggcaaagcatttgattgaggagggggcagattttggtgatgaagaggaggagatagatgaaaaggaaaaacgtctgggtaagaaggtaatgcctttgaaagataaagactttgttattaaggatgggaagaagacttatggtgatgagcagaggagttgaaaaaggcttttc

SEQ ID NO: 109678 - DNA, 401 bp, Glycine max
tcttatcagaactcaatgcgacaaacacagtggacatgctgcaatgatactcagcgagttagaaaagcttcacttcattgtccagagtagcagctgtttgccctttcggcattaacaatactgatgtaactattattgctcagatgaacaaggaaaactgcatgacagcaaaggatctcctaggaaggctacgacaggcgttgaagcagctcatttgatcacataataactagatcaaggaatttaagccagtgatggttgtgattagattagaggaataagtttggtcaataatgattcttatcgcagagctttatttttactttttcgtgcatgatgtggattctggagttacatatcaagggcctgcgagtatctgtgtgcataggacttacatggat

SEQ ID NO: 109679 - DNA, 386 bp, Glycine max
tcgtcgcgtccgaagacattcaaaatcacccatttggaaaaccaagctcgaactacttctgcaccacttacaagaaagataccaagtgatcatgtagagactaaggaaccgtcgagagctggccacattgattgccgagtacatgatgaggcttaagctgaaaagaagacaaatgagtcttataatggggttgttcctgctgctgcacccaaggtttcaggggtaggttcaaataagaatttgagttctttggtgaatggagggggcacagagaaggatggggtgcatagtaatcacacggttccgagagtgaacgatgagatgatggagtctttgatcaagtgtgatttttttgatggggaatgggttaaggatgattcctatcc

SEQ ID NO: 109680 - DNA, 474 bp, Glycine max
ttctttcatctcttgtgctctctcttcagtctctcacacacacccttcttcttcagctgagttgtttgtaatacagcaagatgaatccatggaacatgagaacttccaagtcactctctcaacaagtttcttatcctccttatctctttgtagaagagattccaaacatgggaaattccagtgttgtgaccaaggatgctagaggttcacagctgacaatcttctatggtggccaagttcttgtcttcgatgatattcaagctaaaaaagccaaggacatcttgtcttttgccggcaagggaatgtctcaaaaccagaacgattatgctaacactttccctgctacaacttcagtctctcacacacacccttcttcttcagctgagttgtttgtaatacagcatgatgaatccatggaacatgagaacttccaagtcactctctcaacaagtttcttatcctccttatctcttt

SEQ ID NO: 109681 - DNA, 161 bp, Glycine max
tctttgacgcgtgggcggacgcgtggggaatacttgtgtatttagttggatcaaaatggaagcaggaagcagaaataaggacagaaaaaacatgagctgcaaaaaatttagatgttcaattgtagttttgtccagtacagaattttcaatcactttgttag

SEQ ID NO: 109682 - DNA, 392 bp, Glycine max
aagtaaaactttatttatcaaaaccaaaaaaaactttacgtcaaccttccatatccttcagctacaattttaaaattcaattttgtctttgccaggatgagttggccgactcgcgcagttttctgcacagtgttcgtgccatggctcgccttcggttgcgcgacgccgcgctgagggcggacggcacgggcgatgtgcgcacatacatcacaaaacgagtggacggacaagcatttgcactctgtcgctatttgtgctgcccagaggaggaaaagaagtggaacggaggggacgagtcgcagcagcagcggatgagcacgacagtttatggcgatagtgttgtcgtgctcgtcaacttcggccccgcgccactcactttttctttgtccgat

SEQ ID NO: 109683 - DNA, 341 bp, Glycine max
gctacgcgtgcgtcgacgcgtccgctcaatgtccatcttcaacttcagacacttaaacgcgttttagtgttcaataatccacaccccgaaccccgaatctttccgtatgcattggcatctgagtgttccctgggaccatatattataccatatgtatatgtcgtcacatactcaataatatataataatgggtgttgtgcggacgtgggagagcaggagggcggagctggaggcctttcgccggagcctggaggcagccgccggcatccagcggcggaaagacgacgagggggggagaaccgacaagtgtgtttcctccgatgaacatgaggatggaaagg

SEQ ID NO: 109684 - DNA, 213 bp, Glycine max
ttcggattagtatcatgtttatttaactctataattgaagtctcattctgattgattaggaaacgaaatagaatccaatgctgctgaaaagatgacaacgttcactcctttatctttaattaccatattgatgaaagttgatcatcttagctaatgaaaattaaggattcaatatttgatatacaacacaattattgcgtagtacaataaaaa

SEQ ID NO: 109685 - DNA, 160 bp, Glycine max
  unsure (1)..(160): unsure at all n locations
ntcggctgatgtatctgatcatggacttgattggcaggtagttgattatagaagcttcaaaccggaacaagcagaggattacaacagcatgtattgccaaagaacaatatatgtagatgaggaagatggtgaactatcatggtttaatgctggtgtaaga

SEQ ID NO: 109686 - DNA, 342 bp, Glycine max
tttcgcctattcgtccgtaatactagctctctctgattaagttgttactcactcacagaaacacataaagaagatgatggcgtacaaattgcatggggcaattgctagctgccattccagaacatggtatttgtggatagatgagtaagggcgcgccatgtcctctgtgctcactactcatcaggaaccctttaagactaaggttcctgagttgacaattagccatgtgcccccacctacaccctccataaagaacaaagacttcatcatcccctccaccactagtggaaagtttggtaggtttggtggcaagtttgcacctgagacacttgtagcttcttt

SEQ ID NO: 109687 - DNA, 207 bp, Glycine max
ttcttcttaacccatcaaaaccatcgctctgtattttggtcctttctacctttctccgatcccaatccctaatctttctctcttcaaactctaattttttcatctgggtttggttctttcctttccccctttttatccctttctttctttgctcactatcatacatatcattcgtttcacgattttgatcgtttcagggagatcggc

SEQ ID NO: 109688 - DNA, 414 bp, Glycine max
ctgaaattggctgatgaaaagagcaaagggaagagcagattcactggaaaaacagtggtcttgcttaaggactttattcacagtggcaagagaagtagcaaaaagcgcaacaaggggttctgtggatgctcaaggccttcaactaatgaggactaagtgagaaaatttagaatcattttgttgtaagtaccttctttaattggtatgtgtctaatcttagcataataattttaattttagctgttaaagatgctgttaggctttatctgatcacagtaacttatgtcagatttgtatgttctagctttcagaggacatgtactgagcgacattttcgctaaggagttgcgctgtcatgtttgacaatgtttaagctatgaaagcacagagcagagaataaagcttttcaccctt

SEQ ID NO: 109689 - DNA, 395 bp, Glycine max
  unsure (1)..(395): unsure at all n locations
ctgcttccctctaattcttctatgcctttttttttattcaaaagtgagtttgccatgacatgtcttactgttgacaaattttgattaatgtcacaaataaatcatatttgatgtcttttgttccataaaatatctgtgcttgaaacaacattatacaattttttgttatcaattctcaatttaaattctactcatttaattttattgctatttttctgacgactatgtaactgtttcgatatggcaaaatctgcatatggaagtgcgctcatgcacacatggactctgtaaccatataagcaaaggtatggcctctttttttttttttgattgatccctgactgctgtgctatgataagcctatatatatcatatcgnagagttgaatatacatt

SEQ ID NO: 109690 - DNA, 449 bp, Glycine max
aaatttccgtgttgaagtgcgattagaacttagaagcatcaattcaagctccaatcttcgacactgtgcgtaattgttcaaactgattgaaaaggctttttgaattagttaattgcgttgtagtcacttaatacattgaaagcagagtatgccgagtaggaatagtgccaaaactccaaagaaggatggaaacaactcaaattccagtctttcttctctagaaaataatttctatgaaggagaacgtctcaccaatttgctccaatcaatccgtaggtataatgcatgtttttcacatgtgatgcttcatgcttcctgtttttattattcttccaacatgatttgatgatttgatccacacggccattgcttattgaagctgaattggtggccagagagaatttttaacagtttaagagtgaactactaatcaactgccttcaatttta

SEQ ID NO: 109691 - DNA, 263 bp, Glycine max
gactggagtaaaagaaggattacgagggcacatagtggttgaattgagtgatttagacaatgaggtccttgttaaacttgtgggtggtgatcttgttgaaactgttgtagctcatgatgtcattggtcgcttgatgattcaatgtgctcgacagcctggacttgcacagatttgggaagatatacttggatttgaaaattgtgaattctacatcaaaagatggccacagttggaaggcatgcaatttgaggatgtactaatca

SEQ ID NO: 109692 - DNA, 248 bp, Glycine max
agaaaattcaaatggcctcgggactcgccttgcgattcagatcccatctcctgcacaccgcctccctcctcccatcctgccttctccaccaccctcccatccaaccctcgccgccgcacctctccctccaccgcctcctctccacggcgcgccgcaccccgccgcgctcgaagaaatccgtcgacatcagcgcacgcgcgcgccagctccagacgcggcgcctctggacctacgcgctcaccttcggt

SEQ ID NO: 109693 - DNA, 200 bp, Glycine max
cccacgcgttcgcggacgcgtgggatttaattcacaaatttggtccttcaattttataaatccctgcaaaattggtcttggaagtccaattcggacattgactgttaacctcagacgttgactaccacgtgtcaacgcttgagtgggttcctgcaattcacacatttggttgtctagttgtataaatatctttataaatt

SEQ ID NO: 109694 - DNA, 249 bp, Glycine max
tccacgctttcggatattcaccgagaaagacataaatggcgatggaatagtgcaactgtgaatgaaaattgagaagggtaaccgaaaaacaaaggaagggttaatcagatctgatctaaattcaaattattttggcgttaagatacgtgtatggccacagagaccatacgcagttctgtgaagctcaaatcaagtgccccaaatgggtcttccaagggaaagattgattcttcagttggcaggaagaaa

SEQ ID NO: 109695 - DNA, 437 bp, Glycine max
aatcacaacaatttctccgtctccggtggcttgcttccttctccggcgtcatgagtaaatcgtagcagcagcaggcgcggcggagatcggttccggcgtggcggatctgtgtgatggtgtcgcacatactagggtttcatggcagatagtgaccctccatctttaggtcgtgtgaagcttactgatttagtcccttggaacgggctagcatctgattcctataaaatatcagtttcaattttgtcacattctctggctcagttttctgcagtcatcgttcagtttccagcaagtgacggggctattctgcgatctggtttagaatctgctcgcatgtatttccaccaaagggaaacgtatccacctgcagatataatcaatcctggtgagtctcgtgagtggtgcaaaacatctctggttattatgcagattctcat

SEQ ID NO: 109696 - DNA, 436 bp, Glycine max
tggacgcgtggggaagaagtgccacctcgtactgattctcaatgccggaagagatggaaggtgttatgtcctgaatgtgttcctttgcttcaagaagcaagaaagaagcgaaggtctattattggtagtaacttcgttgaccgagaatctgaacgcccagccattacactgaatgattttctaccttcacccgcgttagctccaaaatctgatgttggtgcttcaaatctctgcaagaagcgcaagtcaagcaatgttcccaaggaaacgagtaagaaatgcataaaaagaactcgacttcgtaccaaggaagtacaagatacagaggtatatagtgatgatgggatcaagacttgtggtgatagtcgtctctgcatgcagaaatgtttccaagaagatgaggtccaaaagacatacaaaaaacacccaaaattgt

SEQ ID NO: 109697 - DNA, 355 bp, Glycine max
tccacgcgtccggccaaacgcagtaaatggccaaattgtggctgctttcccttgccttcggcattggcatcgccccctttctttttgccgtgcccctccaaaaggccaaagggacgacgcgaaaatggttggccgaacacatggacgaagtgatcagcgaaatggacttggccaaagcatacggagcaccgtacgatttggtcgaacaaacgcttaacaaacggcggaaaatgctgcgaaaaacggcgaagggaacgagcagaaacattgggcccaaaaatgcgaaggatgccgcgtacgaccacaaaatgatacggcacaaaatatttccgatggcagccgcttcttatgggga

SEQ ID NO: 109698 - DNA, 100 bp, Glycine max
tttgacctttaactcttatgcttaatcccacttgcaaactcgaaattcactatgaccggaatctgcagttaattaagaagaacttaacagacatataaac

SEQ ID NO: 109699 - DNA, 130 bp, Glycine max
tcgcccacgcgttcgcggacgcgtgggtttacttgcatccaagccctcattgaagctgtggaaaggtctgacagaattcatgttatcgatttcgatattgggtttggagtgcattggtcatcttttattg

SEQ ID NO: 109700 - DNA, 225 bp, Glycine max
gcaggatgctatattccacgggactactagatatctgtcttttttatttggtacatcgatatctatcttgttagtctgtgttgtaatggcaacttttttttttaatctgccagggtttgatttttgcatttatatactatcaatacagtttggtagctgcgcaaactgtttgtaagttatcttaacgtagctgtttggtgcaaccgttcaaggacatatgtgatt

SEQ ID NO: 109701 - DNA, 307 bp, Glycine max
tctgtgttccttcattcttcactctaccaaccaaaaccctatcccttcccttttttacaatgctattatactcgtctttacttcttcgatcattcaatgttataagttcttaaccttcattgcagcccaatttctgtttacttttctctatctatttgtttggccttcttctttttactggtatttctttctcgaatggtcggatattagagaaacatgaacgaaacgtaaaattgcttgttcgaacacatgattatttctcaagtagtataataatgtaaatttaggttatactgaaagaaaatcc

SEQ ID NO: 109702 - DNA, 119 bp, Glycine max
tggacgcgtgggggcgaccacccgttgacgcgccaacaaaccggatccatactcgattgctactagatttgagaatctttctacttttttgtgctcgattgcttacgggtacgaaaggg

SEQ ID NO: 109703 - DNA, 449 bp, Glycine max
agaatcaagatcaagattcaagactcaagattcaagaatcaagagaaggcttaatcaagataagtatgaaaagtttttctcaaaaattgagtagcacattatttttctcaaaacatgtttaccaaagagtttttactctctggtaatcgattaccagattgtcgtaatcaattaccagtagcaaaattgttttgaaaaagttttcaaattgaatttacaacgttccaattaatttcaaaaagctttatgtaattgattacacttatttggtaatcgattaccagtgattgtttctgaataaatcaaaagatgtaactcttcaaaaaggttttgactttttcaaattggttttaagtttttctaaaagttttaactcttctaaatggtcatcttgatcagacatgaagagtctataaaagcaaggctttgttttgcattttaaattaatt

SEQ ID NO: 109704 - DNA, 236 bp, Glycine max
ataactggttacggaacagattggcgctacttttgctgttgacgttgaggaaattgcggctgggcatcacgttacgcctgtggacatgacaacagctaccagctaacttcagcttgaggctgacgaagtgcaaaatccgtcgactaaacctaattggtcatcgcattagcgctctcaattggtgcctaaaattgagaacaatttcattattgcattgaaaaatgccataaacaagc

SEQ ID NO: 109705 - DNA, 448 bp, Glycine max
ggaccatccaaagtcagatgaatatttttcagatccacggttggcagcatatgctgtaccatacaaacaagtagtttccgggtatacagtcagttgtccccgttcgcttctatcagaaacaagttgagatattgagaaccaagactcactggaggaaagcttacttttacttgtgggatgagccactgaatttggaacaatatgattctgttcgaaatatggccagtgagattcatgcttatgctccagatgctcgtattttaactacttactattgtggaccaaatgatgcacctcttgcacctactccattcgaggctttcgtaaaagttccaagttttctgcgtcctcataatcaaatttattgtacaagtgaatgggttctgggaaatcgagaggacctggttaaggatattattactgaattacaaccagagaatggtgagga

SEQ ID NO: 109706 - DNA, 349 bp, Glycine max
cccacgcgtccgctttaaacagattataaaaatgaataacgtaactcatcaaaaggttactcttaaacaaagtccaaattataatattcataaaatgtatagtataattaataatacactcaataatttcattggtaaataatgatttaaacaatattttaaattatcagttaatattaacccgcgtattttaattaaattcaacaactttgtctaattaccgtcaaggcatgatagagaataaaatggaagtaaacgcttaatctttaaatggaatagaaggaaaataaccttggtagtcattcttttgtttgaatattttaggttaagaaaagcatgtaggatcatg

SEQ ID NO: 109707 - DNA, 101 bp, Glycine max
ttctgtttttagtttttacctacgggatgtagtcactttggaattgtattggacaacattcagttgccatctaatctcgtttaagctaagtttgttgtgct

SEQ ID NO: 109708 - DNA, 431 bp, Glycine max
tgctcagatctcatctccgagattccactacccgtaaattttatttatttatttattttaatctctgcttatcagatccgaaacgcttctagatttaagtttatcgtttctgtgcggaaagcgtggtttatgctatagatcccgatgcacagaatctacatctaggaaaaaccggtttctgatttgctttttccttgtttggattttcacttgacgtgctacctttcatcgattagattaataatcaagctgaattttttttattcaaattgaaaaaatcatggatttattgtattggtataggttaagctaattgagattgcgagtcggttggaaaaaaaaaaacattttgaggttttctgatggtgtttgggccttggttgaattaaactgcatgctacggttgcaagtgtttaattcgatgcattcca

SEQ ID NO: 109709 - DNA, 407 bp, Glycine max
cctacgcgtccggccctttttttttttttttttttttttttttttttttttttttttttgggaatccagaactttttgcatacacgtaataacagtttaattacataacgggggggatgtaacacaatcaaaggaataatacatacaacggcaacagaagaggcaaaggccaaagttgcagcactagcacccaactaatgattcgaccgtttcagattattttactcagatgatgatcagcttgctttatagctttcaacataaaacaactttaggccaaaacacatccaaattttaaaaacactttaaaatgatgcaaggaattcccgatgggtcactccaaaaagggctttttcaggctacgccataccttatgtagacaattggaacctgccactaggcttttt

SEQ ID NO: 109710 - DNA, 192 bp, Glycine max
gtttgagattggtatacatttcccggaaattcgatacccattattttatcccgacttttctcctgaatggtgagagtctagactgatccgtacagatttgactgtccctcctctttctgattcatgtgccattcgtaacaatgattaacgaaaatgccatcatctctgctgctgctgttggtgctgctgatc

SEQ ID NO: 109711 - DNA, 385 bp, Glycine max
atctaatgcaaatcggccgatcagcttttaaatcttatcgggcccaaaaatccgctggtccttttcgtttggattgccatggctttggtttgggccgttatggccatgccaattatgtgctccgcctttctaatggacgatttttgttcgtcacagaaaacaggagacaatggcactgactctgtttgttccccgaggccgggcacagtgacagccgactttaatttgggatccagtcggagttacttggcggacattgcaacttcggcatttgtgggtggaatggccatcggcagcattttcatgccatggtttgccgacagaaaagggcgtcgatcggccgttctctgttcgcttttcctctgtggctttttcggctgtgcct

SEQ ID NO: 109712 - DNA, 388 bp, Glycine max
gttcgaatatgttccggaatcgcgcactaaaacgacttattctttgttggccgcgggtgtgcgtgaggtccgatctaaggagcgttatgcacaccaccaatacatagtgaagacaatggccagttacaaagaactgcttgacctgcgcaaccatctcgcctcactgaacttctcgcaaactaacaaaatggaagaccaactgcagcaaaaggactttttttttatgaatgctttccgagcatcttaccaacttttgttttgcgaagctgccgactttccatccgttcatgtcaccgatagtgaacttcgacgctatttgaactgcaacaatttatatttcctctcaacatcggacagacaaaaagcggaaacttcattgtggaaaaat

SEQ ID NO: 109713 - DNA, 305 bp, Glycine max
gcctgacgtcacttataatgtcagtttcgttaccgtggcgaaagatcatttctagggttttatttcccacaatcatgtctagtgctggtttagtttcttttagtgttgattggcaattgcggtttggttagggtttgttgtggctggaatgagggtttggcttgattggagtttctttgaaatggctcttttgttggagtctcgatagggccttgtttaaggaaaatgaaaacttaggttttggtaaattcaaatggagagggaagggttttacttagaagcttatcaaggtttgtgtcggtttc

SEQ ID NO: 109714 - DNA, 471 bp, Glycine max
gctatgttggcagcgatcaaagatgatcagtacatccatgtgaactttagtgaaacagctaatcagatgcgtctgatcaactaaacatagcaactatattgcccaacaactttacaacctcagcattcaccaacaactttctaatcaggctttatggtatctcacaccaggcattaatcatgtgtgtggatataaatatttaaccatcttctccgaagctaggttatcgggatggaattttcttattaaagattctcttaatatagtctaaaattttactctgtagaatttataaaagcaagaaagatgtcactccttcaagtttattagtggtatttggatgttttatgttctttatcaaggaagcacaaaagattaactcctgtattttcatttcagtcacgaagaaaacgtgcaagaactccaaccccagggcactatcttggactgaaaaacactagggagtatggc

SEQ ID NO: 109715 - DNA, 108 bp, Glycine max
cgctatcgtattacgctttcttttatcttcaggcggatcaaattaaaatcacaacacccccagttcccgaaaccctaaccctacctgcttgcagcacatgggtaagaa

SEQ ID NO: 109716 - DNA, 366 bp, Glycine max
gtccaataaagcctaatttgatataacgaatatcaatggaacatggaagcttgccgcttcaactcattattttattcgttttaacgttgcaaatttcaactcagtcgccagaaatttcagtgccttctgatgttcaaattttgtcagcagtccgaaacgtagatttgaccactcaaattgtcaaggttaaaactgactttgagttgaaaaatggaagaaacgaggaattgagcagttttgtacatgccatgtcggctgaggaggctgcaagactttcttggatgtccgcttatgagagcggcaaagaatcgggcaaattacggatttctcgtgttagagtcaaaggggtctcatcggacatggttt

SEQ ID NO: 109717 - DNA, 286 bp, Glycine max
ccctcgcgtccgcccacgcgtccggaagtagtagggtgacgttcgaattcgaattggtccatttgcttggcaaaagttgcatctactttcacagaaagaaaaaaagtttctaagctaaggaaatccagagtgaaaaaaaaaatggccggtgacggtgcaactacatgcatagacatgcttcttgccattattctgcctcctcttggcgagtttctcaaatatggtggccaggcatatattaattatacatattttattgtcagaattaaagattttacacacaaaa

SEQ ID NO: 109718 - DNA, 362 bp, Glycine max
ccctcgcgtccgcccacgcgtccggtggtagtagtgctacgttcgaattcgaattgttccatttgcttcgcaaaagttgcaactacttccacagaaagaaaaaaagtttctaagttaaggaaatccagagtgaaaaaaaaaatggccggtgacggagcagctacatgcatagacatccttcttgccattattctccctcctcttggggtctttctcaaatatggttgccaggaatatattaattttacatatagtcttttgagaattaaagattttacacacaaaaattggttaccttttgtcattgcatgttaatggatttgtagagtgtgtgactaattaatacaacacatggttgatga

SEQ ID NO: 109719 - DNA, 355 bp, Glycine max
atggattctccaaccgataaaggaccatgttatgaaaattaacttgaaaatacaaccacaatgaggaaaaagttatagattaaaccatgaaagaatgtgacccacataacaaaagggcaattcagaaaattaaaatggctgcctcagcttaaggcattgtgcttaagttgtggttgagaagtctactgtggaggatttaccacctggatgggtgaaagaattaaagattaggaagaacagcatgggcattcggaaagatccgttttatatagatccagcgagtggatatgtattgcgttccaagaaggatgtacttcggtatcttgaatctggtgatatacgttcatgtgcattt

SEQ ID NO: 109720 - DNA, 385 bp, Glycine max
cggtcgcgtgggaaaaaagctcagttgctgaaattcattgttttgcttttgttctataacaaccttgctgaaatttattgtttctgcatctgaaacctagagttttctaccagaagagtctaggcatcaaaaaccttttgtctaaattaggagtaacattatcgtcaaatgcaattgacagttttccaaattatagtgttaagagttaacttttagtaattgattatgcaagattgatggctttctattgtgactcactgatgttctgcgatcaacctttgaatgctagttttttgatcttggattagtaagcaacatatgttttcatagtcagagggatggatggttcacacctcaacttatgttgattgctatgagcttctag

SEQ ID NO: 109721 - DNA, 125 bp, Glycine max
cccacgcgtccgcatatatagaacatatatagatgcccttaatgaatcgaatgaatcttccaaaatggtgatactaacaccatttcatttttgtttctattaatggtttcgttcgtgatcaacac

SEQ ID NO: 109722 - DNA, 425 bp, Glycine max
atttttacaaggaccaacagtgttagaatattatgggtagttagttggaaaggtttattcgagataaatgggggtaggatcaaaggaaagggaataagctgccatttgtaaagtgagaagaggctctttgtgaatgggaaaccccttaaaggggaggcttctttcatatttctgatttttggtttgtaacagtgacttgagatcttttgatagtacctatggcactctaaatgcatgggaaagcagagcaacataatacaagatggatgccatgaagtgcaaatccagagaaggttgctggcattattaattaactacaatccgtgtgaagtgacaacgattgagaagctgtagtcaattgcatgcatgatgtatagtagctctataaccatttccttaatcttgctattggaatttttatttgt

SEQ ID NO: 109723 - DNA, 409 bp, Glycine max
attaaatttaggaacaacaatctattataaagttcacttagttttaccactttgtgcaactttctagctagcattcttctctttatttaggccattctcaaccctttcttcgagtcattgtccaagtatgtttggctttgcatggtttatttatcacgcagcagattcctctctcatcatatattacgctctctgcaacacctatgtcatgtcgttagtaccaagtattgaaagctgaaggccatggttgtcgggcgtgagggtgaaatatcatgcgaatcctttggactcaagtgtgcagaacaataccaaataaacagaaaaatagcttaagatcatctttaatgaagcttgtttatagagttcttaaatttaagtataattttttcctgttagagcaattgaagcc

SEQ ID NO: 109724 - DNA, 297 bp, Glycine max
gtgacctgaacatggaatcagtcaagatgtgaatccattaagcaaagcctcatgtctgatggaagggttgggggtggctttcaccctttccagattgacccttgctttgatgcccgagatgactccgaaccgaatcactgttcattctgagcatgttgtcaacccctacgactggttgcaattcaattgcatcaaggatcggatgaaccccaggggaaaaagatgccctctaaaaaatcatatattgggaagatgaaataaggagtaaattccacattctgcactgaaactgttgct

SEQ ID NO: 109725 - DNA, 458 bp, Glycine max
caacctcttcttcacgttacctacgttttcattcaaaaccacagtacgacatcgaaaaaaacaaaaaagtcataatatatatcaacaaaagggaacgatattttcagcaaagttttgctctccacgtttattgaatcaaggtttatctgctattattaaaagtgttgggatacaagtaccaagcagaagtttgccaaggcagctgcttttagctgatgccatcatcatagtatggacttgaatcaatttttaaattttaacgttattagttcggaaggattcccttgcacatcgtcttgtactcctatttcaccaatatccaaccagttgcttggatccttgaaacttgacataggaaactcacctaactcggccctttctagtcattttgattctgatactctttcttctgcattaagtgacagtcaggaattgcacacctctggggaaattcactc

SEQ ID NO: 109726 - DNA, 480 bp, Glycine max
cccactcgtccgcacaactggtgctgaattacaggatcaactttttttccacctccttttcttttttctcttttctttctttcaaattgcagtgttatctggcaactctgattaaaaaagcacaccaccgaggtttctgcctcaatcctctaatctcttctctccccctctcatgagacacacacattattattataacataagatagtgagagattgtgttgtgtcatgtcaaatgccaagtctagatcttcttctcttcctcttgagtttccccctttcagaaactcaagaaacatgaatatgcaaccataaactccatgtttctcagacctcacaaattttccatacaatacaagccacaaaacacaaacctcccttaacccatttttccaaaaacttcagatccttttgtgttaaacaaccacaagtccccgcatcgaacaaataaaaacacacaaaagggtatataaagacagag

SEQ ID NO: 109727 - DNA, 405 bp, Glycine max
tttaagatcccacagacattcctgtcaacaacagattacttgaactccttcattccttcactgattgaggaaactcggagcgatctatgttcgaacttgaaaggtgtgtcgcgggcttccttttgcgaaatctcaagcattgaactcgagaggtcaagaagcttcatacctaccaagagcttgttctaccaaatatctgtgaacagaagcagcaatgatgtgaatggaaaatatgagcctgaggttggagacctcattgccttcactgatattaaaccgaaaaccgtagatgacttaatcaacaggcctaaaagaaactaccatatcggttatgttcatggaataaaagaaagtattgacaagatctcaatattatcatccaaaagctttgacatggacattcag

SEQ ID NO: 109728 - DNA, 436 bp, Glycine max
ctcacgcgtccggtttgagaagaaatcttgagagcgttgtttgaaaccaaatattaaatatgtcatctctttccgaggaggtcaagaaagttaagcaggccgctaacattcctcctccggcagtttgtaacagatttgtcgaagggttttcaagcgtttatgtgttcgaaactcgaccatcttcacatggcggtgcttttgcattccgttacgatgttgaaatggtgcagctcactagaaacaaaagtttgacttcgggcggtggcgacgatgggaaaaatggattgctccgcggcgtttgttttgaattgatcaagttcgtgcacgactcgacgcagggatttggacaagcggcacaatttgtttacgacaaccgtaaaatcttattcacgaacaagcgaatcgaacaatctgtattggaaattgacacggaaaa

SEQ ID NO: 109729 - DNA, 465 bp, Glycine max
ggagggtgttgcgatgctttggttctacatttggggccaaaagaacccagattcagattgggagtcattttccacagctttgatgaaaagatccggagatcactatggtaacccacacaaaaaaagattaagtatcatgaagaaagaagaacaaattgagacggaaacccacatgaaaaaaagggagacttccacagagttcttgaaagaaaggaccaacatttcagagctgaaacacatgctgcgcaagatattgaatgaagaagttgattctcatgcctcttaacaagacaaaaatagcatggagggaagtgagtcagaatgcagtgaagcaaaggctagttcttggacaagaaaggtgaaactttccagctttaatagaagcatagaagggggaactaatttaaagggtaatagttctgagtgtgacagtgatccattacagttcttgaaatcagaaaacag

SEQ ID NO: 109730 - DNA, 266 bp, Glycine max
cgtacgcgtgggtgaaaatgttaattgaatttctcaagcacaaaaaatataacttcaagtgcacattcgattagtaatatttcttaagcacaaacattatatttgtttggtaacaacgcaaccctcaaacttgaatcaaattcaaactaacctgtgcaagtagtctgcacaatacgattcatcattcatgcgtttgcaagcacaacacaaacatctcctctatacaaacaaaattaacaaaaaaaaaaagtccatgtcacagcccc

SEQ ID NO: 109731 - DNA, 260 bp, Glycine max
tttgcttacgccgttcaatgtgcgcaaagaagtgaacttggcaccgtcaagcgacggggcgaccaactcagacgaggagaggaacaccaactcagatgacgacctctaaatctttttttaaccaaagcttagcctttttgaaatatttacatttgcactttggatttagccgtttaattatttataaaaggcgaagtgagcgctcttaaaatatataaatctaaaattgcactttccaaaaacacaaaagggggggccgt

SEQ ID NO: 109732 - DNA, 430 bp, Glycine max
tggttaatcgggagattgcgaagcggaacaacgatgaaaagctgagggcaaaagcattggccgtgaaggtgcgttatctggaggaggagcgtgactaacttaacgcgcgactgcgccactacgagtgcaagtatggcattatcagggagcaaccatatgagcaacaaaaacggaatgctattgacgcagaatcaatgcagtgcatttcctctaccgtactcaacctgtaagacgacagtagcggtcccatcgattcatcgtatacaacaaacgtagctgattgtgcaactctgtcgaacactgtatgctatcaacctgatcaacagcagcggtaacaaattcaaccgaatgatgttgaaaatgatgcggcagcgttggcagctgaacagctccaaatccatgcacaacaatttgaagcggtccaagcatt

SEQ ID NO: 109733 - DNA, 197 bp, Glycine max
acaaatgtgactggtaaagctaccttgaataatgtggcctgtaattctagggaacagtgtgattggaaattggattctcaatctctagtatcagatactgctgaaattcgatgatggacattttgatataaagactcaaggatccagaagttgttttgccgttcttatttgccaaagtcaaccagtttccttcatgc

SEQ ID NO: 109734 - DNA, 193 bp, Glycine max
atttcaacattctcataagtcacaaccaaacaccatttcattaattcttgcagaatattgcttagttttgttttatctgaattttgaaacagcttttgaatggctttttaacgtgactgtaaatgccggcgggtatttggattgcctctgccggcaatttccaccagattttgaatcacatggggagatggtc

SEQ ID NO: 109735 - DNA, 194 bp, Glycine max
  unsure (1)..(194): unsure at all n locations
cttacgcgtggggttaaatatgtgatctttcaaatcgaattttgtttcgggtcgaacacatgatggattgatgagtcttgctaaaagcaaattaaagtggtaaagctgcctgttttatactnttatttggacactacaactttatttttctttgttctttgctcgtcccttcccatttctataacatcagtttc

SEQ ID NO: 109736 - DNA, 105 bp, Glycine max
attggggtggagcggcatccacaatattagatatgtgttcactgtgtgattgtataggggaatgccatgccatgggaaattagaagatcaaatttgggcaagtga

SEQ ID NO: 109737 - DNA, 100 bp, Glycine max
gtcgggatggttttgttatggtgctggtgaagctattaagggatggataccacggagtgcgaatacgtgtgataggttgcataaaattgggcaaggaact

SEQ ID NO: 109738 - DNA, 107 bp, Glycine max
gcttttccattcaactcttgtcattgtgtgcactgtgtcttttgcaaaatactctgagactgtctttaaccttcttacagttggctctaaacctgttgaaatccgtg

SEQ ID NO: 109739 - DNA, 487 bp, Glycine max
ttgttgttcctctgtaaaacaaataaggacaagagagaagatattcaaggcactgaggtaatgaattctgtatattttcatttcagcaaaaaggtacaattttatatacacgtattaccctaaagggataaggtaaagaatgtcctttttgcctcacaaattacagctcatactattctagaatttactctaggatcataacagaaaaatattcacataaagagatatttacaagaatgagagctattgggctgtacgggttttgagccattgttctgttactctggagccactaaaatcccgcttagaggttagtttagtagccgcgacagcaattgggtaaaattgcttgtaatttatgtctgtgcagtaatcctctgcgtgaactacactgcccctcttgatagatattaatacatgctacgtttttttgctacttcaactagtcttaggaacagttttctttttactctctacatcaatagca

SEQ ID NO: 109740 - DNA, 210 bp, Glycine max
tttttcatttcttctgatgacatggaattatctggaattgttgggttgaatggaactacatatatggaatctgatacgagtaaagtgcctctgcgaactgtagaaatcctggctttttgccatgcattgctattagttgagaataagctgtgcggtgatcctcttgagaaggctgaacttaacggaattgactggagttataaatctgat

SEQ ID NO: 109741 - DNA, 405 bp, Glycine max
tgtcctcgcgtccgcccacgcgtccgcccacgcgtccgaattagttgaaaaccaaaaattaattggccgtgacgaaaacaatatcatcaaccacagaaaaatgaactgctccagcgctgcaatgttgatgctgttgatgaccattttcactgtgctgtccaatgtcaacgaggtagcagccgaggagcacgagctggtcagccgcattaagcgcaacggctacggatacagcagcggttatggtggtggctgttcagcctgccaaagcagctgcaccacctgtggttacacatcctaccataccgtgcctgcggctcctgttcccccgccaccaccgccgcctacgccttcgcctgcgcccgtctacaggcagtcttcctactcctcctgctccacctgcggggg

SEQ ID NO: 109742 - DNA, 324 bp, Glycine max
gcctgaagctaaatcagaacttggatgctggccatcattagatcactctggaaaagattatagtctccctcataatctgaaatctttagctgcaccagttggaaaaaataatttgcgcaatgagaatggattttcaaacgaggggattaaagattgtgcttcaatagtgccctcatccactaatccgcagaacgttgaactcactactggatgaaaatctcacagtgtgtacaaaacccttggcaagatagttgatgttgctacacctcacgattcacgcacagatatgaccaatggcatatgccctaagacatcactaattca

SEQ ID NO: 109743 - DNA, 452 bp, Glycine max
gtcatagttatttcataatctattaattttatacatgtgttatatggaatccatcgctaattctcctcaaatgttccatcaaaaacacacccaagtgaccaaattctttgtttccgcgcactcagccgacaacaatccaaaaacagcaggactctttttgatagaaatgcaaacgctaatcgcttgccgagtgaggagagggcatctcttttggatggtcctttgaagcatttggccgatttggactccaccattcccacttcggcacattcgacgtccacaatgacaaacagtgacccgagtttggccacttccgcttttctgactacgaatttcgactcaacaatggacccgctgttttctcctcccccggcaccgattgtgccagatttaacggcagaggagggcaccacattaatgagtgcgggcgactcacatgacccaccggaact

SEQ ID NO: 109744 - DNA, 364 bp, Glycine max
gctaatgtgtcggaggcgaaattccaggctcgggggggtccatagccgctcgtagctcgatttgaggcctcggaacccccggctggtggttctccgaagcccatcactcagttctcagtccttgagatcgccgacacgagcaagcatgcgcaggccagggatgcttttgagaaccttgccaaggctgcaggaatcgaggcggcaggtggtgtcagcgccggtgatggacagaaggctggtctaggtgtgactggatggaacactctcgaggaggctaaagcggctcgtgatgatcccaagtttgcggcagctattgcggcgcttgagagcctcggaaagactcataacatctttgttcagatcc

SEQ ID NO: 109745 - DNA, 408 bp, Glycine max
ttgttattgagttttgctaatctgttcgggatttgggatttgccaacgtgtgagtgccacattcgtcattaatggcccccccaaaaaccggtgaaacatgttttcacgtacccatcgcaaaattggcaacaaacaaattgcatagcaatcgcattaattaataataataataaaaaaaaattttgtgagtgtgtatctcctttcaaactttttaattattcaaatcccgctttttcaggtttttgaacgtggactggaggccatcccgttgagcgtggacctgtggttggcctacattgcctatgtgaaggagattgcgcaaggacagcgccaggcaaccgccaaaattcgagagtgggctttttgtttatatgctcgggttttttgattttttttttttttaaattt

SEQ ID NO: 109746 - DNA, 450 bp, Glycine max
gaagctaaatctggaagggatggagcatggtatgatgtggctacctttctatcacacagatatttagaaacaagtgatccggtaattcaatgctaagattatttctgtttttaagttttgtgaagaaattaatgaggcttttttatatggttttcaatttccctttctcactagaatatttccttggcaatcctatgattttattgctttctattcctgcacgcatgtcctcatggatgctaagactaactactaaagtattgtagtaaaatgttcttagtggttgaaagttgttagaatatataggagctattagtcttactgttagtgggcttttacttgcactaacattaatagtttttttatacaactactaatgctaattattatagatcatataccctttatttctggtccctactattggagatcccacatcgactagtgatg

SEQ ID NO: 109747 - DNA, 273 bp, Glycine max
cccactcgaccgagatcgcgagcggccgcccttttttttttttttttttttttgaatagcaaatattcgatattccttctcatgaaagacaagggtttcacatggtatacatctattatcatacatcaaatgactgattcaaaacctaaatcatgagctttcacctattggccaaatactgcacaaacaaattgagtcaagtgcaaacgaatattgggaggtcagatgaaaccaaaagtacatttctattgcttttctacaaaactgttagtc

SEQ ID NO: 109748 - DNA, 71 bp, Glycine max
gtttcacgtatggaaaatattagtaatagcaacttcaacaaaaatcgatttgtaggagaaatttcttccct

SEQ ID NO: 109749 - DNA, 99 bp, Glycine max
tctgttcgattttcggaacatcgcacatctcttgacacatgaaaacttttatagggcattgatgcatcatgactggcagggaaatcctccatacgatga

SEQ ID NO: 109750 - DNA, 392 bp, Glycine max
gtgtcaagtttctatcggtctcgccgattgtcaggataaaatccaaatggcactgcaaaatgggaaagaaaatgtaattaaaatggaagagaaattgacaaatgcggagaaggaaattgtcaaactcaaggaaaatgcgccacacaaaaagttgggagttgtccaggatttggtggaccgtttggccatcctcgacgaaatggaacagtgtctgaacacgttgtggctgatgccgaccgacagcaaaacggagttcgacccgctggcgaccacgcggacaattctgaggctgacggagctgtgcgccgcgttggaatcggagtcgtccaattatttggagtcgatcaacgagcgaattttgccacttctgttcgcggaaattgaaacgcgga

SEQ ID NO: 109751 - DNA, 401 bp, Glycine max
gatacatttcgtcttggggaccaactccatctcgtcaacaccacggtcgccccatgtcgaagtcgtcttcgagtcgctccaaaatgccatgccgtacaatgcccaatgccatgcaccgcccagccaaaagcattggccaacagccaggcttcaaggcaatggttggtcggcactgcttcaactgtttgtgcggacctgttcattttaagagtgctctcgctcatgttctgctggcgctttgtttgacatattttggctctgtgatattttgtccatcaacaacattccatcggctggacttgaaaaacggttcaagttggaataacgatcgacaaaaacggaagtgccgcggggcagattttgttgagattttggttaagatatcatttccaatggagcaa

SEQ ID NO: 109752 - DNA, 438 bp, Glycine max
attttacttctattattctagaattgctgcactttgtgccaaaggggaactgcagaaagcaaatcaatcagtaaaagaatttctttctgacctgacagagtctatgaactgaacatgtgggataaaaatgaagaattctttttattttaggaactaatctctcagtagtgccagcaaatagagcacatggatgactgatgacacctgcaggactgaatcatggctctgaagtcaatgctatatcagaagactgatgagattgggaactatgatatcattagtggagaattcaagttattggtcaaaggtacagaaacagaactaggaacagaattatctcaaatgctggatcctgtatgaaaaggcagctatataatatggttgataagcagctggtttgcctttttgcttcaatacataacttgctaaagtatgctc

SEQ ID NO: 109753 - DNA, 285 bp, Glycine max
gttataggtaagaaaattgtttttcttactagagttgatccttttccagtagctttactggctgttctttttggcgttaagaatgaaattctgagttctaacgccactaatcctatgctgacgcgacttcttgagaactgtaagagtctcaaatatctggctgatgagtgtccttttgcatttgtgaactagtatgtaatattttattcacttaaataaagcgcattactatgtgcaatgagtgtgtttaaatttaaaagaaagcacaaagaaaaaaaaattatt

SEQ ID NO: 109754 - DNA, 435 bp, Glycine max
ttgtaacgttgctataaacgttgttgttttcagataaacacgtgactcactatctatctatcaatcgatatctccgagttcagccgaaccaaactccgaagctatggcagagctccaaaccaaggttgaacctgttacggtcccggctccggtggatcccgagccaccgctagctgaggctccgccgctcgagaagaaagcggtggcggtgccaccacctgttccggctgcggcagaggaaaccaaagctcttgttattgtggagaaggagaaggagaatgagatttctgtctggtttcttagaaagcgttgggaaatgggaaatcaaaggaaaaagaactatggctctgtaagaacttctagttgcaattttactttctttttttttggtaaagttgttgcaatttaactgattttagtttatttttttttcat

SEQ ID NO: 109755 - DNA, 451 bp, Glycine max
tcttacgcgtgggcggacgcgtgggctttttctctctgtcccactgactttgggcgttacgcgtgacaattggaggagggcgctgttgatgaactcgtcctgctggagcagggcccacacgctgcgcttctccgccgcgtccagcgcgcgcccccgttgccggccacgggcactgccggcggggacggcgccgtcgtcgtcggcgagcggcggccaaattcggcgcaataaatgacgcttgtacctgcgaggccatcccagacgaagttgcagcacgtgtttgttgccgctccgtgtgtaatccgccagcgtccaattgcgcggcagaatgccaatgccgtcgtcgacaccggcgcacaaagtgtcgcaaaagtcgcccgagtaatggccgatacgccattccgcgcacagcgcactaatgatagagttggcccttaaaaaacggaataca

SEQ ID NO: 109756 - DNA, 443 bp, Glycine max
actgaatttggctctgggaaaccgggtttttgtctgaattagaagcctgatctacaaattttggcattctagtttctccaattgtgctggaattccgtctggggttttagatctggagaaattgatgtgtagcttgtgacaatttgtggaagaatttttatttttttcttgatttgcggagatgtggtagtttccaagtaagggttctgggggttttgtgctagatttgaccaatgatcaaacttagaacttgaacttgaactttttttattggctaaggttaattgttagtttattgttaacgggattcagcagatcttagttgttaattgttagcttcttcttttttttttttggttagtggggaagatttgatcccactatttcttcccatcctttcttccttcaccactttgaacttgaacttagttgggggacttggc

SEQ ID NO: 109757 - DNA, 486 bp, Glycine max
gtgtcaagaggagggaagagaaggaatttgagttggtcggaggaggtggtgacgtgaaggaggcagcagtggccgccggaacggtaacacttacggaaggagcagcaggggtgggcagagtggacgacccgcggcgggaaaacagcaaccgaatggttgccgcctgtgttgcgaccccctccgtcactgttaccgccaccgccgccacttatttcaataatcagacggggtttgccggcactctcggaggtggtggtggttccaaaaaagggatggaggcgaacagtaacccatccaaagcctcgaaaggagtgaccatgaccaccgcagaggtggaccagctcaggcaacagctgcaatcggtggttgaaaatggagatctcactgcttcgaatgtgtgtgttgaacagttggaaagtgcggtgttaagcaaggatacactcgaggcaactcgtatcggccgttttgtgaacgacgtgcggaagc

SEQ ID NO: 109758 - DNA, 377 bp, Glycine max
atttattctgaaagtgatgaaatgactgaagaaggggcggatactacatttacggctgctttgattagcgatggacgtgctgaaaatcagttggagcaaaagaaacccagccaattgcattccctcccattttccatggattttaatgggccggcattggtctccaaattcttccagactgaggatggcgctaatgggctcaaagcagcactgttccgaggacatttgcttttgggcaaaacggtcagagcgccggagggttttgcgttttatgcagtcaaagagagtgaacattcacaatcagaagagggagagatgagcacgtacaatgttgtggactctgttccgtcgatggatgtttgggagtacgacgaacc

SEQ ID NO: 109759 - DNA, 433 bp, Glycine max
ttttattcttcttgcaagcctctacttggcctttgtgggcattcaagtgagccttaagcctattaataccaccttccttaacctgtttatcacaataaatacacattattgtcactttttgtagcaccctcattaatttgtttacaatgtcctcaagctagatcatttttccctctaacattctaagaagtatttggagtggatgcttctttagaagatggaccttcaacaaatgacatcttcaagtctaattgcaaacattaacaatcaaagaaattccaaataactaaaattgtaaaaagactaacttaattagttagtgatcatatatggtatttaattccaattaagtacattaacttggattttcagaccttcgtagctatgcaaactattagagaactggatagtggatatacaaagattatacaca

SEQ ID NO: 109760 - DNA, 430 bp, Glycine max
ctttttgagtatagtttcaaatgatagcttatctatggatgactttctgtgattatgaaagtaagggtcttaaaatggagagatgactgaacaccttgctttcccttatttatttttccatctgcacatagatgaaaataatttgaatatgcatctcagaacaaattggtgatgtttctacattcctatcttgtttacagattaatcatgggaaaaaagatgtgtatccatttcatcttgtttccatcacctggtatggaaggatggttctattgatgaattcttcctgtcttctgtccttccatgtggccacatagatgtgaaaataaaagtagattcataatcatacttctcccttcttcctttgcttaaatgtttatctccatgatttagctgtaataaagatgtcgatacccccttgatttttttt

SEQ ID NO: 109761 - DNA, 421 bp, Glycine max
ggattaatcattgaaattaggacctggatctcctaggtgggatcttgagttatcccacaaacttcggtcagagccagctatgggtctaatcttcagtacacctacagttcctcccgcctctctaagaatgttatacaacgggtggaagtgaaggtcaaatctcaagaagattattgggccttgaagtttcttaatgttatagctggtgcaaatcaattattgtttgaaggattgactcgtgaactgccagtaataggctttgcagaagatatatggatggtgggagtaattgatgagattcggatgccattaacagaaaatgatcatagtccaattctaagtgacacaaagactcgatgctcgagatacacttcctgctgaaccgcagcgaagaaatggaaggcttcaattgatgtgctac

SEQ ID NO: 109762 - DNA, 316 bp, Glycine max
tctcttatggcgggcgataaaactgaaaaaatgccggggggaattcccaaggaggagaacgagttcataaaagactatattggttactatcatgacttcaaacataactgcgctggagtgggtgctggcgtggtcgctgccttcgccttaatctttggagctgtattcggggccttaaactagaacttgagattgcaggatagattgaactatatatcgaacgctaaatacaacgtaaaagatcccccatattctctccctcttcctgtttttgttctcgctttaggcttataataaaggtaattatcattgaatc

SEQ ID NO: 109763 - DNA, 515 bp, Glycine max
cttgggtttagtttttagctttatttttcactgggatttttcttctcctcccttcgcctctctctctctctccaattcaacttcgtagtggccatgaaagctcttcttccttaacgcagcagtctgctacttggcgaatcggtgtgtaaccatcacgacccattttcgcagcttcgcttcttcatgtgggtcgagccgggttcttcttcttcttccatggagatggaggtggatgcagtacaagttaatgacctgaattgtattgacgaacaatctctttctccagaatattctggtgtttatgatgcttttggtgaaccagacatatttcctcgggtgggtgaccagtaccaggttgaaattccatctttaatttcaaaatctgactattactggcttctaaggaatccccatgaggcagagagcacagcaagtaggactctccataagtttcgagttggattacccatcccaataatttggattaaggatgtagagaacaataggcacgatca

SEQ ID NO: 109764 - DNA, 460 bp, Glycine max
gtcattattctctctctctctgaattttcttttcttgctcttcgcgtttagggtttggtttcctttacttcaaaatcaaaagctcagcttcaccgtttctgagcgaaatggtgagaaacgaattttcgaatttccttttccggagtcgaaatgacaactccgacgtggtgagccgaatggctttcgtttgctgagcttcgctgaaattatggaatctgagaatttttcggttcaggattaagtgtaggtagcggtgataccttcaattggaaaatttcgaagtttggatttcatttccttgatggggatgatggtggccatgatattggcaaggagagtaacggtgttggctgatgtgatgggtgaatccatgaaaatataaaaaatatctgtttgaatgaagatgaatttgttttttcctgccatgttacggaatgcaaattttagtgcgtttgaatga

SEQ ID NO: 109765 - DNA, 193 bp, Glycine max
gtaatggatctactgaccatcttgcactcgatgttagtggggagtctgataatttgattaacagggtagataaggatgatgataaaggtcatgtattcaagtctctgagcactactggattcgtaccaaaacagggaaagctcattgcagatcgtattgatggactctgggtatctggtggccgggttctcat

SEQ ID NO: 109766 - DNA, 355 bp, Glycine max
ttctttcgtccgaagaaatgtccctttttgtcggttttcgttctttggtctctcgtggtccgtccaatgtcggtgttgttcagcttcgtttcagaagacgcacagtttcgccgcctccgtgggtcccgcgtaagttaaaccccattcatgaccagctttataagccggatcgggcactgatcgagcaggacttgagcagcgattcttttgtgcattcacgcaaattgtctctctccccctacgaaacattccatttgattcccggcgtttcgaatccgccggactgtacccaaaatcaatattcgtttgaagcttccaaacgaattggtctgattggtcgcaaaattggcatgac

SEQ ID NO: 109767 - DNA, 291 bp, Glycine max
tctttatttccatgtaacaggtgttcaccatggggggaggtatggcaatgtgaggctcaggaatctgtttctgtatatagcaactagaacttctttaaggccatagaatttcaacttctgtcatggtgatagtttgttctatgttgatttatgctcaagctagtaatacctggtgacttattgtagaagtttagtcgagctttttaactggttgcttcttgagatgaattcgacatattgtgattgcacctgacagatggcagggaacttcagattcgcaatggaccattt

SEQ ID NO: 109768 - DNA, 244 bp, Glycine max
ctccacagccagagaaaaagagagaggaaaatgtagacaaaattgggggaaggcatgggtatggggggattgggaaggaatatccataagcaaaatatgctatttctttcctacacctcccataccactgtttttcctctctttctaccccttcccttccttactgctgcctttctatatcaaacctccttcacatctcttcatgactgcttttataactgatagcactctacttttgaagcta

SEQ ID NO: 109769 - DNA, 439 bp, Glycine max
tttttccttgtgtttctctcccatgtgtctccttctttgctgagaattgttgtggcagacaagatcaaaacatgtcatgaagtctgggcttaaatttttggttttgctgtgagaatgggatttcagattcagaatcggttttgccttagagaaaaacatgtcctttttttatctatgaaaattgaagacagtgtcagtgtcagggagaaaaacatgtcctttggatgctgcattttagaagcggattatggtttgaccactgagagataataggaaaagggctaattagtacttccttctttacttgattatgacttcactttgtgagaaattttgggaggaagataaaagaaaactcagtttgactatgacttttcagcctctcccccttcacaattttatttttaattattatggttactgtttttgtttatatgat

SEQ ID NO: 109770 - DNA, 334 bp, Glycine max
cgctcctacgcgtgcgatcctcagatgcatcaaggggaatattgtaaacggcggtggtggactcgtagcagacatctcgtgcaggggatacatgaacagagagagcaattacgatagcaacagctacgcaccatcaaacgactacaacacaaggaccaactacaatcaggacagtgcatacagtcgtcatacaaatggatacgacattggaggaatgtcaatgttcgacttgctcagccacttcgacaggtacaacaacgataacggatatagaaagggaagctccagctccgaatcgtacagctcgtcaggcagccatgagaggaagagaaaa

SEQ ID NO: 109771 - DNA, 447 bp, Glycine max
caaacccaaacccaaccttcaattcaattcaagcagatagtgttgtttgtttcccccttcttcctccttcatcagcatagcattgttgtctcccctacaccataaaccctaaatccacgatgttgacttcagcatcctcatcatcctccatcttctccttcacccctaaaaccctaaccatacccccacagcaacctcgcttcaccgtccgggcccactccaaaccccccattctccccaacctcaaaaccctcgccggcgccgcggtcttcgccgccgtcgcgctccaattcccctccaccgcacgtgcctcccctccgcctcctctcgaaaccgaccaccgcctcaacgtcgaggagtccctctcccctctctccgacctcctcgaaaccaacgccgaggccctcgccgcgctcaagtccctcctccagcagaagctcgagctcg

SEQ ID NO: 109772 - DNA, 354 bp, Glycine max
tttttgatgatactcgcatggtcacttcttgtgaggtgtcatacaaagattgggatggttattgagtaatattcccataaaacatttttgtttggatgcaaagagaaaatacgaggaaagaaaatgaagagaagagaaaatgaaaaaaaaaaggttaattttcgatgggagaaagaagaaaaaagtgagagaaaaatgatcatgttaaatgacatttaaatctttacaatgtaacaatataattgagaaagcggtatatttgtcatttcatcaacttttctcttcacaaccaattttctcacttgtccagggtagaaaatattttaatgtgagttccacatatttttttcccat

SEQ ID NO: 109773 - DNA, 449 bp, Glycine max
tctgctcacgcgtccggttttttttgtattgtatgcgcatggctcatgtctctcattctcctaaccatctgtgaagtactcttcttcttcttcttcttcttcttcttcttcttcttcttcttcgatgagcagcataaataatttatccaatgatgtgttgggagaaatattcattcgattaccatttagattcactgcaaaatgcaagtgtgtgcaagcgttggctgagactaatttcaagtccttctttcccaacaaaatttgtgtctcgccagcactctctttcaccccgccaacttattctcggtttcttcccttcagatttggactttaacggcttatttttgctgttgactttctttcccaaacttatgatttcaaagaagaagaacctttataagaagaacctatcactttaaagtggaagttttctcttcagagacaaatat

SEQ ID NO: 109774 - DNA, 440 bp, Glycine max
ttctttcgtccgcccacgcgtccggcagtactgcctaaccgtctacattcagaaacaggtggattatattggagtgaatatgttgttaaagttgatgaacgaatggagattcatggatgagcttgcagtgttgcgagctatatacttgctaggttcaggtgatttgctgcaacactttttgactgtaattttcaataagttggataagggtgaagcatgggatgatgattttgagttaaacaccatattacaggaatcaatcagaaattctgctgattgtatgctgttaagtgctccagattcattggtagtgtcaataaccaaaaatcgtgttgacggtgatgaggaagctagcacagctggtgttctgagtactcctcgtcaaagtcatgccaatagctttggaattaatggccttgatatgctcaaattcacgtata

SEQ ID NO: 109775 - DNA, 408 bp, Glycine max
ttcgttacgcgtgggcggacgcatgggctttcctgatggtatggagcaattctttgaaggagacctcattcctaatggcgaatggaggctggttgataaatgtcttggcttggcactggtgaaccgatttagtgttagtgaggtattcaagtgtcttgttcactgggattgtggcactgtcaacctggagctttggtcccagagtaggcctgtttcagagcaatcccctctcagaatttcccatcagtacgaggttataggaatttcataataatttaactgatcatcaatgtatctagaatgttcgaaacagtgtagtgctgttacaaaacctgcacctaaaatctatgcataaaaatttcagtgttggttccttcaaaaaaaaaaaaaaaaaaaaaaaaagggcgg

SEQ ID NO: 109776 - DNA, 303 bp, Glycine max
  unsure (1)..(303): unsure at all n locations
tcncttgtttgtctcttcaattaaataatgtggggggatttattataaaaaaacctgcaacatagatactgctgcaaaatttgagttggagaggatggataatggtataattgttggtcgtgatggtattcctattgaagtttggatatgtgtaggagtacaatgtatcttttggctcactaaagtatttaatgagatttaagaagacgccacatacgtagggagaatcactttggttcttatacaaaaaagcatgaaagatatttaaaattgtgtaaattatagatgaataacacttataag

SEQ ID NO: 109777 - DNA, 160 bp, Glycine max
ttgatgtataaaacaaatgaataaacagcatagaacacttcatcttaacaaaaagatctagaggctgttctgtatgtcacaaacttcatagtgtccccctttccataacagaatcattctattcaccaagcaatagattttctctctcttcaatattaag

SEQ ID NO: 109778 - DNA, 487 bp, Glycine max
tttcacgtttccgcccacgcgtccggttacttataatggtgaatattacactcatttaattactttgttttataaaaaaatgcgcattccctttcagggagaatggaagtctgcacgatcatgaggttgctgaaaaaatgatgatttgtgttagattacatattattctcttatttatgattagataataattagggatatagttcttattaccctcattattagtctaatcgtaatcaatactgattctatttgctcatctaaataaaggcttagtgtggtcatccaagacatacaaagttctgtacaaattctataacttgcacgttgtgaacaattatatttgttttgtaaattggcagattgtgcagatcagactactggataacaatgacttgctacattaggtggaatagtttgttatttgctaatgctataaaaaatatatatcttgctctcagaaaatgtctatgtataagattatgag

SEQ ID NO: 109779 - DNA, 202 bp, Glycine max
cttacgttttcggtttgagattcgtgatcagcgcattgtttaagcctagaaaaaatagctgcgaatttttaaacattttttttcgtcgggacatcaattctttaccattgcccttttttccgctttaaaacgatgaagcgcttttcgattccacccgacattttggaaaggcttcattttgtcgccggtgcgcggacgggac

SEQ ID NO: 109780 - DNA, 377 bp, Glycine max
tttttcgcttgggtagtaactcagttttgtgaaagcaagaattgggtcgattttgcaaactttaatccaaacatacacatagtcattacgttagagatatactctctatgttttcatatatacatttcatttacattgtaacttcattgtaatttcattttagcttttctaggtaacagattaaccttttctgtcattagttacctgctgactcagcagtgaatcatatagctttagctatatattttccatttctttgtacttttaatccaatgaaatactcacaaagtcacaatttctctccctctctctctctctctctctggtattctgaatgctattatagtatcatgaggttgtaattgatccaagccatg

SEQ ID NO: 109781 - DNA, 379 bp, Glycine max
tttcgtgttttttgacggagttacctcccccactcaactccgttacgctctcaaccatggatcccttcatccacaagctccgtcgccaccttctcgcatggttccaccgatctcgctccggtgcggtgttttttgtgcggagaatttcgtataaggacgttagaagagcgacggacggtttccacagagtcctttacagcaattccgaggtttctgcgtacgctgccaagttcggagacggcggcggcgcttgtttggtgagagaagtgaaaggcttcgatgaaggaaacgacgatttctacagacacgtgcagttcttggggcgcttgcgtcatcgccaccttctctcgctcagaggcttcttcgtcggacgcaatca

SEQ ID NO: 109782 - DNA, 247 bp, Glycine max
ttcttgcctaatcacttcgattttcaaacatgcctcgaccatgggtggtctgctctcgtctcggcatcgcagcctgtcctgctcccatcccggaccgcactcagttggctgtgccgacctgatgcttcacgacacgaacgcgagcgactctggcgtttacatgcgggtcttctatccgacttcagagaaggagcttgatgacaaatcgacgaatgcggactggctaactcggcaggaatacctggaa

SEQ ID NO: 109783 - DNA, 373 bp, Glycine max
tttgaattttgtgtcattttgtagcattttttgtcggcttaccaatgtcgtcagctaattcctcttctgcgacagcctcaacatcgggaccaaccaacaaacgtcaaagaatgcggtcggaatgcaatgtttccaatgcatcggttcaaaaacagaatttaggcaataatcggcattttgccaatcatcgaccacgttatcgccaaccaaaaagggataatcggcggcttttagtcccgggtttggtttccaattgtcctgtcagaattcgttctgctgaactcagtgatttacccggtttctcatatgacccaattacgaagaaatactaccgaattttggagaatggtcccggacgtcccccagggtcaac

SEQ ID NO: 109784 - DNA, 443 bp, Glycine max
ttgacgcgtggggtttttccaattgtcatcctcagcaccaacatcatcttccgtcgatgggccacagcagttttttcaacaccaccaccaccaatttgtcccatcgatctcaccactgttcgacacctccggcgccggcatgttgggcacgttggcggcacccaccactgcctcaatcttcatgccgtccttgttcggcggctgcggcggggccgccgccggtgatggcaccatcaccgccgctggctcgctgatgcaaagtttgttgagcgcggcagtctgcagcggcgcattcccgttggtcggcacgactgttgcagcctcaccgctgactgctaccacctctcaacatcgcaaattgttcataggcgggctcagccatgagacgacggatgaacagttacgtgattactactccaaatggggcaaagtcattgactgca

SEQ ID NO: 109785 - DNA, 250 bp, Glycine max
ctctatcttacttctctctcttttgcgtttgcattgcttcctgcattttctttaccttccatactcacatcatgtatcgctttgcttctaacctcgcttccaaagcaaggtcaccctccaatcccactcttatttttacatgttccctttattcctgtcttgtgtgggagtgaaattggccatctgggtcacccggaaaatcttgcataatggatcaaaatttgaacttcttaattattgcctcattcga

SEQ ID NO: 109786 - DNA, 305 bp, Glycine max
tcgcttatttcaccttgattgatttaccacacaacacgacacaattatgctcctttgagagttatcagcaacagatctcaggtccgaattaccatcccttcttcacaaggttcgccttttgaccacaaatgttccatctttatatgcgtgggacatgcctgtgttacaagcacaagccggtttcgttttggtcaggtaagggcttgttccctttgacccctcaaacaatacgcaagtgtattctgtttcaagttctacacaccccctcaagagaggatatattcttattcgatgagtatgggttg

SEQ ID NO: 109787 - DNA, 396 bp, Glycine max
attttgctttttaatcagaactaccaaagcttccatctgatttgcagagagtttttttttttttttttcttctcaagggaccaacagaggcaaccaaggacactgtagagagaggaaagtggttctgttctttctgtgagtaacataacatgcaatagatactattatgtatagagagagaacagaagagttgaagaaagattgttgttcagttcgaaaaatttgcccatcaagtaccctttttctgttttcattttttggttggttttgctttctatccaaccctgctcttgattttgctgtggtggattgaaggttgtggcgttcctggatcgttcttctttgtggtggagacatgttggacggtcgttcctgcgttgttccgaggatgttttt

SEQ ID NO: 109788 - DNA, 330 bp, Glycine max
  unsure (1)..(330): unsure at all n locations
atacaannatacaccccccctcactcaccatttcgaacaattattattgatgaaataaattgcctttttttaaattaataaaaatattcaatcaaacatgtacgatactgaaaaagttgcgttttgaacgctagacaacactcttttatggttctattattaaacctctgttaacatttcttttcttttactgtatttatgtatatatgatgagtattatcaaatacgtatttacttaagctatttggtatggattaattgtttttggataatttctttttcttatatttattttacacttgaattggtctttctattatttcatcaaat

SEQ ID NO: 109789 - DNA, 348 bp, Glycine max
tttgttatctataagaattattttcaaaaaatagtttcagtgattaatttgttatgttatactctatcagacactataatagtgatttactcttatttgttaatttaattatcctatatgtctttatatatttactgaatgtcaaataaatattataacactaaagtgtaagatatattgaaagtctagctaaaaataattcttaaaattatgagagacaaattctagtttcaaattatcaatatatacttattttgttcaaagatatgacacgtaccgtaacaatttaaccttgataacacttccatatatctttttgttttgatttggattttacatacacgtgtt

SEQ ID NO: 109790 - DNA, 422 bp, Glycine max
ttaaataattattttaatatgtttttctactacgaagttatatataaaaaaaaaaaaaaaaaacccacaagaattgaaggctaggtaggatcccacaaaatacccacatcttaataaaatatttatagaaacatgtttataatgattgaagtttccagccggagagacacatagtaacacagagcataacatgttacatcatagaaaagtggaaacaaacaccttttatttatatattttattttgacacttttgttattcttaatgttggattggattagttgctgaaagttcaagcacggtaacaagaagaacggcgaatacagtatacgattacgaatacagaacagagaacgtgaaagtagtggaggaagaaccgaggagaaaatacagaggagtgagacagaggccatggggaaaat

SEQ ID NO: 109791 - DNA, 322 bp, Glycine max
tccacgcgtccgcgaaaccatattttttgaagtatcttgttttcgttcgaaggtgttcaaaaccttataattgagggatatatatatatagggatgcttgtcttctgagtttaagatctcaaattttcataatttcctcttccaaagtatttgtcgttttatgttaaacaatttaggtgtaggagagagggataggtggcatagtggagaggatcaaatctttgatgtacaccccaatccaaaagattagggatggagctggttaatctacaagaccactggctctaaaagccaaggaaaccactacacatttcccttagga

SEQ ID NO: 109792 - DNA, 305 bp, Glycine max
aagagtctcaaccatcacctgctcccatgccggctccattaaggtcctataggaatccactagatgaagaagaagcccctcatggatccaatggagagacttcttcacccatggagggtctcaacggtaatagcgttgacaatagccaaaagcgcgctgtgccgcctatgcacagctgcaaatattcccaaaagaggagtaagaaaactaaggagtcacagtttgatttgagtccttcagttggtggtatcagtgtggccacaagggaagatggtgatcgcgaattggttaatcttgtgctcatg

SEQ ID NO: 109793 - DNA, 436 bp, Glycine max
tcggtaaactcaagttaagttaaaaatttagctcgtgtgcttttgcttagagttttgaatttgtaagttaaggtaactttagatttaaattttgtatttttctgttgagcaggccctttatttttgttattctgcaagtagcagcaatgcaaacttaggagtagttcagaactaaagactaccttgcctcttaaatctttgaaaaatgctaattgctaggaatgcgtttctatgaaacaacttacagatagttagaagtaaaataagttgttgtgtttgttagttacccatttactttttagattctactatttttcctatacgaccatggttggttgtgaggcatttgtaacaaatttcatacaagagattttgctaaaaagcactgttgtaaatattctactttaaactggcgtcaaaactcaaaatgatttca

SEQ ID NO: 109794 - DNA, 470 bp, Glycine max
tcgttctcacagctgtttattttcttcctcttctcaactgtgttcgtgtgtatgcatttgagttgaaagccagactcaaggagctgaaagacaaaagaagaaacttggatttgaatcagccaaaatttgagttacacgtatgccctttattgcctttcaagattttctgggctttcttgtccccaaaactaatttgattgcagtgggcacggaattcaagaaaaattctcatctgaaatgttgttttgtcatcattgaaataaatttattttttttcatttctaactcaagaaagatgttgagcatatagtttgaatttcccatggaagcataattttttgagatatcatgcatagtaacctcaccaaggcagtattcatattttaaattattagtatactaccatgtcttgaaaaggtgcttagctagctatgcagatgaattatagttataattataatgatgataat

SEQ ID NO: 109795 - DNA, 375 bp, Glycine max
tcggtttatttgagttcggctgcgcacaatgcgtgcgtggagcaatacactgacacattttataccgaggaaagtatgcgtgtgagttacgaatcgatgcatgccgaggcatttttgacggcattggtaaacacgcggcagaccggacgaagttatgtgggagagttcgaagttgccaattactccaatcatgccaatgatatgtattttttcattgggttgcaccaaattccgatggaccgactcgacctgcgattgatggattggtattacccgcaaatgatcaaaaacttcgtgaaaggaaaagcgcccgacattgggtggaaaccccaaaattggaacggacgcaattactttcgcatcactttcaatgtc

SEQ ID NO: 109796 - DNA, 398 bp, Glycine max
gtcacacgtccgctcataagggctctcacgaggaggtgattgatgacatcggagaactcgtcttgtctggcagacaaaatataactattgatatctaaacgcacagtcttcaaattggaaagtacaccacattatccctatgtcttatattcaccttattcttaactgctttgagaaacgttactacaaaatgtagctgccttggtagggatagcctaagaaacgatatgggagaggctataaaaagaaagaggattgtgattgtattgatggcattaccataggttccttagatgatgtctccctgctggacctgtgacttcatttttcagatctgtcaggaacacccttgattttgacttcgaagatgacaatgaaggtcgttggcaatctactga

SEQ ID NO: 109797 - DNA, 306 bp, Glycine max
ctctctcgttcggaagaagttgttgtttttgttgggtgctccaacttttgtatgttgtctattgagcttagtagctcgtgccgtgccgaaacacattttgcaagtagtatgttttttaatccattgtttatccatgtaacagaaagcaataccgagtaaagatcagaaattacgtagttccatttcttggttccggtttcatatatcataacttgtagtgagcgaaaagaatatatatattttttacggtgtgtttgactcaatttattttgaagaattattttttaaaaaggacaaaaactcata

SEQ ID NO: 109798 - DNA, 212 bp, Glycine max
ggacttagggtcaaccagagtactcctgcattctattatccctctgtctgttctcagaagcggcaaccgaccagctggctattactatctgacttcccggccggcggtgaccgttgaactttggttggcattcagctaatcgcaaagtccactagtagccgctttctagaattgcccatagacaaaataaggaaacagttaaaatggtacgg

SEQ ID NO: 109799 - DNA, 426 bp, Glycine max
tttttactaagcccaattcttctgtgcaaactgacctggatgtggggaatttatcactgtgtatcacgtttgcattcccatgaacactttgaatcccaacccaccaaccagaatgttgtctaaaagaaaacccctttacagatttccactcattcctgtttttgcccttgtcatatgcctctccttcttggttttgtatcgctactatgcaaaacctgattcccagttcaatggattgtccaaaacttcaacaatgtcacatgcccctcaatgctccgggcaagccctcgccttaggggagaaattcgtgtggtatgcgcctcacagcgggttcagcaaccagctttcggagttcaagaatgctgttctgatggcggggatactgaatcggactttggtggttcctcccattctggatcaccatgc

SEQ ID NO: 109800 - DNA, 384 bp, Glycine max
cttttgactgagaattcaacttcgcttggtctgggcgaattctgttctccgcaatctcgcaatcttcgccgctggattcggtggttttgtcgcaatctcgcaatcctctttcattcgaagactctctcccctttgcctatgttgatagtacgattgtcgttcatttaaagaggctaggcaggcaggatcccaccactgaggtagtggcggatggctgagagagaacgagtaaacaaagcatagatggaatcggcaacctcagagtcgccgtatccaggatcagggaatggcgagatcccaattgatctgttcggttccaaaaaacatgctggagtctcacgcggtgctctagcattcacagatgagtctggtaacatagtcttc

SEQ ID NO: 109801 - DNA, 155 bp, Glycine max
tcacgcgtccgccgtgttggggtcaacgaggtctatctcttgcatggtttggttcatgaacggtaaacaattgtccacaaggcaaaacgctgctttggttcttaaggaaatgcatgttgaggcgttggtgaagtgtgtagatgttgttgaggatt

SEQ ID NO: 109802 - DNA, 369 bp, Glycine max
tttaggagatgaagccgaactgggccgccattgtgtttggccacggggcacagcagcagcatctggacatggcaattgtgcataacatgggcgagaaggaggccaaaattgcgacgtctgctggcgtgccgttgcgcattctgagcacaacgccaatgatggcaaacgtcgagggacgcgtgggggcaaaggcggcgccaaaaatgggaccatctgctgctggtcatgggctgagtgcccagttcgagttcagcgccatgtcggcacggatggcacaaattcagaaaatggaactgatcactccgtttgctgccagcggcgtcgaaagtattcgctcgctgcacatcaatttgccgctgcaaggcgagc

SEQ ID NO: 109803 - DNA, 355 bp, Glycine max
ttttaactttattattaaggctcttacttttaacttgaagggttcaacggtaaagttgcaccttggtggttggttggtcatgagtttaaatccaaaacagcctttttgcatactaaaaggtaagacagtgtacaatgatcccataccttcgcattgcgaggagcaaagcactgggatacattagattagatagacttctaacttcagcttcaaagtagcttcgaagctccaaagaagtcgaacctaatcctaccttaggaacataaagtggcttcttttgctttctgtttcgaatttcttgctttctcttattctcccaaattcttctttgcagggacaataacagtggtggttg

SEQ ID NO: 109804 - DNA, 268 bp, Glycine max
gtgtcaaacttcaaccggggctttcttacttctcttctcttcaactttttagtgctcctttttttttctctcgtgtcgggtccttgagcttctatttgatgatttatttccggcagcgagttgagttaattttcgtgtcatagtctcaatttggtggatgtgacccgtgtggttagggtttcacactgcaaaaacgcatgtgcctcgtgtctaattcatcctgtaacaaggttttgggacagagatctgaatattgcaagctatctat

SEQ ID NO: 109805 - DNA, 114 bp, Glycine max
gttacatttagccgtatggtccctgtggggaaacttatcatggggttcagaaaggcatcaaattctactgcaatacaggaaacactaccatataatatgcccaatgattctcat

SEQ ID NO: 109806 - DNA, 255 bp, Glycine max
cttacgcttccgcggacgcgtggggttgaaatcatgtttcaagataatgaatgctgcttgtacctggtcttttgactcttttctgatattttggtttgtttctgtattgtcaatgagacgtgttacaattcttgctcaacatttatttcaatggcaggaagaaaaagatggggaggcacctagggttttgcagcactacacagctgaaaaactttcatgctttggagaacttgctctaatgtacaataaacccct

SEQ ID NO: 109807 - DNA, 152 bp, Glycine max
cttactcgttcggggccgcatggggttgaaatgatgttccaagataatgaatgctgcttgtacctggtattttgactctctcttgatatttcggtttgcttctgtattgtcaaggagacagggtacaagtcttgctcaacatttattcgaat

SEQ ID NO: 109808 - DNA, 310 bp, Glycine max
cctacgcttccgctctaaatcggtagtccctcggtgtctatctctctttcattcccttggttcttgtgagaaactgccaaaaaaaatgcggccagttatcaccaacctcaaatcccaaagaacaagatgagcccaacatgttagccaccttgatccccaaatgcccaacatgtcaacaacaacaacaaatgcaaaatcaccatagtactcctaataacaccactcattagtccctttccctgaacgaaggcaagagcatagccaacatcttcttgtccatggacctcactggactattactctattcccg

SEQ ID NO: 109809 - DNA, 365 bp, Glycine max
atttgacaccaccaaaaataggttcttagttgctggtgacgagtttacaatcaaattctgggacatggataacacaaacatgctgacaagtgtagaggcagaaagtggattactggcttcaccctgtattagatttaacacggatggaatactgatgggtggctccacaaacgacaatggagttaaaattctagctaacgcaaaaggaattaggctgcttcgaacggcggaaaatcatacatttgatgcttctagagttgcttctgcagctgatgtgaaggtaaagagattgatattttgttaatcttttgcaagaacatcttctgaatccttcatgttaattcaggcacctactattggagctt

SEQ ID NO: 109810 - DNA, 409 bp, Glycine max
ttttcggttaggcaccatttgggctatatgtctatatcagcatataatactcaattatgtattgactttacattaggggaattctcataattggagagtggggaccattattagcatcaacatatcctgagattattattacagcaatagaaagtcttgcttttactaacagatctgagattacttgaattattgatagctaacagtagactggccacaaagagtgaccaagatttggttgacatataacaatagaaagaccaagagcaggagttatttgtgaagagttgcaaaattgtaagggtggcaacacaaggtcattctaacttatatttttttactatactagtcaattgtgtaactaaacatgtttcacttcacaatttttcactaatgaataaattaattt

SEQ ID NO: 109811 - DNA, 319 bp, Glycine max
gttatatttcgcacttattctcattggagagccttgcagggattcggcagtggaaatcactacgggcatcatttgatttagaaggaagtgagaggctgtttcaacctagtctcagataacagcaagacttcaaacacttgtacatatgaaaagaaaactgagcacaaggaatctaaaagtcaaagacatagttcaaatgaaccttgttgggtgttgaggccatccaaagaacttgagaatcttgtccatctagaagatggtcaagagagtcttagtcaacatgccatcataaacatttgcaagatctatgacttgaacc

SEQ ID NO: 109812 - DNA, 229 bp, Glycine max
gatattttctctctcttcattacacaacaacaaagtggttgttaatagcctctgttttcttcttgccaccaaaatctcacaccttccattgcatcatcattcataacatggctcatcccacctcatcaggttttgtcacctttcttctctctctatctttccctgcccacatttttttgttttttatgttcttgtattgcaactattatgattattattgtttctatta

SEQ ID NO: 109813 - DNA, 102 bp, Glycine max
gttatcgcttacgcttaatcctcctcagtggtgctgtcacgccttttctgatggggccacaaaacactggcagatgcatacaggtgaatattcaacctttga

SEQ ID NO: 109814 - DNA, 359 bp, Glycine max
gtttcgcgttcgaactggggcatcttgatgatggacaataacataacatgaacctttgaccaccacaactaacaacaacccccttgccttccccatccacccaccgccacaggcaccacaacaacatccatttcctcccgccgccgcaatcctccgcaagccccataaccgccaaaccaaccatcctcgaagaaggccccgacgacatcctctcccttcacaaccgccgctacgacttcacccccctcctcagcttcctctccaccacttccaactcaagccctgccacctcactcgactcaaccgagttccaactcgccgagtcctaccgcgccgtccctgccccactctggcacgcc

SEQ ID NO: 109815 - DNA, 436 bp, Glycine max
tcgatttgttgtctgctattagatatatttcaagttaattgattagaaccagcacatttttggcttgttactttggctcttttattctcctgcagtcttcttgactatataataaatttctatattctcttctaactgccatgaccctgtctatttaatctacaattttcaactctgtgggttttctttgttgttatcttgactaactcctgatttttacttgaagtcatatatgttcttggtttagcctgacgtgcatattatctgcccgcgtagaatccaagtaaattcctttcccatggctagactctgggagttattgtcaataccatggtgtaggacttttatatgaatgttttcttgggttattgctctgggtagtgtccagtgtgaggttatgcaattaacatgctgaaggtcatgtaagcttctactt

SEQ ID NO: 109816 - DNA, 129 bp, Glycine max
tttttccgcccattcgtccggattttcaaaaaaattttacacattgcaaaagtgttgcctataattgccaaaatcgacatggccactttcaatgtggcgcttctcatcattttaattggaattgggttg

SEQ ID NO: 109817 - DNA, 381 bp, Glycine max
tttttccgccatttttggcacatccgtgcattggaaggtatcacagaagcacaactgtgatagggatacatgagtcaggcattatatttctgcattaactggatgatatctctcatttgtttattaaaatgatttatatgttttaggttgctgtaaatacagtattacaagatgagagggacttcctgaaccacattgtcaagtctacaaatatgaagtgcctgactccaccgtaagttatctgattctgctcaggtcctgttgtagacactaattttacacaaaggattctctgtagcccaccctaacatgcaaatttctggcagttattgcgtatgttttccagagcatctactacgtggatctaaagacctatttgcg

SEQ ID NO: 109818 - DNA, 120 bp, Glycine max
ttaccgcccactcgtccgggtctgtaagctcaaaatgttagagcgctcaaagcatttgttattgacctattctttaaaaacatttgctttgagaggttggtggttcgaatccatctagat

SEQ ID NO: 109819 - DNA, 394 bp, Glycine max
tgccgtagtcaggagtgacgtgccgccgcggcagccggtggtggatccttcgccgtcgtggtcccccgacaacgccgctaatcggagcgattccttcaattcctcgcccaaccacttctccgatgctgaaattcagctttagtgaaacctgtgaattgtggcttttgacgttataggatggctctggtccttggaatcttttaattttgacacatttaattgaaattcatatttcacttaattttacaaactccagacgtattgaagagtgaagagtatcgacaattgttccgtcttccacaggaggaagtccttattgaagattttaattgtgcccttcaggaaaacctacttattcagggtcatatgtacctctttgtcaacttcatttgtt

SEQ ID NO: 109820 - DNA, 327 bp, Glycine max
acctcacatactttgcgggttaggctcagacccaatctctattattagtattacatatcttggtcttaattttgattgaagctgaagcatcttggaggaaccaaatggctccactcttgtaccttggctgcagaagggtgctcctgttctctcttcttttgatcttttttgtttctgctggctcagaacctcatcaaccagagagcaaagccttgactagtgatggcagcagcagaagcagaagaagaatgttgttgtcggagttggattctgaaaaggaagaatttgaacaacccctgaaaaagaaatccaccaaaaaccaaacca

SEQ ID NO: 109821 - DNA, 327 bp, Glycine max
aacgtaaccttgactgttttatcttcttctcctactctcacttttactctctaaaatttagtttttgctaaatcgttttataaaatagtttttaaaaataaaacacaatcaaaacaccctgtagtgtaccaattacattaaactgttttggaacgttaccatatgaatgacctagcaatctagaattattagcttgtatttttcctttttgtaatatggttatcttcattggaagtaaaagcctccagaggcaatggtttcctttatttttgtaagactgaatatgtcacgatataaagtgggagagaatatcacttacttccccta

SEQ ID NO: 109822 - DNA, 352 bp, Glycine max
  unsure (1)..(352): unsure at all n locations
aatgctagccagccctgnggccacgtacatggaataggattgaaaaatctagtactaccattaaatgatgccactagctagctagctagggagggacaaagattggtcatttcattggtgtcacggttgcacggtgcttgaaatggggtagggtggacccgtggagtgttgttttttttctccaacaccagcttgcaaggacttgactactactactactgctactactagaaccatcgtgattcccttgtggatttccttttggtactaccgcactagctagtaaaccacgcaaattccgtggctgcttgtgctttatttccttttcttttcatgtgggagagtggttgtt

SEQ ID NO: 109823 - DNA, 142 bp, Glycine max
aaagcatgtgctggattacatctgtatggtgtataagttagttcccattgactgcgggtagcgtgttactcggttattattgcactcgaattgatatgtttccttggttctgttttactattcatgtcacaaatttctcttt

SEQ ID NO: 109824 - DNA, 422 bp, Glycine max
  unsure (1)..(422): unsure at all n locations
caataacctttcaacanggntgtttttgcttggttgtgtgttttctctctaatcattcgaatggccaaagaaggacctaactgggacgggttgctgaaatggagcattgctcactccgatgggactagccctactcgcaatttaagtgaggaggatcgaaaatggtttatggaagcgatgcaagcacagaccattgatgtttgaaaacgtatgaaagagatcacacttgtgatgcaaactccagaacaagtattgaaagaccaaggagttacccctgcagacattgaagatatgttggaagagttgcaagagcatgttgagtcgattgacatggccaatggtgtgttttaaggatcttgaaggcttatgaatttgactttggtgatgatagtaggaacactattcatgttattgaagtactt

SEQ ID NO: 109825 - DNA, 507 bp, Glycine max
tttcgttctcgtgggttgattttttccatctgatttttatctagtgaagtaggaggtctgtgtaaaattaaagtttactttatttcttgtgcttatggagccaggctttttgatagagaaaactaaatatcagttcagtctgaagagaagtaggagggcctaatgattcttccatgattccatctaaaaataaaaacaaaatttatgttaaaactttaaaatgtgaagagaaagatatttttcaagctgagttaaacctagggtgctaaacttgttaaaattatgagataaattcatattttaattcgaataattatatttgagcagggcctgaccgctctgattaatatttttttcagagtctaaatttggcctggaagccattataggaattttggcagtgaagatactacattaattgttttagccttcttaatttccaattagttttacatgagatgtacagaggatgtgaatgtgaataaaatttgaaaggagacacatgat

SEQ ID NO: 109826 - DNA, 379 bp, Glycine max
ccttcgttatcgcccacgcgtccgtccacgcgtccgatgacctccaaatattctttttcggccaattatgttgcgctgagtttcggcgtctgtgcgcttttttgcgtgtccgcgttgttcgtcatgtgctccctcttcagagaattgaatgttctccgcgagggaataacggcggatttgaccgaattcaaagggattgcggatgatgcgtggaaaaaaatgatggaggacgaagtggcgggcgaagtgaggcgcattcggcgccaaactgtggggtacggccccgccgaagcccccgcggggagtgccggcggacaatacggcgcttctttagtggcagcagcacccaaaacggcacagttaccgaagtgcaactgcg

SEQ ID NO: 109827 - DNA, 211 bp, Glycine max
  unsure (1)..(211): unsure at all n locations
attagataantggaagaacaaaaacttaagccatttttcttgtttttgaaggtttttcttcaccgagggcgttttgttttgcaggtatttgaagtttgcgcttggaaaaacgatatatgttggcatatttttgagctgttttgttctgtctctgttttcgtgagatttacgtttcactatgaggagaagttaacacactagttgtgtattc

SEQ ID NO: 109828 - DNA, 422 bp, Glycine max
agtcacgtcacaacagctctcacccaaccagcttcaccgccgctcaatgacctccgccaataccaccagcaccaacaacaccaacgcctaccctcccgcaaacatggcccaccgcaccctcacccagtccaccacttcgacacaagcgtcgctggagcccgcctcgcccgacgcgagctcgcaaaccttctgcttcaacaagcccgctcctcgctcgacaccctccgctgagcacaactttttcggcgcgatcaaggagaagatcagggagcgctccaggagccggtcgcgggcctcgcgctctcgcgaacgctcgccaatgcctcccagccgtgtcagcacctccagctcgacctcgacctcgcccagccccagccagcagctgcgtcacgtcaattcttcgtccaccaccagctccacct

SEQ ID NO: 109829 - DNA, 447 bp, Glycine max
  unsure (1)..(447): unsure at all n locations
agacaataaacgtctccgncgcttacatagctgttaacttcctttcccagtatctgttacaattcaacattcacgctccaaagttcaaacctcacttcagattttgtttactggattactgaggtgaaactctaattctgattggaaaacatcaccaaaaacacctaaggaattgcattttaagttttgttcttctatgttttgatattggtttgtggatgatgtgttgtcatgcctatactgcagctgggagattaaatggtattggattttaatgtcgaggttgctggctgaatttcagaaggaaagtgttcaaaggatccaatccatacatgagacgcaatggcaacaaacacactcatgttagcttcaatttgttattattgctgccactgtgatttatgaataagtcactgtctcaaaagatatggagcttgtttcttccag

SEQ ID NO: 109830 - DNA, 217 bp, Glycine max
tgttttggtttcagacttgcacatattatcaagttggagcaaaatttaccgagcgagagagtgggattcatgcgctgggaactactaccaaatcatgagtgtgcctaattcctcctgtgtaagttgcatatgcttctgtgctgaactgcatcatgatcaaactccattcaactcaaacaaaccgagctaaattgttcttaatcttttttatttatta

SEQ ID NO: 109831 - DNA, 340 bp, Glycine max
caagttgaaggaaaatgtgagctcctctgaatgatattctctgctaagaccaaaagtgtcatagagttgaaaaaacttcaactattagagcttcaacgttgtctccggagtgattttctgaatgattttttcaaaccaattgcaaccgagatggaacatttaaaatcaattaagaaacataggcatggtaggagggtcaaacaacttgaaaggtttgagcagaaaatgaaggaagagcgtcagaagcggattcgtgagaggcagaaggagtttttcagtgagatagaggttcacatggaaaaacttgatgatgtattcaaaatcaagagggaacggtgga

SEQ ID NO: 109832 - DNA, 232 bp, Glycine max
cggagcgtgtgtgtgtgagggtacatgcattgcagcgagcttgagacagagaaagaagcagttcaagattgttgttcaatattgcaaaaaacatgtccattaagtactttcgttgcttgttttttttttttctttcgattttgcttcttattcaacccgaatgttttttgaatcattgtttctctctctctttcttctctctattattttctaccttacttatgaatgagct

SEQ ID NO: 109833 - DNA, 386 bp, Glycine max
tttcgtccgatagaaatagcatatgttaatctttggcaaaaagaaaaactaaaggaataataatttgacgaattagaatgttctcattcctcccactcatgagtgggactagtgggactgtggatgatattttttcttgttcataatatcagtgtttaaaattaaaactgtttttacataagtaaaagtaagaagaataataaaaatattaaactataataaacactttaatattaaccttttacttttagttgttcaattttaaaaaaatatgttggtaagattgaataatattttattcattatattaacatgagtattgtcgttgaattcatttttcctttacattcccatgtctaacataacatccaaagccttgattggaa

SEQ ID NO: 109834 - DNA, 200 bp, Glycine max
tttcgtccgttttattcaatttcccgtatgaacacaacgaaatgccggaaaggccaagagcaaacaaattaaacctagtattcctacactagaacaatcaaattgcatgaattcaataattaactattagcacacacaattaagcagcaaggaaaattcatcaaacagaaacgaattagagatttcaacaacagataaca

SEQ ID NO: 109835 - DNA, 358 bp, Glycine max
gcttattttttgaaaaatcgagaaattactcttcaattatataaaaacgattttcgtaaaaagattgccgcatttctccggatcgagggatggcgcaatcagctgaaaaaatagtttttgtgtgtggggctgacggcgatgatgaaaatggcgacggaagtgagattaagccagtaaagaccttactccaagcccttctactttcgcatggaacttcggaagtcgattttttgcgcgtttctgtgtcatcaaaagaaggacaaaagcaatgggaaaagccatctaaatcggcgatgaaaaaggcaatttcgcgtttggaagaagaacgacgtaaacgggaaaaagcaacaaattccgc

SEQ ID NO: 109836 - DNA, 212 bp, Glycine max
aatccagaccgttccttctgatgatgttcaggaacataatgatctcgacaaagcttctgaggaagtctcttctccctccaaagcaaaaatcccatcaaagctaccaacttctgaagatttttccacctggcaacggattatccgacttgatgcagtacgtgccaatgcagaatggaaggcatattacccctctcaagctgcagtatcagaca

SEQ ID NO: 109837 - DNA, 282 bp, Glycine max
acctctcgtacttttcatcctccacctagagtaccctcttttatgttctcttttcttcttcttcccctttccatttgacagtttagtgctcacctctctttgtttttttttacctcctcaagtgtgaaaaggggaatattgactcaatccattcaaaaaaaagaaaaaatgcatccacaacaaaacatggcatggggcgctctctctgcttattctctcagccagtgatcctttgatattttttctgatagaccggtgcagcttcgatttggtcctatctgc

SEQ ID NO: 109838 - DNA, 404 bp, Glycine max
ccttatacttgtttctatgttcacggccgctcacaattatggtaaagaaagttactttttctactttcacttctgggttttgagaattatgcaatttcatcatttaatttgatgcttttcttttttccattattgggatttcctccctttcccccccatcatttttggatgataatgtttgctcatgttgcattttcaaatgaaaaatcttattttttttttcaatacacccgcgtgtaatccttttgtttgcagatgatgtactgggacaaagattttttctttttcattaattaatttttgcacattttatttttatgtgattttgaatgtttgcgagtgtgtgattattatttatttgtgctttttgtatccggggaattagttctgtgatctgcagtgca

SEQ ID NO: 109839 - DNA, 423 bp, Glycine max
ctgtcgcgtgttcggacgcgtgggcggacgcgtgggatcctcaacaataccctgtcctccttcaactctcaaggcggtgtcatgtggagtgttgcctttgagtcacttcgttgtctcatgcagccaagaccggagacagcttggtgtcaatccggaggacggccatttgttgttttattaaccccgcttatttgagacgtccttgtgtggggaatacactcactttctcttgcagatagtaacgaattgtgcttagggaatgtctcagtactctggctgaacagtgcgtcgaattaggcgatcgggtgggtctcgcaccggactatccgcgttggtatctcgggccggggcaaatgggctgctgcgaacgttccagtgcccctcaattatgcagcgccagatcaggcacctttcgcatcgtgc

SEQ ID NO: 109840 - DNA, 245 bp, Glycine max
ccttgcccgtaataagagaaacctacaactttgctcattaccctaggggattatttatttttaactgtcctaaaatagttgacattgcacgttgttggggcatgacttttgcatggatgatacaaattcttcaggttagccaagaatcagatacccgtattggttggattgacattgttgttccgggaaatcaaataccaaaatggttcaacaatcaaagtgttggtacttcaataagcctagac

SEQ ID NO: 109841 - DNA, 393 bp, Glycine max
aatgatggttctgaggatgtacttgatgctttgactaatgatccttgcatggtaaaatttctgttactttatattatatcactccgaggatagacttcttttactatggagattttcttcccagttttatttggaccttcatcactggatttaattcttgcacattatgtttctaaatcctgcatttagctgttacagtatttgaatttttgtcaccattgcatacttccttttttaaatttgtttgggtatcattaattcgcgctgtttggagacaaccaatctctatagctggttgacctaccaaaggcaccagtattatccgattttgaatgacctgaaacctggatagaaagtgatattctattttatgcactgttggaaatcttgggt

SEQ ID NO: 109842 - DNA, 133 bp, Glycine max
cccacgcttccggatgattttaatgaagggccaaggagtagtaatacagggattgagatggaacacgattgtgaggctgatgcaatgagccttactgaggactctggacaagactatgatattgatggtgaaa

SEQ ID NO: 109843 - DNA, 99 bp, Glycine max
gcttaatgtcaagatcaagctggagaaagcttggattagtactcccactgtactatctgcaataggatcaagtgaggagacttctgtatcaacttcctt

SEQ ID NO: 109844 - DNA, 210 bp, Glycine max
cctttgctttttcacaaacagcgaactctctgaatatctgtctttctgtctggagcgctctctgaacatgtcgatggattccccgtcacgatccttcgtcatcaccgaaagagccggcatctccggtgagttactaacttcttcttctactgctcattcttaaaaatggtccgcgctaccggacaaacaactgaaagatatcgttctgga

SEQ ID NO: 109845 - DNA, 430 bp, Glycine max
ccaatttctattccatggccatcgctaccttaaaatttgcttgcaaacccaatctccttcttcgccccgctcccttccaatgcctccgcaaggttgtgcctaaatctctccctagggttgaggtagaggaacgtaggggctctcatcgagaacaagacaaggggactagcgaagaactcatatcagaaaataataatagcaaggtccgggcgtggaagaaactgaattccaaagagattggacttcgaaattccatgatagcaattccaaccaaaaaggttctgaacgtgctaaagaaaaaggggcatgatgtataccttgtaggaggctgtgttcgggatcttatactaaagcaaacaccaaaagactttgatattataacttctgcagatcttaaagaggttacctttatttcctattatatttctat

SEQ ID NO: 109846 - DNA, 201 bp, Glycine max
ccttcgcgttcgcacaaacagtggactgtgtatctttctttctttctgactgtgggggtctctgaccatgttgatggattccccctttcgctacttcgtcatcatcaaaggtgccggcatctacatgtgagttacttacttcttcttcttctgctcattcttaaaattgttccgtgcaaccgcacaaacaactgaaagata

SEQ ID NO: 109847 - DNA, 427 bp, Glycine max
ctctacgcttccgggccaccattatggtggccacatcacgtgatgtcgtctgcaaaaatcttgcatgggattttgaatttgaatgaatcttggttatgtttccttttgtgcttcttatcttccgaggtcatcagcacgatgctttgctattgaagctataatttacttcatatttctgattccattgggtagcttaatctttcaagatatcaatagctcaaaattaatttgtgaagatttcacctttggagttgttcggagattaaaaaaaacgagagccttttttgctttgtttagtgttcaaaaataagaaactgtaagatgtttgtttgtgtgcaaaagctcctgatgcacagggaatgataatgaggaggataagttttacctctttattgctctaaatattgttaatagaaagatgatgact

SEQ ID NO: 109848 - DNA, 186 bp, Glycine max
tcggttgaaacatagggaggttggttatgaggggaaggagcatttggaggactataagcaggagatggtgtttttggaggagtaggaacatttggtggagtgtaaataggtgaaggtgttttgggaggagtggggacattaggaggattataagaaggagaaggtgtttttggaggtgtaggaaca

SEQ ID NO: 109849 - DNA, 150 bp, Glycine max
gtccggccataattgtagtaatcaaagaccaactccttggcttggagcatgcctatcacctctctactataaaaggttcgaaggacaattcctagcgcgagcttgggtccggggaaaaaccatggagagtattggggaggagcagcacgg

SEQ ID NO: 109850 - DNA, 265 bp, Glycine max
cttacactttggttttgataagaatggtttccatggggcaaacggtgtgaaggtcactttctatgaggaggaagcccttcggtcaatgaaggcattctggtcgccttctgctacaccagaagcttctattaaagtagatgcaccttctaacagtactatttgtgcggaaggcattgagaaactgaatttaaagacacttttccctgagcaggatactgaggatactactgatcagaaaaaacccatgggtcttgacaagacctac

SEQ ID NO: 109851 - DNA, 164 bp, Glycine max
gttttacttcgcctaaatcccaaatcccaaactcctccgatgagggcaactctctctctctccccaatacatgttctcttattcttgatggctgctcttctattcgatccggacgttctatggaaccggagcttcagcccaagctggtccccgcgccggaggct

SEQ ID NO: 109852 - DNA, 258 bp, Glycine max
tttattttattagagacccaaaataaaaaatgatcatttatgagggatccaaaacatattttagccaattcaaaaatttggattgcatccatgactgaactttaaatctaacaagacattcatttttgtttgtaccagatgcctagaagagggagctgatgaatactttctgaaaccagctcaacagtcagatgtaaacaagctgaggccacatttgatgaaatcaaaagctactgatttgttggtcttccccatcct

SEQ ID NO: 109853 - DNA, 278 bp, Glycine max
cttacgcgttcgcccactctggcgtagtgttacgagaattgatgccgttttcgatttggctggtgccactggcgatgctacttatgtcggtacgcattatgatcggcacgctactctgccagagttgccacaatggacgcaacaatttgtcgaccgaatgccaacgaatgaacgtgcatctaatgaaaacgagtgaaaacaagtcgacatagggcacagaaaggtggaggtggcaaacgcgcaaagaattgctgagctggagcaacagttggttacac

SEQ ID NO: 109854 - DNA, 497 bp, Glycine max
ccttcgcgtccgcccacgcgtccgaaaacgcctccgtcgtcacttagccaccaccgtctcgttcaattccgagttggtcattaacaaaggtttggttgtgaaagatgagtttgatatcccaaaacgctcggtctaaaaatgaggtcaataagaacaagagggaggttgaagatgatgtcgagaataatgatactctggaagtgaagaagaagaagaaagatcacgagagggaacagtcgacagtggaacaagtgaaagagatgaagaagcttgagaactttttgtttggttctctatattccccccttgtgtttggaaaggatgatgatgaagtggaacctcggaaggctgccgaaaaagtttctgatttgttcttcactgaccgctctgcggatagtgttctcacggtttaccaggaagaagatgctgacttgtctgagggaagtcatgatgatgatgaccgccccttgcagaggaaacctgtctggatggatgat

SEQ ID NO: 109855 - DNA, 92 bp, Glycine max
ctttatattgctattcctttgtatgttgtttctaattttttatgattatgtaagttgtaatttgtgaccatgttatataaagattgaagagc

SEQ ID NO: 109856 - DNA, 167 bp, Glycine max
ttggctagctcagaccataggaagcgaggcatgtgcgaatgcaagcgatctctggtcttggatggctgccaagggcggatgtgactaccatagtgcaggttgacaagttgcactcggcgcaggaggagaggaatgctcctgattgataccatatgattggcctactg

SEQ ID NO: 109857 - DNA, 92 bp, Glycine max
tgtttgttgagtgtccttttgcatttgtgaactagtatgtaatattttattcacttaaataaagcgcattactatgtgcaatgagtgtgttt

SEQ ID NO: 109858 - DNA, 283 bp, Glycine max
tctttttcactcccaaacccaaccactggaactttcttccctctcattatcttcttcctttgttgtgtttctcaaatcgcctttattcagtatcctatgaggtatgcttttctgctgatccatggaaagtccatcagtgtggatggtcacacgctgcttctgtcccttctgaggaaccggaagccccaaaaggtaacaaaagggtcccaagacatgaaaggagagctctggtggagccttttgtgaacaattatagagcacagaatgctgggaaattcccaag

SEQ ID NO: 109859 - DNA, 347 bp, Glycine max
ctttcgcggccgctttaaattaatcaattactaatatgttattaaacagagatactcgtttgttttacactcaaaaccctacgcaccgccgtatacggggcgccgtcgcacacggggcgccggcgtactttgcacttggctttgctctggtcaacaggatgcacgataaggttgggctttcgaggaccaggactatcgttttggttagtgaaaaaaaccctaaaccctatactacgctcttctcaggaagaaaaagaacaagagatgaatagggcgagaactgaaggcttaactttcacgaaggagccgtttatggtggatacagggcctggcaagataaagaacat

SEQ ID NO: 109860 - DNA, 490 bp, Glycine max
atttgattttagtagattagattagattagatttctaaaactaagattagattttcaaaagaaaaattagattagtttggccaaaatattaaattaaaatatttatttctatttaactttaaaaaaaattcaaacaaatatttaaatttgctagttatgaaaaatatttaaaataatttaaatttgttagttataaaaataattcaaacaaaaattttaaattatttaaatttgttattgaaacaaatattttaaatgtataacaaatttctaagttataaaaaatggttgaaatgaaattttaaaatatataaaaattgttagttataaaaaatattgacatgaaaatttaaaagattttaaaattgttagttagtttttaaaaattgattgaaacgaaaatttatacgaaaattttgatgaaaccaaaatttaaattttaaaatatgattgaaataaaattttagaatatattaaatttgttagtgtt

SEQ ID NO: 109861 - DNA, 386 bp, Glycine max
ctcacgcgttttagttagtgttggtcaagaaattgttgaatgtttttgattctgtggtgaagagagaatttggtttcttgagaagatgtatttggtgttatttgtttcctactcattttaaaattcatcttgagttactgcaacatagtaataagcattctctagtctgcctttaaaagtaaaactcatttcagaagataagattaatattagaccatctgagtaaattgcccgtctaattttttggtaatttagatattcatgcctgtgtttcggctgttttgtgaattcaacatataactattccattcatcttcttagaacctgctcaaaactcggttaagtacttaacttggcataggacggcgtcatctcgatcctcctca

SEQ ID NO: 109862 - DNA, 438 bp, Glycine max
aatttatatttgatgaagccgcaagaattttctggagctgacaatgagcagccatctccgagtcgccactcaataattggtgttaagcgcaagttcagttcgattgattatgcgtcatctaacagtcctgtaaaagtgctgccgagttttactagcacatttctgcctgatttatcaaatgcgcaagtgttgaagccaaagcccaccaatgttgatcgtcttcctttatcaaatgaagaatttataactccaactcagccaaaaaagcagcaaagtcgtccaaattccccagcaaatggcgtatccaaattgatacttccgagaagccgagtcgcttcaatacgtcgtgagtcggattgcaattcagagaaaggatttggtgaggcggaagcggcacacgaaaaaatggtaaaatcggcacagcaagtcgcgatgggt

SEQ ID NO: 109863 - DNA, 102 bp, Glycine max
gaggacaacgcgagcgggtgaatggttcaccgctcgagtgtctgcatgtggactatttcatatggcatcccctagtgcaccagagacatcaaagacagagtg

SEQ ID NO: 109864 - DNA, 412 bp, Glycine max
cccacgcgttcgcccacgcgtccggtgctgggtacgcgatgcgaggcggaaccacaaactcaccacacaaatgcggcaacagaaaaacatgcacaactcaatgctgcactcaatcgcgtgggcgcattcgagcgtgcaccgctttacacccgcatcattcctcacgagtccgagccggaaatgtgtcgtgtggcagaaagcactgcgcacagtgtcgtgctgaactccgcataccgaagggaggaagtgatcgaaagcagcgaacatatcatctggcaaccgcactttggtggacagtttgtgcacgcatcaaggcgtgcgggcgacgtgtctgccctgctacaacttcagctagcagagacgagcgcacggtcattgcaagcgcagcacatcatttgggtagacaatcgac

SEQ ID NO: 109865 - DNA, 378 bp, Glycine max
gtttcctaccccagcttctctttctctctgtttcgaccactctctttggtatcaaaatccagggaaatctcgggggagctcgaataggaattgtagccaaaccttctgctgaatttgttgctggaatacttgggatttggcttagtggaggtgttgctgttccgcttgcaaccagctatccagaagtagagctcttgtatgtgattaataattcggatgtatctgcaatactgagtactgaggatcatactgaaataatgcaaagcgtagccaataaaagctcttctcagttttttcatcttccacctgttctcaacaagtcttctgagaaaagcagagataaacattcacagaatgtgggaattcatacagataaaa

SEQ ID NO: 109866 - DNA, 317 bp, Glycine max
atcatcattctcactttcactggagccgcagttgaagaggagaagatctcaggaccagcaaatgcgattgccttctgttagtcgtgtgtcaattgatgttcttaatagccctcattaataatgatcttagtatttacttcaaatgtggtagctttctttcatatcaatctggcagttatgttattgaaatgcaactaaattatgttcttagttatagacatttctagccaaaatttgaaaattaatgaggcagagacttagatacccttctccacttgtaagtctacctgagttatactttcagtgcagtttttact

SEQ ID NO: 109867 - DNA, 285 bp, Glycine max
gcttattctcagctttcttaaggttctttttgtttttcgatctcgcatttttattgctgtaatcattctcgctaatgtcaactgcccccgcgccgtcttcgccgccggcgaataacggcaccgcgcctccgccgtcaactccggccactccctccgcaccgcctcccgccacaccttccgcgccgccaccctcaactccgtcgtctcctccgccggcaactccgtcgtctcctccgccggcgacaccttcctcgccacctccggcaactccttcctctccccctc

SEQ ID NO: 109868 - DNA, 351 bp, Glycine max
gtaagtttatgtgagaagggataagaagcaaactgagattcaataggcctgaattattagtgttagtgtagtaattgtgaatttggtcagctgcttaggcagttatttgagtagctatggatatcaattattatttgttgtatagtgtgtctgtctttatgcagttaggcagttatagaatggtttgctagttagtgtgcgatggcagcgatgcattatatgtatggggcttggggtggttatattcattcgatagttttactaattgctatatcttgaaggaggagactccttgtaagaggaataccctgtgttgtctatgtcttgtgcagtaattctggcctaaaaact

SEQ ID NO: 109869 - DNA, 172 bp, Glycine max
ttctcccctacttcttgcttgattgtgcgcttgcgctagattttcttgaaaacgactcatgatctagagatggaggatcgctcaacgccttacaactccgtttattggcctgctccatctactctggagcattagaaggagatagcgcctcttatcgagaccggatcgtact

SEQ ID NO: 109870 - DNA, 376 bp, Glycine max
gtttaagcatctcattcgtaggacacggtattgccagcatacaagctcttgaataagcattgtgttccatcattggatttggataaaaataccattggaagatctagttcacgacttaaggacaatgtatcaacgacaaatgtgcacaagaaatatgaggagtttggtattaaatactgtgcagataccatggacacaacagattcacaatcggagacttttaagtcatactgctcaaaaagtcaagttgtatctttcatatgggctgtttctaggagtatacttccttctgaattattaggtactcctcctacttggagaataatgaggagaaatatttccaagttcatacacttacggagatttgagaaattcc

SEQ ID NO: 109871 - DNA, 259 bp, Glycine max
ttttccgtttatatgtgcacccattttgagaacttcaacttgttacttaattactctactctcccctttctagcttgtgtgatcttcttcttcggatctctcttcatggcgtgctgattaagtgccaggatcaaagctgagagccctacacgcataggtttgagttcaaaggatggtaacaaggaagaagaaggcttaagcagcaaggcctcaactgcctatgttcctccaactccgcggacggagggagagatcttga

SEQ ID NO: 109872 - DNA, 293 bp, Glycine max
gtttgttggtgtttcacttgcttttgtcattcatgagtcagcacacccacatattggtaagttgattcgtctaggttcaaaccatatgcatgctcttggtcgcctcacatgtgtatcatgtctatcgaattgaatcaaattatagatactatcttgcattaatattgaagaatcatggccttatcactcatatattgttaattaaaaaactactttctttcaaatgagtaccttgaacctaaaaacgataagagactaggatcggctgtttatgatatctggatacactgaat

SEQ ID NO: 109873 - DNA, 212 bp, Glycine max
gttatatttaagttgaaagtgattttcaatgcactgccttcccaacggcaaactttgctgttcagtgccacgctcacttcggccctcaaccgactcaatgcagtgtccgtgcggaagcctttcctttttgaggagaaagacacagtgaaaacggtggacaaactcgagcaacgttttgtgctttgtcctcgcagtgttaaggatgcttacct

SEQ ID NO: 109874 - DNA, 410 bp, Glycine max
gtttttgggggtttcacttgcttttgtcattcatgagtcagcaaatccacatattgggaagatgatccggccagggtcagaagttatgtatgctcttgttcgctccacatgtgaatcatgtacatagaactgagtcaaattatagatactatcctgctttcttatggaagaatcatggaggtatcactcatatatggttaattaaaaaatactttctttcaaatgagtaccttgaacctaaaaacgatacgagactagtattgggtatttatgtatctggatacatgaataagaacataatacatttataaactttggaaagaaaatttttctgatgaacaacataattgcggaaccctttatgaatgaaagagacctttatgattcaatacatgtgcatatggagtatt

SEQ ID NO: 109875 - DNA, 205 bp, Glycine max
atttacctcttaccgtttccgttcaggattaataagtcacatcccctgttgttgcttcagaacaaggaatcttcttagattctttgtctgagtctattagcgtttcacaaatagagagagagaaacagatacagaatcagaagaagaaacttttcttatttatatacagcctctgactgatcggtttttcggaaactctttttcc

SEQ ID NO: 109876 - DNA, 391 bp, Glycine max
tttcttttcaaagtggatatttttgttatttgcagcatgtactgctttctgtctcttattatgtgttagtggacatcctttgatatgacttacataggttggtattctccgttaaaaccaagtttcacttatttgaaatgcagaaagaaggatgcaatctctagttacattcatccatacatcaacaagaaattgctgcagattcgtgatggggtgcccttggaggacattatatgttcaagtgatgagggaaattcttctttggttgaatcctttgggggtagtgcctgctcaagtacccaaaatcagaacttaactcaagttgatttttcaaagcctgatgaagtaaatatggagcagttggttagggctataaaaatgggactttttg

SEQ ID NO: 109877 - DNA, 256 bp, Glycine max
cggacgcgtttgagagattgaacctgtttctaagacatccaaatcgtcttcatcagacatcgagattgagatagctgagcttttgtacgggttgaagacttcgaagaaccacgagtcttctataaagctagaagcaagcgtcagtccctctgatgatgctgagaagaagaaaatggaagacaacaacaattcttccaccctgttttcaaataattcaactgaagagttaagcaggattcagattgagcaacctgct

SEQ ID NO: 109878 - DNA, 362 bp, Glycine max
tttacgcgtgggttcatttctttgattttcgcacagaaagagtgcgaagacacacagagagagaaagagaaacgaaaaaacctaatcgaatttccctctttttttgttttgtgtgcgtgtgtcataatatttatttgaatttgaggagcggaggatctgagttagggtttccaatcgtatttttttttaaccgaatcggaatgttggttcgggacgcggtttcgcggcaattctagctccgatctcaggggaattgctcgaatcttagggttaaggaatggacgttgattcctcgatggtgccggagcccgatcacgatccgccggtgcagaaccatgccgagagagaccagctaggagagt

SEQ ID NO: 109879 - DNA, 278 bp, Glycine max
attgactcggggtgtgttgactcagcgatggcggaagaggtgactcgggtgatggtggcagtgaacgagtcgagcatgaagggataccctcatccttcgatcagcagcaaaggggctttcgaatggaccatcaacaagatcgttcgcaacaacgtctctgccttcaaccttctttttcttcacgttcaagtccccgatgaagatggttctctttctatttccctctcttttctttttaattgttctttgttgttgtgtcaagaaatattatgattact

SEQ ID NO: 109880 - DNA, 157 bp, Glycine max
cttacgcgtgggcggacgcgtgggcgacaataaagttgtagtaggacctgtaggaactctgaaaatgcaattaaagattagtttttcttttgagttattcgagacatatgttgcagatttgtttatatgaaatttgatttctatttctccattggac

SEQ ID NO: 109881 - DNA, 332 bp, Glycine max
gtcttggtaggatctctgtgtttagaagcttaggatttttggtctaggtctaaaactttaacaatagggcgagtcggccggctgctgtccagtttcccttgatataatttgtggtttgggtgtgtacagggccatattgtcagtgtgttggaactgcctgtaacttgaccaagggtttaatgacttgcatactgagatgaaactgttttgctgcagctggtagactatctgctcctgttaatttgggaactatattttttagaggtgtcaagttatatggatgcctgggtcagagttcctttgatatgtggcttggatgttgatctataact

SEQ ID NO: 109882 - DNA, 408 bp, Glycine max
ttcacgcgtccggaaattgataggctcatagatatgctcagagaagctaatcctcgcgaacttcagaaacttgttgttgaaaacatccttgctttcaatccaagcttttgggtgcgacttgcagcgagaactgatacttgcaagtctgacgatgataaaaaagattatgaagaattggctacaacggtcatgaatgtggtggattgcgtggtgcataagactaaagaaaagattgagtcttccacagatgtcctgaagggagtactaaaacctgtgattgatgctgaaggagagattccatggcctcccagagatcctcaggcactaacattgatggaaaaggaaataagtcaaagggagcaagaaggacagctggatgaagggttccttgctgaagttaatgcacag

SEQ ID NO: 109883 - DNA, 210 bp, Glycine max
aatcactgttggatgccattttggtccctttttaagtgcaaaatgcgcaaattcacagattggtggcaaccctcgctcccgtctgtccatccaagccggccgtcagcacatcctccgacttcgggaggaaaagccgtctctgagtgccggacaagtgcagcaaatgctggtcgaacggggcatttgctcccgccaaaatgtgccgagcgc

SEQ ID NO: 109884 - DNA, 172 bp, Glycine max
ggtagggccttaaatggtatttaatatgctttacattccaaaatcctagaaggtggcccaagggcttaacaagggcagaatttttgaacaatacaacccttctttttatactagtgagggcttgactccaactaaaaggggttatggaagaaaccttccaccccgcaaacaa

SEQ ID NO: 109885 - DNA, 338 bp, Glycine max
ccctcgcgtccgctttcccttcacattagcctcccaaacagagctccttcttcaatttgcactgaaggggattcaccctttgatgctgaaggcttcaaatcacacagtgatggttcaatcaaagggtgcagtatcccctatcacacagacacacagctttccttagccaaccctacaaatactacttatactccttctgaggctgaaagcacatggcggaagagaaactgtgttcggcttgatgctgagggtcaaataagactcattaatggaatccctctctacagtaacctttattgtttggatactattccctcaatggagagaaaccaacctac

SEQ ID NO: 109886 - DNA, 149 bp, Glycine max
cccacgcgttcgcggacgcgtgggcacgatcctaaagctcccaacaactttgctggcttcatggacttgctcgctgtccctgctgattattatgccccttctttattcgactggccccaaaacaccaccgacacgtcagaaccaccacc

SEQ ID NO: 109887 - DNA, 258 bp, Glycine max
gacacgtgggcagaaggaggtactttgtgctgtatgatgtggggtgaatacccatttcttggagacacacttgacgacacaggatgacagaatagtcgatgatcctttagttctgccagaggacatcaacccccagataaagattttaataggaggattactatgcgaagacccagaactaaggacgacattgggcgatgttgctgatcatatctgggttgttgaagacgatgggccaattgccggctacttatgttg

SEQ ID NO: 109888 - DNA, 467 bp, Glycine max
cccacgcgtccgcccacgcgtccgtgctgggctaataatggcaatgcttttgatgatgccctcctcatccgtcgctaaaaaagatgaagaattttcagtgttcataacgtattgtggaataacatatgccgttcaagtgaaggccacggacaatgtggaaatattgaggcaaaaaatcgggaaagtgattgaaattgagcccggacaaattggaacaattagaggcttccaaaaagaacttacggacgaaaaaacattgaaggattatggcattcaaaaattcacaaacattctcttggaatcaacattgaagtgcgcacagagaaaacaagaaaaaaacaacaacggaagattagcgaaaatgtttcccgttgatcactgatcagccgccctttttgatcgattcaaaaacccttttttgggcttatctgtctttcttttcattggttcattaatcttggctatct

SEQ ID NO: 109889 - DNA, 322 bp, Glycine max
ttttagctttttctcctgcttctgcttctgccattcttctttattattctctgcactaattttaagagcatgatacatgatacaggaccctataagggagggttttttctcatgcatgtggctagcagcagcagcacgtgcaaggtggccatgagcatgaccatggtcaacgaccctttgaggagaattgggaggtgtgaccaaaaaaaagaagccattagtggctttgaaaatggagctgacaatacttctgcagcaggagcagtttcttcattctaatttggagctatcctatttgagctttttactactactactaccc

SEQ ID NO: 109890 - DNA, 268 bp, Glycine max
catttttccccctgagtcccctgaaagtcacacgacacagaaaaaccgaagaaaaggaaccgacccctcacggaaacttgattccgattgtagtttagaatttccctttgatgagtgagagagtgaagaaagaaaaacaaacgggggacaaaagggagaggatgaagaacatcttcaagaagcttcacataggtagcagccacgatcctcatcgatccaatgagccttcgcctcctgtgccgtcgccttcgtgcgccaccgatcagtc

SEQ ID NO: 109891 - DNA, 132 bp, Glycine max
ctctcgcgttcgttctcatggatttttacattggcatccctgtatgcaaccctggcgcggacaaatgcacggcctaaactctctcttaaacttttccttccaagacttcctccatgaccctaataaccacac

SEQ ID NO: 109892 - DNA, 415 bp, Glycine max
gtttgagtataggcgcagtgtgaccaatctccttaagattggtttaagatgtgggatttccttttgtcttttgaattgactgtgctgcacgtgggataggccagatcaggctttgaaagacctgagcctagcctacgatgactcacacctaaattgtaattaaagtcttacttgattataggaatagaagttatggagcagtaacgtgtaatcaagtatgatagtttaaaaaaaaaaattaattgtatccaaaaaataatattatatattggtacccaaaaaataatatatatatatatatataggccggacctaaccttttaattaaataggccagttcagactagactttatgtaaatcaggtcgtaggcccctgtaggccggcctgacctattctcacccctagctgcacgt

SEQ ID NO: 109893 - DNA, 290 bp, Glycine max
ttcatatgcacgttcttattcactctaataccatctctaacaactcccaacaaaaataaataatggtttaaatttgggggaacaataagggggaataaacattgggggaagcgtgctaaaaagagagggtagaaaatatggtggcggatgatatgatgctgggcattagaggcggctatggtggttgcttttcttatgcttattccaaagcgtattcaataaggtcagaaaaaatcttcgaagatctatccctataaatatgttcagaaaaccgttcttttctcttttat

SEQ ID NO: 109894 - DNA, 131 bp, Glycine max
cttctgcctctcgtggacgcgtgggctcattgttactcagacttgttgggtccctaatggcaatatcattctccaccgttttcaaaatatgtccttaaaccccaaatgctattattgttcactctccacac

SEQ ID NO: 109895 - DNA, 370 bp, Glycine max
cccacgcgtccgattcagatgtagaagcaaataactttgatgctttgatgatgatcatgatgatttgatgcaaatgcgcttttcaagtttaaattcaagataatgattcaagaatacaagacacaacatcaagatgatcactagtattttaggaagggaattcctaattgatatagcaaaaggtttggccaagtaatttaagttaaaaagtgtttttcaagagatttattctctggtaattgattatcagaggatgtaatcgattaccagtggccaaaaatgatttacaatagctattaaaaatttgaattcaaattttagactgtgtaatcgattacacaatattgataatcgattaccagcagttaat

SEQ ID NO: 109896 - DNA, 317 bp, Glycine max
ttccaacgaaaagaattcgattattgtatcgattcagcaattagaactaaagtgttgttcccaaatggagaagttcaccagaagcatgctggtataatttcaggaacagctggaaccttgttatttaactctttacttaatacaatcgctggttatactatattaaatatgatgcgaatgtactcattccaagatcaattcgattttattaataaaattgaagatccaaattggttgggtgatgatttcgccttttttacatactacgatttcgacttggaacttttttcccatttgatgttcaagtattttaacgt

SEQ ID NO: 109897 - DNA, 100 bp, Glycine max
gcggtttggttcatctttcaacgccagttcacactctctgcttcgcgtgttccaacaagtgcacgttctaatcaatggccagcgctcagctcacagcaat

SEQ ID NO: 109898 - DNA, 103 bp, Glycine max
tcggtatatgatccttataaaagtcaaggatacagggttttgtaagaatattgaccgacgtgatcaatctgcatcaaggaatattgttccacacctgacaatt

SEQ ID NO: 109899 - DNA, 66 bp, Glycine max
ttttcaaagaacgaattgttattttttcctgattttagtaaatattgaaatgttagtgttgtttat

SEQ ID NO: 109900 - DNA, 314 bp, Glycine max
ttctactcaagttgtggcgtatgggtctagccgtactcaaatggttctaaattgtaccgtttattggcggggcctaatatttccagtgcttaaagcattgaagatgtttacaactcgaagagatcggtctgtccattcttttacgaaagctgacttttctgaatttgagaaatagcaaaagtcttattaggttgccgcagtttggagaggacctcattcttaaaaagctatatcttgaaggatgtcaaagtctgaggcacattgatcaatccatcgggtttctaaagaaacctcggtcatttgaatatcgaaaa

SEQ ID NO: 109901 - DNA, 385 bp, Glycine max
tccacgcgtgcgattttgagacttaaattacacatacatcactggagatattgatcttcatttaattaattacatacaccatactcaaagaattttaagcattcatctctgaaaatatgggaaactgttgtgagccggcatcatcaatggagtgggacggcgaagattggagtgatttgacgacgtccaagaagacaatatcaagcaaggtgtttgacgaaactcatgctaatgctgatcatggtcatgagttgagtttagggaaagtgcaaaaggagaagtttatgggagcgctaagagcttctcttgatgccaattatggtaaggcaaagataaagatttcaaagaaagagttggaagaattattggagaagcaacaagaaca

SEQ ID NO: 109902 - DNA, 406 bp, Glycine max
ggggtgtctctccacagaatgctatgttatggagcataattacatctttaccccagccaattgtagccgttccttcatttatttgtgctgatgcattcagcaagtttcttcctttttgtacgggatttgctgctgggtgcatgatttggatggttattgcagaagtgcttcctgatgctttcaaggaagcctcagcttcacaggttgcatcagctgcaaccctttctgtagcatttatggaagctctgagcacattctttcagaatttcagtcatgactacaactctgaggatgcttctggcttttttgtttcattactttttggtctcggccctttacttggaggaattattcttgttgtatttgctcttgccttacgtcttcagcatgctctcctcatgagcac

SEQ ID NO: 109903 - DNA, 315 bp, Glycine max
ctcacagaggtggacctctcctctatcgtggacgcgttgttgtcgctcgttcactctcacagaccctcgcacaagcctctctcgttctcgttctcgttctcgttctcgctcttgtagatcctcgttcgttctcactctcgagctctcgagcttcttctctgggtttaattcaaagcgttggagtttttgaatttgttggttcatgtgcagcaccagccccaaactcctgctcaatcctgagttcagcgggttgcattgtctactgctgcaaatatgtgcaagaagcttccttagatgcagctgattttgtgatgg

SEQ ID NO: 109904 - DNA, 179 bp, Glycine max
cttacgcgtgcgagctgactcctttatctttcaactaaactgcgctgcgtgagacttacttgtttttttctgcaaacgatgtcgtgccacatttattccttttctcattattgaacgccacacagacaccgttgatgaagctatctatgagtcctccggcttgaacagctttcctgatc

SEQ ID NO: 109905 - DNA, 165 bp, Glycine max
gggtacggatagagaagactatagctcgagttggattgaaagatggacagagaacactttaagaaggagaagccttggaggggaactagaggcgtgcaaatatggatgggcaaatggtagtccatgaacatactcaacacactggaaaagaactccgcgaggatg

SEQ ID NO: 109906 - DNA, 279 bp, Glycine max
ttcttcttctcctctcggggtgacccctctcactctgggactgtcgatggcaaataacgtgttccttggaaagatctgaggattggttctcgggagggaacatgaaaagaaggataggatgaattgatccagctactatggctgccaagaaaagaacacctggacaagctgtgatgagacaaggatggaataagggatttgacccaaaccttgccgatcgggttttataaaccactcttccatcaacacagaagtcggaccctccaggcaccccatcat

SEQ ID NO: 109907 - DNA, 351 bp, Glycine max
ccttctcgtcctgttaaaactttggctgtcaaactagccaacatggacacatggacagtagcgtgagcttatagggtctttcaactcctcgtctagatgtaaacggattgatgttctcagagcatttaaatggtgctgaaggctatgtaaatgacaaagagcatccttctgaattggaacttaatcataactcagctgaagatgtaaaaattaacaccatgacacacacaggacccagcattcctcaaattcttcatatggtgagttatgcaactagcataggataagttggttttttaattttattattcggaaaaccaaaagatcctgtagaaagagaaattttgtgag

SEQ ID NO: 109908 - DNA, 275 bp, Glycine max
tgttcatcaatcacattacataataactaatagcttcataagaaataacaaattgctttacaaaattcaatcacttggaatgaaaaggtttgttggcattttcttccgccgtttttctctgtcacttctttttgccgtacgattgttggatcagtgtaagtgttaatctgatcagaaaaggagatttaagtgatcatagtgggaaaaagacgggtcgcattatgccaatgccttgtggctactgtaatgcttgctggcacctaccgtttccactt

SEQ ID NO: 109909 - DNA, 116 bp, Glycine max
acttagttcaattcataaggatggactgccatcggtgccacaaaacctgggaagtgagctgccaacaggaaaaccagtactccttgtttgcgcagaaagattgagacttgcttaaa

SEQ ID NO: 109910 - DNA, 414 bp, Glycine max
cctacgcgtccgctaatttgggcactccaacggaacaaaatcagccgcaggagcagcagcaaaaggcagggacagcagcggggacaacgactacagctgcagcaactgacgctgcttctgctgcggctgtaatggaagaacagactgttcccctgaagctccgcgtcccactcactctgagcatttccatctcaaatgtcgcttccgcttcttgcattggtcccctctgcgccatttcgtccacttcgtgcgccagcggtgtgccgccgagttcggcaggtccaaccaaacgccgtggcaccattgaggagactgactatctgatgggaccgctcaaatcggtccatcgccggagggcggacccacgcgtttcgatgggaagcgtactgatggagatactgaacgagctgaaga

SEQ ID NO: 109911 - DNA, 393 bp, Glycine max
ccctcgcgtccgcctaccgtccgaagactgctatggtctatgtgcttctttttggtttctaattgcacagggcacagtcatcctattaggttcaacaagattgcatcactgagagaaagcctcaaatagttataaaccataatagttttaatttattgcagattttatagcattatactggctaataagtcaaggttttgatacagcttcaaattcagcgtgaagcaagtaacaggaaaatcatgtcattagttaggtctgctgatctagctccaacatcatatgaaaatgctaagctcttctcactgaagggaactgatgttcgaccggggctgtcctcacaaatttttggtcctgataagcataggagcacgtacatgacggatacttacc

SEQ ID NO: 109912 - DNA, 385 bp, Glycine max
ccttcgcgtccgcaaattgttgagctagggtttgctcccaaactcgtgctcctatgttgtagtctgaaaattgagggtattttcatagaattgtgctcgtgcgacgctgctatgccctgcgatagagtatcctagggatcgtggggcgtgttctacagtgcgtatgggttgtgtgggtggcatcgccctctggtgttagtttcggcaatgccgtccgagggtccttttgtgggagatcagcgaccaacgcgccgccgcacacggaggttgcatcccagtcaaatcagcgagattgcattgtcgtcgcagacttggagggccaccaggtcgcgttgagaaccgcaccaggctgcgttgaaactacgtcgaaccaatgagaatgacg

SEQ ID NO: 109913 - DNA, 353 bp, Glycine max
  unsure (1)..(353): unsure at all n locations
cttttgcctcaacgcttttttaactcctttcgcttttccattccaacctctttcacacttcagatctgtttcttcatcgaaattttgaattggatgcttaggcctacgctccaccgtacgatcttgagcacttagccacattgatccttctttgttcgttttatttaggattgtagctaattagctgtttgattttctctctctctctctctctctaggttnggccgtcgattaatatctacgaatttttcactttagtttcgatttttttttcatataaaaggatactaatcgtggagcatgagctctgtaatgaacactaagacatcaattacaagctcgactgtatttcg

SEQ ID NO: 109914 - DNA, 422 bp, Glycine max
gatataattaattaattcaatttgtattttctcgcttcttatcaagtgctattagtagaaagaaatgaatcgtattggttcagcactttcaaagtcggttttcatccctcgtttgttctgtcaccgtttcttcgccagtggacccaccgatgcgcgacaaaatgtgctcgttgtcattgtcgatttcaacggcgaacagcaattgcttgtcaacggaaagtacagcgaattgctcggccgttcccccgactttccatttccgggcaacgtgaaaccgttggctgaaatgcaacagcaacaacagcagaaatttccattccctttggacgccttgccaaccaaacaactcggcaatggcttgggtgctgtcatgccactccacaaaatcgtcgagccttcatttgttgtttcggacgatcgta

SEQ ID NO: 109915 - DNA, 419 bp, Glycine max
cactaacttgattattaacaccaccaatcacttgacaatttacattcaatcaagtacaagacatgagcaaaacactagctatatggttctttctgttgttcagcattctcacgtattcagcttacggaagcacatgcactgaagatactggagattttagaacctccaagccagaacaaaaggagcctaaaccaatgcacggtatgatcatgggatcaagcaaaccttgcagtcaaagaaaatttccagaattgcatgctgccagatatacaaggatttctcggttaggaaaagcagtttatagaggaccaagcaacttaaggccccgcaatgttcggaatgcatcaaactccaattcaatcaaacctccatccttattcatggcggcacttgggcatctggtttttggactgctttta

SEQ ID NO: 109916 - DNA, 320 bp, Glycine max
catttttgaattctttaagtttttctatgaaggtagaaaatatttcctaaattttaggggtgtttggtttgggattcgtttgtgatactgtcgagcaagaggtgtattgagggcgcggcagagtatgaaaaaatgaatgagaaatttagtggaaacctggcggcaggttgcacatgcgccaagaagtatttaaagatatgcaacacaacacctgactacccacccttaacactccaaaaaccacctaattatccaccacccactgaaagtgcaaagctcaacaaacacactcaaaagtcttcttcatccacaaacaacac

SEQ ID NO: 109917 - DNA, 282 bp, Glycine max
gccttgcgtccgtttccatcttatcagaactttcaatacgcatcatattaataaagcatccatcaacatatgagaataagatccttccttgatttatcttgcttaatttctgagcagtagctactagagcatcttcaacatggagtgagactcacgctgtgaatcattatggaaaatgaaggaactcatcaaaatgtatgatgtgaagtgacaccattgtcactgtgaggatatattcttgcttacacccacatgaacagaacaagtgaattcccgaagttg

SEQ ID NO: 109918 - DNA, 308 bp, Glycine max
cgttcgcgtgggttcgagggtgcaaggcactaagccaattttcagtgacatcagagaatatgattgaactagatttatcattcaccagtgtcagtgcatttccctcaacttttggacgtcaaagcaatctcaaaatcctaagtcttgtcttcactaacattgagagcttgccttcaagcttcaggaatcttacaagattgcgatatctgagtgtagaaagttccaggaagcttcatactctgtctctaacagagcttcccgcatcccttgaagttcttgatgctacagattgcaaatcattgaagact

SEQ ID NO: 109919 - DNA, 391 bp, Glycine max
aaattaaattgcagttctatttggatgagtttaaataaataaaaaatgaaatgatatgatgagatgatttgaattttgttaaaatagtagctacaatatagaatccatttgtgtggaattggtaatcctccataagagagtggtctaaaaacaaacaatagaatggggagtaaaaaagaaagagaaagttgagttgtgttggtgttaggctaccagagcatggcatggaggtttaatttagggaaatggaccaaaaagagttgacatataggttagctggcacgtgaagagcacatggggaaattcatgagatgattattgagaatatctctctctatattagtgttttgagagggctggaagaagctcataattgaatgaatatgaatat

SEQ ID NO: 109920 - DNA, 451 bp, Glycine max
ggttgtttgaaatgccaatattttttgcaaggcctcttccggccgagaaaaagcttccaattctgaataaaaccccagagccaacagagtcacaaaaggacacgttgagtgacgacggccaagacaaccaggacaggggtgcctcaacttcctcacagaccaacctaatgaaaaatgtgcgaattcttcggaaagaggcggcggaaacatcgctcgagccatacattcagtttcaatgttttgcgcatttcgcaatttcccggaaatgtgttaacgaattgtgcgctgatgtgtcctcggatggcgtcgatgtccacatttttttcgaggatgactttccgcgtcttccccgcattggcttctcctgcctgtctttgcaagagctttacgaagaccgtgctctgctgagtgaaaaaaacgcaacgccagaccaactcagtttcattcaatt

SEQ ID NO: 109921 - DNA, 245 bp, Glycine max
cttttattctccgtttttgttggcctccattaagagcaccaaggaattatggggcttcctccagtcaaaagcattcctatcaggaggctgacaatgtggaacacgacagaatgcctaatatggagaatcagttttacgacgctaacagcaagtctgacaatgcaagcctcaataaagctgttgaaagttgattaggaaagaatatctcctctatggaaacaaaacttagcattaagcaaccatta

SEQ ID NO: 109922 - DNA, 419 bp, Glycine max
tctggtttcaggaagcttacgagttttccgcctctcaacttgacctctcttgaaacacttgaactttctcactgttccagtctagagtatttcccagaaatattaggaaagatggaaaacataagggaactttcatttcaatggtgtgagagtttagttgcagttgatgagtcaattggttttctgaagaaacttaaaatattgaatgctgctggttgcaggaagcttacgagttttccgcctctcaacttgacctctcttgaaacacttgaactttctcactgttccagtctagagtatttgccagaaatattaggagagatggaaaacataagggaactttcatttcaatggtgtgagagtttagttgcagttgatgagtcaattggttttctgaagaaacttaaaatattgaatgc

SEQ ID NO: 109923 - DNA, 395 bp, Glycine max
tgcaacctaacacttggattggatgctatgcttcttcttcttcccatcaacacccttctaactttccaacacacaatcttattctgattctgatcatcaacacaacccatttcatgatctgggtggcttcgtctggagagagagaagaaaaattggattttgacacattcccagggcataaaatgttgcttctgtgagaggggtttcatgggttgaactcggagaatcatgggtagcttcagcgaagacgaggaatgtcggtttttcgatgctcaagaggatgttgtgtccattccagatgaaggggtatccaatggttttgattatgaagtgtggattcggagtccaaggagtgtgagagagcgtatgggcaagtttatgaagaggatgggact

SEQ ID NO: 109924 - DNA, 385 bp, Glycine max
tttcatctcacccttcctctatttccatcattttgtgacaacaacaacataaccttcttgcccccaacacacaccttttctttttaggggtttatcttaaaccaggatttttggcactaatttctctatgggagaagcaccagcattgcttgttgatgacgtgcaggatggggctctgaatggccttgaattgaaaaatggaacttgcaaaacaactgctactgttggcgataagatgtatgtcattggtggagctgatgatggaactttgtccattgaagttcaaatttttgacggtagtcttggagaatggtcagtttaaggtttctccgtttcatagctgcctttctcagactcttgctgatgacatctatttaaaattgca

SEQ ID NO: 109925 - DNA, 334 bp, Glycine max
ggtaactacccatggctgtactagttttgagcgtttgaaaatttgtatgttcttattctatatttgcttcggcggtagggcagcttggttgcggcttcagtatcggcttaccaaacccttactcatctgggatttaaagaatcatggccaacgctgaaggtggcaaggaaccagtaaatgaacaagcagttgccaatatgtatgctgcaatgaggtctgagctcaaccaaatttactccaaaataactgaactggagatggaagttagtgagcacacattggttaccaatgccattcaaccacttgaccaatctagacgatgctatcgtatgat

SEQ ID NO: 109926 - DNA, 214 bp, Glycine max
ttccctttctttaaatgctccctcctattttttttgttctctgtctcgttttttgaagacgaacattaaacaaccgttaagtagcttttaaagcaaactgctatacgcttaacatttgaagctaattcaaaaaacatcatcgagtataagtcatctttttgcggacattgtgtttgttttctaaaaagaatggaaactgtgtgtgtaaaatctg

SEQ ID NO: 109927 - DNA, 380 bp, Glycine max
tttgttaatcacaagaaaatggtgcaactaaagctcatagccttaaccttgttggtgttgtggtcatggtggagctttgagggtacagttggagaccctcaactctttctactcaaatgggagtgcggcgtagtctcggtacatgacttgtccaacttcaaccaaaatcgtaacgcaattttggcagacctgagagcgcaggtgagaaaccaaagcaagtactttgccacggctgaatcaaccagcggagcagaccctgtttatgccatgttccaatgcaggaactacctctccaaaaatgactgtgccgtctgctttgccgtcaccgacaccaatattcgtaactgctccgtcggaaatactggccgtatagtttatga

SEQ ID NO: 109928 - DNA, 219 bp, Glycine max
gtcttgtttttaaatgctccctgctattttttttggtctctctctcgctctttgaagacgagcattaaacaaccgtgatgaatcagttgaagcaaactgcgaaacgctgaacatttgaggcacattaaagaaaactaaatgagaatgaaatcatctttttgtggacattgtgtttgttttctaagaagaatggaaactgtgtgtttaaaatctgggatg

SEQ ID NO: 109929 - DNA, 460 bp, Glycine max
cttttgatttttttaaaattattgatgcattttcaatctcttaaatgttatccctaaaatcagatttagacgttgacatgtgtaacacattattatattttgatctgctggacgatgattttcacgtgccacattctgatggtaagttgacaacatcaatacatttttattgtatatattatcgtgacacgtgacgatcaatattttttataaccattaaatatattaaaagattaaatgcgttaataattaaaaaaaaagaacaaaatcgaaatcggaaacaaaaataggttttaaataagtaactgtgactgtttcatctgatttgatctcttttgaaaaataaccgcacaaaaagaagaattgaaaacattgagccacagctacaatcactgcaacactttaattgctagattacctgaactcaacgatcagtagcagcacagagacacgtgatgat

SEQ ID NO: 109930 - DNA, 164 bp, Glycine max
cctcacgcgtccggcaaaacctctcttcttctgattgattcacttctcgatttttctgttttcgttttcattttcggtttccgatctaatatcgatgcgattcgccattgccggaaaatgagtcctcctgcgagtgtccggtgatgatcgctctcgagagaggc

SEQ ID NO: 109931 - DNA, 103 bp, Glycine max
ttatcacacgagagggctgatgacaccaataatcatgagggctgtgcccacaagctggtgcatgttggggtgattcaggactaagttgccttgccattttcac

SEQ ID NO: 109932 - DNA, 386 bp, Glycine max
ttgctaattttacccattccgtgacgaactccaggggctttttaagacttactgggggctggaatgacatgtggaacactgcacccgatacgacagatggagctgagcagcttgaacatcttccggcttctagaaagtccttgtctctcgttgcgacccactcttcacagccagtccttcgaccgtcttttgagatggaggttgcccgattggctgccctgcctgacgatgaagatgatgatgggggtattgagtcagccctgttgaagcttgagggcagatatgagaagaaaagccctgacccgtcgccaaaagcagcagagttttatgtgcctaaaggtgctcctcctcagtccatgaagcgagaggattctcatggcggggat

SEQ ID NO: 109933 - DNA, 480 bp, Glycine max
cccactcgttcgtgtggagggggatgtgggagcggttgtggtggaggttgtagtgggggctgtgatgttggaagcggctgtagtggtggttgcggtggtgggggagacgtctcaaacattgaaggacgcagcgatggaactgagcccaaatacgttgctgtctcaccggaaaaaagttccaattctgctgcaggtggagaaaaggaagcggaaggtgaacaagcacaagtaccagctgagcaacagccattaccagttgcgccagccgcggcggaagctgcttcagccgaaaacgcaccgaccgaaaatgcagcagctgtaccatcctcaggatattctggtggtgaaccggcacaggctcaagctgtagcagtacaaacagtagaacagcagcaagccgcttcagaatccgaacccactgccattggcacatccaacggcaacaacgagattaacgatgcaaacagcagcagcactgat

SEQ ID NO: 109934 - DNA, 465 bp, Glycine max
tgtattatttaccatttcccctctgaaaaagcacaggggattctctagcatttcgggggctcccaacctcgcaacagaggctttgctctgtaaaagctgacaccaaccactccccttcacgccattcacgccactctcctctgtgttcccacattttcttctttcttatcccctaattgcaagtgcagcaatcaccaggatgttgttgtcttatttattggcattaccccatacacctgaccttcatactctgagcatcctcatcaattgtttctggcatctatagctcacatcacttttgctttttctgaattggccaacattctcgagagggtttatcacccagatgcaataaccctcaccacactgcactttttcacgacgagggggtagctcaagggttccagctgaacaaatgaattgtgtaaaacagcagtgtgcatataatctttctcttcctttttt

SEQ ID NO: 109935 - DNA, 281 bp, Glycine max
ttctagttcgcgagcgccgccctttttttttttttttgggtttttttttttttttttggggttttttttttttttttttttttttaaaaaatctcatttaaaaaaataaaagttttttttggatcatttatccctgccatcagggcttgcttgggaatttctgccggcctttttgcttagaaaggacctggtgaaggtcatctggccctctaaaattctaaagggccccccgggccttcaatcttggtttgggaaagggttcctctgcttttccctaaaaa

SEQ ID NO: 109936 - DNA, 337 bp, Glycine max
tctctacaacacaacgctctctgggcgggcttcacaataatcttgggggggggtatactctactcaaaaaggatttgggacatcatgtgcagtgattcgaaaagtaaactttcttccccaaccctcgtcgagatggagaatagtaacattcagaagcagaatctggatggtctctacaactcggttttgcttgaattgtctgcatctgatgattatgaagctttcaaaagagaggtggaggaaaaaggcttagatgtgaacgaggcaggcttttggtaccgtagaagaattgggtcaaagaagatgggatctgaaacgaggacccctctgatgattg

SEQ ID NO: 109937 - DNA, 226 bp, Glycine max
cggtcgtttgggcagacacacgggcggacgcctgggggtctttcattctctcttggggagagagaaagcagagagagagacacacacaactgccacaattgctttgcctaaccttaatttcaggacacttcgaaggtaccaggaccaattgatgctggtcttccctttttgtgctttttgattcacagattattggttttcgatttttttttttcacaaggagaaa

SEQ ID NO: 109938 - DNA, 203 bp, Glycine max
aaatatttttgaactatgtctaataatcacggccctctgaacaccccgggggattccaattccagttcaaagcgactcaagcacttgttcgactcttttatcctacgcactcctccctggttatcctgcgcatctttcacctagatcctgcccttcactccttcactttcctatttcagtgggaaagaatcatgagttgtttc

SEQ ID NO: 109939 - DNA, 291 bp, Glycine max
  unsure (1)..(291): unsure at all n locations
gatcctgngagctcaggagctgcccctggccctgggggggatttatcaaacgccaggggggcatcaacacctgccccttctgccctgtaattttggtcccttgaaatttcactctccttttgcagagatggtgtgaaattgagggagacatttaccattattattattgttattgtgtcactatattagaaaatggagagtatattgcttcatttttatgggttgagttcccattaatgtaacggtaatcaagagttgcgcgtggtgttgataggtttatgttatgttgtt

SEQ ID NO: 109940 - DNA, 321 bp, Glycine max
gaatatcttaaacagaaacataaaaagtagctgggggtggctcgtactcattctgggggggggaaacctcattcctcaatccacgagtttctcgtgacccttctctcatcatcggcatcttcgcgccctaatcgattatctcgttgcgggtgctgatgattgattgattgggctataaaacgctgccaccgaccatgatcaaccattcataaacaaagagagaaaaaaagcttttttttgctgggtggttttttgtgtgcccaataattctggattggtctgttgtttttttgcattttcccatgacgtattacgagaatg

SEQ ID NO: 109941 - DNA, 328 bp, Glycine max
tgtcttttaatagccaagtttaaaataataaaggggggaattatataagttggggggggataatggccgaccaaatgggcacggaagggcaatttttgaaattggcactgcattttgccataggcatttgttaattgggaccagtgatgccaacccgaacccgaaacgcagtggaaaaaatcagagaagaatgaagaaggatacggtagagagtcaagtttttgagaatcgtaagtgtctattctcgaatttgccaattaatctggtattgaactcattcattcattttctcggggagcatttttgagtagagaatgcccaagttttt

SEQ ID NO: 109942 - DNA, 501 bp, Glycine max
  unsure (1)..(501): unsure at all n locations
cccatgtttccgcccacgcgtccgcccacgcgtccgaaaccttaataaccttgccatggcactaggcatgggcgttaacgttaagagatacgaggctgttggagaaggaccaccgcatctcaataacagcgtcccattagcaacaacacaaacactaatctaaacctaaactctttctctcagcaatcaatctaaaaacaaacattattagcattattcttttcatcatcgtcttcgcgagacactcgcatctgcatctgccgcgtcgatccgcactacacgcggcagcacatcgtccaacaaataccctttcaatcttcaatctctaattctctattctcaaagtccaaaaagcattcccgtttttttattttcttttcttaaatttttcttggtcaccaaactctcactttctttctctttctcacttccactntcttcngttcttggaattttttaattttaaaattgataatccaagccagcatttatttctctcta

SEQ ID NO: 109943 - DNA, 523 bp, Glycine max
tgtttgagcttttctcgacaaaaaattgcgaaggcctgtcgtagcggctgttgacctaattttggagaaccaaatgaattttgttaaaaaacgaagaaaacgaacccacgatgaaactgatggaaaccacgctgacaagaccttattcttcagtgatccgaattcgcaaaatgacgaatcaactgatgaagttttcttgaatgaaattgatctggaaaacccatctatccatgattttttcgttgcattggccgcacatttggataatctccttcaaaaccggaacgagaaaatcagtttccaagctgcgcaaattttcgacttggtttcttgcttttcaaagctttttacaagggtacgacgaccgctttttcaatggcttttaaaaaagaatgtgtcaattgaggaagtgttcatcatttccttcttcatcgaaaacctagcagatgagcacaagtcttttacagagcttgtggaacgtgtggtggcagagagatataagcgtcagtctctttcacagaca

SEQ ID NO: 109944 - DNA, 436 bp, Glycine max
aagaaagagagcaaaggcactgatcgattaatttcgatcgatcggccgggcctttgattgctttatgcccttccgatcttccattattttacattccttccattaaattcgcttttttgtggatcaattaaaaatgcctgcaggggaatacgaaaagggcactttgggcagcaacagtaaaaagcaacagcagcgagaggaggagggcagcattttgagcaaatttgggactttgacgaaacggaaaaagtcagtgccaccggcgggggaagggccggcggaagagacggagcggaaagatgaggacgaagcggaaatagtggagaagatgggcaaggacgccatagactcatgccttatcctgccacagcccgacttacggcatttggaagacggacaaagtctgcgcactttgaccattgagtcgcgagacgac

SEQ ID NO: 109945 - DNA, 309 bp, Glycine max
gttacattgatgcccggctgaggcgttggcgtatgaatttcaagcagcatataaccaacggtggtggggtgaacaactgcataaagtcaagccgtcgctcaacgtcccacgacccgaagggaaaaagcgcaatatctcagaaccgttccaccggcagcaacaacaaattgtatttgtttgtgagatgtgaacagttggacgaaagcaaccgaatacgcacttgtgcagtgcccagaaaaaggatgcacatgaatctcaccggactgccaaggcccaggctggagctggactccgtctctataaatgaca

SEQ ID NO: 109946 - DNA, 382 bp, Glycine max
cctacgcgtcctaatggaaagccaaagccaaaggcagaagaagtaagaatggaagcaagtaacgaaagacgagtgctacctcgcagaaagcctctctacgatcgcaccaacacttcttttccctccgatggtcccctcaaacctgtcaaaaccaaaaccccttcttccgcacccgctaaatgcaccgccaccaatctcgatagtgccccaaaccctacctctccttctacatcgctcaaaaccccctctgcctctgtccacgagattgttgatgatgaagcttccgagcctatcacagtcgtgtacagccgaagacgttcttcaaacaaaagaaagaaggataaagggaaggctgtggctgttcctttcactaccacgccca

SEQ ID NO: 109947 - DNA, 346 bp, Glycine max
tttttatatattttttttatttgttttccctggtcccacttactcctcgtgcttttccctttccttgatgaattaatatttttttcaataatttgggtgacattatttaattttgtaagatccagagggctataattagcagaattgaaggtggggtcagggtataattttatggagttgatgcaagaagtgaaagggtactctgatagcagagaggaggaggaggaggaagagggagcagcagaagaagaaagcagccggttgttacaccagcaccaggatgcagcaggttccaatttcatcatcaacaacaatcaacattatcaacatcaccacacaacaaagc

SEQ ID NO: 109948 - DNA, 271 bp, Glycine max
attataaaacacattaaatgaggcttagcacacagtataattggcataacaatggtaaatagttttccagagtgatccaaaagtcatgtatagacatgcaactcattttgataatatattttgagattgtcagcctcaagtttaagcttcgatataacaaggttgggcaaagacttaatgtatagcaagcctcaagttcgaggtcccagagttcaaagtcaatgaaccaaaaattaatgaactgcagatgttaacatgccaactatcaatc

SEQ ID NO: 109949 - DNA, 376 bp, Glycine max
cataacaagtgtcagcaaaaacttgtgaggctgtgaaaccaaaagatggcgactgtaagctatttggcttctcacttatcagtggccctactttaccagagccttctttatcacaaagaaatgtgagtgaggctgctgatcagatgcatcttacagcacaccaacaaagaacatctgaaaatgatgaaaagttagaccactcgaagggatcaagacctgtagatgatatagttgttgatgaccaggacagaccattacggacttctcagctgcatactaaagatgttcaagctaaacctctcagtggttctgctaggagttgcactaaagtaagatccttcactatttgattgaaaaatgagagctagaagtttac

SEQ ID NO: 109950 - DNA, 188 bp, Glycine max
cctacgcgtccgctgtactcttctgtggtatccataccataggcattaatattcgcactattaaagaaaatatagcagaatagtgagagtgagagatggatcaatttttgtggcgggtgttgcctttgcttacaattcttgttacctttggagtgttcttctacttgcaggattattacacagaacag

SEQ ID NO: 109951 - DNA, 388 bp, Glycine max
atgttatgcaattcctatcaccagaagagagaaaatcaccattgaggtaccaagattgcagccactggtgcctccctggtgttcctgatgcatggaatgagattctatatgctgagcttctgttgaaagagtatcagaatcagcatcaacagaagcaaacataggtaaaccacaaatcacttatattgaatgagtttttagctgaaagcagaactagatgcaatatacactatatttgttccttccacaaaaggagagggaaaggaacaaaccatacagagcaattttttctagttatgtaaaggttcaaaagcttatgtttagtgaaataaaagatataagttgcttggaagttgaaactactcaataatttttttcatatgaatta

SEQ ID NO: 109952 - DNA, 248 bp, Glycine max
cccacgcgttcgggaaaatataggggttacccattttgttaagttacttccaatacaccgaacatgtgcttgtatgaaaatgtctatcatttatttattaatttatttattttgttgaagttctttgtctgagtaaaattttaagatacatacagccataccaacatcaacatgtatactgtttttatgctgcgagggtggctcaagttttagccttcaacagctgataatgccttaattttccgtat

SEQ ID NO: 109953 - DNA, 467 bp, Glycine max
gtcatatgttcattagaaatttgatcattttatcacatcatcttattcgttaatatatatgataatacgatgtggtgatatgatgaataatttcttttgaatgtttgtgtaacgattcagatgtgttgtctctgttgttatctgattattagaattggaattttaatttgataatctggataataaagattttttttattgaagaatgtataaatttatcgatgtgaaactccaattctattatctaagttttgttcatgaattaaatattgtgctttatatatccctttgggtgatttctgaatttggtgctttggattttgtgtgtctatagcttgatgattgggtgctgtgccgaatctacaagaagagcaacacgcataggtcacccatggagcatgacagggaagattcaatggatgacatgattggagggattcctccatccatcaacgtgggccacatga

SEQ ID NO: 109954 - DNA, 486 bp, Glycine max
tcgttgcccatggtgttgcacttgttctcaacaagttcgtttcctctaataatatcaaccatgatgatcatcatcccgattgcgctttcgcaacggaggtctacggcgccgttttggagcgcttgcagaagctcaaggactggttcgaggttcagacggtgtatcacttctattcttgttctgttcttgtggtgtacgagaaggatctagggaaagggaaagctaccaaccctctggtcaaactcgttgactttgcacacgtggtggacggaaacggtgtcattgatcacaacttcttgggtggcctttgttccttcatcaagttcctcaaggatatcctagcagtagcatgtcttcacaagtgactgattttcatcgagttaatcttattcctatcagaaaataattatgcttgaattagtgtcgcagactaactgtttgaagtactgtcagaaacaaaataataatatggactgagaggcaatc

SEQ ID NO: 109955 - DNA, 465 bp, Glycine max
tcgcccacgcgtccgggcaagggtcacatcctcattgttgagttgtttgtggtgcacaccctctcgatactctggctcgcgacgggaggaattacagagtatgctatccctcgcgactgctggtattactactactacgacaactacaactgcgatatctaccccatcgtcatacgagtcttctgttgggtctcagctggccaccttctcatctggtccacctggctttctcttctcgcagttggcgcaacccggcgcggtaatcgcgaggtctggatctctaatatcgggaccacaaacttcctccgggttgtacatacgtcgccggagccctctgtggtggtcacgaacttgaacctcagacgtttgagcgatccggaaacaggaatgccacccccataccctcgcggaagtcaggagccgaggacggaggatagggagatgcgctatgttgatctggtgaag

SEQ ID NO: 109956 - DNA, 157 bp, Glycine max
cttatcctctaaaggcactcgccagtgatatattttttggtacagaagttgaagttcagcttgggaaacgtcttcaggccacaattgttaggcaaatgaaggagttcgcgatggcaatgcaatggacactgagctatgtgcttacaagtggtttgcg

SEQ ID NO: 109957 - DNA, 445 bp, Glycine max
ctttaagatttgctatccagtgtgaatacagaaaatccagatatgaaatctgagtcacctggaagagacgttgaaaccaagagtctgaagggtgacaatgggcgacaattttccatgtccaaaagtttagtcctagaaggtctagttagatcactcagatctaatttgatcggttcaggagcaccagcaaatgaagcagctactgaaagaaaagaagaaattgaaaatgttaatatgggaattgagactcttgaagagttccctacagaggaacaatctgtagctcctacaagtgcggttgaggaacctgagacccctgtagagaaacaaagcaacacaggattgtggtacttggtgtataagcacatggtatcaaatgtggcggaaaacaactctgagtcactaattgatggggcagacgagaaagagtcagggttggatgaca

SEQ ID NO: 109958 - DNA, 306 bp, Glycine max
ccttgatcgtcgtgattatgactttgtcggtgagaaaaaggatgaagaaaacaagcctcatcctcaggcggaggctatcgccaccgagtttcacaccgtcactgtctcagaccatggatagaaccagcgcaggctcttagacaagctttaccgatctgacagccgatctagctcttcatgtgaggaggaaggagaagatggagggaaaagggagaagaagaagaaggaaaagaaagggctgaaagagaggatcgaggagaaaatcgaggggggatcatcatgatgaccaggatgaggacacaggtg

SEQ ID NO: 109959 - DNA, 300 bp, Glycine max
taatataagaaatattattttaatttctgtttctctaataaatgctttcaagaatatacgtattaatttctttaattagaaaatcaaaccaatgccagcatgtgtttgtgacagcgagggatgatatttataataacaaaataacttcagggggggacaaattagtaaaatcagctgcaatggctttgcttataagtcccaaaaccataattcattgctccagccactgtgtgggatagtgtcaaagagaagctgagactagagggggaaagagaaaatagggtctctagtgtcacattc

SEQ ID NO: 109960 - DNA, 413 bp, Glycine max
  unsure (1)..(413): unsure at all n locations
aacccattttcgccccagtccccgncggggcactcacaccggcaaccgtttctctctcttatttactcttcgtctgctttgctcatacatatcctccattttttttttgcattaataaaaaattgaaaactcaaaccatttttttcttcttctcgcaatcaaaaaacacacacaaatcaaccttcgtcttccatcgcttgcttcacactcttcttcacctctcacccaccgaaatctacaccaccccatcacaccaaagtgtccaagtttgaatctttgaggaaaacgagcacgtgggtaacggtgcttgttagagagagaaagagaaacagtgtgtgtgcgtgtgtgtgaaactgtgaatcattgttatggtatggctcagcagaggcaatcgggaatggaaaggtttgggg

SEQ ID NO: 109961 - DNA, 376 bp, Glycine max
agatggtatgcgccatttctcccttgctaccaacgacactttaaacatcctggatgtgtcttcaaacttctctcccttctacttctagggtttcgcttctgcaacggacgaccttcttcaactcatcaaaggtgaagttttttttcttcttctttatctcactttgccttcgacacacacaccttgtgccctctaccctcaattttcccattttcttcagaattttccccctcttaatttcctttctctttgtctattcaattttatttctcgaaattccccccccccccccccttttgtgtcgattgccagccattttacccccaaaatgcttgaatttcataacccattattactcaattattttcatgttttt

SEQ ID NO: 109962 - DNA, 59 bp, Glycine max
tgataaaaaaaaaaaaaaaaaaaaaaaaaacggggagaattaaaaaaaaaagggggggg

SEQ ID NO: 109963 - DNA, 149 bp, Glycine max
ctcttcgctgtcgccagagtagagtagtgcggaagaaaagaataacgaaatccctctgctttgcgaaacgggcgtattactcttccggcgggttcgtgccactgactctgttgctgacttgcgcgctaggtttccaaacggacgagctt

SEQ ID NO: 109964 - DNA, 162 bp, Glycine max
attactttttctcttactcccccgatcttcaaggctataattggttataaaatacaccctagcaaatgggatcctccaagttattgggtactatggccatgctattcgttgagctgctacccatggctgccaaaggggataatattactgatttccttgata

SEQ ID NO: 109965 - DNA, 116 bp, Glycine max
tttacgcgtccggtgattctgtttcttgtatgggagccacccctctcttgaaaacactacatctcgtgcttccttgatctacaaaacgctcatagtgaccggatctgactggatct

SEQ ID NO: 109966 - DNA, 252 bp, Glycine max
tgaattaatatttcaattttcaatttaggctgttgtcggctagatgaattcaacgaaactaacacagcaattccaacttgaagttaacctaggtcatgagttggaattgctgtgttagtttcgttgcggtagtacaaacatgttggatatctaacaaaaacacaataatgcaactctgaatgaatgtgcctactttgtgaaagattttggattttttctatcttaaatgaaataatatgaggggaattcagt

SEQ ID NO: 109967 - DNA, 502 bp, Glycine max
ttatttttgcttttgcatgcatcaatcagaaacgagggattcgatctagtagctaactaaaacaagctttttgattgcgtttacacgtgtttgttaaaggtggcaaatcctaaagagaagaagggaaacgaggttgacaatatattattccatgaagggatgatgaacaaccctgcattattgtcaaggctgtttccgggtatcaatagggagagggagatgtctgccatggtctcagctttgacccacgttgtctccggagaggttccaaccggtgattcttcttcagttcttcatcatcaacctcatgatgatgatgctgttactgttaaaccaaacatgccttctacaacacccttttcatctacttatgttgttgccacctcttctctcaagagaagtagacaacatgatacatatacaccatccttctcacatccaccttcatcattccctgctatgccaacaagtgcagaatgttcaaagagtggaatgggaaatg

SEQ ID NO: 109968 - DNA, 201 bp, Glycine max
gttctagatcgcgagcggcccctttttttttttttttttttttttttttcggcattggtttatatgattaaaaatcgattgtttttgcaatgaccattcaatcggcactcattatttcttaattaaggactttttccgtcggatcctttggcacttttcacatgtgacttcctcctcgggctggccatcatttggcacttt

SEQ ID NO: 109969 - DNA, 437 bp, Glycine max
tttcagttggaattatattgttacaatcttgacaaatcaattggagcaatgcaatctgatttaacttgtgaccatgaggaaacagattcaaaactcaaatctcttgataaacaccttcaggaagtacacaggtctgtgctaattttgagagacaagcaagagctagctgagactcggaaagaattagccaagcttaaacatgttcggaaagaatcatcttcctcaagccatttgcagtcaaatgaggagagatcttcaccttcttccatggatccaaaaagaattgataatgtatctgacacacagaaccaagagctagctcttgccttaccacatcaagttgcaccccggcaacagcctgtggcatcctcctatcaagtgccagccccaaatgtgagccaagccactcaacgacctcattattacttgatgcccac

SEQ ID NO: 109970 - DNA, 300 bp, Glycine max
gcgtgaactactggttcaagctgttcgaccagcaccataaacaaaatgtagcacagattgccgccgaagcagtgatgcaacacaatttccaagcagagaatatggaagaggaagtgcagaaaatggaataggccagggttaatggaaacgatcagcagacgataatgacgactatggcaaatggaaataaccactgatcctcctcaactgctatcaattcctatggcattgtgccgtcagcggtggccggcgtgccgcaattgcaacacaacgcccacttttattaccccccgcctttgt

SEQ ID NO: 109971 - DNA, 293 bp, Glycine max
cccatctgtagtttgtggggctagaagtttctattactgggcattcagaagattgcaagaaaagttatcatctttatttccatattgaacagagaggttgatctaggtagagttgggtagcaatcctcgatctgtctttgggccaaattcggagggtgaatgctggataatatattatatttttgtgtttaaaaggttgatattcgaatatggaaatgttaggggggtggactcacactacagggcgatgctatgattacatgtttacactgtttaatgataaaactggcaca

SEQ ID NO: 109972 - DNA, 400 bp, Glycine max
ccgctctcctctctctctctctctccttcccagcattctacgtcgtcgtttcgatacaaaatgctgggttcacgtttctgcgtccgcacgttatccggcgtgggctctgccgcagcggatcacacgaatgtcgccaccaccgcccgctccgttccgtgctccgtcgccgtcgacttctcgccgctccacctgtcaccgttccggtcccgccgccgcttccgctgccgcagatctatcctcatttcctgcaattcctctcgccgcagatccagctccgacaactctcacgacaacaacaacaaaaacgattatctcgaagcttctctccttctctcaggtctatccatgtgaatgatccatgcctgaaattttaattacttaaactagcgcagaaacattc

SEQ ID NO: 109973 - DNA, 260 bp, Glycine max
cgaacagtggcgtgaccagttgtgaccattcggttcaccgagattgcttttcggggtacttcgacaacatcagtgacatgtgccccgtttgcaacaaaggaggaccacatcagacccctacaaaggaagtctgttctcagagtagcgctaaagctttttgagagggaagattggatgcccccaaacccagaacgcatgaccatggagcaatttatgataaccaagcccctgccagttgactctgagtcttctgaaataca

SEQ ID NO: 109974 - DNA, 117 bp, Glycine max
ggcggtcctattttagaggctgtagtatgcactatgagatatattgccagtcaggtcgagaacaagagtcatcttgtggctttgtctacctgacttgcgaatgcaaaagagctggga

SEQ ID NO: 109975 - DNA, 339 bp, Glycine max
agaagaagaaaaatggccactcaagaagacgaagaagacgagataattaaccccttcacaatgctcctaatccacgaagaagacaaaccaagcgtctccgctaccctccccgcggctgcaccgaaccaccacctgctccagcaccaccccctccgttcgatccaatcaacggtcgccattcgccagctcccttccgagggcctctccttccagctctggcccgccgccacctccctcgtctccctcctcgacctccaccgcgaaaaccctccctccgccagccccctctcagccgcgctccacggccgccgccgcatcatcgagctcggctccggcacc

SEQ ID NO: 109976 - DNA, 230 bp, Glycine max
gctggttgtgttttgcagcagaagatatcaaaatcctacgaaaggagaggagtgagagagagagagtggttgttgcagttgccttcctagttttgaactttagaatattatacacgagacccacatcattaataattcacactttgatagtccttttctctttgtttctattctcccatctctgtacgttctctcccgtcaacgttggctttctctctctcctcggattt

SEQ ID NO: 109977 - DNA, 100 bp, Glycine max
tcttttagagcaaggagcaggttttctagggctccacattcacctgcagtttccacttcgcctcatcgaggctcaccttcaaggtcaatgagcaaatcat

SEQ ID NO: 109978 - DNA, 243 bp, Glycine max
attttgtatacagtgacatttactttgtgcaaggtgtgatgtcacaatcttattgcctagctatatatgagctccttcattttatgtctagataattaatttctaaacttggtcctaagttcatagcatgactatgtaatgtgaatgatagcattatatatgtaattaatatacgttttaagtaagttttaaggtgtacttggttgacgaaaataatatgaaacaaaattattgactcaagtc

SEQ ID NO: 109979 - DNA, 461 bp, Glycine max
ctaaatttattctaaaaagaatagtatcttttgcgctcctaatttgcatttttctcatcgttttaagccgttttaaatctgagcaattttgagtttgggcccttaaaaacttctttattttttatgggacaagtaaaggaagcgatacccacccaaaatggaaatgtcgacttcatttcttgactctttgcctggattttctgttgtagattttaatggaagtcatgagaaaagaacttgtgttcctggttagtgtaaaaaatttaaaaagttgtgattcgcttttctttaggtgaacaattattttcagtctcaagtggatatcatgcgggaaatggctgttatgaatttcatggttcaatatgtgcttctcttgcaggatttttgcacgtttattcacttagagattcgcaaaacaccgagacaaacattgtcgaagtgagacgcaacattgacgagag

SEQ ID NO: 109980 - DNA, 363 bp, Glycine max
cccacgcttccgtgacgtaatattgatatttacagttgctttgtttcttacatttatgcacgcatgaaaaggttggtccaattgaaaaacctttagctttcaagaatgatggctgtcacatagttgcgaaaattcttacaactgtcatctattattaattattgtttgcatatgccaatcctactcatgcacatataatggtccaaattcttgatgtttatccagcaatttggtgcgtgattaatggttgacggtgtgtgttcccacaggaacattggaaaacttttatagttgaagatgatttcaagttcatagcaagtaatggactgaatgctgttagaattccaatcggctggtggatag

SEQ ID NO: 109981 - DNA, 247 bp, Glycine max
gcagaggtcgcagttaaacaattgaagcagagggttctccaatttagcacgattgaaacagaggacgaaagaagggttctctcttatttccaaatgcagcagcggcttcttcttccatttttgtgcatcggtgtcactaacggcaacatatgttgcaatgaagcccacaaagctcggcttggaaaagctctggggcagatccgcaactaacattcaccctttcctcctagcacgtcaataacctcga

SEQ ID NO: 109982 - DNA, 358 bp, Glycine max
cgactacgttagggaactcgctctcctcgtcagaaaacagggctcggaagcgaaggcgttcatcggagccgaacaaatcagcctccggaacgacgtcgttttcgtgctcgaccggatcaagaacgagatcgtccccgatcaagcgcatctagcatcgatcttcgagaagttggagattcgcgacgcgtcgagctgcagagcggagatcgggagcctcgaagaggagattcacaaccgtagcgaagaacaaccgaaaacggatctcgttgctttgatcggcctcgtccgtttcgcgaagtgcgttctttacggcgcgtcaacgccgtcgcagaagaccgtcactatgcggcggaatcag

SEQ ID NO: 109983 - DNA, 343 bp, Glycine max
cggacgcgtgggcggacgcgtggacggacgcgcgggggccattttgaggctggtcgaatcccgtctgatggaatgttcctcattttccggtgtccacacttgtctcagcaatttgtcctcaatgactaccgattataaggccctggccaagattgccttcaacactttgaatccatttccggccaaattgatcgagtcacgtcgtcagaattattatctccagcataagagtggcaaattcaaaatctgaatgtgagctttgattgcctgttcaattcaattccacttcctattctccacccaaattttattgctcaattctcctaattccctttttttttat

SEQ ID NO: 109984 - DNA, 103 bp, Glycine max
cccacgcgttcgtcgtaaccttgctcttggtggcattttcggcatcgttatttccgtgctcgtctacaagggcatcgatcgggaataccatatgcaagatgaa

SEQ ID NO: 109985 - DNA, 272 bp, Glycine max
  unsure (1)..(272): unsure at all n locations
gtggtgttgtggttgtggtgactccagaaaccttgatggtgcagccaaaattgcggtcagcttcgtttttttaaaaccttggtgatgtcggtgtgggctacttttcctaattcacactactactgctacttgatattcattcatatgctgccactattctactatcattgctttgcagttgcgtaagacgatgatgatgatagtgttaaaaattgtaatctttaatttattttgcttttttaagttatagtgatttttttgaaaagaacana

SEQ ID NO: 109986 - DNA, 362 bp, Glycine max
acgaaacccttcgaatctatgtctctggggtaacactaacggtacacggggcaatcccatagttctaagcaaccgaaagattagctcaaacacaacaagtcgctgacatgttcttttctccccacatctttttctcttttcactctgttctgaatctcaccaattaggtaacacttcaacctctgctgaatcggactctcgcatgtgaaaaaatctttcaaagagtttgcacgtacatctttgtcctttcaggtgcaaagtctcattctttttagtaaaaattttcaaagatgaaatcagagtttggatgaccctcccctggtttcaattcctctggtttgcttcaaaaggaatggacacgc

SEQ ID NO: 109987 - DNA, 380 bp, Glycine max
  unsure (1)..(380): unsure at all n locations
aataattataaaatatttgatgactgctgctcttaaattagagcaactgattttaaaaatttgaaactattataattgatgttggtttacagtttgtttatttgtcttatgtaaaactaccgtgaattatctcccttatttatatcttatgctgaattaaaggattgctttactaatcctttaaaccctcttagtctcatacaaagaaaaagcatttaatgttagtgttggtcaattcttttgctgcttgtattgacacctatgttgaaaaactgttaatagcttggagattgttagtctcttnacacacacacacacacacacatatatattctttttttaaagaaaaactatgcatgtgaatacatagtcaatctttt

SEQ ID NO: 109988 - DNA, 379 bp, Glycine max
cgctccctcaacattgcttttcctaataataataccaatcccacactgtttcattaggaattcggattgcgcacctactccttctaccttccaacacaagctgtctctgtctttctagtcacagttgggttggttggtaccaaaggtgaggcaggggagactcagaaagagatggctgagctcggaggagttatgccagactgtgtatatgctccaaatccctaccatgaatgcacggaggcttgcgtgcataggatcaaggaagccaagcctggcaagccatctaaaactaaaaagggtaccgctttcaaagattatcgcagaagtgttacagatggtgaactgggcaaaacgatgaaagaagaaaaacgcaggccct

SEQ ID NO: 109989 - DNA, 417 bp, Glycine max
agctgaaatcggtctctatcaattctgagatggtactcgtgggaggaacacaatcctgtcccgctttgctctcaaattccagcagcgttagattctgtagtcaactcaactgtttcggtgagttatttcgaaggaacaacgaagcctcgaataaaatttaattggctgataaagctgtcaccagttcagttggtccagataatcttgcggcagaaacgagttttcatcatattaatggcaccaatggctcaatttctagcttgtgttccagaaatctgagagtacttgatgcctctgatgatgtgtatgaggctgttgtaattgattcagaccggttaccagacaacccttctaccttcgcagctaatatgcgttaatctcttcatcattggaaaaaggggaagaaggggatttggc

SEQ ID NO: 109990 - DNA, 105 bp, Glycine max
aaaatattttattcaagcacaaaacttgaagccttattccatgtattggggggaagttatggctggccatgtgggtagaggtgtcttagaggaggaggtatggag

SEQ ID NO: 109991 - DNA, 357 bp, Glycine max
gttgaatagaagtgtctggaatccaatccgaagtggattggtgtttgcgcgatgactagctatggctactctgcggaggatgctcaaacgaacactctctgtgtctcgctctgtggatcatatcatgaaacgctcaaacgacgaccacgctgcccccggccacgtctcaacctacaagccagtgttgctaaccaaagcccaacgcgagcaattggctctgcagcgccgcacaggaagaagtcgccgaccagaagcgccgccaggagcagcttctcttccgcaaccactcctgcgatcccaaaccctcctacgaccgcgacagagacagagaaagagaccgagaccaccaccgagacc

SEQ ID NO: 109992 - DNA, 445 bp, Glycine max
aaaatacagagatagagagaagaatcaataatgtattgtgactgaaaacaaaataagggaagaggagaaaaaacaaaaccaaacaaacctcaaaagttagggtttcctttttggttcgttgctgtggaatcgattcctttgccttatattaaacgtgcgtcgttgtgaagtagaagcaagactcgcagcattgctctgctagttttgacatttaagcgtcacctaaccttcttcgtttgctttttaaataattctgcattttctcgcttctttgatcactgcttcgcaaattgatcttcgtcgacgaattgcgcattcctgtgctgtattcgagtgttttccattgctgctgtcatatgcactattctggtgcttcctgtaaattaccatggaatggacagaatgtataagaatatacctttggagtcgctggaagtatttacca

SEQ ID NO: 109993 - DNA, 315 bp, Glycine max
gcctatatctctgatcactccattttctctcgtctctgcgctctttttaatttctctctccccattcttcctctttccgccccccaccgactcgctccctgacccgctctgactcgccaccgactcggtccccggccggttcggtccacaccgccatggagatcgctcacgagccaccgccttccctcgacggaagcccctccgccgccgccgatactctcgcgaattctccgtcgtcctcatcgtcttccccttcctcctcatcctcctcctctgcctcttcgccgcgcggcgcgaagaaaaaggagatcgaat

SEQ ID NO: 109994 - DNA, 345 bp, Glycine max
attgatttaagggggaaaatggggagaagagaaagcgtggtggcgaagaaattagtaaagggtggacgaaggaacaggaattggctcttcaaagagcgtattttgctgcaaagcctagcccccatttctggaagaacgtctccaaactggtgccaggaaagtctcaacaagattgctttgatagaattcactgtgactatatgacaccacctcaaactcagcctcattcgagggcaaagacattgaagtcatcacccattcaccaattttctatatctgcaagtaaacttctcaaacctattgataaaacagttagaaaatccaatgttctaaaaccaaagaaca

SEQ ID NO: 109995 - DNA, 385 bp, Glycine max
  unsure (1)..(385): unsure at all n locations
cttttaatttacngatgttatacatgattgaaactcttgttaagcctaacacatgtcccatgagaaattcaatgtagacagtggaaacttattattgtttactaatttacttgtctaatgttgcatactgcagcttttcgtggtttaggtaggttgaaattaatctgtttaacctagtatgtgacatccatggttttcatggaaaccaatattaataagaaaaatttgctgataaaaaaaaatattaataagaaaaataataaatatgtgattgatatttctcaactttgatattttttgttagcagaattgtccgctcctacctgctacactatggctatgaagatacattgaattcatttgatgtggctagtaaaagtactgt

SEQ ID NO: 109996 - DNA, 278 bp, Glycine max
caaagagagaaaccacgacacaacacaaaaccttcttagacttggtgtattttgtttttctgtctgtgttgttccttcacaaccacagagccaaaaacaaaaacatctaaaacctctttctttctctgtgtatgtgtttttagtttttgtttttgtcctatgaaactcccaacaacgtttgcagacccggaatccttgccttacctttacaccttgctccaatcttccttcgaccaaatgaatgatcccaccaacaacaacacttccaccactgggag

SEQ ID NO: 109997 - DNA, 300 bp, Glycine max
cctatgcttccgtacaaacagaagcctatttcagacctcatcaaggattcatctggacaggcagtaatattaccattaaggcttccagagttgtttgcattacgtatcaattccctcgttcttttaattaaagtgacaaatgaaggtgagttggtgctggtggacaaaattgataatgcagcagctgttagtgatgctttgtccatttcagagggtcaacatgcttttgcatttgttcaacatgaagacagtaaaattcacctctttgtaaaggatgttaatgattggaatggtgatttg

SEQ ID NO: 109998 - DNA, 191 bp, Glycine max
acacacacccattaagtttattaacagcaacattatcaaaaactcgtgagattaattttaatggcaacccgggtgatccctccgagaatgatcctcaagaacatccgttacaacaccgcagcaaagccactcaaaaccactcacccatccctgtctcctgtcaccgctaccgcatcactcgtcaagaagcc

SEQ ID NO: 109999 - DNA, 263 bp, Glycine max
gtccgagcctacaagaaacactgccctgcatacttgaagttgaatgatgatatatggcgtttgaagaaaattgctaaggaaggaaaaatccacaagcagctttttttgcatggaatttcacatcgtcaaggatctcttgcgtttttacataaccaacgaaccttcattatatgaaacgtttggaaatattccaaagaagtcatggctagtaatcactgagcatgccaaagcctgtgagatagatgattaccacctttacagct

SEQ ID NO: 110000 - DNA, 301 bp, Glycine max
tgtttcgcttttattcgattcccttcagaattgccgaaatcttccattgttttgtgtctgcaactctcaaaatcgaaaattcaccatctctctatccgtttgagtagaaacctttcagtctcggcgttgcatttgtttgcatataaatgcatctcaaatagcataggcatggtggaatggtgcttcctttgaccaaattcattttgattcgtaaccatttcttcagaaagttttcacctttacacaggatttttcaagggcatgtctgctttgagcagtttccttttctgcaaaaattttc

SEQ ID NO: 110001 - DNA, 292 bp, Glycine max
caatcgtgtatttgtagagagaaacaaagatctctattactttctctctcctgcaggctcagaatccttttgtaactattctctgaatttccattcattctatgctaatcactctatagatttctcttctttttccttgctctatactattcttggtgcagaagcaaagtgaacttgtggtgtatctttccaattgaagtgaaagagtaaggatgataagcgggacaacatactggtgttacacatgcaggcagccaatctggcttgaatgcagggaagccatttgccccta

SEQ ID NO: 110002 - DNA, 488 bp, Glycine max
aatttacgttttagtaataaaatgccaaaattttggcggaaaatgccgagacctccacgaaaaaggattgccaagaaaagtgatgacaaaaaatcgacggaagacgaaaaaaagaagaagaagaaacggaggttgcccaaaacactgaaggagtgttttgagtgcgtcgacgtcggttccatcgttttgtgcgcctcctatttggacattccgccggagccgatcagcagcagcagtgacgagaaaagcaacgggaaaagaaagaagcaaaagggacagacgaaaaaagaagggcccaaaattgtgacggatgtccacgaatttgggtgcattccatggcgactttcgcttgtgcaccagcttcgcaaggacgacaacggaggctattccaaacacattctcaagttggcactgcactcggactatcgcaaggacgtcgcatggcgtgccgatgtgtccggcactttgacgatgaaaaaatgggtgga

SEQ ID NO: 110003 - DNA, 382 bp, Glycine max
tggtacttggtacacaacttcacatgttcttgttacgatttgcgttgcgtccccaaacccaaaaaggctagctagggttttagatcagatcagtgtgtaagaaaatcagtaatcagtaatcactcagcataaaatttgtttttttttttttttgtttccgatgcaaaaaatgttacacagcaacacattcatcattcacttccttttgtgacaaatcgctcttaccgattaagaagatctcgtgtagcagactcaccgacatgggtccggggaaggtccactggaacgtttttgacggagtgaagataatcgcggcgacgccggaggcactcatggcggagatcgactccgcgatctcgaatctcgaatactcacgcgccac

SEQ ID NO: 110004 - DNA, 397 bp, Glycine max
tccacgcgtccgcgcggaaacacgctcgtcttcacgatccagcgattccgctctccgacgagtctgcgtaaggtgaagaatcacgaggccagccgccggtgaagaatcgcgcgattcgtctggaaatcgcgattcaagctcgattcatctccgttatagagattcaaccacgattcaggaacaaaaacaagacaacttccgattcgtttcagtagcagctagaatcgtatcgaatcgtgcgacacgtatcgtgaaccgtacgatactaactaccatgtgcataattagagtttagttgctctgtgttattgtcttttttgctgagtcttggtttgttcatcactttctgtcccataactgtatgtatgtattgttgataagggcttttatgattttt

SEQ ID NO: 110005 - DNA, 289 bp, Glycine max
cgatttttcttacatataaatcgcagccctacttggtatgcaatggatcctatagatttccaacttaacggggatgcagcggaggttgaagagatgtcgcaactgagggcggattggcgtgctgaaatggctggccattttgctggcggtgttaccgaggaccatttggatatggtgccccgcgtttttgaaccggaggaaatggggccgaacgatgcgggaggggcggcccggaatgggcaggcggaggaggaatagaaacgaccggaggagagaaatgagtgaaggg

SEQ ID NO: 110006 - DNA, 318 bp, Glycine max
cccacgcgttcgcccacgcgtccggcaactcccagggggcaacgacgagcagtggaaggagaacgatgcccaagttcgaaaggagtgggaaagtaggcggaaagagttgcacagccagctggttgccgagactaagaagggccatcagctggatatgcacatcagggcgttgacggaacaactggcagcccttcaacaccaatccggcctcgcctactacaaccaggcagatcctgcggccctggaatatgaaccaccggtgtcaactcaggacaagcggcatagcgggaacagcaactctctttccaacctgaactt

SEQ ID NO: 110007 - DNA, 465 bp, Glycine max
  unsure (1)..(465): unsure at all n locations
gtgtaaatgatatttatttttcatccaattatagatattgataacatagtgaataaataatcatatatactcacgactaaaacaatttgcactatcattctatctcaaattggttaataatgtatttttttttgcactgacaaagcatataaattaaactcataaaaaaattgtagttatttgtgtttttcataaatatatatagatttaattggcccctattcatgctatatttgtgctctataataactttataatttatcaaaatatatctacagtaatgattttataaatacgtgcgtgattcataattttcgtacgtgtcacggataattaatctagtatttgtaaaatgaaatagaaacataggattttacgtaacttaaacgcatgaaaatctcatatttgaatgtacatttctttatatcagctaattntacgtctatgattgcgtgtaaaaatata

SEQ ID NO: 110008 - DNA, 447 bp, Glycine max
cgtacgcgtgggctttgtcgttcaccttttcagtttcttttacttcaagtcattgcttcagttgacgaagcatatcaaactgcaaggataggaatattggatccgattctcttgataatttttgttgttataaattttatattagtattccattaagaggagaaatcgatttatatttatgcataacagcagttagtattaggtagttgttctaggttcttgattttagaactggttttctgttttgaatctatcattaagtcaattttgtaccaacttacgtttattcctcttgattctagattatgtgaaaatgggtatgtatgttcagtgcatatacaaatttcaggagagatgtttattttaaaagtttgcgttttctataacctgtgaatcaatctatgctttggcgtgtacacaagaacctgaagaacaaactcaacaaag

SEQ ID NO: 110009 - DNA, 392 bp, Glycine max
actctctctctctctctctccttctcaggggggacagtttagaaaaccaagttgatctagttcaatcatacatagagaatacagtgtaaagaatagattttctcccctaccaaaaacaagagggagctgagatattgtaaggtggtgtgaaaggaattaacaaggatctgttttgggatatatgggcataagagaaagagatgacatggtgcaatgactcagatgaggagaggggaattgatcaactggttgcactaacaattactcctacttcaactaataacactactgttcttactgatcatcgcacaaaagcaagcgaaattcgcaccttaacttgcccctcatgtggccaaaacattgaattccaagaccagactggaatcaatgac

SEQ ID NO: 110010 - DNA, 424 bp, Glycine max
tttcgctttctcgtccgggcattttcgtctttctctaatttcttcttctttctttctctcacttctcttttgaatcaatctcatctcatccctaacaaccacacatgcacgcaccaccatcaggcatgttctttccatgctttcaattttggaaaaaagcttaaaattttgtaacactttaataaaaactaattggaactggtgctagttcagcttgatttataaccccatttttggccaaacaaatagggttgcccattttattattattcttttgaaattttcaactttcttatgctgtggatctttgacttcagttggagattttgagtttttttttttaaccctcttttcagatgttgttctgagataatccagataccctttaaggttttttacttcatagctgcagaattccttgcac

SEQ ID NO: 110011 - DNA, 499 bp, Glycine max
tatcgttactggtgcgacctgggatcatctgatcacacaccagtcgatgcgctacctgactgctacccttacacagtatgtttctaatataagagatcactctaagatatgcgctcacgccgcgtcaggtgggaacagtgagggctctgcggagctcggattacacagatggaacaaaaaattcagttgagacttgagttcacgaggtccacgggacaaaacaggccacaagcctactcctaccccttcaaggtggatttgttcttaacttctagattcgatcctcaggagagcggagtcatgtgaaggttgacaacttccggacgaagcacctcaacaaaactacaaggatgcgattcagaagcctcaaaatttaaattggaaaaaaaaggactcaagagtcactctcgacaaccaagattccagacgtcaggacagattcttagcgactaggaaaatgacctaatagagcgatgggatcatgaatcaaaaactcatc

SEQ ID NO: 110012 - DNA, 459 bp, Glycine max
gatttcctgttcttacactccctattctccggcaccttctgcctcctttgccactccaacaaactctccgacaacctcgtctacagattcatcaacgctctcggccatcgcagcgacatcaggggcaccattcactggttccagaaagccaaaaacctaacaagaggacgatgcgcatattctgcaaggtgattagagacccgtcaaagtatcgaagaaagcgagggtttgaatgggaaccttcgattttgccgaggaagttgctcgagcctacgacgccgccgctcggactctccgaggtcccaagccaaaacaaaaatccctctctgacctttttgctacaaccccaccatcgatcctttcttctacgcgggtttccccacttaccttgaagtctgccacagcggctgccacacttcatctttcgtcaatgacgacgacactatttttaattttctt

SEQ ID NO: 110013 - DNA, 396 bp, Glycine max
ctctccatgtactaaatagaattcatgattgtgagcctttagtttctctcttctacgcgccggggccaacgaagcattagaggatctttctagcgccagatgtacataccggaatggtgaatgaattgacaacaggtgttgattttgagaaattctcatggaaaattgaggatttctcaaaaaaaaatctcatgaaattgcgctccaagcctttcaaaatccggggttgtacatggaggctccttgtgtatccactgaggagggatgtgaatcacttttcagtgtatttgatggttgctgattctttaccgccgtacggatggagcagaaacacttttttcatgttagctctaataaatcaggtggataggaataagtctatagctaaagagacac

SEQ ID NO: 110014 - DNA, 464 bp, Glycine max
cctactcgtcctgtctttaacagaactgatttcggggtttctattgagtttttcccgaattggccgcttaatatgatagttatattgcggatttcagtttacaacagcttgtgatgcgtgatgtgtttgatctgcggagaaatcggttttgtgatctgacatgtggattgattcaatttttatttatttatttatttatttatttttatgaggctgagcatgtggatttaacttcttttatttgataattatgcgtggaattttcaaataaggcatatattcttgttctgtttttgtttttggttgcatatattcttattcttttattagatttattttggtgatgtttcttatattaaatttattaatgagtaatatgattttattctgggatttaagtgacgacaaacataacgcggctttttatttttttattgatgtttacttattttggcactaatcac

SEQ ID NO: 110015 - DNA, 309 bp, Glycine max
  unsure (1)..(309): unsure at all n locations
cctcccctcgaacaaaanacangaaaanggaggcaacggagaacagaaacccccggcccccccgccacaagagaagagaganggaacagcaccagcccccncaaaggaagaaaacaccagcccccagcgggcagaaancgaaccaaagaaaaaagaagggcggaccccaagacagaggcgcagccaacgggacacagaggcaccacgnngagagccacccngccccgacacagcgcaaggccccccccaagaaaggccngacaggggcccacaccgggaagcgaaaaacagacccagaagccgccgaaa

SEQ ID NO: 110016 - DNA, 334 bp, Glycine max
  unsure (1)..(334): unsure at all n locations
gaataatttcagggganccagcgagcgacacaagttggcctatganctaagagctaagtagggcttactagattgtctctcttaaagcatcccttgtggtatccaaatacaagaggagcacagtaaatttctgtgttgaaagtctttgctttatcttcctttgtttgattcttttctttttcttccattattatgaatttggctccagggtgtgtactttagagacaaaagtgggggatttcaactatcaaagaaaaaagagattggtttgtgacacatgcatggattgtgcatgtgcatatgatgatatcaattgttgattttttcttcaatc

SEQ ID NO: 110017 - DNA, 274 bp, Glycine max
attaaattggggatcatttgtacatcccaagttgggtggttagttgttttctgaagtcacaggatcatcttaggcaggaatcaagttaggtgcatgatatggagacatgcttcaggtttaatttgtaatcgtggagtggttgtttaactctagggaagattcttctgtgtagttatggcttacaagtttgttaatgctctattgaagcaaatgttgggagtagggaaagtgcagataagggcaagaaataaatgtggaagagattagagtgatg

SEQ ID NO: 110018 - DNA, 105 bp, Glycine max
attattctttcataggatagacagtgagttcctgggacatggttttcagaggataccttgtatcgatttttcttcatatttgtatttattgtttacttttgtctt

SEQ ID NO: 110019 - DNA, 439 bp, Glycine max
gatataggtgttggtggcggcggttctcagggaaggcactggtgatggtgatgatgatgatgcatgtttttccattgttggtgccattctgcgtgtaaaaaagccttgtgggaggggttcggataagtcagtcccaaaccctgcttcatcatccctgtcgaattttcctccataaaccttctttttttccttgtggtttttatttaaattaataataaccgaagaaaagaactcaatataatttttcttttcttcttgaaagggtacctatcgaaaccgcgtttgtcggtttgttgaggagcacgtgatttcagggaacagggtagaggggatgggatggaaggggtagggctaaaaaaggtttttccttatataaaacatctttttttttagggtgaagtttgaattctggtatattaggtttaatggatgcattact

SEQ ID NO: 110020 - DNA, 328 bp, Glycine max
  unsure (1)..(328): unsure at all n locations
gataatctgatatagaattgaaattgtacttgccatccgacattcttttccaactagttgagcttgtagccttcaaaactacttgggatctacaaccaatggaatggacactagaacgtttgctggtttatcatgtaaaatgggttcattacatgttgtaaatgttaccgtgtcttgtttaacaagagcatgatgcaattttggtgttnaaaaaaaaaaaaaaaaaaaaaaaaaaaaaaaaaaaaaaaaaaaaaaaaaaaaaaaaaaaaaaaaaaaaaaaaaaaaaaaaaaaaannnaaaananacaaaaaaaaaaaaaaaggggggg

SEQ ID NO: 110021 - DNA, 271 bp, Glycine max
tctttcgttgactcgtgggtggaggcaaaggtggtggaggcggaggtggaggttctaatggttcagggtatggctcaggctctggatacggtgaaggaggtggttatggtcaaggaggtggaaatggaggacgaggcggtggcggtggtggaggaggaggtggaggtggtggcggcggcggtggtagtggaggttctggttatggtagcggctctgggtatgggtctggttggggtgggggaggaaattatgagtccctttaaactaagat

SEQ ID NO: 110022 - DNA, 185 bp, Glycine max
cgtacgctgtgtttaagaatgaaattctgagttctaacgccactaatcctatgctgacgcgacttcttgagaactgtaagagtctcaaatatctggttgatgagtgtccttttgcatttgtgaactagtatgtaatattttattcacttaaataaagcgcattactatgtgcaatgagtgtgttt

SEQ ID NO: 110023 - DNA, 370 bp, Glycine max
  unsure (1)..(370): unsure at all n locations
ggttctcaactttctagaagagctcaccagttcggngaagaagaggagagcatattgtatgtctctgattctcttggttttgcagcgacggacccgtcgttaagggacccttctctggaagacaatgacttctcagaaactgcaaagttcataaaccaaatcctcatggaagacaacgttgaacagatgccattctatgattcactcaacttgcaagttacagagaaatccttctacaacgctctcactggcaacatacctctttcccccaatcaacatccccttgttctcagtccccaagctgaaaccactcccaccaccagcaacagcagcaacaacagcaaccacaactttttagatgaaaattctc

SEQ ID NO: 110024 - DNA, 439 bp, Glycine max
  unsure (1)..(439): unsure at all n locations
gngtcagcagtgttagtggaagngatagtggaagccacagttggagcagaagcagaagtcctactgggacagggagcgggagtagtagtgacagtgaaagtgatgcatcttctagcagcaaagagggacaggagggatctgatgaggaaatagatattatgaccagtgatgatgaaaaagagtcaaaacaaaaaacagaagtctctgaccaaaggatgcccttacccattccagtaaaatctcctgacggaaggtcaatgcagaatgtggttgatgagaagcaggatggcaatgaatctgatgcagttgaaattgaaaaggacttacctgaggaacaggggactgaaatggctctacctccggctaccatttctaatagaggtggaaaatatgcagaagagacaagaccgtttccacttgactatcaacagctccagga

SEQ ID NO: 110025 - DNA, 185 bp, Glycine max
  unsure (1)..(185): unsure at all n locations
cgttcgcgagtgcttctccacgccncgcncggaggaaccatcatcatatttgacacctatgcggggaagggacaagactccagaagagagaagaattgcaattcgcatttgtgatgatgttgcagagcagtgtcgggaagctgctgcgaagtataatgatacctatctcccatccctgttggagg

SEQ ID NO: 110026 - DNA, 425 bp, Glycine max
  unsure (1)..(425): unsure at all n locations
acctaatttctctctncaancnncatcctctcgatccgncttttaattttccagtcaagtgccctacactacatcacatcaaattagtagtaatttcaagaaagatcatggaaattgcgtacaactactacttgcctgaacttcaggaaattgaggatccaaccttctttgatcaataccagatggattcatttgcttgtccacttgatgactttgactttgagtctttctccggttcccctgagagcaactcctcatatcatttcaactccgaaagcacaccaaattgtttcccagctgaaagtcatgatcagtcttttacccctgcaagaccaaccaagaggctcaagaacacttgtgccagtgacttcatttcccacaaggtttctgctttttcatcctcccaacttatttcctttgggcac

SEQ ID NO: 110027 - DNA, 340 bp, Glycine max
  unsure (1)..(340): unsure at all n locations
ngttttgtttttaagttgtgaccataaactcgccttgtcctcaggcgaaatgtattgcttttgttgtttggagttcaggtacagtctaggatgctttgcctttaaagggatcccatcagttgtccatccatcttcccaaaatctagcttttgaaccagaccctacattccatcttatgccctgttggaaccagctttcctcccctgaattatgacgcacctttttcaggtcgtaccatcatttggagactgcttgaggtgtattgttgccatccaagctccgccaacctccatatttggagtccaacactctagcccagagttctccctgatggtgaaat

SEQ ID NO: 110028 - DNA, 418 bp, Glycine max
cgtacgttttggttcgcatacaattctaatgcttccatgggttccattttttgtttgctctcaacagcagccatcacgaagggcgaaacatcagtcaaatttgttcgaacaaatgcttgaggtcagagcagtcggaacaaatatcggaaaagagcaggatgggccgtcgtacgaaatgcttttccgtttaacaacgacaaatagaagcaaatctgctccttttctggccaaaataccgacaaaaactttgaaaagggaagtcgcaaacgaagcaaaaacgaataattcaacaaatgatgacgagaggaaggaggaggagcaattcgcatctctgaaaaaccgttgccatacaatcgcatcgacaagcgcaccttttgcttcgacaaaagtgcaacagaacggcgtggacagcaatcat

SEQ ID NO: 110029 - DNA, 390 bp, Glycine max
  unsure (1)..(390): unsure at all n locations
tcgagtacttaaacggagaaggnnggataatgccttaagcactaaaccaacctccttgtccttttaactattgctgatatgcatacatatgcataatgcgaatatatatttttactccaatcaccgttttagtgaattaagattcttctctttctaggatgcacaccacgttctaggattaaacaattgaagaatttgaccagctagtcagctaccatagataccaaaatagtttcaataaacaagaattttccaaaggaagttctcattcaacaaggaatggtattatctccttcaaagcaatggtagacttacttattaagaagtctcaaacatcacacagaaaaaggggtgtgggcaacacaacaccttcatagcaccaactcatct

SEQ ID NO: 110030 - DNA, 159 bp, Glycine max
  unsure (1)..(159): unsure at all n locations
ttttgnataattgcggatggcgcgacgattgcacatgctggctcattgaccgcgttgatcaccaggtttggggacaacctgaaggctggaccatccatcacaaggttggaagagtcatggaccattgatgatgttgcattcaatgtgccagggttgtcc

SEQ ID NO: 110031 - DNA, 428 bp, Glycine max
  unsure (1)..(428): unsure at all n locations
tttcgcatgnttgaggagagtaatttccatgcttggaatttgtaaattgaaacacacaaagccaacaacgccttcaaatgtaatggatatcatccgttagcattttgctgcaaatccaacggaattacgtcgaaagtcgacttataattagcacaaaatgtctccagcaatcagtgggaccgttctcttctgtcccaattgccgccgttctttggcatttttccctttgctaattgttcctctgattttgctcacttttctctcctccgatgtccattcttcgtttgttgtcccaattgaaccagacaatgtctttctccccccgggcgtccgctccttccgttctttgctggtcaaccaaaggctcagttccctttacgtcggctcccgtgaccatttcttccgtttgtggctgttcaatgtcaacg

SEQ ID NO: 110032 - DNA, 404 bp, Glycine max
tttcgttcgcgtgggaaaagaacagcttttgtatgcttcagatgcatgcagtgacgtaacatacttggctgagttcacataaatgatctggtaccttactattaggaaaatgcagatatcaggggccactgatctagcttctaagggacagggtgcatcagatagcagtagtgtaaaggttaaaagtgaatttgatgatgcctttcaaccagatgtgaagattcgctgtctatgtggaagtagattggaaacagagaatttggtcaagtgtgatgatgcaagatgccatgtgtggcaacacatcagttgcgttattattccagagaaacctactgaaggcatcccactagttcctgataaattttattgtgaactctgtcgtctcactcgtgcagatccatttt

SEQ ID NO: 110033 - DNA, 413 bp, Glycine max
ctatcttccgaaatttgcttcttccccgcttcctctccgaatcactccgacaaacaccaaaacgcgattgcatttcaaaccataatcccgttttcaccgtatcgttttccctatttcaattcctctcaatattgctatcgtctctggttctcgttcgcaactcctgagtcctgtgacgcattcgcgttggcgaacgaacgctcttggcattcccgaaatccctcaaacagcgtcagtaaccgcaattcaaaaccctaagccatggaccgtgacgacgacccttctgcacttgcatggctttgggtcattgaagccctgttaacttccaaagaaatcaccactcccactttgcagggtttcattgatgcggcacctgtgggacatcatagatttagtaaaaatacaaaggaatt

SEQ ID NO: 110034 - DNA, 272 bp, Glycine max
tcgcctatgcgcccgattttctcctatctatctctatattcaattcaatgatggcgctaaagaaaaccctagcccagcggatcataaacatcaccaacagcttcaattaccgcattgcctgctccgaagaccggtctccgaacccgacagatgccgacattggtgccgaccccggggacaaccgcaggatgctccacaagaggaccgccgagttcccgccggagctacgggcggcaccaccggtcgggaggctcctgcagaggctccgggaa

SEQ ID NO: 110035 - DNA, 351 bp, Glycine max
acagggctttttgaggtctaggctggcatgttactgtcgacctgttgtgcttgaacaaccaggtattgagtgcaggcatgcttgagaatgtggcttcccgcaccccgtatcgatggcttgagacagcattatttgtgcctggcttaagtggggccaatgagacttccttacttgtccggcactggctgtacctcttgtacatgcggcaccgtcctcgacagaagttcggtgccaccttgaacttcatcattcagcgcatggctaatttgcagtttgcgctaaatggtcgagtacttcttgaaaataggcaacatgacttgcaaattgattgcttggtcattgctgctttac

SEQ ID NO: 110036 - DNA, 124 bp, Glycine max
cttgaacaaccaggtattgagagcaggcatgcttgaaaatgaggctcaccgcaccccgtattgatggcttgagacagcattatttgcgcctggcttaagtggggccaatgagacttgcttactt

SEQ ID NO: 110037 - DNA, 109 bp, Glycine max
ttagtgttgtgcctcaggcatgtcgttcactactgggggtgattgaccagctagaggaacaaacgcaagacatgaccacacccggtgtcttaaacgactatcctatgga

SEQ ID NO: 110038 - DNA, 396 bp, Glycine max
gtttcatttgcccacctggacccccgggagcgccaggagcacccggccagcccggcaccggaggaggacagccgcaacccggagagcccggcccacctggacccaatggacagcccggacaacccggacagcccggagcgcctggacagcccggacaacccgcaagcccaccgccaacggagcccgctcctgcaggcccacctggagaggctggtgcacctggacagcccggtcagcctggagcccctggacagcccggcgcggccggacagcccggcccgaagggacctcccggaggcccaggacagccaggcaatggcggagccccaggccagcccggccaacccggacagcctggaaaccccggagagcgcggaatctgtcccaaatactgtg

SEQ ID NO: 110039 - DNA, 439 bp, Glycine max
ttctgggttgggttttcaaccctcaaaccctgccttgccttgccttgccttgccgcacaggttggggttgcattgtgatcatcgcacgtgacgtggcagtcccctattggcacatgtcacgtgacaaaccaccttcccggttgccccaaaacccaatccacatgacccaacctacacacaccatacatcaacaacactcccaccttaagttccctgaactaacgttgttcttcttccaattccaacaccaacaacattagtaagtaacaaattaacaacaacaaaacccttctctccaatttcttgcacttcaacggcaacacaagaaccggagcagcagcagcgaaacgcggcgtttctctgggggggaaggttgggggagcgagtgttaggttcgggaacattctcaacgacttcaacagagccgttaggtttcatt

SEQ ID NO: 110040 - DNA, 433 bp, Glycine max
tgctccacctgaggttatattcattgcagacccggaagggttaatgatgggtgtgggaagttcaattgggccgcaatatgttggcaatggaaccagtgaaatgcgattggttggtgctcttagggaggtgttggctggtggtcatcttggatttgaggaagtgcaaggtgtgttaaaggatgtccttcccatcaaagagggtgatgaaaagcctcagggagtaagtgaggctttgctttctgcatttttaataggtcaacgcatgaaccgtgaaactgaccgcgaattaaaagcatactgccttgcatttgatgatgaaattggcccccctcctgttgctgatgtcagatcattgactcattatggtgaaccttatgatggtaacacacgcttcttcaggagtacgctattcgttgctgctgttagatcttgc

SEQ ID NO: 110041 - DNA, 395 bp, Glycine max
ctttctttgacttccctttctctctctctctcatctcactgttaccattttcagctcaaggagtattcttgcccaagtcctcgtttttctgatcgagctatgaccaaggacttgtcttaaaaagcatcttttttaccattcttaggtaagcaatggttggtgcatcttggtttcgaactctatggaagattcgacggaaggatgatactaattctgagaaggcagtgattggagtgttagcatttgaagttgcgagcttgatgtccaagcttgttaatttgtggcagtctttaagtgataaacaggttgctaagttgagagaagagctaactaattctgtgggtatccgaaagcttgtttcagacgatgagaatttcattgtacgtttaatcagt

SEQ ID NO: 110042 - DNA, 404 bp, Glycine max
tcggtttaagaggatgtggagagcggccgaggaattgaaaattagggttccggctaatgttcctgtcggatttgttgcctcgatgttgcaaaagtgtcctgggattgtgagactctcgcttagaatggagagtgattttgattcaactatgttggcttgcattgccttctcgtgccctaatctcgagtgtatggagatcttgacgtttgatactgcaaccattcggatcaatggagatgaattaggccgatttgttgctgataaaaaaagcctcaaaagcctcaagatggaaggttgttctaacctgggtggttttgtcctgtgttcgtctagtctttctacactctggctatcagatctgcactctctctctaagatggtatttaattgtccccagttgagag

SEQ ID NO: 110043 - DNA, 377 bp, Glycine max
tgttcattacatttctaacactactgcaatgaatataattgatcggcttgctgaacatcgcatccaacttcctagcacctttggaaattataagttgattgattggagtgtcgagcctccatcaaagaattggtggcagcaacacttcttcttggtcgtgagtttagctattttgatcacattgcttctaggattgtcaatattaggaacgttcttaatttggaaaaaaagacagcaaagctcgcattcatacaagccagttgatgcggctgttccagagcaagaacttcagccattatgagttaagatcatgctacttctttttatatcttacttcataatgttagtagcatattcaactaccatcaagagagcaa

SEQ ID NO: 110044 - DNA, 297 bp, Glycine max
gttgtttttctaagccccttcttctcgctcggtacactcttattgctatccgctgttcacaccctccctctcacatgtcaaacctcaagctacccatctacctctgaacactttggctcccctttcctttttttacacctttcactggtatcccacctatcaacttctctgagattcaatttctgtatatacaatagttctatattgcgtctgattagcttaattcctctggactataatactatttaatgcttgttgcttcttttttgaatgattcttacaaagttctagcttgtg

SEQ ID NO: 110045 - DNA, 216 bp, Glycine max
agtgcaagtgtagaaattttagtaagccaaactgtaataaggtgatggaaattgggcgaaggggagaaatgtgtgtacgtttgtgtttgtggaaaacaaaagcaccccgtcgattcaaaggatgtgttgtgcatcggccattaaaaaattgtagtgatctagtgtaactaatgactcgtagaaaagcgcgagttagatgtgaacaaggggtttgcg

SEQ ID NO: 110046 - DNA, 391 bp, Glycine max
ggtatgaaatgagttaaggactttatcctagatgttgtcgtactgatggaggagtggttgatcggttggtcttgatcatcttggttggttcaagctacatagtgctcaatcactgatccggagttctgtcatacattgctgatgcaaaactgtatgcacatttttttaattggaagttggtagtaatttctacatcatttacttttaaatatttccttatttttttaacacttttagttgatttgaagaggcaaagatggtaatttgatgcacaggagtcatgagtcgtctttgtcgcataaagaacagcaaagtcaggttcacatttcggaaacaacttatccactaatggagtagaggctttgtacttgtaaaccctccctatataaaa

SEQ ID NO: 110047 - DNA, 498 bp, Glycine max
gtctcttccgtatcaaagaaagaaacgacgacaaccaccaccaccgcatcattgccaccgtaatcgccacgaccaaaacgccgtcgttaagaacagcgcgtggagattcattgtggcatgcgattcaattccacgcactcgtgcagttagcgccagattcacatttcacgcaacttaaataccttcatttcctccaattgaagattcgttgcgattttaggggggaaattccccgattgtacctgctacagtttcaattttcggtgcattgattaacttttatcacgaaaaggcttggattgtgtgctgtgtcgttttcctgattgatgcaagggtttctcggaatttgctgcagacccccgatgagggtggagattttgatttgtgtgaggaatatggttttccgggaaggttttagggatttgtagggtttaagtatgctgtagctggtgatctaattgaaatcagggtgtttttcccttgggggggaatgattat

SEQ ID NO: 110048 - DNA, 346 bp, Glycine max
cagatcaaatttcgtcggcaccacccaccgccacgccgacgaccttcattcgctgtcggcaacacatcccttctgctgcgtcttcgtcgtctctgaccactcctccctggtcaagcttcgccgacctcatctagcccctctccccgtcgccatagcgagatccgtcgtgagatccagtccgtttctctctatcatttttctgattttttttccagatctgagattagctcctcccagatctgagattcgttcctcccttggtgtcctccttttccgcctcgtcctcgtcggtaactccattgacgtcgtcacggcgagatctagacccgctcctcgctgccgcctc

SEQ ID NO: 110049 - DNA, 176 bp, Glycine max
ccgccggttcgtccccgtgcccctcgctgtgcgcctactcctcctcctgctcggcaaattcagtctccaccgcggagcgttcgttgcgcgcatggttgcgctgctgttcacggtgctgtggtggggatggagcatcaacagttggagcagaagatgagcatgatctgtagcacaac

SEQ ID NO: 110050 - DNA, 473 bp, Glycine max
tttcacttcgtctgctataaacgccaatgcctcacttgctgaacaacttatgggctgttcgttggactgcgatcctggtctttcttgtgaattggtgacaaaatatatttcacccatgtcaacctgtccaagccattacgtaggtgttatcttggacgaaccttcatctacaccatatacaggatacatcaatgatgttcccaggttcatctggaattttctggctgacagaacttctatcccaagggagaataatagttcagattgtcaacatggttgcaatggtagagatgaagtatgcatcaaagcagagactgatggcaagggagtttgtgttctctctacaacgaggtatgttccggcttattcaacacggctaaaatttgaatcaggagtgtggaatgttttgccccctaattcctctgacaaaatgggggttgtggaccctgtctggacagagagcaactggaata

SEQ ID NO: 110051 - DNA, 76 bp, Glycine max
  unsure (1)..(76): unsure at all n locations
ctcgcctgctgtgccagcacaanngactgagacatgacaaactgttatatataaaacacgaacctttccttattgc

SEQ ID NO: 110052 - DNA, 380 bp, Glycine max
tcgcctcgcgtgggcgcgaacaaatgtgctcccatatattcccttgcaattagaggggagtggaaagaaactgaagccatgatagacgcagatagaaggttggctacttctgccatctcacagggacgggcaacactgcttcacgtagcagcagaagcaaatcagttgcacttcgtaaaggagcttgtgaaactactgagcgatgaagacttggaattacaagaccgcaaaggcaacactgctttctgtttagccgcagcatcgggaaatgtgagaattgttaaagtaatggcccgaagaaatagcaggttgccaactatcaggcgtggggatggactcaccccacttcacatggctgctttgcagggaaaaaataaaat

SEQ ID NO: 110053 - DNA, 221 bp, Glycine max
cacacgaaacaacaagggagtgccagggaagccccacaagaagaagcacgagtggcacccgcaccggccccagtggcgacgctgccaccccccggcaagggccacccaaccccaaagaacgaggtcgcaaaccgaggggggtgccaccacaacccggcggagagccacgagagccccactgacggcccacctccaaaagcccaaaaggcatggctggaggc

SEQ ID NO: 110054 - DNA, 286 bp, Glycine max
tttcgttttgattcacatgactctttaaagagagatcagattatatagtttcaatgcccactttttatcctgttgaaagcagtacacggttaaaatctaaaaatgattgattgatctattggataaatttcacttttcccctcttttcagctgcaaatatcccatcaatgcagagtttacacattctttgattaatatattatttatttttggtatctctacaaattacttatttccttagtgccaaagctaattgaaaatcacatttttttaaaaaggacaaatt

SEQ ID NO: 110055 - DNA, 227 bp, Glycine max
gtgggaatctacatagcagagcgcagactatagatcctcaagcttggcaggaaagagaagggaaagaggccacatacggggggaagggttgtggggggattcaagaagactaagaacacctttggtaactatgttaggacttggctgatgcacaaacaggaatcagcacttgctgtggggcccgtgccagagcctactagaagtggttgggcgacacgatggaacaa

SEQ ID NO: 110056 - DNA, 290 bp, Glycine max
aaaacgaccaaaacaacaaattccgtggtagtactgttttgcgtgcttcgacagaaaactctgcgacatcgaacaactatagtggatttgctttgtacaaccagcagaaagccccattttcggtcgctcgaaggggccgtaactgcggcaaaacgcccgtaccggggaggaatttagtcgtttaaacaacagcagccgcaaccgcatatattgggcacaggtggagccaaacggaaattgtcgaacactgcgagtgagcatagaatgcaccagcaaaacaaccaaaccat

SEQ ID NO: 110057 - DNA, 291 bp, Glycine max
aggaacaaagaggtgttccaagaaactacaaagctagtactcaatcccatctttatgcaatcccagtttcaccgatctctaggagaggatggattatcagtacattctaggacggattatggcttgacgatctgattatttgtatggagggtacagttatggagcacaggtcacagattcaagttcaatacatgtaacgagtcatgaatgtccacagatatcataagctaatgccctatgcttacatgatgatgcaagaggtgctgacatcattattgtgggtgctggggt

SEQ ID NO: 110058 - DNA, 195 bp, Glycine max
acgtgtaggttttctgtttcttcttttatagccacccctctctggaaaaatctagatctcggtcttacttgatctacgatacgctgttagagaccggatctgagtggatctgaaccagatctacacgccgatggtggttttgggctggaacaataaaatttacatcggagttatgctctgtataggatcgatcca

SEQ ID NO: 110059 - DNA, 130 bp, Glycine max
ttcacgcgtccgcactgttgtaaaagatatttcggagaatgattccaaggttttaatcggtgattcgccacccccgcagactgttgcagccacggtggctgttactactgctgctgctaccaccaccacc

SEQ ID NO: 110060 - DNA, 444 bp, Glycine max
  unsure (1)..(444): unsure at all n locations
cnatgtctaagtcttgncgaannnacttccccgctgtctcgtaatctccgtcgtcggattcggtggttttgccggaagcacgggcctgatcttcctccttcatccgaagactctctcccctttgccgtagtggtgggtggctgagagagaaagactaaacaaagcaaagatggaattggcaacctcagagttgtcatatccagggtcagggaattgggagatcccaattgatctgtttggttccaaaaaacatgccggagtctcacgtggcgttctagcgttcacagatgagtctggtaacatagtcttcagggtgaaccgccacccacccaatcctaactcattgccccttcccaaggacaagaaactcttgctcgatgcctcagaatgggtcttggaaatgctataagggaaatagtgaggagaacaaggagctggtgttta

SEQ ID NO: 110061 - DNA, 421 bp, Glycine max
  unsure (1)..(421): unsure at all n locations
gcttctcaattttttgcaacacgaaccgaccgccaatnggcttgattattttttggagcggaaaaagctttcagagctgctcagacgaaacccaattgaccgaattgcagcgatttcgttttgtgaccaattcgttgaacaggctttggtcggtgaaagagatttggcgacgatggagagaaacaatgcaattgagaaagatgatttcatgagcacacattacaaaatcgaagacctttggctgtgtgctctcagctgttttgcagcgtgtgattgggacttgtcgttgctgatcaaaaattcgaatgccatccgagtgggcgctttgttaagccgtctcatccgatgggcttttgaatccgatttgagttcacagagcagaactctctttgcggaagagcctttcaaatttctgaattct

SEQ ID NO: 110062 - DNA, 432 bp, Glycine max
tttccgtcttgttcttctcttctgaactctccgtttctctcacttttcacttcttcttctctcttaaactacaatggtagaagacgtgtgtttattttttggcatgttgtatgcagcgaaggtggaagaacacattaaagctgcgatttttatctcaaaaacttcatgagtacaggttcgtaaacacaaaagcttaaatttttttgggggttatacctttattttgttttctgacttctcacaatacaaaaatttaaatttttgtgtgtttctgagccttctccaacgtgcttattgcttcctatacccatctttttgtgttttcgtcctttattgtggtgtgatggatcaatatattttttggcatgttgtatgcagagaaggtgaaagaacacattaaagctgcgatttttatcttaaaaattctatgag

SEQ ID NO: 110063 - DNA, 367 bp, Glycine max
tcgccctcgcgtccgcggacgcgtgggttggaatctgttcgggatcgagaacgccacggtgaacgtgatcgtgattatgatattgacagggatcatgattatgacagagatcgagattgggactgggatcgagatcatgatcgtgaccgagacagggatcgtgaccgtcgccgtgattgtgatgggtcacatgtggatgatagaagtggtagaggcaaagagagtggaacaaagaaaagaactttggatgatcgtgatgattatagtgactctaaatctagagctgttaagagctactatcctgatgcagagaagagggagtttgagcaccagcagagctgaatctgatgttgatagagggaagatc

SEQ ID NO: 110064 - DNA, 500 bp, Glycine max
tcgcttttgggcatgcagacgctgaccctctttcgctccccccaccctatttctcaaaacgctgtcgttccccgccacgccatgtcccgctcctccgaaacctcctttcccaccctcactactatctccatctctttctctcaactccaagtctctctctctctctttcattgttctgcgttttcgttttcaatatttttagtgatcgaaaacaacgctcaagctgctttctactttaaaaaattactatcgttcgtgttacatgtgtttgttcctctgttttgtgataagaacgccgacttgtcgttcaagattgaagaaggctttggacccaatggattggggattctatccgtcactgatgtcccaggatactcttcattgcgcagaaatctgttgcatcttgcaccaagattggcaaatcttcccaagaagtgaaggaggatcttgaagatcctcatagtaggtacaattttggttggagtcatgggaaagagaaa

SEQ ID NO: 110065 - DNA, 286 bp, Glycine max
tgtttataccatgatggttttgtggatggatggaagagttcagcttggagtagttgtgtcgtacttgtatctgctatcaatcaaacaaaatggtggtttgcgaagcggtttttgcatccagacatagttgctgaatacatttatgtatttctttgggatgaggaccttcttgttgataattttgagacaaaaatttcataacctattctgaagattaaattcgtgaataattattgagtgaaatagtgctatatgatggcataggtggtttgtgaaacggtttttg

SEQ ID NO: 110066 - DNA, 205 bp, Glycine max
tctctttcgcgtggggcaggagttaacagctgatgcatgaaattgtgaaacatgttaattgctagaggaagattgtttctgggaaaacaatagttgttagaaggtgtggctgttcaatttatctgaaataatcatggaaattagctacctatttaatagccatttattaattagagccaggagctgagtccattttaggtgcact

SEQ ID NO: 110067 - DNA, 292 bp, Glycine max
tcggtcggtgcttatttcaataacgtcttagaatgcctactttcaaagacgttactgtggtaatcatcgtctttgaaagttgctcactttcaaagacggtgttttgggattcgtcgttgaaatttttaaacttcgacgacatcacattcaacgacactcgaaaaacgtcgttatatcccttatttgaccgtcgtagaatcgcttttttctagtagtgtgataaggactaaaagttgtaacaaaagaaaatgtaatattccaaaaattcaattataggaatttaagaaatatt

SEQ ID NO: 110068 - DNA, 303 bp, Glycine max
  unsure (1)..(303): unsure at all n locations
cctacgttttcgcccacgcgtccggaagccggaagagaaggatgtagagcagttggttttgggggtaggtcctgtgcagagatcgttctggagactctcaaggctagttcctttggaaggtctacgaagacaattaagtaaatgcagagaaagacgggtcaattttattgaaacaaattcattgcctgattctcttgctaatactntgattgaggaggaagtagttgcaccacagtcacttgaaatacaagagggttctgatggcatatcactcaagcctttacctgatactgataaacattc

SEQ ID NO: 110069 - DNA, 308 bp, Glycine max
gatggttggtctggattttgagttctgatccaaactgttgaagctgaagaacctgagcccaattgaactctaacgtgccaaaattttttgagttgcatgtgattgtgaagataagatgagtattgtgtatagtcatgctgtgaagtactctcaaggggaaacaaggatgaacccagaaatggattcaaacattggtcaacattgtcaccaacaaaattctggactaatgagataccgttctgccccaagctcattgctcacaagccttgcgaacaacaacaacattaataataacaccaccaccaatg

SEQ ID NO: 110070 - DNA, 202 bp, Glycine max
tcggttacaattcaactcctttgcaacaattgcaatggctccaaagctcactctctactcgtttgtcggctcgcagtgggcgggcgttgcccatcttgccttgacagagaaaggattctctgcagatgactacgaagtcaaggaaataaacttggctgccgcggagaactttgcgccagaatatctcaagatcaacccccac

SEQ ID NO: 110071 - DNA, 302 bp, Glycine max
tcggtttcaaagttggtagtttaattgtaagctacactttcaaatcccgtttttccctcctaatcaaggtgccactttcctattccataagtgcgagtgtcaaattcttcaatcaatcccacttcctgagttgggagtgtaatgattccaatctcaaaatggatggataagaccaaaggagagttacacaatcaattctatctatatatacatatgaagcagatccatctcatatatctcacttaatagttaatacatatatattctcatatcctcgcatatctgttttttacgcattaaat

SEQ ID NO: 110072 - DNA, 255 bp, Glycine max
ccttcgctttcgtccacgcgtacgctcaaatgttggcaccttgtttttcatagtcttgtttcgtcaagaacacaatctcaccatgaatcatcatgttgtgtttctcttcacactaacctttcttcttctttcttttaatgccaaagcacagcagaattactcagggaattcaatactaagttgcaagaatgatgacaaaatggggccttcaccttccttcctttacacttgcaatggcttcaacaaaacctgcat

SEQ ID NO: 110073 - DNA, 236 bp, Glycine max
ctctctcgatactactattccctgttgctaagacttttttatttgtttgttttcataattgattatgcttttctcagccacgcttgctttgctttcgctgaagattatcctcacctttcttttgtttttttaatcaatctttctcgtcaagtctcaggttttgttctttactcaattgcgttccccccccccccccccctctctacttagggctgatttttgtgggtatggaacac

SEQ ID NO: 110074 - DNA, 568 bp, Glycine max
  unsure (1)..(568): unsure at all n locations
ttaaattaaatacaatatttaaaacatctctaaaacctataacctacaatattaaatcatcatgaaatccttatcaatcctaatcatacttttggtatctatcattgctattgctcatgcaatgcctatgcaaaataatggagaaaaaatcattaaaagaaaattaggatcaactgtgcaacccttgggagtgagatttaaggatttatacgcaggtttcaatagtcaagtgaaaaaagttaatgaaaaatttgacaaagaaatcaaaaaatttaatgtagtagtaccaaaagccgcagcagcagatggtacagacccagaggacgtaaaatggttgattgattggaatggtaaatacaaggcacttgtagatgatttggaaactaccactacaaagttggacaaatcaatccaaaagcttgacgcanaattaaaggcgtaatgaaaataattctgtataactcttagtacttttcataatatctttttttatttacttattttaatattaaataggacaanataattattatcataatgcaattatgtaacttattttaaacttagt

SEQ ID NO: 110075 - DNA, 233 bp, Glycine max
ccctgctttcgcccacgcgtccgcccacgcgtccgattaattatgaatttctcccatgtgcattttaaacataacgaatgcggtctttttgcacgagtaattcgctgagtgttttctccaaattttcgttttattcaaaaattgctgtttgcgctgcgaaaagttgcaggaaaatgtcatctgagtcaaatatggagaatttccccgccaaattggacatggattatatcaaa

SEQ ID NO: 110076 - DNA, 342 bp, Glycine max
attttaattgaggatcagttgactggggggctggtcattaattttgaaagggtcaagagtgtatctgaagatgatgcaagcataaaacctgaagatgcatcttacattgttgatgttcttacgagatgtgttgtgaggaaagaaaaaattggaaaaaaatctatcaagattgttcctctgaaagaagtgggagaacctgaagtgggttcggttcctatctctcagatcaatacaacaagtggttcgcgtggaaaaacaccgaaggatcttttgccaatggaagcttgagaaaacacactgacaaaagtgtacaaaaactcttactagatttggtgagaaagg

SEQ ID NO: 110077 - DNA, 406 bp, Glycine max
cacttcatatgttgcttgaaccttacacgtcaccatcgttgcgtgttgagtgttgagagatgggaaattcgttcggatgttcggcctccggcgaaaggctggtgtcggcggcgagggacggcgacttggtggaagcgaagatgcttctgaactgcaacccgtgtctcgccaagtattctactttcggtggcctcaattcccctctccattttgcagctgccaaaggccacaacgaggtccctttatttcactttttttacatctaatccaaccctttaatttatttatttttctctgttggttttctgttagattgtggcattgttgctggagaatggagctgatgtgaattccagaaattattgtggccagaccgcattgatgcaagcttgtagatatgggcatt

SEQ ID NO: 110078 - DNA, 438 bp, Glycine max
tttctttatcaaaatttttggcatatgctttatcatgtacaggaatgttttccatatcttcttctctcatgcaatataatttgatatactcgctttttcttagatgtttttagtgtacatatatgagatgaacatatatccttatatgctatccaatgtaaatgtaattctttttctcttttgttttgatgatttgattattttacattggctataatcaattgtgttggacagtataatctcctttcatatctgtcacatgctaaattgctaatgctttcaagtactgactactttatgtgtttcactcattccaatgattatattttgaatatgatgaatcggtgaatatgattgatcttccaatgttgtgattatagattatacctctggactaaggatcataggtaacaagtttagtaaatgctaatttttttt

SEQ ID NO: 110079 - DNA, 338 bp, Glycine max
atactcgtccgctcaataccaaatgcaatacaatcgaccagttcaaatagctgtatgggctgttattctcctttgctttattggtaggcctttttttctttctataatatgtatggccttcttgatgatgctttccatttacccccccccccccccctcctttggatatacaacttttttttgccccattttagtttttcctggttcctttgttcgagaagccttttcatggtatcattgttcttgccttttcatgctttctttgtgggcatgattttgttgcagctatatatttcacgtatagagatgaagctaattttgaatttatagaactttat

SEQ ID NO: 110080 - DNA, 207 bp, Glycine max
cccaaaaccctaaccctagcccccttcctcttccgatccctcaccaccgccccctctcgtccttccctacccgcgctctccttactacgccggatacttcgatgcagccaacccctccctccgccgggtactcctgccaaacgccccctgcctccgcgccctctccacacgcgccaccaccttctccctcaacgaccccaaccctaa

SEQ ID NO: 110081 - DNA, 254 bp, Glycine max
atcaactctctctgattcaggggcgctagtattatatacatttttgagatgattgatcaaccactcaggggcgaggatttgatgaatccaatgggcgctagtactgcaagcaacgaagaactcaaagagaccgagagtcttgggagagaggacattgaagaggctccaattgtgcccgaggatgtgagcagaatagcaccatggataagacagattacacttcggggactagtagctagcttcctgattgggat

SEQ ID NO: 110082 - DNA, 436 bp, Glycine max
attattcaagcataaatccctctttggttgtcaatccgtcattatgaccgtaactggcaaaattcatcaatacgcaaaatacgcaaaaggtggcaatcgttttaccagtattttatcttcgaaattccattctggtgaaaatgctttgccaaaaccatcagtggaattaaaaatgtcttgtcactcccaagaacgacgacaaaattctttcgttcaacaaaaaagtagacataacagaaggaaacgtccgttgactatgcttttcaagcacaagaagcaaaatgttaccacatcgggcccattgcgagaagtcaattgcgttccaattgccgaaggattggatattgatgcgatgtgcggggacttaaaatttactaattatttcacacttaattatgttgacgacatcaaaatagcagtccattggcaaaggaaa

SEQ ID NO: 110083 - DNA, 201 bp, Glycine max
tcacgcgtccgcggacgcgtgggctgaacttggcccatgcacgacactttgggcgatgtgggctctctcgcgctaaaggtttcgcccttgtgcttcctacgcgcttccttcggaattatcgaaaccacacgtgcgggtgatcgacatggactcatcctagtcgggttctgaaaggccaccaccaaagccgccgcaggttgt

SEQ ID NO: 110084 - DNA, 300 bp, Glycine max
  unsure (1)..(300): unsure at all n locations
gtttttttttgcacacgatgagacgaagaacaaacacggaattttctctctcttcttagtattgtgggttgcctaacttttgaaagtttaaacccatcatatttgaagaaattagttcagagttgaactcaaacgtttccattactttatactactatgatcaataaagagtcaattattttactttgaagagaagaanccattgtaatttaattatccggaaaatatttttttaatattatttgtaatgagaaaatttaataaaaatataattaaaactgggtaggggtttgagaggtc

SEQ ID NO: 110085 - DNA, 229 bp, Glycine max
tctctcacttaaacaaaaacgcacgcccccgggggacgacagctaatcaaatccttccacggctaatcggcgatgctccctctccggtcaccggcggctagggttccgaccaagcctataagctcaaacgccactgtcacggaatccgccagctcagagcctcggcctccattaatgaatttgtcattttcaaagcattaaaggctgcttttcgcttgtgataccttta

SEQ ID NO: 110086 - DNA, 164 bp, Glycine max
acattgttgtttgctgcctaacattaaacagataaacggttggtataataaacaataagtttatatcttctatgaaaaagggtggccttctggtgaatgttgctagaggtggtcttgtagactatgaggctgtgatcaaccaccttgaatcaggtcatttagga

SEQ ID NO: 110087 - DNA, 242 bp, Glycine max
cacgcgtccggtcctattttctaatttgtgattattgtagacgatggatttttgcttgcaattgtgtcggttgttaatgtttgcattagccctggccatggtagttgctgttgcacctgatcgaaccctttctgaagtcacaccttcttcactgaaccaagcagtcctttctggctgcaaatcctcttgtggagatgtcgaaattctatatccattcggtattaggatactcatctttacca

SEQ ID NO: 110088 - DNA, 451 bp, Glycine max
tctcgcgtccgataaatattattactcgtaaaaaaattaaaaaaataaaataaaatttagaataatgtactactaatcaattcaaattggcatatgttagatatatgaattacgatcatgtatgtggaaacaaaataaaggatcttggatttaattctcttcttattaatgaatctataagtctattttgattagaaaaatcataataaatccttgattgttgtagtgaattactaagaaatgtttgtaaatagttcacatggccaacaacactaacatggctgcaatgcaatggcagatcttttgtttggaacacagatcctacaagtcccacgcgtgcctgaaatccgaccacaacagcagaaaggttgttgtttgcgaagcatgttccatgtccatcgagaccaccggccatgtgggacaagacgaggaggcaatcttgcagaagcac

SEQ ID NO: 110089 - DNA, 225 bp, Glycine max
tgaccaggaagctttgcagcttgcgaatgaccttatggtaaagagggataaagagaaacttgagctagaaaaggaggttgaaatatatacaaaaaaggttcatgaatatgaggttagagaaatggcgatgtcaagaagagaaagtcatatgagaagcagaactgctccctcttgtagcaatgctttagatagtgatgaactatctattgatttgagtcgagactt

SEQ ID NO: 110090 - DNA, 192 bp, Glycine max
gtgattgctgtttccaatatatgggaaccaccgtggtctgttcttagcaatggtttgatgtatacgaggtctgtcacatagacagggccgccaatggctgcattggtaatttttggtgaggaatagtttgataattctgtgtttttaagttagttttggtcgagagtataatcaattgcgtatagaagggat

SEQ ID NO: 110091 - DNA, 100 bp, Glycine max
tgagggcgctggggcaaagaaagatatacaaaggcgacgggtgcagcaggggctattctcaatcagttctgtcacggcgattgatgagaaacggcgaaca

SEQ ID NO: 110092 - DNA, 493 bp, Glycine max
gcactagtaaaaaatatgttaatggaaagattaatatcaaataatatgaaatgactaaaaaatgtaacacttttaaagatggcaacaatagatagcagatgatttttgggtcactagcaccaccttcctttaaaatgaatttagaagccaagttttatatgtgtcttagtaccaattggacactgagaatatataaaagggtagcagaaagatgaacagaatttgcagctgcagtccctcataaaaagcagtttgaatccttctatcaaattatgttattatggtctaacactgaaactatttcattcatcccatttcctactattggcatttgggctccttttatcttgtcttggtaccctggccaaaacatcatactccaatagcatatctttttggtgttgtttaacatgcaccttctctgttctatctcagctgttagatgagggtgatatctacataagtgtaaaaaggtatatataatcaatgatta

SEQ ID NO: 110093 - DNA, 57 bp, Glycine max
ctctctttggtaatttctgttttgtacggtcgaattatttcaaaattagggtgtgtt

SEQ ID NO: 110094 - DNA, 57 bp, Glycine max
ctcgctttggtaatttctgttttgtacggtcgaattatttcaaaattagggtgtgtt

SEQ ID NO: 110095 - DNA, 424 bp, Glycine max
cctttacctcttggcccgcaaggacaagccggaagcccaggacgacctgggggatcgggacaaccaggacaacccggacaaaatggagttgtgtataagaccgttcctggaccgaagggacaacccggccaacctggagcaccgggacagcctggcgcacctggacgacctgggaagcctggagaccaaggacaacccggagccccggggcacccaggacagccaggccaacccggagcaccgggacagcctggtcatcctggcgctgctggagcacccggcaaagatgcctcgtactgcgcctgcccgccccggtcgggcggcggttatggcgtttccgggggaggcggaggcggtgccaaagtcgaacacgcgcccttgcccgctgaacaggcacctgtgccggaacaaccggcagaaagcg

SEQ ID NO: 110096 - DNA, 274 bp, Glycine max
tttagtattgcgcccacgactggccggacaccaagggggatatatttgcaagtccggagcatgttgcctagggcgagagctcgacacctactgacaagacataacttctctcagaattccgagcgaaatatttctttccgaattctaatttagtgatcccgacccttcattcacgaacacacgacctctcatggcagacaacgcgggagatattgatttggactcggtaatagaccgactgttggaagtacaaggcaaccgcccaggaaagccc

SEQ ID NO: 110097 - DNA, 219 bp, Glycine max
tgatgtagtagtgcaacagggcgaactcacacagggccaaccgatgtaccaggcaagaccagatgggtttgtgtggatggctatgagattacatcgttcatcaaagctcaactggaccagatgatgtaggctcttagatccgagtgatgaaagagggatattacatatcagtatcacaaaattattcagtgtgaagcaatatggggaacacgtgtgttg

SEQ ID NO: 110098 - DNA, 371 bp, Glycine max
ctttattttgatgctagggccgcaaagaggttggggagcaagaaaaatcttgttattattgaatagtgaagatgaagagtgatagctggtggtgtccctgcggcaatatatggtttatttgtatagcatggcactattgagtatattcattcttacaaaccgtgcttctggctcatcctaaagaggaaaaggaatctggatgacaaatggcagagggtcttgactgtccttatctataataacagttgataaaatcgaaagtagatttatgtagggctgttcaaataaactactcattccacgcattataattgttgtccttaattggtttactcaaaccaagaaaaactaataaatgaattaaaaaatat

SEQ ID NO: 110099 - DNA, 282 bp, Glycine max
ctttgtttccgcccacgcgtccgtggacgcggggggggaatagtagttacgtgtgcggtgaagcgaaaaaaaatccaaatctgttttgacccaattgatgctcatgtcggctgtgttctttaacttcgtggaataacaaaaattcggttgcaacaattcatgaattcattaccccaatttgctttctcgcaaaaggaagcgaccctgattggttttgttgcatgtaatggagattttggattatgggcaccccgcataaaccaaaaaggtcttacttttttt

SEQ ID NO: 110100 - DNA, 307 bp, Glycine max
ggctacaatcactccttcctctcatcctgtataaataaagcgcttaattcgtgttgctactcggctcagtttccatggattgggggcttgctatatcttctcatcctaaaccttattcagtcacaactggtggaaatctctggcggagtaaacacaccaccaagaatatttactttgcaattgtgcatggttactattactacatccaatatttggtattttaggttcttggatatcaaaagcttcacgacacaaaagggaaactcaaatagaacataatgttttgaggttccaacaaccaagtttg

SEQ ID NO: 110101 - DNA, 355 bp, Glycine max
tttcttacgcgtccgcccacgcgtccgcccacgcgtgcgatcactgttgcatttatttgagatatttagtatttgggtacaagtttgttctttagtttaaacaccgacgtctctccgtggcggctatacccaatttgaactttaattttcttccctttgtgtgaaaaggttttgtgttggagttggctttttgaagggcgtgcatggtgaagttatttgtgtatatgaatgatgaagaacgatagagaaaagggtaacgaggttgaccagagttacatacagcagcaccactcgttgtcaatgccaatgatgttttcgggttttaacagagagaaggagatgtcagccatgatca

SEQ ID NO: 110102 - DNA, 333 bp, Glycine max
tttgtagatccatctcttgtttcttgctttctttcttcaccatgtcacttgctgggaaaatcaccactgaaatcggggttcatgcaaccgctacaaagtggttcaacctcttcgcaacacaactccatcatgttcaaaacctaactgatagagtgcatggaaccaagctgcatcaaggtgaagactggcatcacaacgagacagtcaagcactggacttataccataggtaattaaacttctaactatattaatatgatcaaacgaaaatgggtagattattatttccccccaagtttgaatatagttttagtctctctctctctctctctct

SEQ ID NO: 110103 - DNA, 464 bp, Glycine max
ggaaaggatttactgcagcagtgtttccgaagggaccctgcagatcgaccatctgcagcaacgcttgttaagcatgcctttgtgcagaatttgcatgatcaacatgttctagttcattcacaatcctatccaagaggagacctaggaccaggaggtaattcagctagtcctagagacactaccaaaaatagacgtggcataatgcaagcctacattagcacacggatttttaacaatattcagaaagtaatcggggatacttccgaacaaagcaatgctaaggagtctaatcatattataccttatcttcactctcatgttccagaagtgaaacttcttcaatctacattggaatctggtaccctcaatttcatgtctgttgcaaattccaaaaacatttcctccgacatgagaatgatcacgaacttctgaagtatgccagtatgcttaaaattggagggatg

SEQ ID NO: 110104 - DNA, 491 bp, Glycine max
cccatgtttccgcggacgcgtgggcgaaggatcactaaagagaattcttttttaatcattctcgaaaatgccaccgacttgggccttagtgccgcttttgcttctgttctttgtccatttcattgatgtcggattcgctcgttgttacaaagcgtcaacaaaatacaatccgccggcggaagaaacgacgacagaaacgacagaattgacaaccccaacggaatgccctgcgccggtgtgcccatgcgaatgtcccaccgaagaaacgtctgaaacgcctccttcgacgggcgggggagggggcactgacgacgacatcgtgacctcgccggaaggagaggagacgaccacgcccgtcttcggttgtgttccgggcccgtcggggccttccggtccaccgggcccagcggggcaaaaggggccccagggaaaatgcggcgacaatgcgagcaaacgcaaaagggaagcagcagtgccgaacgagtttatga

SEQ ID NO: 110105 - DNA, 248 bp, Glycine max
tttatggcttgacttttggactccctgattgactacaggtgtgcttcctatgattgtccttcaggagatatatgctttaagtaatatcttatagaagctggtgttatgtgctgataaatggaaagatgtaatcttattaatgatgtctcttagaactcttgaaggctcttttaagccaacacattatcttttatttcaatatatatatattattttctaagaagaaatagaagtaaaggaaaataaaa

SEQ ID NO: 110106 - DNA, 471 bp, Glycine max
  unsure (1)..(471): unsure at all n locations
ctttctcgtccggcgaaattgatagtagggtttccaggaaaataaacctgaagtgtcaagggacgaaatcctcttatctgggattttagatgagagtgcgattgaatccaacaactctaagactgacattcagaaaatttcctatcatttttctaaaaaagtgaaaatcccaagaaacagttgaatgagttaaagaataaatctgaataacaggagcattgtgcaatagagatgataaagtcgaggaaaagccatttagatgtcaaagcaatgcttttagagaccaaattaccaagacccaaacctcctccctttttgggtctatagcaaacatcccaactaactanggtgtaaccatgtagaagctgctagattcctagatttgtttgctgcatgtctaagccatatacagtgttttctggtttgctcggcataatcactaaaacagatcgatcatcaactctgggatat

SEQ ID NO: 110107 - DNA, 494 bp, Glycine max
gaactttctgaaaatgctacaaataatctgtatgcattcagatatgttgaggcaaacacagatcagtgcagaaagatgaagacacacacacatgaactttcaagatcaggggatgctttgctgactgatgctgaaattgatgaccttcttgaacacaatgctaatgggagatcagaacatgtgattggcaagttagagactgtcgggagtatggttaatacagagctgactgattttgaagatgcacctaaattttcatcgcttgaaccttcattgtttggcaatcctcagccaaatgctgatggctccttgacatctggctatgataagttcaatgaaggtgataaaggccagtctggatctgacaaatgtgcagaggacacactagaaaacaatgaagttgttcactcaagccattgccatgacctcaaaatgaaagcacctgtgaaatcaaccaagttagttattaaaaagaaacaaatttcagcagacac

SEQ ID NO: 110108 - DNA, 465 bp, Glycine max
ctcttttagtgcgtctacaagagacctgctgctgagatgattcgtgctgtaaataaatttaaggatgattttggtggacaagttgttgctttggagcgggtgcaaccttcgtcagatcatgttcctcatagtggatgaaatagaggagggatttggctgttatttgtaacagaaagatattgctcatgattaagggaaaaaaccaacaagacaatattaactcaatttagccggaatgagaatgttgcattggatgaatggacatactagaccacaagatatgattgggaatgaatgcattagagaataagttggagctgcatctattgtagaaaagattgtagaagctcatcttatgtgctttggtaggcatatgtggagaagatctacacaagcccaatagaacagatggagagtagcaatccctagtggtaaaggtagactgggaacaactactatcaaaat

SEQ ID NO: 110109 - DNA, 425 bp, Glycine max
gttcgttcttactcgctggatcgtaatttaacttggggtttggtcagttatctaacataggcacatactttgctctgtgtgtggtttttagagttttccatcggacatctgaggtttgtgattaatccttgaccggagtactgatgctccccctctgtatgtaattgttgttgtggcgaatgtaactgcatcacatcttttatggagtttgccacaaggataagaagaatatctgatttgagagcgagcattgagagacagagagatacagatagaatcgaagtatcacgcgatcgatgtgtcttaaaatgagcatagttggttcacatttgtctgaagtctacatttttgtagttgtttgtggggtcagagctgtaagcaaggtcccttgtgccatgtgtgattagcatttgatatcccatact

SEQ ID NO: 110110 - DNA, 226 bp, Glycine max
atcttgtggattagtctccgagtgtttttattggtggaatttcctctcctttatggagcattgattcctttatgacagtttgcgatttttgtcggagggctatgaattgcgggtttgattcaagtttgcttctttggaattgggccgggttggaatcttccaacattggagccttggtatctgattttgaattgggtatgtacgtatgaaggaaagttttcatctt

SEQ ID NO: 110111 - DNA, 361 bp, Glycine max
ctggtatacagcacacaacaaattctctcaagatctgttttctttagaatggggaatgcagccgcgactccatgctcccatccaaagaatacatccttataggggtcgacaaaacttattttgtgggatggcacgatgagatctctaaagggtaagcacatgtgctagtgagatcatgtttgagtttccaaacaaggtaggttgccatgcagattctatagtcattggacacccaattcctgctgtagccttaaaggatgagctcattcaaggggaagcctatttagatctcccaattgataggttgatcacaagcaaaaccctatctgtgccttcactcttgtccttgggatcacacact

SEQ ID NO: 110112 - DNA, 490 bp, Glycine max
tgtatgaccggaaagtttcacaaggctgtcagtgttttaagatttgcagtaatgaataaatatccactggacactgtagcatacacagttggcatctgtgcacttcttagaggtagaagaactcaagaggcttgcacattgtatgaccagatgaagaacgatggtctgaaacctagtgttcatacctataatatgatgctgttcactttttgtaaagaaagggatctccagatgataaaacagatactgcaagagatgattgattcaaggatatatttgagtggcagaaatttctccaacttgtgtaaatatatgtgtagatcagatactcatctttctcttttaaaattgttggctgagataagagatttgaggttattatctgccaaggcattgcatttcttaaactttgacaggcatgctgatggtgtacaagcaaaacataaacatcaggcagaagataatacagagtggaacctaattttggata

SEQ ID NO: 110113 - DNA, 441 bp, Glycine max
gtctgtaatgcatcaaccttcatggggattatctcctccaatgactgggcctcatcctggatcgtcacctcatatgacaggacagtcataccaccctaatacatctgaacatcctcctcacatgagcagggtagccccgcaaatgacagagcagcattatacaccatctggatcttcacctcaaatggcaggacacggacatcagccttatggaacaccacatgggccccaacaaatggaagaacgatggtatccatcgtcagggttgtctcctccaatgtcagggtcctctattccttggaatggagcatcagctaaaatgtcaccaccatatcatagatctgcagcaccatcttctcaggtgactggaccatatcacccatcatcatcatcatcatcccctcctcactgtgaggaatctcatcaacagcaatcagaagt

SEQ ID NO: 110114 - DNA, 486 bp, Glycine max
tgtacgcgtgggctggataacaacgatttggtaaataagatgtttgtgtttgtttggagacactatttatatctatggcagctctagatatttgacttggtctataccttaaattctgtgttctacaattcaatcttgtgtgaataaaattttgcaggaccttcttatcctccattatatttttatagtggaggagtcaaagaattccttgctacaataaagcaacatgttcttcttgtgagatctgaagaagatgccaacgtattccttgtgaatgattttcagaatacactgcagaggactttgtcttccttggagatgcccagggctgttccccttgcatgtggaccttcaaatacatcagttgatgaatccattttgattgagaaccaagaaagagctgataatggtgccaatgatggaagattcagtgttaatcaattccatgggagaccaagacataaagtagatcctgctcgagacctc

SEQ ID NO: 110115 - DNA, 377 bp, Glycine max
ttttcccccatctgtagtttgtggggctagaagtttctatttctgggcattcagaagattgcaggaaaagttatcagctttatttccatattgaacagagttgttgatctaggtagtgttgggttggaatcggtgatctgtctttgggccaaatttggagggtgaatgctggttaatatattttatttttgtgtttaaatggttgatattcgaatatggaaatgttaggggtgtttacttacacttttgttttctgctttcattgtttgttttcactttttaattataaaactgtcacactttgttttctatctgtttcatgttttcaaagatttgtgagaaaaaaactgaaaacaactttctttttttctctgtac

SEQ ID NO: 110116 - DNA, 228 bp, Glycine max
cggatgcttgggcggacgcgtgggcggacgcgtgggggagtaaatgatgctgctcagtgaactgtattgtaaagtaccaattcaattccttccgtgggaaggctaacatactctggaagatatgggggtgatataaaccttcttcactctgcattctcgtgtaacactaaattgaggcctttggatggcctgtggtagatatacaaggtactgtatcatttctgagca

SEQ ID NO: 110117 - DNA, 438 bp, Glycine max
tctatgcgtccgctaaatatgaaatgtctaattgattgttaaactgattatggttaatattgtcttattactatttattcacaattagtcttgaagcttttgttttgactgctttcaccttgcagttgaaatctcctgtagtttcaagaaagccattgcaacctgataacaagaagcatcctgatgatgatgattcttgttcagttgcttcaatgtatcctcttaaatatgttgcagtgaagagtgtcaaattctcatgtcgagtttttcttattttggcaacggttctacttccttttaaaatatgaaattgcttgtactgcttgaccatgtaaagaactgcagcttctgtgcgatcaatcaagtccaggacaactgttgcttctgctcctgtgcctaggtccagtcaacgtgcagaaaaacggatggagttttata

SEQ ID NO: 110118 - DNA, 225 bp, Glycine max
cctatgcgtccgtttgaaactcttatttctttcaggtgaatgatggactttaagtttgggagatgaagaatcatcacatgattctcatgatgatttttgccggcaaccccatacccatgatggaagatgaccaaatactagccatgactatcatcaacccccttgctatgatggaagttcagcgaatactagccattaatatcatcaaccttcatcatatgctgg

SEQ ID NO: 110119 - DNA, 482 bp, Glycine max
cggtttcgtgggttcaggtattgaggactccatatatgaaaaacaatggagctcccattcaacaccagcaggtactccataatatttatgtccgaaggctctagtaacacacacatacactaggcatcttgattaactgcgatcaaaatcaccctagtgaattatatacttcatcatttcttaattataagatattttttttagaaatttatgtcttttttcataagattaatttttaatttttatatgtattatttttttcctacatattcttatttaattatttttttaaaaatattaatgaaaatcaattaagtggataaaatataagaaaataataataaataattaatatattgaatatgattaattaaatgaattattcttctttaggaaagaaagaaaaaatatatgttacaacatatataaactgtttgataattatatagtcatccatctaacagtttatgttacactacatc

SEQ ID NO: 110120 - DNA, 329 bp, Glycine max
tgtattcagctgagggacggaacccaagagcagggcctggtcacagaccatctcattatttgtgggatgaatagtcattttcccttcatattaaagcagttaaataagtgtcaggaactcgctgctctctaaggcacagatacagctaggaggcagagaatactctttatgacggatcttccaggaaaacagattgatagagtaccagacaatattgcagaagattcacatcatattgatggacttacaaagagatgcagccttagtatgaccaaatcatttgaaagagcatcacataacagggcacgtgcaataaatatactgccaac

SEQ ID NO: 110121 - DNA, 370 bp, Glycine max
ttctttcgcgtgggttgatatgctcttttgataagctgaaacatgccatcaagttgtatgacttttttttttatcaatgtcagaaaatcttggttttatctctaatttttgttgttcactgaaaaaagaacattcttttcatttattaaattgttatgatggatgtggcattcttgctgtgactcaattctgatttcatagagattttttctcatttagctatgagctttgcgtagatcataggttgggatttgtgaatcaataattcaaagttttatctccccattatgggtatttaatgcactcctctttgatatgccctatttagatcactgcttcagatcctttatcaaatgtagataaagaaaaa

SEQ ID NO: 110122 - DNA, 315 bp, Glycine max
tttgttcgcgtgggcggacgcgtgggcggacgcgtgggccttaaaacacttattccatctagaatcacggttcctaacatttttgtttcaggcatatattataaaaaaaaggcttgcctatttacctatcttgtttgcttcatcactcggttctgattcgatctagattatcaactttggctatcgatgcttatttgcttgcatttttgctcttattggtcgggcgctcacatttcacttgttagaaacaaaatgaaaaaaaaaatgtacttgaagacatgtagctggtatacatgattcactgattgatcttga

SEQ ID NO: 110123 - DNA, 425 bp, Glycine max
gtttttgttcatcttcctcctctattcactggcacttgatagatccctctctcacagcttccattcgcaatccagtttctctttgatcggatgcatcttctgggttatgaaccttttactcctcatcaacattatttgtagagggaaaggaggtgtcatttcagtttgaacagctgtagaatctcaagaaatcagttatggctccttctaggaaatctagaagtgtaaataagaggttttctactgttcgtgaggctgcatctagtaaagacaaaattgcagagaatgctagcaaaaataggttgaaggcgagtcctggtattcagaacaagagaaaattggctgacatgttagggccacaatggaataaggaggagcttgagcatttgtatgaagcttaccgtaaatatgggagagattggaag

SEQ ID NO: 110124 - DNA, 78 bp, Glycine max
gctcgtttcagtgagtaactttactcaaaaaatgcaaaaggaaatacagtaataatcaataaaatgattcttttttgt

SEQ ID NO: 110125 - DNA, 393 bp, Glycine max
cccatgcgtccgcggacgcgtggggaggatttgttaagaagctgcaactgttgcccaaagggatgtcagttccatcaaatcccctgccggatcagtccgcctccattggcaatctgagcattgggccgggtgcaaaatacgcagaaattgtcgatggcagcggcggttccgcactgaatctgttgctgttgatcacactggccaagtcgatcagttccgcgggcaaagtgtcaaaactgagtgacaccgtactccgcatggactacgagcaccgtaaccgacccgtgcagctgacggtcaattgggacgcggtgacgcacgacaaattggacttttaccacttccattggacaaagccggaggacgaagtgttggatcatttggaggatgccc

SEQ ID NO: 110126 - DNA, 231 bp, Glycine max
gtttttcttactagagttgatccttttccagtagctttactggctgttctttttggcgttaagaatgaaattctgagttctaacgccactaatcctatgctgacgcgacttcttgagaactgtaagagtctcaaatatctggttgatgagtgtccttttgcatttgtgaactagtatgtaatattttattcacttaaataaagcgcattactatgtgcaatgagtgtgttt

SEQ ID NO: 110127 - DNA, 458 bp, Glycine max
ttttgatttttccctcctccccatttattcatttgtcctccctatttcttcctcaaaatgccctcctccgttggcccctcttcctcttccgatttgctcatccgtcttttcctacttcctagactcggccgttcactttgccctcggcgctttcctcttcttctgtccgtccacctgtgcccatttccttttgaaacgcccttcttccgatggcgtccattggcaccttttgcgctgcgtcggtggccaattgatggcctccgccactctctcgtggcgttgcgcctccccccgccgtctccccgagctgcgttcgtcctgtctgatgctccgtctcctcggcagcgttctcttcgtgttcctcttcctccacatccgtgctgttcatcccgatttgatgccatttcttgtgttgcgacaactcatctggttctgcttttccatgattgctttgtgtg

SEQ ID NO: 110128 - DNA, 345 bp, Glycine max
ttttgttttgatgttttcttgaagtagtactcttacttcgttcattcttgcagggttcatggatgtgtcttaaattatcgggctagcacaggagccgtattggcgaaaacgactttttcggagtggccagattttcacttttctttttgtgagtttcttgttgctgattatttgtggcatgacctatgggcaatgatatcttctgcttgaagagcatcaaagagtcccttagagacccttacaactatttgcaatcttggaatttcaacaacaaagtgaaggctttgtttgtaagttcaatggggctgaatgttggcaccctgatgagaacagagcccttaatct

SEQ ID NO: 110129 - DNA, 330 bp, Glycine max
aaggcgaagtgccaattatgaagacgaaagcgaatcggacgaatacgggtgagaatacaaaaagaggggagacagtagcgaagaagagggagagtacggttgccatgaacgggcttatggtgaagacaggaacaattatgggacgcgagggtacggggggagttatgggtacggcacgaaagagaagggatacgggggagggggcggtgagaagaaatatgacggagcatataaacgcgatgggtatggcggtgaggagaagacatatgacgacaccaagtacggggtttatggaaaagagtactcaacaaatgagtacggcactggtta

SEQ ID NO: 110130 - DNA, 302 bp, Glycine max
ccctttttaaacaaatgaacagtatatatgtatgtatttggagttaatgcgttctgcctttgcaagcactgatacattgtatacattgaattgccatggcaggatgtcaatttttgaataattattgattttttgtttcatagcatgatactaaaattctaaaaccgtggaggggaagtagtagtgattgaggtagaacaacattactatttgttacaaaaaaaaaaaaataaaaaaaaaagaaaaaaataaataaaaaaaataaaaaaaaaaaaaaataaaaaaaaaaaaatggggcggcc

SEQ ID NO: 110131 - DNA, 212 bp, Glycine max
tgttctttcgaggcagcgtaggaaggctgagaggtcgttgttgagtttgcagaaacggttgttgctgcgtaatgggtcggtggaagcaagtgcaataacatcatcttcacccgaatagtgctgctttggatcctcaagtggttggtgaggatgataaggttgttgataaggatgttgagaaggttgttaaggtttcagttttggaagaggct

SEQ ID NO: 110132 - DNA, 393 bp, Glycine max
gggtaccctttgatctcgggtttgtggtatgttttgtttctcctttgtccttgggaaaagttgcaatctttctacctttttggtttggtggggatgtggtagttctaaacttttttttttaaaaaaaaaaagttattttgtttatttggtttgagctttggtgtcttcatgtttcagtcactggtgaccttgaaagtgatttcattggaagcaattgataccagttgacatttgaagcagcttgtacttcattcagttatgacttgttttcctttattattcagtaagtcgtcgtcttcttctgcgagacacgaaccagaaattgatgaaggcattcataatgttaaactctactcctacaaagagctaagaaatgccactgaagattttagt

SEQ ID NO: 110133 - DNA, 374 bp, Glycine max
tcggcggtcccattacgtgcgacgaaaatgacgtctgctgcgaccagtccggcaactgcggccaattcctaatcgcacgtgaatgacgtctgctgcgaccagtccggcaactgcgaacagtgcgcagctgacagcgtcgaagaagaccccgccaccttctgacgtgggacgagaacaacggttgctgtgtccagttcggcggaggcactcagctgaacgccgaagtggtccagcagggcgtgaacaacccaaacggcatcagactccttccggacgggagaggaatccatcccgtggaatattaaaggagattttgcaggatggctgcacattcagacgccaccttggaataagtggtagaatgaacttatggg

SEQ ID NO: 110134 - DNA, 573 bp, Glycine max
ggctattctaacaagatcaaactcttgattgatcctttattcctgtttcaatacaatcatgtcaaaaacatggaaacaaagctaagaaagggattcaatttaacagaaaacgttgactagaaaagtagttacaataacacaatttattctctatgcgttgacctgaccctatcttgattttagagctctaatccttaaagctcacataagattccattagtacagacatttccagtaataatccaatcttaaaacactcaaattcagacaagaacccaacacgattcagctgaatagtcatgaatcgtacaaagtagggaagaggattttgttcttatgaacccaagagggaaagagatctataaagggacaagtaaaagctgttccacaaatagctttaaaacatcacaatagtagtagacacagattcagataagattcgcaatccttaacaatgcaataagacccagaaaccctaagcaaatacacagtacagaattcaaaagagttccgatccagtttccttaccttcggaagtagaaagctccgatgacagataggagatggaaatcg

SEQ ID NO: 110135 - DNA, 437 bp, Glycine max
aaaaatttccccaagaatttttcattcaactttgctggttcttatacataaaaaaaaaaaccacagttaccttgtcaaagatctctactttcgtacgatcatcaaaaagagatagtcaaatacgataaaatgattcaaactcacatcaatcggatgaaaacaaacacaaacaattacagtaacaaatgagataagtgtgaatcatcactatgtgaagcgtttaattcccaacagtaaaacccagaaacccaaagtaaagctaattcaaacaaaaacgaatcaaagagattagcaagcttaatataaaagacaagtaaagggaagcaatataaagtaactgttcaccaggaaacagttgtgctagttgatcgaataagctgatacgtaccttatcataacgacgatcgatcgcagattattagtcctgaggaaatttt

SEQ ID NO: 110136 - DNA, 452 bp, Glycine max
cgcggcacagcgtcagcttcatccagatggcgccgtcggcttgcagcttgcgcagcagctggaacacggcatcttgcggcccgcgcgccggcaccaggctgcccaggtggtcgatgaccagcggcagccccaggcgggccagcgccggcaggtgccgcgcatgcacatcgcacggcgcccacagctgcgcgtgcaggccatgctgcttcatgcgcggcgccagcgccgcgacctggtcgaagcccacactgccgggaaagagtttcccggccgggtcgcgcgcctcgacaaagcgcagcgcccgcacgccgccgtcgtacaacgcctgcagttcggcgtcgctggcctgcgcatcggccaccgccacgccgcgcaaccggccgcctccctgcgccagcgcgtccagcagggcggccggctcggtgccgtagggcgccggctgcaccagcacg

SEQ ID NO: 110137 - DNA, 494 bp, Glycine max
ttgatgcctgtaactttcttactttttatttgttgaaaattcttatttgattggttttgttcggttctttactgaaataaaaccaaaccgagtcaaaccaaactagactaaaccgtctgaacacaactcgaaccaaactaactatggttgaggtccgctagagttttattacaaccgaattaaccgaaccgaaaataaaccgaaatgcaccccctaactacacctaacgcaaaagaatatactccacagagatgtttgtttttttaaccagaccggtttaaatttgtttcttttcagatagaacagaagtatccaagtcttttaaagttttaattctcacaaaccaacagttactgttggactaattacttctgacgcgccaaattcgcacgtgtaagacaacccaactaagagttaactaactcacaagtgcgtgctgcacacgtgcctatctgttgataagaatgccacacttgtcatctcatattctcatt

SEQ ID NO: 110138 - DNA, 506 bp, Glycine max
gacaaacagcggtctgcgagactcacagcctggtttcaaactcctgtgaattattttattcatgtacttcctcggtgtcctctttagctttctgttcattagcagacttcctttcctctcatttcatacaaagttttttgttaattaacagattcgctgtcatgatttcctaggaatttgagaaataccaacagaaactgcaggccaaagccttcgagtcaaaacctcccaacccttcagtttccggaagcatacagcatagtgatgggtctcctttgctggtttacacggatctacctcaagttgaagaatttctgacacgcccagaatttgtgatcagtatgtgatttgatccatttttcatgatatctacgtctcattggatggatatactaagcaatcgtctgcataaatgcattagacgaatcaagaattttctttgtgttttctgagttgtgtcacttgcctgcctgcagcaaatgaaccaaaagatgcagacatattat

SEQ ID NO: 110139 - DNA, 170 bp, Glycine max
caaataattgttttattttaagtgaaagctaaagaaatgtatacttaaggatagtctggaagcgcttgaatataaggattgaattggttgcaatatgtcatcattaatagataacacataacagattattaactggataaaaagaaccaagaaaagtagggcgaaataga

SEQ ID NO: 110140 - DNA, 385 bp, Glycine max
aatataaaaacagcaggttttgatgagtgaactgttaacagggaacggtcctacaagaaggaacataggatactctcgattctattaaacttaaaatctcagtttcagaattttcttacagagacatattctaatagagtataaactaccacgtgtcatctttcagtcgattcaataagatgatatcccaaaggcttatagccaatcaatcctgtgattctccccggctaatgtcctagtatgcatgtgatcaattaaaatctattacaagtttccaactgtagacaaaattagtctaactaaaagatgttggagtccaataattttttgtaatgtaaaattaatacaaacaacatatagtattgggctacctataatatgtcat

SEQ ID NO: 110141 - DNA, 367 bp, Glycine max
acgtgattataaacaaaaaacacttgcatgtgcaatttaagaggccaaattgggtaaactttaatgagtataagatacccctccaggttggtggtgtatagaatttgccccatatatatatacctgccgttcggagtttctagcacgtctctcttattcatgtatgtgtgacactcatactttatgtataaaatgttacatgtgaaatgaacccgtcaaattttggagcttgtgtgatgagaactaaatggtcctgaaactatttatatgttcttgatgttgcagctgtttgattttcaatcggaggtgatatgatgaaatcttcccggtcataggggtcgaagatgttatcctttcactaaaaaga

SEQ ID NO: 110142 - DNA, 154 bp, Glycine max
ggacaccacgctcggcaccttcaaggtcgcggcgctcgcgcccggcgagggcggtccgctcagcgtcgaggtcgcggacgccgagggcgaaggccccgccgagcgcttgcgggtgctcgtcaaggacggcgacaagaccgtcgagaccttcgac

SEQ ID NO: 110143 - DNA, 528 bp, Glycine max
ctctgcggcaacaaaggtttgtacgagaagtacaatttttacattctctgcaatgaaccttggtaactctctgtcaataatctccaaatacttcaaaaattgttcacagaatttcctaaatttatcagaaatctttggcacctaaaagttatcagacgcaagggtcagttttacttacgcatcgatctacttgtctgcaggattaaatatagcataagcattgctgctgataaaggtctcaagaagcctcttttcacctctgcccgcttgaagaaaggggaagttttgtacttagaaactcattcatgcaggtatgcacatcacatgtttcttttatctgacattaatgacataagacgctgaatctaatctgtgtatgcaaaaaggtatgagctctgtttcgcaggagagaagaccatcaaagcaatccaagcctcacaacaacaatcatcacatgaagctatggagacagataataataataacaagtcacagaaccatctgacaaacggtgacaaaacagattca

SEQ ID NO: 110144 - DNA, 296 bp, Glycine max
aagtaagctccagcactggctgtgattccctttattctctctctctctttccttcctttgatccatggaagcctgtgatctcttgtgatagtcggtgtgtcgggtcgggaagggtttgaaagcgtcgcatattgtaacgagctttcactgcacgacggtggccgaatcttctagctccattgtctttccaagatatccttagattcaactatggatcatcacctctgatttacttacatttttaggaacctacacacttggggatccccctgacccaactgtgtgcaacagccaca

SEQ ID NO: 110145 - DNA, 181 bp, Glycine max
tcgttcaacccctcggtcacagcttgctcgcccctactctttttccagcctctatctcaatctccatcaaatttaactatggctactgaagaggctccggatgatgaaatcacttaccctaccaagaacactactaccaagcccctatctttgctgggccatggaatcaccgacatggaga

SEQ ID NO: 110146 - DNA, 386 bp, Glycine max
  unsure (1)..(386): unsure at all n locations
nttggaagaatcctattctattctcttctctgggggtgtccatttttcattatgcctgcattggatatttttgccgcataaatctatctaagagaaaggaaaaagttccattttttcaaccattccttttttcttttcttttttccaatttggggcgaaagaaaaaaaaatgggacttcaaagttttgtttttccacttggggttgataacttgcaattctttgtaaaggggaagtgttttccaccattcatcacgcgcacttgtcatctatgaagcaccgacactgacacggacaccggatacgacacggacacgtgaacacctgtcaaacacatcaaattcaatccggacacgggcgtcggtgtcgtgtcggacaccgaacacg

SEQ ID NO: 110147 - DNA, 443 bp, Glycine max
ttcaaagaaatacttgattgaaatttttaagcttttaagcatgagcctaagaattgattctaacttacacttagaaaacatattctggaaagtgagataaatcctgcaatacaattttttgttgcataatgctcagattatagtgtaggccagggagttaatctatggtgctcacttttgtatatgccatttgataggaacccaataataaatagtgaaaagcaaaggatattctgttgttttttatacacgcttcaaagcataaagggattacagaagaagaaaaagaacccttggcacgtgagacaattggtctactgtcggtcatttaagggccatcttttatattttggttattaacatcattttagtagtatccttacaagtagctaaaaatgataagtataattgctatatatccctgttatgttccaagtcattac

SEQ ID NO: 110148 - DNA, 429 bp, Glycine max
cttatgcaaaattatcactctttactctctttttgattttggaacattaaaaaaaaaaattgacttccatagcatgaattttcgtttacggagttgatcactgggatttcccccctcttagatctgcaataaactcttttattcggtacagatctcggcttgttttctggaatgatttgtttttcaggtagataaaaaatgagggaatactttttttttttaatggagtgtgttgttatccattattcatacacgagttcactttcggctgattttaattcaaggatgactttgcggattctgttgaaatgatagatgcttaagaatgatgctgtttgtgtttcttaataacccgctactgcagcttctttttctcagtatagaggtacttggatggcaaccttttgttcattgctaaaataaacttta

SEQ ID NO: 110149 - DNA, 294 bp, Glycine max
atcttacccgttcaaattcgaaatgttcgaatcgatgcaggaagtttttgggtcttcacagaattgcacgctgacttttgccgacactgacgaggattttcagtccgggattgtcacacatcaggattcttcccaaacggattatggtcagatctacctttgtacgcaaggcgaacagacacaaggcgtcccgtcaactgtcgatgcgtctcagtcgcaaacagagccggacctgaattttcaagacgaggaggaaccgcttgtggacaatctgccgacacacgcttgcaagta

SEQ ID NO: 110150 - DNA, 397 bp, Glycine max
cttgaaaatgaccgttggctgagtttaggggctaagaaaaccacccgtatcccataaggctttgcttattttaaaggagggaaataatataccaaagaaactttgtactatattctgtggcacccacaccttttacactctactctaattaaaaaaaaattcttctatttctctcctctaaaccaaacacaccctaaaagaggcagaagattttttggttgtagttttagtttcttttcaattttttatagcttaactctgctctctatataatatcctgttgcaaaaggacagggtcagacaagcaaagaaacttggggttgcttatatgatctatttttgctcccgccccaccttcttgtgccttaagaggattcgtgatctatcctctgttccc

SEQ ID NO: 110151 - DNA, 208 bp, Glycine max
tttccgccttctcgtccgcccacgcgtacgggcttggcgttgctcgtgagctttgcacttaatacataataacatgtgattcttaggtcaagaattttcatgatttgtgggtacaacaataatccgtgtccaattggcattgcaagtttactcctatttgggaattcgcatatgacctacatatcatatgggttggggctttggcatt

SEQ ID NO: 110152 - DNA, 315 bp, Glycine max
ctcaaagcaggaaaatgtttaaattaatttgctcctttacagcaagatctactatataatgtaaacaacccttttatttctttccttaatctttcaaaagcctataaacaacattcttttcttttatggaacatgttacatccttttggtcacctgagaaggttaactcataaatgtcctaaaactgtataccatagaatggcaactcttttcatctacaacaaaagggaattttaaaaaaaattcaccgctcaatgttagtttttttttactagaacaaaaactataaccatttatgtcacgtttacataaaaa

SEQ ID NO: 110153 - DNA, 281 bp, Glycine max
acgcaatcgtcacttacagaaaacgaagtatacatttccagttcccaatcaccatacatatgtgtgcactagataaacatacaatacaattattttaggacaaaaaattcaagaaatcaaaagcaataataaatatcaattttgtaacaatctaaacatacataggtcttcaaaaaccagacctcagtttcctttcactaaatttattaggaatcaactcctattgaagatgagatgggagacacgcaaggaaaccagtaccgccgtctaccatttttatg

SEQ ID NO: 110154 - DNA, 262 bp, Glycine max
tttttttttttttttttttttttttttttttttttttttttttttttttaaaagtaacgacaacaatttttatgaactgaccagtttaacaattactgtgaagaaaataaagggaaaaaaatgaaagaaatgaagtccaaaaaacatttggacccccgggtggatgggccacttttttggcacatggattagccaactggaaaacaaaatcccgagctttatgggtttgacttttcccttattaaacaaacttttcgacatt

SEQ ID NO: 110155 - DNA, 126 bp, Glycine max
ctacgtctttgcatccagggacacaaatgatatcacaatgcatgatgttcagggtacaattgattggtggattacctctcaggaatgtgttaccaggacctatggtgggttaaagccacaaaatcc

SEQ ID NO: 110156 - DNA, 411 bp, Glycine max
ctgtcgcgtgggtaaaatttaaaatttcactataatattttagatacttaaaggattatagtgaaattttaagtatctaaaatattccattttagttatttcatttgattttcgtcataaacattatggatctgttaagaaatagttaatttaatagccccatggctaaaaacagtagttatctttaaaaaaataaaaataaaaaactaaacccccttgtgaattatgtgaaatagggggcacccacgttgtgcctctcttaaagcccctattgcatcagcgatggaatcccagaggccagagggtcaccctctagggtatacaaatgacggaagaagagaccaaggtgaaagtcacatccctcattgccgatgcttttgtaacctcttctctcctcgtggcaaagaacct

SEQ ID NO: 110157 - DNA, 216 bp, Glycine max
aatggtggagcttgaacacaagttttttgtattgtcaagaatccacacattaaaattggggatgatgaagactgctttacataaaggcttaaaccaagagactctcattatctcatggactagagccgtctcctttatgggatataatcaaacacccatgataactaacagggtgaaattgaaacaaacataaccaaaccttattttacagggtgg

SEQ ID NO: 110158 - DNA, 243 bp, Glycine max
tttgcttttgttagtattacactattacgcataacataaatattgttattttgtttagattataatagttggaaggataacataatttctttcccctataagttaaaattaactcaaacagaggttcaattcatcttctggaaaatctaaatgagaaacttttataagttacgtgtaagactataagctaattataactggtgagaaaagcttatttcatggctgttaggaactgtagggata

SEQ ID NO: 110159 - DNA, 331 bp, Glycine max
aactgaatgtatattcttctatatgctctacttggccaaaaagcttatattataattgggatttacatatacccttcaacatataacacataatatacctaacaattctgtcctctaattgttcctaacgatccttttgctcaagcacacgaatcaaagcaatataataaggctataagcatgattttgagcaagcttaaaagtttccaatgcccggcaagtgtttttaagaacaagaatgtacaaaactgactatatcatgatcaagtataacaatatctagaaagctgtaaaagaacaaagaatggttgaatggagtaacttctgatgc

SEQ ID NO: 110160 - DNA, 334 bp, Glycine max
tttttatttttttttttttttttttggaaaaatcttggggaaattaaaatttagctaacttcatgttcaaatttcatacaagtatactacaataataacagtagttaataataataatacaaacacaagttatggctatatatagtaaacagcagcttctcagtgttagcagcctttcaacagtccttccttgtatgattggagtttcctaagcatgccactttgcttcttggcatttacttggaaaagacatgggttttgatcaaactctccttgatgcaaagccatcatcaaccaggaaattgattcttcatcttctatctcacaaaaaata

SEQ ID NO: 110161 - DNA, 271 bp, Glycine max
  unsure (1)..(271): unsure at all n locations
ttntttttttttttttncnnnaaaannaggatnnaaggaggaggcaaacggaaacccaacctaacgaaaaaaaaagtgacactaccacctaaaataaatcggagatttccagatatctagagacaatgagacacgcttttttaatcatggttggcatagcttaaaacaaatttccaggtaactttcaaaggcaagcgatgaaaaacaaaatggggggggggatagaagccagtcaaaattttggagatccactacttatgctttagagcgg

SEQ ID NO: 110162 - DNA, 271 bp, Glycine max
cctcttccttctcagatttgctcttagtaactctagttttgcttccaggggatgctttgcttcttgacgtgatattagatttgcttttcccaagagatgcatttagagccttaggctttgcctctttactggaaactttcccatttttcactccaggagtttttgtatcggtaccctcaagattagatgaatgatttttatctgtttcaacttcagatagctttctattagcttcatttgaagaaatgttattatcataatccatttccat

SEQ ID NO: 110163 - DNA, 481 bp, Glycine max
tcgctttatttaggtatatgtttgaaggccgaagtggacggaaatgaagataattctttgattttgattctctaaagttgaataatcttttttagttattcccattatatcataacattttgttgttgattacttgatttcacaaaagtcgattgatttttgttcatggttgatgcactgcatctgtttaccctctccaattttgtccagcttcaatggctgtggagttaaaactgatgcaaagattcaaaaaggttgacttaccagcccattgcaccgatttttaaattgccatgggtcaaatggatttaccgaaatccccatatagaaaaagtttttttttaaagcaaatgtgtcacttgtattctgttttcagtgatttggcagacgatgatttagtattaaaccccttattgatatactgatacgctgtgatgaccataaactccacttatctgataccatataacattagtatttt

SEQ ID NO: 110164 - DNA, 323 bp, Glycine max
cacttttgctttaatggtcaaattattaatggaaattttttaaagtgcgatttaagttaattgggatttccatgcatcgtgtactttaaagtttatgaaccagtcatggcagagtggatgggagggagttggaaatgttggtagcctgatattaacatttcagaagacagtgaattttattacataataatgtttccggtaggaatcgtttggttgctttactaactaaatatagatgagtgttaatgttggctggtgtccactctcctggttttgctaaagaaaagaaaatggtcaatgaaatttgattgtgtagaatatag

SEQ ID NO: 110165 - DNA, 223 bp, Glycine max
atgttctaagcctgagtcagtgcctttacagcatcatctaccagtaccatggttcaaagaagcgtcggttgttgtataaagatgagaatttacagaagccccgactgacatcattttagctgtgccgggatcttattcttcttacccttttatttggtagaactcatactcaatatagttgctcagattcatacatggttgtttcaaatttcttttaagacta

SEQ ID NO: 110166 - DNA, 362 bp, Glycine max
atttctttattaagaggagaagtgatcagtttttcaattcagaggttgtagcttgtgctgtcaataacacctcttcaactacagttcttattcctcacagggaaagtgttaaaattcaggagatacaactttttagtgatcatctagtagcatatgagagagaaaatggtctaccaaaaataatagtttatcaccttccaccaattggtgaaccactaaggagccttgaaagtggtcaggcggtcagttttgttgatcctgtatactcagcagaatcctcagattcagagttttcatcaagtattttacggttttcgtatagctcattgaggactccttcctcagtctatgattatgatatg

SEQ ID NO: 110167 - DNA, 103 bp, Glycine max
ctttccaactcttcattacctcaacttggcaattcttctttcaaatttgaatcctctctgccctaataacactatcactccattctctacagctatggggagc

SEQ ID NO: 110168 - DNA, 185 bp, Glycine max
tttattctaagaatgtagacgaatatgggtcagcctgcaaacttggtcgacccaacctaacttgaaagggattttatgttttgaaagtggcatggttaccgttggttcctacaaaatttgtcattggctcttaacaccacatgaaattatccttctatctctaatttaaaaatttcccatccttc

SEQ ID NO: 110169 - DNA, 300 bp, Glycine max
gaatgaaattcgctgagtcgagttaaaactcacccgccctaactcgttctctttcgcgtttggttgtatctgtgagctaccctcgttcgctcccacacccttccctatcctcatctctcgcctccaccgccattcgacattgtatgtgatgtacatgccaagactttccatagatgaataatggctgttgagacttctgataaaccaaatttaccccatgattttgaggatgatgatgatgggccagtaatttacataaggtactcatcatctaagaaaaatcaatcgcattcagaagta

SEQ ID NO: 110170 - DNA, 453 bp, Glycine max
tttttgatatttgctatgggatccaaatctcctttgtgcaaatcagctccatttataaatcagtgctgctcatgcacaaccaatcatccatttccccatccaaaacaagtctctttctaataccggtagtgatatgtactcgggaagtggaaactcgattccagaaatatatgaactcatcgtcttatccagattcatcatcatcattcttccttatcagcaagcagcactcgtgctcaatgcgtccaggcgttttagatatactttggacttgagaaaggaagaagagaaagagcaaaagaaacacttgattagagcccatgcacaagtcataagagcagcactgcttttcagattggccggtgaacgcgagctagtgataagtacagcagtgtcacccccaactccagttggtgactatgatattgggctcgaacaacttgtttcaatgtc

SEQ ID NO: 110171 - DNA, 312 bp, Glycine max
tcgaatagagagagcacagcgcagtaaatttggtctgggactatcgatgactactatgcttgatcctgacttatgatagagacgatgaaggtcatgaggtgctatttgctagtttcaatctgatgggtgaaaccataggagacatatagtgtttccagcctggaaaatgattcatggtcataggatcaatgtttctggggtctgcagagatacacctagtttaaaggaagtaggatatatgtaggaattgaatgtagtgcttatttaagactatgctatgtattagataagatcaattgattacacactctt

SEQ ID NO: 110172 - DNA, 325 bp, Glycine max
  unsure (1)..(325): unsure at all n locations
tcacctccaactcccaaatggaagaagaagtttgattctcctgttgtggaggctgccttgaatgatttcattgatttgatattgaaggactttgtgataaatatgtggtacgcagacattactccagatatggagtttcctgagctggtacgtgacttaatcatggatgctattgctgaagtgtcagcgagggttaaagagataaatctcgttgacttgctcacaagggacatagttgatttaataggcgatcacatagaccttntcagaagaaatcaagatgctataggtggtgatgttatgttaaccttatcttctgaggaga

SEQ ID NO: 110173 - DNA, 345 bp, Glycine max
gtttacgaccgtcatggaatcgttgggggacgaagtcaaccgcagggctaaggcgctggcgatgctcaaccagcagaaggcacagctcgaaagtgatgaaaaggagttggccaagcaactgaaggagaagaaggacgacattcgccagcatcagcaggagatcaagcaaaaagaccgttctttcatcattctcaccgacacttacgacgattccgtggccaaacttttcaaaaatttgagccttgtggagcaaaaggttcaagtgagtcgctcgaaccttctcagcctgttcaacgagagcgaaatttttggtccgttcaatcagtgaaatgataattattatga

SEQ ID NO: 110174 - DNA, 147 bp, Glycine max
ctttcgcgtgttttgacgcgtgggttgctttaacacatacatggataagcaaactcagcagtcgattatcatactgtattacaataagataatagactgctgagtttgctttaacacatacatttataagcatttttcacctgaagc

SEQ ID NO: 110175 - DNA, 390 bp, Glycine max
ggtcaaagaaactgtagaagaatttggggtcgggcaatggcaatatatggaatggacgcttccttcatttctctcataactagaaagttgaaacttatagatttttggttggtggcacaggtgatttaatttgaagcatatggcttccaactgtgtaaatctttctaatccttaccatcaatgtacccaagcttgctcccaaaccaccatcaagacgtcgcactcccacataaacaaaaacaagacttcaggttatggcccaagtgtcacagatgctcagcttggaaaaaagatcaataataaacacaatcaaaacgtacgaacgtacccaggttgtcctaaagcatccaatccttaccaccagtgtgatcacaattgttacaaaagatt

SEQ ID NO: 110176 - DNA, 268 bp, Glycine max
  unsure (1)..(268): unsure at all n locations
tttccggtcttgactatcacagttgggggggcacccgaacccaacacaaacaagccttcttgctgtacatcatcttgaaaccattgctacttgctcagtatcattgttttgcctgttttcttttctttaccattcttttttattaacttatctggatttcttatgcttgtgcgtgctgattaatgagtattatcccagtttttaattgatattttttggctcctggcctgcagacctgnnaaaaaaaaaaaataattaaaaacaaaaa

SEQ ID NO: 110177 - DNA, 410 bp, Glycine max
gtcatctcccatcttccttcacttaacatttcaggtgatagtaatataatacaccatgggattctacacacagaaccttttttcttctttcacctcagcttcatcatggttcgaggtgtacgctgccttctccacattcatgatgctcctcagaacagcattccatgacctcattccccagcaattccgatccctcattgtctcaaagctagagtccttcttcaccaaataccaaccaaataacgaaatccgtctcaaaatgaaccaattttgggacgaaaattcgggagaccgcaatgaacttttcgatgctgcccaggagtacctccccaccaggatttctcacacctacaagtcgctcaaagttgggaaactgcaagacgagaagcacattgagctcgcagtggatg

SEQ ID NO: 110178 - DNA, 474 bp, Glycine max
ataaaagttatctgcttctgctgctgaatgtggtcgacggacacaatccgtgcaaatgtttagtgacaaaacaccgaacgtgcggtgccgcccgcgcccctctttcgtctccccttccgcttcttcttccgtctccttttccgcctcaccttttaccctcctattttttgtactttgcgctccgtttccgttgctccgctccgtctccgcgtgtttccccggcgcccctggctcgggttgctgcttcgcgccgccctgtgccgcgagtgtcccccgctgttcgccctcctctgtttcggccagccatttgagcagttattctcatatggcgccgccgccttcctcgccacattacggtaacggacacgacgaagaacattaccatcaccatcatggaggacaatacggggaggaagaatacggtgcctatgccaagcatggttatgaagagggacacagtggaggaaaaggata

SEQ ID NO: 110179 - DNA, 456 bp, Glycine max
gttgagtgggtcttgcgttgtgttggaatcccaaattcatttctgtttctcattctcaattcttcttctattctcattctgatttgccacacacgcagaaaggttgaaaatagtgggacttgattcactggaggtggagaaagatggctaacaacgcagctgcttgtgctgagagagcaactagtgatatgctcattggtccagactgggcaatcaacatagacttgtgtgatatcattaatatggaccctgggagcaccagatgtgaaattaagctgcttttgaatttgatcttgcattttagttttggatctcaagcaagccaaggatgctttgaagatactcaagaagcgtttgggcagtaaaaatccaaaaatacagcttctggctctttttggactggagacccttagtaaaaattgtggtgaaagtgtatttcagcagatcgttgagcga

SEQ ID NO: 110180 - DNA, 344 bp, Glycine max
ttttaaatgattttgttttcattgactccattggtcctctggtccctactttttgttggggcacctgttgtgcaaagtgccggaaaagttgcgccgccgtctccgccaccaccgtctacggcaccgtctccgtcaccgtcttcgtcaccaccttcaccaccgccttcgtctccgccaccgtcttcgtcaccaccttcaccaccgtctccgtcttcgtctccgactccgcctccgccaagctatggcggacctccaccaggcggtggcgaagagtggaaacaacaactggcattattggtgctgtatgtcagtggaatattacagtgggatttactacgccgagt

SEQ ID NO: 110181 - DNA, 390 bp, Glycine max
cgctttttgttcctcggtctttgaattcacactgtcacacatacacagtagtagcagtagttatagtagtgtcaaaactctctctctctctctctctctctattctcttctcttttctttcatcaatcatttcatttttcattcaattcaccgatcgttagagacaaacgctcattcgccgcgtgatccgacgcaatggacgtacgcgagacgccccgcccaccgccgcccaccatgatggtgggccctacatcctacggttccaccaacctcggccctaatttctcctcctcctccgccgccgccatgctggcccccgccaccgcgcgattcccctttggcgccgttcctccgccgcaacagcatcagcctccgccctcgtcggagccc

SEQ ID NO: 110182 - DNA, 310 bp, Glycine max
ttacgcgtgggtttccttttccttttgtgataaaacataccaaactcttatttatctaccttctacttctcgcaattgttcttttccttggtttttcagaaactaaacacggagtcatgttgatgcttacttgactttgcaaattgacttcacttgaatttaaatatcctagtcattggcggctatacttttgtaaattgctttaatcttctgtttctgcgaagcttacctgttctcactggatgctcatgtagcttaatcataaatgcaaacggacacaaatttgagaggctggaggacgggaaatcag

SEQ ID NO: 110183 - DNA, 373 bp, Glycine max
gttgcgttcgatgaattcgatatcgacgaattcatgacttggccttactagtaataaaaatctcaggaacagtttcgtaattgtagaagtgtgagatggaaatccccgaaattgccccccctctcgttgtcgaagtttgaaattttgtcgcactcgttggagctttggaagagtgtaaaagagttgtagtggtaaaaaattgatgtagtcgcattttactaccacctgaaacggcgattctttgtgtcgtatttggcagaatttaatttgtaatcattatcatgaaaagaaaaaaaaatatattgaaaatttttggagtgtcaatagtcaaaactaagtgagcgagaaaaagagaaaggaaagatggggttat

SEQ ID NO: 110184 - DNA, 450 bp, Glycine max
gttaatcggaatacaaatttgggcagcagagagaggaagccaacaaaagccagaagctcttggattggatcatcctcaacaatgttctctcgattctttaacaaatctccaccgcagcaacgccctcagtgatggaaggatgaaggtgtttggtggtgacaatattgaagggactcttatctctcccaagcaagcattcttcaaaaatttagagttcttggaaaatcaaggttttcttgccagcgtctcaagtgataacgaaatacaggtaccttacaagtgtagtggggttcttttaaactgtctatgaccatgcaccctccatataagcttataattctttttgggtcttccatatgagatcttttaaactgtctatgaccaggcaccctctgaatatgtgtaataatttttgcagtaaaatatgtttttggtatctcaaaatatttc

SEQ ID NO: 110185 - DNA, 401 bp, Glycine max
cacattggagtgttcaaggacctcgcggcggcatccgagtcggcgagggaagccgccgcgaagcaaatggtgacggagttgaaggcggttcagaatgcttatgattcgcgcgaggagaaggagagtggtgagggtggattgaagttggaagcagagaaagacgatggattggataactgtgcttcgtctgtgagatacgctgttcgtaggctcattcgcggtgtttcttcatccagagagtgtgcacgacaaggttttgctttaggtttaactgttttagctggcacggttcataacattaaggttgattcattccttaaacttgtagtcaatttgctggaagttacttcatcaatgaagggccaggaagcaaaagattgtctgttggggcgcttatttgc

SEQ ID NO: 110186 - DNA, 385 bp, Glycine max
ttacccacgagcttcagaattttgcaaactcttacacaatagcttgcctcaatgtgctccattatactcgaataacatcaactttttcttaacttgtcttttttctctcttgtcaccatgacattacctgtcgcttgtcctactccttctacctcaccatctccgatagacccaccaactgctgcacagcgaaaacgacgtataagagccccagctagcggtgcatcagacgattgctttgcttgtacgaagaggaatgtcaaatgcgatcgaaggcgaccatattgttcacaatgcttggaagttgggaacgaatgttcaagatataaaacgcagttaacgtggggtgctggtgtcgcaagtcgaggaaagcttctaggtcttt

SEQ ID NO: 110187 - DNA, 323 bp, Glycine max
cttacgcgtccgcccacgcgtgcgcttccccttgatctgatttgcagagactaacccaagaaaggaccaaccaaaaccaagtgctttcttggagcttggtagagagagaaagtcccactctctctctcttctcttttttctttctgtgtgtgtcgtgtgcgtgcgtgcgtctgagggtacatgcaaaacagcgagtctgagatagagaaagagggagttcaagattgttgctcaattgtgcataaactgcccatcaagtacttttgctgtttctttttgcgatcgagcttattatccaacccgttcttgatttggaaggtgat

SEQ ID NO: 110188 - DNA, 476 bp, Glycine max
tcttgtagattcctaattgatgcgtgcttcatctgttggtgccacaagtatgttgagattggtatgcatctagattgatcaatactgtgtcatatgcgtgaaacattttgtttgtataatgctattgaaatcaatgggtggctgatgctcttacctcatatcatatgtgctttcagctattagtgaaccttcacaatggcagatctcaaggagaggctactagcaccaaaacctgcatcagctcttaacgtaagagaggtttccaatcgaccatctgcctctggaaggcaagctttccaaggggtggatgttttggggctaaagaagcggggccaaggtctccgttcatggattcgggtcgacacatctggaaactctcaggctattgaggtagacaagtttaccatgatgcgacgttgtgatctacctgcacgtgatcttcgcctacttgatcctctgtttgtctacccatcaac

SEQ ID NO: 110189 - DNA, 443 bp, Glycine max
cgttcgcgtgggctttgctaagaataaacatgcgtcaatgttcaaaactcttatgaggttcccagttatctcctgttatcattcctaaagattgattatgcatgtaaatttcaacacttagttgaatgttagttggttttggtttgcctgcaaatttcaacagttccatgatcactccgttgtgtttcacaatcatagccaatttgagatggtgaagaaatgaaaggaaaagtgaatttatctcattaatatctgttgagaagaagctatactgaaagcttgatctgtttgaagattggtgaaggacaaggaatggtttttggtatcttgaactgggtaattttaggattgaccttgaattattttctattgcagatgaatgggaaaactttcttgaaagaattggtcgaggagcatccactgtggacgcagaacttcaagaa

SEQ ID NO: 110190 - DNA, 322 bp, Glycine max
gcttatcttatgttgcattacatcccttcacgagccccctcctctctctctctctctctaacatcctaagctggctgtaactcagttacgttttaacaaaacttgtgtcttatttgacagacacttcattcaaagaagaagaagaagaagcaagccaagcagcaacacctgcttcattatgggtgcctcaggaaaatgggtaaaggcattaatcggactcaagaaaccagacaaagacgaccatgtgagtcagtcagttagttctctattgcacagcacagtgcatggctcttttttctatgaattggttggtttatgatgt

SEQ ID NO: 110191 - DNA, 394 bp, Glycine max
aaatttgttaatttaatattttatgaaaaggttcttgattgtgaaagtgccgaagactttatatatgacaacaaaattatgtaatatagcattatggcccatagggttaataatgatggggatcgatcaaattttatcaatagatttggggccatgccgtgccacactgattaataagttgtatggcttatacgggtacgtaactattgtcaagtgcccacttactgacacctcaaattcgcaaataattgtgattatttttttttttaattttcatcacggacacttgagttccttgtcgtatttggtgtctgacacgtgtctgagtcaatgttcgacaccgacacgacacccatattatattctatattttggacattacagatgttcacgt

SEQ ID NO: 110192 - DNA, 322 bp, Glycine max
tgttcgctttcgcgtgggccaaaacataaccgaagaagcaaaacaagaatctaagaaaatacgaaacagcacaatctacgtgcctcttcccctaaaaaaacaccatccagcacagagagattgaagggctcgtgatggatgattgtccaatggccaacatttttgattttctctttcggtttccctttagttcaagcgagacacactctctgtctatctctcatccatcaacgcgtagcatcatcgagctgtcaatcatgttcgtggaacttgcgcggatcgacgaatgcatgctggaacatactacaacaacaatccatgt

SEQ ID NO: 110193 - DNA, 426 bp, Glycine max
ggttacaccaaagcaacccaacccaatcagcccaaggatcatcctgtcgcgcaacaacaccaacttgacgacagtttttgccactggtctgaacttgcaagacaacgtcccgcgttgatctgctggatcacaagagctcaatttgctctaccccgaggataccatgactgttactctttgtgtgaccacggcaaccatgccaggtttcaagaactcgactgacctcgatgaggttcactcgctgtccaggtactgttttctttactcttccctgggaggtctgcgtttgcttttcaaatcatgttgcgcgaaatcaatgtatcaatcgtcttgcttcttcactctgtcttccacccaaggatatcgctcccggacaacaaacacttcaagctctcgccccaaggaacttcttcacatggatcaaat

SEQ ID NO: 110194 - DNA, 198 bp, Glycine max
gttattttactttctatatgtcaagggctgggaattttgattggggtacttttttttatcgttaacttcaattgttaattacgtttttaacctcggtgtttgctcgcgagatttgcctcaattgattcaccctgctatagtgctatgtgtattgcctcaattcctgcttgaaggataattgatttactgttattgcat

SEQ ID NO: 110195 - DNA, 239 bp, Glycine max
ctctgttccatttcgagttgtactcggaaatcattgcactgcccgtcggctatttgtgccattgggacgacgtgccgttcattcagccggacagagccacgtacatttgtgccgaaaatgacgcggaccgtgagcccggcattcgtcaacagttggacacattgttacgtgaaaagaaatacgaaagtcgaatgctgttgctgctggccaaaacgtatttgatggtgcagaacaggccg

SEQ ID NO: 110196 - DNA, 458 bp, Glycine max
  unsure (1)..(458): unsure at all n locations
cccacgcgtccggggtacagtttttggttggtttaaccggttaagcaacctaagcctgtactttcacgggccaggctcccttttctttcacctcggaggcacacacacacacacacacacttaatctggaaccatatataaaatagaggttaagcaacaagcacagtaactggaacgggttaagtaagtttgtgctgcgagagagaggggttccgttctgggatatggtgtaaactaaaattctgaatgtgtacacttgtaaggtgtgccagcttgcaaaacttggcatctgcctttttgagtgtagctagccccatcttcacgtgatctgctcttaaccccttttgttttcttctcctcgnttctattcttattcctatatatgcaccccatcctcagtctccattctcacacttactagtagtaagcatggagtcctcaaagatctatgcttacct

SEQ ID NO: 110197 - DNA, 365 bp, Glycine max
cgtacgcgtgggccgtccgttctccgcccgccactctctccggctctgacctccaccaccaatcccagcagaatgtgccctcctccgtcccctcctcgtcggttgcttgtgcacagtgtgccaaacactttcccagccaatccgccctcttccaacaccaattgatcgctcacatcggcggcaccgatgcgccccagcagcagcaacagtcgaccgccagcaacgacactcagtcgactgttaacgcattggcaatgttagcagctgcgggaattaacgggggaagtgggacgacgcaacagcaacagcagcaattatttggacagttgctcggctccaaccctttctcacaaggcacaacgcct

SEQ ID NO: 110198 - DNA, 453 bp, Glycine max
gttgttttttccactaccgatatcgaggagttctgcaagtttttcgacgacatgaagaaggacaacaagatcgatggtaagaaggagtgctctttcaacaacaagaacgccaacaagggtgaggacggtggccagaagagcgatggttccggttcttcccaaagcaacgaggacgatgacagtgccgccggcagcgtcagcatcaacatggctgtccttgcccttgctggtgtcgctgctgttgcccagctcttctaagcatagatgaggcaaaactgttagctttccttttaaaggcgtcattctttgtcgtcattatgttttccgacttctttttacgacatattgtgcttggtcatccttcatggggcacaaattgcttttcatgggggcggtaactgcgtgtaaaggataacccgttagagcttaataatcgattgcatttggactttg

SEQ ID NO: 110199 - DNA, 441 bp, Glycine max
gttcgcagttagggctcaaaagcaacacacttccaatcattcgcatgttgatactccgccagtgacactatcaggtccatctggacagagaaatgactcaggcaatgcttcagcaacagctgcccatgcatggatgtctgttggggcaggagggtttaaacaaggacctgacaattctagttcacccaaaaatcagatatctgcagattctttgtacaactcaacaagagagttgcatcagcagatttcaaaaattcagggggagtttccccctggtgaaatacctttccaaccatttcaagcagttgctcctcaacctattcacacaggcgctgtttcacagtttcccaaccggcctatggttttccctcagttagaatctgctgaccaagctagctttcaaatgagaatgtttgcagaaagggctcaaaagcaacacac

SEQ ID NO: 110200 - DNA, 386 bp, Glycine max
acgctttaaatttaataaagggtaacagcaatcagtctgcaaatttgacaagttaacagcctaaatattccaattcatgaccaaaatcaaacatacttattataattgtgggaagtgtcctacactaatagacattatatgcgtattcttaccagaggataactgattggtcctttttaacagaaaacattgcgcaagacttcttgatgcgcaaggtctacttattctaaaccatgctatcacttgttgaaactaatgaatgtgaggaatacactcattaaaaataactggttaaacaaccaaaatttcctataacttaatctctcaagtcaaaagctcatgaaatgtttttatatccattacacccctcacgaaagtgtcttttg

SEQ ID NO: 110201 - DNA, 154 bp, Glycine max
acggttatgattttaagctagtagcaagagcgagaagaataggaggatggagaattgggaaacggaggaggttgcaggtgaaagtccccttccggctctggaggctgttgactacagaggtggagcctcggagagatcgaaatctgggtcatgg

SEQ ID NO: 110202 - DNA, 428 bp, Glycine max
tcgaatatacgttgccgtgttgatacttcgaactgtctctgagatattcattcatagtgatgattattcaaagtagaaacactgtgaggcactgaaacttcgaagaatacggttgaaggaaagcatatatccttcaaactcaaaactgggtgagtcaaaattcattaccaatgtaccattttcttattgctagattaacaactaagacaccccattatggtgttctctggcacaatgcaattcttttctttaattgacgtactctttctgtatcaaacacaaatcactacaaaggtggcaccttcaatgtatttagcctcatcaactcatgtgggttgtccccagaaaaggcacagaaacttgccaataggttgaaattgaaaaaccctaatgggccaaatgcggtaattgatattctcaggaactat

SEQ ID NO: 110203 - DNA, 337 bp, Glycine max
tcggttatcttctgtccactttcaacaaccaaatgcggaagcaatgctgttactatgattccaagcaacaataaccagaacaatccagttcctgcagcatcaaaagaaggcccagtagccaggaagattgggtatgacagggttgttgaaagtggacaggtagaaatgctttctatctcagataatccatcaagataagagaagagatcttctgtctttttttttctttcttatgcatagttccatattcttttggctacatgagagtatatctgtttattaccggatttcattggttgctatccgaaggatagaggtttttttatcactgcagagg

SEQ ID NO: 110204 - DNA, 287 bp, Glycine max
tcgttgtcgcgtgggcggacgcgtgggttcttcttcttcttccacccacctcaatagttttctcctctgtctattccgaacataaaatcaataattttaattcatttatcctgcaagttcattatcacgctccatgttccgccaccgctttctcatcgtgatgtacccagcacaaggccacatataccctgcatttcagttcgcaaagcgctttgttagtttgggcgcacacgtcactgtttccaccaccgtccacatgcaccggggcatcaccaacaaacccaccc

SEQ ID NO: 110205 - DNA, 297 bp, Glycine max
gtttttcttccttttcaaattgtcatttctggaatatgaatgaaccgtggcaccaaatttgtctacattttttttttctttttcacttcatttcacaaaattttttgtttgtttgatgatgcacgcactttgagtggactggatttgtgttcgtttgtggtgtatttttgattccccaaaaacaaagtttttttttttttttttgctttgcgtgttcatttatgaattaatcaatttacatttgtgtctcgattattatgggctgtgctaattccaaaccaaagggatgccaacatt

SEQ ID NO: 110206 - DNA, 445 bp, Glycine max
attttccactcttttgaaaccatcactttgccattgcagcagcaaaaatgtctgccgtggctcttcctcggcggttttactcgctactatggcttgcgattctgctcgccgttgtcatcttcttcgtcagcttcagagatgatgcctggtcatccattcctagcccgcccaagagctggcgcatccccttcaccaccgacgatggtgtcctctcgtcgtggaagggatccggcgataagagcagcgacaagggcagcagcaagagcacctacaagggccgaaagcccgatgagccgctgcgcatcgccctcgtcgagtcctcgggtactcacgacgaggtggccgccgccatgctccacgcgtttggtaactacgagaactcgcagctcgacgcctactttgccaaccagcgcttcaacatgcgcgagatcatggacaactttac

SEQ ID NO: 110207 - DNA, 105 bp, Glycine max
tttcgtccgttttatcagtatcatcatggaagtgcatcatctagaaggggttgctgttgataaaagtactgattctttcctagttgaacaccctatggagccacc

SEQ ID NO: 110208 - DNA, 241 bp, Glycine max
tgtcgtccggtttgaaggctaagctactttaagtgacacaaatcaatatggcaaataaactagattgcagctaatcgtatttaggaaatttattatatattttgaatttcctaatctgcaatcaattcacatttaattactttatgcagaatcattgtacactatgctatataattatcctttgactctcttgtattgtagttgagtgttcacatttataataaaagttataccatttatc

SEQ ID NO: 110209 - DNA, 170 bp, Glycine max
cacgaaacccaggacctcacggagccacacacgccgtagctgctacccaccctcatcattggaaaattcaaccaccacgccgtgaaatatggaggctccggcggagggtggcggcgaccttgggatccaatcgacgttgacttgccgctacttgtttggaaactctaagc

SEQ ID NO: 110210 - DNA, 323 bp, Glycine max
cctacgcgtcctctttataatataccttcactgcgcaaactaattgtactcgagaaccgcgagttcctcatgcatctcactacctccgtcgccgtcctcgtcggctgcgtcgttgtcttcatctggcggagatcctcctcccccaaggccaagaaggtcacctcgaattccgcttctgcaattgcaatggcttctaatgcgaccatccctacatatgatgtgtttgtcagcttccgcggtgaagacacgcgcaacagcttcactgcttttctctttgatgctctctctcaaaatggcatccatgccttcaaagatgatacaca

SEQ ID NO: 110211 - DNA, 358 bp, Glycine max
gcgactgtgttctggttcatgtgttgttaacttgatattttataaatggaagtagaatccagatgcttgttttcgtcctcaaatagcgaatttctaaggttcagctgcttcctgtatgagtaagatatggtgtaaagataatttctgaagtgctgttggatagaaagaacaaccaagataagtgcataaaattctatggacccatctatagtgaagcttctggaagatgacgaggatgaaagtatgcattcaggagcagatgtggaagcatttcaggctgcattaaatagagacataggaggagatacttcaacttctcagctgtctggttcagacacaggaagcaataattcattga

SEQ ID NO: 110212 - DNA, 430 bp, Glycine max
tcgacttcttgcgacatgacacaggaaaccacggcttcggcttcggcttcacgccgcgatgtaccccccgacgagcgacgacccgatgcgggatacgggtcttttcccacgacggaccgcgatatacctaaacctgcgaagcagagcacgagagcgcttgcccctgacttgctgcgaggcttactcatgctcaccatggctctcgaccacatggcactcgccttgaatacctggcagcacggtactggacgggagacagagatggatggtgtcgtgatcaaggagtggaatagacctgtcgcatacgtcgtccgcaccttaacccacctatgcgcttccggatttactatgcttctcggtgtcggagtcgtctatctcggtcggtcgcgtacgagactgggctggtcaacgctgcgcatcgcaaagtact

SEQ ID NO: 110213 - DNA, 411 bp, Glycine max
ctttcgcttgggaagaaaccatgctcgatggcgaagaagatcattcacgacaccactaggaagatgtctcagctgtgccagaaaatcgttcaggtcgacgtccggtggggattcctcaaaagggtatctttcgttggccactttttccgtttcatttggaacagacttgttgtttgctctgtcgccggaagcccatctcactaccggaaactacccctccgggacccctcttcttcgccgccggccaccgttgacgacgtcttcttctccgctgcaaccactactggcggctatgactccgattccgatttggtgaacctcaagatcagcttgttgggtgattgccatattggaaaaactacttttgtggtcagcatgtttctagctttaccatttattttttttggaaga

SEQ ID NO: 110214 - DNA, 292 bp, Glycine max
tttctttcgcgtggggtttttgctggctgataacatatgtttctatgagtataaggtaagattgtttttggtaggaaacagatttgtggattctgtgatagggaagaggtttgctttttgttttttgacagacatttgttgccagtcagaacgattatgtatttatgttcgaagaattttgagagacttgagatgctttatattccttcacaattttggtgaattcgccttgatatgtgactcttttactgatgtcctgtgcatttttttgtgtgtatatttttagattggg

SEQ ID NO: 110215 - DNA, 312 bp, Glycine max
  unsure (1)..(312): unsure at all n locations
tttcnttattataattgaaagcattggaacctaaaaattccaaaattaattttagaatgagttatatcatatttcagcttttgtgttgaaacactattttcgttgtattccttgaaagtttaaaatttctagcagtcacaatttattgaactcttgcatgcatcatggagtatgagagaatgttttggcttttatattgttagtcaggggggattgttagctatgaaatataaattgacttctatggacaattgtagctttgagtctcaaatttttgcatgtcatcttacttttactgataaagttggacat

SEQ ID NO: 110216 - DNA, 252 bp, Glycine max
ctacagaattgcgcacaatgattgcgggaaccaaaaaacaagtgtcatcgccttcttcttcttctttccctgattctgctggttccatctcttcattcataccttgatccgtgatctcccaatttctcacttgatttgtcctacgctgggattgcttgagaaggtgggaaatggaaatgtatttgaaaggcgaaggtatattccaacaagatgcatcatatacaaatgcatcttcctcttcccctatcaaaa

SEQ ID NO: 110217 - DNA, 307 bp, Glycine max
gtaggtcaaaagagattttgttgagcaagtatgagtctttgaaggagaattcaccttcaataaagggacccattctgtctacgatggatgagattgatgaatgtttggagattttgcatgcaaaacaggagtctgtgtcagatgatatcttagataatgaagaacttggtgacttctgttctttggagctgcagcagcttcgtcttgaagcattgaaagaaggggagaaagtttatgaggacagtgataacaaggtagtttttgatacattgagggagctatacaaacttctggtcacaaagcattt

SEQ ID NO: 110218 - DNA, 299 bp, Glycine max
tttcgttgtcgcgtgggctccttctcaacaggggcactggagattcaaacgtgtctgtctcgtgtcctttctttctttctcccctggcgatccgagacagcattccaaggagcgagtaagtgactcggtggtacaggcggcgttttctcagtgcgccgcgcatcattcgaatgggctccgttccgcaccataacgaatcgaatctcccgatcaatcacgagatattcgatctccttctcaacaggttcactgcagattcaaactcacacgcacgcacgcacactatttttttttatcat

SEQ ID NO: 110219 - DNA, 302 bp, Glycine max
gctacgcgttcgcccacgcgttcggtttctttgggagtcctctgatcaattggaagggcaagctcactaaattatggattagtgctcccactctcctatctggtataggacttcgcgggcagactctcctatttctctactgactctcactctctgcttctcactgatccgcattgccgaacaaagtggtcttattagaaaaacacttgggcgatggtgcatatgtacgctacgctaattgtctatgcagacaacacgctcactgagaaaacaatcttgacttgcagagattcggacatctc

SEQ ID NO: 110220 - DNA, 104 bp, Glycine max
gtttcgcgtttgacatgccctggacaccaagacgagccctggagaatcacatgctccacaatcggatattcaggaacaagactttactggcaatgctgcatggc

SEQ ID NO: 110221 - DNA, 227 bp, Glycine max
gcgtttttgaaaagagagagaaaaagattttgtattttaattgaacacttaagattgcaggcagtgacgtagtttccctgtaacggtgggaactccgtttctcaagctttttgtccctcattggatctcgccttttttttcttcccttcaaggaagggtgagtccattcctgggtttaccttttttattttgtgatatcttttgttgaggaggtggactgagtttaa

SEQ ID NO: 110222 - DNA, 515 bp, Glycine max
ccctcgcgtccgctgacacacataccttgattctccagaatgcagaagccagagacccagggaaaccagcctcccccaggatacccaactgagaatcccccggccaaaagaaagctgttttttggtttaaagaagagaggagagagaggattcattgagggatggtaagcttctagtgaattgcatagtgattattaatacacttgctttttttttttggtgaatacccacatacatgtgcttagcctgcatgaaaagcatggaatgtaacgatatgtactatagtttatgattgtttaactaagacatgaaccaacaaaagttacaaaacgcaaattcaatgcttttttttttaaagctaatagatatggacaaaagtttccatatacgccacaaactattcgctagaagtctagaatactagacaaatgacttggagttggatcagatcagcataatctatcaaaaagcttctaaacaaatttattttcttaaacactaatattacttcttct

SEQ ID NO: 110223 - DNA, 238 bp, Glycine max
ccctcgcgtccgcaaattttgatgcatacactaagaaacacatataagagtaatactactactgatataagtacaatatggggatatggggaagttttggaattagaagttccaaatatacattgtcaaagttgttatatatgtatgtgtataaagtcttctgcaacttcaagtttttctgactggaatcgtagatatattatactcgcactgccaaattggagcatagatacacatt

SEQ ID NO: 110224 - DNA, 179 bp, Glycine max
ccttacgcgtgcggggacgcctggggatggtactgataaaggagctaactttcaggagtactgtgaaccgattcgaggcttgggaccgtgcgtaagaataacagatcgcccagcagttttacttgtggctacatcttagtttactatcaagtttaatataatggttaattaatttgtta

SEQ ID NO: 110225 - DNA, 204 bp, Glycine max
tttacgttttggggaagccaccacttgatggcttcaatttcataaactctcaaagtcctctcagcagaccctttggactcttccttggttgagcttcttgcatcataaaaagctctctaagtacacccacccagttcgagctatatacttggaggtgctctatattaccacactggccttgaagaagcatggcatagaaaacca

SEQ ID NO: 110226 - DNA, 345 bp, Glycine max
ctctctcccagtagagatctcttctctagtttgattctgcagttttgcctctctctctctctctctctctcactatctatctatcccaccataaccattaaccaccacctcttaaataatttttccacaaattaccaaaatatcccattattttcaccctctgaatcacaatttttttctttctaactaaaatcgcctgtacacacaaggattcagcatgttttggctggaagatggataactgcttttgattctcagaggcagaaggaaacaataccttgaaagtaaatagatgtccgcatattcgcctttcgatggctgcttccagtgaaaggtggattgacc

SEQ ID NO: 110227 - DNA, 144 bp, Glycine max
gaaagaattgagactgatcaaagtaaattggaggaagttgctgaagaaagatgtaatgagtcaaacgtaaatatagataatttgaaggatttgagtgagaataaggttcagagggaggtgtctgagattgaaaaggaagcttgg

SEQ ID NO: 110228 - DNA, 223 bp, Glycine max
ttttgtcctatggacaaaacattgctgagaaagggacatgttctggtacacagtcacatttttctgcggtttctgaaagattgacatctgcagtctcttctgaaaaagaagacttgccatctgtcacttttgatgattcagatgacccaggttcagatagtgacatgaattttgtcaacaagtctaaggtttctgggctctctgattatggaaagtttttcct

SEQ ID NO: 110229 - DNA, 343 bp, Glycine max
tcgtttacgcgtgcggagccttttcccaggtttgcggagaacccaatttcccaaacaaacccgaaactcgcacgcacagctacttcgcatcgaaacgacgatgaagacggcgattctggccacgaagaaacggcgcgcgtttgggctctggtgctgcgttttgtgcctcgcgatctgcgctagggtttgcggcgcggccagatccgaccaggaaacgcgggagaggttctacgggaacatgcccaatgggtcgtcgtccgaatccaacaacaccttggccaagatgttcgatcgcgttctcgagaaggagctctccgagaatgaccaacccgaagaacctgac

SEQ ID NO: 110230 - DNA, 291 bp, Glycine max
ctggtcgcgtgggcggacgcgtgggttttctctctctctccctctctctctctccctctctctctcatacttattctccctcgcgcgaaaggtatgacctaactccgaatctccgttgaatctccgtttcgattttctccttcgcatcacttcgcgctcgttctctctctcgatctgttcgaatctcgccgagatctgaccgcgtgcatctcagatccgcgcctattcttgcttctttcatttctcgattcactcacacattgctcgattccgctgcggtgaaatgaaaat

SEQ ID NO: 110231 - DNA, 449 bp, Glycine max
ttgtctttctccttcgctgttgatggtggctgctgccggaacctccgccgtgcatggacgacggcgatccttccctgtccgataaagaggagggggagaacgatgaggaagacactccgttgctgcgagttccactcgtcgatgctcctatactcttgttcgtttgcttccacaaggcttttcgctccgaactcgatcaccttcgtcgcttggcggaaacggcgtcgtcgttggaggacgagccgcgccgttgccgacaaatagttcttcagcttcaacgtaggtttcagttcctcaaactagctcataagtatcattgcgctgcggaagacgaggttatcttccttgcactggatacacatgtgaaaaatgtaatctgtacatattcccttgaacatagaagcacgaatggcctttttggttctgtttttcatttcttggatgagctg

SEQ ID NO: 110232 - DNA, 386 bp, Glycine max
cctacgcgttcgaatatttaatacatcttattgaacattgattgaccattattatcaaagcacttatcaacagagtcagattcaaagttattttatttgcctaaatgagcttatatggatggaatattttaacagatgaagtgtaagatgaattgcatgtttggattaaagtttgaatttaatttaagtttgtaaactgagtttgtaaaagtatcataagtcttgattctccaaaacttggttttcatgcaaaattttactattaaacatacttttgtgggtaagtaaacattgtttcaaactgacttttagaatactcccattgaaaatccaaacatagcaaaactagagatcttcaaggttttgtcttttcttttccttttttg

SEQ ID NO: 110233 - DNA, 472 bp, Glycine max
  unsure (1)..(472): unsure at all n locations
ctttttctctataagcctcccacgtgccacaccaagctcgatcacaccggcactggccctgattccaaaccacacgaaccctttcatatgtttgctgacgtcgatgcttctgtgttggatgaattgttgcaaaccctcaacaaataccgattgaggtcaaaggttgagattgatgatgtctcaagtgatttctcttgctggcagcgttatggtgctggcctttctgagaagtcctcacaagtagaagaaccagaagcagcctctgtaggctgggctgctggtgtggatcgtactgcaatgtcatcctctcaagggagtgatcaagggtggcaatggtttaaggatcccagattggtctgtcttggtttcagagggatcttcccgtcgaacataactcgttagtcgntagctagcctttgctgctaataaattttgtctatttatcatgcaatcttttatattattatatgac

SEQ ID NO: 110234 - DNA, 167 bp, Glycine max
gaccgaagagtgagaccgaccgcttgcctgtccgctctcttcttctctttcacacacactctctctctctctgtttatttgagagaagaatgacatcaagtccgcaaacccttcatctttaattgcatattgatgtgaaacccgcactttctttctagagaaggtga

SEQ ID NO: 110235 - DNA, 364 bp, Glycine max
cccacgcgtccgcccacgcgtccgaaagcagttgcatgcgtaactattggcgccacgtgttcttttgatagtgctaactaattcaaaacccaccatccaaaatgctttagaggaagattcgcctaaataaaggttttgggggtgttgttgaagatgttggtagcaaatagctttgatctatggcgaaaggacggttttttctctgcggcggaagaggtgcaggaatcagctgatatatttttcctttggcgcttgcaaatggagtttttggtagctgaggggaataatagaaacaaaggaggaataagaatagactgccatcttatatctgggttcaaaatgaatgaagctatttggatgatct

SEQ ID NO: 110236 - DNA, 136 bp, Glycine max
gtttttctcgttttttgctacatgcagggtgagaagagattcaatcacaccccaaaattgtctattgagctacttactatacgatccagatctcccatcagagagcgtcacaaacttgccaaggtcccttttcagg

SEQ ID NO: 110237 - DNA, 419 bp, Glycine max
  unsure (1)..(419): unsure at all n locations
atggtttttcaacagaaccctcttttggctttctgtctttgtaatttttctcttttctatcatatttgttctttataccacgccaccttcccccgctgccaacaccgccattagtcctcaagatagcttcagtttccagattggtatatttagtaagattataaagcttagtggcgctgaacactttatgtctctgataacaagtatagctaggaggagacatcatcaccggaggagtcataaggaaaaatgtgacaggtccaaatgggattccaagcttattcaagactataatgtgagtcttgttctcacggttgacttaaagggctgtgctaacttcagtagcgtgcagaaagctngtgatgctgttcctgaatctagttctgataccacccttatcataatcgattctggcacat

SEQ ID NO: 110238 - DNA, 146 bp, Glycine max
cgagtccttgcactccttggacttatctctcgtttggacattcattcccagaaaacttttgcacacaccatattccaaatataccaaaatttcaattttccttgacagagaacacatcacaaacatgaagactcgcacctctgcca

SEQ ID NO: 110239 - DNA, 336 bp, Glycine max
ccctttcgtccgtctgtttctttcccgctcgtgagaggaaaatacaacactgaaagtgaaacaatactctagcgcctggtggtgatcgcatcgcatctgcaacaagcacaacatcgatgggcgaggttgttacttcagcttccgggaaagtgcttatgaccggtggttaccttattttggagcgacctaatccaggacttgtgctcagcaccaacgctcgcttttacgccattatcaaaccaattcatcacgaaatcaaacccgattcctgggcatgggcatggacagatatcagattaacctcttctcagctctgcagacaagccctctacaaac

SEQ ID NO: 110240 - DNA, 419 bp, Glycine max
gtagtcacttctgttagtatcatcaatccaaaaggtatgaaggcaagcattctctcctacatgatgccaactttgtttctgtttatttttctgatcataagtttttgatatttaatttattgttgatgagaaaatcataaagtttgtatctagtagtataagaaagattatggctgttttgccttggctatcaagttcaaagtcattaatttaattagctatttacattatgttctttcccccattcctttacaggattgaggattgggatgattttgttttatttgccattagcttgtatgttgcaaacatttgtgcttgtttctttgtgtgatccatgtcacaatgttatattgtttcacaatatagatgcatagtattgtaatttgaattgttcccaagacatcaagatttgtact

SEQ ID NO: 110241 - DNA, 167 bp, Glycine max
gttttgtatataaccttgatgtaatctatgtttaggaacttaaatggtttgcaaataagtaaaccttctcattctgctagtttttgttagtaagtcacaagctagaaattgttatcccatctctctttttcccaaacacgacttcaagcaatgatgaccgtatatag

SEQ ID NO: 110242 - DNA, 236 bp, Glycine max
ctttttatggctgatcgcaggctctgatgatctgtgcttcgaccattgctccctcgatctccggcggaattacaagcttcgatcccttgccagccattctgtggcccaaacttgtgcactggcgtgttatacggtcgcgcattacaaaattatgctcacagtccgagtccgggaatggtttagcatcggtgctgaaaagctctggactgggcttgtatcaacaggctgggggggtt

SEQ ID NO: 110243 - DNA, 406 bp, Glycine max
gtttgccattttattgtctattacaaaaatgtagcgagaacaacactaatttctgttttgtattttgatgcagccattgtccagatttgctgactatatatttttggcatatttagcctttttcctgcattggtttgtttagcttaaagcattattttgactctaagcaacttggttttcctgggcaggatcatatcaacgactggaggaaaacagcactttgtttaacatccattttctttcttgctgctgtaatatggctcataggtaagtggcatgctgctttagttgacattttctatttttaattcttccagatttgcatttaggttagaatagtttaggaatttcttcagaacacatgaagaaaacataaatgttgtgcatgtgttcgagttcttctaca

SEQ ID NO: 110244 - DNA, 150 bp, Glycine max
cacgcgttcgtccactcttgcgttggacctgagcgggccattattggtgccacttctcctggctcgcatgacacccctcccatggctccggaaatttttgaagagggacagatgctcacctactggtaccgtctaccgaatgccggaccc

SEQ ID NO: 110245 - DNA, 167 bp, Glycine max
ctggcccggtattcccgggccgaccttttcgtccgtttgcctccaccacgctctcctgtgccttacttggactggaattaccctccagaacaaagaaacgatcttcatcaattattcctgttccctccatccgagcctctgtctgcgagaaaccaccgatcccggct

SEQ ID NO: 110246 - DNA, 173 bp, Glycine max
cttttcgcgtggggtgaaatctctattatttagatttgttaaaggcattttcctcgtctattttggatatcaatctgattgacttatttattggaatcgagttattaaaagcgatgttgtatttttgttatgtcctggctctaactctgtctatggtgtatatcactacacat

SEQ ID NO: 110247 - DNA, 99 bp, Glycine max
ctcacgcgtacggagtttgatgtctattttacaatgctcgagcatagtgctactatccttcgacctttgtacgggacaaagactttggggctctgggat

SEQ ID NO: 110248 - DNA, 343 bp, Glycine max
gtctttcacgtcaactttcgtttttctccctctcagattagcctttttgttcttcttttctgcggcgtttctagggattatgacgaattcgctagtatttgcattggaaaaataatgattaatgttattatatcctctggcaactgaaaattgcatctaaagagacagaatgcaaggacctgggggtggcagggatcctttcttcgattttggtggttttggaggctttggttcctttgggcctcccaggagtttaatctcaagcttttttgggggtagggacccatttagtgaccctttcttcgcccaaccttttgagggatgtttgagtctagtccctttg

SEQ ID NO: 110249 - DNA, 350 bp, Glycine max
cttttgagtcttggcctttgttttgcagtatttactaaattgcaatggtttttctttttcttttgttttaatagttttttcgttggttgagatgattgatgcatgtggcatgatggggtgttaaccgtgtcacgtgttaaaccttgaaagtgtgttgatattattctggtggcagaaaagataaaagcttatgctcttgtcgtctaaagttaatgacacctaggtcactgcttatagtattttcttcctctttatgtgtgtagtttaagcttgacgtttccggatgaaattcttgagttagacacatctgttcgcactcttgacttgacgcataatcggatagttgacat

SEQ ID NO: 110250 - DNA, 193 bp, Glycine max
gttctattctcgaaagagcttgcatgatgctggctgatcaatttattggtgccacagtcatagacacagacagccaaaagtttcatggaattggaagcaaagcacctagaggtaccttggttgaccctcttggattttacttcatgccattcactgtggtggttggagtgaatgtcccagaagaagaaatacc

SEQ ID NO: 110251 - DNA, 395 bp, Glycine max
ctttacgctcctctcttcatttcaaatcaaatctctttcctcattcactgcacttcaaccacctccaccttcctctctctcacccaagccttttgctttctccctcccaccctttgtcctgcctgcgcttttcattttgtttcaggctttaagaccaagaatgcttttgaattgtaactctaattcaaatgtatggtaagtttgttttcatcatttctttcctttggctttgatatcacctcgtcaccaaatcaattaaacatcttatccctaatcacactaggctaggtcaagtttgaatgcttcattttgtattcaataaagggattcaagtgaagagatcaattcttaagagaagtatgagtgtatgattgaagagagatgtggaggatggc

SEQ ID NO: 110252 - DNA, 367 bp, Glycine max
tctgttataatagagatggaaggaaaaattagccacacaattggtgaatacactgtagtttcagcaattcaaccaaaagctgcattgttcactatgttggttcctgcaactggatcaatatattggtctgaaagctatcctggtcatgtttctactttattttctaagagtgatctaagtcaatttgtcatgaatgaggagattcttcttgctttccttgctgcttcaaagattggcactccgctgcaatgtcgcactataggtcagaagcttgcatcaagctgctctcaggaaagaaccaagcttgtcagtgtctacacaggtaacgaaagggcaatagtcttgtttctgctctttgagtctgctc

SEQ ID NO: 110253 - DNA, 331 bp, Glycine max
ttttctctcgcgttcgcttgaattaggacctctatgttcttaatagattattattcctgttgaaataggagcaacatggcctatacttcttggtggccaagctcattggacagttggtcttgtggtaactttgattaccataagcagcgtaattgcagctgatacatttgcatttgttggcggcaaggcatttggtagaacaccacttaccagcgtaagtccaaagaagacatgggagggtactattataggcttttgtgggtgtataattacttctgttgtactgtcaaaaattttcagctggccaatacctttattaaggtacactaac

SEQ ID NO: 110254 - DNA, 280 bp, Glycine max
tgtttcgcaatgttccgccacgtcccgtcgtgccggacccagacggaaagaaagcgtgcctgataatcgaaatgctccgcgccgttctgcccggtcgcgcgccagcggccgatcacgatcgccgcatcgccgtgcgcccgggtgctcagttggaccaccgccgctgtttcccaccggggggtgccggagcggtactaagcgagcacgttgtcttttgtttcgacgccgtcgccaggctgaatcagtacgtaatcgggatgaagcagatgggcgatgacat

SEQ ID NO: 110255 - DNA, 380 bp, Glycine max
cttctctattttcctttgttccattgtccgaattcacgttccttttcgtccgaatccttaagctctaaactggatccacctcacccacatacctagtcttcccttttttgtggcaaacgctatgctatattacttcaatataaaatatattcattcttgcgtgtgcgtgtgtgtggcaataatgatgactcaaattcgataattcccccccaaaaaaaaaaattcaaatgtgaacggaaaatgaaaacccattttccccgttaccattcttcaaccatcacaaacccaccatcgccccaaagttgaatcctttctgtccccacaacatcaagtgcagcttcatcggatgccccgaattttgtcccgttatggatgtgcga

SEQ ID NO: 110256 - DNA, 288 bp, Glycine max
atttaaacatgttgccatatccaattgttaatgtttcggtttaccaaaacattaacaattgaaacatgttgccatatccaattctaatgttttggtaaaccgaaaatttctatttggagatagccataaagcttctgtacttatttgaaattttccatttttttaagtaaagccaatataccccatgattatagcttggaagaagaacatacataggaatgtgtttggctgaaattaaatatctttgtgaaatattatttaacatactttgaaaagattgtctgtttt

SEQ ID NO: 110257 - DNA, 114 bp, Glycine max
ttttaccgatgacataaacttgcgtgaattctccttgttagaagcaagaatcagagtataaatggcaggcaacgattggttgaacagctaccttgaagctatactagacgtgtg

SEQ ID NO: 110258 - DNA, 203 bp, Glycine max
ttccttgtcattcaacttgatgaggtgtgtgctatccatcatcatcgtcatctaagatgcccagaattttcatgaggctgctgctgctctctctgtgcttctcatagggccactctgtctgtgatatatctgcaacacgaacccaaaattcgaacggtgaggaacaagcagattttcccgccctgccttctttaactagggtg

SEQ ID NO: 110259 - DNA, 218 bp, Glycine max
tcgagatttttgaccggaccagagaacaagggaggatagatgaaagtgaaagaaaatggcgttgtacatggacgaagaagagattctgaagtgttcgaagcgttcataaaagagaagaagaagctgacattgctctacttgcctttgagaccgagttgtaactgtttgccctgactgtgctaacgtgcgcccctgttgctggtacgccaccagctcct

SEQ ID NO: 110260 - DNA, 305 bp, Glycine max
tttcaattctcagaaagattttgtgctcttgaaggaaagaagagaagtcttttgtcaaatgaacaactttggttatggtcagattgacaatgaggaaatttttcaagggacagttggtccggtgcaattagagctggatgacataagaaagagttgtaactggtcaaaggatatctctgatcttctgagcaaggaggatggtcacacacaattcaccaagaaaaaaagtcttggtggatatctctggggtagctttaaacagattgttggaagatctagttcaataaacgagagttatgcaattt

SEQ ID NO: 110261 - DNA, 204 bp, Glycine max
attttacaagcattcatatcatggcaatggggaggcagcataggacatcttagatgcaaaccctgctctgaagactgctgccatagcacctggggggtccacaaagttgcatgttgctgccggcacacaccattatcactttgtggaggagttgcccaacatataatacaatgatgcaagacaattgcaggataaaaagggcaa

SEQ ID NO: 110262 - DNA, 471 bp, Glycine max
attttctacttcaatctttttcttccttaattagctccgattttacgatagtgatcaaattcagcatatttgggtacttagtattaatatttcgctaattcaacttgtgcgcttccatccttgtttctggtttccgtctttctatttatttattggagtttgtgactccaggtactttgatcaaacgcaacaaattatcggaattctccataaatctctctgttttacgcttgttttggtcaattctttctatgttttatttgaatggatttattttattttatttttttcttgggatctactctatatgtaaagaaactttctgggttagcccttcttccttttttggttggttttaattgatttttttttctcgaaacagaagtagctaaaagaaagaagaaacaattttcgctccaatgcttgtatttatatataaatataacatgttactgtgcaactgagttctaa

SEQ ID NO: 110263 - DNA, 380 bp, Glycine max
cctcaaccaaccataattctagtttctctcattccttctgtcccttaatcgcgaagcaaaccttaatttcttccatgggaatggaaccaacgtgcgtcgacacttcgctcaaccttaacgttattccctctccacacatcgcggaagaagttttggttgaagagttgcggcgtttaagtaatgagaacaagagattaactgagacgctgaaacacgtttgcgagaactatgttgctttgcagaaacatttaaatgaattcagccaactgaggaacgcaaattttgataaagaagcaggaacagtaccgtcactgaagagaaaggccgagagtgtgaatctgtttggtattaacaactatactgagtgcagcaccatcact

SEQ ID NO: 110264 - DNA, 415 bp, Glycine max
gttcaagtccaggttggatgaagtcaacaaaacccacaaagagtataaagaaattcttgagcagacaaaagaagagcgactcaaagtgcaagaagagttacgctccgctgccaagggttttgacccagaaaaggctaaagacctgcaaatgcaggttgaaaacctgactggcaaaatcagggagacaacaaagcaacttgaactcattaactctgacaagaaaacacttgaaaaagagctatatgagtacaagggcaagatcttggctgcgcaagcagaaaaagatgaattgacccgacaagttgattctctgattaatgccagaaaacgtgcctcaatcgaagagatccccccccttactgttccaagacccgaaattaacaataggttggttgctcggatcttaggagagaaa

SEQ ID NO: 110265 - DNA, 250 bp, Glycine max
cggacgcgtgggctgaatctggctatgacccaggaatggggaggcccgttgctaagttcagagatgaatatatagccaaacccatgatggcaaagaccccaagcacttcgaagggacaacatggtacttgggtgtactcaaataacaccccacttgataacgatgaaactttcaccactttcattcaacatgccaagtccaagtataaaactactagaactgggtcccacatcagtagggagaagagctt

SEQ ID NO: 110266 - DNA, 413 bp, Glycine max
cttacgcgtgggctggaataaaaaatactatggagacaagaaaaggtgaatttattactgaagaaattaaacatgcaagtgtgcagatcatgtgtgctggtgttgtaattggactggtaactttggttggtttaaagtttttacctactaggaatggctcacccattcttcgtaaaatgactggttccgcaatggtgtcagatactatcaacttaggtatggtttttagagacgtgtaatttggaagattagtacatatatttccttatagatgatttgagtgattcatttgccgcagatccaaaattaggttttagaagttcattgtgtaaatttcatgtattgaattgctcattactacacaggttccttgggagatgaagaaaaagtagagcagctaccaaaaatggatg

SEQ ID NO: 110267 - DNA, 332 bp, Glycine max
ttcttaatcttctttcacaatatctgacgatgtttcccgtttacatgatctttccgatgatgcttctcattctctctattgggaatggaaatgggcacaaggaagagtgcccattgtggtttgattgcggaaatcatgggaggttcgagtggcctttcaccaaggtagaacaccaagactgtggcatatggccaatccatggttgtgatgatgatcttattaatccaaattatgtgttgttaaagattggaccaagctcgattaaagttcaaaaatttgagatgcaaaggtttgctactattgtttacttcacagatcatcatctcagaaat

SEQ ID NO: 110268 - DNA, 278 bp, Glycine max
tttcgtttttttatacgagaaaatagaatcgtggtccttattaaggagtgacttatttccattctttcatggtgggagttgagctgagaagagagaaagaagatggtggcgcgcatgtttctggtggtccacgacgactctgactttgatctacattacgacacatacgacggttttgaagcttttcaattgcagctttattcgctcacttccgttccacctcatcaacaaatgattttcggagccgaacaagatacttctgtggtcaatgactctga

SEQ ID NO: 110269 - DNA, 198 bp, Glycine max
tttccgttttcagaagcctttgccagcactcatagctcatctccttcaggaacaacaacaaaccacttcaaaggtactatattgcagatccttgttatgtaaattcctctgctgagggtaaaggagcctatatggtccacattggcgtgaaggagcccttgctgcgggtatcacttgatgccactcaaaagactgtac

SEQ ID NO: 110270 - DNA, 373 bp, Glycine max
gtgagaggcggaagcagaaggaggaaaggcgataatcgcgttggtaattgggagtatagtctactatcaatgtgcctaccgcaattctactcttctctctcttttctccgatgtcgtcttcatcgtccttctctgctccctcgccattcagacaaatgagcatttatgcatttcaatttcattttccccactcaattaattagggtatgttctgacttgcttagggttcctcttgatccccttgagtggcaaatatctcaggagagtgcgaacgcgatagtggcatggttggctaatacgattggtgccacgacaagaggctgtttctcaaggacatgtttgccgagtgctctcaatctatgaagcacggaca

SEQ ID NO: 110271 - DNA, 269 bp, Glycine max
ctttcaccacctgcaaagagaatttgtcctctttgctgtccaaacataattgcaccattgccctgctatgctcaatttcatcatgaagcctaactaccagtctactcattgtgtcaaagtctctattcaatatataagttccctttgctgctataccaagctgatcataaactttactctgagaccctttttctgaaaattcataggctctaagcttcctcttaaaatgcttaaatggaaaactaagaattgctggtcccataataact

SEQ ID NO: 110272 - DNA, 374 bp, Glycine max
aaattacatcacttgtccaacattacctttccaccagacatgaaagagaaatcattctttgatgagatggataaaaccattataggtggtgaaagtgaagatggcagccgttttgtatcttccttgcataatgctggagaagtggcttttgatcttggctcatcaatgaaatcagatcttgaaaagccatatcaatctgaggaattagattctgcttccaacaacttgttgctgcccgtagaaagcattgaaatggaggattacttatctccaaggcagatttctgaatccattaattcagagcaagctacttatactccagcattgtggactcctatggagatagaaactgcaacaggaaatgcagactgcac

SEQ ID NO: 110273 - DNA, 375 bp, Glycine max
aatcaagagaatttcggacatcgcgacaacccaattcatcatttaagctcacacatacaagtgtagttcagtccaattcttcaccatcaaattatgttgtcacctgaaccctgtgatccgaactttctgctgcgtctacccgatgatgagttgggcatggtgtcacggttcctcttgcccagagatgtctgcaatctcagcctctgctgcaggagtctatatgctctttcatgctctgaaaaagtgtggttcccttagtgttacatggcgggagtggtgccccataaagaccttgttgagtggagagagggtgtctcatcttaccacgcactatgccgattccttttgagtgctaaaccattgcttgggatatgg

SEQ ID NO: 110274 - DNA, 399 bp, Glycine max
attaatgttttctcatataagtgaaaaatgaaacatgtttgctctatctaatcagtctcaaaatcaacaccatatatcgttgaaatgttcagaattaactacacctagcaagatacttattgttaaatcaaatcacatccctgttttcttctgttgtaatgatattagagtacagtaattgagagttagttttttacattattcttgcagagaatgggaagcatatttaagtgagaggtaaaaaagagtatgagagatgttaatcttaactatagaatcaaattaaatagtaagattaggtttaagtaaatcattgtgagggttgtatgctcaaaattgacttctcttatctctcattaaatatgttcccaaaattgataatatatatatatatatatg

SEQ ID NO: 110275 - DNA, 384 bp, Glycine max
gcatgtgcatgcatatgtgtgcttgcatatatttctgtgctgagtttgaagaatctgtttgaatgaactatataaaagaaaatcatagaagctgaagtacttagattgaagaatatgtaccaataagctacataaaggaaaatcaaaaggctgaagatcaatgattaaccagtcagtgtctttattgtgtttgttactttaatccctgcctcaatgattgaatgatctctaatctggttatggtagtctcatgctttgtttttctgggatgcagatttgtcctatatgctccgttaaagttgcacgggacatgttaaatcacataacgctgcaacatgggcatttatttaagatatcctttgtactgttatttttcattgaata

SEQ ID NO: 110276 - DNA, 66 bp, Glycine max
gataacttttatgtaatattttattcacttaaataaagcgcattactatgtgcaatgagtgtgttt

SEQ ID NO: 110277 - DNA, 421 bp, Glycine max
ttgatcttgatcaacctaactctgaatgagatctaaaacaaaaactttaagagtttttttactttaaatgaaaaagctatatgttggaccttttttattaatatgcgacttttttgtcaatatatgagactatttttgctttataaaaattaataacaaatactaatattttggttgtcagcctaatacttatattttagtagctttacccttaaaatgaacttaacatttacatataaatcatacacaaaacttttgtgcatgataaaatcaagagaggtaagtgcaattttccaatgaaaaaggtttaaattaatataattagcatttagcatcaatttcaatcaaatttagtggaattatttctatttttctctctttagaagcaagatagaatgattagggagaaagacttgcctgg

SEQ ID NO: 110278 - DNA, 222 bp, Glycine max
tcgttttttagttcaacaacaattaagcaatttctctttgtcctctgcaaataatttattatgagtaattgcatttgttttttgccgctgctctctctttttgttgttttgactgtccattttttctttggtgtgctcaaaaggggaggaaaaggaattaccaactcggccacgaggagtctctccccaacttgctccattgtaccaaacgcggtcacaatt

SEQ ID NO: 110279 - DNA, 204 bp, Glycine max
tcgcgttacgcgtgggctctctctctttctcacttacactcacacaatctctctcttctatgtgtctttctctttccagcttggtaatattagtacaagaagagtagtagtagcttctggaggtgttggtgttgtgctgcgatctattaaaaggatagatatttatgccacattcagacgtttatgcttagtacccaattggcg

SEQ ID NO: 110280 - DNA, 281 bp, Glycine max
atcgatgcttctgaggtactgtcagtgatatttgactgcctccatcggtcatttatatgtggttcaagtgtttctgatgcagaatcagctgaaagcaactgcatgggatcttgggattgagcaaatggtagttgtatagcacattcactttttggattgaacattttcgaacaaatgaactgctatcactgtggtcctgaatccagacatatgaaatatactcacttttttcacaatataaatgccagtgcccttcggacaatgaaggatacgtttgctga

SEQ ID NO: 110281 - DNA, 403 bp, Glycine max
ttttacgcgttttttcacacggacaatccgggtttgatccctggcactgaagaaaattttatgttttttcgtttttggacttcatttagtcatttctgttatacacagttttggggtccatgttattagcaagttacttgatttgattccaaacgtaagcttgtgcgccactcttttagtagttaacacacacatttgtttgttgtttggaagcaatacaaattccaatcgctgagctgagcgaacaaaaccgcatcagcaaatagcatgttgtctacatttggttttgtttcttcatcggatatgtctgatgtgtcacgccggaaaatgactagaacgaccagaattcacataatggccttagacggcatcgtgaacgtgaattcactcttcaccttagccc

SEQ ID NO: 110282 - DNA, 296 bp, Glycine max
atttacattgaccttggagggattttcttagttcaggtatactcttgaagcgcaagaccattcctcttccctccaattttgtagggttcatatgccagcttttaattatttagttactttaatttagagaaataaagaaaaactaaaaagaaacatgaggcaaggcaattatgagcacttactcatagaatcccttttagttagcaagtaaaataaaattcttaggaaattatgagcacttactcatagaatccctttaaggtagcaagtaaaataatatttttagaaaatcatca

SEQ ID NO: 110283 - DNA, 376 bp, Glycine max
atatcatttggggttgtagaattggaaatttcagagtttttgggacaccccattttgaaaaaagtgtgtgtgtggctgcagctatggttgcagaagcttggattgtaaagatgggtaaccaggtaagttccaatctcaagcatgcccttcttcttgaaactttgacaaagagaaaacagagccacaagaggtcagatactaaagaaaccataggtattctttcttttgaggtagcaaatgtgatgtcaaaaactgtgcacctccacaggtcactgtcagagtctgagatctcaaagctgaggaatgagatcttgggctcagagggtgttaggaatttggtgtcctctgatgagggctatcttcttgagctggctct

SEQ ID NO: 110284 - DNA, 255 bp, Glycine max
ttaaaagaacaaacttagctgatcaaaattaatatgaatgtgaagagtaggttacatgagagaagactgcaaaccatttttgacatgcaagactgccacaggaattgtctttaactttatactcattctaattgtacattccttctgtatatatttcaatcattccaaagactgatggggtgctggcaaccttcctgacttatgtcgtgttccactcttcatatatcaatttatggacgcaaaacttgatctttt

SEQ ID NO: 110285 - DNA, 236 bp, Glycine max
attttgactcaaccttgattttggaggtataatcagtagattacccggttgaatacttcaatctatttacgatgttatcatgttattacgtgggcatcatatcacatttttctttctttttttttcacaattttgctgccctacaagttatagggcaccctgttactgatccttcttccattccaacctggaagctttagaaattcatggaagttggttaagtttgccaacatttc

SEQ ID NO: 110286 - DNA, 401 bp, Glycine max
gcgaaatttaaggtcttttctttcctctttcctaatattctctatctggttgcctgtaagattgagaacatggatcgcagagttgtatcgttgaattgagtcttaggttttgcagtttccgggattctgtacaaggttccatttctgtgttgaacttgattgaagttgtcacgggaaatatggattctttgagcatcggaaataataccagtaattatttccgtgctctgagccagcaatcattaccaggtccattggttggcgggagtgttggaaataaggaactgtacaaatggttagatgagaggattgcacactgcgaatcacctgacatggattataagaaaggtgaaaggttgagactccttctttccttgcttaaaataggttgtcaacattat

SEQ ID NO: 110287 - DNA, 427 bp, Glycine max
tttatcaaaaggagaaactaatgtgggcttccttcaatggctccttccatcaatatatggccatggtgctaggatggatttgccaaatctggcttaatcttctgttgttgaaccttctgttgttgaacgtctttctcttttgtcaatgttctcactttgaaggagctgtgaaaaggtatgctgtgcatagtttggtttgtggacttccaagttttatcactcttacatgactacactgcagaccgtgaagctagaatctacagcataaaggatataatgatgtttttttagcaaagtgctactagagactcttctgttttattgtgtttagctttggagtagagagggtggatacaaaaaatatactatccggattctcttcttacatttaaaaggtgctggaaaggaaacatttgtttatgtcttt

SEQ ID NO: 110288 - DNA, 381 bp, Glycine max
gcaaatatagttgcacccttttcttgttgaaagattataaaaacactgttttttggaacctagtattattattatcattattacttgtgatggctgttgtgttctgatcttcctttcccatgtgctgacttggttttcttcgccttgctttgtttgttctgtccatttggctctcctctttcctttgttattttgggggttgaaaagccctagttttgaggattgaaggagtgttcagcaagtgggtttgtgctcatttcattgagttgttcttggctcttaccggatccagcttcatctgtttttagttgaaggaagatgactgacagagaagggtccgacaattaatcctgaatagtagaggtagaagatggaaaatac

SEQ ID NO: 110289 - DNA, 131 bp, Glycine max
ctttaatttacgatttcccttaaaattattccttaagcgttaaaatgatacattaacttagggactaacttgatgaatattcaatattgtaggggataacttgaatagtatcatgaccttatgaattatct

SEQ ID NO: 110290 - DNA, 342 bp, Glycine max
cctcacgcgtccgcccacgcgtccgatcaaaaggttgatgggcggaggcgatgaagctcaaaacatcagacgccgctcggaagagcttgcggaaaaggctaaacaatcccttcaggaaggaggttcatcccacaacaggttaacgaccctcattgctgatctcatgcgcttgagggactctaagtcggccacctgatttcttgcgccatgcccctacaattataactcttccctagctataagaatatgtattatgaattagtaaataaacagatttacttactaacttagtaagttcatttagtgcgctaagatgttgtaaactctctgatgagttgagaa

SEQ ID NO: 110291 - DNA, 415 bp, Glycine max
cttacgcgtgggtcggataacaactacatctggaaaatcagtcaataaacaacagaagttaattcgacagggaatgggttttttgttgcaacagattagagcagacaacgcaccctccgatgtgtcaacgagtcaaagggaaagttcaattaccaaaaaaaacaccgcctctgaggaaattacttcgaaggaacaaatcgtctctctcccgaacaaaaatttaattcattcggctgttgtcgagaaacgtgaaaataaagaattaccaaatgattcttcgttttttgctaatctgaagcctgcacaagtcatttccaattgttttaacgagggaacgactcccgacttcggcttacacattcacagatttattggagaaaacaattacgtccggtcttgcagatggtccccggat

SEQ ID NO: 110292 - DNA, 466 bp, Glycine max
cctacgcgtccgcatccccttgcggaccctgccttcgagatctgatagtcaaaacgaccccgactcgcaagcgacgtcattgctcgcttcgtcccgctacgacgaccacgatcgtgactacgactaccggcaccccgacaccgcccgctcccagcgtcgccgttcctactccggctccgagtcgtcctggaccgacacgggtgacatcggcgaacagctcgccgacaacgaccccgttcgccttcagctctccaccgagatcgaggacgagctgctggctggcgtccagcgtcgacacaagaatcacaatcaaaagagggttcgcatccaggattcccatcaccgccaccactctcgctcccattctgtcctcattgataaggaggctatcgaagtccccgacttcaatcctagaccccctactcgtggtgaacgcataattggcgccatcatgtcgggacgatca

SEQ ID NO: 110293 - DNA, 154 bp, Glycine max
ttatagtgaagatctactgatgagcatagagctggtgggactacaaggcgcaggttaagtgtttcacaacatgatggcagatgatgataagatggggaaggctaacacacaacagtaatttgagggaaatttcgcaggggagtctgggttacca

SEQ ID NO: 110294 - DNA, 168 bp, Glycine max
cttacgcgtgggcggacgcgtgggattttttcacaaccacctctttcaattctctcctctcttattccaaattcaaattagaggaaaaagggtcaaataataattaagtgcaatatggataccatcagtgttcacgcgatgagaagcttatcagatagtgactcatta

SEQ ID NO: 110295 - DNA, 287 bp, Glycine max
gtcaccaactctcagctcaagtgtttagaggccttgtatgcatgtttgcatctggtcctgaagtttaattgtggacatagctattttgtgtaaattgttttggctatgccattaacaggaaccatgatgaagctcattagcaccatatatatatatatatatatagagagagagagagagagagagagagagagagagatgataagagtaatgatagtaaatcaacggacagaattatataatctagtctgtcacgactgaatattatggatctagcattgtcatat

SEQ ID NO: 110296 - DNA, 57 bp, Glycine max
ctgtacgcgtgggttttgagacttcaaaaaaccaattgtcattgatatatacaaatg

SEQ ID NO: 110297 - DNA, 344 bp, Glycine max
ttttgttctaattttttctttctgctgggagtttgctctctcaatgttactcccatgccttcattctttgcagcctattctgggttgcttgatacatgattgctattgtatagaaaacttagttccatgtattgaattattgggggccgatttacagttagtgaaatacatgtgagtatttcaatagataggttgcctttggcacttgcagctattattctccctttttttccctccaaatttttcatgtttatgtaaaagcatacaactgggctggtttagaggtattcgagaccttaagtgcaaaacgttgtggcatcttaataatataaaatacattgtac

SEQ ID NO: 110298 - DNA, 363 bp, Glycine max
tcgacaaccattccatcaagtgcagtgggaaacatccttgaagaaaaccatactgttcctggcaaacttttagggcgtaaaaatgccctaactgaagaggaaaggggctctcagcctgtccaatcaaattggcagattccttttgaagacaatacaggagaattgcctaattggggcttcacccaatcattgggtttggaatttggatctgattatggtgctagtttactgggggatgtaactaataatgcaggcccagaaattgttcctgagctgttcacttttaatggtgagttaaaagagcagtctgtgcaccaaaacttctcaaagctgtatacacatgggcaatctcaacctacactg

SEQ ID NO: 110299 - DNA, 155 bp, Glycine max
tcggttctgagtgggcaaatcaaacttaatggcgtttgtgtttacttattgacaatcccaaacagtgtacaggaatggatattctcttgggaattggttaagatttggaaattggtgtaaattctcttatgccagctttttctgttccacaggct

SEQ ID NO: 110300 - DNA, 54 bp, Glycine max
cttacgcgttcgcccacgcgtccgcccacgcgtccgactagttctagatcgcga

SEQ ID NO: 110301 - DNA, 467 bp, Glycine max
cccacgcgttcgggcttaggagataggagttgattctttgatggcatgctgttgaatgggattcaagtggccaactgatttagatgcagaatggacgcttagtgtgaatacatgcgtccagtgtatgctgaaaatgatggatccagtcccatttatgttggctcaagaagcagggcatgccttctatatggcagtagaactggcattggattattttttggatttgcaaagcaccaaagtccaacccaaccgtagtaccatgacaccttgtataaagctttagcactcctcctttaggattcaattctttctcatgtaacatagaaattagtttcctttttgatagagattttggtaggtaccctcgagaaaatgttgtatagctgtcaggttcagagaaaatagaaatcagctcattgtattgtaaccaatattatttcaattgtgaatcacgaggctaatttttg

SEQ ID NO: 110302 - DNA, 478 bp, Glycine max
ctcacgcgtccggtccaataaagaagacatattcactcgatcaaagaacggcttgacaaatatggaggttgaggtgaaacagcaagagggtttctatctgaaggcaattgtgaccgatgtgttggagaattcgctggacgttgtttatgaccgtggatgccgaaagccggaaactgtggaattcagccaatgtcgtgctgtcatcattgaaaatgcgcagcaaaagcgaccgtcaaaatgcggcgacattgttgatgcccttgttccgattgacaaaaacaacgatgacttccaggcctacaagaagatgaagattcgggagatcaagggcgattttgcggttgtgtgcagcgtggacaattccggagacggcaacgtgtcagcattgggcagtgaagtgatcccgttggaccaatgccgtcatccggcaatgtgtatgctaattgatgccagctcagtgaaacagtgcaccatttcg

SEQ ID NO: 110303 - DNA, 186 bp, Glycine max
ctcacgcgtccggttaagaatgaaattctgagttctaacgccactaatcctatgctgacgcgacttcttgagaactgtaagagtctcaaatatctggttgatgagtgtccttttgcatttgtgaactagtatgtaatattttattcacttaaataaagcgcattactatgtgcaatgagtgtgttt

SEQ ID NO: 110304 - DNA, 461 bp, Glycine max
cttacgcgtgggattgttttgggcatctctttattccttagtttggcctgttcgaatcccgtcatcctgttctcgacgcaatttaaacccatccctgccactcctctcaacaactccccgcgctatctttgcaccgagcacgcactcccctcaacgaaaagccgacagtatccttggaatccaccagactccatccaacctcttcgaaactgtacctagacgaaatcgattttctccttcgcaattgaatagtctaccaatttttttgcatattttgcgaccggtcgaaaacgttccacaacgcctagaatgagactgaacaaggctgctcgagttatcctctttggtgcacctggcgttggtaaaggaacccagagcgagcggttgctcgcgcgcttcccgcaactcaactctgtcagcactggcgacctcctccgtcgaaatgtcaaggaaaggacacc

SEQ ID NO: 110305 - DNA, 304 bp, Glycine max
ctggttctggttgtggtgcgctatccggaatacttgcggttgtcgcgcgagggcgcgggtttcgaggacagtccgctgggcacgctgtggcgctacgagatcgacctggacgagggcggcgtcacggagcgcgcgctggacgatgccggcatcgagctgccgcgcatcaacgaggcccggaccggccgcgcctaccgctactgctatgcggtggagcagcccaacaaccgcgagatgcgcggcgtggagcgctacgacctgtagacgggcgcgcgccagcagtatgcggtgccgcctggcgacc

SEQ ID NO: 110306 - DNA, 327 bp, Glycine max
cttgaagttcctccaatccctctttgtctttgtgcttttctaggtccttccaaaataccaacaaaagcaaagacaatgagttgccaagcatggcccgaacccatagttcgagtccaatccttagctgaaagtggcctaagttcaatcccttcacgctacattaggcctcacttccaaagaccctgcaataccacttcttttgcaactcctaaaccttttcaaacatgatcatgatcatgttaacattcccgtcattgacctgaaacatgttttctcggaggatccgatcctccgagaacaagtgtttgggcaggtggaccaggcatg

SEQ ID NO: 110307 - DNA, 480 bp, Glycine max
aggaaccttttctatgcctcttgttcctctcttttctccttttctgctcttctgggactactgcatcttcatcatctgctgctactacattcttccagaaaagcaagatctctaaatctgagattcggttttctgtatctgattacaagtttttgagcactctcaccaacaccaacctgtcagatgatttcttcttaaatgaaagcctggttgaaaattttgtttcttcaaaatcaaaatcatctctggtttcatggctagaaactcgtcttttgaacatttttccacaagtagacatcagaagcatcgttgttagatgtggcagggagtgcttacgcccagatgagatgcctttgctcatacctgttctcaaatcaattcattcatttctcagcaatcttcaactaagcagggaaactaaagtctgcgtggcttttccactttcattcttagagaatttgaatgcatcatatgagagtg

SEQ ID NO: 110308 - DNA, 218 bp, Glycine max
actttttctttctctctcccaaacgtgttcactgatctagattgtatctgcaggtttgactctctctctctctctatctctcactatctatctatcccaccataaccattaaccaccacctcttaaatatttttgcacaaatcaccaaaatttcccatttttttcaccctctgaatcacaattatgatctttgtaactaaaatcgcctgtacacacaa

SEQ ID NO: 110309 - DNA, 53 bp, Glycine max
attttaacaaattcttagtgtatatacacacctttgttaaaaaatggatctag

SEQ ID NO: 110310 - DNA, 351 bp, Glycine max
ccctacgcgtccgatttttgttattagaaattccgaattccctttcaaaaaatgctttctctgctctccattttgccaattgttctcgccgcgttcgttgcgccttttgcaaatgcccgctttttcaacgcccagcgttacgctgagcttgaaccccaaagagattgaactgctgatggacacggcacaaaattgcaagaatctgtcggacgaccagcaagtggccgccttccaagtgttggcagaggagcagggtggcgatttgaaggcaaacattgacaacgtgctgatgaaagtgaatgtgtcggacgaccagttcaagcagaacattgaggaggcgaagcagaagct

SEQ ID NO: 110311 - DNA, 237 bp, Glycine max
ctttcgcgtgggcttttatcaaacactatcttctgtatggatttgattcactctacaggtaaagcagatgagttcaaggacttggtgaccaatatcacaaagctggttggaacaccaaacttggcagattttattacagcgttgaagatggttgatccacagagcatcaaaagacgacagagtatgaactcgaagaaggtgtaggacatgttaaaccacttgggtagccaaaggttg

SEQ ID NO: 110312 - DNA, 313 bp, Glycine max
cggtttgcgtgggtttacgcgtgggcggacgcgtgggggaatccacagcaagaaaaccaacctgcttaaagcatatgtggagtttatttatcttgtagctaatgcagtataggactatatataggtttttatagggtatcctttgtgtgaaactcaagagacctcgtttttaggggattttctgtttgatgtccataaggattatcaattatgttatatatggtctgggatacaagtcttgacttacagtttttaacttggttgttttcattgttatggtaatttgattatgatttgagaccagccatttttc

SEQ ID NO: 110313 - DNA, 268 bp, Glycine max
  unsure (1)..(268): unsure at all n locations
gttcttaacaggatgtgtggtctgcggtgcaggaacgagcactagttcaagctttaaaagcctttccaaaggaaacaagccagagatgggagcgtgttgcaacagctgtacctgggaagactgtgaatcagtgtaagaaaaaatttgcattgatgaaggagagtttcaggaacaagaaaactgcagtctaatgttctgttgtgatattttagattatattaaatttttctcatgagtnaaaaaaacaaaaaaagaaaagaaggaagag

SEQ ID NO: 110314 - DNA, 72 bp, Glycine max
tttcgattttcttgcaattaaccttgtattatgatgaaggatctgttataccttcattattccaatttgctt

SEQ ID NO: 110315 - DNA, 409 bp, Glycine max
ctcctcctattcctcttctctctctctcctctccgcaccccttctcccacgcagcatttccacgtttccgatgccgaaacctcgttcttggcctccctcgaccactttctcctcgcccacgctcaaacgtccctcaaagacgacgacacagcgccccgcgacgaaccccaaaacgacgacatgacgaagaagctcgacgacgccgtttttcactccgagatggacaggctcctctcggatccttactacccggtgtcccttccccttagggtttacgtctacgacatgccccccaaattcacccacgatttgctctggctcttcaaaaacacctaccgagacacctccaatctcacctctaatggaagtcccgttcaccgtctcatcgaacagcattccattgattact

SEQ ID NO: 110316 - DNA, 265 bp, Glycine max
ctttcgttttcgggtatgattaatttttgtcaaatgtggctgcatatgcatatctacgtgaagttgttgactttactcgcttatgccttatggtttaatttgcattgttttgttgctgctgggatccgtagctgcattcagagtgtttgagattgcccttataagaattgttcaattttagttttccaaatattggcactcacatgagaaggggaattttttaaagcttgttttggttggggttaacttacacggcaagttcacc

SEQ ID NO: 110317 - DNA, 403 bp, Glycine max
tcggtttgtatgcaggccgataggaaaaggcagaggttcaatcaggtatgtatccgttccctttctcattctaccagcctgaatcgatctacctcaattcgcataattattgaattctttgtgtaaacaattcaacttccatttattatctatgaattcaattcaaattacagtactgcctagcagcttgcaagtttcatagatcgagagaaaaaaagcgaataaatgttcatctttaacttccattcaaacaagtgggttgggtttgaccagcatacacacaacatataattctggtggaacggtgaaggatgctatccaccaatccatataattgcactggttatgttggattagtttaggtttaatcgcccctctattttgggatgagttcgagatgctt

SEQ ID NO: 110318 - DNA, 427 bp, Glycine max
  unsure (1)..(427): unsure at all n locations
ctttaataaattttgctggtgtgaaatttgccattgcaccctcgatttatcttcttccttttctcactttcgttttgccatgcttttcctccctccctcccttttccttttgcttttcctcctccatcgtccctttgccaatgccctcggctgtatgtccgccgtttgtgccgccggcggtccctccccctcttcccatgccgtcaatcgcatcattcgttgcgcttccgactctttttgtggccattttcgcgctttgcggcgaaatgaccaatttgtcgaggcggtcgacctcagttgtcccgaattcgccgtggtgcgcgctcctttcgatggcgaaatttcggcttatcgtccgatgggagggagccgagcgcaggaggggacaaagggcgaatgtgtgccggatcanggagttcggatcgac

SEQ ID NO: 110319 - DNA, 395 bp, Glycine max
gtttttggtttcgtttctgcaaaacctgtcttcttcttctgattgattccacttcgcgatttttcgattttcgtttgttttcttctttttcggtttctgatctgaactcgattcgattcgctattgccggaaaatgagtcctccggcaagtgtccggtgatgatcgctccctcgagaggttgttgaggttatcgttgttgttcttcgaagtcatggtttcgatctgagtagcatcatcatcatcaccataccttgttcagattctgctcactttcaccacaaaggctttactatttaccgcgtttcgttttcgtgtcaccgcaaataatgaaaggaggtgttccctgtatccactcctcgtcagggaagatctgaagcagtgctagctgctcacg

SEQ ID NO: 110320 - DNA, 216 bp, Glycine max
tcgctggacaagaaattgagcagaaacaatgaaattcatccatttcagctaataatagtagcatctcttcttttcaaattcaaagtggagcggacatcaataaaacctttgttattggcacacataggccttctgtggaaattcggtattttgcaccaggtggaggaattacagtagttgcttgtgggacaatttcattaacgaatacagcaggga

SEQ ID NO: 110321 - DNA, 214 bp, Glycine max
tcgcaattatagatcattctaggtttaaattttgaactaattattataaaaatcgattatgttcgaatatataacaattcataactagattatagtatacgttatgagtgtattttaattaagttcaaataatattttcatatagcatacatttgagggacgatcctttaatcagttgttcaaattatgcagggaatcattccaatggagccat

SEQ ID NO: 110322 - DNA, 183 bp, Glycine max
ctttttggcgttaagaatgaaattctgagttctaacgccactaatcctatgctgacgcgacttcttgagaactgtaagagtctcaaatatctggttgatgagtgtccttttgcatttgtgaactagtatgtaatattttattcacttaaataaagcgcattactatgtgcaatgagtgtgttt

SEQ ID NO: 110323 - DNA, 95 bp, Glycine max
cggacgcgtggggaaacatcatctggtgtttcatttgttcatctttatgatctttctttgtgcaggatattccaatattatttgctttatttttt

SEQ ID NO: 110324 - DNA, 347 bp, Glycine max
tcggcggttttgcgttccctcgtatactctactgctgatcacacttcgctcctcgcttaattcctcatttccccgttattacacgagaaatgatccaccaaaaaagtttagccgactgatccttcgaacttcgaaacctttaaaacttgacacctactaattcatttcatttaacttgtaattttttttttgtttcaaatttacccgagcaactctctctctccctctctcttggaagctactgtctaaccatttttttttttttactccttttgcttttgtgcggcgccaccaaccctaaactttgacacctccaacgagcaaagaaaggggaaagagatatgagc

SEQ ID NO: 110325 - DNA, 391 bp, Glycine max
ggtctgttgaatctgctcattgtaattgctatcttgaggtgtactgttttgagtctctggtttttttggttatgcttattactattgttaatgtgattgagtgataagaatatggtatggatgcttactgattgcattgtagttaggattgagacttgagagactactactactgctggaagttgcaacaggagaaatattccccttcctgtagaagggatttcatattccacaggtagtactccgggttctgtgggttgtttgtgtcattttgacttttccttatgtctgtgtaaagcttgctttggattcgcagattgcattatccaatacaagcttgctctctctattagctcatagtgcctaagttttggtgtacctaaaccatata

SEQ ID NO: 110326 - DNA, 418 bp, Glycine max
acagtgtggtacctaaaattgaggtttcgacctccaaagagtctaagattggaaaggaaccgacaaaggatactaatgctctctctgaatcgaaagaaaaacttccatttgctgatacagcatggaaaagaaagcggaagtctatgggttcaaaggttgcaagtgcaaagcttgattcatatccaagtggtcccttgaaagatgaggccttagatgatggtaacaaaccggtggttaaaggaaaacacacggatcaggcttttaccctaccaaagcaattgaagacagttaagtcgtcagagagttccttgtgtagtgatcagaaagatttaacagtatcaacggcagaaattccacttttgaatgaagttagtttaccaactaaacaaagaaaacgaaagatgattttacagagaac

SEQ ID NO: 110327 - DNA, 353 bp, Glycine max
gtcatggtcaattcagtagtaattcaatatgtcctagatagttccccctttatataataccaagatgcagaagttctgaaaattaaccaaactcaaaaatttccaaaactttatagaattagagggacaacatggctggagggttgcttggagataaccttggattgaaggaagatgtgatcaagagggtgtgcggtttggcctccaaagctcacaatcacaagtcaacggacaagctctacttttacgattaggttcggacttcttcggggacataccatgttaccagcttctcgggatcttgggatcccgctgaatggttttttagcaaaccctttggcggatccaagata

SEQ ID NO: 110328 - DNA, 393 bp, Glycine max
cgagtatataatatcccagtgatgtcatccaaactacagacataagaaccaaagttacaattattaaattggaagtatttaatatcttggaaatcctaaagcattcactacttcattctttgagggattaggattagtaatgaatatatttttcatttattaacatttgttcttaggccaagtaaactaaattctattttatttgaatgattttgcttactattgccctaaggacaatgcttttgttagatgtcacgttgacgatgaattggtaacatcgattgttagtgtcacttaaaaaactattcattttgatcccttaaccattgcctttaggaaactgtatttcattttccattccgtgacatgctttgagaatttagcgtaaaatat

SEQ ID NO: 110329 - DNA, 394 bp, Glycine max
cttacggttcccaacatatgaacaacaacgccgccatgtagaacacaaccgcttcctttttcttcttcagaaactcttctctttctcattttcctcttctttgaattcaaagaaattcattacaaatatggagagagagagagaggaggtaaggttttaacggacctatctcaacatcacagatgataaaggaaacacataaagataaataacaatagaaagataaggataaatccaaacctaccctgagactatctcattacaaaacttatctcaacctctttgtcaatgcatagataaaagctcatgactatctcattgcatttagtttttttttccggggaatgaaatgctgaatctctttttcattatgttctaatgctattcttattta

SEQ ID NO: 110330 - DNA, 94 bp, Glycine max
gtttgttctgtgtaaaagcagggtttttgatggtgtgaacttcttgtacttggctcttttacttgagaaaatggcaaattgagtggtaccttgt

SEQ ID NO: 110331 - DNA, 166 bp, Glycine max
tgaaattctgagttctaacgccactaatcctatgctgacgcgacttcttgagaactgtaagagtctcaaatatctggttgatgagtgtccttttgcatttgtgaactagtatgtaatattttattcacttaaataaagcgcattactatgtgcaatgagtgtgttt

SEQ ID NO: 110332 - DNA, 410 bp, Glycine max
ggagaatgcgccgttcatgacgcgcagatcgccggcgcagcaagttccgacggcaaggccgaagctactccgccgatcgccgatggttctacaccgactgtggtggctgataaacctaggggttcgttctcttcttggagggtacatccgaagcaaaacccaaattttgaaccttcagttccatggtgcagactcttgtctcagtccgcgcagaatccgaatgttttaatttccacacccagctttactattggctcaagtaggagttgcaatttttcgttgaaggatcagactataagtgcaaatttgtgcaagatcaagcacacgcaggatatgtatgtgcagtatgattactgttgtttctggaaatgatcagcgcgagggaaatgtcgtggctgtgctagaaagta

SEQ ID NO: 110333 - DNA, 178 bp, Glycine max
atttttaccaaagagggaagatctgatctgcgtagatgacatcatggtacaacaagaggagagagaaaatgatccaaatatgggggaaaggaaactaaatcacgagccattaacctggaaactgatgaaggatggggtcatcaagcacgattcggatagacccaaatttgacatgatg

SEQ ID NO: 110334 - DNA, 311 bp, Glycine max
cccactcgtccgcgggagcagagctcgcaggaggtggaggtcgtggagagggaagaggagagcgaggggagagactcagatagtgacgtcaaggacggcgggtacagccagcgcggcgtaacgagcaagcggagggacgacttcgtcgagagcggatccgaggagaatcagtatgctcaccatgatgacggggaagaagaggtcgacgaagccagaagccctagtgggtcacccagggatgaaaaagatgagactcgggacttgcattcagccccagaaattcgtgatgtgtttggtgattttgatgatga

SEQ ID NO: 110335 - DNA, 218 bp, Glycine max
aaaacagtggggaagctggtagcggcgagctgctggcgaagccttgcgccgcgtgctcactacccctgcatgcccaaatatgccaagggcgagagtggaagcaccgggcaagagctctatgagtccaccggtgctctctacgatggcggacagagctgcgctggctgcgccggagccggggagaaggcctataaacgcctgcccggggtccgtgaagc

SEQ ID NO: 110336 - DNA, 420 bp, Glycine max
aaaaaatcaaacagttggtagctaaagagaaaaagtcaaatccaaaaacttgtgcgtctagtaagaagaaggaacttgatgttgttgagaaggctcgtttgttcaagaaatccaaaactaggttgaagcttccacaaccaaagacaaccttgaagttgcattttaattctatcttagaatgaggaaactgaagaacctcttaagaggaaaagagtggacgaagtggaagccactactgaatctgatgaacctaaagctccattagctcaagtggtgcaacaaccaaagaggatcaaaaccttggagtcattgaacatctcattcccttaactcaaatttgaaaaaaaaatcatcccaatgttgttcgagaacctataaagtggaaggaataccttggaatcattcaacgtctcattccat

SEQ ID NO: 110337 - DNA, 398 bp, Glycine max
caaagctcttccaatgtttccttggttctatagatggagatggaagctctgagtctcgctttcgccgaatctcgttttctgtgttcggatttcgctgttctccgtttggtttgacgaaaaaaaagccgtttccttcctcatcccgttgcttttttgctcttcgggtttggaattcgatcttcaccttatccactcgtaaccgctaactgaagcatgtgcggtggtccagagaaatcaaaatctctttcaacttcatcttcatcagcggtagaaggttcatctaacagcaaagacatgaaaaatttaacagttcatactgaagattctttttcctgcttacttgagcttgcttctaacaatgattttgaagatttaaagctagctttagatagggatgc

SEQ ID NO: 110338 - DNA, 446 bp, Glycine max
gcggtaccatcttcttcattcactgccaattccactttctctcagtgcatgcatgtaatagtcttcagttcttggagtccgcaaagctagttatagtaacctcttcaaagttcaaaacttcccttttttgtcctagcttgcacatgttgtcactgttgaaagtacaagtctttttctctcatttgcagtttcatttgccccgcatttctttgctttaaactactcttctcattgcttttgtccaaagttcccttctttgtctcgttttctgattcaaagtttgaattgtgaaatttttttctagttcaaggacgggcctgtgttattaattaagtttacatgaatttcagtttctaggattttttgttttgcacaaatgaccagtgacaacacttgaagcaaggaaagatttcgattgagtacatttttatgaacagaacctatga

SEQ ID NO: 110339 - DNA, 383 bp, Glycine max
cccacgcgtgcgatcaaatcacaaacccgagaaaagaaagaacaaaccctagacctgacggcactttgcacacacagaaaccgtgacaagtatagtaatagcaattttcctcattcaatccccatttcccttttgcatgcacctgctcactcaactcacatggatgcctccgctttcatgcatcaccataacgctcctttttttcaagatcttcaatgacccattagccccaacaatctcaaaccccaggatctagctacacccacttgtcaaaatccttgctttttgcaccacccatatgccccaacaccaccacaaacttgacatttgtcactctcactgctgccaccgctactaatagctaccactattactattaatgg

SEQ ID NO: 110340 - DNA, 386 bp, Glycine max
cccacgcgtgcgcccacgcgtgcgcttggccaccattcttttttatgtggggcttctgattccccttcacgcccattggctcttccaaaacacacttattcctttccatccaccaaaccaatactcccaaatctcacaaacaccacctccattggccctatcacgctacgccgtggtttagcacctgcttctgcacccttcgtctctcaatccacacaccctcttatcgtttttgtccttgtctccctctcgcttttcgccaaatttgtcttctttttgcaccttgtccctgatttttcctcgcctcaaataatattctgcggctccttcccccccccccccccctgaacagaatttgggggatcccttcttcttctttcattatt

SEQ ID NO: 110341 - DNA, 139 bp, Glycine max
tcccacttcgaccggttagctgaggccttgtgtttggaaacttacggtgccgtttcggagttgggaaaacaaattattatgggagatggcatccacgaacccttatgattcgatgggtgacgacgctgaggacccttct

SEQ ID NO: 110342 - DNA, 455 bp, Glycine max
atcatctcagggttgggttttcaaccctcaaaccctgccttgccttgccttgccttgccgcacaggttggggttgcattgtgatcatcgcacgtgacgtggcagtcccctattggcacatgtcacgtgacaaaccaccttcccggttgccccaaaacccaatccacatgacccaacctacacacaccatacatcaacaacactcccaccttaagttccctgaactaacgttgttcttcttccaattccaacaccaacaacattagtaagtaacaaattaacaacaacatcaaagagagatagaaagacaacgactacaatgaataacggcgttagtcaagaatcgagcgtgctcctcgatttggcgtgccacgtcaaccgattcgctatcgattccttccgttccgacaacaacaaaacccttctctgcaatttcttgcacttcaacggcaacac

SEQ ID NO: 110343 - DNA, 339 bp, Glycine max
actcaccacttcgctgcccgtcaattcgctcgtctctttggtcatttggttttgttgccttctctacgcttccattcgcacttcttcatacacggcactgggcaaaattggtggggcgatcagtgaaggaaatgccgaaggtcaggacatccctctgagtaaggcgaaagtgaacggtggcggcaaaggaggaggaagagaaaggacattagcaaccgaaggggggggggctggaagacttatggtccatttgagcgaacaatttcatttgttcaggcgaagcttcaatgtccgtcgaggagggcgaccgtgggacgacggggcgcaatgtttacgaca

SEQ ID NO: 110344 - DNA, 156 bp, Glycine max
aattcttacaccaccccttttggcttattcttcctcaattctgccaaaaatcatattcttaccgttctgattggagcttcagcttgagggccgatgtcaactgtgtggaaagatgacatcttggtgctgatttcggaggactctcactgcccaaaa

SEQ ID NO: 110345 - DNA, 90 bp, Glycine max
acggatgagtgtccttttgcatctgtgaactaggatgtaatatgccattcacttaaataaagcgcattactatgtgcaaagagtgtgtcg

SEQ ID NO: 110346 - DNA, 268 bp, Glycine max
cacattctttcagcctcccttcaacacgctgttggcccttcattcttccaagtctcaaatcgaagctcgaagacctgcgacgaacaaagggttgtttaaattctgtgtggctgttgctggaggttgaaatacaagctgccgcctcaagtgagtgtcattcttaaatttcacaagcatgcagtatttatggagtatcgcattatctgaccaaatgttctagtgcttcaggactagatattacgcttctggtggcaatatctctcttctc

SEQ ID NO: 110347 - DNA, 215 bp, Glycine max
cccacgcgtccgaatcaccctaatatctatgctatattatgtcctacaactgaggcatgcaataaatccatgcactactacagaaagcatttttcacgatgttacttttagatcagttgatataaaaccgatttagaaagaacacggaagcattttttagattaaagcttcaacagtttcatgaagggtgtacaaaaaattggcataaaagttat

SEQ ID NO: 110348 - DNA, 403 bp, Glycine max
aaaaaattcaattccaattctaaggagaacaggtatcttccccaactctcacatcacatacctgttctccttttttttcccctttccaccaaagccagggtttttctctttcaattttcatgccactcagattcacgggattatgtttcttctgccacacaaaccctttttcgtcttcggtgtaaactcctcttccttgttgcaattgaaaagggtccctttgcttgctcttgtctgctgttgctgatgtctattattgttgctgaagggaattggcttgtgattgtgaacacacccaattcctcgccattgcaacacacccacttgtctttctctaaacgcagatgggataaggcgtcttctgagcttcagagtggatagtatctgaatcagattcatagct

SEQ ID NO: 110349 - DNA, 113 bp, Glycine max
ctggtaggctgatgaagggttacacattgaggattgtaccactttggtcccttaatttattttattgtacatttggtcttcaatgtttttaaaaattagccattttgattcac

SEQ ID NO: 110350 - DNA, 379 bp, Glycine max
gcctaatgttgttacttataacgttttgttaatggggtttgtaggaaggtgagtctgcacccagaggagatgtttgagagaactatacggaatgcagaggaggtgtttgatcaaatgcgtgagagcgggattgggattgagcctgaagtgactagcttttcgatcttgcttcatgttaatagccgcgcgcatatgccgcagctcgtgctggatcagctgaggttgatgaaggagaaagggatatgtcccaatgtggtgatgtacacttcggtaatcaagtgtctggcctcgtgcgggtggcttgaggatgctgagaggttgcttgaggagatggtgagggatggggtagagtccgtgtgccgcgacgtataattgcttc

SEQ ID NO: 110351 - DNA, 354 bp, Glycine max
ccctcgcgtccggtaaaatctgaggaaacaaatgatgtggaacatgttggtgtggctggaattgatgatgatggtgttaagggggaaactgaagcctcagctgaggcttcgttgttaatgactcctcctagttcggcaaaattttcgaattctaggttgaagaagtttccttccaagttgaaggatcttctggcaacagggattcttgaggggctgccagtgatgtacatgaagggagcgaagacacgttggaaagccggagaaaaggggcttcaaggagtgattcaagactccggtgttttgtgcttttgtaagatttgtaatggggttgaggttgtcacgcccactgtgttt

SEQ ID NO: 110352 - DNA, 87 bp, Glycine max
gatgagtgtccttttgcatttgtgaactagtatgtaatattttattcacttaaataaagcgcattactatgtgcaatgagtgtgttt

SEQ ID NO: 110353 - DNA, 349 bp, Glycine max
gtttgagcagaaatggccagcccctccattgacattggtctgcttgtcctgcgcggaaatgaggaattaatacggcaaaaattgaaacgccttttggcaataacaatgccaaaagtacgtcaaaagttgtacgtgcatttggagcaaatggacgtcatccgggcacttcttcccgccatttacattaatgcggcatccattgcgccgaaaattgatctccgagtccttctgaaccgaacgaccagcgtcccagttgaccgggttttctatgacgaggtcaaagacccaagccatccgatttttccgatgcttcgcgaagagaatgggccattttcaagatggattcttt

SEQ ID NO: 110354 - DNA, 463 bp, Glycine max
cttgtatgatagtgacaatcaacacctcaaaagctcaatgaggactgagcatgaagtattagatgatgctcagaagtcaacttcaatggatgttcatgaaggtgttaaaactattgcaaagatgataaagtggttgctcacaagcttccatgttacaataacaaatataattgttgcatttgatccatccttagataatgaagaaaataaaacacattgtcgtcattccttagttcttcagatttctgaaatacaatgtggaactagtctgtctgaagatgccaattcaaatgttgatgtccttggtataagccggctaacaaactttgtaaaatttcgtggagcagttattgagcttctcaaaatagataatgaagatgtatactttcaacatgaatcaggagcaggatgtggtgaacctgttttggggtcaaatatagcaacatgtccaatcatgactggg

SEQ ID NO: 110355 - DNA, 301 bp, Glycine max
gtcttagggtgttgagtgagttcaatgaaccgattcagattgaccatttcatgaaatttacctcatttcttaatttcttcaaggtattatttataattgatatcctttggcccaaatcaagctttatgcttttcaattcgtctagatacgactgtcgtatgtttactaccaggtcagcttgtgcatccttttttttgacctagcgaggagggctgatgttgcaaaatcattgcaaaaattgcgtatccacgtcacttgttcatcgatgacgcagcagggtactaaaccaaaccagcttttg

SEQ ID NO: 110356 - DNA, 491 bp, Glycine max
  unsure (1)..(491): unsure at all n locations
ctatgaagaaaaagtaaataaggagaaaaaaagtccacgcatgtttagcaggagtcttgtaactcttcatttttacttacaaaaagttttgttggattacagagttatcaaacacaaactttaatactgaattttatatggagattgcttttgttactagaaattcttagttaatacacttgaatcgttatgttagataaaagaattttatgaaaatagcttgagttaaccatttacaaatccaaacttaaccatatattttttcaacttgatgaaaatagaaatttgaaaatagcttgagttaaccacttgatgaggttgtcttaaatcgacaactgatggtatgttttttcaaccattgccagcttaagccagcaaatatacaaatgtttcttcaactattcaatcccgtttgaatggttatagaatttctatttcatccctgtaagaatagtctatgtattcttgttcatctgaattntatgcatgat

SEQ ID NO: 110357 - DNA, 405 bp, Glycine max
tcgcctttctccaaaattccccttaatttctcacactttctttcttttttccactctaaagtcaacctcatttcaatttcaatttttctttctttatatctattttgtttttttttctttctcttgacagagaacagaacaaaatggaggaagaagcgaaagagagaatcctacaaacgcaaccagaagcgtcacggcggcgacgaagacgactccgacgacgacaacgagcccgacgacaacgacgactccgacgaccaattccgcagccctagcgcccaattcgcggacccgcagcgcgtggagatcgaggtcgtgtcgcccgacggggtccagaattcgcggttcccgccggcgatcaggcgcgccgtgacccgcccccatgcggcggtcacggcaatcgct

SEQ ID NO: 110358 - DNA, 383 bp, Glycine max
gctagaagcctatttcctcaatatgtcgttggaaacttaaaataacatcaatcaaaggactcgcttcaatattctatagttgcttatcttaatttaaaatcatatagaacaaagcattacgtgagatgtaaaaagaaaaaaaaaccattacgtggagcaatggtggcattttacttttgtcaatgcattagaacaaattgtagccgttaaaatggttcaatttcatggggcttgcctttttaaagtgggctaaacagggcaattcgtgagacagctgttgtcccatttaccaagttttatatttgagataaattttaggctaaattattaatctggtatgtctatttaattaagcaatttagtttagtctatttatttaatgc

SEQ ID NO: 110359 - DNA, 508 bp, Glycine max
cccacgcgtccggcaggtagaactttttgattttatttgttgtgccccttgattgttgatgacaatattgctcttaatgcatgtttggaaatgaataataatattttttcccctcaagctttctcaaaaagctagagaaataagcatttgtttcttcaaaataagttgaataaatcacaccaaaaatttatttcccatgaaataaacttctctttaccattcctttcatttgaaaatttaaaaataatgcagatggatggatggcatccattctattaagtgtaactgtatcaaactataagttttaaatccttggcatcggcttgtcttttaagttgacaatgctggtcattttaaaaaccacgaggtagttaaaggatatacatagatctttggccttgactatgtggataccttttcccttgtggctaaaatcacttgggtttgcctttttcatgccataatttccatttatcatgggtctctctatcaagtggacattaaaaat

SEQ ID NO: 110360 - DNA, 247 bp, Glycine max
tttttgggctaccacgccaggaacaacgagtccaaccagtttggcaacaactaatgttggctgccacggacgaccgaacatcgaccccatgctcaacgcgtgcacgaccagggacccgatcccaaacccttccaggcccatggatactcaattcatgatgaatcctgccatgtggaatccagccctgaacaaccccgttggcttctttccccctgagctgtcgaccgtgatgccgacaaccttcacg

SEQ ID NO: 110361 - DNA, 498 bp, Glycine max
tttttatgttcaatctcactatcagtgtcatcacaaaaacgtgaacgctagctgggcattgtaatggcaacttggttcctgctgtaagtggtgcactgcattatggagtgacaaactgcaagggacacagctacagaaggagtgcttccttttctgatgtgcctaacacgggattcttacaaaaagatctttcatggtctaaagtggtatccaaggtcctgcagatacacagatgtgggttttctgcacctccacttcataaggatcagaaactcttcaaagtcatttcctcatggaagaaagatagtcccacaaaatactttgactttatcgtcattgggagtggaattgctggcctccgatatgcgcttgaagttgcaaaatatggatctgttgcagtgataaccaaggctgagtctcatgaatgcaatactaattatgctcaaggtggtgttagtgctgtgctatgcccttcagattctgtggagagtcacatta

SEQ ID NO: 110362 - DNA, 344 bp, Glycine max
ttttctcgtgggcggacgcgtgggcttctgtctctctctttctttctcatgtttgcataaccatataacaccccgtgaacgtgcactctttttatttccttgtttcttggtgcttgttgtggaacaaataacccaaggattgaaccttcgatgagcaccatggcccctgacgtcatcgagatccctcccccaattcaccaccctccaagattccgcgagcagaacaaggtcattttgcatgatgtgattgacattgatgacgactctgaggatgtagtgataattggtgaaaaagttaataatagtaacaaagggaagacaattgacgccgttgatgatgatca

SEQ ID NO: 110363 - DNA, 402 bp, Glycine max
tctttccttaagcttattgttttaatttaaaatgtcaaccattggtagtcttgtcgttctgtcactggaacacatctggttctggaagcgagcctcgtgaacgtactctttacgaaagagaagcggagaaggctctaaaactcagaaatgtggaagttggtcgtgctgtcatggcggaaaaaccaagtgcaggccacgaaggcgatttggaagttcataccaacgtttacgccatcagcatgggtccgctggatatctaccgttacgatgtgtccattgtcggcgaacgtggtggcgaacgatcgggagtcttgttcaccaagaaatataaggatgatgctatcgctgtcaatcgtcgtgactgttgtcgtgaagtcattcagtgctttatgaatgttcatc

SEQ ID NO: 110364 - DNA, 283 bp, Glycine max
tgcttctaagaatccactaagaattcccaagattactgataacttggagcaaatatgttacaaatatttgcgttatgaaaccttcggctcagtggaagttgtcttgtgcatatacaggaaattcttatcgtcatgccactttttgctggtagtttgttagagatcattctgactcttctagaacaaacccaaacagatgaaatcatgatcttaggctgcaacactctttttgattttttagatagccaggtagttggttatttaacgtttctgacttttttgg

SEQ ID NO: 110365 - DNA, 376 bp, Glycine max
ctcaaagacgcacgcagcgttctaaaaccctaatcgggtatgtgcaaagagagctttgtagcacgtgcttaaggagctcatctactaagtccatttgaagaggatgtatggaagggcatcatcaggtcttgataggtttaagaaggctcagagcttggaaccattctctgtttctgtcaactcttcttccagaaatggtgcccaaccctctactaaagtagttgacccttcctctgctttgcctccgctgtctcaggcttctgccaaccaaccccaacaacatgcttctcagaagactgtaggagtggaggcggctccattgttggggcagaatcagcaggcgactcaggttgggggagggcagtcgacgtggcag

SEQ ID NO: 110366 - DNA, 360 bp, Glycine max
cggacgcgtgggcggacgcgtgggtcttactactaataactctcagctctgaaacaaaccttgtacctcacagcgccaactctctctctcagagcgtgtttttgaccttaacgtgtacaatacaacgtgttgaaggaagcttagctcagtcatgaattgaaggaccaacttcaagaatcgctcttcaaactcaaatcatgcacagatcttcaacgatccaaaaaactactgttcgagcttgaagcattccttgaggcttttggttgaattccgagtgagaattgtccctaaaagaggataggatgcggcttctttagtgatatgatagctctggaaaataatggaggaaagcatcaatag

SEQ ID NO: 110367 - DNA, 172 bp, Glycine max
aggttgtgagaatttgcgcaggaaagagcggatcgtagatggagatgcactacagtaacaacatacttcgagaggcaccccatcctcaagtccaatgctcccgcagataaatgggtcagagaatgggatccccaagatcttgtgacgacgggagggaagggcatgatcttaa

SEQ ID NO: 110368 - DNA, 192 bp, Glycine max
ttgcaatgcatccttatggcaaaaatactgacatacaccactcctgtggatgtatgcacgctctccttaattgccaaagcctttcgatctgcagctgaatcagacactgagtgcgatcgtcttctcctttccgatttcacctttatcattcctattacctctacctataagaaggatctctatttcactctc

SEQ ID NO: 110369 - DNA, 432 bp, Glycine max
ggctttgtattttcgctttcgtagaatctcaattgtatgagctgcagctctacttgagcttcagtggctttttaatatctcaatcagatgagtagccgcaacctttgatgttcttcctatatatacctccaattctccttttttttcttcattttttaacattagtctataaaaattcaaggacacaaaaattgtgctctcaaaaccattatcacttgaaggccaatcagattccgatgagcattatgaagctccaaatattctgcatcgcatattaagtctctttaagaatatgcgacaaggatctgatctctcatgcttcaaggtttcacaccaccctccggtatctgcccttcatgccactgatgacaaggaaaacatagaaatgacatggtgccactctccgatttcaaagttcaatggtactttagt

SEQ ID NO: 110370 - DNA, 355 bp, Glycine max
ttcctcgcaaactataccacgcgcttcctcgcgttcaatggacaccttcttcaatgctcaatcttgttgttcttcgagaagccgctggagttacgatactctcaagaatgttcgtgagatctctccgctggttcagaatcacatcaaacgggtttattttacgttatggtgcgctgtggtggctgctgctgctggagcttttcttcatgttctgtggaacattgggggttttctcaccacgttggcttccattggaagcatgggttggttgctatctacaccccctgttgaagaggtatgagtatgatttgctttcggcactgagagccttattttttgatggtgttgttctcac

SEQ ID NO: 110371 - DNA, 307 bp, Glycine max
cccccccaagaccaaaggggtccccccccaacccaaggtgggggcggggggacccccccccccgggattcctggggggcaaatttcgggtcccaggcccttctatgggcccttggcccccaccataatatatggggaccattccgggcccgggggggggggaaaaaaaaaagggatttgggggaccccaagcccccaacggggaaggaaatcccggggttggggcccgcgcccccaatgggggggggaaattttttaccggcgcccttaaaggccctccaccaaaagacgggtttgggggggggccc

SEQ ID NO: 110372 - DNA, 318 bp, Glycine max
cgtataggaggggaaaaagcttttcgactaacaaaggcaaacaaattgtaacaaggatagatgacaggatgaccataacaaaagcaaaaaggctcgtgttttacaagccagcaaagatagcattctgaatatacacacgttgaaacaattctccattatgtttactcgcatactgaaaatcagtggtcagagttacatcatgcgcaaggttaacatttcttaagaacaacctgcactttgagacatcctctgcagaatctctttcccagccttacacctctaaaggagcacctcctcctgacactaagaaaactcctg

SEQ ID NO: 110373 - DNA, 428 bp, Glycine max
gtccatttagacgttagtcccactgctcgagactcggtatgaataattatttaaataaaggattttttaacattagatgatactagtagtattaaagaggtatgaatggaaagttttcatcgaaaaatgaaatgtttattagattaaaaacataaaagtcgtttatttcttttgttttccaaaacttccatatctttagcatcagcctgatcttaacaaatacatttaattaaataaacaatggcttatatctgatgaggacgttagtcgttactcgttagtgtgtgtgtgtgattgcttttcttgtagaagtaacataactttcctgtattaggatttccacaaagtgtatcttcttatttaattaccataaaaccaatcaagttgtgcctgatgaggccgcgatactctaaatttaataatcattg

SEQ ID NO: 110374 - DNA, 391 bp, Glycine max
  unsure (1)..(391): unsure at all n locations
ctantttttttttatttttttttttttttacataataattatgatggcatattatatccattaacaacataagaaaaaaacaaaataacaagaagaagaagaaaaaacatatagtttatatatatgttgtagtccatgaatattaatttgctgaccttaaaataatataaagccttttgggatataaatcctccgtcaacatcttcatgaactctcaaaaaggttgtggacgtgaagcagggtttacagcccaaccctcaactggtaactgaacattctgcatattgagtggtaaattgaagaagggaagtcctgaagaagggtcggggaaagggctgctgttgctgctgtttccttgagacgacgtcgttgcaggtggctgaatctgaag

SEQ ID NO: 110375 - DNA, 215 bp, Glycine max
gtccactcgggaaaaagtatcatttttatttttttccgggaataaattatcatctttctttagatatcgaaacccacatcaccttacccagcttatgcaggcatttttatcatccaagataggagtgccccgaagcctccccccaaaagaatgtttttatggaaacagtcagatcaaaattgtgggatccccatagtccatggggatcaggccca

SEQ ID NO: 110376 - DNA, 391 bp, Glycine max
  unsure (1)..(391): unsure at all n locations
ttacgcttctcttcctcctctcgccaccatgtccgtggagaccatgtgctccgttctcaagaaatactttgggttttcggattttcggccttatcagagagaagttattgagaaaattcttgatgttcagtttgacaagcttccacttcatggactggggaaaaattatccagcaaattggtggaaagcacttggacatcaattgatttctcaaggttatttgaaggagattgttagtgacagatacagaactattagtgtcagctcaaaaggagagcaatttttggcgtcttctagaccagattatcaacctcccttggttttgacattgactgctgaaatgcttggagaagaagataatggaaacacacangaagcattcaaaacttta

SEQ ID NO: 110377 - DNA, 181 bp, Glycine max
cgaagggggaaaaagtatcccggtccctatttttcaagattccattcaaaaactaaatccttatccccatcaatttggattttaatctaaaaggaaaagacccgcccccgaataggtttggttttttaaaaagaggggatctcagcgaccaaaaggggttaagaaaaaataattataaatc

SEQ ID NO: 110378 - DNA, 307 bp, Glycine max
atattttttctttatttttttttttttttttttgtttttttttggttttttttctttttataaggaaccccaatttattttatccaaaaacccgggtctttatgggttaggattggaaaaaaacaaaggggacggggagaatcattttttgcggcccaaaaatggaaagggggaaaaaaaaaacaaataggtttacatttggtacagcctttggtttggaagcctatttagagaaaactccaggcgggcccagattttattcaggcttttatgaaaaagcccaaatttcaatggggggttgaatttc

SEQ ID NO: 110379 - DNA, 277 bp, Glycine max
ctaatttctacattttttttattaagggatggctgggattggcaagggtagtgttgaatttgaggatttgttaccggtgatcgccggtaaactgggtggtgagggtttgataaaggagctttgtaagggttttcggttattaatggataaggagaaaggggtgataacgttggagagtttgagaagaaactctgctatgatgggtttgcaggatttgaaggaggaggagcttgcgagcatgattgagggaaggggatctcgacagtgatggggtcct

SEQ ID NO: 110380 - DNA, 268 bp, Glycine max
tcgtccatttctccttccattgcgcttctcgtgcctactggaattccacttctccgtccaaccatcgcaacaccaccaaattcgcacgaccaccaccatccaaacaccaccgcttccgcatgctaccaccgttgacaccacaaccacccaaacactatcgtacctgtgcgtcggccctgaaataatgccagatctgtaccctaaacccccccttcatgtagcagatctattccctaaaccaggagtgcgctcaatgtctgcttcactt

SEQ ID NO: 110381 - DNA, 320 bp, Glycine max
tcgaaattttgtgcatatgtttgtgggtgtatccttagtggcaagatataactcgacacatgtgaggttgtgaaagttttacgaataaagaaaacatagtggttatatcctcatcatcttgcaacttgcatgccctattgtaaaaacaatcactagcaaatgatattgggtatcgataatggatgtgcttgaccactttaccatatggtaacctaatcttattttgaatagcttgcttcaaggatcaagtgacatgttccctcggagttgaactatttttggttcactgcttacatacattgacctatgttgagttgttg

SEQ ID NO: 110382 - DNA, 345 bp, Glycine max
tactggagacatttctacaccaaaactctattgtgaagacatggttaatcaatttgatggaggctaaaattggccaaacctacttattactacagactttctttttgaaacaatttatggtaaaagaccttggacacttaaaatactttcttgggatggaaacagcaagcagcaataacagcattttaatttctcaaaggaatatacccttgatctgttaaaagaaacagggaaatagggtggaatggaacacctctagaaaaaatggaaacattagttaagtagattctcctgtagagagggaattgttagtaggaaaatcgatctacctataacttactacta

SEQ ID NO: 110383 - DNA, 329 bp, Glycine max
tcgcccacgcgtccgcccacgcgtccgctaaattcaaagttcaaaatatgtctactacgggttctttgacttttcctcctttatcactctctcttgttctataaatcttttctcaatcatcaaagccgccactaacctcatacacacgatagaaaacatggcatcttacgagggagggccattggtgatggaaatggaaggagaagaaggtttcgaagaagaagccggcagcagcggttgcgggtgcggatgcttcggcctgaagaaatggtggcaaggccatgaggaagaaggtaaagggctacttgttgatcaaaagggtgagggag

SEQ ID NO: 110384 - DNA, 164 bp, Glycine max
tcgcccatgcgtccgcagttgtttgggatcaagaagctggcagatatgtttcggttcctttattgccctctgaagcccgtttcacgtctcttagaatagaagtgttagaagttgaaagcaacaatggatcattaccaattctaagagacgtgaaacgggcatca

SEQ ID NO: 110385 - DNA, 273 bp, Glycine max
tcgcttttttcctttttctcttgcaaatttcatatctgtctttctttctcagccaagcaccccttctcttaactcacctatttcgcctccttcgtgtccctttctctgtaaatcaacgcctcggtagggttaggttaggataggttttcggtgaggcgagagaaagagagagagtatgaggttgagggaggaggtagcgtgtaaaaacgacgacgtttgtgagaaagaggaagtggtgatagagaatgacgtaaccgtggcccaaaatcattg

SEQ ID NO: 110386 - DNA, 368 bp, Glycine max
cggtttcgtgggcggacgcgtgggtttctttctttctttactcactcactcacttaattacccaatccacttccctttttattctttctggccttttctgaccaaccaatcaacctccctcccttacttgctgacaaactttctttttgtttcttttctgttaatttcaaagaatgatgatgttgctgatgttctcttccgttttcctttttctatttccctgcctagaaggaacttcattataaactaatcaattaaaattaaaacccggaaaaagcgcatcgcttgtgtgtgatgttttgaatcgcgacatgcttttggggttggaagagtgtgtgcaatgcataaactgagattggtgctgtgag

SEQ ID NO: 110387 - DNA, 395 bp, Glycine max
cctacgcgtcctgtctagagcacttgcttcttgccgcatcaacatgggcttctctgtgttaccaaaagcaactccttgcatttcgttcttggctctgctgttttgtacttgcttcacttcaccaggttcacctcgttactatttctctttcttatttttttccttgtttatgtctcgaaaagatgaaatttttattggttttgtgttttttgtttgaggggttgttcagctttccttagacgctttactgtttgcattttctggtggtattcattctatgctgcgtggaccttacgccatgctggttttttaaatgaatgctccagaaagatgtaacctttgttctttgaatatgataaagaaagttggttttgtcctaatgtggaaacttattt

SEQ ID NO: 110388 - DNA, 186 bp, Glycine max
ttattttaacttttcaaattctaatttatgcgttgactttgtgtttgggaacgggagctttttctacaactatcttacttgcttccaaattaggtggggatggtgaaaagggcaggatgcaagcattgttgtcaatagaacccgaggtcaaacatttcaagtcttggtaaatcctaattatgcatc

SEQ ID NO: 110389 - DNA, 217 bp, Glycine max
ttctttcgtccgtagcatgcttgccagcagttcggctgccaaagttctttgtatcgtgaattgtgttttgccagtatagtcaccgcaccttccaatggttctgagtgtttgtttaccattgctattgttgctgacttttggtatctttagaatgtgaatttaattccaactcaaccccaaaaattaattcaatgggtgaaaattcctcacttatcta

SEQ ID NO: 110390 - DNA, 401 bp, Glycine max
ctctttacctacgtttttctttttctctttctctttctcttactctcttcaacactttctcaaatcccttccttcttcgctcttgtcttctctttcaggtgcaccttccagttaagcaggagtcggataattgttggacatagatgaaatagtgattgttatgtctggactgattgaaggacttcctgacgctgttgcaatcaggtgccttgcatgggttcccttctacctccacccaaagttagagcttgtctctcgtgcttggcgagcagttgttcgtggccctgaactatttaaagctcgacaggagcttggttcatcggaggatctgttgtgtgcctgtgcttttgagccagagaacttatggcagctgtatgaccctcagcgagacctctggataa

SEQ ID NO: 110391 - DNA, 106 bp, Glycine max
accttttcgaatgctttgatacgcattcgagccctagattttaatctagggtttctctgcacgctaattccatcttcaaattctgccttcattcgattcagggggg

SEQ ID NO: 110392 - DNA, 266 bp, Glycine max
ctctcgcgtccttccacgcgtccgcccacgcgtccggtcttctacttcatttagtaaagtaattttatacattttgctcagttgactgatggaaaatgctaggccaccaatatcttgttctaaaccaaaataaaacatgctggaaatctgttatagtggttttgtcacaagtgtatgcccaacaactgtcaaatacttatctttttcattcacactaatgagcacatgtctgtacgtgtggtgtagtggttggcaggacacagttg

SEQ ID NO: 110393 - DNA, 386 bp, Glycine max
tttgtccgcctccacggagatcatcatcttcacttcaattcagtttactcatcgcgtgatttcatccaaagttagcaacatgagcttcttgaggccttctgcgttgtacaactttctgatcagttatcctgcgctgcgatggctgccatgtcagagttggggcttccttcgatggcccggccttgatgggttcttcacgcttttcgtggttgtgcttctgtggtctacactatccgagcttcgtttcataccctcatcttctatgtaccccaccctttgtgttggcgaccgaattattgtcgaaaaggtgcacaatattctgcttttctgtgtctttccttggctcgcgatctacctttatgcttgatgtcacgtaggaatagcat

SEQ ID NO: 110394 - DNA, 312 bp, Glycine max
tcccatgtttccggctacgcgtccgtccacgcgttcgcccacgcgtgcgcaccttaaaagagaaagcactgagggtagatatgataggtaacatgacgtatgaaaaagagaaaaatagaaagaaattatgcattgttcgggcatgcatatatcattcttcaaagttgtttggtctattagccttgccttacactttttttttttttttttgaatttttggacttgccaggaggagcaagagtgcatattgaagagcaaggaagaaaggggagaagataagggtctaaattgggaagatgccaaaaagatgcc

SEQ ID NO: 110395 - DNA, 302 bp, Glycine max
tgttgaacttttctaaaattaaagaaatccatccaactgataacccaaacgatcttgcctacacataatgaggcttgattacatatgacgccatgtgtgcaaacaaattaccacatcaatgataaatgagatggactgatttgtccttaaattctttacggactaatttgtcagcttggaatccaaaacctaattatcacaccagattcccctacctattctccgatctctagctgcatcatatagtgatcggagaataggtaggggaatctggtgtgatgcagctagagatgatttttggc

SEQ ID NO: 110396 - DNA, 421 bp, Glycine max
cttataccaaacatgcccttctcctcctctcgccgtggaacatcctgggcctcctcgatcctcccctcttcgaacccacccaaatcaaaggcacccagaaagggtagaaaacgcgcgttggtgaaagacttcatcttttccaacttcttcgccattggcctcgtcctctccctttccctcttcctcctcatcctcctccgattcggggtccccaagcccctctacacgcactttcgtaccaccacgcgctcctcacgcgcccgccacacccgaaagcccctccctgccggtaccaagccgagcacactcgccggcgccgccgtggacgtcaccaccaaggcgctgtatgacaagattgagtttttggacgtggacggcggaccgtggaagcaggggtggagcgtgacctacaggggcaacg

SEQ ID NO: 110397 - DNA, 186 bp, Glycine max
attttgttcctcaatcaatctttttgattctgcccctttctttctctgaatcgaaaccctagaagttcgtcgtcttgtcttccagaatctgacaactttactcatgcgaacctaaattcttctcatgaaaccctgacttatccaatccccacccaaatgccccgcatcgacctcactcccctaaat

SEQ ID NO: 110398 - DNA, 228 bp, Glycine max
tgtataggtaccctgattatatattgatttattcgtttaaaactcttcatatattgcaattgtgtgcaggtgattgtggatgaaagctgaaagaagtgacattccacacatggataggaaaaagcgattgatttttttactacttctgttccttaagattagtttccaggcctgataatgttgcttagctgcctgaagttttaatgattttgcgggtggggggcactg

SEQ ID NO: 110399 - DNA, 214 bp, Glycine max
ctttcgcgtccgaattcaagcaaccccattggagatcaaactacattttgcgccatttccaagagactattgggggaaggggaaattttctccattgtctgaaggtctgttggagattgtatccaattgaaaacttgattgtggctgtccttatcaatttgcctaaagataatagcttatctttgttgcgtccttcaggttatgagaagtttaa

SEQ ID NO: 110400 - DNA, 237 bp, Glycine max
gttaacgatgacgtgtctgatatgatatgcatggctctcagacagatgcctcgttttggcgaagcgacagagcagctccgtgtcgccgtcgtgggcgaggtgagaaactgcgtcggagaagattcacgcgaagaccattggttgcatgcccggtattctccactgcatctgcaactacaataaccggcgctctcgtggattccttacattcggtgcgctgggccccacaccatatct

SEQ ID NO: 110401 - DNA, 342 bp, Glycine max
ttttacttttaattggttaattgaatattcttggccttccttgcttctttgtgatctcatgtctctgtcttgttcaccttcacctgttgaatgaatgatgatgctctttcgctgaacatgaacaacctttgtactatcaagtatcaacctttgacatgtatgtatgtgatgatgttcgccctgacacgctcacttttttccagaatctctaagcggaattttgtacacccaaaatggacatgttccttgtcttgcaaataaccatccaaagttttccttttgactactgcattggctatgttactcaccagaagctattgtattgattttgggttttcatgg

SEQ ID NO: 110402 - DNA, 282 bp, Glycine max
aatatatggtgttttcttttcattatattttcttaacaattttggtcacgagatacttgatgcttattagtctctggaatttgtgaatataacttcttttttggagagcacgactgatcagtctattcgtggcagctattgaattttattcatacttacaatcatgattgagttgtactcttcaatacgttatttatataggttggagtgtcaaagcaattgtcagcaggatattgtctgagtgtctagagaatgaaaatgtctcaattgtcactgaaaaag

SEQ ID NO: 110403 - DNA, 216 bp, Glycine max
gttctgcaaagtttgagcgccgccgttaatggcggaatttcggggactcgccgtcgctggtgttagaaagtggttttgattacatgagagaagaaagaagaagatcatggatagaaccagagaatccagaagatcatgcatgaccacctacaccaacggatttaccaaacgcagacatctgactattgctctcagagactctttcgaggaaggagc

SEQ ID NO: 110404 - DNA, 232 bp, Glycine max
gctatgcgtccggttttagctcactaatcaatgttgtttcaatatggatattcataacatacagcaatgggagttggaggtacattggagtacttgtatgatctaatgggcagtggtcaccaccaccacatgaagaagaagaagttgttccaaaccgtggagcttaaggtgagaatggattgcgatggcttgtgagcttaaggtcaaaaacgctctctttttactaagtggg

SEQ ID NO: 110405 - DNA, 208 bp, Glycine max
ttcggttttgggagtcctccgatctggtggagggtgcttgcttttaggggcacgaccccaagatattccctatgtctattgattgacccacgtcatctttgttgctgttaggtggatatactatagggccaagaaatggcattactatctactggatggctgctgttatgccaatacaatatgtttgatggagcttcttttttactca

SEQ ID NO: 110406 - DNA, 206 bp, Glycine max
gttagttcaagaaatcctcctccaaccgcgaacgtggtcggcaaagaacagcttgctcagcttaccaatctctcagcctcgctggctcatatcctcgggacagggcaacagctgccacaactttatgctgctttaaattctcatgatgcaaaggacatatcctccctagcaaaaactgaggtgcctgctatgcctgtttccaacac

SEQ ID NO: 110407 - DNA, 358 bp, Glycine max
tttcaacttggctttcctcgagtcgctccctcgacgccttccttcgaaggctatcatgaatttgtttaagtcccctaatccgattaggaatcttgaaggtagattttttcttctttttttggtgttatttgtctatattcagctctaactggtttgtatttttcaagaattatggtacaagtcggggttaatatgccttccttcttcctcgctcgcaagaattgagcatttgtgacagttagtttgacaatccctacgcattcactgatctgaaaccctcccctgaatgaccttccagcttatgccatttcccttcttactagggaagccaagcaaaaagaccaggggaagcactatg

SEQ ID NO: 110408 - DNA, 199 bp, Glycine max
tttattcctcagccatggtagctatctccacattgtgtgcaaagcttcagtgttaagacttaattcagccatgtgaactcacaatactatggttcttattaatatttgtttatctttgaggcatgcaaatagtccaaaaatgatgctgcattcccattcatttgcttaaatgtctttttacaatgtaggatttgaaagc

SEQ ID NO: 110409 - DNA, 272 bp, Glycine max
ataacgacgtcgttgacgggtgaccttttgcgcgatcgggttcaggtcacgggtttcgctttttttcttttcagatttatatatagagagaagaaaaaaaaagtagcagataacaggtttgagagagagagagagagagagtgtgaggtttttgattgagagagagagcgagagagagagattgttgctgaaaagaagatgaagaagaatttatctgaatttctcttgtgttcatcgatcaaactctgatcgtttaattttttttaaatttt

SEQ ID NO: 110410 - DNA, 348 bp, Glycine max
ttgacgcgtgggtaaatttctgccactgcgaactctcgatcccgcgtttttcacatcaacaacatcaatcgccatttcgaccgatcggctaccgcgttcgaacccgtattgattcatccccaaatttttgatacttttatcttacgactttttttacgcgatcatctcgacaatgcctggtggaaagggaaagtcttctggcggaaagagctccggcggcaagacgagcgctgctgagggcaccaagaagcagcagagtcactctgctcgtgctggtcttcagttcccttgcggtcgtgtcaagcgttttctcaagcagaacacccagcagaagatgcgtgtgggagc

SEQ ID NO: 110411 - DNA, 269 bp, Glycine max
tttaaactaaccaacgaacccttgaatccgccatgagcgaccaccaccctcggttgcagcaccttcgttcagcctctcacctattgaaagaatcattttcttctttctcctcaaatctcctcatatttttgttcctttctctcttaactctttcttttcgcaccctcgacgaaaccggcaccgcccatgtcaccttctttattgaccgcgacccttccctccgcgcccttctcttccgccttgacctcgtcggaaactcccacaaccac

SEQ ID NO: 110412 - DNA, 270 bp, Glycine max
cgcaacgcaacgacgacgacgacgacaacggcacagaacagtttaaaacggaaataacagtcgccggcagagaagcgtaacttttccggcaaggaaatggcgcgctccggcgacggttacggtgtcggagtggacgagtcgtatcgcgcgctgccgtggctgtacctgacgttcttgtcgatctggttcttctcttcttgctcttggaccgtttacacctacaaaacgcgccattttcagagcagtggaataatttgcagtggacacttg

SEQ ID NO: 110413 - DNA, 113 bp, Glycine max
cggtttcgttgtaaaatcaatcatatttatatatttggacatgggatgtacatttgaaaaatgtacaactatcaatattctattatctattacacttatcactttttctttgt

SEQ ID NO: 110414 - DNA, 363 bp, Glycine max
gtttgcaccattttcacacttaattcaacttggtttggttcttatctcatacaactgttatcgttttcatcgttttcgttttcatttgacaacaattgttgcatgttgtgcggtgtttgacttcgattccagagaggaaaaaagttgtaaattttgtcatctgggtgtggtcagtgatggcagatctgttcactggaggcgccgtgggggcagtgatgggggagttgctgaaagggtcaattgcgaccataaacaaaggtcgtgacttcggtcccaccctcgagagcaacatagaaaccttaaactctctggctcctccagtggaggagatgaagcgttacaacatgatgttggatcgcccca

SEQ ID NO: 110415 - DNA, 363 bp, Glycine max
gggtatttttattcatttgaaatttgtctcattaattttctttgggtcatctggactatcacaatcagctaagatttgacaacataattgtttcctttagtgagattagtattttcatctttgttgtcgctcacctagcaagttcttcttcgacatccaagctaaagtatttagttgaagaattctctatccttgaatcctttcctgttcccattcaccccccaacttgaaactgattaagcaagttgattggttccctcttgtgctcaataccatcaagtgtaatgttaatggatcagccaagggtaatcccgaatatgttggtagtggcgacatttttagagatcacgatggggtctgatc

SEQ ID NO: 110416 - DNA, 113 bp, Glycine max
cggtcgcgtttttaaaacaatcatatccatatattgggacatgggatgtacatttgaaaaatgtacaactatcaatattctattatctattacacttatcactttttctttgt

SEQ ID NO: 110417 - DNA, 200 bp, Glycine max
cggttgcttttgcaagcaaagacccttgacattggggaggttggccaaaatgctttttgttcataccctcgttaatgatactctgaatcagtttaaaaaacgtataattgaaggttatcatgccacacaagagctcacaacagacgatgctccgttctgtgatttgacagcatagactgccacacacgaaccactgccac

SEQ ID NO: 110418 - DNA, 230 bp, Glycine max
ctttgccagagtttcccttcggaaaccactcttccgccgtgagccaccgcgaccattttgagctcgaaagtccggtttttttcccggttcaggaaaactggtttggtctttgacttggaaccgtgagtggagtttctgggattttgggttctgcgaagaggtgcggatccaggaaggttctagagagagaataacaagtgggctttgttggttttttttagagagagaga

SEQ ID NO: 110419 - DNA, 134 bp, Glycine max
gctaaaaacagttttaccatgtcttctccaagcaagcgtcgagagatggtctcgaggaaactgccgatgagtgactacaaagcggtgatgcttaatgacggactgctactctctatgtgcatttccatggaccc

SEQ ID NO: 110420 - DNA, 70 bp, Glycine max
ccttgcgttcgccagacagaaaagagaaaacaagaattagaaagaagaatcaaaagtgagtttttcgact

SEQ ID NO: 110421 - DNA, 474 bp, Glycine max
atttcaatttggtgtgcgattgcttcgtttgcttgattgatgattaattactcgcgtttggtgagtgcaggcatataggaggatttctcatattcgccgtgttggcggcgatgagcaccacctcggaactctggaatttgctcaggtatgctaaacgcaggatcgtcgcgtcgttttgatgtttctgtatagtattgttgttcggtatgagagagaatgaatgaactgattttgtgaatgtgactatggaacgccagatcgtccacggcgctcgggttgtcgacgaccacggcggcggagatgaacgggtctaacagtgacgccttcccggtaatgttttattaaatttatttttaagttcattgcttcgcataataatagcgagtagtgattattggtgcaaaaaaagaagctatagtagtagtgcgattatgactaatttgtttaattgttaaaaaaatatttatttaataa

SEQ ID NO: 110422 - DNA, 110 bp, Glycine max
ttgggatgtccaaccctggtggcaattgggtcgctggatctctttctacaatacaaacgagaatatggagcctcaggcggacaatcggcgccaagagactcttattgtga

SEQ ID NO: 110423 - DNA, 411 bp, Glycine max
tctttatattttgcacgtaaaaatgcaagctgttttctttgcagcccatgaagctaccgtaatatctcaagacgcattcccacactaaaacactgatatagaagccgttgttgaaaaacaactcaaagcaagttcttttgcatacacacaccaagctaatggctactaccacattctgtacatacctattccttcttctctgtgtgtacctctcaatcttcataaatcttagttcatcttcatcagagggtgatattcttctctccttcaaggcctccattgaagactccaagaatgccttgtcaagctggttcaacacttcctcaaaccaccactgtaactggactggaatcacttgctgcaccacaccttcactctcagtaacttctatcaaccttcaaagcctaaacc

SEQ ID NO: 110424 - DNA, 415 bp, Glycine max
gttctctctcttcagtctctcacactcacccttcttcttcagctgagttgtttgtaatacagcaagatgaatccatggaacatgagaacttccaagttactctctcaacaagtttcttatcctccttatctctttgtagaagagattccaaacatcggaaattccaggtaccattctttaattttgttcttaaagtccatgactttatggctttttttgcttttaattaacatagaagatcaattccttctatgttgtgcagtgttgtgaccaaggatgctagaggttcacagctgacaatcttctatggtggccaagttcttgtcttcgatgatattcaagctaaaaaagccaaggacatcttgtcttttgccggcaagggaatgtctcaaaaccagaacgattatgctaacac

SEQ ID NO: 110425 - DNA, 113 bp, Glycine max
ttccacacaagctactaaagcatcgtatcttcaaacttgtacggagctattagctcctatgctttatacaccaatgtgaatgcttttgatcactttgagatacccgtaacgac

SEQ ID NO: 110426 - DNA, 304 bp, Glycine max
attattctctgtttccctctgagactctctctatgctttggtttgctcagatttttccaaattcgcggctcttccagtttcttggtaggctctgttgcatgcattgaattggcgcggcattcactggagtttgcgacgcgggagctggagaagctgcgatgaagtgtggtgcttggagggtattcttaaagtagcactcaattccaggtttaatgtttggtcagagcatggattctgcaaggaacgcggaagccgttgcagggacagagctaattcccatgcgttttgtgtcgccatatggagg

SEQ ID NO: 110427 - DNA, 361 bp, Glycine max
ctcacgcgtccgtagagctgatattgaagagttgagggagaggctgatggacaaagaatctcagttgcagggattatcagaggagaatgagatcctcatgtcaaggatgaagcaaaaccagcctagtgaaaaagaatctgaacctgtggtggagctcaaaaagttagatgctgatatggccaagttgaaggaaagattattggacagagagacagaactgcaaaatgtgactgaggaaaacaatgcactgaagaaggaaataaagagggaggagttagagaagaataaaatccctgatgaggctgttgcttctgctgaagcagcaagggccacagagcgcgaggctttggtgaaacttggc

SEQ ID NO: 110428 - DNA, 92 bp, Glycine max
tttatttaaaagaagtaaaattggcacaaacaagaactgccaccgccagagtgatgcattattaataaatatatctggaacgttttattttc

SEQ ID NO: 110429 - DNA, 252 bp, Glycine max
ttgggatcctttggtgcaagttctccatagttgatcgagaaagttggtctttttcattattgtatataagatgcaatgacatgtcctcttttttttttctactttctgatgtattgtgattagttagatgaggtagggatttaattacttggtatatgctgagatattggttttcatttaccttaacttttttctcaaacatttgtttgggaatatggcaaagtaggagaattattattgggggtgattaat

SEQ ID NO: 110430 - DNA, 158 bp, Glycine max
cccatgcgttctcggacgcgtgggcggaaacgcagcactgattggtcgtgttaccgaaataatcttctggcagtggcggaactacccttggtctaacgccaacgggcattgcaaactgaatctcttcatgtggctcaacatgttggcagcgaatcaca

SEQ ID NO: 110431 - DNA, 421 bp, Glycine max
attttctgtttttttttaggtaaagactgacactgttgcatggactttgtatggcagtggacttcatgcaaaaagattagttatatctgtccttatggaacaaagttttctaaaagttgacaagaatgacaagcttcaaatgcatgatttgctgcattggccatacaaactctgtagttggttgaaaaacctaatcagaagctctacccacacttttatggccatgataagatgctggaggcaaggttgcatacaggttggaattgcctgaagacagttagttcactctatttttcatatctccttgctgaagaaagtggctactgctcaacaacaggcacaaccactgtcccttgcattgtcagatgcacacaaacagtagtacagtacttttaccacatgagggatgcaagattgcatt

SEQ ID NO: 110432 - DNA, 316 bp, Glycine max
attttgagtttggagcgactgaactaatcattgatttgcactcgctgtttcagcttcatcacccttcttttgcatcatttatatcttgttgatgcctcatgccggatgtgacgctgctcatttggattttttgcttgctgaactctagcattgtgttcgtttacgactgatttgaattaggactattttttcttcttccaaggccctaattttaaattgaaactgttattgtcgcgatgtatcttgtgctttcctgtttccgaacaaacttatacaggttcttacgtgtttttgctatttcagattttcagctaat

SEQ ID NO: 110433 - DNA, 317 bp, Glycine max
tcggtttttctgtcctacggaaacttagtcccgtcattttgaggcctacgttaaattcaccatctttctcaccccacaccactgacgccccctctcactccttttaaatcccgcatttgcattcgtatttcccaacttcccggcgccgttatgtggtggtgaatcacgtgacatttgaaaccagatctgcacccggacgtgccagacccgatggaggaagcgctcgagctcgcacgcgcgaaggacgcgaaggagcgcatggcgggcgtggcgcgcctccacgaggtgctggaagcttccagaaggagcctcagctc

SEQ ID NO: 110434 - DNA, 338 bp, Glycine max
tttccgcggtttcgtgggcggacgcgtgggtgcatctgaagattgtgtgagttaattagttaaagcaatgaggaaggggaacatgaagaagcataacaagttggtgtggatcataacgacgccgttgagaatgttgtggaaagcgagggacatgtacgtgagaagcataacgaattgcggtcacaagatgaactatagcaaccccgtggatgctgctggcagactccaggccttgcccaggagctacagtgctgccacgtcacgctccgacaacaacgaggatttcgccgagcttttgcgagcggctttcgccaggactctgggcaacagaatcgatg

SEQ ID NO: 110435 - DNA, 397 bp, Glycine max
tcgcggtctcgtgggaaagtgaggaaccgaaccacacgctccctctctctctcttttctcagtagcattggagtttgagattgcgtttttcgaggacgacactatataactgtttttatctcgcgttttggggttgctcgccccacactttcactcccgctgcgacgtcgtttttgcaccaaacgacggcaccgacactccttgcttcttctccaagctagacgacccttcgtttctctgcattcttcacccaccgcttctccgttgtgcagctgaaaaagaagcattagcattttcccaactgcactctctttgaacaacaaaaaggttgtacattgttttcaaagccacagctgagatggtttattcagctgatgccaggtcagagtgaaatgct

SEQ ID NO: 110436 - DNA, 465 bp, Glycine max
ccctttcgttcgatccattacaaattagttgctaatgaaggaaacaacacacttcattgtacgtacacttgttttaacatatatttcttgaacacaatttttctataattgcattgactgtgtggcccatatatatgatgctgggcaatgcttgtgcaaatccacaattgcaatttaaaatctttacacatatctcatatatatgtttgctttaccagatatctcatatagaaatactaacacacacacatatatgtttgctttaccagatatctgatgtagaaatactaacacacacacatatatgtttgctttaccacatatctgatatagaaatactaaaactcatgctttctgattgaccttagctggacccaaagcattcagtgatgttctttggaaagtgacaaggcatataaaagatggtgaaaaacccagaatcaccttcagttaccacagttatga

SEQ ID NO: 110437 - DNA, 349 bp, Glycine max
ccctcgcgtccgggccagcacctccagaattaagaggaagaagatgatgaagaggatgaagaaaggaaaagataagtatcgaaaattctcattgcctgcttgtttattacatagctttatttatagtgcttgctaggctgccccctgaggatagacaacactaaggcaagcgaggacccccaagctttgtccatttcttcacacgtagtcactgagggaataagtatattttgtccagatgcgtcattccttgtcaaaatggataaagtcaaaggaaaaccgcaaagtttggtattctctcatgggagggagaagagagagcataatctgcgtggctgttacgtccgcg

SEQ ID NO: 110438 - DNA, 262 bp, Glycine max
cccttgcgtccgcccacgcgtccgttcatttttgggatctaccctctctattcattaaacaatatcttattcttcagatttatgcctctccttgacacaataacaattcaagggcaattcaatctcacaaaactctgaccttacctgcatttttaagtctgataaataaaggcttctgtttgagaggtgaagatggaattgtaataaagctgggaatttaattggggaattgtgggagaagaaaaaggaggaaatcatccac

SEQ ID NO: 110439 - DNA, 322 bp, Glycine max
ccgtgttcaaccgaaccaaactgcgaagctatggcagagctccaaaccaaggttgaacctgttacggccccggctccggctccggaggatcccgagccaccgctagctgaggctccgccgctcgagaagaaagcggtggcggtgccaccacctgttccggctgcggcagaggaaaccaaagctcttgttgttggggagaaggagaatgagagagagtgtttgttctttcatgttcaaattgccaaacttttgctttgattgaatcatgggttaccgtgaaaactcaaattatacaattacatgctagctagtagcttggatg

SEQ ID NO: 110440 - DNA, 426 bp, Glycine max
gacttaacgggccaaaccaaattcaaagtgccagtgcgacggtttcgttcaatgctaatcagctaatttgctcactaattaccccaaataacaaaactgccccctgcatctcccaacaatggccaccaaatgccttccgctcgaacttctgtacgaaattgtgcctctcatccctgccgaaaatgccacaccgaatgcgctctcgtcctgtcggctgctgcacaaacttttgctgccacgtgtcatcaaatggaaagagataatgagtgaaaataccggcttccaaaagcaacttcttgaaatggtaaaggccctccatgaaaaagtcgccgtcattgaaaaaagcgtcgccatcattgaaaaaaacgtcgccgtcattgaaaaaaaagccaccgtcattgaaaaaaatgtcaccgtcattgaaaa

SEQ ID NO: 110441 - DNA, 417 bp, Glycine max
tttatctttggcattgacaacagatatgtgtagcaacatcacaacagatacggattccaacttggtaaaagatcattgacatacccaaattagttaagttttgataataagaaagttggaagctttgataagcccttctcctgcaggaagttgcttgtaaagtgcttactaaatctagagtctgattggcatgtaatagtcatgccactagacagattattgcattcgttttcctttcctgtcaatgaatataacacaataattggtgaagtactttatacacaaaacaagttgattttgcttgtcatgtgttacaagtgaactagtggcgccctttgtaacttgatatctttatttgtgtttacttttgatttaaatgcaaaattttatagtacacaatctcaaatgtactagcat

SEQ ID NO: 110442 - DNA, 451 bp, Glycine max
atcttcgacttctgatacatttcagaggacactaatcactcgtcatcccaagtgaaaattgaagaggcaaacacgtggtgcgagagtgggagtgtttagtcataccgcggatttggttgtgcgcttggttatattacttggttggcactatagctgcccataacatgtttgatataatgtctgactcatagaaaatctgagtactgtgttgagaatgttttattggaaaccgtggccatatttcgggctcaactggtgtatttttattttattttttaaaccccgagacctttgcttgttgcaagcaccctctgggagggttatagcatgaattaaataatgacatgaactgtttcctttatcatcattgcgctgaatataattatgatagcttgtgatggctgcggtgtttttggcttttgcgtgtccatgattggtttgctcttttttt

SEQ ID NO: 110443 - DNA, 125 bp, Glycine max
ccctcgcgtttttccacgcgttcgtagagatgtttttggagcagaaggtgattttatcacctcacctgaagttagccagatgtttggtgagatggttggcgtctgggtgatgtgtctttgggagc

SEQ ID NO: 110444 - DNA, 334 bp, Glycine max
ctatttctgtttcctgtcgtatttcgtacgcagaagcagaagtattcaggaccactaaaaatatattatgtggacttttgtgttgaattaatattccattatgtgtggaaatatttgtctatttgggtcctaccaaaacaaaaagtttgtggtcagcctgcgttctgataaaggagaaaataaagtcaggataaggatgcaattcgtttacttaaaacgaaatttaaacctctaaaaatcaatgggatttatttgtcaatttaatcatttgatgacttccggcggttgatttttgctttatcattctcagtttttttaattattattttcaatt

SEQ ID NO: 110445 - DNA, 323 bp, Glycine max
ttttgtgtgttactgacaagagaaagaaaagaagaatcttttggtgtctgtctctcatatcttaactcacaccactcaccacctctcttttgcttgttgttttcaaagggtaggatctttcttcattgctgctgtgtaaagtttcttcctttcttgctcttctgttcattcaacgctggtttggcctctcttgagcttcttcgttcatcaaaggaagatgggctaatcgagcatttttatatatcttggtgtttggatccatttaagtgttcacgcagccttcctgaaacgttgctccaattctcagtgttagtggatgcatt

SEQ ID NO: 110446 - DNA, 363 bp, Glycine max
tctcccatgcgtccgcccacgcgtccgaaaaagaaacatgaaagtgttgattgttttgaagtagcttgacaaagattccacatgatgttaaggagatatttgccaagctattgaagagtaaagaaaaaagaaccacattttgatttgttccagcaaaatgatgcttcattcttgcaattccaccacaacatgagaacagaacttacattgcacttgaagtctattaggggggacttatcacagtactgccatgtaatatcaactgccctatttttttcttgacccattcttcaaaaactgcatacaacacataaacagaggagaggagacaattcaacagcataaaaaagggatcaccacagc

SEQ ID NO: 110447 - DNA, 452 bp, Glycine max
tcgctgtttttcaggcgccttatgttgtattcatatgcatgcatgcttaatgaattggcaaagtacatgtgtacatttaatgactgtgctgtgattttaaatgctgaaaggatagtccaattcattttcagctcttcaatttacttttcagtctcataatttgggtgatgctttgtcatatcaatatggagttggatatagaagaactacatatggacttgacacaccctaagtcttattagcttttacttttgagtttacagtgaaatgcactaacaacagcttataaggtccctgcctattattttctttaaagctcctgttctctataataccttctagaaagtagggatgctcaatttatgagggcatttatgtgtgtgatatgaatgttagggtcataagagctcaagttgttgattcttatcagtcacattgctagttgtcatgag

SEQ ID NO: 110448 - DNA, 323 bp, Glycine max
ttgtcgctttggatatcccttcgtttcaaatttgtcgctcaaaagacctttcctctttccctggaaaccccgttcctgccatataccgtctttcacccgttaaccacaacgcacgtgacacaaagcatccaagccttcttccttctccttctccgtcaccgtcaaagataacgtccatcgtgcagagatgcaaaatgtgctgcgacaaggacagtttgaagaaactgaaatccagcgttccgtctaggcgaagcgattttctgatcgacaacgtcgaggaagacgaaagcgagactctgattttttgcatgacaagtttctcc

SEQ ID NO: 110449 - DNA, 352 bp, Glycine max
cccttgcgtccgcccacgcgtccgtgcctttcttttctaattttttcccgccggttgctagtgttttcctacttctgtcacacatacagaggcaaaaaaattgaatcgtgaccaggatcctgcatcaacaaaggctaggcttggttttaagactttcatctttaggtggtgtgtgggcattgggcaagtttattttcatagatttgcataagtaccagttttagaacggttataattttcttcattcgagcattttcacccactcagccttttctcgcctcaacgctaagtagaaaactattggtgagttgagttcgctccttagaggtaactaactaatttcgagatttct

SEQ ID NO: 110450 - DNA, 248 bp, Glycine max
atattatttattccatttatttcgcggctggtgtggggtacctgagtttttgactttaaagtccccttgatattgctccctcaaacatcgctaaaaggcgctttcgtcaatttctccccatctttcttctcttaaacttcacaattattgtcgtcactattacttactcaaagggaactctctagtctctagtacgtactcttatactcacagctactctatcactttcccctttatcttcttcttct

SEQ ID NO: 110451 - DNA, 233 bp, Glycine max
cattcagcattgaagaggatttggaatataaaataataagggagacctttcagcgtgcatcggattatctgtcgccatacttgaagaatacagagggttcgctacatttacatgcttattgggctcgcttggaaacaaaacttgggaaagatataactgcagctcgtggagtttgggagaattgtctgaagatatgtggttcaatgttggagtcatggactggttatatagca

SEQ ID NO: 110452 - DNA, 355 bp, Glycine max
cggtcgcgttttcatttcttgtgtttggaggtacccaacttgcgagattccatcatttttcatgtcttagatttcatttcacaagagtgagcaattaattcccaacaaagaaaaactttatttttctttttcttctccaatgccagaaaattaaagggtcgtgttcgtttgttgttgtagtaaactgtgtgggcgttatcttcgatttttttttccgctcaaaagggtagcgtttgttggtgtaataataaactgtgattgttgtctctagcatttgaagttccgagaaagttgcgaatttccctttttttgatttcctcttggtgtgggtattctaaggttcttatttagttat

SEQ ID NO: 110453 - DNA, 90 bp, Glycine max
gtcttgttgtaaaaatgcctcagtctcagtctgagttgaaaaacatgcttgttatgcttacatgaattaagtacaaggctctaatagttt

SEQ ID NO: 110454 - DNA, 267 bp, Glycine max
atgtttcaagcaggttgaatgactccaatgagatggcgagtgatggtggcgccaacaggcttgctgataaaggatcaaagaaaaaaaaggggaaagccactgcgaatacagtagcaaacctatctgaaagtgctgcagataaccaggaacagactctgacaaaatctaagagaggcccgaaaagaggtaaggatacatcttcacagacgtgagattcaaagacaggttctaggaaagaattgcttaaaatgaaagaggataatcccg

SEQ ID NO: 110455 - DNA, 355 bp, Glycine max
tcgcactgcccaaaactacgccgtttcgaggtctctgttcttcagctcttcctccagcgagacggagagcgacgaggaggaccacctcgccgagttgactcgccgcgtcgctctcgaactcgatctcaacaacaagggcgtgtttggggatggtggtggttctcctcagtcaaccctgagcgtgtttgagaacagcggcaaagggtcgagctcaaacgacgccgttccaccccacgtgaactcctcgtccacgtgggatcttctccgcgccgccgcatgagaagtcgagaggatttgcgacgaaagctgtaaccgttacggtcaaaactttctgacaccctcttccattgatgct

SEQ ID NO: 110456 - DNA, 376 bp, Glycine max
tcgcccatcgcgtccggatcactgttgctgcttcttaagcctttttcttttcttatgtgggttccccccttcccctttcgattttctgcactttagagagacaaccagacatggctggcagtaaccagagtgttgttccgttaaatacatgggtgcttatttccaatttcaagctgtcttacaagcttctcagacgtgacgatggaacgttcaatcgtgagttggcggagtttctggataggaaggtccccgcgaacgcaattcctgttgaaggggtgttttcaatcgattatgttgatagaaacgcgggtttgttttaccgtgtgtacttgccagcctctggaaacgaggctcaatggggtatcaaagaccttga

SEQ ID NO: 110457 - DNA, 197 bp, Glycine max
gatctgaagtgcgtagagctaaagactgagagagacgaagccagagaaaaccaaaaaccttactctttttcacgcgacgccctagttcatttctcttctacggtctcttctctctctgttctttactcactctcattcattcaccatgacgaaacatcatgccaattggtctccttacgacaacaacggaggatcat

SEQ ID NO: 110458 - DNA, 369 bp, Glycine max
ctgttataggcgaaatttggatgattgtggtctcttctctaatgacacagttgttcagtctgatggagctactaataagaggtttgtgtcagttggtccaacatgccaaatgccagagtctgagaggttcaagtcaggaagtggagtgtctctaacattgggtttgcagcattgtgaaggaggtaattttctgcctggtaagacccatctcagtttggtttccatgagggaggacgacatctccaaagcgaccgcagcttcaacagttggagtagagacaacagaacttgagtgcattggtgctggaaaccaacaacaaaggttaaattcacctcatatgctacatgattttgaagtatgatgataatc

SEQ ID NO: 110459 - DNA, 277 bp, Glycine max
agtttcaattttcgagttcgcaaaacgtctccttaatctccacaacaacaccttcaacatcacatgcatcattccaacacttaactcctcttacaataacattgccaccaaacccttctttgatttcctcccttcgaacattcactgcattttcctcccctcagtgtacttcgaggacctaaacaacaatggagtctctgtggagatccaaatccagctctaggtttctcgcgccatgccctccgtttgggaaaccctaagatcactctttgatgcc

SEQ ID NO: 110460 - DNA, 463 bp, Glycine max
cttctcacctgcgacaacgacgaagacaagctcctccagagcggtagcgagatgtcaacactcccatttcctcaacctcagggaatgatgaaattcaagtctatgaaaggatggaaatctattgtaccacttcatttgaaaggaaaatcggcaacccgtttttctttatttcgcaaagtcaatttagctggagacctaaattttaatccttgtgttatataataccattttaagctggccaagttttgctaggtcatatgctgtctaagtaacttcatgactagagaaggttattctttggagtgcgcgataatggtgatttatcaagcctaatgtgtgtgtgtgtgtcttttctaatttaactttagttttacactaataacttgagggcagtttgagtgagcacactggaaaatatcaatttgcaacttccacagagtatttgttcctataattttctgac

SEQ ID NO: 110461 - DNA, 106 bp, Glycine max
tcgtcctctcgtccgcccacgcgtccgccgttcgttcacagcgtagcctctgctctcgaagatggctcctcccagaggtggtggtgggttcaggggtggtaggggt

SEQ ID NO: 110462 - DNA, 368 bp, Glycine max
cttttatatttcatgaaactccttcaagacctagacgttgtatgttcctactcattggacccatcattagaagctgctttactctttgtggttaaattccagaaatctcgacctgatttggttgctagagctcatcttcagcttctgctggtccaggatgggaaactctatggtcgggatcctatgtttactatgaccactggagctgctggattacctggagtcacagagaattatgactttcagaaaaatgcatttatggtgcaactaggacaggtggcgataaatttactcaaaattctttgtacaaatgctgtttggcaaaggcgtaagctagggaaaatgttacaagactggcatgtcaccta

SEQ ID NO: 110463 - DNA, 172 bp, Glycine max
ccttcgcgtctgagctctgcgagatcttgagtcgccgatttgtaaagatgagtaagcttgagagtgttgctttgcgtgaagccatctcaggaatcatggccgattgcaaggagaagaatcgcttatttgtggagaccattgaactccaaattggtttgaagaactaccatcc

SEQ ID NO: 110464 - DNA, 246 bp, Glycine max
acttttctgtctttttcttctttctgactctctttgttgtatctcttacaatgtcaaacttgcattacatgttcatcttgtttgcagttcttcttgggcaaagccccagtagaatacattgccataccaagggaattagaccaagactttgtgcaggtaaagggttattgaccaacataactagagtgctgtattctgaacagcaattcatgaaatgggcgaacattgttggttccctcaaacact

SEQ ID NO: 110465 - DNA, 151 bp, Glycine max
ctttctgcgttcgcacgaggtttaggtcgtgtcataggtagacttgtaggcagagataaacatgatgaccatgatgcagttgatgttttctagaggcgtaggcctactgtctcagcctgtaggcaacgagttcatcagacgaatgcggatg

SEQ ID NO: 110466 - DNA, 365 bp, Glycine max
gttttccagttttcagcaaattaatagatggtccacaagataaaatatgaagttggtgttgaaagttcagaagttgaggagattagatctttatgtttcttagggtacaaagattagttggaagtggctatatggacaatcggttgattgttcataactgacctgtttttgagaagaggctgaaatctgaaatacttgttcaagctgatggtgatatctttgaagaataaaagagtataattaaatattttctaaatttttatgataagtgatgcaaaatgccctgatatccctggaccataatattataattgcaaacctttattacacacattctaataacctaattacatctggtaaatgaa

SEQ ID NO: 110467 - DNA, 355 bp, Glycine max
tcggttttcaagtaagcattcccaaatcactaatgtatagagctatttgttatgacttattttttaactcttattataactgctggatatacgctttcgttgcaaaataacaaggcatagtaagcttgttgctcttctttattaagtaattatgtatagttgagtttttcatcaatgctattgatgtttatattacttaattatcgatttgtgctatgtgcaaattacaaagtaatccaagttgctctcactaaaatagttttactacaacaatagctatttaaaaggacactttctattgatgtgccccatgtgattggatgatagtataaaaactatgaaagtaaaacaaagc

SEQ ID NO: 110468 - DNA, 246 bp, Glycine max
gcgtcacactgtggtacagcatgagagaccaacggttctgggagaatctcctcaccctctttttcaatgtggtcacccacaattgtcttgcagctctcacaacacatttctacaaaccaaactctgactggagatcaaactctagtttctgaagctggggtcttcgaactgggcttcttgaaggccaggtaattcctcaaactactacataggcgtgtgggacaaaagaggcaccatacaagacaa

SEQ ID NO: 110469 - DNA, 248 bp, Glycine max
  unsure (1)..(248): unsure at all n locations
ctttttcccttcgtttgtgacggaaattggtctcctgcttaggttgtatgtccatctcactttcacacttgttgcctgccataacatgtttttccagttgtcactcctctcgctgtattttattcgtttttttcttgtaagatagaaagaaataaagggtagcagttatttttcgttttgttttgtttttccctctcggngaaggaaacagagaaagaaaagtttaaagataccaacttttaactgaa

SEQ ID NO: 110470 - DNA, 365 bp, Glycine max
gcgtataccgtgataacatagtaatgatagctctatttctcatttaccgtcacactctaataatcagggatggcagaaaagcggtatcctttagcacccctccatgcataatatgcaattcgagtgtgacggtaaatgagaaatagagctatctataccgtgaaaacatagtaatgatcaaatttggttgcaacgtgtatgcttcaatggcaaagatggaacaaaatggtagaaaagtgtaatcgtacttgatacttaagtagttaattagggaacaaaatttagaaaaatgatgcattaaagtttgaggttagaaaaataagcttaaattgtatcgtgaaattgtttcttttgggcaatattat

SEQ ID NO: 110471 - DNA, 382 bp, Glycine max
gcgcttaatccgtttacgacggcgccatgaaggtccggtcgatgaagctgaaggaggcccacaccgcgaagagcggcggcgcggccttctgctccgtcctgtgggaccagaaagcgaagcacctgatcactgcgtcctcctccgacgtgggcatctgcatacacgactcccttttgccctccctcgctccgaaaaccctccgccaccaccgcgatggcgtgaccggcctgaccctcaggcctaattgtacttgcctcggctgcggatccgtggaccactccgtcaagctctacaagtatcccggtggagaattcgagagaaatattacaaggtttacacttccaatacgttccctggcatttaacaaatctggaagcatgct

SEQ ID NO: 110472 - DNA, 247 bp, Glycine max
gcgcttgcgcaactagggcgtcgacaacacgcacaatcccgagtgtctcaacctgcgagttctatgaagtcggcgctacattgccagatgtgattgagcgaacagagcagctcattcacggactccacacagccgtcgaagcactgcgagcaacctatttccccacactttctgcgccagaagggatcgacttcacagcaccattcgctcaactccccttcatcccaacaatcgaaaaggcgatcaa

SEQ ID NO: 110473 - DNA, 411 bp, Glycine max
gcgctcacgcgtgctattagaaacaatgatggaagaggtaataaattcgattcgacgcgcttgtgtattggcccaaaaccttgaacaagacctacccaacttggcgaaccaaccagctatgatgtccttgtccattgatcagataactgaggctttcagtggtgccaaggaaaagatgttacaattttcccgacagaaccaaacttgggacgaatctcctccaacgttggttcatgaaacgacacagctgcaacctcagatggatgctactctaatgcaggaatggctaaggtctagtcatgcactaacaatggatcagttgtttcaaatgcatcagtttcatgctgcaaggagtacccttcaaattggtgaaatgggagggagagatgggaagataattttgagagaaac

SEQ ID NO: 110474 - DNA, 460 bp, Glycine max
tggttacgcattccgaagcgctcaaatatccacctacaatactagcaatgtgaggaatattgaaacaggtgcaaagccatttgctccctacgtccccaaatttaataacggtcatggttactcagaggggcacgttaccaagaaaaaaacaattccagttgctagcaggccttatgttagaacagttgttacaacaccttattatgaccatgcacgtaaatttgatgacttgaccaatgaagctagccgcagtccacctgattggccaaaaccttcttataatggctatgctgactacggaaccaacaagccatttgaaggtgaaattaagaattatgatgaccatgatcctgtcaagaaggacaactatcatcatggttatgacggctatggggactacaacaacaaagatgagcccaagcccaaacccactgccagtcctgtttataatagtggatat

SEQ ID NO: 110475 - DNA, 305 bp, Glycine max
gcttatactgtcctatccaaataatattctccaaatcaaggagttctgtattgccattgttcatggcaggattaaactgatgatggatttatttctttgttctctgttggctgtgctgttgtaagtttgtccagttgtccattagtagggctgaggcatctcgtgtctttggttcataaatagatgagtgcgcatgacatgtggagacaatgcttctctgtttgcatcttgaaaggatttctcaatctcccctcccccctccccattaaagtgtctgtactcagttaagataagttgataagtca

SEQ ID NO: 110476 - DNA, 173 bp, Glycine max
gttggagttctacttaaccccgctcttgtatacctaagtagtgcatcatccaacatatcagcactaagagccaagggactgccacacgtaaagcctgccgtggatgtgtcccactatcaaaactacaatcgcttaccaatctcttcctgagcctgtgtattttaaaaatgacc

SEQ ID NO: 110477 - DNA, 221 bp, Glycine max
ctcttgcgtctgtagggtcgtctttcttgtctctgcttttctgcttctttccgttcgccggccggaatcctattctccggccatatttccggctgtctgtaatgccgcttgaccttccgaactcaatcaatcttttaaataagaagctgaagctatctttggcagcgatattggaacagagagagggacgatggcaggtaaaagcggtgcctatagaagga

SEQ ID NO: 110478 - DNA, 369 bp, Glycine max
cgtctaatagcgccgcatttcgctgctccttctgtaatccctaacccttctctcaaccatgtttccctcttcttcttactcttgatttggtttcgatattgtttttcagttggtgttgcttatatcatatatagttaagcttaacaacctccattcaaagttaaagatgcctcgtaccagcactctggagtgctccggttgccctccgcttcgcgctctaacctttgacgcgcttggtctcatcaaagttgtggaggcccgcgataagcaacgaggagctccccaggtcgtagagaggtggggcgaccctgaatcatccaaatgtgtgatggctgtttcaatgattgaccgagagtctcaccctttatt

SEQ ID NO: 110479 - DNA, 406 bp, Glycine max
ttttaattataaaattctttcaattaattaacattttttctaagaaaaatagataatttaattaattatattaaatttatcatgtgtattatcatttcaacattttctttttcttatcactttatttatttaattattttttattatatttaaagaaaaaataattaatatatctaaaacttatagaaagaaacctgcataaattacataatctatcacaacccataactcataaccataatatgtataataagtttgttaatttttaaaatagttattttaaaataatttaaacaatgatttattattaaataagagtataaaattattttataatgcataaaccttaaagtcaaataataattgtcatatttagaaataaatcctattaaattcattcaaattt

SEQ ID NO: 110480 - DNA, 326 bp, Glycine max
gtgtaatcgttcctacaattaatccctcctctcccgccaagttttattgccgtcgattactcccttctcatccccacaccaaaagaaagttaccttgcggacctttggcttcggacggcgggaggcgactaacccctgacaaatgataggactacccccccccccccttagcgagcaacggcctttttcggcacgctttcttcggatttttttttaagggttttgcctttcacttaaacaatgattggctacgttattgaaaatctttccaaccgaaaattattcttcattctctccctccttttgcttctccaatcacttttctt

SEQ ID NO: 110481 - DNA, 416 bp, Glycine max
cgatcgggtggtagactcagaaacaaacagggcactgagtcaccgatgcaactcagcagcaacgtactgattccggcgaacaaacccccaagaccgttattcttcaaacccccgattttgctccaaccccaactcgcccgagtcgaactcgctccaagccgagaccctcaagactctagaatggggctccgtgtgcaagcagctctcggcgttcacctccacctacatgggctctgccgccgccctcaacgcccgcttgcccatcggccggacacgccgcgacagccagaggctcctcgaccagacctccgccgccagactcgtcgccgagcccctcgacttttccggcgtccacgacttgacggagattctcggcgtcgccacctccggccacttgctgaccatccgagagctct

SEQ ID NO: 110482 - DNA, 453 bp, Glycine max
cgtgtcgcgtgggtttcaatcaaatgtgaattgaataaaaataacaaagtaatagtgaatacaaagctgattttacggcaccaagcttattaaaaaatttgcatgagttcccttgatggcacttgtgaattgttgggatgagtgaaggaggactgaaatgaataaaatgagagaagaaatgatgattctacaccctaacattcaacttttttgtcttttcctgggaggaccttgcatcatcttttctcccttctgctcacattattccttccttttccccaaatttgcccaaatttgcttttcctagaccacttgattattcctttctttctttttccttcattttcttcaatttccccaaatttgcgcttcctagacaacggatttgatggcccttctatatcctctttatatacccagcgatatccgtatttcttcacctcagcatatgac

SEQ ID NO: 110483 - DNA, 402 bp, Glycine max
tgctttgagaactgtgttattgtggaagcttgataatgtagaaaagaatgacaaatgccaaataacaatgatatccacatggtcttcctcaacacatggtggttcataaattcactaaaaagagaaagaatgtggtcatagtatatgattgattgagaggcagagacaatctttcatattagcaactcaaatctttcacgcactctatctctcgattggactcgtcgtactagtaggatagaaaaccatggaagagaatctattagcaaaacaaagagagaagcagaaagttacatgggatggtttgggtgaagaaatgaagaggatcatttgcatagcagtgcctatggtaattgtgactgctacccagtatttattgcaggttgtgtcaatcatgatggt

SEQ ID NO: 110484 - DNA, 357 bp, Glycine max
gttgtgtcagcagctcccatccccagcttcaacctttctgggttttgagcttatttgggaatctgggtctcagagagaatgccgttttggtgtcccaatgcctctcaaattgcaggctttggacgtggtttaagtgataccgagttcagtgcatatttgaggtgaaaatttgagatctgtttagaaacccacatcactgcacaccaggtgttcgccaaaagtttcgcaatggtcaagttttcttttgtatcttaagcttccaagagtggtgtttctgtgagttttctttctgggtagttgatggatagttagaagaaaaaagacacaattctctgaaggggcaactggtgaagtaac

SEQ ID NO: 110485 - DNA, 174 bp, Glycine max
ccctcgcgttcgttcaccctctgctgctgcttctggatcttcttctccttgttctccgcttcggattcgccttaccaagcctcccaccgtgttctctgcttcttctactgcttcgactacctctccgaacggcaccgatttgaagaggaagcgacccgctcgggtggacatacc

SEQ ID NO: 110486 - DNA, 283 bp, Glycine max
gttttgttgatggggacaatgcagggacttaagcagcattttgttgcttaaggacgggcttcacgcataagaaaattgattgatttaatttaatttattaattgggttggatacttgatgcgtggaaagtcctcgtataaggatagatggttgattatgacccaggtagaactgtagagaggaggagattttctaattttatgttgtttagctcaaaaattggagagcagggaaaggaaaatatatttttggattggagttatcttcacgttgtattttatct

SEQ ID NO: 110487 - DNA, 403 bp, Glycine max
cccactcgttcgcccacgcgtccgcccacgcgtccgatttcatggtcgtgcatcttggccctgcaatttttgtaagtctattcaagtccaattcctctctcatcttttgtcaatgttgattgcattgatggtccttggcatccagtttcgtagaaatttcacaccaagttcttgattctgtttctaaattttatgaatatcaagtttccaattgcgttaaaacttacctgttgtgtgtttcggatgtttaatttagatggggcttaggtcatcatttttgtggtagggttctgtgccagagttgtttcttctgattaaacatgctgatcttggctatgcttctgtttcatgctctcctaaacccctaacattgtttgatcaggtttgtgctttttcttgacac

SEQ ID NO: 110488 - DNA, 474 bp, Glycine max
gtccattttttagacaaaaactgaaagttaccaaatagatttgtttcttacactcaactgaaattttctcacaggaaattcaatcagggtgggaaattcatgtagtcagtatttggtagcaatttatatttttaaatcaaatcaatgttgtacttgcactgcaaaataattaggttcaccttattcatattcttaccagtagagtgtgtttaataactgtgaaaaccccgcagaaggagaagcgggataaactatttaatgccaatcttctaatcttttctggtaatcctgcctgtcacactgctggagcataaaaaatgtacatgaagtgaattttctgcaatctgcggaaggaaaatgtcaatgaaaaatatttactggaatgccaattttgcttgctctggaatattttactgtgccttttgttttatataatttcaggattatgcacactggactgcaatggatccccta

SEQ ID NO: 110489 - DNA, 404 bp, Glycine max
attttatacatacactaacaactactgctcttgcttcttctgcatcatcatgtctgaaacagttcctcccctcagaagagcgaaaatcgctcgctacttcaaacaaatgcctctcacagacgaccaagaacacatcctcgcgttaagtggcctctggaaaatcgccataactaaccccaatgatccagagtttccttcccttggtatcttcagatgcatggccaaactgattcaaaaaggagtgaatcacaaagattggcttcttaggggtcagaacatgtatatcccttattatgcagcgcatatcattggttcttacaccatgaacaaagccaagttcgctgataaagctgttaagttcaacgttggacaagaaatcatgcaaactctcttacaggattacc

SEQ ID NO: 110490 - DNA, 369 bp, Glycine max
catatattgtgtcattatgatacccagacaatatatgttcttccaaaatctgagcacattctcagctacaaactgttgcatgtctgagacaagtgggacagttacctaaattttccatgacttcagtgagatactcagcagcatatcagccttcaaattcttcaaactctgtttttgttttcccttccaagcctcatttgaaggctgcagtctcaactaactctagggtggagtcagctgctaatgaatagatccttgtaaaccgtcgattcttattcaaatttttccccttccttgtaacacccgttcccctgagttttggggtggggtgaacttcatattttacatggaaaagctccatcatgatct

SEQ ID NO: 110491 - DNA, 227 bp, Glycine max
ttggtcgcgtgggattagttttgcattagtcttcttcaactgaacttggcactctctctctcttcaatggcttccttttctctcacctcctcggctcctacccttcacaaagccaccatcatcgacccttcttctactgcttgttctgcttcttcttctcatgccttccctcaccgtccccccttcgatatgcgaatgccccaccaaccccgacgccttcaaacccc

SEQ ID NO: 110492 - DNA, 329 bp, Glycine max
tttcttattctaatacgcttttcgattcttctaattttctcagttattaagagaaccaataacaagcaccattacaagattcgagggttttgattttgaagttcgtagtattttatcgcgttaataggatggcgcacatccaattgcttcccttgtaatatagatttgccctttatgtgctttagtcagtgtagtgctaaatctttgtcatgcaccaatctctgttctgtgtatttggctcaagagatgtgtgggaattagtgctatggcaacatccaccaaggttgacatatcttctagcagcccagatagaccattgtactctgggc

SEQ ID NO: 110493 - DNA, 442 bp, Glycine max
cccacgcgtccgatttcaattcagctcctttctattgatgtttatgctgaagactgaataaaagtctgagaaagctgcttactacaaaccaacaagattaactaagaaatcatcttttgggacgatgcaaactgtttatcttaaagaacacgaaggaaatgcgcacaattttgtgggcacgttgtcttctgcagcttcagcaccctggtggagtgcttttggatctcaatctgttcatcagggagagtcttgtggccaagtgaaacccttttcattggagctgccaaactgcatagaccaacttgctgccactaagccactagcaagaggagctgaccaagttttgggtaaagggcacataactcagtttacaatctttccagatgattgtaaaatgtcagatgatgcgcaaaagcttcagacaaccatgtcactgcagtca

SEQ ID NO: 110494 - DNA, 492 bp, Glycine max
ataaaacatcgtatggatttttaatttttaaaaataatgaaaataacaaaatttgatttttacaatttttttttataacatctcctgataaaaaaaatataacaataagataatatcttataattaaataaaagtacaatatatagaaaataaaggccacttaagatttaattgagagtttatttagatcaactcatttttagagtgaatttttaaaaattattcaaaccatttctgatcatgcattgagtgagttgtttgacaatgaatggaatttaactatagtttacggatagttttcgatccagtgaacctgactcaatgagcctttctgaagtttttggtttctatcgtcgagagaatcctctagttttaaatggttcttatttgacccaatgaaagtcgggtctaataattattggtcaattgatctaatgatttttgtgatccgatattacatcgggcaattcagacgagcccagtggatctagt

SEQ ID NO: 110495 - DNA, 380 bp, Glycine max
ctttttccatcaccttcgtcgcaatgaaaccaggcttcatctgaatgcgattccccttcgccccttcccctccttcactttcaccttctccgaatccgattccccttcgccccttcccctccttcactttcaccttctccgaatcctctaccaattattatgatgaactccatcttcgtctctcacaaccttcgcgtctttggtcccggcttgaatcccttcgcaccttattgcatcgccaatcacaccctttcctctcgctaaataccaattcccctctccgattttcggggttactttacttggtcgttttgcttttttctttgtggtcgtttttgctttaattgctgagaaagatagaaacatgctcgaggaacagc

SEQ ID NO: 110496 - DNA, 380 bp, Glycine max
gcctctctctctcttatgtgtttcttagacgtggacgcgtcctccatcacaaactgacactattcagagacagagattgttgagaagatatatgaagaggatggcaaatatgtgtgttgtagtggctgtttgatggtgaattggcaatttatttttgagtcattgatggaatcatagaatgtgaagtattactatccgtgatagttctcagttatggggttcttaaacgtagagaagaaatggttatatcctttcatagtgtgttttgcaatatgcatgctcttactagtttcatccttcaacatgggtcttgtctctaaaattcactccatcaattcactctttttctttctcccttctcatttacgctcaaaccaaac

SEQ ID NO: 110497 - DNA, 456 bp, Glycine max
ttttgctgcagggtgctctgaatgagccaacactatgttgaccattaacactctttatccaacacgttgttgttcattgccttttcgattaaagaagacactgtagggttttgaactcgaaaattgtgagacagcacaaggtgactagccttgaaaatcactggatagaacatggctccatcagatgtttgtctatccgaggatgcagttcaggtattcatagagcacttggttgacccgttgctgccagcaaaagcatctgtccaggataatcccacaccatctcaacagaagttagttgcaaatcaggtgcgttcaactgtcttactgtacaactactaccataggaagcagcaccctgagctagcatatcttccatttaatgaattttgcaagttggctgtggttttgaggccacctttattagcatatatgcaattcatgcaaaatttaaat

SEQ ID NO: 110498 - DNA, 114 bp, Glycine max
cgcacgcgtgtgtgaaagcgtggggtgtggtatttggcgtattggctagaagaactgtaacccctatctgctgattgtgatgaactcattatgtggttggacggggtttatgtg

SEQ ID NO: 110499 - DNA, 428 bp, Glycine max
cccacgcgtccgcccacgcgtccggttgggagcttatgtctcaaggaaactaggtttcaagcacttattgacagtggatcttctttcacatttcttcccaatgaagtttatcaaaaagttgtaacagagtttgacaaacaagtaaatgcgtccaggattgttctccaaagttcatgggagtactgctataatgccaggaacaggaatacaccatcttttgtttgcctgtaagcccttctgctgatgactacgctgccattggacagaacttcctgatgggttatcgattggtgtttgatcgggagaatctaaggtttggctggtctagatggaattgccaagatagagctagtttcacatcaccttccaatgggggatcaccaaaccctttaccggcaaatcagcagcagactgtccctaatgctcgt

SEQ ID NO: 110500 - DNA, 211 bp, Glycine max
gaatcaatcatttacggattcacagcaacagccagtactgacaccactatatcttcaaccaccaatgaatgtgacccatggtcaaagaaatattgacccttaatgagaaacttctcctcagggtagcaacctacagacaggaggtggaccaccctatgcgcaagggactacctggcctcaagatgcgtctagaagtatgaggatattacta

SEQ ID NO: 110501 - DNA, 361 bp, Glycine max
cccacgcgtacgacgcctccaagaccagatctatcgagatgacgtgctcgtgctaagcttgcactatgccgagagatcctacaagatcctctaactttcatttctttctcacacacactttctctctcatagggtttcaattttttttctgttcgcttatgtgtttcgttttggttattgtgacaggtttcaaatgattttctgggagtgatgagacaaaggaaaggagatctgaaaataagagtggggaaaaacctgtaagaagaaaacaccaaaatgttttttttcgaccaggaaaagatccgaaaatgaatttgattcctaaagtgaatttcttttcgacaatcaaaaagtttccagc

SEQ ID NO: 110502 - DNA, 466 bp, Glycine max
cccacgcgtccgcaaatttcaaaacacacaacacaacacagcctgagacagacaacaaacaactgataacaacaacatggtaagaaaacaaagctggatcaaattccattaatcaacaaaacccaaataactggttgggtcgggttcgggttttttggatccgcttctctggttcaaccgttgttgttgtggtgattatagtgttctctttcatttttctcagcaattcattgttctctaggttaggtgttcataaggtgaggtctgaatggctgggattgatgataatgttggccttactggtgattggggtcttgctagcccaagtccaaggacctttttttccagaatgttcgaagaagatagtgtgacaagatcaatctcagaacattctggaagtggtagaactggggatctcttttcgggacatcgtgagcctagtgagacagggaaagaaaacatgaat

SEQ ID NO: 110503 - DNA, 399 bp, Glycine max
aatgactgggggcactagtggtggaattgaagcaaggtcaaaacagtgggatgacaagaaaattgaaggtttttatcattttttttaaatttaattcaaagcttttgctcttgcaataatcatgttgttttctcaggacttaataaaaagaaagagcagtatgaatcagaattggaagagctaggatcaataagagatatgcaccttaaagagtctgaagcatctggaaaaattagtgggcttgagaagaaaattcaatatgctgagattgaaaagcgaagcattgaagataaactttcaaatttgagccaagaaaaaaagaccatcaaagaaagaattgaatgcatcagtccagaactgcagaagttaaatgatgctgttaacaagagcaatgcagat

SEQ ID NO: 110504 - DNA, 534 bp, Glycine max
caatcttgtattcttaaaaccgtgattagttgttgtttccgttatgaaacgctccgaatttgagtttcccgcaactgatttttccagcgccatccccagcgacgtcgttttgtttggtaaagtcataacacgccgaaccgaacccggtccagataaaagagaaaaccgggttctgtcgaaatctgagtcttcttcgggtcgctccaatgggttcatgtcctggctccggtcgccgtccgggaagaaaaaccggtgccggagaagtgagagtggccggagccgttataagacggtattgaagtttccgttgcaaatggaactgagtgacattaagaagaggcaggaccggagggaatcgcttccgccgccgccgccgctcccgatatttacggcgaaggacgacagcgacagcgacggcggagagagttgctgggaactggtccggccgtcgaggcgtcagggaacacttaagaacgccttctttggatgctttcttcccattatttaggatttttttttctttaattttttata

SEQ ID NO: 110505 - DNA, 387 bp, Glycine max
cctttgcgttcggagagagattggtgagtggggagagaaagacagagagagaaagcgggtcagtttctttttggagtatcgggtcagcttcttttggcaatgcccaagttggtcacgctctctgaaaatgcagcagctgcagcagcaggaggcatgaagaacaacaacctcaccactccttcaaatatcatcatttctcactcgatacttcactttcttctttgcttctctctcttcttccctctcctttctcattcttctcctcatggctggtctcatcgatctcaacaacgcaaccgaagacgatgaaatgccgtcgtctggctcctcctccaccgtgtgcctcgagctctggcacgcctgcgcgggttcattgatttccttgcc

SEQ ID NO: 110506 - DNA, 262 bp, Glycine max
gcgagggtccacccgttctggtgcgacagggttcgtatatcctgctgcaaagaccaaaacaagtatcccccggtacgcgtcggagaaagaggaaacgcccgagcggaaaaacctcgccgcagcatgatggctgccactgcaccaaggaaggccggggggcctgtcccttccggtggccgcacatcgccaagggccgcaggcgatgctgccccggctctgcacgtaaacctctcccagccgcaggggcagccctctgccacct

SEQ ID NO: 110507 - DNA, 130 bp, Glycine max
atatatatgtgtgtgtttagtgtgcaacagtgattagaatgcgtccgcatggtcatcttcctttcatcccacattatacacaactgctattccaattaccgtaaagaatagtaccagtttttctcccgtt

SEQ ID NO: 110508 - DNA, 79 bp, Glycine max
tcgaactaagtcctcttccacaaacagcgtcattctaagatggtggacttgctgcaattgaatgaatcattgtattctt

SEQ ID NO: 110509 - DNA, 360 bp, Glycine max
actcaccaagatattcctcaacgtaatccaatattcctatctaatagctaccaagctattattctgtcataagaaaaagaaacacacaaaagagaaacaagttgttagccacagcaaaagtcgatgcttactagtcttagttaggcctcagcgtcagttcatgaaaacttttgcttttataggtaagatttttcttaaaggaggggtggctgaattgtccactcttgttgttttatctgaaaccttacaaatcaggtttctttctcaactttgaccttgattttgtgctattggaattttgctcagggaggattcttgttggattgttgctgatagcctagagggggaagttttagtctt

SEQ ID NO: 110510 - DNA, 437 bp, Glycine max
cttctgttaagtggttaatccttgggttgtggcttatgcttaatggttaagcatatgtgcattggctttgaatgttttcagtcattgtctatctttcaccaaactattttttggcactcttcattgtattttgctttcatttgatatttgtgttgttcatcccaagctggaagttttgtgaacacctttcagcttacgaaggcctattagaattttggccttgtttgtccttgtcctaaatgcatgggttcgatctggtgtcctagatgctttgtccccgtccttgtcccagatgcactagctccgtccatgtcccaaatgcactggctttgtccttgtcccaaatgcactagcctgactttgtcacggttgcattggctttgtccttgtcccaaatgcataggtttaatctagtcaagaatcattattttttttca

SEQ ID NO: 110511 - DNA, 439 bp, Glycine max
ggaaatcgctgagaagattgattcctttatggagaaggccacacagggatccttcatcccccatggacgtcaggatgttctcgccgctgctattggatgtccagatcaccctgaacatgtccgtgctgctggagccagtgtcaccatcaggcaacggctccacggacgtcctgcagcgcttcctccctgcctcttgacgaattgcagcagttcacccagcaaatcagggaccagctagaggagttcatcacagagaaagtgacgagacaggtcatggcatccttcagccacatgcagtcccagcttcagtcgcaaatgcaatcccagggacttgcagtgcctcctgaccctctggttggtccctccggtcctcgagtgagcacacaggggagttgtgttaatccctcaggaaacgatcctgagacgggtgactctgaca

SEQ ID NO: 110512 - DNA, 403 bp, Glycine max
ttctctcacaaatctatttccattccattccctcagagagagcaagatcacccttctatagagagaaaacacacacacacacacacaaaacaaaactcaaagagggtgttaaacagggatgcaaatagagacagaaagggagtgcgatgactgagaacttttcgtgggggatggatggaatgaagaaggttttagaataatgttttacaaaaaaaagaaaaagatcaaaggttggtgcaataagtaaaaaaacgcaaaggaacaccctactttttactagtctctggtttgggccaattgctttatagagttagcctaatcgggccgagagaagaatattcatataaattttggcattgccattggtccctggatgactttgttggattatacaaaaatactc

SEQ ID NO: 110513 - DNA, 181 bp, Glycine max
ctttactataatcctgcatttgaagtttcagatagtttacaacttaaacaacattttagggaagaattgtaaggaataagcggtaaacagagcgttgtgggtagaaaagttgagcaataggaaattatggtcaacttgtaggaaaggcaatgttccgtcagcttgttatattaatttattt

SEQ ID NO: 110514 - DNA, 392 bp, Glycine max
cccacgcgtccgtaaaaatgcttcctgcccctttggtcggtttcattttgctgttagggcattttgtgtttgtttctgtcggttccaatttccacgtgctcaaaaaacggggatacgacgaaagcgaaagttacagcagtgaagaagagccaacgtacaagcgccacgggtatggcgggcgctttggtggcaaacgccaccgttacccaccggcgcatggcaagggacaccgcccgtcgacgtacgatggcttcccttacggcgattctccgcttcttccccaagtcatcgccgcccctccgatgcctttctcgcctttgcaattgccttccatttcgaaagcccaaagcgaccttggcgcattgcaagtcgcttctcctgttttggaaggc

SEQ ID NO: 110515 - DNA, 395 bp, Glycine max
cttctcttctcaatcaacaacatcactccaaaaccctacttctctctccgattcccatgtccccttcctcctaatcccccttccccctccgatttctattctcaccccccctatggaatccaccgccaccaccgtttcccccgattccgaaaacgacaccaccaacacgcgagtgaacggctacgtcgtttacactcgccgcaagcgcaccctcctcaccctccattccggtaatgacgccgccaagaggctcagaacagctgaaatcaaagtcgaagctcgcaacgacgatgacgacgtcgttttcaagcgccccaagctcgagtctgaattaacggaggaggaattgaaaacgacgtcgtcgtcgaagaagatcattgtcgtccacaagaaac

SEQ ID NO: 110516 - DNA, 442 bp, Glycine max
gaggtccctatcctgttgccacaaccactgatcaagaactagaaaagtccctgctcttgccatgtgaggccattgaaaatgtttcgtgcaatgacataatgaaaaaaattggagaacatcaacctcagtttgaccttcctgttaactctgcagaagagaacactgttgacttgaacttgggtgctgagaagtatccgcttcatttgaggatgagaactcttggtgccaaattggagtcaacaagcagtagttctgccattgctgaagatcaagtttctgaactagactttttaaactctagaaatacacagctgatatcagaaggaaaggctatagatggtgtttgctcaagtagtactcaacctcagttaatgatgtctgaagaaagaatgaatgttcagcatacaaaaactgatcaaccaaaactcatgccagtgatttc

SEQ ID NO: 110517 - DNA, 446 bp, Glycine max
gtcaaatacaaggcatcccttgatggtcataaagtacagaggtacaagggatagtggtgggaagagggagttctcaacatattagatagtatcccttcaagctgattatgtaatatgtatgtactgtgtcataaatgctttcagcatgcaagaaaattgtacttttattacaggttaaatagcaatataagatgcattacaatatcccaggggtgcacaacttgctttttcctgtattcatttacaagctgcaactgttgggataaatacgggaaaaaggtgcctattgtccctagtcatgtgcattcgattaacgattccgtgtcagcagaagaagctgccgatgattacgagtttgtcattcgacagctggtgaaaacccgtgttgtcagcgtgtctgagattagtgattgtcccaagtttgacctcattctgcttggattggg

SEQ ID NO: 110518 - DNA, 385 bp, Glycine max
tttgtaactaaatcccggtagcttcattttccaaacccagttattacttactgcccaaacaagcataagaagcagtgctgtttatatgcttctccacccataattcctcccctatcatatttatggctgttgaactacacacttcgcttccttctcacttattccccgacgacaaccacgacgtcgtttcgtcacagcataaccacaaagacgacatccaccacgcctcagctttaaacccgctccccgagcttcccatgaaggacaacgacgacgatttcatctccgagttaactcaccgcatggctcgctttttgcttccagatgacgacactttcgatttctcttccatcgatcttgattcgtcacgggactcaaaacaggg

SEQ ID NO: 110519 - DNA, 150 bp, Glycine max
ctggttttattaacaaacttctgctttgtgagttctgttttcccaccccgttctgaattttgcttcacccttggccgtaatctaatctccttactgttagcttctcatctcgctcagacgcgtctattggaattgactctggctagccta

SEQ ID NO: 110520 - DNA, 128 bp, Glycine max
cccacgcgtccgcccacgcgtccggttgcgacaaagaagctcattcgattacagtaaaatacagtcttgaaacagacatttaattctttagatactatcttttattaaaattaagattttattttagt

SEQ ID NO: 110521 - DNA, 76 bp, Glycine max
ggcaaatcaaattaaaatcacaacacccccaattcccgaaaccctaaccctacctcctcgcagccatggctaagaa

SEQ ID NO: 110522 - DNA, 168 bp, Glycine max
tcgtctacgcgtccgtccacgcgtccgttttttttttcacagtagccaaaattaataaataaatagaagaactaaaattcaaactcgtcatctggacgtcgccgagagacgtgacacgttttcagttctaaatacagttcatttgcttgttgtttccgaggaagattg

SEQ ID NO: 110523 - DNA, 329 bp, Glycine max
ctcacgcgtccgtccacgcgttcgcccacgcgttcgattttcccctcggaagagacatcgaagaaaatcacgtcacggcaatggaggaaaagcacgcagcagccaatgaatctgcacacgccgaatccaacggcgtctctcacggcgccgaccacggttggcagaaggtgacctacgctaagaagcagaagaagaagaccgttaacgccgccaacagcgccgattcccgtgcgaattccaacaagctcgttccgaacggcacgctgtccggcaacgatggcgttttccggtcgctcgagctgcagtcggaggaccggcgccggaaaatt

SEQ ID NO: 110524 - DNA, 246 bp, Glycine max
gccacgcgttcgaaaaaaaagaaagaagaagatgacaacagccaagccttattgatcttacctcattatatataataccccatcactactgaacccacacacgtcaagctcacatcggcatatcacttacgcttaactcaaacgtacgctgacaagcaacttgacttgcaagagtatattctattatatatagacttgcgattctttaacattccgcagccggagttacaacagttatacttacct

SEQ ID NO: 110525 - DNA, 116 bp, Glycine max
acagtccagcaactcctgtgagaattcgaatggcttgtttagatgaattgtcaagtggaattgtttgagcgtgaatttttgcattaatgaaggctggaacctatgataaggggata

SEQ ID NO: 110526 - DNA, 397 bp, Glycine max
cccacgcgtccgctctctataaccggcctcctaattaaactcacttgttggtggaaaattaattaaagtacttcttcattcaatggatcagcttggaatcattcaaccatcttcttcaaccaaggttgaaagaaggctagtggagaaaaacagaagaaatcaaatgaagaacctgtacaacaaactcaactctcttctccctagctataaccccaaggaagcattaccactgcctgaccaagtggatgaggcaatcaactacatcaagagtttggaggcaaaggtgaagatggcacaggagaagaaagagaatttgcagggaattagaaagagatcccgtggttgcttctccaataatagtgccaattttgctgcaacttctggtttcccaaaatcg

SEQ ID NO: 110527 - DNA, 428 bp, Glycine max
cggactcgtgggttgaaaaattactgagattcatcttaatgtgctgaattctataatatctcttggcacaaattcataaacaattgttagatctggcttgaatatactgctaactgctcttggaagataccaaataccatgtttcacaaacgtatgtcttgactcttgactatcctcaattcctttgccacatccccttctccaacgagtagtgtttctctcttgatcttctctctctctgtgcttatatcccatttatttgcatcactcttcggattatcaaccttctcgggcatattcattcctttcaggtgttcttggctagattgccaccatgataaagcaaattcttagcaaattgccaaagaaggtgccaaaatctgactcatcagattctgcaaggagtgattctagcaataccactactt

SEQ ID NO: 110528 - DNA, 453 bp, Glycine max
ggaataataactaaagatttttccaaattacaaatcttcaatcaagttctatggagtacagatctaaaaagaattataattaaaagagacttgattgaagatttgtaatttggaaaaataactaaagatttttttttattagatatactaaagttatcttacaataacaacaaaagccttaatcccactaggtgagattggctacgttaaaaacccatttctcagggatattattcaccataaaaaccctttaataatttcttccaatgttcttggtttttctctgcctctttcataaggctagtgaccatgtgatctactctcatcattggtgccttcatttagctttctttgcacatgttcaaatttctgaagataatatctcaatggatataaaattagtatattaattcatgtttggaattatcactttatgattcatttttatttatt

SEQ ID NO: 110529 - DNA, 315 bp, Glycine max
tcgcccacgcgtccgaccacgcgtccgggaagagtctcgtcattttgtgagagagaaaaaaaaagcatttcaaatggcccacgggatcgagcccagaaacaaaaaataaagtaaaagtgagagaggagtttgatgttttaagcagggaatccaagtgagagtatgttgaattgatcgtggatgacaaaaaatggaaatcggaggcagaaaactgataagcggagaaacgatggccgctgaatcggtgacgcagtcagcacctccgacgtgatcaagaggaagaatcactttactcgaaaactcgagaataccctt

SEQ ID NO: 110530 - DNA, 365 bp, Glycine max
gcccaatgtcgttcaaagggcgagtatttatgatgaacaatttcgtgggtgaatgataatttgtaaatgggggcgttaatgtgatcctaatgcttccagtgggtgaatagttggtaaaaaagggaaaaatgaagatggcactagtggattttcttgcggaatgagtttcattatagtaatggtagtatgctatttttcctccatagaaccttaacaattttgtaatcatatgacatcaccccccttgggggtcgagttcttatccaacatttcatcatcccccttggaaccatgacctctcttgttggtaaagtcacggtgattcatttgattcataatctctcctaatccatggttattcatcg

SEQ ID NO: 110531 - DNA, 356 bp, Glycine max
cttattcgtccggtgcgacgattttggtttacgacttcagtaacaccgcaaaaccggcggtgccgacgagcccgcgacggcggaaacagcgtaagctgcggtggttgattcaatccatacaaaaactccttgaagaagcagtgagcttccactttttttcaaactctgtctccgacaacacatcatgaggagccacgtttctctctcctcgctattcttcttccctcccaataaaaccccttccttttgatcattctcaccttgtcattggaaccaaacgatggcatttggggttcgcaaaatgccgcgttttgtggtgtgcgctggccctaagaagatattatttggcaaagagt

SEQ ID NO: 110532 - DNA, 293 bp, Glycine max
cttacgcgtgggttgttttttagtcctttaaacattcttggcttctttgcagagctggaattttcactcttcaacccattgttttgatcccaaatcagaaaaaaataaaataaaattgggtttgatatgatccgtaagctgaaaggctgaaactagtatcattggagacaccctttttcatctcataatttgaggttgatcaacgagatcgtttcgttcagagttcagactaatcatggcgtgttccttgaacagtgttttctgtgttcctgacttgaatgagagcatgtttg

SEQ ID NO: 110533 - DNA, 411 bp, Glycine max
gttattgttaccactaacagtgacaatactaattctgcggattattatcaaccctgtcaaattagttactcggatagttgcatcacaagcccatctgggttgttccctcaagggctagattttcaatccatggatccaaacaccccgtggaacatgcaaagtggggactcctctgacagtttttggaacgatgaaagcatgttgttcttagagcagcaactcatgaatgacaacatgtgaaaacattgggaataggaaaataagacttagatacggctcttcttagtattgtgttttaattaaagttaaagttaacacaagttattgaagtgaaactttaattttaattgaataataatactgaaaacaagagttgtatttaagttttattcttttatgaattatgaatta

SEQ ID NO: 110534 - DNA, 432 bp, Glycine max
gtgtaacggtgctgccaacgtgatcgaagtggatcttcataagttgacgagggagttcctggtaaagctttgggtcgatgatatcaaaatgagaaaccccaggtggttttccgctacatatgctctccccaggagacctaaacgacgtcccgttttgaagcaaccccctatcagtcaatcgctcactgactttttcgatccacagtctccccaagaggccaaggtagcaccactgcttgccaggtctaacttgctaattacaagagatatcgagtgggcaaatcttgtactaggctttgaacagaaattgatggaagttggagtacttcacaggcaatggcatctttggaggagaatctatgatttgtacttggggaataagcaatttgctgtggttgagaatcctggcttatggaattggacattcacatt

SEQ ID NO: 110535 - DNA, 314 bp, Glycine max
ctgacgcgtggggctgtacatattgttgaaatcagtttatcttttaggctgtttggaagccatatcttcatgcaacgccttcttctctctactctctcctccacttcccattctcattgaggacattcgcgccgacgagacatggcccggcctccgcaaccacgaaatttctctcctccgactcttcgaaaccgtctgcgacgattgccacgtcgaaatcaacgaaaccggtaccaaattaaagtacaaaccgggaactattatgggtggcagacaacacagtccacacgattgcggcgtctcacggtccattg

SEQ ID NO: 110536 - DNA, 134 bp, Glycine max
tcataaatgaaaacatagaaactaggaattaagagcacaaaaatagtagcgtgtttgtttgtttattatttttccatatgtgatccaatatactggccccgagtattatttaacacgtacaatgtaacatttgg

SEQ ID NO: 110537 - DNA, 290 bp, Glycine max
gttagatgttaatgttcttttgctctacatggcagctttcaacattgaaaagtttcattatataattgtaaacctattctttgtgcaaaccttgttttctgtatagggcttctgattgaccaagagaatctgatggcgcctacatacaaatgagattgtcttacagcccagctgctcaatttttcctttttctggctcagtggactgattgtcaccatgctggagttttgggattgctgataatcctcatatataaggtatatgaagatgggaagacaaccatgttcatt

SEQ ID NO: 110538 - DNA, 111 bp, Glycine max
tctctacaagctccagcgcgaccttgagttggatcttgataaggctgcggagctggagcacgtgcttgccatgctgcatgacatgtttgctgaagagcttggtgccaagat

SEQ ID NO: 110539 - DNA, 332 bp, Glycine max
tttctctttcgttcgcccacgcgttcgagaatattcaaataaaacaaagatgctttcactatcatcccacgttattaccttagtttcttgcataacaagcgtaagcaaattaagagtaaaatagagactaaagaaatgagagtgaatgaaataaaaaaaacggaatatacgagaaataaagtaaagaatatgtattattgggatagatggaagaaaaaaagaagtggaaacaatttctatccacttgtttatatgagtgaaattaaaaagattacataaaaatttctttgattaccatacaaagtttactccattattttatccaacattaa

SEQ ID NO: 110540 - DNA, 355 bp, Glycine max
tctgaatggaattcttaaggtgaattaatttcataggttgcatgattaaactattgtgctaatggaacttcttatgatatttgcctgctagcttttatagtgacaaggaaatagtggattgcaaatgtgacaagtccaatttatgtgaattgcaaatgtctgattatcaatggcacaatgactttgatttttccgtctatctcggcttatagtggacactaccggccaacggatgacactctagacagtttcttatcatatctcaaggaaaatggcgtcaagcttgatgaagatgagttgcacaaggcaaatgaggactctgatatatatgaggagagcaatgttattgaaaaac

SEQ ID NO: 110541 - DNA, 280 bp, Glycine max
gttcttacgcgtccggcttgtttctgggtcttctcaagatttgtgcttctgcctggtggttcggatctaaagtacacagtacacacgaatccattattcaggaactatctgactccatcactagtcgaaatctaatggatcaaagctcccatggttatgcatatagggagggagcaaatgaggttgaacgaactctaaagatggtaactacaggggtaattgatagccaggctggcatggcatgaagaatcaggtgtctggtctagacccaactatgaca

SEQ ID NO: 110542 - DNA, 200 bp, Glycine max
acgcccacgcgttcgcacaaattggaacgatgttgttcgatcggttggccttctgctgttgaaagcacacaagtatatctcaaagaaaatatccaacagttatagaagagctgcgccaccaattttctctggccgatcttaagaaatcaaccaacaattttgacgaaaatggagtgattggatatggaagatttggtaaa

SEQ ID NO: 110543 - DNA, 364 bp, Glycine max
ccctcgcgttcgcttaatagtaacttctcttgtatttgacatcgattcattcgctagaaaattttcggccgaacaaagtgacttcactctaagtcgcttttcagaaatttttatggaaatggaactttcaagcatatttcttggtcgcttttctttttctgacttggttgaggtatggaatgcgttctctttcaaagtttatataatattattgtataatatgacattgtcgaggggttttcgcgaaatccggaaaatctgaatttgcgacttttttaattgaaactttacttcctttttacagttttctgaaaatctgttcatctattgctcacgttttatgttcaccccattttcgagcact

SEQ ID NO: 110544 - DNA, 484 bp, Glycine max
actgttttggcatcaccgaagagttgagggactttgtcaaaggaatcaccatcactacctttgaggattttccccttcaagatgatacggaattgtctgatgttcctgcagtttcaaatgttaggcaggacctaaccgagtggcaggaaaaacatgccagtcttgttctttctacagtcaaggagatttcaggattgaggtatgaactgtgtccacgagtcatgaaagagaggaagttttggagaatatattttatacttgtgaataatcacactgcaccctatgagaataagtacatggaagacgataaactaaaatcatgtgaacaagtaaaagatcacaaagtgatgatggaatccttaaacactgaattgatctccaatcaagaggtgcaagaagtgaaaaaggaggccaaaccttcgaattcatcaacagagcaagacttggatgtatttcttctgggagaaggaaacagtgatgatga

SEQ ID NO: 110545 - DNA, 261 bp, Glycine max
tcgcttacgcgtgggcggacgcgtgggatgttgttggtctgtggaattcccatatcgtgagagaagcaccatctgctggagccgaatagctgtgctctcctgaggccttctcttacgtgggcactatggatcgggacagagttattgttgctgaaccattggacggaccaattatgaaccactactgatctttggccagagaatccgtcatttgggagtcacttggaggctggcaagagattgaatccgatcctcaacact

SEQ ID NO: 110546 - DNA, 411 bp, Glycine max
tcggcttaaacaaaccttgttcgatcttccaatctgggcttctccgctcgaacttatgcaagggctatgtgatggtgatgatgattgaatttgaagctgctactgcattactctctttggtaatgaatttgaagaagcagaaagaaaggaaatgatggtctttacaccgtcaattttaatatatgtaagtgtaaactctgtagtagcacagtgatgtagtgtagattaggcatttggcagcgtggtaaatattcttagattgaattgtgttatcaacagtattaaacgttttaggctgaatgaatgatattgatgaatttataaggtggggaggctaagatggaatcatgtggttttgtataaaagttcattaacttctagaatctaatgtcattatgtgattgatttctt

SEQ ID NO: 110547 - DNA, 292 bp, Glycine max
gcatgcgcatgaacgtcgccggcagctcgacgccgacgataaaaatccttctctcgatgtggggcccaacggccgccctctcttctccgacgccccttccttctcccacctatcccgcaacgacgtctgcacctacttcaagctcacgaaggatgccctgaacaaggttttgccagagggactgccagtgggtatggtcaacgagtttcaggactccctgcgaacggctttgcttgatcgccagagcttcttggatcttcgagataacttcaggcgcgtggatgatccccca

SEQ ID NO: 110548 - DNA, 204 bp, Glycine max
ctttctctctcgctctttcttcaattccaagctttattcctcatgtctttcagaggcctcagccgggtaaacattcttcttggtttttatttttgtttctttgctccattgagctatttactttgtaagttttggttcttgaacgtacctttcgcgtgtgaatgtttgaattcaaaatcatgttttggatgaaaaggcttttga

SEQ ID NO: 110549 - DNA, 170 bp, Glycine max
acgcgttcgctgtcgcgtgggctatattggtaaaggggtgctgtgaattcttgaagttaaaactgattcatgggacgaaaattcaaattgttaccaagactaatctagtttgatgagtagagactagtgaggggatttctattgcaggagtgaaagatgggtgaagcatt

SEQ ID NO: 110550 - DNA, 365 bp, Glycine max
  unsure (1)..(365): unsure at all n locations
tcgggcatgtttgcatcttggaatagattggcaattttactttgtgatcaaattgtaatgtcataatgctgtattgttttgtcatttgcagtatgttgatagtgagattgtagttcaaggctaggcaggaagggtcccaccactgagttaataattttggattaacttttgtgctagttcatgagaatatgtaacatgcttaagtgcaattattttagtgtattctatattctcttttgatgcatcttgtccaaatcctctttaagttggcagatttttccctctatcgattatccaatcatagatgattcatattgaatacaagcatgcttaaagtgcaaatagagagagatattgnttttttt

SEQ ID NO: 110551 - DNA, 270 bp, Glycine max
gtttgctaattttacctccctttgtttattgttttaactaaggctcttaatcatgtggagatttattctctcgaggaagtcgcaccactttgctgttgcaattacattgcaatatgcactattgacaaaataaagtacccacaatcaggtaaacaggaaaaactcaattttaacactacttgttgtatcttcaggtttggaaaccccatctttcatgatcttatgctatgattctttaaaattgcatgtgttcgtattgcttctataacc

SEQ ID NO: 110552 - DNA, 373 bp, Glycine max
tatctctcaatctctcacagaaatggctctcaaggccgtccatgtcaccgacgtcccttccctggacctggtgaccgagaatgcctctctgtccctctgctcctcccgcttccccaacggggtggaaatgagtcggagtggcttcaagatgccaaagttcgtcgtgatcggacacagaggtaatggcatgaacgttctgcagtcttccgatcgaagaatgagagccatcaaggaaaataccatcttgtccttcaacaaagccgccactttcccgctcgatttcatcgaattcgacgttcagaaaaaagagaccgaaaaaaaaaagttaaagcaaaaatgcacgtgtggttttttgtaggtgacgagagatgac

SEQ ID NO: 110553 - DNA, 199 bp, Glycine max
catttgattcggtcgtgcactttcactggaccaacacctaacaatttgtgtgtgtttaattctttaccgcatgaatggagttggacggtgttctactaggaatgtgccaccatctccttgacatctatgccgtcgtcgacgacgctttcttgcaaaaatacggtatcaagtagaacgatgcgattctcgctgaggataa

SEQ ID NO: 110554 - DNA, 375 bp, Glycine max
gttggtcaatgagactagtcttcttcacttattgggagcaacaattgctcaagatgaagatattgataaaatgagcgtcttagtaaccgactgggccaatgggatctgcatagctgaaaatgaacgattcttctctcttctcactcatcgtgatatgcctgttcaaattgcatttcgtcttctcgttcaatctggcctccctcgtctctcctatttatgcagaattatgccaccatcatcaatcaacgctgccatccataatttcgattctcttattctcaaaacattatggaaattatttaaagtaagcaccaactcattatctgctgattctctctctactatgtctgcacaggttcatttaaaaatgaaaaa

SEQ ID NO: 110555 - DNA, 179 bp, Glycine max
cttacgcgttcgcaatgcttgagcagggcatcgaagtgttaatttcatttcaaaatgtccttgatttcattgtcatttgcttgtttagaaaaaagttggattgaagctggagtgtactgtggattgttagtagatccctggaatcctaataaaatgaataatatttaatattcatcttg

SEQ ID NO: 110556 - DNA, 477 bp, Glycine max
gtggcatatgttttccatcttctaatcctgaagcaaaacaagaaacaaaggaaagcatgtttcaagatgacttgtggggattggaaacatcctcttgtgagtcaactgcagacaaacctttgaagattagttgcattgaaatttctagttctccttccacttcatggagatgggaaaattaatatcaacagactggacaacttcatatgatgggaactaagatcctagttagctccattaatggatcggtggtagttaattattataagtaaatgttataaaaaatgactgatctctaatagcaagtctattagaaaactgttctatgctagaaactgcatgatgacaattatgcatagaaaatactacatttattagcagttatgtattacgatttaggagtacatgtgataggaggctggcccaagcataccactcacatgcctcttaggtttaaaaactatatttaatttggac

SEQ ID NO: 110557 - DNA, 324 bp, Glycine max
  unsure (1)..(324): unsure at all n locations
ttaattctcaagactgaatttaaagaatgctgaaatgaaaatgaataataatagaagaaacatagaaaatgtttagaaatttgacccacaagttggcttaccaaaagttgacttgccatatcaagaatttatatattgtactacatggtactttgttttgctttcttgtccccatattggcttggcttcataatgtcattcttgatgtcttcatctacattcagtatgtatccatctatcttgaattactcataagtnaaaagagagagagagagaatgggaaaatgtctttttttcttgatactaccttttctcctttctagc

SEQ ID NO: 110558 - DNA, 382 bp, Glycine max
tatatagggcattgcagggattgactattttgttaagatcccatggatacgttccaaatcttgtggatgttgctcatgcaaactgaatgaggtgggaggtattgtgagtatagccatcagttctttgcgatctggctcaccatccgaaagacccaatcaattccacaggccaaaatcaaatctttaaattctgggtctgttttgaaaatcaattctaaggcctttgaaataatgaaatggaaaaatcaccaagtctttcatcctgcatcggctttcgatcagaatcaggtatggtatatatcaaatgtcaattgcttagtagtcaaactggcaatatggcaacggttacttctacatgcccatgtctccgttattagcattt

SEQ ID NO: 110559 - DNA, 147 bp, Glycine max
tcttgcgttcacgcggccggttttggattgttgataaattgtatccattcatgtagctagtaatacctaggcctagtgattatttgcacaattaggaacatatataatgaataatacagtggtgggtctgtcatattcttagttgac

SEQ ID NO: 110560 - DNA, 419 bp, Glycine max
gtggaaacggagtcgccggcgtcggctccggctccggcgactgccccgtcggggcggcggctgagcgtgcaggaccggatcaacctcttcgagaacaagcagaaggagaattccggaggcagggcgccggagctccggcggctctcctccgacgtgctgcggcggtggagcagcgccagcgacatgagcatcgacgtcggcagcggtgataagaaggattccgacagccccttacccacgccagcatcctctgtttctcaaaccaagtccgttgtcgtttctgaagacaaggatcaaaacgacaacaaattggagaaatttgcgaaaaccgatcaagggtcttctcaggagacagggaaagtttcggtttttgatgaggcgaagaacggggggtttaaggatcaggtgggtagtggtgg

SEQ ID NO: 110561 - DNA, 284 bp, Glycine max
attttaccaccacccactcactcacttccccaaaaacacatgctctggcacatccctatatatctttacaatctgcatcatcatcatcaccaccaactccaactctccaaaacttgccaccacaaccttgctatatattccttcctccactctcttactttacttcttctgctatctttctgagagacctcacaaacccacaaatatgatcaccttaacagacttctaccatgtcatgactgcaatggggccactctatgtggccatgatactagcctatggct

SEQ ID NO: 110562 - DNA, 370 bp, Glycine max
cggacgcgtgggttcactttctttacaatctccaaagattattattcactaacacataagccttatctatactagttcctcttccgattaatctgtgcagcttgaatcttctccgccacgtgtcaagcgttcagcgcaagaggttaccagacgcgatagcaggaagcttctcggagaaaccaaattaataggtggtgagtctcttctcctctcagaactccttcgtgctcaaacctgcattaacaggctcaatgctgaaaagcttctctggaagcgtcgagaactcaagaataatcaatcaatgctagaggacttaaaggataagttagccagggaaaggacaagtagggagagaatggaatcaatgaat

SEQ ID NO: 110563 - DNA, 337 bp, Glycine max
gttagaaactctggagagaggggttcatgaatgctttattagggttctcatatttgcttcgtttcatcctcttctactcctgaaatcactccttttccttctcttttctctcttctctttcttaatagtcctcgggatccgatctctctcttctcttgtgggttttttcttttttgatttggaactctcttcttgtggatagctagcaattactactacataagacgcagttggtgaaagcaaagctgtttgaggacaaagaaggaggagattgagttcaattcccgaggaaaacatttactactaactttttctactttgcttttcttgtcttctg

SEQ ID NO: 110564 - DNA, 279 bp, Glycine max
ggttttatttacctctttttctgttgtgtgtctgacgtttcaacaacctgcataagaagctgaagctatgatgggtagacttgcaccattatcagaagaacccatcaatgaagaaaacgaaggctacaacaatagtaactcaaagaaaagccttcagtcatggaggaactggaattggatcaagactcatttttcccttgcctttaacaaaaagtccaacctcaagatcctccttagtgtcttgggttgccctttatttcctgtgcctgtccaccccat

SEQ ID NO: 110565 - DNA, 159 bp, Glycine max
tttccactgtgttcaacacaaatacagagtactcccactctgccactcttcagatccgtgcttgtggctaaatcgccatggccatgacgattagggttttcctcatccttctactctttctctcatctactcatctcagttactcgctttacgaagatc

SEQ ID NO: 110566 - DNA, 230 bp, Glycine max
tttttcttatacctaggaatgagaggttcagagagcaattgatgtttttctaaagtattatgatattccaagacaaattggctgccatttccactaattattttttttatatagagttctatgcatcaccttcaaatagaaactccaattctccaaatatcatgtgaaatatttatcaattcatgagatattgctttttaggtctaacacccctaattacacattacact

SEQ ID NO: 110567 - DNA, 237 bp, Glycine max
ttcccactcgtacgcggacgcgtgggcggacgcgtgggcttctcaagccaccgaagcctcactttttgaaattacttgcatagatagataatcatggctatgatgaaacgtgctgcttcctctgcgcttcgctctcttattgcctcatcctgcaccttcaccagaaaccttcatgcctcaggtgaaaagaacaagattgcgggggtgttctacaaagggaatgaatatgctaaattg

SEQ ID NO: 110568 - DNA, 176 bp, Glycine max
ttttccacgcgtccgtcaactatcaacaaccagatgaaagcctaagagtgatacattggtgaaggttcatttatagcctagttgtcttgaattgttttcatagatcatttgcttagatacagtttgttaaatttggtattcattcatcataagtcaaaaccctcatggtttgaatc

SEQ ID NO: 110569 - DNA, 110 bp, Glycine max
tttcgttttttatgtacaaacacatcaagcaaactgaatgttgcttgtaaaagtaaaattaggtacttatttgcacggggcatgtaaaattggcttccgttcttttctgt

SEQ ID NO: 110570 - DNA, 152 bp, Glycine max
attaagagatcatgtattgctactgtaactactatgttatagcctgctgtttactaatgcatcattctagttagtgcgacgcttgtaagagtaactgacaccgtttcttcacgtgtgactattaattttgtcgtctcagcttttaccctacc

SEQ ID NO: 110571 - DNA, 401 bp, Glycine max
attagtcaatagtcataaagacatatacataagagaaacagtgaatgctagtgatataaagagggaaaagagaaacaaataaaacaaagcaactttagcaagttaaagaaaccatgagccacctcatttccctctaccactccctctcggacgaggaaatcatcaagcttcgaaaagaggtgatcaaatccaaaggggtaacatacttgaattcccaacatgaatgcttccttctcaacctcgccgcagcagagcgccttgaggagcttgacacagcagccgacactgtctcgcggctcggccggaaatgctccgatccgagcctcagcagcttcgaccttgtctacgccgacctcaagcttggcctcatcgaccttcgaaagctgagttacggtactcgc

SEQ ID NO: 110572 - DNA, 386 bp, Glycine max
ctcacgcgtccgtgtatttgtatttgtttgactggtctttgctgctctctctctctgtctgttctttctttgaagagggagagagagaaagggtcaccggccgcccccgccaattgaaccctcctccctctttcctttctacaataaaagtcaattcccagagccaccggcccaaacggtaacccgtccctcctcttcttctacgattatatccacattttctctctctctctctaccctctctccctctctctcaaatttcaatcttcttttcttgatttgttcatctttggtctgaattctcttctgggtattcgagattttcggaaaaggtttattttttattgaattgaattagttctttggccatgtctacgtccgacgct

SEQ ID NO: 110573 - DNA, 275 bp, Glycine max
tttatcctccattgtgagaaccatgtgccctacttcatctgtgggttcaagaccacagcatgctgcatcaaggttgagaaccggaactccacgaagtccaggcattcctacctctgaaaggtttggcatgataagagcacctactcctctattcatggcaccagctgtgagaatccgatcagtggtcccggtctgctcagctcctccaaggagatccatggcagaggtgtcccaaagcaaggaaaaagaagatttgaagcctgaagacaaagagg

SEQ ID NO: 110574 - DNA, 423 bp, Glycine max
cttctcttctctttctctttctcttctcttctgtcgaagaagaagaagcagaagtagttacagaaacatgctggagaatcttcaggctcctccgccaacggaatcggccccagtggtgaagcgctatgctcctcccaaccagaggaatcgttctgccaacaggcgcaaatcatctgatcggcttgatcggacaaacagtatcgggaatgacttagaaaagaatcaagttgcttattcaagaagtgttcacattccagatcacggagatgctggtagcagtaatcttcttaatgagaatcactattcaagattaatagctttagaagggtgtagttgtagtgcagctgcccagctgcttaatgatcgtaagtatatcccaaactttgcttgagattacttgcatatattgagcaattacatatt

SEQ ID NO: 110575 - DNA, 234 bp, Glycine max
cccacgcgtccgagtggcttcatcacccccatttttctgtggatctccacctagcagggcttcaaaccctgtgatccaagatgagcaatttgccctccagatctcttggggagaatgatgtccagaagctcagccccaagagatctggagggcaagtggcttcatcacccccatttttctgtggatctccacctagcagggcttcaaaccctgtgatccaagatgagcaatttg

SEQ ID NO: 110576 - DNA, 128 bp, Glycine max
cctttgcgtctgttcgtctggccttgggattggcgtaggaacaccagccaccacactgcttagaccagggcctatatctgtctcgagagatcgagagagaggaggagaataaagcgactaacattacg

SEQ ID NO: 110577 - DNA, 246 bp, Glycine max
aatttccagaggggatggtcagggtaaagaacttgtactgcatataccgtttgaacaatggtgtgcaccaaattctgtttgaacaatgttatccagcatgtcctgtatgaacaatgttgtccaggaccaggatgctccgttcaaactctcaaatcattgcctgttttagtatgcatgtaatagtaaaccttgatgtaatgtgcacggtataccgtatatagtgaatggaattgggtactacacttg

SEQ ID NO: 110578 - DNA, 264 bp, Glycine max
gtttttaacagtggaccgtcatcatcaacttatgctggttctattcaggctacacagagaactgctcatggacaatttcctgctggttcatcgaggaacacacgtgacaatgtaagaattgttcactctgcatctgctccaaatctcatggagaacaattctgttgaagtttcaatttctgattttcctccagtttctgctgcacaagtaagtaagttacctgccagcagccagtcttcattgaatgtggaaaatgttcaatcc

SEQ ID NO: 110579 - DNA, 294 bp, Glycine max
gtacttgtttgaaagctttccaatgagccaaaatggacctattcactgtctgacgacaaccaatgattgtcctaaaacctttaactctttccatataaattgtggtggtgaaagggagctaagtagtgaaggtatagtatatgatccagatttagatccatcaggagcagcaacgtctaaaatcatgggttcaaattgggcatttagtaacaccggtcacttcttggatgcccaaaaacctgtatcagaaacctatatgcagcaacaaaataaaaccgggctttctaaactata

SEQ ID NO: 110580 - DNA, 410 bp, Glycine max
ttcttcgaatctctctgaaacttttctcttctctttgattcttctctatcaggtataattcttcaccctctcttctttgatttctcctaaggaataaggaaagaaaagaagctcttattttctatttcgtgagaataactgtagtcaggtttgtgaattaatttcataatcggtgccttttgcgaattaatttggtaatcggtgattttattcggtttaatcggtttctagttcgccgatctaaaagtgtttgatgagttttagatggtttgaccttttttttttttctttcaatgaattttgagatttgcgttgttgaatttggctgctgttgtttgaaattttaacttttaacttatagatctggacatgcttatgactgagattgaaggttggattttattatttta

SEQ ID NO: 110581 - DNA, 145 bp, Glycine max
gtttatgtccaaatagaaacttgaaatttaccataggattgactgatgaattcagttattcttttgttgtatttgcagggaaaaaggttcttctggaagaatctttcgatatttcaataatccgtagcatgtgtgcttgttttgg

SEQ ID NO: 110582 - DNA, 251 bp, Glycine max
tcgcataaacccattcacttttccacaagccttagttcttctcatttattctctttttcaaaactctctctttttcaaaatactttcactctctctaaccttccagttctcactaaacctcgtgaagctcgtgatggacaccaagataggttcactagacgcgcccaagcccaacagcaacgacgtcgtatcatgcaacctcaccagcagcgccgccatccagccctgcttgccggcgacggtgatcaacg

SEQ ID NO: 110583 - DNA, 470 bp, Glycine max
atttccctattaaatccaattggggattttttttttctagaagaggattgaaagtgaaaaaaaggaaataacaaaatgaagaatattcctctgattctaatgggttgtggaggagttggtcgtcaacttctccaacacattgtctcgtgtcgttctcttcactctacacaggggctgtgcttgagagttgtaggagtcggtgatagtaaatctttggtggttacggaggatttgctgcatgaggggttgaaggatggcttcttgttagaactttgccgggtcaagagtgtcggcgaatctctattaaaacttcttgattttgggaaatgccaggcatttgtgcatccggagtcacaaggaaagattctagagattgcatttcaacttggtaaaaagacaggtttggtatttgtagattgctctgctagctctgacactgctgcggtgctaaagcaagcgattgatatggg

SEQ ID NO: 110584 - DNA, 135 bp, Glycine max
tttttttattattcatactcattttttgttgtcatcttatccacttgtattgtcatcttaaatagatgagacgattctgaaaagggaaaaaaaatgattttttgggttatacaattgagtgtccccgtatatttc

SEQ ID NO: 110585 - DNA, 433 bp, Glycine max
tcggggtgaatcaccaacatgtctaagcaagttgccagtagcactatgccacaggagaagctcctgctgaacccatttgaagtcagtgacgatcagatcttggagagaatatacataacccatttccattgtgttgagaagtatgacgttggagttctttatagtgttgcttcaaatgttatcaaacactcaattgaaattgctgacatgattatcaaggatggccaacaaattgaacaagtcagagaagaaacggatccattaacctctttccaacgactccctgccatgaagcgaattgcttgccagatgatgtgcactgctcgcggcgagcaatatgcgcatcaaacaacaatgttgatacttgaacagctgagagattattcctgggatgccaaagcagtgatagtactagcagcatttgctctggagt

SEQ ID NO: 110586 - DNA, 395 bp, Glycine max
  unsure (1)..(395): unsure at all n locations
cccacgcgtccgcccacgcgtccggaaaaaggaggaaaaggtggtggtgggcgtgccagtgccagtgtattacggtggagaaaatgaataccaaaggggaatcatccctcctaacgccgtgtttggagatccaaagggcatccccatccagcaaaccatttacagggacactcctgctcctttcaactgcccttactgcgctcataccgctctcactaccgtcaggttatgcttattctctttaatttcaattcaaaccatcttatctcataacaatttaccggattcaatttccggtcaaaatcgctcttcttcttcttattattattagggntaaacaattttttgctcattatgttatgattttgttttcgtccctttttttttttttttta

SEQ ID NO: 110587 - DNA, 434 bp, Glycine max
tttccgattttcgtcttctactactcacacctctcttttctctcccactttttcttcctcctcaatttctccgttttttttttctttttctttgaaggtttcgttttgcaggtcgcttcaatggagaaatcctcctcttcgctcaagaagaaacgttctaagaaattatcgaaggtcaaggcaagcagtacaattaagaagagtaggaaaagtaaatccaagaaggttcgccgccgggaggtctctctttccagttctgactatgaggattcaaaaaaattggacacattggcttcctctagttctgaagatagctacagaagaaaaagggataggtctcgcacaagaaaagaagtgaaaggtcttaagaggaaggctcggggacgatcttacagcagtgacagcagtgaggactcgcattatgctaggaagag

SEQ ID NO: 110588 - DNA, 414 bp, Glycine max
gcataaactgtggaggccattgaagagaccgttggtgctgtttcttctaccgttcagcctcaagctgaagagaaagcttcagaaccagaagccaccaaagaagaatcttcaccgccacttccacctgaagaggcttccatttgggggataccgctgcttgcagacgagaggagcgatgtgattctgcttaagtttctgcgcgcgagagagttcaaggtgaaggaggcattcaccatgctgaagaacacgatccagtggaggaaggagtttgggatggaggagctgatggaagagaagctcggggatgagttggagaaggtggtgttcatgcacggctttgacaaggagggtcaccctgtgtgttacaacatatatgaggagttccagaacaaggagttgtacaagaagactttt

SEQ ID NO: 110589 - DNA, 430 bp, Glycine max
tggttttagtttcatctccttccgttaggaaggaagaagggatcagttctacatctgatattgatggttctgaaggcctttcgatgtctctgaatgttcatcaattaataactgtcccagatgctgtcgagtcttcatcgtcccaagtgaaagaggaaaaaaagattggggtatcttctgacagtaaattagttgtgaggtctgtatctgaaaatgacatggaaggatctggtcttttgccagaaaaccctgtgctggaaatcaataaaatgtcatcagattcctcaacgattgttagccactctgtggagggtcaagtgtcatttgtgaaagaagataattcagaaattaaaattggtgatcaaatggatgcttctcatgtctctgagaatgatttagaaaggattacttctaaatgcatggatgtacc

SEQ ID NO: 110590 - DNA, 205 bp, Glycine max
aaggaggtgggatccaatgccttaggggaagccagttaacaatccaaggttaatcagttatgatactgttaaatacaggaattgggtacctaatgaaaaggacagaaaggtggcagtggaatacaaaaaaagcaaggatgggttgaggaatactaaattttgttcattactgcaaagattatttaataaggcttttgaaaggcca

SEQ ID NO: 110591 - DNA, 435 bp, Glycine max
ccattccacaccccacactcttctcctctatttaacaacgcccaaaaaaaattaaaaaaaattagggttttcaatttggggaaatattctggagagagtgtgtagaaaatatggttgtcgatgatatgacgctgtgcatcatcgtcggctatggaggttcctcttcttctcgtttctccgatgcttatcccaaaaggaagggaaggctatcatcctttgatgaacagatacataacaagtggtccagttaagagttaatttatttttggaaagggggtggccgtggctgtaaatttcatattaaatagtccttttactattactttatatagttaatgactttgtgacgaatttataactattctcattttattttgatttgtatatttgatctgcttaaccatctttttttttttatatctatcactaaatata

SEQ ID NO: 110592 - DNA, 448 bp, Glycine max
aaacaatgaccatttctattgcctcatgacagaaatcaacaactttgtcaattctgattctgactgttaatatactattagtactaaaacgactacgactgcaactactacttaaccttaccttaccttaccttacctacaggaggcatacataactaaagcttgacattttacttgggttatcttttttttttcccctcacttttgtatcttgtcttttctttgtagtaaggtgtgtagttataagattgtgtagcattacttgttattgtcataacatctatggtggccaatttgagagttctgtgacctggggactactgcttcttgttctctctgtttgtgtctcttggaaggtagcccctagcaccagcttcggcagtaccagaactcggttcatttggggggtttggtcgaaccaccgtatacaacgcttcccccccccctt

SEQ ID NO: 110593 - DNA, 413 bp, Glycine max
cccacgcgtccggtgagaacaagacattgcacttgtcatcatcatcaagctctacatttctttatcatcagtcaacagacacgcatgcattcatttgttcagagcaagcagttttttatgaggaccgaataaaagattcaaatttctatgacgtctatcaaatcattgagatggctgatgagaaaaaagagtggattgtctgatgggggtaaatcaagtttcaagatgaaacatctgccttttctggcagttttgtgcacgataatgttattcattgtgtatagaaccacaaagtatcagtatcaccaagaagagattgacaaaaaatggagtttctggggacaaccaaaggtgtatccttcaacttatgggaagttgaaaggctcgccacgaggtataatacatgataattc

SEQ ID NO: 110594 - DNA, 390 bp, Glycine max
gctactgtttgtttgcgcttttgttccctctcacactgttctttttgtttttctaggcactactacagttctgatactgtcttctgctttgtccaattattgccattttaaacagtgatgaagcaagggtcagcaaacaaccaacagctcttgtgggcaagagtggttatgcgcaaatggcttaacatggccagtaacgagcctgattacaccgctgaccctgatgatgataatgaggaggaccctgaaagtgactcagataatgaagagtggggcaaacggacacggtttggggacagcagagaggaacaagctccaattgagtcaaatgaatttcttccaaggctaaggaggcaaaagtcattaacttctaggtctcagtatataaac

SEQ ID NO: 110595 - DNA, 383 bp, Glycine max
cccacgcgttttaactaactacaacacagttataatattttaaccattatcttccatgaataaaacaaagaaatatctataggaatatgacattttcttcctgtgttgcaggtgtactagtggtatagtgactggaatgagtgatttggatccctataaatggcccaagtcaaaatggaggtgcttgatggtacatttgctattttttctttacaaactacgcagaatgttttgaccttatattgtacatttagcatttgctctggattttatcttcaccgactttgccattgaagatatgttatgcttcatcaaccttttattgaagatgcattttcatgtcagatgggatgaggatattgagattagtcatcaagatagag

SEQ ID NO: 110596 - DNA, 128 bp, Glycine max
atcaattgttccataaattccgaactctgttgtctaatttgggaaaggcaagtgccatgtaggatatcgtatgctgatctttagtgtttgatgtatccaatgcaagtgatttcacattcccccccctt

SEQ ID NO: 110597 - DNA, 411 bp, Glycine max
gtttttcactttgctgctatttctgtaaaaaataacgtcctgttgatgagcttaggtgatgctaaacaatgctacttggttttgggtgtggttatatatttacactgaagtttttgtatgtatctgaaaaaagactatttcactacaactttaatctgtacttttgtctgcagacacccaactcttcatgggattcccagagaaaatagaatgctgcatatgagtcttacagaagctagtaactatcaaaagaacatgcttgctcttgattcagaaagcaaacctttggatctgccaagctctattgatgatcttacacaaaatttgggcccgacaatggagggcttgagggacgcacttgatgaagctcctaaggaccaaccttgtgaagctcccacacaggtgcacctt

SEQ ID NO: 110598 - DNA, 363 bp, Glycine max
gtcagatgcagtttaagatgagaatgagacatctatcatgttagctgtctctgtctgcacttcccaattacaactctctgtcacatgcattcttacatacaacaaaagtctctaatcattgcttatgggaaacataactttcttccccaaccctcgtcgtcatggagaatagtaacatccagaagcacaatctggatggtactctacaactcggttttgcttgaatcagtactcatctgatgatcactaagcttccaaaagagaggtggaggaaaaaggcttaaatgtgaacgaggcaggcttttggtacggtagaagaattgggtcaaagaagatgggatctgaaacgaggacccctctgat

SEQ ID NO: 110599 - DNA, 365 bp, Glycine max
gttataagacatcaaattgccttctcttcctgttcctctccctcaccctctctctctctctctccgccgcattacaactccaaacccaaaccttgcccctccactccctcccccacccacctgcaatctcatggcccgaatccgaatccgaatccgaacccgacccagaagaagaagctctctcacttcacctccaccacatagacgctctctcctccaacaaaaccccggagcagctcttccagctcaggctccaacgcgacgccaagagagttgaaggtgtagtcgcactcgcagctctgaaccaaagccacgctcgcagatccggctccagtttcagtagctccatcatttcgggcttagca

SEQ ID NO: 110600 - DNA, 388 bp, Glycine max
ctttcaggctctgaaccaggacagaactggcgatatgtcaggtttgggaaagggacacttttctagggctggtttggaatcaaaccatctgctgctgcacaccctccaatcttctgcctgctgccagattgtggaatgtaaaccatctttttgatggtgaggcacgtgaacttacttaaaagggttgacaaccgcacggttgcacagctacttgagagtatactattcataattgatgctgtgcttcccatgcttgggaagttgcctccgagtattgttggggaacttgagcaagatttgaaacagatgattgtccggcattctttcttgacagttgtccatgcctgtatcaaatgcctctgctctgtgagtaagatgtctggaaaag

SEQ ID NO: 110601 - DNA, 336 bp, Glycine max
cccaactcgcccttgactcacatccttgtccgattccgcgaacgagtcgagtgaatcgggttggtaagatctattctgtttcttcgtcatggcaaccggacaactattctcgcgtactacacaggctttgttttacaactacaagcaacttcccatccagcggatgcttgattttgacttcctttgcggcagggaaacaccatcagttgctggaataattaaccctggttctgagggatttcaaaaacttttttttggtcaggaggaaattgccatcccagtgcatgctacgtatgtgttgctcattcatttctgtactcaaaatttcctttttct

SEQ ID NO: 110602 - DNA, 103 bp, Glycine max
acggaatttacaaagattttcataagcaaagcaagaatcatgaattccaatatttgcaattggaaacaaaatcaggttctttccacagaggaagcaaaggggg

SEQ ID NO: 110603 - DNA, 258 bp, Glycine max
ctaaatcgtacgtagactgaccaacttgtatgtatcattactgtggctactacacaaattaatgagtctcaatattgcgtttgcaaattgcattatctcagaaatcaagctagatgggttctctgtcccgaccaaactcactctattttcgaaccaaaggacccggacttgcccgtaaagtaccaagtgaggttttggcttttcagcgatacaattcaaatggttcatttctctcatcagaacagcttgaacttgaag

SEQ ID NO: 110604 - DNA, 471 bp, Glycine max
cccacgcgtccgcaaacttggtgaaaagtttgatactttcctgcttttcaaccacacccatcttctccttttcattgattcgcacttgacgttttgcctcttcacacgttctatgttctgaatcttctcaccattcaccggtatattgattagttctgtgtttttctcatccgtgcgttgatgtgtttgtgttgcttggaaaaggttggaaattgaggcagtgaatgatttgtttagcacagcaatgtttattgttcagagtagtggggttcatgcattttctcaaaaccttctattgggtttctctgattggcttttcatgagtgaattatgaagatgagactgttttgagttattgcggatgtttgtactttgtaccacctgaaagcttctctctcttttggatcaccatgaaagcagtttacacattttgctgacttgaccttttcatatcactcttaaaataattca

SEQ ID NO: 110605 - DNA, 250 bp, Glycine max
cggtcgcgtgggttttcagaagagtaaaatcttcaaattagtttagttcacgagattgtacaggatagatattatagtctgatattttaaactcttatatttagtgtcttgtataacgtcatttgtaacggatgttcaacttgcaacattagtccgaaaacctgccagttgaactcattgttaggaaatctaacaattacaattttcagggtacatagaatattcatgaattatattttattatctcgtt

SEQ ID NO: 110606 - DNA, 268 bp, Glycine max
atattatctcttcaagttgatagatattttgcttgcttctagttgaattgtatcatatcaaatgtgatccaaatgccatatccaccacacaatcactacccaaataaactttttttttagggtgaaaactaaaccattttttttttgtttcttaattaatatattagacagagaaggttaaaccactcatgttcacactctatattatataaagggtccagcttataaattgcattgtttgttttgatttgatgtctgctgctacaaa

SEQ ID NO: 110607 - DNA, 141 bp, Glycine max
cccacgcgttcgaccacgcgtccgcccacgcgtgcggtagcatggaagaaagtctagtgaagaaacatgagcaagaaagagtatacatggggagggtatagcgaagaaatgagaaggatatgccatatagcagggtctatg

SEQ ID NO: 110608 - DNA, 218 bp, Glycine max
tttcgccctttcgtccgcccacgcgttcgcatgctgcaggggtggaaattaaagctgcaaacaccattgctcgccataagttggtggataggttcaattttgagataagttatagtgacagcgtgttgcggattccaccgctgtatgttaagaacactctatctgttttttcttggagactctattgctcaatgttctcgagggttgaaaggagacat

SEQ ID NO: 110609 - DNA, 217 bp, Glycine max
cccacgcgtccgctcacctcacaacagaagcagcaatgaagaagaagatgatggcaagcaccgccatctccgacgacttcgccgcgctcttcctcttctcctccgtccactacttgtacctccccggcgaccgtcctcgcgatttccaaattggagaccccctctatgtcaaagcgaacaagttatcatccaccaagactcagcttacatatgacta

SEQ ID NO: 110610 - DNA, 166 bp, Glycine max
gctacaactcaaggaacgaattgagccaacacccttacactcgatattataattgatacgctacttgaatcaggaaaatgcctaaggaaaaagcccttgttaatgattttgtgaatgagcttaagaaactaattgaaagacgtaaagccacagctaaggacacagc

SEQ ID NO: 110611 - DNA, 299 bp, Glycine max
tcgccctcgcgtccggctggcacctagagccagtgttggcggtcaaattggtccctttgatttccaaaaaaggcccaatattggtgcttacttggatgacaaaaaattacattatcagaaaactggtgctaatttgaattctaataaagatgggctattacaccctggttattttggacacccttcaaatttgggttttgtaccccagaattcaagttccccactttgtagaccagttttatcatgatacccagaaagttagtcttggccttctaggtggaaggaatgaaatgaaacgc

SEQ ID NO: 110612 - DNA, 374 bp, Glycine max
atgaacaatctttatgtcaatagggaaccgttttcaatatcacaggcttttcaattatctctgtgttggactgcagcttctttgctgaaacacaaacttgaccccattgcttctcttatacaagatttgaactttgagtgtaagaaagaagaggtggactacatttgttctatgttgtgttgtttgaagaaaatattcttatatcgcacaggaaattatcatgataccggctttacaaaagcatctggaccatcaaacagggcatattcctgtacaggagttgcacgagaggttgaattgttcaaaaaagatatgtccaaaagtattaaagaaattcagaagaagtgtgaaaagaagctgaagaagctacatat

SEQ ID NO: 110613 - DNA, 390 bp, Glycine max
gttagtttgagatttaggacttgatggatacggaagaaggagctcatggaaagggaacacaggtggtatctttgattgagaaggccaccaactccaccgcgccggaggtcgatccccgcctcctaaaggccatcaagacggtggttcgctattccgattcggagctccgcctcgcaacccaaacccttatggatctcatgaagcgtgaccactctcagattacaactgtcatctccagcacaaagtcctcaggttgaccttgacagatatgtgttgcaggtcaggtaccttgcgcttctaataattgacgagctcttcatgcgttcaaagctttttagggcccttgttgttgagaacttggatcagttgctgagtttgagtgtcgggttc

SEQ ID NO: 110614 - DNA, 395 bp, Glycine max
cttcttcttcttcatctctttctctctctgaagcaagtgtgcagagcaattaataaatctagttttgggtcaccccgtgaccgtgatgatcataaagttattgtcttttgagtgatgggtttgtgttcttcggtccccagaaacgctaacgcatacatgaagctcaaactctcgttcggttccaaatctgagaaactggtgattcctccatcacccatcaagggacaacaaccccaaaatgggtggtcaacgaccaccttcaccgaccatggttgcaaagaggaagccttttttgattccaaggcctggttagactcggattgtgaagatgatttctatagtgtcaatggtgactttacaccatgtggagggaccacaccaattcaccacacttt

SEQ ID NO: 110615 - DNA, 388 bp, Glycine max
cataaaatgaattcccaattgctttgcatctttctgctggtcatttgcaccgtttccattggcacactgacacaagcaaagccaattccggaagaagctgcggcaaccgaaaccaaagcggacgaaggcaaaaaagaggagccgaaaaaggaagaagccgaagcgaaaaaggaagaagcgacgaaggaggagccgaaaaaggaagaaacaaagaaaggagagggcaaaacggaagaagctaagaaagatgaagccaaaaaggaggagccgaaaacggaagaggccaaaaaggaagaagcaaagcccagtgccccggccgtcttaactgaagctgccgataatgtgaacaaagcggtcgatgacttaagcgttaaacaggcaaaagcat

SEQ ID NO: 110616 - DNA, 193 bp, Glycine max
cttcccctttggactcattttcataaccgggtttctgtttgtctttgtgttttttttttaaaactcaattaactgtgtactcgtgttgatccttttgttgtgattcaaaacagtgatgttgccgctcttttagttctgccgattatgattttatgatcatgatcatgttgatggcgttctaaagtcttcaatt

SEQ ID NO: 110617 - DNA, 289 bp, Glycine max
atttattcgatttagctttcccccaaatcccaaaccctttctttcgcttagatcccaatccaattgggttatggacatggcttccagtccccgcaccgttgaagagatcttcaaggattacggcgccagaagaactgccgttattcgcgctctcactcacgacgttgatgaattttacggcctctgtgatccaggtaaaagggtggtaaattggatctggttttatttctcggctcaattttctagtttcgctttgttttgcaacatttgattgtttttttctttctct

SEQ ID NO: 110618 - DNA, 405 bp, Glycine max
  unsure (1)..(405): unsure at all n locations
aatggatagagtgattgttctaagttgaagaccctcagatatctgcacttttgtacttgaatacaaggacatgcctagagaatggagatagaaagcttgctaaaatacaaatgacattgcttattttctcctttggtattagtggcttgaacttttgatgtaattgcttttatgcaaattttttgaatagcagcaatttggatggagtgaaatacaccactttaggttatctctggctttggtgaatcgtatgaatggaagcctgatagctctgctgtaagagaaagtgttagcgacacactccctaacacacttnctattattattagtgaaaatttattggaaattacaaagtttgagtgaaactcattaaatagttaagacttaccaataaatttcagtcac

SEQ ID NO: 110619 - DNA, 308 bp, Glycine max
atgcaatgcatatccttgttttacttcaagagtcattttaagatttgtacaataatcagcaaaagttgaggagctaagagaactcttcttaacatgacaatcctctatgtgttgctctttctgggactcttgtgggctgaaattcatgtcatttcttcattcactgatactcgagacgttgttgcacttagatcattaaaagatgcatggcaacatacaccgcccagctgggacaaatcagatgacccgtgtggagcaccatgggaaggagtgacctgcaacaaatcaagggttacttcattgggact

SEQ ID NO: 110620 - DNA, 426 bp, Glycine max
ctcagctttcatggagtgtaactggtcatctacttgagtttttgccacccttttgtgccttgcaaatagggttttatgctctaaatttggttgtgatgctttttactttccacccttttcttgtttttttcaaaaggattgttgttttgggctgttttggttttgtgggtcaagctgttgtttcctctgttatgccgtgtgtctgatgaattgatgtataaagtctggtggcctctgatgtgatccccttttgatgtcaaataccagaagagaatgaaactatgattgattgacgttgttttgatttaacaaaagaattagtggaaaatgggaggttgctgttgttctgccagaaaacctcatctgcaaggggcaccagtgtattactattgcccaccaacttttgaagagcgtgagtctttaaca

SEQ ID NO: 110621 - DNA, 312 bp, Glycine max
gagaaactcccctttccttccatttccctctcgatgccttcgcctgtgctttcgatcctttgctagaagagaaccttattccttgctctctctctctctctctctctctgtctccctacaaagttccctgccttttcttccattgtcactctctccctaaccgccggatgcactttggtttcgcaaactaattcgttggctaaattactccaatcgtgaactggttctgctggaatatcggacatggccaaaggtcgcaggggaagacacacgattgcttctcgtcaattcagagggactgcatacccactg

SEQ ID NO: 110622 - DNA, 436 bp, Glycine max
ccctcgcgtccgcccacgcgtccggttcctctcattgacctggaaacttctggaaacggcatggagctgcaagtagaaacatctcaggtccactgttcagaaggagaattaccatactcttgtcaagtagaagatggctggtcaaagacaaatagttactcaaatgtgtattcagtgaaaaaattgaacaaagaggatttttccaaacaatcaggcaccagaaataatgcaccaaaccttgtggcaaggttgatggggatagacaccatgccattaccattagacactaaatctgttgttccattggatgaaagcaaacatggaaatatggagaggaagttttcaaaaaacggaatgaatccaaggggttctgttggcaggggttcctccaactttaattcttctagccatatggtatttgattcattttatcgag

SEQ ID NO: 110623 - DNA, 285 bp, Glycine max
aagttatcattttagtaggcccagcctttggtcacgaggttttgacggaatgccataccatatgatatagcatatctcttcaaatgcaattcctttggtcagaatttgcccgttattattagtgtgaaaaaatgcgtcaactctgtagatgccaacatttattttcacagatgcttctctatttatatactgctctccattctcttttgtaaaaaaattctcagtatttatttgtcatgcctgatttacatttgcattgtgtatatatacactagtggattcttg

SEQ ID NO: 110624 - DNA, 343 bp, Glycine max
gtgtcaatgacagtaacaacagataatgagaagaagcatgaagaaaaagaggaaccaaaacaagtggcgaacccatgggaagtttccgccaaaggcaaagtggattacgacaaactcattgaccgggttggatgaagctttaatttggtgtgtatagtgcatcacctcttacactccccacgtctttctacgatgcggtatttttttagcccaccggtacctccatgcattttctccattcactctttgcgttatttacttaaacgaaaatttgatgatgttgtttctctgtgtcacaacaatttcatggagattctggacgcatatgagaggggagataggt

SEQ ID NO: 110625 - DNA, 108 bp, Glycine max
tggtacttgaagtgtcccctgatgatgatacaattacagagcttttacgggataccaaggaaaaattggcaatggaaggtggtgagcatgcacctagaagaatagtaa

SEQ ID NO: 110626 - DNA, 436 bp, Glycine max
ctctgctaatgctaatcatatcaatgattgttaccctttttatacccgctgtctctgatcgtcatcacaatctctttaatctttttttattttttatcattcattcggatttttattcttttctcaaatttcgcattcagatatcgtgccacatttattccgtttctcatttctgaacaccacatagacacatcacacatttgatgagctatctatcaattttccagcttcaacaactttcgtgatcagtaaaaatggaggttgcagtccccagacaacaacagtgaaaaaatcagcacaatgaggatatgatagagttctcaagatactcaaaacattccggaactgtccagaggaaagctgacaaaatccctgagtatggtcacatgaaacaagaactaaaaggggaagaaactatgagatgtttaaagaaaat

SEQ ID NO: 110627 - DNA, 362 bp, Glycine max
gtttaacatcattttttgaaggaagaagacatccccccacgtctacgtcttttttagagaaaggaaaggaagaaaagaactttggttttaagagaagttgaaagagatttgttaaactttcagaaaacaaattcaatttgagagaagcatttttttttaattacaatccgttaaacaacatgagtcatcatccaccaggcgcagtcccaccacccggagccttcccaccaggcgctgttccaccacccggtgcacacccaccaggtgctttcccaccaggtgctcacccaccaggctctatgccaccaggagcatacccaccacctggaactatgccaccacccggagctttcccaccaggc

SEQ ID NO: 110628 - DNA, 94 bp, Glycine max
gtttcttcagaaactcaactaccactgttcggtttagttgtagaaagacttactgtgtttacattatatgcttatcttgggatcgaattgaagg

SEQ ID NO: 110629 - DNA, 446 bp, Glycine max
ttttcttcaacgttggggactaaattgatgaatattcaatacattaggggattacttgaatagctttattaccttaggaattgtttaggagagagaggactagttcgaagatgaaatcggtgatttacttgcattttattgctctgcgtcttgagataaaagtatggtatgcagatattataatttatagggcctatcttaaccctcaaaattaactggtatgatgaagattgcccaaacttaaagtaaaatatccttaatgtataacaaactacttaagtagtcctatatttattagaaattaaacaaagttctccctttaatattaaaatacccgtcaatatattccttaaacattaaaacaatacatcaacttagggactaaattgatgaatattcaatactttagggattacttgaatagtgttattactttagaatttatt

SEQ ID NO: 110630 - DNA, 56 bp, Glycine max
ttttacgcgtgggcggacgcgtgggcgtgattgtatctaaatttgtttttcatatg

SEQ ID NO: 110631 - DNA, 203 bp, Glycine max
gtttaatacatgaacatgtactaaattctgttgtcaatggttcaccgtcatggttggttgatttggtcccattttacatgggagaaataattatttttgttttcaaaggctgtttaagaaaactgtaaaagtattcttttaaagaatgcagttaaaattacactgtgattctatcttataaattaaactcttttatttttttt

SEQ ID NO: 110632 - DNA, 493 bp, Glycine max
  unsure (1)..(493): unsure at all n locations
atttgttttggcagaagcacaggttctccgcgtcagccatggccgatgacttcgacttcgcggataaagttcctccttcattcgatcgcgtggtacacttacaaattccattgcaaaccttntattctattatcgtttattacttagatctgatcttaatcaattcctgcacaatgttaaatgctcctccttccacgtttttcatgaattaattaggtcttggagttatggatcgaaccttgcatgtgctcctgccgtgttttattttcagatccttggaatcattaacaaattttgcttctttttttcttcttctatcttcctgatgaacatccgtccgagtttttcaatgttacaaattcttagcgattctaatgttatggattcggtgaaaatcaacttagcaatcctcttttattttttaatttactgttcagctntaaagctaggattttgatctggtaaaggttcatgttcagatttaacgattcaa

SEQ ID NO: 110633 - DNA, 356 bp, Glycine max
tttacgcgtgggttgcaacaaaaaaatgagcgagggaattgaagctgcacaaccttctcctgctcatgagcagattcagcaacaatccgttgataggcaaagcgaggataacgagcatcaaccgtcagatgtttcacaagcacctcagcaattgtttgatgcgcgtcttccgtttccacctcatcaaatgcgtgctggatttcatcctcgttttccaccatttccaccgaatggcatggggggaccaccaatgcgggcaccttttcgtccgcctccaaatttctcgcagcaacccggaggcactcaacctgataacttcccaccgtttttcaacagtcctgctcacagaatgggag

SEQ ID NO: 110634 - DNA, 73 bp, Glycine max
ctccaactgtcttgtatgataattagttgattgcaagatttgtattgataaataacgataacggttgccaatc

SEQ ID NO: 110635 - DNA, 205 bp, Glycine max
gtgtgagtttcctactggatttgtcaattccttcctatggtgggctcgggcctgatgggttatgggccgaaccaattttgatccagttgagcgcaaggaatatccgaatttccgcgtggcaaagctaggagtataaataagaggtagtgaagtaagctgataataatattggtggtggcagagtagaatagcagatggcgatggt

SEQ ID NO: 110636 - DNA, 492 bp, Glycine max
catttcatacactacagacattaaacaactatctcaaatcacaatcattagggaaaattcaatttcaatgtccagggagattattttcttcatgtcactgttaggtactactacatgttctgaaatgtgtttgtggaagtagtcacaatagaaaatgcgtgcaaggctcactgcaattaacaaatagataatggaatgaagtctacttttagaaatgggggtgaagcatgaaacaaccagagacatttgaatgttgttataaaggttttttattggttaatgaatgcataggtaaagtaactgtagacaaacttataggttttgattggaattataggcaagagcaatttgagaattctgcagcaggacgagctgctcgtgcacagcaacaagcaatggcaaagcaatctgcaaacaccaacaaaggcgaaccagttctaaaggttggtttggtgattcaagatgccacttatggttttggcaactattgat

SEQ ID NO: 110637 - DNA, 162 bp, Glycine max
acatatgcttattaaactatgtcggtgtatgtggacctagcttgctgttttgtcttgccctctcgctttggcaatttctgtttcgttcgctccaatgatatcaaaattacgtgccacgcatcatgagagggatgctcatatggcatcattatgaatataaat

SEQ ID NO: 110638 - DNA, 201 bp, Glycine max
cccacgcgtccgtttatccttactgatgggtaagaataaagcattatgaatcaatggcgagcactggttgttgaatttggatgtctcttgttttcgtttgattagtagtcatcaatgatatagacctggaaattacctgtgactgtgaggattgttatccttactgatgggtaagaataaagcattatgaatcaatggcct

SEQ ID NO: 110639 - DNA, 384 bp, Glycine max
aaattttgcagttttctcctataggaactaaaactgaaaacggggcaactataagaaccaagtgaatatagtttaaccttttaagattcataatttgtacattcttagagaggagggttgcatgtgcattatacacctcccactagctaactcattccccaagattaagttgggaacttgagttcacagtcattgtatggccctggattgcaattgcatacaaccagttatcttgtggctactaaactatttacaatggttatgttgttcttggaagggagggggggctgggagaaaaacatgatcagccaatctttactctttgttttatgccattagctggcacgtacaaacttgttatgcgaattcaattgtataaaaact

SEQ ID NO: 110640 - DNA, 434 bp, Glycine max
cggtcgcgtgggttgacgcgtgggaccaattgtttcagcaggagcttggggagctgcaaagaatgggctaactaataatggaaatgtatattctactgttgtggatcaatttgctaaattaaataagcaatattcaatattggatactgtggaggattatactagatggtggaatgatttatctccacgaaagcgaacaggaaatccttatacagatggtctcattggagtggaagccaatcctggtcctaatccaatgaaaaagttaaagaaggaaattaaaaaagaagcgaaagttgttcgtaaagtaatcaagaaagacaagaaactattaaaaagacgtcctggcaaattgatgactcgatatgttcctcaaactgcccctgtttcagctcctgttgcgataggtagtgtttcacggaataattcacata

SEQ ID NO: 110641 - DNA, 412 bp, Glycine max
cggtcgcgtgggaattaggaaaacaaatataggagaaactttgccaaaattttgactgatattttgttgaaatataggactcgtgaattattatgcttcctttttcttgctaaactgttaagtcttttattttgaaggcttgccaggttaactagcttgtatgtgggtcatggcctagggtgggccatgacatataactttttttttttttcatttcttgtgaaagggagggggagtatttttatgatgaaccctgactgaattgtgacatactttttatgtggatgctaaaattctctgttccagctgaaatttggttgcagcacctcagaagatcatcaatttgtgaggggtattccaatttatgcaataagtcaggttcttgacaagattatatcaggtgcaaatgggt

SEQ ID NO: 110642 - DNA, 316 bp, Glycine max
ttgttgatctcttctaatcattttctctctcaaggctcatcctcttcttctgttataatcatttcattgatgcttcttctcaagattgaatcttgaataccgaacaacaacaaaatagtaaaaaaagaagaaatcatggggtcaaagtttccgatgacccagttggtgatatcgcccagatatgtgatttatccccacagtgcatacaactacaagtattccagaagaatattctcagagcaaaagttcccgttcaagttcgtggcgcagaccttaggggataaacggaagctaaatgacataagtactagttcta

SEQ ID NO: 110643 - DNA, 73 bp, Glycine max
ggaagaaggcatatctttaaattgaattgatgggggggaaaacccgaatgtaaagatatgccttcttccattc

SEQ ID NO: 110644 - DNA, 304 bp, Glycine max
ccctcgcagtccgcacgcacatagccattatcatgatcactcacaagacaattgacaaaaacaaacgcttcaacctttttgggggagagagagttatccattgttttcgtctcattttcttttctctctcattcagttctcgatctgtgtctctatttatttatcatttcagtgaagtggggtgtttggttttgtcatttgggagtttgaaagttgcgagatttttgtttgatttggcttgatggcgtgaaaattcatctgggattgtcagattctctctgatctgtctgttttcagaggaaac

SEQ ID NO: 110645 - DNA, 454 bp, Glycine max
cggacgcgtgggcggacgcgtgggtttaacatacatatttaattctagcaatacatatatatatatatatatatatatatatatatatatataattttacatttttacttatggcttatgtaaaaataatgaaataaatctatgatcttatagtttatattataaatagctgtctgtattaattaataatatggtttataatatagagctatttttggatttgttaaacccatgtgtgtttgaatttttattcaaatttttctatgatttttttctataatttggatagagaaaaatatgattatcttctttaagttcattaaaaaatccatagagttttttccctgtgtcctcacacaaatattttgtatataaacacacaaactaaatgttgcaggttcattttttcacacaaaaaaatggaaatgaaatttttaatttttcagacacaagt

SEQ ID NO: 110646 - DNA, 310 bp, Glycine max
aaacacttctatgcattactctgtcaatgaagcaacagtctctgaagtgataccaaggtgacaaatagaactggacatgcttttcttcttagcttttgtaggatgcaggaattctgtgtataagttacctaaagacagaagattaacatatttttaggaagatgaaataattttttggtgtataaaaatgatcgagtttcggaaagtatactttggcttaattgtatttattatcatgggtgatgatctgttatttttttttttttatgggaatcaccttaaccaaggtctttagctttagtttttggtg

SEQ ID NO: 110647 - DNA, 395 bp, Glycine max
atttttctgtttattttacggggaatgtgtacgataatttaagtagtgaggtgaagcaaggtaatgaagttcaaaatgatggctcaaatgccttaggtaattatgtgcaatatcacgagggtcaaggttatgatggatctttagaaagccacacaaacaggcaaggtgatgggttaaatgcttcagttaatcatgtacagtatcaagaaggtgaaacttatgttgcatcttcagaagaacacacaaatggacaggatctgagtagtagtcagtattgggaggatctttatcctggctggaagtatgactacaaaaccgggcaatggtatcaaatagatggctatagagcaacagccactactcagcaaagctctgaagccaatatagctgtggat

SEQ ID NO: 110648 - DNA, 423 bp, Glycine max
agcatgcgttagaattagaacagcaagtgttgctacttcacgatgttctatgcttttgcctttggtaacgtgcattgatggaggattataagaagaaccatccttatcagcaacagcaacagcatcagcatcagcaagaagaagagaaagaagtagtgtgtgagaagatggagaggtatcctagggatttgcttcaaggattttccatcagtggtgttgctactattagggatgataataacaaaattaacaataataacatgatgcagcaacaacatcatgttcttcatcatcaccatgagcagcagcaacagcaagagcagcatgaggaggacgatgaagaggttgagttgaaccttggtctttctctcggtggaagatttggggtggacaagaacgccaaaaaaaagaggcttttacgct

SEQ ID NO: 110649 - DNA, 431 bp, Glycine max
cccacgcttccgatttccacaaacgatgtcttagtttcgtgaatttcttcctccctcattgccgtatttctctctgttgaattgaatctcttattgcgtttgtctttacctgatcgatcaacaacaaacgttcagagtttttttttttttaatttattatttatgtttttccgatcgtggcaaacggtattaatgtaatttcattcattactgtcctcgttttgtctacattacgatcttaattgtcaattttgcgtgaaaacgctggattaattggagaacatggaaagcggtgttgagattgtgatttatttggttatcaattaatgcctgttttttttccatttccaataattaacgcgtttttgttttgtttccttatttaggattggatttaattgcacggaatggaggcttaaagcttcacagca

SEQ ID NO: 110650 - DNA, 467 bp, Glycine max
cttggatcagttggagattgtctgagtctacgagttactacttggtttggtttgccctggttagattcatcatcaggttccatagttatatgctctaattgattcaccttcattcttttcttatgttgtataaaatgattatcatcactagaggcagatatttcgatttctgaatcttgcctgctattaatattgtattgatctcttttcggtcatctgatccagttcctttttctgtttcttgctctgtcgttggttccgtgcaaagtttcattgacattcctagtcaattattgttgacttcatagaaacaattttcacctcttgaggtacatgtcttctaatttcttggtcgagttcaacatgaactctcttgtgcaaaactttggtggtcctatctcagtattttcaaatcaggaccaagtagagaaggggtttgactatgagtttgatgattcatcttcccc

SEQ ID NO: 110651 - DNA, 100 bp, Glycine max
ccctcgcgttcgataacaaatctagccattctgttgtcaactaacgtccatattgatgaagctcaaaattagtctctagttccacagataagaatgtagg

SEQ ID NO: 110652 - DNA, 419 bp, Glycine max
aatatcttcatctttgtcaacattttcatgctctccaaatatcatcacatgccatctcacatttcctcttcaacattgcttgctccatgttttctccactttaatctgtgtgcttttcttctcagtcactaccacagaaatccaacaaccgaacagaaggttcaatctctatgcattcggtactttgtcttatattcctatgttttatattatagcctataaaacaaactctgtgaaattggtcctagattgaagacttttcatgtgattccatttacactagacctccaaaacacatttccagagtcccaaaaaatccaacctttttgccctctttcttctcttcttctctcattggtgatcggtggttcaactcaattcaattcctttttgccacttcacatcctcaaaagccaaca

SEQ ID NO: 110653 - DNA, 215 bp, Glycine max
gttgagcctattatcaacatgaacattcaacacaaacaatttcagtgaatcagcacaagtttttatttttttttgtcttcgtgattatgattattgggatcatgctcttcgcttcaattgtccttttcaaagcccactgacttttttttctctctgaatcacatcagattcaatggaattataccccctgaatgcaatggtggtctgctaatgtc

SEQ ID NO: 110654 - DNA, 139 bp, Glycine max
tcgaatgtgtattattgaatttctccggaatcttcttctgtgtatggttatccttcctttgtgttttctttcctgttgaatcggtggccgatgatctttggttggatggctgatgatcctgtaaaaaaaaataattagg

SEQ ID NO: 110655 - DNA, 386 bp, Glycine max
ttatcggtttatgccaacgaaaacggattgtcagcctgacactagatcaaagcagattggtaatgcaaagaaagccgatcagaacactcaaactgtccacagagaagatggaagatctcatttgaaggacaagacaaagctggctaggcgctgatggattaggcctcatggcactccagcatccacagtttctgaaggtgtggaatcaacatcaacagatagaggctggttatctgttcgtgatactgctatattggagagagaagttactaacactggcagcacaagtaaaaatatgaggctggatagtgaagtactgaagatgaattctttacagaaagagtctacgcatgctagcactactgatatggcaaggggaatgcacg

SEQ ID NO: 110656 - DNA, 500 bp, Glycine max
cggacgcgtgggcggacgcgtgggaaaaatagaaaataaatcactttaatgttttgagattaataatcaactacaacatagctgtcagttgatgttattgcttctaatcttcccctttgaatattactactaatgctagctgctgctactacatcatttttttttctaataagacgccggattaatttaattcttccatccttttctttttcctgttcttagacgtatatgaattgactgacaattgatgtgttcgaccactttttttctgctcaaactaaaatgaattcaaatgaaatggctgttttagtctaaacccatcttgtatcttacatcaaaccaaatatattcatcgccaactctgatctttggtgattacacttcaagattttatccttcttctaagtctaatctttggtaacaacattcttaagcttttcatcgttttatacagaactaggatggtttgatttgcaatgtcattcataattggcagatca

SEQ ID NO: 110657 - DNA, 247 bp, Glycine max
tcactctttagttggatttttctcaaattctctcaggtaactctgccacaaaactcattcattcattcgttcttgttcgttacaatctattctcgaatgtgtattatccgaaaagactagtacttggactagggtcactcttgtcttgtttagattcctgaacttccctccttgttctttatattttttttatcactttgttctacatatcatttacttcaattacttgatctgttcctgttctctg

SEQ ID NO: 110658 - DNA, 456 bp, Glycine max
tgtaactcctatttctctgaagtcccctgttgatgaggcattggttgcaaatctgatgaccccctcttctggtaaatgctaaactaaaccctgaactctgttattcttttgtcctttaccataagctagcacaatgtttgatgtttcttggttaaaacatttaggtctcttcccccccccccccccccccttctttttttgaggtattcttatttttggttacataaaataggatttcaacatctataatacaacagttgaaatgcagtctctgtttgtgcagaggtggagcaattttcccacgagaatactcctctgttacctgtagtcaaccttgatattgaagccctttgaggatgcttatccaaaaattaaaacctgcaccatttactcatactcatgggctatatcactatgataatgaatacaaataataggcctgacaatgcaacacac

SEQ ID NO: 110659 - DNA, 401 bp, Glycine max
cacctactttgtgactatgaggagtatcagcaacaaccaacaatagagggtggctagcagtagcatgtgagtgaaggagcctgcctgcagtttttttaatcgtactgtactatgtttgttatgtaatggtatcatggtaagctgactaaagtgacagatttgttccatcactgccttctgagaaagaagttaactcttagcaggtccacacaaacatgatgactccaaacttgaacttggaaatcgaaaatcattcagaaggcagcagccaagtggcttcaaatgtatccttgcatgaagcatctcatgatcttacaaagggcagcaccaccacttcctcctgtctcacaaaggatgaaactgatccaggtttcattacccttgacttgacactcaacttc

SEQ ID NO: 110660 - DNA, 201 bp, Glycine max
gtcacgctttcggtgcatccattagccaataaccaaacctctcaacacacatatcagaacacacagcacgacacaggtcaggtttatcggttccctacacagctcctcacaccacaacacacacacagggacacaaagacgcactcaaagacagactgagaggtaacaagcctcgccacgtgttcccctacgcgctgccct

SEQ ID NO: 110661 - DNA, 433 bp, Glycine max
gttttattcatcaatgttgaggtagccttctcaatttgagttaatgaagttccatattatggtttatctttcagtttctggaatagttctaaattggtcttttgtttcattttgttgtacattggaaaaattgcatgtgcagaagatcccctcacctttcaattttatctttcatacattaaaggttaatggaatatagcgatcctgtagaaactttgctgactgcagggaaaataaagagttgcccacttccctgtctacacgatataggcatttggttttattttgaatgttgcatatcaaaaaacagtacagttgcatgttttcaaatggagattttcttaatgtgatcctaaattgaatttccaatttgagtacaaattgtgaattgaatatttcgtgcatggattttgatcactgtcattaaggggat

SEQ ID NO: 110662 - DNA, 470 bp, Glycine max
ggcaaaacaaagatgttgttagagaggttaaaaacgaaatgtgtgatgaccaattggaggaccattttctgaagcagcatagaagatttcctaagagcaggcaaaataaacacactgagaaagaaatcatggatgacttagctgagaataattctcatctgctgcatagaactcctaaaaggaagcaagctaaatgcatggaagaagatgatatgaattcagatgatgaaatggaagatgatcagccgctgaggagagcacttcgaagtaaacaagctaaaccaaagacacttctgaaacaagctaattccttccaagcgaaaaagcaggcatctcggcccataaaacagggctctcggttgcttgtgaaatcaaaggctcctcagcaaataaaacagcctgctcatttgcggaataagcaatctaataacacccaggaatttagtttatatatggaagaggaggaagat

SEQ ID NO: 110663 - DNA, 287 bp, Glycine max
tctactacgcgtccgaatcccttttgaagtaactggagacaagaaaaaatgccggcgccaacatcatcggcaaacccgaagcctatgtgatgattgtactgaaaggaacagtacccatagcttctggtgggaatgagcagccagcagcttatggagaattggtttacatcggtggttttaaccctagtgtaaacatggaacttagtgctgcaatatgtttcaattctggaaaccaaattgatagtgccgaagtcgaggttcttcttgaaattctatgacaccaaggg

SEQ ID NO: 110664 - DNA, 184 bp, Glycine max
atcaaaagtggaaaatctctcagtctcttatagtgatgagtttccataatattatggataacattgtattaaagatgactagtttatacaccttggttctcctactttatctttttctatcttatagacctgctctttcattttcttctagacataggcaatattggggtggcggtgggaggat

SEQ ID NO: 110665 - DNA, 440 bp, Glycine max
tcgcatcaacaccattctcaaaatcacttattgacaaaaataaggggactaaaattgcattttagcctttatatttataaatcattcagaacacaaaataagctgaatcaaactggattttattttatttctcttctctttgggttttcttcctgaacaaacttggtctagtaggcttttaatatctatggcagagcagtttccagtaactttgtaattactaatgctacacttcatatttcagttagcattgtccttggatattttcagaaacactgttgttgtgatgttcttttatgctctgatatcatatgaaaagagtatcaaacatttaactgatagaactgcttgaagcatattgctaacgtaatcaagttccacctgagattttcatgatgctcttgctttctctgagttttaaatcatgagacatcttaatt

SEQ ID NO: 110666 - DNA, 402 bp, Glycine max
tcgcccacgcgtccgttcactcaattcggattgtgtcctccgtcccgtttcgttcaccgcttctttctttctttctttcatttctttgatttttgcacagaaagagagaaacgagaaacctaatcgaatttccctctttttttttgtttgcgtgctgtgaaaatattaatttgaatttgaggagcggaggatccgagttagggtttccaatcgcaattttttgaaccgaatcggaatgctggttcgggacgcggcttcgaggcaattttagcttcgatctcaggggaattgctcgaatcttagggttaagaaatggacgttgattcctcgatggtgccggagcccgatcacgatccgccggtgcagaaccatgccgagagagaccagctaggagactcaccg

SEQ ID NO: 110667 - DNA, 108 bp, Glycine max
atctgttttaatctgaggactgtaatgcatgttggctttatttttattagtcatgtcatgtgcttttatttgtctgcttaatatatgttgactaactttgacaaattt

SEQ ID NO: 110668 - DNA, 459 bp, Glycine max
ttgattgtcttaaccatcaaactcagctaagtatactataagagctttataggagctcttcttttcttctcttctggaaagatagatcaaagcccgcatttaataaacaaacccagatagatagatcatcgcagcagttttggacaacaaaagcgtcaactccgttatcgtctctgtcactgtaactattttctcgtcgcaacttccactaacggaatttaaaataaaactttgttgcaccctccgtctccgcaattcacacgccatttccctcatcttcatcttcatctttcacgctctccttttcactattcgatctcttttttagttctggaaatttgatttgttttggctactgaagctgttcgattggcgcctatgtgattctgaaatcggagcggtagtttaatccaacgtgatctgttttcggcgatggaatagattaatcgaactacgttg

SEQ ID NO: 110669 - DNA, 437 bp, Glycine max
tcgcttgtttgtaatatatattttattataagagggtcagagggatattcagatattcataatcatttttgagagaattatggttaagaaactctttgtgaagatattttcaactttgatacattaaccaaaagtatgaattgtttaagtctactggctattacattaaaaattaataacattgttgaacattattcttttggttaatgcccctcgacggaatttattttaccaagagttcttgaatgaataaagtatgtatgagccttttttttctccatatattgagacaaggataatttaaaagaacatattctatgacaaccttaactatagttctatctgtttcaactttcttatattttttttcttccagaattagcatgtaaaaaaagattatagcccatgatctgtctctttcatagaaactatgtttt

SEQ ID NO: 110670 - DNA, 447 bp, Glycine max
gtatatttacagtgtccaacaaaatcatcatcatcatcatcatgcaaaaccttagtcgcatggacaagccaaaaaccatcacacactacgtgttgataagctccgccgacgatactgtcgctggtttcacgagcactctcgccaagtccctggaagaccagggattcccgacgagagtgctcgtggaccaccgcgacctgaagaaagcggagattgagacagtgagggtgttcatcgttgtgttgtccgaacactatgcaatttgtccgtttcggttggataagctggccgagatcgtcgatgggttaggtgcccggcagcgggttctcccggtgttctactatgtgcccacgtctgatgtgcggtatcagactggtagctatgaagtagcattgggtgttcatgagtactatgatgaacgtgaaaggttggagaaatggaagaaca

SEQ ID NO: 110671 - DNA, 388 bp, Glycine max
cggacgcgtgggtggagctatttgcagcgtcgcttctgtttgccagtgattaatgaaataccggaagtgtccctgcttattcttatgtaaaggatttagtctagttgatttgatgtgatctagtaggcaatttggagtcaagtattcgaattgaaataaaatgttgagttattggaaaacaagtgttctcccacaccctttctcttaacagtaggtaatattgaaaaatcataataacccttgccccctaaaattggtgatatcatgtatgttcttatgactatcgatttcattatatgcagctaatattgtaattattagcaatgatcccagtgcttattagtcaacagaaatttcaagatatattagcaatttgagggagaaaagg

SEQ ID NO: 110672 - DNA, 454 bp, Glycine max
ccttttctccttcaatggaaggtgaggaggggaaacagtcttcccaaaaaaacccttacgttgaactagaagaagttgactttgattttattctagcaatgagcatgcaagaacaagagagagagttcacaatgctttcaactattgaaagtgaaagtgatgaatatctaagtgactcctctatagataatgatgaggatggtgatcctgactttatagcgagtcaagagtttgaaaccgaccttcggtttcttgaaggtgaaggaagcgacgatgatgatgaagacatggaaatggaagaagatgagattgatccagacgaattatcttatgaagaattgatggagttggaagagtttataggagaagaaacatgagggttatcagcagatgaaatctctttgtgcttgtacccttatacctgccaatgtgctgaaagcaaaagcggcattga

SEQ ID NO: 110673 - DNA, 355 bp, Glycine max
cccactcgttcgcggacgcgtgggcaaacaggccatcatcctgattgtcttagctcaaaagattgcaacccgatagtggaagggttggttgaactaagagagagtgaaagaccttggctaggcctttcgttggtttcacaaggaaacacacaccttagagaagaatcgtcaaatctgttgttgttgttgtcttttgagctaagacaaacaggccatcatcctgattttgtttcgtcgagttccagagaagggttctttggaaaaccagtttctcttcaacagcaacagatgttgtcacaagatgggtatgtgagttctaattctaaagttgcaagtgtttatcaacaaggacatt

SEQ ID NO: 110674 - DNA, 480 bp, Glycine max
agcttatagaggaagaatttcgtgtttttcaaaaaaccttttcagaacagcgctattaattttttttctcaaaaaacgaatttttccaaaatttatgtaataacttcttcattttgaagatagaaaattctaaaaaagtataaaatgctccagatttttctctatttttaatgcttttttgcactttaattgattcatttagaattgaattatgaattttcaaacattcgcctaaatttccaagggccaaaaaatgaaaaattttttcaattcaaaaatttcagattaagatttaaattgtaccattatgcagaaagcaaaaaattttaagaatttatatagggaaagggattgaacaataaaagccccccctcgattggaagccccccctcgaatataagccccctttggaggggggttgaacaatagaagccccggggcttataatcgaggaaatacggtattttagttaactatttc

SEQ ID NO: 110675 - DNA, 489 bp, Glycine max
cggacgagaatactttcatgttaaatttgttctataaccctaattcctaaaccatgttttccttctccccccacaagaatgcggaataatgcattcaaactctttttttttatcaaatgttaattgttagtttgttagtaatagggatccaacacacaatctttttcttcttttctcctttcttaaacacttaatcaacttgtatctctccattcaaactttgtattcatgcttgttgagaaattttgatgtacttgaatacttgcatgatgtgcaatgagccggtcattgaattggctctcagatgaatttttttttttagctaattagattgattgcaaaaatatataaaactgatacagctcaatctaactgaactagtatggataggattcataagttaaaaatataattacaaattattatgagttttacaatatacattaactcgagcgaaataattaattttatattaagatgtaatacata

SEQ ID NO: 110676 - DNA, 211 bp, Glycine max
attggaagcttcattccgatgcccgggaaggttcaaataaaaagcaaaagactatacattaagagttagaccaaatttagaaatgtctaccttgtatttgtaaatatatacacaccagatcaattgacttttttttatagtcgtcaagcttgtacacgtgtaaaagtcttcggattttaccttatttgagattcacttaatttcctttctt

SEQ ID NO: 110677 - DNA, 296 bp, Glycine max
ctctccattattctataaactgccttcccacgctgcttcacgctctaaatgcgtcccactatggccaccaccgagcacgaaaaacagttcattgtggccaaccctaaccctaaccctaacgccgagaccccttaccggacctgctcctgctcctcctcgctcgccattttcgcgaggaaaagctctttctacgacaggctccccttccaacccatgagactcaccgttctcagactcaacggatcatgcttccatattcaagtttcgaagatggccaccgctgcagaactgaagga

SEQ ID NO: 110678 - DNA, 60 bp, Glycine max
tttttgttgtaatatatgaaaattaaatgttttggtacaaaaaacagactatagaaatct

SEQ ID NO: 110679 - DNA, 450 bp, Glycine max
cttcacaacacaactctctctctctctctcaccaccccattttgctttggagtttgatctcagtttcacaacttggtttgtgttgtgatggtctcattcattcaccagtgcacatgtgtttgttgatccttcataacattttcattcaaaaccataatgatattgttctttttatctacttccaatatctagctttttttttttttttctctaacattcaatacctgatgcagtgtaacttgagagattaggccttgactttcgtccgaactatattcgggttcaccaaaaagaaacaaaaaaaaaaaattgttcaattattgcaagtgggttggtttgaactttggaggccttgaagttgttgaggtggctttgtatctatattttgaggcttttgggctatggaaacttgtttgtgagagttttttggaagatggggtttgggagtaa

SEQ ID NO: 110680 - DNA, 366 bp, Glycine max
atgagggctaatgttcccacctgaagtctctccaaccttgcaacaacaatcatgggccatgcctccggttcactccttcaactccaacccggttcactacatcaacaacaacaacacaaacccggttcatcatcatcatgagcaagcaccatttcttgtccctcctcccacaacaccttcaccctatgcaagcttcttcagcagcagaagggttgtcccttctcttcagtttgcatacgagggtccctcttctcatcttgatcaccaccaccatctgaggatcatttctgacacccttggacccatggttcaacccggttcagcagcaccctttggactccaagccgagctgggaaagatgactgc

SEQ ID NO: 110681 - DNA, 262 bp, Glycine max
tcgcttaattcttggtagtatatttatgcatgaaattccattttctaaaaggtttgggtttgtgaaggccaaatggcccaaacacaaggttttgtagaatgtgaggtacggaatccactcactcaactaccaagaaaataaagcgctcattaggctattttacatgcaatatttggtttcccatggcatgaaccaaagaccaggttcaggtatatacaacatgagaagtttgtaccacaactctagctacaaatataacatt

SEQ ID NO: 110682 - DNA, 373 bp, Glycine max
ttttcattgaaaaagcttactctagaaggcttgtcaaatttgaaatgtgtgtggagcaaaaccccccgaggaattcacagctttcccaatttgcaagatgtggatgttaataaatgtagaagcctggcaacattgttccctttgtcccttgccaaaaatcttgcaaatcttgagacacttacagtactgaggtgtgacaagttggtagaaattgttggaaaggaagatgcaatggaacttggaagaactgaaatatttgaattcccttgtttgtggaagttgtatctttataagctgtcactgcttagttgcttttatcctggaaagcaccatctggaatgccccctattaggaagcttggatgtgtcctatt

SEQ ID NO: 110683 - DNA, 221 bp, Glycine max
cgtacgcgtgggtaatcatctaacttccttcaactcaaggtgcgtggagcaaatgagcctggggccaggcatgcaaaaggggcagatttgccactgtggtttctgtggaactactttatttgtgggatttatattttggttggtaattgtgtccttcaacaagaatcttgccttgatctttacatcgagctcttccgttatccaaatggtcaatgagctgg

SEQ ID NO: 110684 - DNA, 319 bp, Glycine max
tggacgcgtggggttgaccattccaaacccagaaggaaacgctgcctagaggacacactttcggtactctgcgcctttcagagtctgtcgtgtctatcgggtcatgcatcgtacgctgatggccgccatagttccgcgatgggtaaggatatccaccttaggctactcactcctaaaaccgtcttcttattctataaccaatttcatctacaacaaccctaaacccccaatctttaaaccctcccagttccttccacccatcatgtttgtctcatccaacaacaaagactcctgctacactttagattgcgacgaaacc

SEQ ID NO: 110685 - DNA, 227 bp, Glycine max
cctatgcgttcgcggacgcgtgggtgatgatcatgcacaacaaacaaaacctctaatttgatttttcgggttcattcggatgcattgatggacccggagcagacgttcatacgcgatggaagagctgttatagcagatgctgactgcgaaaggcagagatgctttggagtatctctacctattcatcgccataacctcgatctgcattctcgctgatatgcatgcca

SEQ ID NO: 110686 - DNA, 292 bp, Glycine max
gtacaaccagctttactattcaactgttcttcttctttcatctctcgcctatcgaattcgaacccgacacaagatcaaatttttagggctcctcaatcctctctctctctctctctaatatatccctcttcttctttgcttgtatgaaccggaattagggttttgcctctattatcattgtataatttagaattaggtccttttttgtttcaattttgtaaatttataatttttttgttcgcttaattttgatttttcagacttgatgtaaagaatacaataacagcgatgc

SEQ ID NO: 110687 - DNA, 417 bp, Glycine max
cagttttattatttagattttgatgtgttcttctgatttccgagacccactgtattgtttccctctgtttctcttctccctttattccctgcctgccatttttatttttatttcttaaccatttatttatttaattagtgcttccccctcctccattctcattctccctgcatcacatacacacatcattctctctctccttttgacctaaatcaccttctgctgattccgcgcatttttctgtgacgaattgctcccaaattgtttcggttaacagtgctcgtgattttggtactattgcaattaggagtgattgcgaaggtgcactgcatgttcgattgttgaggagagggggtcctctgttccgaggattcccgtcgctggttgttcagattcgaagttggctctaaattttcg

SEQ ID NO: 110688 - DNA, 415 bp, Glycine max
ttttctcatccactatttctctccgttttctggccccaccggaaaacctcttccgttcgccggaaaaccgctttcgttttcggcgtttttttcacgtctccagaggaagctgatttcggtcttcttattcgcgcgtttgcattctctcgctatttgccgtggtagcttctgcgaggcgttggatctctctgtggttcggtttcagcgttgtattcagcgttcctagagaatgtggcgagcctggttgtccttcgaggctcgctcttaatctgaaacattcaggatcgtgatttagggtttggatttcgatttggtattgtgattgcttgtttttttttggcgattccttgtatcacctttttttggcgattcctacagggagcgacttcgtaatgaaatggtggaaagaagagtg

SEQ ID NO: 110689 - DNA, 448 bp, Glycine max
  unsure (1)..(448): unsure at all n locations
ctcacgcgtccgaaccacttccctccctccctccttcctcctaaaggatctgtggctaaaaaaacaatcaagggctaattgatgtgttcatcagatcacacacaaaatcaagcagaaaagaaaaagaaggtttttctcgtacggatattacgagaaggagaattttgtttgagtggatatggcgacgtactttcatggcagcacttcagaaatcccttcctccgctgaagggttgcagacactttaccttatgaatccaaactacgtaccgtactctgacgcggcacaacacccaacgcaaaacatgctcctcgtcaatcccaacaacaacaacactagtaacactagtcccacttccaccaacgcgctcaaccttggtaactttttccacgcgccgtcaccttcttttnccaacaacaacaacaaccaccgtgaacaacaacaacat

SEQ ID NO: 110690 - DNA, 198 bp, Glycine max
gttgcctctcaccaatgtttcgctctttcgtgttgctttctgcattgatctaaatgggattttgtttttcttttctcaatttccattggggtttgtgtttgctgaactggagggggattcactcaatgattttctctacacaaatttgaatgatgttggaatagcgaacttggattggtttttgggtgtattcacaga

SEQ ID NO: 110691 - DNA, 151 bp, Glycine max
cccacgcgtccggcagaaaggatacaaatcaacatttatcttatttatctacttgctaatcctgtattcagctttggaatagagttgcaaaaaaatgattttaataaaattaagagagaagctatgttaaaaaagcatacttttcatggat

SEQ ID NO: 110692 - DNA, 418 bp, Glycine max
gtttatctcattcacacattcacagttatactctctctctctttgtcgcttggatcactgatctcatctcaattttcaggtacttctctactctctttctcatgtttctactttattcccactgtatgtatgattcaccttttggccaattaaaccatgcttcattttggacttttgtagagatggtatcttatattctactcaattgatcaagcattgaccttatgattctgtgtatcttccatgttgattactgggaaatccattgacaaaaagtaattagattaaaaaaaaatagtactacccttatatggaatgatgagttttgctgcattttttggagcatggagatctaaagtttgtattttgaatgatatgtttgtacccaatgctaatgcaattgattcagcatgttaca

SEQ ID NO: 110693 - DNA, 198 bp, Glycine max
gaattatctacttatacatgttttgttgcataactataataaactcttgttttgttaatagatattgtactttaaggagaattgcatacatccacaatctgctagctttattttggccttgataattggattgagttgtctgatgatgaggagatattcttcctctcatatttctaataaagcagtggcttttttatg

SEQ ID NO: 110694 - DNA, 242 bp, Glycine max
ccatctctacactgtgtctatgacctcacggtgctcgcttttcacatctaacgaggctattcaatgtacttgaggagaatacaatgcagagatcggacatgggctttggtgctgcagtcattgaaatacattttttaggccaagattctctgttcaacgatgttttcaatctttgtcccctaagaccactgtgaaagaatatgcttcacacggaaggatcatcaaaaaacatcttttaggtt

SEQ ID NO: 110695 - DNA, 412 bp, Glycine max
  unsure (1)..(412): unsure at all n locations
acacgtccgggccgacccacgcacccggagtgttgagcccccatgggcacttgattctctattgagagttactttccctcttccttcagcccgggtcaaggccactgaaagatttgaagctgtttatccaacgttaagagaagttgcccttggtggttcccctggaagtaaagcaataaagcatcttgcacaacagatactaagctttgcaattaaagctgcgggaaaagccaatctggacctatcaaaggaggcaagtgacatttttatttggtgtttgactcagaaccctgaatgttacaagcaatgggtgagtacaagggaatgatattcaacaatttcttttcatttggtttctacagtttttttcctagtgactctntttctacacatttcaacatgtatttaatac

SEQ ID NO: 110696 - DNA, 350 bp, Glycine max
aattctttttcttggcacgcgctgttagcgcgctgctagtggaaaaagttttcacaggccaaaatcgacagtaagtgtagctgtgggcctgacgggaccttaacaactgccacaagaaagggatttagagagttgacctttcttctcgctgcttgctccccacgacactgagcttcgcgagctcttgatatcgccttttggcccttccccctttgtggtgcttccggctcctctgagcctcgacttttctggcctcgcgagcctccgacatcctcttgggcgtcgcgccctcccccgaacctcccgtccgaccgacttctgcagccctggctgcccagatgacacgcgca

SEQ ID NO: 110697 - DNA, 124 bp, Glycine max
  unsure (1)..(124): unsure at all n locations
aaaacagtaatacccatttcacctttttgattcatgcaaaccactagattagataatgatcaagagcgcataataggaacgccataggaatcacaaannnnnccgggtattactgtttttgttc

SEQ ID NO: 110698 - DNA, 426 bp, Glycine max
attgatcatgactggatcggattgacttaattagattataaaatttaaaaattaacatttttagaatagattgtttaaaataattttctttaagatatacaatataattacataaaattacaaatttgttgcataaaaaattttcaaattttcattatttttaattttttgtattttttatagattaaattataatatttatcttaattttttaaattcatcattttgattctttttatttttaattggaacatttggttttctagttttataaattaacaattttggtctcttggaaaattaactaataattatgattgatagagttactaaattaattataaattaaataaaattattaatcatttaaaaactttaataaaaaattatgtggtattgctgtatgtggactcacgtggggtggta

SEQ ID NO: 110699 - DNA, 153 bp, Glycine max
  unsure (1)..(153): unsure at all n locations
tttttttttaattggcagatggttgggggttatatcatannncctacttgctaaaatattaatctgcaatgtgtacaaaaggcgactgtggcgagagaaactatatactaagtgctaattatgatttatgatatcaagcttgtttcatcgctt

SEQ ID NO: 110700 - DNA, 470 bp, Glycine max
ccccacaccagataagagcactcatccctgaagacatccatccaattcgagatgctcactgcagcatcaacccggcagacgacagtggcgatggccaatggccgtcgtcaggttgcttcagttccatggcctggtggaggcagcggccatcgatatcgggccatccacttacctacgagtgttcggccacctgaacaagtatcatcacacatactacaagcagctcagaagtacttttctgcaccacgccgaattatatctaggttcatcgaacaccttactgcacctggatggggacaggttccttcacggacgatgtctaaagaactctatcactatcacggttcggccagacaaggtctctcactacctgctcgagttgcaatctcttcttcaaaggcgacggcagttcgtccgtctggcttgttcttccccaaggttccccagatgaacgcgatgaaaacgacatc

SEQ ID NO: 110701 - DNA, 167 bp, Glycine max
gttctagtcgttttgaagccaataacttcaagacgtgtacaacattgcaataataacacatctcattttgtttctttcaagtttcaatgttgcgtgaagtagtgagaatttgaatccggtatcagattatattagatgtttctttaggaagttcagactccagagca

SEQ ID NO: 110702 - DNA, 424 bp, Glycine max
ggggaagtagtgaaggcagattcggttcttcagaaggcagcccagcagagccagatgaagccaatattttctacctacctaactattttggagcagtatgctaagaggggtgacatccataactcggagaagattttccttagaatgaaacaagctgattatacatctaaagcaaagatgtaccaggttctaatgaatgcctatataaatgcaaaggttccagcctatgggattagggacaggttgaaagctgatagcatatatcccaatagaaatttggtaaaccaattggttcaagttgatggatttaggaagaatccagtctgcgatttgcttgattgaggaggccaacagattcttgcgccagtgttgtttctactcatacacatgcaactgttgttagtcaaagagtactcatagggat

SEQ ID NO: 110703 - DNA, 434 bp, Glycine max
acttaatggatccttccaggaggacacttcagaggatttcaggtggtcaaattttttatataaaccgttttgcttggattttgcattacctttcattttttctacatttcttagcatattacaattatttaaatctgatcttgaaccagttaagctgtgtgaagttgtcacggttgagacagttgaacttctccatttttctctacattaaaaccattgttttagtagtgatgatttgttcccaatttaggaccaaacacggcattccccctcttaatttgtccagtttgtgacagttaggaagttgtaatgctttaagagtttggctattaatatatataacaataaggttttgcagcttcccctttcacttggtcaatgtaggcctaatgcatgttagaaatgctagtattagttcaatacttttagcatac

SEQ ID NO: 110704 - DNA, 435 bp, Glycine max
gaattttatacctccgcaccctagtctagatgatttattgcttctatgtgctggactctgtgtctgtgatgctaaacttgtttgtgtgtctaattattgatggggtacaagtttcgtgatgagggataaatcttagtgcagtgcagacaaaaacatgacatatctccattggcttattcattgattttttttaatccaacaggcaagaaagcgtaaacagattatagacaataatagaggggataatcaaaattatctacaaataaataaagtgatgataaatataatcagagggggcagtgattggggttggcggctttctggggagtcagggcggggatggaaaaaccccgtcatcatgcctacttgaatagcagtggctctgctattcaagagacacaggcttgtcagaaccatttgcactgtgagaaattg

SEQ ID NO: 110705 - DNA, 429 bp, Glycine max
tgtacatcagtttccatcgtgggttggcaaacatgctgtttgttgtacactttggtttgatttgcaagtcagtgcatcatcatttttaatattaaagatgtttttttttccttcaaacttttttctattaaataaaattgtggtagtaggaaaggtcctagtgggataaggttttgttgttgttgaggtaataggaaaggtgtataaagatattaaagaactcatctgggtctatttcttgctctcattggtaccatattcttttcatagaaaggaattagttatattatttttacacacttttttacctctcatttttcctcattcatcttattccatctctctctcttttttgttttcattcttagttgtaattaaagattgtataaacttgatatacgtacaaaatttctcaaagaatattagata

SEQ ID NO: 110706 - DNA, 271 bp, Glycine max
ctgtcaccaaaacaatcgcacacgccgccacagcaaccaccgcaaccgagctcaacccgttccggtccttcgctccattattgtccgaggaattgttattcgaaacagtggaagaattcaacgttgaactgaactcccacgaatgaataatgtttcgttcagtgagatcgccagttgaagcggagaacccaacatccacccactcgggtagaatgtccatgaggtcatcaatctggtaagaaactgatgaattcttcgaattgggtgttgc

SEQ ID NO: 110707 - DNA, 55 bp, Glycine max
tcgcccattcgtccgctgcgattcactctagtgagagaaagaagagaaggaaaca

SEQ ID NO: 110708 - DNA, 55 bp, Glycine max
tcggtctttttctaatccttctttcgcctactcctccctctctctaactttcaca

SEQ ID NO: 110709 - DNA, 53 bp, Glycine max
tcgcagtttgccaaatgcctcatcaggcatgggtgttgctgatcacagcaaga

SEQ ID NO: 110710 - DNA, 55 bp, Glycine max
tcgattttgtgttgacttgaaaacaaagcaaacactgtcccagtccatacccatc

SEQ ID NO: 110711 - DNA, 55 bp, Glycine max
ttggagattatcagataacctctgtcaacacctgtctgtggcgcgcgagagagaa

SEQ ID NO: 110712 - DNA, 55 bp, Glycine max
tcgcccattcgtccgcccacgcgtccgatttccaccagcacaagaagcatggctg

SEQ ID NO: 110713 - DNA, 55 bp, Glycine max
ttggtatttccacccagtctaatcctgaaagccacaactcagatcaactacatga

SEQ ID NO: 110714 - DNA, 356 bp, Glycine max
aactgacgaaaaaagacaaccatgaattaccaattttacccttgggagaaaccaaaatgacatgatctgatctgtgcctaagtcgccattaacgacgactcggctaagctgaactgcgagaggagctgcgtccacagggaaacgcatagcatattcgtattccggggaagaaagaaagaaacatcatgtgttcttcggagacgatcaacatcgctgcgagtacacagaaacttgatgttgataatcgaattgctcttcgcttctactacagaattgccgataatatcctcaaacaggctgatatctttcgtgcagagacaaatatagttgatctgtatatcatgctcctaagattt

SEQ ID NO: 110715 - DNA, 235 bp, Glycine max
tgtaaatccaagaagtgatccacatattctgatattggttgatagaatttttggggctggcattctgagttactgttctaaagtagttttgacgagttttgagtttatatgttttctatagtccattagtttttatttgagtatatgaaattataacattccgttatttttgctggtgtttgtctttgttttgtatggatatcatcattgttgcgaaattacttgtgttaattct

SEQ ID NO: 110716 - DNA, 443 bp, Glycine max
tggacgcgtgggcggacgcgtgggggggaagctatggttgccttcaactggagtaacgtacactgcgggactcatactttagtttaacacaaattaatactgccaaagaggaaattataggggttatgcatttaagtgttttgtggttagcattaacgagcttcaacaacaatccatcggtttggcgaaattttcttttctttgtgggggtgacttcatttggtgtggtgacaaatcgctgcatgagaaatactaatactattttacaacgagccagtgctaattaatgaagtcccaactaactacatttgtagaaattgcagcaaaaaaataaatataaaactacactgtagagagtagagttcttgcacatgttgtatccatttagattggatagtatttctggtccccagctcctgattctagcacggaattatgtcaat

SEQ ID NO: 110717 - DNA, 390 bp, Glycine max
ttcgaggtgtagatcaggtggaacaagattggttcctatgaaggaggatacttgttttctctatagaaaaaaaaaaaattacacacaaatcatcatcatctattatcaatgttcagaattgttatatacttattataagatgttgtttaagtagtttatatttgacctgtgcaggagagggttatctatgttctatcaagggaaggcccagtctttcacttctttagcaagggtggagagcatagaagatcttcccaagaaaggcacaccttatagtaagagaatgaaatcatgcaaaagttttgggggaggcttggatagtcagagactattgtgcagtccaaagtctacaatatcaaagaaaacttcaagagggtcttttgcatctgt

SEQ ID NO: 110718 - DNA, 388 bp, Glycine max
ttcacgcgtacgggtggactttctgatgatagcttgaaaccgaatccatgggttcttagtgatgtctgttgcacttcgtgtgtgaatgatgttcataatgtagaaagtaacaactctgatgttggtcattttcatttaccttctgatgatttagaaggcttttctaaggacatagagggtctcatttcagaacttaatccagctattgagtgctgttggaatcttcatcatcagataagtagaaaactaacgatagcatcagcagaatgttttgtcttttcaaaatgtttgacatcactttctcaaaaatttcataaagctgaagatgatgaccaaaattcttcaccaactaaatcatttgacatattcacactccattggagatttg

SEQ ID NO: 110719 - DNA, 460 bp, Glycine max
ctgacgcgtgggcggacgcgtgggattaaagtatataagtggaggacagtcctcatcttacaagttgattttctagagttgagttagacagaattccaaattctaagagagttcacattgtttatgtgacatttctaattttgtttcactaaagaaaattcttgtaaaaattaaaaattaataacattgctctttcatgtcacttgacagcttggtaattgtattctccaaggtgaattatgcttccacttccttttagtaaggcagcgtggatcattcattgataccattattgccagaattgggctagaactgagatagaaagaacagtgattaaattgtgtgctgaattgctaactgtttttctaaattaagctcttttgaaattaaagattcaattcaaagcatgtgaagattgtggaggttctggtatatgttctgaatgcaaaggtgaaggatt

SEQ ID NO: 110720 - DNA, 161 bp, Glycine max
cttgaaattactctaggccttgctgatatttcagaggatgattatcctgtcaataaggataatcatcctcttgaaattactctaggccttgctgatatttcagaggatgattatccttattgacagaataatttcaagaagtacaagttatttttttattt

SEQ ID NO: 110721 - DNA, 438 bp, Glycine max
gtaaggaaattgtggatgagtgggtgaagttgaatccacggggaggaagcaacactctgatggctgatggagactcgtcgcctgtgcagaaaaccactcaaaatgggcatcatcagcagattcctgattttgcatactcgcccaatccacacaatgggagctcagggtctgaccgtaacaactcagaagcagaacgcaaacccaaagtagttccccgcagtgaacctaggccaaaacacgcgccatcaccgtcagtttcaacccctgcttccgctactcaaaacagacagagggagagcagttttgacgcggagaggcttgcttcggcgagaaggaggcttcaagagaactacaaagaggctgaaattgggggaattttcatttctataaaattttcattcttgatgatacatctctctctctctatatatatatata

SEQ ID NO: 110722 - DNA, 262 bp, Glycine max
gtggggatgcgtgtgagggagagggtgagtgtccccaaagctggactcactgaggaggtgatggagaagattcataagaggtggaggaaggaggagttggtgaggctcaagtttcatgaggtacttgcttaggacatgaggaaggttcatgagattgttgaggttcaattcttgcccctttttcataataatcacttgacattatcattaacacatatcataggaccacgtacaacgattgatagtttgtaaatgatccatg

SEQ ID NO: 110723 - DNA, 60 bp, Glycine max
aaattaaaaaaaaaaaaaaaaaaaaaaaaaaaaaaaaaaaaaaaaaaaaaaaaaaaattg

SEQ ID NO: 110724 - DNA, 448 bp, Glycine max
cttcgatcagttggagattgtctgagtctacgaggtactctgcaaccaaactactattactacttggtttggtttccctaagttagattcaccatcaggttctataggcattattatactataatgtttttactctaattgatttaccttcattcatttcttatgttgtataaaatgattatcatcactagaggctgctatttcgatttctgaatcttgcctgctattatattgaattgatccctagtgtattgttcccatttctttcatatgatccggttcctgtccctgtttcttgttctgtccttggttccttgtcaattattgttggcttctttgaaacaatctgaacttcttcaggtacatgtcttgtaatttcttggtcgagttcaacatgaactctcttgtgcaaaactttagtggtcctatcacggaattttcaaatcag

SEQ ID NO: 110725 - DNA, 337 bp, Glycine max
gttgcaaatgctgaaaggtatcagggagtgtggctcataactcgttgtggctcacttttgaaaagtggctacaatcttcatgattggagtttgtgcatatccatactcattcttatgggtgtaattgcccgggctatagcatttttctgtatggtcaccttccgaaagaagtaaaggccaaacttcaggctaccaaattttacgtctaacaaatctgagttgtacaaattggagaggccagcatgaccaaaactgaatagaaattacattaggattctcatgatttgataaactgctgataattttttttggggctgatattggttattggctttta

SEQ ID NO: 110726 - DNA, 363 bp, Glycine max
cggtcgcgtgttcaaatggctctattgagggtttcccggctttcatcgcctcagtggttaatcaaactgccaccaacttgcttcgcatcaaaagtttgggagtgaggaaaattgctgtaggtggtctacaacccctaggatgtcttccttcatccacagccacatcttcattccaacaatgtaacagcacctccaacgacctcgtagttctccacaacaacctattgaaccaagctgtgaccaagttgaaccaacaaaccaacaaggataacttcaccttcatagttcttgacctttttgacactttcacgtctgtgttgaaccacccatctaccaataacattaaggaccctctcaagcctt

SEQ ID NO: 110727 - DNA, 345 bp, Glycine max
cccacgcgttcgatttatatatctagtttagttttgtaactagtgagattatatggttgggcaaccttacacaggatgataaatggtggcattttgtatagtgatactctccaaagcttcttgacaagtgctgccgacctgtcgtattcaccttttgttttgtaattttcttggtacataaataagctgtctgtagggactagtccccccagtgtctagtaagctctttcttgtcctgttgttctagcttgaatctgaaatgtagattcaagttgagatttcaacagatactgtaatgagtcttttgaatgaatagaagaaaactcaatggattaatatagcttt

SEQ ID NO: 110728 - DNA, 492 bp, Glycine max
ggtaaacctaatggaagacgcaaagaaattgtacgaatcactctccaacgccaccgctcaagatccaataatcctcaaagacaaagaccttcgcagcgtttgcgaaaccctcttcgaccaactcaactccaccttccgccgatttttctccgctctgcctctgcgccaccatgaccctcacgcttggtctcttccgcctccgtattcacggctgtggccaattgttgaagacctttctctcgttctgcgctgctgtcttcttctcctgacgctcccgcactccgatcagaagtttctcctcctcaagtgccgttcccttcttcgcgtcttgaactccttcctctccctcgatgtcgccgaacgtcgcggcttgcgcttccgcaacttcctctccgaggacgtggacttggagcttcctgattcttacggtccgtttatatgcgcgctgcttgaggtatttgcagatgaacttttaagacatcaatctttgag

SEQ ID NO: 110729 - DNA, 53 bp, Glycine max
cggacgcgtgggctgaaatgtccatttcataatgtaaatttgtattctggaat

SEQ ID NO: 110730 - DNA, 418 bp, Glycine max
tgctaattcagcaaaatctgttccagttagcccagctattaaaaagcaggcggaagcgattcaacagagggttagcattgtagtgtcagagcttctgtcccagctgcaagattggaacaacagacgacaatttacatcccctactgacttccatgctgatggggtgaatgacttatttatctcacaggctgttatggaaaatacacaagcaaatgaaattttgaagcaggctgctttcttgataccatttactagcagggttaaaattgtgacttctcaactagctgctgcaaggcaaagacatgggtctcaggctgtttatactagaaaccgggtcagaatacggcggagtcatattttggaagatgcttataatcaaatgagtcagttgtcagaagatgaccttcgaggattgatt

SEQ ID NO: 110731 - DNA, 443 bp, Glycine max
  unsure (1)..(443): unsure at all n locations
gttgggtgtaaatttgagatagttgttgcaccacaaaaatgaaatcttcttctccacctccgttcgttacttccttcaacattccgcaaaaagttacctctattttgacctttttcttcatactttacatacctttgtaactgtgttccatttttatttagactttccagtttacattctgctaatttttatatctaatttgttccattcttttattattattttcaccatcatcctccatttctgacttcttaactatgttcttattgctcctagagtcctaggcactgattatttacataaaccgtgacttatcatgaatttatttaattatgggttctttttcatttttgagtattatatgtgtagtataaattattttttggttctttttttaaatgacaaaaagancttgtctctagttctacttcttgaccatgttc

SEQ ID NO: 110732 - DNA, 373 bp, Glycine max
agagaaatggttctgaaatttgtttatatcataataattttgatgatatggtgcatgtatccattaacatctgcacagtatctcgatgagactataatatctgcgcagtacgagaatacgactatagcacaaccaggttgtgatagcaaatgtggaaatgttttcattcctttccctttcgggatgggcaagggacattgctatgcaggctcgtggtttgaaatagattgcagaaacaatactactactaccaattcatcaggtgaacagaaaccttacctcaaatacatagatttggaggtaaaattcattgataactggggtgggcaggtgttgatcatcatgaaccctatttatcagagtgggaagaact

SEQ ID NO: 110733 - DNA, 370 bp, Glycine max
gcatgccaatcaatgtcaccagaacaaggggcaatgcaatcacaacttgatgcagtagctgactggattgtgaaattagaataccttcaatcactgaggctaaaatcaagagatgagaaaggtcgaccttggaatttacacttgaagtctttgaaaaatcatattaatctcactgacatatatttgctgggaaacttgaacggtccatctattctgactcagttacctccaaatcttgttgaacttaccctatcacattcaaaacttgaggaagaccccatgaaaattttgaaagatcttccaaatctccgctcattgtctttacatgcagaatcctacataggaataaaattggtctgcaattctaaaa

SEQ ID NO: 110734 - DNA, 371 bp, Glycine max
ccctcgcgtccgattgtgcatgcatatctgatcttgtcctccccccacccaaaaatcttctgtgtatgatcttgtttaaacaatattgtaaaatgtccaggcttattagtttcctttctctgagcggtttatgtgacaatctgcaaggaaagggaagatgataggtagtgaagtaaactttaagagtttagacaagagctagtctttatttatttttagttcaagacagtggagtcagtgatgtatctgtttggaggaaatgttttgtctcttactggtaataattctgatacggagttttctttttctttttgtaaactaattagtgtcaatgtcacagttaccgagtggtctggtgggctgtatgtatc

SEQ ID NO: 110735 - DNA, 362 bp, Glycine max
gagttgaggtacattattttcttttcatgaatgaacatttgttaagccgttaggctcttgcgaacaagtgaaaagggagatcatttactattagaccaattagtgccctctaaattcagcatgttgataaaagaataaaacaacttgcactttttgtgcctgtgcattggagggtagggatcatctgcagggaaccgatctacattatatggctcttatgctgtatctgggtttctttttctttactgtttttaacataccagtgttggctatgttttccttcccctttctgcacttcttatgcacgaacatgtattttattacatttttaatcaatgattatagcatcaaattttactttt

SEQ ID NO: 110736 - DNA, 381 bp, Glycine max
gttaaggtgtgcaacccactgctacattgctcgcaatatattgtgtcaccagcaaattgcgaggatgaattcattctggccagcagcagcaggttctgcatcactatacggggctaagcccagcaatcttaatgttgtaccctccacagagttgcatgggaatgttcccggcagggctgcaaactcttctcaggacaaagggcatggtattgccatgtttccaggacatattgggaaggacaaagcctctcagcctgccattgtggataattcatcaagaaaacaaattttgcttcagcaagctttacccccaggagcagcacctagtaatatcttgcatggccctgcattcatattcccgctgaatcagcagcaagcagc

SEQ ID NO: 110737 - DNA, 443 bp, Glycine max
ctgtacgcgtgggattgggagcagcagccttccctagacctctccctttttccctcaagaaattgactttagagtggctgccaaaactggagaatgtctggaatgaagatcctcatggaattctaaccatgcaacttctacaacatgtaaaggttaaaaattgtaaatgccttacaagtgtgtttccggcatcattagccaaagatcttgaaaaactagttgtcaaagactgtgagggattgatagaaattgttgcagaggataatgcagatccaagagaagcaaatctggagcttacgttcccttgtccctgtgtgagctcattgaaactacaaggtttgcccaagttcaagtatttttactactgctcactgcagtgtgacatgttccagacacctaccaaggatgaaatgcctacatccaacttacagtgcctgtcactc

SEQ ID NO: 110738 - DNA, 120 bp, Glycine max
attaatgttttcatgtatcactggtgtttaagggatatatatgtcaatttatatatatcctatgatattagttttcccatgtcatatatatgatgttgcacaatgttgtggccttgattc

SEQ ID NO: 110739 - DNA, 412 bp, Glycine max
cacacactctcaacatgacgaggttgcaactctgaatacgagaagtcgtgggaacaaacacgcaacacttgacaacagaaaaaaacaaatccagattcacacattcattcatttcatcaattatctccaaaatccatccttactagtcaatactaccatgtgtggcaataccgcttttttcttcttctgactattcactccttccttcattccactgacccagcaccagcaccactcctttcatctttggtttggcaagatcaacaaacggaaagaaaaaaaatcctaccttttgcttctgttcctgagaaaatcacttttttgtcaataccccatgtgctatattcttgttattcccaacatcacatgttcgaaagttgattttgcagtttgcacccttgttagatctcag

SEQ ID NO: 110740 - DNA, 459 bp, Glycine max
cctatcgcgttcgatttggtattggaatttaattggtttaattccgtaccaagttcctatacgtttagctttatctcaatgttaccatcctatttggactaatactgagaaaaaagaaattcgtgaaattaaaaaattaattgaaaataaaattagaacattcaccgcttcgccaactgaatttacagtggcagcgaatcgtatgtgtctagattttaataatttattttattccgctggaaaaacctgctcgtttgttggtaaaactaaattttttcagggctggcataacctgtatttgcgtttagctaagcatcctcgcggttttgaattcgatgcaggaagttttgatgctagcgtcttccgtgatgctctaatcgaccaaatggagtttcgatgggaaagttacccttcatatttacagacacccgagaataggcgacgtttaactcatattta

SEQ ID NO: 110741 - DNA, 181 bp, Glycine max
gagagatttgctttggtaggtatatagatagaggagagagaaaccaaacacaaatccttgaaacgacgacggagatggccgtttagagctcgcacatgcgtttcacctttgagtgccgatccgatcccgatttctcgccaccggcggcggcctttgacaaccttcgccgccgtaacttccg

SEQ ID NO: 110742 - DNA, 443 bp, Glycine max
cccacgcgttcggcgctctttctctctgctcccacaactctcattcccaggtttgtagcttccatcattgtccacgccggtgatggaggtttcatcacgtcctccgatctcttctccatatgagcccgtcggcaccgccgtaatccacggtgttgtttaatcagggaggcactgccacggtggtgcttctcctcttagtcgtcgccacctcctacgtgcctggaattctcccacctacaacatttcatcaacatgactgacctccgtagcagcgaaaaccagatttgacgcgtaaaacacactctccactttcaaatccatatgaaggagaaaaaaccttccaatttcattccctttctttagccccaattaccagagatttctatattggccatggtggtgaatacgcatggggttttgcctagtttcaaggatttaacaac

SEQ ID NO: 110743 - DNA, 469 bp, Glycine max
aagtcactcatctgaagaggacttcactgagaacatgaatggcctggagattgaagagaccactactgaagactcagttgcagtagagaaggccaatttgatcgaaaccgagaggccttctgcattgatggcacctagcccaaggcaatttcaaattcttggaagagaactgggcaatcttgaaataccaaaaaggggtaatgtgtttgaaggactagaaaatgagatagaaggtgttgaacaaagttgtgtgagtttccctatggaatcacacacaggtagtcaagaaacaacactagcatttgtaccagaactagaccataccatttcagagaaaaaaaacttatctgatgacaatgatgtagaaaccattccacaagagtccatactcaaaagaatcaactcacataaagaaatgaaatcatatcaactggggaagcagttgtcttgcaaatggacaaccggagcg

SEQ ID NO: 110744 - DNA, 429 bp, Glycine max
cagagtcttctggtcagcgtaaggactaaggagaggaaatggcattctcgtaacccagaaaacaacaacagaacattacacacccctttggtttgtgtttttcaaacacagcaatgacagagtcggcagggccaagtgtgagtttgaaacttgttgtgttagtagctattctagtcgtctccgcgttgctgattctgcttctgatcttcttcctctgcttccgcaagaagcggaacctggcggccaaacacagctcagggagcatccctctggtgtccaaggagatcaccatggtcaaggcctcggatccgaagaagatggaggaggcggaggtcaaggttgaaattggtggggcccagcaccaccaaagcagcgaactagtgtcgggggaggatcccgatatagggtggggccgctggtacaccattt

SEQ ID NO: 110745 - DNA, 148 bp, Glycine max
tcggtgaaaacaagccctacctttggtgaagctgctatggggagaattgcccagggaacaatggtcctggcccatggtggatatgagaagattctactgaatacattagagacagttccggacgagcggcttctgaattcttatgcat

SEQ ID NO: 110746 - DNA, 416 bp, Glycine max
gatgtgatggactcgtacaatttcactgccttcctgtggtagccatctctgcaattgagttgatgtctgtttctcgtggcccacaaattgaacgctttctatcacagtctcagaattttatgtcaggagaagtagatatcaaaccagacattgtatctgaccttgaaaatgctcaagatgaggcacagaagcttataagcctttgtgggtgggaatcaagctggcgtttaaatgttcaagattgtgaagaacactctgcccaatctgaaagaaatggatattcttttggcccaagcaagactcaacttcatcttactcaagatcccgggtcaaaggcagtttctgcttctactaaattggatgccagaaaggcaaaggcgcctcttaaggagtctagacttgactctaggtcacct

SEQ ID NO: 110747 - DNA, 408 bp, Glycine max
ggagcaacaacatgtccactgtaattgctccaaatgccccttttatcagatgcaacactgctcaagcagatcatagttttttcaaagaagctggagcttaataatgaacagatgattgctccccgccgtcagtgctgcaatgtattgctgacctctaatgatacagtcagtcttcatattagacagtgtgaacttgatgaactgatctccatgcaaccctagcattcatttagggagtggcctcctttaaaagcttcttcgaaattttcaagagcatgaatgtccgcgtggtagctgatgtgaggtggatgcttcttctttaagtagagaaagatccttgtcctttttgttgaagaaaaataatcagaagataactcttaagatcttgctggtaatcaaacccctctc

SEQ ID NO: 110748 - DNA, 124 bp, Glycine max
cttgtattaaagttgaattataatatggctagttaccttgtaaagatgttttggaagcatctgaccattggaaaagctaaagatattttaaaataatcacacattttgagtcttgtttgcttct

SEQ ID NO: 110749 - DNA, 410 bp, Glycine max
gcgcccacgcgtgcgaaaccatactactatcactcccgacgggctcctcacccttacccggaccctcaccctcacccataccctgaccctcaccctgacccccatcctcaccctcacccacatgcacaccctcaccctgcgtacggttacccctgcccaccacctactactaggaagccatacaaggacccatctccgccacctcctgtccatcactaccctcaccctcaccctcccttcgtgcatgactctcctgcaccatctgctaagaagccatacaggtacccatgcacctccaccaccagtacaccctacttacactccccacccaggttatcactctactccaccacctgctaccaacaagccttacatctatgcgtcaccttcccctccttaccactattagc

SEQ ID NO: 110750 - DNA, 407 bp, Glycine max
ttggcttcttcatttgtagcagcatgaaaattgcgacgtggtgtgaggaccagcagtataattttccttcagcaaagcaagttgcggttgtggatgtgttgctgagatgttcagacattttctgtccttttctggttggttctaatagggatcttcctcctcatcgacattcaattaattccaatttttgtatttggacccatcaaacaatgaaggcaaggagaggaaaacgctcagaggctttctggccttccattgtgatgaaaaaatggttaaacatcaagcctaaggtgaatgattctagtgaagatgaagtggacactgaaactgaaagtgaagatgatgcttgttcaattagaggctcaagaatgtgtgtgcgtgaagataatccacatccacttagaaca

SEQ ID NO: 110751 - DNA, 282 bp, Glycine max
ccatctcactctgtttctctaatttccgagagcattgttaattcgcttccacgtgtgaagtcttttcagctttcgctgctgttggagttttcgcttcggtgctttacattgtggtccgctgttgtttttggatcgaattttgggtttgataggggttttgtgccaaactggaattgttgttctttcaagctatcaatcctatctgactttgaactgcttattttcaatggtgttgtatatgcctttttaacctaatatatgttcctatttcggggttattag

SEQ ID NO: 110752 - DNA, 471 bp, Glycine max
cggtcgcgtgggcgaggaagagacttaaccaagtttgaacaacttcaagacatcttggatacagttgctgtttattccaatccatctggatttaatcagggtatgttttctttgcgatggtcattttggaaagaattggatttgtatcatccacgttggaattcaaaggatttacaagttgctgaagagagatacttgcgcttctgcagtgtctctgcactaaccacccaattgccccagtggaccaaaattcatcctcctctaagggggatagccagagtagccacttgcaaagttgttctacatattatccgtgctgtgctattttatgctgttttcacttttaaatcatctgaatctcgtgctcctgacagcgttcttctacctgctctacatttactgtcattatcattagatatctgttttcaacagaaagaatctagtgagaatacatgccatgatgtgtcacat

SEQ ID NO: 110753 - DNA, 394 bp, Glycine max
cgtactcgtccgcccacgcgtccgggaatctggtatgcaactaagaagttcagaaaggagcagatgaaaatgctgggacagattacacctaaaagatggcaattgcttgggaagataaaacctagagggttggaatttcagttccttagaaggaaacttacaagatccaaagtgtttgatactgccacaaaaacatctgaaacaagtataaaggatgcttctaccacacatattgctggaaaatccgataagtaaacaactataaatggttcttctaagcaccaatattgatagagatggctgcagatactggattaggcattcaatttgataaacagagtagcaacgtagttattaccaattatcatcaaattttgctctgatattttatttt

SEQ ID NO: 110754 - DNA, 409 bp, Glycine max
ttaacaacattacaaatggagagtgtggaccttaacggaaacattccagttaatttatttagccttgcctatttacaaaatgttgtgctaaacaacaacaaccttggtggaaccttggatattggcaccaacaacagaaaacacctgaaacttgttaatttgaagtcaaattcaattcaggacttcgagcaacaaaatgatctcccagagaatatcacgataatacttgagtccaaccccatttgtacagaaacaggagctatggagaggagttactgcaaaaaacacaacatcttagatacagaaccacaaaataaatgtccacctgatagttgcagtcgagatcagattctaagtcccaagtgcatatgtggatatccaattacaggaactttgactttcagagcac

SEQ ID NO: 110755 - DNA, 171 bp, Glycine max
gacgattaggttacccaccgccggattcttacggaaaggacgcgtaccctacggcagggtacccgacgaatggaggataccctccgtaggcgtatccagcacaggggtaccctacaccctacgcgccttctcagtacgctcagcctccgacgcaacaacaccagaattcat

SEQ ID NO: 110756 - DNA, 193 bp, Glycine max
atttctagaaaccaaagcaaagttccctgtttcactttctgttctgttttggatatttctcaacataaccaaaccaaagcgttttactattttgttttctagtttcctccatctccctcccatactcaccttctctctgggtcaatgcaatctaagtccaaccttgactgcttcctccggcgtacgacacctg

SEQ ID NO: 110757 - DNA, 474 bp, Glycine max
aaaaattacgagtctttattagaaaaatattgactgattgatgcctttaattttacgaatactatagttaacatatgcttcaatatcaaacaaatgtataattgattgatatgatgagattatagtaagatggccatacctagtttctatatgctatttcaaatttaattttaaagctgctactgcattcattccaatacattgacaaagctgctactgcattcattccaatacattgacaatgtatccaaaattgatttttttttttaaatttagtcaaattttcttgtccctatgccctcgtaactaacttcaaaattattggaactcatgcatatgatttgttaatggatatatgaagtgtcttctagcaattacctgcaaatttgaatttatattgaaagacacttgcttccagtgaagatctcctggtattaacaattaaaatagcatggttactgacgttaggaatgc

SEQ ID NO: 110758 - DNA, 201 bp, Glycine max
cgggccatgagttctaaaagtcaaaatacgcagatgaagcagtcctccaaggttcaaactgaatcatctgatagtgttaggtccaagatgagagagtctttagctgctgctctggccttggtttctcagcaaggtaaacctcagcccccaaacaataatacaccgaatgatgctgccaatactcgggttaaattagagaac

SEQ ID NO: 110759 - DNA, 359 bp, Glycine max
gccacatgctcaacaatttcatgtaatttatcgatggcaaaatattactgcaggatctgcaaattatttgatgatgaaaggtaatgtagcttaattagtgtctttataaactttaccttagagaaactttcaatcggtggattctgtaaagatacccatcccatagaacatttgtttgttagattttgagaatagtgcgtccaggattgctcactaatatcttatttatggtataaatacaattagttaaagagataattagagccaatcaatattggaaaaaacccaagtcccaaattggttagagataatgtcaaaattgaatatataaatgggagacaaccttcaccctatgaact

SEQ ID NO: 110760 - DNA, 185 bp, Glycine max
cccacgcgttcgtttaaacatcattgtttcttcaaaattttggcaaagatttgtcttttggtttgagtgtcaaacataacctgtttcataggacagatcttctttgcacacgttactatggtgttgttgttttttttttttttttatggggattggagattttttttttggccggtattggagat

SEQ ID NO: 110761 - DNA, 342 bp, Glycine max
atacagcaccctttccaacacaaagaaaaaaagaaagaaattaaatcccccaattcgtcaattcttcaatcaatcaattttcatttccaattcttttttattctctctgtacaagcatagggaaatatacttttcctctgtttgagacgagttttcccttttcctcaatttgggtgcccccctaaaaaaaattctaattctgtttctcttagatttccaaaagggtattagaaaaaccgtgacttcaccatttattattccgtttcgctcgagtctgggattgaaacatccgaaaatcgaaaaccctaatttgtgatttcgtgacctctttttctttctcat

SEQ ID NO: 110762 - DNA, 212 bp, Glycine max
attttcttgtgattgttttggtggttgtaaattgtgatagcttcgtggatagtatacgcgaggggttgtaggttgtaaaaaaaagtgtggttcatacgataggtaatttgttgattagggtttttgtaaatatctggatattattactgtaattgctttgcgatttgaaagttagttatgcatatagaggaattgaagggaggtgaggtggt

SEQ ID NO: 110763 - DNA, 368 bp, Glycine max
cacaaacccctttcccttttctcggaactttttattttgttttgtaaggaagaaaaaaagcccaattttcgccgttctttcccatttcaaccacacgcacacgcacacgcactcaaatccatttcaaccaatgtaatgtgtctgtctgggtgctaatttttttgcctgaaaggaaattgagatctcaaataaaatcctccattccaaaccaaatgcatggttacagccgcctgggcggagcagcgcgatcgcctccgtcgtctcctcggttccggcacggccggagcaagagcagcagctggtgttcgtcgaaggagagcaattccatggagaagttggtctttattcttatgtcggcagtttttaga

SEQ ID NO: 110764 - DNA, 448 bp, Glycine max
catttcttccacaaatcttactgtttcttctacttctcaaaagcactttttcaactccaatcatctcaacccttcacttccggccattcccaaactagcttatttccaatacttcaagacaccaccaccaccacccatccatccctgcaaattccccacttccagcaaccacctaggtttcctttcaattttctcctttatatattcattttccaaacgcgcccttcttcaattgcagtccccgaaacactcaatccccaatggactccaaacaatgccgcctgcagaaaccctaatttcccctcccaacaactcatgaccaatgacggggcaagagccgcgcccgacgacttcggccgcgccgccgcccgcctcgccgtggcgcagctctgcgacgccgccgggttccatggcgccaccgcctcggctctcgacgccttcgccgacg

SEQ ID NO: 110765 - DNA, 431 bp, Glycine max
gatgagaggtatgctgcacggactggacccaaaatgtgcaaaggtaggcgcgttttaccaaccattgtggcaggacttggatcttaaagtatgacaacccaagaattctaagcgggactcatattaattgttgcaacaccacaaactggacataatctcatgctaagcggcttgatgcgggtcatgcgaatgctgcgtgctcacatataaaggtgcatcgcagatgccactgtatgtgggaaagaaggggggctacttgattagcacacatagggagccgaagagtagtgcaaatatcatgtggttttatgatcttcttctctatttttgggaaatttggagccttttttgcatcgattcccctaccgatatttgctgccatatactgagttttatttggtatcgtggctgctactgggatttcttttata

SEQ ID NO: 110766 - DNA, 399 bp, Glycine max
tcgcggtcgcgtgggttttaattgttgactgaaattctgtcagtttcagtgttttttccccttttttgtgttctttgtttaatttttccttttatttgcctttttttttaagtttagttttctgtttttgttttcccctgtactgaatgtgccggtgtgtaataatctcagtgcctctttgttataatttgacaaatgaaagggaaggcttaactagatggtatagattgtgctgtaaatgatgtggaatggaaagttaataatatattttttggtaaattctttttgatttttttttgtttttatatttaaacttgtggttattggaaatgagattttgtttgtgtatcactatggtatgtatgtgcactaaatgagatttggttggtgcatctatca

SEQ ID NO: 110767 - DNA, 248 bp, Glycine max
tcgcggacgcgtgggctaaatataagacatataagatacatacttccttaataggaggtctgataaaattcggaataacaatttagatttggcattgtctgccacgcttatgctgcagtgaagaataaaacttaacatcatttgctgctttctaagttcataataatttctgtacaagtaacaaggcacaataaatctctacagattattcaagtccaattaaaatgtgaaggcaagtgctttttatt

SEQ ID NO: 110768 - DNA, 440 bp, Glycine max
acctgtccatgtttcatgtaccaggtgagccaagagtcagctacccctattggttggattgatattattgttcctggaaatcaaataccaagatggttcaacaatcgatgtgttggtaattcaataagcctagacccgtctcccattatgcttgacaataactggattggcattgcttgcagcgtggtatttgtggtatttgatgatccaactagtttggataatgattggaaatcctctataagcattggttttgagacaaaatcttattcatcccggggttcaccgctctatattccaatacttcttgataggaatcttgtaacggctaaattgcatcacttgtggttactctatttgactaggggagaatttttttcctattttaaaatagaaaaaatgcttgatctttatggcatcaaaatgcatgccatggtcga

SEQ ID NO: 110769 - DNA, 358 bp, Glycine max
gacataacgtgctagaacttttattttctctgttctaacagagaaaaagatgagatgagagagaccttgacttagttaaagaaaaaaaaaaaaaaacaagggtgcaacattttgactttgtgtgaagggggcttttgtttttaagccttcctcttcgtctctaaagccatcttcttcgatcatcgttgttgcaaagaagttaaagcaattgaagaagggaaaaaacagttctctttcgttccttaatttcaaaaaccgcgaaaaagtgcgaaacgcaaaacgatggctgtggtggttagcgatatgcattgcgctccgaaaacgacgtcgtctctgcgaaccgcattgttatgaactg

SEQ ID NO: 110770 - DNA, 464 bp, Glycine max
cacagtagaaatgatcattgcatttcacatgaaggctttggtctttttcctttggctgtttgtcccctcattgggcaaagacttgctaagctgtgagacaacttcacctgatgcctctggctaccattgcattgaaaatgtgtcacagaaccaatgtgagacatttgcactctttttaacaaactcttactactcctctctctccaacctcacctcttatttgggactaaacaagtttgtcatagcacaagcaaatggtttctctgcagacactgagttcctctcccaggatcagcctctactggtacctattcattgtaaatgcataggtggcttctctcaggctgagttaaccaaaactaccgtcaaaggagagagcttctatggcattgctcaatcactagagggattgacaacttgcaaggctattagggacaacaaccctggtgtgtcaccttggaatc

SEQ ID NO: 110771 - DNA, 420 bp, Glycine max
tcgggttaaggcaagtgaggcaggttttgggaatgaaatgtacaaggtcttaactgctgcagcacttagtataatgctaaaccggtccttgatcattggtcaaaccaggcatattggttttttctcaagcctttctaatttttcttttcacttttaagaacttttacattctctcaactgaaatttagagaatccatgttcattggcttggctcttatatgaatgactttggtagctttaaagcataacttgtgccagatcttttttgcactcttctgctatgattcccacattgtgtaggacttaagtcgtgagactctttcatttagtagactagtcttttgggttagactctccttgtaagcttaaatcatagtatcatacatatacatattacatttacctacctattttcaagaa

SEQ ID NO: 110772 - DNA, 165 bp, Glycine max
tcgagataattgatcagtacattttgaaggtggaagactttgttggtagagcgaggaaactggaaaatgatatattgagattggatagcagagcctcagttttggacttaagactggaatgtcaggatttagaaagattttctgtcatcaatcgatttgccaagt

SEQ ID NO: 110773 - DNA, 420 bp, Glycine max
cccacgcgtccgctagatcaaggaattactatgctgcaaaacctggtgaaaaggctgctgctggaaataatagtgctaatggcaatgtggctggtgctggcagcaaatggaacaggagcaccagtgactgcagaggctggcatggtggctactgctgctgccttggaagctgctgctggtgctgggaagttggtggatacaagtgctcctgtggatcaagggacagagtcaaatatgctgcacaactttgagctgccaatttcattagcattacttcaaaagtttggcggggctcaaggagctcaggcaggatttatggcaagaaaacaaaaaatagaagcaacagttggatttagagtctctgaaaacgatggcaggaggcatgcgttgacgctgacagtcagtgattacaaaagaaga

SEQ ID NO: 110774 - DNA, 83 bp, Glycine max
cggacgcgtgggggaaaaaaaattggcacaaaatcaatttatgttctgcagttatgttgcaatttgaccctttagtcctcact

SEQ ID NO: 110775 - DNA, 393 bp, Glycine max
cccttgcgtccgttttttttgtcctccaatctattttttaattcaatttagtattttagttttttttcatttaatcttttaattttttaaaatccattctaaatcgtaaatcacacttttaattttaaacctttgtgaaatgcacattttcaaaaaataaataataaataataatcgattaaagcttttcaaattaaataaaaaaaagttaaatgaataaattaaattaaatttagaaatctaaataataaatttgcgaaaaaaaacacttaatttaacctttaattaattattattgtttcactttatgtttgtgctaggttagttagtgagcaacacactagtaaatgtgcagggaatgtggtaggagttttattggacaatcttcccccc

SEQ ID NO: 110776 - DNA, 319 bp, Glycine max
ctcgattttctcgttagaacggaatgcttcgtgccggcgctggttggcttcctcgacaatgtcaatgacggcgtcgaattcctcgaacaggtcgttacggcgttggatttggttgtcagcaaaatgaaagattgcgagggcctgaaaaatttgatactgaagaggcagggcgggggagaaaaacagagcgtggattctctgcttctccttctgcaacaaggaagccatgtcataaaaatcgcatcggctagggttttgaaatccgtcgccgtagacgcggaatcgaagctgttgttagcggaaaaggatggtttattat

SEQ ID NO: 110777 - DNA, 374 bp, Glycine max
ctttcggttagtgactaagaaccgtctcttcatgggaattgttggaatgaccttcgcgcttcagataatcatcatcgagctccttggaaaattcacaacgacggtgaagctcgattggaagctgtggcttgcttctctttgtattgggcttgtcagctggcctcttgcgatagttggaaaattaattccagttcccaaaacacctctgtcccgatatttcaggagattgaggaagtccaagtcccgtgcaccaccaccgtgcaattcatagttagctaacaactcacatgtaatgtagcaacatagtaccatttttattcttctccaacataactttatgtaggaatttaaacattaattgaaaaaacttacag

SEQ ID NO: 110778 - DNA, 510 bp, Glycine max
gcttctttttaatgcattaggtaggcaatctttttttatgcgggtgatatacaacatacatagttctgttaatacaggtgattataatcttgcttttaaatcattactttctatagataatacttcccatcttcttatattcaatttaattatttattatgaataaactgctaaccagtgacgtaattaataaacagtcacatcatcctatatagatcattttataattcttgactagacaattatgtcatttttacaatagatgtcattttttaaatcatttttgaccgatactaaactaaaacacatatatagatcaggtacacaaattcacggaagaagacaatatcatggggcaattacaatggctggagtctttttgaaactctaaattttagagtcattaataagaaaaagtgcgatgttgagtgctaataatatttagaataattttggatgaatgatactaactgttaagtttaatattattaactaaattaaatatcttta

SEQ ID NO: 110779 - DNA, 232 bp, Glycine max
gattttaatcgttgaattttaacagccacaataaagttggggcttgataaaactggataacccattgggaaagactgactcggcttttgtcttattagaagctattgggtatatcaaattcctctagagtcaaattgatgcccttagcttaccatacttgggcagtggatcaggaaacatgaggcaccaacaattcgttcaaggagagaagaattgtatattccttgaagac

SEQ ID NO: 110780 - DNA, 416 bp, Glycine max
ctctgtccttggaggagaatctaaagcccaaatatttgtacttggttaatgaacttaacaatgaagtgcaatccttgaccaaatacccgatgtatcttagcttatctttagaccagagaattcgtcctcgtcataggttcttggtttccctaaagaaagctccaaaaggaccatttccacttggatctctagttccaactgatgaatgtttttgccaacagtgggctggaactagtttggatagatatttggcatttcgtcagagattattactaaaaaagtttgctgagaaatatgaaagaaaaatgtgactgatcagaatcaagtttgtatcagtcaacttgcatgaatactggaagaagaatctgctgtaatattactgtcatgcaacatgtgttttataaaatgttcttgat

SEQ ID NO: 110781 - DNA, 476 bp, Glycine max
gttagctttctccaagtggtcatggtgtccttgaccaagaaaccaaagttctacggaagcagaccatgaggggtaatttttccagttgagtttagcagctgtgatggttggagtcccggagaaggagaaaacaggtccaggggaagccattttgagccacaaggtgaaaccctaagggagcaaaaaggtggagagaatagggctgtagtgttccaggtgacgaaactggaaactgagggctggaacggactcaggagaagccgaccaagagaacggcggaggcgcggcgcgtggactgcacgcgccggaggacgcgcgggacggtggcggcgcgtggctgctccgttgccgacgcgagttggccggctggctcgcgcttcccaaggcgagcctaaccctggcttcgccggagaaatgaccgccggaaagtggcggcggcagacggcggcggtggcggcgggcgacggcggatgaca

SEQ ID NO: 110782 - DNA, 189 bp, Glycine max
ttttactttttttacttttgttattttattctttttataattttctctgaattttttttggatgttgcttagttctataggaagtggtttattgtaggaaggggaaaatttggaattagatgggtgttttttgaggtttataaaatattagaatcttgatgggtccttaatcagatattcttttcctct

SEQ ID NO: 110783 - DNA, 491 bp, Glycine max
gtttttagtaaatacattagcacaatggttggagaaactcaacctttatagtatgcatgttgaagtttcggtctatattacaaattgttcttgtatgatcaagggagctttaacaacttaattgaactcttattaaatgagagcttatcatcaaagagtcgtaatcccttgataagatgttttaattttatgagaatggcttataactctcctgttagcttattttgtttagctttcccatttagcttattgaaataagctaaagtgaacttatcattagccacttatattataagcctttaaaagctctgtgaaagttcttccaagggtcccaaaatggggttaattgaattgagaacagcagtatacttaggctagttaatctcaggcagcatatcttaatgtttctttgacatattttcaaaatccttaggcctgagtactgagagtagaatctaaatactgaggttatcttagatgatatattattc

SEQ ID NO: 110784 - DNA, 434 bp, Glycine max
atgaattagagagagtgagaggaggaagaagaagaagaagattccagaatccagagtgagaaacattaggcttatcagaggagacatgcccgagttgaaccgacaattctattactactctttgcttctttcttcatgcctcatcaaatcccaaaggtattctctctctctctctctctctctctcatttattctgcattatcctgtctccagtagcaactcctaaccttaccgtgggatcctattggtgagttttaagattgttgtttactttgtgcatgtggagtttgagctcaccttatgttcttcttaagttcaccactcactaatatatttggaaactagttctgggctacacttgttgctgttactattgttctgtttatggagttataaggttgacttggtggcaaaagggtaaaaggagaagggag

SEQ ID NO: 110785 - DNA, 305 bp, Glycine max
cccacgcgtccggaaaagaggaagaaataacagttgcggcacaacatgcttgtggcatctctctagaagaatgaggatgttatgataatgctagggatgatgacatggccctgcaacctgttcatgatactaaggtgaatcttaacagcacttccagtgtgtgccactaattcgagaagccagctcaagatctggtgcttcagcctattcattgtctttaccctgtggtgtctgagagcctagggcatgtgggagcttataatggcctgttgacccaccataggccgctgagttcactcactggt

SEQ ID NO: 110786 - DNA, 226 bp, Glycine max
tcggtacaagcattcgggttctcatcactgaacatttgttctgtcatgtgagtgagagggtgtcattcaactggggtgatggatgatgataatgatggtggtcttagagaactagatactagagtctagagtgtttctttctattcttttttttttcttcttaattttggtttttaggattccacgggaacttttgagatgtttttgtgtttagtgaagaaaaggg

SEQ ID NO: 110787 - DNA, 299 bp, Glycine max
tcggatgttaaaaaaaacctctatcaccccaaattcatgtataaaacacttggtgaggaagaatcagaaacgtatagaagtcgtagacacactactctagagtcaaaacacgatcatatatatatactccaatgttcattttgctgagtcccttctcaataccattttgagtgtttgccatctcggatgtgtcctgaatatcattgctagttgtaattgtagtaacgaaagcagtgatacttcagacttgaagattacaagattgaataggtacaacgaccctttggtctattgatgtt

SEQ ID NO: 110788 - DNA, 417 bp, Glycine max
tcgctcttagctgcacctgtactgttggttgccatttatgcatcaatctcaaatctgttgacttgacagatctattcttcgtacctatgcccacgatgatgtgagtgctggatcctggtttattgggcttgatgtgaagcatgttgatgaggccaagttttgttgctcatcttggtcgacaggagcaatctgtgccggtgtttgagttgattccagtgcattcttgtgagcagacgacaaacgtaattcttaggagtcatcaattgttagaaggtttgcatcctaagattttttaatatctactggaagcgaagtgattcatagagatgtctgttgaaaagttgcttctgattatagacttgatgtccatcgaacaatatagtttcattagcttatgagcacgggtggcaaggtgtg

SEQ ID NO: 110789 - DNA, 478 bp, Glycine max
agacgtggttagggtaaagatggtgtgtgttagcagcagcggaatcagaaatgagagtggaaaggaaggggcaataaacaataaaggaaagaaaacccatcatgatatgattgataataaagcaaagcaagaagcagtggcaccaacttttccccattcaaccaaaacgtgctttttttttttaataataagtttgtttgaaaatgatttcatttcatggcttttaccctgtctttaatcttttggataaaggagcctcaaaaacatacacacactgcacaggtcaaaatgctcctcagtctcactcattcatcaccaccacacagtccatggccgccaacaaaaacaacgtcaaaccgacaacaacctcaataacaacgaccagaccaaaccaaacatttccctcttctcttctcttctctctcaaaccatgttactagtgcctttcatttccctcctcttctcaacgcattatata

SEQ ID NO: 110790 - DNA, 250 bp, Glycine max
gggatgaaagcacatccttttgcaaattccaaatgaatctattacaagaacaggaacaaagagattcatggaagcattaaaatggatttattcaagacatttggcccaatcataatcctgttcaatttgaatttgagcttaaacacatgcttacactaatttgggataaagatggagctattagaggagttttgggccaaaatcactcaaattgaggtccttgggttattgactatacatgtactagtta

SEQ ID NO: 110791 - DNA, 109 bp, Glycine max
gagattgccataaggcatagtttatacatcatttttccgagtgagggatctgcatgccattgaaacccatccacatagccatacatggaataccgcacttgggctgaat

SEQ ID NO: 110792 - DNA, 245 bp, Glycine max
tcgcttttaaaatgtattttttcactgagaaaatgcacagtttgaagatgggcttccctgactacatccaaacattggaagaagaacgccgtaagattcaggggttcttcaaagagctacctctttccttggaactggtcactcaaggtaacgcaacaaaaaaaccagccatacacttttgttgttttggcttgaggatcataaagtttcctcctttcttttctgggtttgctttctgaggggat

SEQ ID NO: 110793 - DNA, 439 bp, Glycine max
tcgcccacgcgtccgcgaagtgacttcaaaagaccaagttttggtttccagcacactgaagaatagcatatctgctgatgaaacccaagaacaacaagaaatccttgagaattctacctcagattcttccaaatgttcatctgccaatgatttgaagcaacttaactcttgtccaactgactttcggtccaaaccaggaaagtcagattccattggtcttgcagctggaaagcctgtagtgagagacttgtctgataaagctgtgacaatgtccagtgttcctttgaagatgttggcctttcctgaatatgaatacacctggcagggtgtctttgaagtgcatagaaatggaaagcctcctgatttatatactggatttcaggcacatctatcctcttgtgcttctcctaaggttcttggggtagtgaacaagtttcta

SEQ ID NO: 110794 - DNA, 90 bp, Glycine max
cagacacatgtgacatgtaactgctttgtagaccttgatgctcttatatttataagtgggatgcaagtttgtacctgcttgttttatatt

SEQ ID NO: 110795 - DNA, 98 bp, Glycine max
tcgcccacgcgtccgcccacgcgtccgcggacgcgtgggtttacataatgttgttcttaaatttgcaataaatatgaaaagagattattatgtgttgt

SEQ ID NO: 110796 - DNA, 348 bp, Glycine max
ctgatacaaactgaccttgaccctaaccctaaactgaaccccgcaacgacgccgtcttccgccgccatgggtagtagcagtaagaaaaggaactctgcttcagaggaacaaacccttgccgccgacgaatatcccaaaatgctcaataagaaacagaagaacaccaccaccgatgatgatagccaacaacaacaaccttccgtcaagcccatggagaggaagaagaagcgcaaagccttggacaaagggaggcgccgaaccgcatcccaacccgaccccaaacctgtgcctccgtccacggattcgcctagcactagtggcggcagcgctatgccggagttccacatt

SEQ ID NO: 110797 - DNA, 164 bp, Glycine max
atttttaatgtgggaaacccaaacaatgaggttacagtttgtcttttttctggattgatcactgatttatattcaaatgcactgattggtgtgcaaaaaaatgaatctttgtttgctgggtgtctctgaaactatgatcttgagaaatcccacaaaggaaacct

SEQ ID NO: 110798 - DNA, 475 bp, Glycine max
  unsure (1)..(475): unsure at all n locations
cccacgcgtccgagaacgcaccgttttaacgggcaagagttgtgtcccattgtttccttcgtcctatgtaaggttgaccacatcaatttcatgatctttcaaacgcaacacacagtgaaacgcgccctttccactcaatagaggcttgatcatcgctgcagaacttggacataaattctgataaaactctccaatggattatcagggtcgtcttcttgtttttattttgctctcgttcttattaagaggcgagtcatggnggttggttttcatcatctaaggagactccctctagtgacaagactcataccaccaatgaaggcaattttagaggttcaagtgctgagttctctattgaatccttcaatgaccataagggagtgaagttaatagaaaatgctaagaagaaaatgattagctcaaactcgtgttggcaaaatgcttatcaacatctttttgctggatgttctgaaat

SEQ ID NO: 110799 - DNA, 117 bp, Glycine max
tcatgggtccaacctgtatggccgccggaagagtgacgaggtttttggccaggcactaccctctctagcaccaccgtgataacagcgatggtgaggtcgactttcttgatgatattg

SEQ ID NO: 110800 - DNA, 241 bp, Glycine max
cgaagaattggtgaagggctctgctcatcaaaacggcgacgctggcataaccctcgatcgccccaaagctctcaacgccatgaacctagatatggatgtaaagcataaaagctatcttgatgaatgggaatctgacccaagggtcaaatgcgtactggatgatagcagctcgcctcgagccttttgcgctggtatgattgaggcatcgagggaaataaataattgattaatcttttaatgc

SEQ ID NO: 110801 - DNA, 417 bp, Glycine max
tggtatttctgtgtagtgggaaaccagactttttttgtagttgtactgattttcttgctttatacccacttttttttttctttctccctctgaattgtccaagtttatgctttgtggttgcagagctggtttcatcattgcataatattttgaatttgactgctaaggaaagcccccatttttctgagttgtaaagtggcttatattttttgagctgaaagtatatctggaatcaaggattgtgtgcttagtcgaccagacttgctatctcagcaatttatgtgagatccacggcttaaaaaggagcaacatggccttatactcatcagatgtctgcattctgtagctgagaaaatgggttgttgtgtctcaacaagcagtaggagtacttgtagcagcaagagcaatggagacatg

SEQ ID NO: 110802 - DNA, 391 bp, Glycine max
ctcgtctcactcccaaatcccaattctaaaccccacgcctcattcaaagctcaaaacccagagaattaattcaaccaatagttacaacttacaattacttctttatttattttttaattttctttcttcttcttctctttcttttgttattttttttacatgcttgcttctttcttcttgtttttcttcttctcaatatcctacaacacacagcgatcgagttttctgatatggattttgggctacaattgaaacccgggtcaggtccacaacaatggcggggttattctcattaggtggaggagggcgaggaggcgataaccaagaagaaaacaacaaccaaagcagcgagattccaccagcggagaccctattctggtacagcaaaaac

SEQ ID NO: 110803 - DNA, 353 bp, Glycine max
  unsure (1)..(353): unsure at all n locations
cccatgcgtccgatnattttttttttttttttttttgtttcttttttttttttttttttctggtgaagaattttacttcttgaacattcattttaagagtgaaacatctttaagggttgacaaaaagctccaggtaggctgaacttgataggaaacaccatattttagctcaattaactagacatgttttcgtgcccatataaaaaacggtattaagtactaattcactgcatgtacattccaaaaaaaaaaagccctacctgtttaaggtgcagttgatatggtgtttgagtaaggacgcctatagaggggagtcagacaaagtttaaaaaagtggggggagtaaagttttg

SEQ ID NO: 110804 - DNA, 387 bp, Glycine max
gtctatcagaaaactagccgtacctgagttagttaactgtgagaaacagttaactaacctctgattacaagagatacaaaaactgagtaaaaaacacttagggagtaaaatactactctcttataccttaggacaaatatatgtatctcacacttcatgaatgaaaaacagaacttggatattgagttttgggatttttccagttggagagaactgactctcttgggttcttcattgagccaacctctgatcttatcaagggaccttaacccttgtggcgatctcttcccccagcttatccattctcctgaattgtggcaccctccgtcttgactcgtatcatttgttgtcacattggctacatatttagaaataactcaatgggca

SEQ ID NO: 110805 - DNA, 425 bp, Glycine max
ctttatccttagttctttattactccttctcctgcgagaaacagaactttcagaagcggaatcgctcactattgatccgattccaccgtcatcggatctttctgcagccaccgtctatcgcacttcgttgccgtcattggcgccggtaaacctattcaaccactcttcttttccttcttcaatttccggatctgttactactgaattgattctatcgattgcggtggttccgatggactgtgattttcacagtcttgcatctctctctcaattttctggaaattcgagtcttatatatgaattctgaatgttaatgaatttgtgaagtaatgatgagtggaagagctatccaataacatgacatgaactgcaaattcttgtatacttgaaggttaagacagcttaaacaatacaaggatgttttc

SEQ ID NO: 110806 - DNA, 426 bp, Glycine max
cccttgcgtccgattgcaactcctcacatgaatgtgaatccaatgcaagaattcaactttaccaattgtattgctcacaattaaaagaattgaaagaattaaaacaattgtctcaaaaagtaatgatggaaaattcatctctagactattcaacaactgttggttctactcaccaaacagttgtgaatgctgaaaaaccacttgagggttcaaatgtggtggcgtccttagttgaccaacatttaaatggacagaaagttaaatctcgtccttcaaggtatttaaatgttggtggtactcattttcatgaaaggaaacaaccttcattcaacgatgaggattatctttctttgagtgaatttctatcagactcaaacaatgatctaactttggacgaaattcagaaaatgaaacaaaacgaatcca

SEQ ID NO: 110807 - DNA, 135 bp, Glycine max
aagtaactttaatcaagataaggggaacttctttagaaacatttttcccagtacatgtgagatcatggcacatcctttattacatactatttatcctctatatggatgatatatgggagcaattggctcaagcaa

SEQ ID NO: 110808 - DNA, 283 bp, Glycine max
gtttgaccagatccacccagaccagtcaacagatgggtggacataccgaccctgggaacctgcatcttcaactttggctacaaagctctgtagggatgaagaagacaagggtaaattcaaggaaaatattttatttttcaccttctcacaaacgcctaaggtgacgaatatcatagaacgactatttgaacattgtggataccacgtacctgagtttataagcgatgaagatgcaattaaacggttggaaattttgctgcggaaaattgagggaagtccactt

SEQ ID NO: 110809 - DNA, 190 bp, Glycine max
ccaaacacaacgcacaacattcgggaaaaccgccttgtctagacttcttctgtctgcgaatcacggaatctgtctgaatcgaccgattgagacaggaatctgcaacagaggctaaaggtgcagcaacaacaggccctgatgcagaaagctgtgcttcaacagcaccagatgtaccaccctggcatgctcg

SEQ ID NO: 110810 - DNA, 286 bp, Glycine max
gaatctccgtattgattagctgatccacccaattcccaccactctcagacgacaagcagcgtacgttagcacccgaccggttctggttcttgctatgttccacttcatcactccacaacaaaactagctaccaacgatctatttccattttggggtcgcaatatctcaccttaaattcaccaaagtcgcatcctttttctagaaagcgaaagcgggcaatggtgggatgaggataaaaggggaagagaagaagtcgatttgttcctacaagaaaatcactcttcta

SEQ ID NO: 110811 - DNA, 431 bp, Glycine max
cctatctaattttttggattgatttatctggaattatcaaaaaaataattttgaatttacttttccaaaaaacttcacaatgttttgttttgattcgtagttatgaaaaaataaccaaatattaatcattatgtgcaatgtatttttgcaaacgaaatatttgagccaagtgtatcccatctaggcatctagtttgtgctttattcactgccctgtgtcctcccgctcatacaagcaatagcacgcacaccatatgtttgattaattgcgtcacccaacacagaataaaaacggtttctcaatcacgaactgtacctcggtagtgttgaatgcggatgcacttgaggcagttctttcgcgaggctaacctgttaaacgggttaaccttgcaagtgcaagctcgttcctatgctcgtcgccgcgaacaattt

SEQ ID NO: 110812 - DNA, 347 bp, Glycine max
tgttgtacatggtgaagcctttcaaggtgttgcatggaggggtatcagcattggtggcagagtctctggcaagcataggagcacacatggctagtggataccaaagagtggctgggattcaactcagcatcaaccatttgaaaagtgctgtgcttggtgacttggtctatgctgaagccatccctttaaatgttggcaaaaccattcaggtatttcaattctttctttcattctttctttctttcacctcttcttcaattagtccacactcataggttgaccatatctaatcaagctggaagaaaaaccaaactaatcacattgaaaattttgtatcacaccataac

SEQ ID NO: 110813 - DNA, 494 bp, Glycine max
cccatgcgtctggttgattataagttggaaagccaatctcctgagcgagccaaagatgtggatacttcaagcccacctgtggtccgacctgttagagatattttgggagaaaatgtagtgcctcttcggataagtgaaccacccaaaacaaacagtggaagacctgctgataggtcagcaccaacacaggtgaaattattaatgatggtccatttggttctaccacctaggttctgaatcctgacgctggatgctacatgacctgcctttgctgtggagtttcttcagtgtttatctgtgatctgtttatcattgtttctatgccataacaaattcactgttttgtcagtcaaagctgatatttttctgttatttccttaaaaatgtttttttttttgttttaacgtactgttttgctggtgaatttattatcattgtatacttgaagattttattcaagcatctgatgaacaataggaatctagtcaatcaac

SEQ ID NO: 110814 - DNA, 162 bp, Glycine max
ccaccaactcctcatatttcaagacaaaaggaatggggggtttatctcttggagaaacgcaattaatgcaaggcggcagcgctcaagatcgtcgaagagatggcagaaagagattgacatatcgaccaatctgtgtagaaactggagtgattccccagacca

SEQ ID NO: 110815 - DNA, 413 bp, Glycine max
gatttatcagtatctgaacgggacttttatgaagccctgtttgagagatctaaagttcaatttgatcagtatgtcgcacaaggaaaggttcttcaccattatgcaaatatccttgacctactaatgcagttgaggcggtgttgtaaccatccatttttagttatgtgcggaagcgatacccagaaacgtgcagatttaagcagactcgcaagaaaattctttcagactaatactgaattccccgatgaaagcaatcaaaatgatccacggcagcaagcagagttgaacaaacttgcaagtagattacttctaaaatctgcttcttctttgcactcggttcaacctcatgcatacattgccgaggttttggagaatattcaaaagggtgacatcatagaatgctctatatgtat

SEQ ID NO: 110816 - DNA, 434 bp, Glycine max
  unsure (1)..(434): unsure at all n locations
cggtgcgtgtgtcatttttngaatagaagccattgtcgtggtgtaagcaataaagcaactgcaattcgcatagccaaaggaaaaagcagaagaaattattagaaataaacttccacaaccacttcgctgttctgctctgcaatcatggactttatttctctgttcttcccttttttcctagtgaagcttgtcctcaaattaaagtatccaaattcccccatcatcacgcgtctcttccaagcaaccttccaccactaccacccttaatccattccattcctctttctctctctatttatttcatcccaaatccccaaatacaaatcatgaatctttcgtcgttttatcaccccccagaacccaaaacccacaatttcaattctgggcattcaaattagccactaaagtttcaattntgaattctgggtattcag

SEQ ID NO: 110817 - DNA, 264 bp, Glycine max
ggcgccttcgcgtccgtgttgcagaatccaggaagaggcaccaaatacaaagcactattcactatgactactcatacccaagaggagcttgttgctcaacatttcgaacagcaaaagatccatgatgatgaacctgtcggacaggatgataatgatgaggaagaggatgatgatgattatgaggacgacgaggatgatgaccatgccgacggactagaaggggatgcatctggtcgggacaagcagaccacaagtgaaaagaac

SEQ ID NO: 110818 - DNA, 454 bp, Glycine max
tcgcccatgcgtccgatactatttaccgtttagagaagataatgaatgatgtacaaggatggggaataagataccgtcttaggggaaacctaaaaaataagaacaaataggaaggaatgttaactaaacaaagcttaggaatctcttcatgtccaataaaggggaattagttgccttgatttactataactgaaaaccgcctgctcccttttttgttcaataattttcattaattaaatgattttcagcggtttatgattagtagagttatctttttcttttttttgagtgcagtgttttcaggaagaaaaacatcattcattataaaaaaatactcctgtcctaaattggctacaaaacccatcttgtcagccttttgtatgtgtagattattgtaattactatagaactgcttttcatttaaagatgtatgtgattctttttttttttttaa

SEQ ID NO: 110819 - DNA, 328 bp, Glycine max
  unsure (1)..(328): unsure at all n locations
tttgcagtgatttaccngcaggggcaccaggaagcaggggttctcaatttattccgattcataacctaaggggggcaccatctaatttgaaatggaaggattgccgctatagtcatggctcccccagcggtgaagattccatgctctggacatctgtgatctttataagagcgttctcatgttgaactcctatgtgttttgcttcggagcagttggaagaaacgtgttgggcactaggacataaaggcttaaattttcaactaggaatggagagaacataagagccaatcgcgttgggtgtgcaagtgtcggtggacagacatatcac

SEQ ID NO: 110820 - DNA, 99 bp, Glycine max
cacatattccgataaacagaaacaccaccgttgtattcgagaataccggagaggcatgaacttgctacgagtccactcagaggaagaggaccaccctct

SEQ ID NO: 110821 - DNA, 405 bp, Glycine max
gtcattttagcttctgattctgaagccatcaagagtcatatcataaatctcaagcgggctgctgtgcaggagattcggattcaacagtcattgcaagagatacagggtataatctctcctttgttgaggattgctggaagatgaaattttgggtttctcatctatgagctggttttgttaggctatgtcttttttttctctctctaaattttgatttaagaatgtatttgttattctggtaatttgattcaggcaatgccagtttctctagaatttttgttggcgactgtgatccttggaaaacaccgggaaatgttttaaattattgccaattgtgttttcaggggctctactttcacctttatctatggtctcatttggcacctatataatattttcttctgt

SEQ ID NO: 110822 - DNA, 447 bp, Glycine max
ttgcctttctaaggagcctccccatgcggcagcttcaaccaagagcgccggcggcagtggcccctttgccggagaaaaccctgttcgaccgggaactcaccgccgagctggacaccctccggtcacaaggtgaattagggttggctcagttgcttgatgctgccatcaccacacagaaagttgcctcagattctcttgccaacgtttgttacaaagactatgctgaccgtggtgctgttgataagtacctagaagacaacgttgagatgcttgatgaatgcaactattttatggacaaaatagatcacatcaataagtacgtggactcattgagagtggtcgttcatttggtcgataagggtggttctgcaaagcctataactcgtgctttggagcttttggaatcatgtcaaggcatggaaaagagatgcaaagcaatggagaaac

SEQ ID NO: 110823 - DNA, 430 bp, Glycine max
ttgcgaccgcttcgcgtccggcgggaggacaacgaaatttctcaggaaattcactcttctctctctgatcgctacgcgatttcaaggttttgctccgatcaagttcaatttccttattctttttcttttcgtttgtgttttgaagaaattgaagggaaacaagttccaataaatgaaaaatctcgagcgatcgattttctttgctggtttttgtttgtaattctgcgaaattgattatttgcttgttgatgcttggaagctcatggatttggttctttcttgcttgattggatttctaggttttgaaatttcattcaggctacgctttattttcttgttcctgttctttatctttctcttcttttatcgcttgaatattttattccgtaacaattgaacggatcttttgctcaaaggagtcaaaagagag

SEQ ID NO: 110824 - DNA, 485 bp, Glycine max
  unsure (1)..(485): unsure at all n locations
ngcttaaagatttgtctttagttcggccaaatgaaagtttaatttttatccaaaaacaagatatattgtgatttattgaactcgagttcttgtgatgcatggaagagtatatttgtcaagagaagtcaaatgtcaagtttgtatgtatggaaagtagtcagttgaaatcagaggtcagttccttgaatggattcgtaattgtcgaccggaagatatgctagacacaaaatggttcttaagatgctagaatcagtagctcggaacctttgaatgatgaagatcaaaattgttagatggagatctcacacacttcaaatttcgagtgtgttttaagtttgagtactaataataactaactagttagaagttagaatatcggatataggtttttctttgtacaccaactcatttgtttgtggaacatatagaaagccaatgagaatctatcggtggatttgtatacttaatatagatctaacagattt

SEQ ID NO: 110825 - DNA, 455 bp, Glycine max
  unsure (1)..(455): unsure at all n locations
agtangttatatacagagnncaatnggagaaataggatncgtcatttcaattctctctctctctctttcaattcgcagagaggttcagtttgtgtcatgtgcatacagcaatcggattgtttggatcagaagtcaattcgaggaggaacaaagaacaagtgaataaatgaagaggagacgacaatgaatgaaaaagtgaagagacagtgggcctccctgcgtcagattggtttgtcccagaatcgcacgattcatgtgcgggatgtgattcaagcaattcatgtgtgatccgtattgccaaggccatgaatcatatcatattgcatgtatcatatcgtgaatcgtatgatactgataacaatgcctaggatccatgaactccaagcaaccgagagaactattgtctgcatggtcctttcattgccccatgcaagaatctcttgttgatcataggc

SEQ ID NO: 110826 - DNA, 424 bp, Glycine max
  unsure (1)..(424): unsure at all n locations
nctactcgtccggangannnnggggctncatggccacacctgtggctagtttttggggcaatgcagaagcttgagtttgaaaagtgtggtttgatcaattaattgcatagttagagatttttatcataattccacagcttctccttagttgaaaggatgccccttttgatgtggttaagagagatgtgaggaatgttcatcgctgccaacaatgtttaataagaataattaaaatttgaagaaaaattatttcatccagatggaatcatgatctgtttttgctaattttcagaaataataatagcagatggatcaagaatcactagtgctaagatgtttactaatatgatttctgttgtctgatcggctgttccttttaaattgagaatcatatcatattatcataatcataacatgagacatt

SEQ ID NO: 110827 - DNA, 64 bp, Glycine max
  unsure (1)..(64): unsure at all n locations
gtcctaagcagatttagttagagtgntattcattggacaatttactgtcggttttatactgtgt

SEQ ID NO: 110828 - DNA, 331 bp, Glycine max
gtgttcggggttgttgattgaggcgcttaaatgggggtgtttataaactacttgttttgttgcaagtgggttggggagggaacccaaagagaagggctcggagttgttgaagttgttgaatagtgcaggagcaaagctgagtgtgttcatcattcttcgtggatttaagcatttgaagaatccctttaatttgatctggctataggatatgagatttgatttcacttctttttttttgtataggttgatcatactgtagaaacagaatataatactcttgtacaaagacgtacacatacggaggatacaaattgtatctcttaacactcaa

SEQ ID NO: 110829 - DNA, 491 bp, Glycine max
ccttcgcgtccgtgtttttcaggttgggactcgttgcgaccatcaaggtatgtcttgttcttgctcttatgtcctgttcctgtttaggacagttttgttttctttagcttctccttttgtttttgggttattattactactactactggacaaggttcttaaaactgcgtatatgtttgtgtctaatgtgtataacgattgttgagtgacgtttgaaccttgcgtgcaaggcttgctgaagttgtgttatgagccatttgggtgtgcagattgattacttagcgtattcaatgggggtttaatttatgggagcttgtgtcttgtaagtgtttgttgaactaaaggttgttttcataagatttgctgtgaagtttagtgaaataagcaggaaagagataatgggagagtcgtgaaactgcttgtattagtatccgctgcatatgatttgtgtgattagcattaaggtttggatcttaaatggaaagtttact

SEQ ID NO: 110830 - DNA, 306 bp, Glycine max
  unsure (1)..(306): unsure at all n locations
gtcctattcctctcttggntctcttgcaaaagcaaatcaatggctaaagaatcgggatcatccaagattgaaatgttagagattagcaatgaagcaatggcagaagcacaatcatccaagacggtaacaatgaagcccgcggaggcagaagaatccaagacggaaacacagaaaatcaccgacgaagaatcaaagaacgttccgattgcggctacagaagaagaatcgaagaagctttcgatcactaaggtagaagaatcgaagaatgccgcaaccgcaacaaccgagggagagaaagaagaagcg

SEQ ID NO: 110831 - DNA, 225 bp, Glycine max
  unsure (1)..(225): unsure at all n locations
ggcttcccttttttttnttttttgaagatgactttgtgaagnttccggcgaatttttccaaaaaaaaccgaatatgtgaccaattacaattcatggatctacagcccacatacctactatcaattatttttttagcaaacattgaaccttggaacaggctacaagcttgtgatcattaacgtctttaggtgtgtgtgagccataaaacctacattacttacaaat

SEQ ID NO: 110832 - DNA, 397 bp, Glycine max
ctttctcttgccactgtctgttaacttgagcaatcactctgttccttcgcttctatcgttcatggagcttcagaggcgccaagatcagagcctctcccagcggaagggccagaagaggaagctcgacgaggagcagcaccacgaggaccgccagatctcgccggcccctcccaccgccgacgagcgcgccgccctcctctccgacgtcgccgaacaggtgagcatcctcgagtcgactttcacgtggaacgaagcggaccgatccgcggccaagcgcgccactcacgcgctcgccgatctcgcgaagaatggtaaaaaatcgatgcctactccgatctcgccgcgtgtcgctgccttcgtttggattgcggtttcggtgtggtgttctcttcttctg

SEQ ID NO: 110833 - DNA, 409 bp, Glycine max
aaataacataccgagtttgattgaggagacggtgaagagttgtttgtcgccggtgttgaaggaattgatggcaggggccatgggaggaggagcgtttggagggagagggttttcgttgaacttgaaccctatgccttttatgaatttgagttttggcggtggggaaatggtggatgagaaatggaggaagcaacagatattggagttggaagtgtattcgaagcggttggaactggtgcaggatcagatcaaggcagctatggaggagttgcggtcacatggaggaggaggattatagtttgtttttggttttgtagcgagtgattggagttcttcttgctcttcgtgttcacttcatcatacggatttgcttggtaatttatccatcaatggttggttcatactcata

SEQ ID NO: 110834 - DNA, 436 bp, Glycine max
ggataattaatataatctaatcaaatgtgtttacatatatatatatatatgttctaaaaagttgtcatttgggtttgtattgttgtaaataaacaatttagtagtactagtgcatttgtactcatgttactatgcatttgggtggaaaatatgtattataatggtagaaaaaagggtaggagggtgcgcaatacgcacggtagactttgtatagggtggacagggaacttcatcagattcttttgctctcgagtgtgaagctgaaacagcagcagaggcaagagggtgtgttccacagaatgatatttgactgaagatgaagatgggcatgcatatcttgcagtgtcctctcagttgtcttgttcaatatgtatgttcaaacttgaaagttgaaagcatcagtgtgtgatggtcacagtctgagagcttttgagct

SEQ ID NO: 110835 - DNA, 501 bp, Glycine max
tcgaatatgcttatcatataagtatttatgtatcaattatttttataattaaatagaaaattaaattaaattgttttcacataaatcacttatgaacatattaaaagttatttttatactttctttcaaatactttcacaagtattttatgctataagtttaagtaaattgtaaaaaaaaaatccaaacatactctaaatagtgtttttttataataaaaaaaacttgtttaaaaacttttttcatactccatcattgaaaattatttgtttagttttttatgaattattttaaaatataaagttaattattaacattttgttggttcgagtaaagtctgaatctcaacttcgagttttatagataaaaaacctgattggaatgtaagactccaataaaattagtttgttagccagattcttgaacaaaaattagttattgaaaaaaatcaataataattcacatcaatgactactatcaatggataattcccgtccttaa

SEQ ID NO: 110836 - DNA, 270 bp, Glycine max
tcgtgctcgtcagttcctggttgttctttgggtggatcatctgttggcaagcagtgtaatgatctttctgtggaaaaggatcataaaatgtcatttccttgtgaagatggtgaaatccataaaatggcaatgggagctgcagagaaggcactgtctactatcagaacaaccatatccggtgattttaatgtaaatgaagggaaagagagaaacaattctgaacctgaaaaaattaatggctcagaaacagatcttgctgctgttttgaat

SEQ ID NO: 110837 - DNA, 455 bp, Glycine max
  unsure (1)..(455): unsure at all n locations
tcgggttaaatgggaaggtaattgtagttgtagcacttgaccaaagggtagtccaatcctcttccatgtggtcttgtttacatttcccttttcctttttccacatttttttccctatggctaggtgtgactgagttcaggagaggggtggtaaggctaggaattaggatgcaggaaacgcagcttgcgcaggattccatcctgggatctagagcttacagtaagggatttgtgccatttgatctatggctgtttggcatgcacattgcctttcagtttcagtattattatgtttgtatcttcactatttctgtaggattaaattccttagtctttgatgaaaatatatgggaggtctaagaagccatctggtgagcttttcataggaaaggctgattgtggttcttaggctctcttatccatgacttgtatntagttctagttttcaaatttggg

SEQ ID NO: 110838 - DNA, 148 bp, Glycine max
tcgattatttatgtgtattgattcaaagttggcactttctgtgaaagtgtctagctccgactccgatgatgttgggcattgggattgcttatgtgtattgatacttttttttattttttaaactaaacaaagctcatttcattgcatt

SEQ ID NO: 110839 - DNA, 151 bp, Glycine max
ttttcggttacatttgtaaactagtgacatagtttctctcatgacatgacatgtatgttaattccagatatttctagtttgacactcttaacattgtatctataaccatttttccctgataaatatacatgcaatgtaatttattgacaat

SEQ ID NO: 110840 - DNA, 292 bp, Glycine max
cctggcgttacagaggttagtattatattatctcaatgcattccggttattctttttatgaaatggttgtatttttaatttttttaatgagaattgtgtcaaaactgtatgaagcatggaattgttaattttgaagtttttgattgaaattcacataacagcaatgcatggggtttctaatcttattagtcgtaaacataccagcttgcctaaataagcatggtacatattattataggtaattggcgaggtcttatcctagagaaaactatttttattttgctccattggc

SEQ ID NO: 110841 - DNA, 361 bp, Glycine max
tatttttcgaaccctgggtacacccgacgagaaaatttggccaggattatccaaattacctggggctaaagcaaattttgttaagcaaccgtaagcatgtcttctctctttttcttcttgataagaattctatgctatgggttataaagcagttacattttgcaactgtttgactataagttattgatatttcaggattaatacactaagaaagaagtttccagccgcgtcatttactggtttgccagttttatctgagctgggatttgacttgttgaagcggctgctaacttatgaccctgaaaaggtatatatattattcattgaataaattcttattgggtttctgtgacatgaagct

SEQ ID NO: 110842 - DNA, 168 bp, Glycine max
tttaaacatagatattgacaaaggcacacaaagtgttttccgctcataatgcactgagtttgacgctgaacttatctgtaggtgccgcttgattaacatgggtgctggtgactactacaaaatactgtaggtgaagcatgatgccactgatgaagaagtgaagaaggc

SEQ ID NO: 110843 - DNA, 346 bp, Glycine max
cttaaaaaaatataacgaaagaaaaaaaggaatttaatccaaagaacaaagttaaaaatcatttcctagttttcttttacacattttaaagaaaaattaatttttttttctccctacataaaaaaaataacaataataaaatgcaatcaaaaatgaccaccatgcaattattgaaaaccgaacaatcaagacgttcgtcatcgacttctaatgctaataatgttggtagaagacatttgaccgtttcaagaagggcaaacacccatccttattatagaaataagataaatagcgaaaattgttattaatgtgatcaaagtgcagattgtttcagcattttgaatgc

SEQ ID NO: 110844 - DNA, 307 bp, Glycine max
tttcaccggcgcacagactcaccaaacacagattttccccttctctggtagtactgttcaaccatgtaccgtctgttaaggatagcaataaactacttgttgcttcactgaaaatacagtcatctattgatcttcagcgtgaccgcaaacacaccaacacaccttttgttacttgcatctttcgagccgttccttcggaacaggtcattttgaaagctgtgttagacggcagagaagtcaaattcgttcttatcctaacctaacccacttaagcgccgcacagactcatcaaactcgttgtgactgc

SEQ ID NO: 110845 - DNA, 389 bp, Glycine max
aaaatttaaccctagtaattttctctcattgtctaaatatttaaatcactctactctagaagacacaccatccgcaaagaaacctctcccaaaacccacacacccacttccaaaacgatgtcgtcttcggagttccaagaccccgccgccgccgcatcatcggaggcccaagtcagcaaaaaggcggctaagaaggaggccgcgaagctggagaagctccgccgccgccaggaaatcgccacggcatccgccgccacggccaacctctccgtcgacgaggaggaccctctcggcggaaactatggcgacgtgccgctggtggagctgcagtctaagacgccggcagacgtcggcgagtggacgcgagtggaggcgctcggcggcgcgct

SEQ ID NO: 110846 - DNA, 251 bp, Glycine max
gtgtctggccgagcaaggaaagggtcatgctcaggaacagtttgttgagcttggtgagagccacaaggctgggccttttggaactgtcaagggtctcagaaccaatccacctgtcattcctgatgaatctgtgaaccccaaattgaccaagatcttgggggaagttgctatttataaagaacttattgttgctctcgctaactctaatgtgaaggagatgttgcagctatggttcaccaacatcaagaggg

SEQ ID NO: 110847 - DNA, 249 bp, Glycine max
ataaattgctgaagaaatcaaacgaacattttaccgttagtctgaacctatcaatttgtgacatgaattgatagctaaatacttgtgattggacgctaggacattttagcacagatgttccatgttcatacaaatgccataacattataaacaactagcttccaaaaatataccctccgtttgatgtggggaaactaatcaaaaattgagttaacttatgaagccccgaaacttatcaaaaattgagtt

SEQ ID NO: 110848 - DNA, 301 bp, Glycine max
ctttctagatccagttatctgttcattcttttagatgctagcagcgaaattgagggataactactgattacggagttcagccattggtgctcaattgctatttccgggggtgatatgattgtacttttactctgctattggatatacacaacttctgttgatgaccaaatattgaagagaaaaaaaaaaactatatactaaatattgatgtattgaaccgctgacgaactaattgtagactttgttgcactgaaattttgctgcaactcaatttatttatgatgcttttgcctttcgtatt

SEQ ID NO: 110849 - DNA, 109 bp, Glycine max
tgcgttcgctgtcaccgaagaccatgcagcagagtattccaatggtgactaatccccttcaaagcccagacagaggttcagggacagatctaaggtcaaactaaaaccc

SEQ ID NO: 110850 - DNA, 103 bp, Glycine max
tcgcttatgtcttaagcaccaacttggccttgcttgtgtggcacttcatttacctgccttgtgtagtttacaggtctcttttactgactccagagcaacatat

SEQ ID NO: 110851 - DNA, 324 bp, Glycine max
gatcattctctcatgccaaactgtgttcaggacctgtccaagcgagtgaatatgttggaaggcacagcgacttcacaatcttggttgttgcagtactattaaaaaatgtagactcaaataactaaaactccaaccaccaatatgacaaatgaccaggtaactggcttagacaagtaagatagattggcggcgaatccaagcatggcatgtgaatctcttgtatcgaatgtcttcttgaaaataggtccatacatggaggccaggtggtgtgacctgtggccatgaaataatgcaatgatattacaaggtattatagtatgttgg

SEQ ID NO: 110852 - DNA, 51 bp, Glycine max
tttcacgcgtccgacttaacccaggtgtaaaaatgtcagcagtgaacatgt

SEQ ID NO: 110853 - DNA, 51 bp, Glycine max
ttcattttcaagctctcaacgccatctccagctgcttccttatcagaagcg

SEQ ID NO: 110854 - DNA, 51 bp, Glycine max
ttttgaatccagcgagtgagtgagcgagccaggtagggttttcggtgtttc

SEQ ID NO: 110855 - DNA, 52 bp, Glycine max
ttcgtcctaaaatatccttatgcttaagtggtgtttctagaaatcatgaaat

SEQ ID NO: 110856 - DNA, 382 bp, Glycine max
  unsure (1)..(382): unsure at all n locations
gttgaatttgttgaaganactggaaaaaaangngcaagcagtatcttctccacatcatttcaagtagaaccaccaaattcttcgatgcctcgggaacagacccctcaatctctcactgctgtgacaagatgctctggaggggagttccttgaaaaccatgtcaaaccaacagagaaaagctcagcctttggcagtatctggtcaaggtgtaagcctgctagtgctcccctagttcaagccagaaagagtagatttatgagcacagctaaggttggcactgaagttaaaaggagtaatgagaagaatgttgtcataaataaattaatgccgaaggatctttctgctgtttttgatgaggagaaagaagcattcattctaaata

SEQ ID NO: 110857 - DNA, 291 bp, Glycine max
  unsure (1)..(291): unsure at all n locations
tcggtacagacgaacggcccccgcagacgcggccggcggcgaccagaaaagcggacccgaccaccaacccagaaaaaaggaacaccagaagagcgggagcaagccaaccagaaaccacaccgcgccncaccgagccaccgnacacaaccacacncccatcaggacccaacacgaacacgaacaacaacaccnccacgaggggcacgacgaagacgacaagaacaagaagcccaagaaaccccacgnccaggcgcaggcccaagcccaccatgcccaggcccnggcccacag

SEQ ID NO: 110858 - DNA, 249 bp, Glycine max
  unsure (1)..(249): unsure at all n locations
atcgaacacgcgcccgcgggccacaccaccggggccggaggagacaacaacaacaaccccacgccccaancnngaggagagagcggccgggcccgacggagaaggagccggcggaaacgaacgaagcggcgaaaaaggcggcggaagcggccaccaccggcgacggcaaacacgaggaaagccgacgcaccgacgcgcccgagcagcccaagaaagcccccgccaaccacaagaaccccgccaacaccc

SEQ ID NO: 110859 - DNA, 329 bp, Glycine max
  unsure (1)..(329): unsure at all n locations
atcgactatttcttctaagccatcngatcggatgataaaaagatccaagtatcaataccaatcgattcgattagtggcagttccaacaatggaggttgtggtaactccaactctagagaatgacacaataacaacactctatgaagcatcactaaatggctctgtaagtaccttaaacaccctgatccaaaggaaccctctgattctgcatagagtttcactctctccattcagtgaaaccccattacacatagcctctttgctaggacatttggaattctgtgaggcacttcttaaaaggaaaccaagtctagcaagtgaagttgact

SEQ ID NO: 110860 - DNA, 348 bp, Glycine max
  unsure (1)..(348): unsure at all n locations
tttgcatantctcttgaggaagttctcattctggttgaggtttgtgtttatgttttggttggtgttgcctggcgaacggcgtgcacggggagtgttaccttttttttagtttggtattgggaatgttatgttaccttttagtttcactatcaccatgcatgcctgttgcaatcttttgaaaccttttccttgtcatcacaatgaagcgctgacacggaccacacttgtcatgtctcatgccgttcttgtgatctaattgcttttatgcctatattttttccccctcaatctcacgtttctccctgtgaatttttggctcaaataatagcagaacttttgacctgacca

SEQ ID NO: 110861 - DNA, 316 bp, Glycine max
gcgcccacgcgtccttccacgcgtccgaagtactccctcaaaagtgctggcaggtccctatcactattcgctaccccccctttttaattattggcttaattggttctcttctgtctttgtgatcgaggtaatcacccaccatgaaccaatcatggatcgggttgatctgttttatggttgttggatttttgccgtatctgcttattctcaaatgatctaatacaaagatcaaccttcggttagcgcttaatcaaacttaaactttctcgtgcttgtccagaaatctactgcgtgaaaattgaatacagttctcccc

SEQ ID NO: 110862 - DNA, 418 bp, Glycine max
tgaaaaccgcaacaaacaaaagaaaccccaatagtcaaagacagtgaacctaggattcatattgtttttagccattcttttcccgctggaattttgtggaagtaatgcttcagcaattctgtccagtattagcgggaattgctttttagataagccaaactgtcagcagttatgagtatataccagcaaccaatatttggtatcttggggctataaattttgcaggacacagtgtgctagttactgtaatgccatattcttttgctgaatgtattttagctgtaattttttgtagggattttgccaaactgaatggctagtttattatattttttattgctattattttaactttttaaattatatattatgctttatttggtttgttattattaattgtatagtctatttatatgtt

SEQ ID NO: 110863 - DNA, 439 bp, Glycine max
  unsure (1)..(439): unsure at all n locations
tttggttatgtttgagtcggatgtgttcttctatacactgctcaggggaagtttcatgggagcaccacaagcacacttaaatatgtggtgagtcaggctgacttcactgctgaaaacctcaggaatgtttcacattatcttgatgcagctcagaagattggagtcgatgcggtttttttaccaggtgatgttcagaagaacattgatgaagttcagacaaagattaattcttctgctgcagaactttccagcaagactaaagaaaattcagagacaattaaagatgtcatagatgcaatgcgactggctctggttattgttgctgctgttatgctctttcttgcatttctcggattctgtatgtttgttttttcttttttaatacttgttttggttttgattttcttgctctatgttaaagttngttgcaattatgata

SEQ ID NO: 110864 - DNA, 291 bp, Glycine max
gttcttaaacaaaatttaaattttatatactatgctaattgctggtgaataatgccttgtgcaatcattggtctttctttaatgctaattatcatttatagttagtagcattagatggctggactctgtttagttgttagtgaaaaggcctgttattttgtaagttggtagtaatttcctgctctttaaatacctaaaaaatttattttgtaagttgtttgctcgtggtaccaaaggactgttattgttgagtgtaggtacgtacagaggatgatctgactgaagcaattg

SEQ ID NO: 110865 - DNA, 437 bp, Glycine max
  unsure (1)..(437): unsure at all n locations
tgttactttaaaagtttctatcatgtcaaaaaacgttgacgcaggcgatttttattacgatggacaggacatggctcgtacgccctattaccacaacgcacgtagcaaccggtcaagttacaataaagcaatagttgatattagacctgatgctgctccgttggaagtgagcccggacttttttgggttcctgttcggatctaaacccgccaccatctcgtcaccgtctgatagaagactccccgatttcccagaaatcagaaacacatcacttgaagaaccatcgttggttagtggttccattagtgattntgaatccggtattaaatgtctttcaaaccggatcgacgaatatgaagccaaactggacgaaattgaagatgaggtcgtcaagtcacacaatgaagatggcgctgccgatttactcgtcaatgaaa

SEQ ID NO: 110866 - DNA, 198 bp, Glycine max
gctagaagctttttgaagttctcatggggcagttgcggaaactccttggtctgaagtctgataacctttatgttggtaagtcaggtgcatacattctcctaggcagtgaaagaggtttcacagaatgggagttggatgttttgtcacggaagcatatatgctgtaatcttcagtcatgtgctactacacttggatcac

SEQ ID NO: 110867 - DNA, 408 bp, Glycine max
cttgggaactgaataactgctaggtccttttggagttgctaaaatagttgtttatgttgtttcacctcctttgcagccgcctttctgtggtggaaaccgtgacaaaattcagcagaagatagttaaagacaagattaagctgccagcatttttgtcaagtgaagcacattcactgttgaaaggggtaatcagtagtccacaaagaagatatttccattgattgttctggaacagttcatctaaatctcatgattatttggcacataataagctctagataacttttccgttttaaaatactattgtcaatagaggcatgcctatgagatgtttaattgccctaccttgaagggtcttagaataattagtgtttctttggagcatgatcactaatgcacatgttatgag

SEQ ID NO: 110868 - DNA, 244 bp, Glycine max
tcgttctgaactgttcatttcatattcattttatctgctcaagtgtttatcaaaacaattgtgctataaagcactcctgttgatatatggagattttcttttttagaaagtaataatgactgacattcagacaatgaggcagagcattgacttgctatttaactttttaaaatgagttatctttccatttcttatatttctataaccacaatacttgagaatgctatttataatataaatgatt

SEQ ID NO: 110869 - DNA, 226 bp, Glycine max
cgtacgcgtgggtgagcattagatatgtctgtgcaccttacctgctaactgggatgaaagtcatgctatgtttggttggattattatccatttcgtcgcttttctcagaaatttatgggagttgactcaatgtctgtgtgtcaactataatagacgtgtgtccgccagttgacaacacaatgttatagtgcatttttgtttatttcaaagaacttcatgttgtgtt

SEQ ID NO: 110870 - DNA, 383 bp, Glycine max
gacgtaaatttcacactagctagctgtagttgacaatcattggtgcaccaaatgaaagctgaagcaacacaacactctcttctacttctaattcccatctgcagttattagccccaaatcctggggttacggtttcatctgcgtcgatggcttcgaattcgatcgacggcgacgccgtattggggtcggggctgtgcataaacgacgtgttaagggacgacgagctgcgttccattctggggcgtgtggagagcgagaaggacaaggaaacgttcgggctggtctgcaagcgatggctccggctgcagagcacagaaaggaagaagctcgccgcacgtgcgggccctcacatgctccgaaaaatggccgataggttcacacgc

SEQ ID NO: 110871 - DNA, 137 bp, Glycine max
acgttaaaatgtggctggtgtgatttatttcgtttctacttataatatcttccatgcacatatcaaagactcttggtttagatttgctggagtgtaagtacactgtaaaatatgtttgtgtacaagtttatggtatt

SEQ ID NO: 110872 - DNA, 454 bp, Glycine max
acacatgtgcacctcctaatggtcctctggcgcccacacccatcaatcttccaattgctgcagttgcaaagcctgctacttatactccacttggagctcatggtcccttcccacctgctgctgcaactgccaatgctaatgctttggctggttggatggccaatgcctcagcttcatcatctgtccaagcagctgtagtcacagcatcaactatacctgtcccacagaatcaagtgcctatcttgaaacgtcctagaacacctcctgcaaatcctggcatggttgattatcagaatgctgatcatgaccagctaatgaaaaggcttcgtcctggtcattctgtagaggaggtttcttatcccttggctcgacaagcctcttggtctcttgatgatctaccaagaactgtgactatgacattgcatcaaggatcctctgtgacgagcatggattt

SEQ ID NO: 110873 - DNA, 395 bp, Glycine max
ttgtttcttaaaacttaaaaaggaagaaattaaggtatagtccccttttttgaccgagtcaacccacgcgcagccacctcacaagtcacaaccacctcggcggcgttcaatacgtcgtcgtttcctcaacagaagaaaggagctcgcgccgctctgaattctcgtgcgatctgttttctatttcttcatcccggcgagttagttggtgtgatcggagatgatgggttcgaggggactgttcgggtggtccccgccgcacatacagcctctcacgcccgtctctgaggtgtcggagccgccggagtcgccgtcgccttacctcgacctcggtgccgagacctccgcaactcaatctatggaggtcgaggaggagatggaggaggccgacgagattg

SEQ ID NO: 110874 - DNA, 321 bp, Glycine max
tcgttagttccatccatggcgtagcaaatggcgatcctcttacgaacgcgcaccctcctctattcgaaacccaccaccaccaccctcatcaaaaccataaccacattcccctttctatcacaagagccccaattagtggactccaccccaccaccttcttactcaaccacccctctccctcccaacctcgcctccggaagccccctctacaacgaaaactggggcagcccaatcccgccgacaccgaccgcttgctcctacggcaccttccacgcgctcgcccccgtgggcttctacaaccgcgccacgtaggaaacatac

SEQ ID NO: 110875 - DNA, 189 bp, Glycine max
taccggccaacgctgctctctctttcatttatcctccataaatcaaccttgtagcaaaaaatctcctctgtgcttttcatgattatacagatcatcaggctgcttctgctgcagaattggtgacatggacacacaaaaagattcaaacttttcagctctctgagctgctggcttatcaattgtgaagga

SEQ ID NO: 110876 - DNA, 225 bp, Glycine max
ttttattgaaataaggagaaaacaacttacggacataccataagctttctaggataaatggtgctactcacagaagggctgatatgcccaagtgaacattaaatgagctcttctaaacataccttaatcggagcaatgcacgcgaatgttaatgcgcatgttctaccacgaatatatctaaaatgctgagaaaggtcattattgtaatagggatccaaattttca

SEQ ID NO: 110877 - DNA, 402 bp, Glycine max
  unsure (1)..(402): unsure at all n locations
gatgtacaactagaacacacaaaaaaagactcaacagtggtttatgattgggtaaatttgggttttccagtgcgaaattggcctcaaggtcaaggaaagcgtggtgactggtgagttgaagttgaaggaagcgaatatgcgtggagcgaaataggaagattcttgccattgttggctagcacttaacactttccaaccaatcagtaccagcaacttcttgctggtactcaagttgtcctgcatcttctgtgggggatgacatgactcaaaacagcatactgaatcacagtagagctcttgagggtgtccatggggtccaagtggcccctaactcgccatttgatttgacagaaactaatcaaagtggggactntcgtacttcaactggtggagcatcaacta

SEQ ID NO: 110878 - DNA, 262 bp, Glycine max
ttttaactggtccttgtccttgaagctcacagtctttttgttccaatccatgtggtttgtcctaaagtttccaaccactcaacccctaacacgagatcaacgaccccaagaacacacatgcgttgacaccatgagaggaacatttgttgccgttgtcgaggatgacattgaactccttcgttgctgtgacctccaagttcagggaactcaccagttctcatgcaatgaaattgtgattagccccactgtcaaagaggagaag

SEQ ID NO: 110879 - DNA, 364 bp, Glycine max
tctgtgctattcacactctgttacctcaaaccctctcaatatgcattaccttcgtttaagaccagcaattcactgcgaaacttttttttattttcatttttcctctttcatttctcaattttgaatctttctctaatttatgttttacattcaaatttacacggggtagggttttgggcttgtttgcttcggattttcccgtaatgaactgttcttataattatgtttgcgttagaaacttgagtcttgtgaaaaaaaatcatctttgcagtggaaggcaacccattttttttcttctttttttgctgtattttttcgaattcaggataaagaaggggcttcttgcttttctctagctatgata

SEQ ID NO: 110880 - DNA, 182 bp, Glycine max
tcttgccaagatgttcaatgatgtaagtgattagggcccaaatgagagagaagaaaagtgctgtagcgactgcatgttgctgagtgtccttcattggacagagccttcttgtgtttctttaaatatgcagctaagagactgcatattaacctgagtccttgacactacgaccctaatgagtg

SEQ ID NO: 110881 - DNA, 117 bp, Glycine max
ttccacgcgtgcgagtgaaactccacgaagtgctcgctacaaaaacgaagatctactttatcttggaattcgagaagggcggcgagctcttcgagagaatcgcgaagagccgattca

SEQ ID NO: 110882 - DNA, 322 bp, Glycine max
tgtgtaagccttctaccaaattcttcaaaagtgatctccttatctggcattccaacatcagtggggccagtttcaattcctgggtgcattgctcattgttttggtgttattactgaacatctgtttaaagaggttgacaatctgcttcttggggcctcacaagggctggtcctttctgacccttttcgatgctgtggatctcctaagcttaagaatgtgcctgttcctagtatttctgtagtaccaccacttccattgttgatatcacatgttgttggaggtgatggtgccatcattttgtatgaaggcgaaatttcgtgat

SEQ ID NO: 110883 - DNA, 115 bp, Glycine max
tgtgaaaacatcaattaaaggattactaccaatccagttcagatatggtggattttcatttatctgctgtgactcatgcacttcattcagaagataattaccttcgaatacaggt

SEQ ID NO: 110884 - DNA, 431 bp, Glycine max
tccacgcgtccgctccccaattccacactccactaaccagtgaaagacaacaaaacaataaagacaagagaaccccttcacgcattgtctacaacgctgccatgaacaactccttccttcaatccaagcattgaattccactcccacaccgaatactttttctcaacgcttttacttttttcagagtgttcacacccgcaaccgcaagctttggaattttcaggggacttcatttcagttctgcttgaattgcaaaacccaccacaggttttgctttttttccatggattcttgaatgtggttttcgtatggtagggttccctccttcctttccaccgcttccccacttttctccgtaaatttgtgctggatttagtggaaaaaaggcctcttacccttatgcttctgatatcatcaatcttatcttatgc

SEQ ID NO: 110885 - DNA, 194 bp, Glycine max
tgtaaagcaaagggtcatcaaagcccaaacctgatatctgaaaagctatctgcgactctatacaggcatacaaaagctgtcaatgctatacattggtcatcaagtcatgctcacctccttgcatctgctgggatggatcatgcggcttgcatatggaatgtatggagcagaaatcagaagaaagcatgtgtgct

SEQ ID NO: 110886 - DNA, 468 bp, Glycine max
tttctttgtatgatttgaacttcccaacggattttagtaacatgtctcttggatcattagataccaattataattcagattcctcccacactaaggccaatcatagcttaaatttgatgttgaacaagagcagtgacaattcacacaggcatcaatctcgtgcacggatacatgatgctgattggatgcatttgtctaaactccatgagcgtcaatgggaatctcaatgccaagtcattgaaaatataaaaatggatttcaaatgcaattgccaagctttttgctgtgtgtcatctgagaatttcattgacccactcacgagatttctgagcactgcgtgtgagcggcatgatgtaaaagctctgagagcaggaactaagttgctattggaatttatgaagtgttgcagaaatggtatgaccaatttaagtgaagatacgtgcattatgttggaaagtcttcttgata

SEQ ID NO: 110887 - DNA, 454 bp, Glycine max
tttcctctcgtccgcccacgcgttcgtagataagtaaaattccccaattaaaaaatgatatattaagaatcccccgtagctggctgtctatagcctattatgtggttatgctgtgtcaagtcttactgatattttgattttcgaccccaatatttttattcaaattttagtttgttaagggtagataactgttccaaaatacctgaaaattacttatttttcccagtgataactaacttggcgattaatttttccttgttcagacttcacctagacagttggatgcttcccgttttgaaaataagcattctagtatagtttcttgtggggcccgtcacagtgctttgctaactggtacgcctccattaccatgtgcttttcaggggaacttttaaaaccaatcttagtatttgcatgctttgataatgtcatatggcttattcatattagagaa

SEQ ID NO: 110888 - DNA, 414 bp, Glycine max
tcttttccttctaaccgctgtttccgcatctcgcttccttcccaaactgtagattcgtttttttctctctctatttcttccttttatttttatgccttctctctcttcagttttgtttctccaatgtgactggtgttgttttgtgtttttcgtgtgcgtcgttcgttaattttgttttgtgtattcggatcgagatttttcgcgttcggttgcggggatcttcggtttaggtttgtttagggattttgttttctgtttctgttgctgatgagtttttcgttggatttgtggtgttctgtgagattggcggactttttatttttatttttatattccttcaatttttttttttttggaaaaaatgaatatttatttatggacggaatggatttgcttttttctgtctctaaattc

SEQ ID NO: 110889 - DNA, 377 bp, Glycine max
tcccacgcgtccgcgcgctccagaagaagtacattatcgcaatcctcgctctcctcttcctcctcctcttcttctcaatcaccgatttccaccaactcttctcaacaccctcttccttcaaattcgattccatcaccgatcgaatgaaggaatcagaattgcgcgccatcaacctcttatatcaacagcagcaatcactcttaaccgcgtggaaccacacactccgaaccaacgcttcggatccgaacctattggaggatctcaaatcttctctcttcaagcagatttcgctcaaccgcgagattcagcagattctgttaaatccgcattccacagggggcaatgcaattgagcctgaactcgatttaaacgctact

SEQ ID NO: 110890 - DNA, 168 bp, Glycine max
gtccggagaaacacaaaaggagagaaagactatggaaagactattgcagttacgattaacctcatgaaaatgactattgaagctctaagagttctatgcttttggaattttctattggaccagataccattcaaagaatttcatatattgtaaatgcacggggttctt

SEQ ID NO: 110891 - DNA, 152 bp, Glycine max
ggctctcactgctcgccactatgtccatcacggggctgaactttagcctcatgctcaactccgttgaatcctaccaaatgtcaaaactgagcatgaatccagcggtttgtgagatggaatggatacttcacaacaagctctactcaagggaa

SEQ ID NO: 110892 - DNA, 260 bp, Glycine max
gaaagcacttggaagaggctgctccacaatgcaacagttttaagggagcttgtgctgaatcgcacagatttgtcatcaacttcaatgaggccactcaatatgtcttcctctttgaacactctaagtcttagaggaactgggttaaagggaacgctggcagatggaattctctgtttgccaaatctgcaacacttgtatctatcagataattgggaccttcatggccaacttccgaactggagctgtagcacaacttctct

SEQ ID NO: 110893 - DNA, 299 bp, Glycine max
  unsure (1)..(299): unsure at all n locations
cgccggtaagtgtaaacgccgcnccttacttcattttagtcaggctcaccagacttttagacgtgcggagttcgatgccatttgtcagattaagggaatttctgtggtgcccaactctccttcggatgggatacacattcaatcgtttgagtttcaaaacgacgaatttgacgtctttcggctgttggaaagggccgtgttagtgaaagcggcgtacgaactgatcgccgagggggacgggcatgagcaagtgatggccaaattggcatccgatccgagttcgtcgcttgcgcgcttcg

SEQ ID NO: 110894 - DNA, 313 bp, Glycine max
gctagtttccttggcggcccaatcggcctgagggtcggttatgaggttgaaatcttgcgccccagctgcatccgaggctaaaagctagaaactttatctgtttttttgtgctatggatagacaagaaaatttgttagcattctccatgcctagccagctgttatcaattgacgaggaactatggcgaatggctgaagagagggcacaagagatactatggacaattgaaccaattgtattatctgaggtgaacagaaaagatgttattgattatgttcagaggctgatcagaggttactatggagcagaggtc

SEQ ID NO: 110895 - DNA, 381 bp, Glycine max
tctacgcgtccgaccaaacccattttttttattcttattaatataaggaatccccttcttccccgttgcgcttatggttttgtgagcaaccctaatccaccccaacccaaccctattgaattgaattgggggaagaagaacatagaaagaagaagaaaaatctgcacaattgttgtaattgaacgatgtctgctgcggtgtgcggaagcaagagatctttgttcgaagagcttcccccttccccgccagtatccaagaggctccgctgttcctcctcccctattcgcctctctctcccttctctcatcgaccaccttcgccctctcttccctcatatggatgaccaggtcctcgagagagcgctccaagaatgtggcaacg

SEQ ID NO: 110896 - DNA, 398 bp, Glycine max
  unsure (1)..(398): unsure at all n locations
ttcgcgtccgttagccaacagagaggnngcacaggngataggacatcttataatcatgaacaaatcagggtagatagaagtggtgcctcaaatggatctcctgtactaactttaactagggatcagcttgggactatagcttggtcctatgccgtctttggacaaatggataggagtttcttctctcatgtctggaaaactctcagccattatgaggagcgaaggatttcagagctgtatagggaggatatcatgtttgcttctcaggttcatcttgtaaaccagtgcttgaagcttgaattcccacatcttcagttgtcattatgtggcgaccttgaggacaaagttgctcttgccagaaagactaaaaggtttaatcagaaaataacttcatcgtt

SEQ ID NO: 110897 - DNA, 380 bp, Glycine max
  unsure (1)..(380): unsure at all n locations
ttaggagttaatgtatcgttggaaagttagaatcataggaaatagtttaattctttattattattcttttaaacgcaaaatgtttttattatgataaattcttataagcatcaaggatttctgactgctgagtgctcttacccaatcaaagcacataatttttgtctagtttctaaaagattattacagcttcaagtgtattaaactatgttatgtggtcttcttttatgtattcctcaggtgaacccctaattttcattgaagttgcactactgaaggatgttgctcagactatacaggaagttttgtgggatagtcctcctatacctgaaggngaggcaacatgtgccttgttctactccatatcatcaactcagcct

SEQ ID NO: 110898 - DNA, 280 bp, Glycine max
tcgttcacgcgtgcggccacgcgtccggtaatttacagagaatttgcgccgccaatatggaaaagagcctcgctccatggagattttactgaagaagctttacttgaggagaatggctgctgatttagggataaccagtatttactcttgagggaagatgatctatatgaaaacatacatgagttaaaaggtattcaagatgatgacagagtccatggcatgagatttacatagaaattcattggttcttgagggggaccaaattaaggctgaactacta

SEQ ID NO: 110899 - DNA, 271 bp, Glycine max
tttcgcatctgataaagaaaagcgtgcatccgataaagtgcatcgcatcgtgttcggtactgttgttgggttcccgaaggaaaaggtgatggaaaagcatcaggtcagggaattagcgtgtgtgcgaccgacttcttcttccatcctctccggagttgtgtggaaataaatcatcaaatcatactgaggattgattcattaattgaattagaattagggtttgtggtgaagggatgcagatagaggtatgttcatgggtgggtcaatgatt

SEQ ID NO: 110900 - DNA, 294 bp, Glycine max
tttgacgcgtgggctctgacataacggctaccatggagaggaaaacaaatatcctgtgccatcgaaggctgaataagtgactcgagggggtttgacgtagagaagaagaagggtgtctttgttttcctctgacataacggctaccatggagaggtatagccaacaagtggccgattgcgtcttggagaaagccaagaaattgtgtaacaatattgaaaatgtagagacgagggtagagaatggcgatccaagggacgtgatttgtcagatggttcaaaagttgggtgctgatgt

SEQ ID NO: 110901 - DNA, 338 bp, Glycine max
  unsure (1)..(338): unsure at all n locations
ttccacgcgttcgcccacgcgtccgaacaatctgttgcaaatctacaatccatctcttgcttgggcattgcattccaaccaattgacaagcactcaacatctaccatcctccaaggatcgacattcagctcccaagatcagcatcacgccaaaagctgcacgtgctatctttcatcatcatcaccatcaatccaacttttccaacttgttcataagtctggggaaagcccactagtcggatcaatatccacatcaaccatcaccacttacaccaacactacaaccaccatcatggntgtcacaattcagcaacaaccctcagaacaaccccaccggac

SEQ ID NO: 110902 - DNA, 448 bp, Glycine max
tttgcgtccttccacgcgtccgcccacgcgtgcgcccacgcgtccgtccacgcgtccgaccgcaatggagaagccatcgtcgtcgttgtcgtcgtcgcgaagaaaatcgagcacgatggtgaaagcttcaactgatgcgaacacaagcctgagcatgctgaacgaggaccttcttcagaacattctagcgaggctttcttctctacacttcgcttccgcagcttgcgtcagcaaatcatggaactctctctgcagtcgcatcctctctcgccccaagctctgttcggcgatctctctcaacccttcgctccccgatgctgtcaacgaggttgttcacaaggttctctcggagccaattcgaccccattttgctattgccaatatcggaactggattcaacactgccaagactctgtgccttattagaaagtcgttggggttcaatatt

SEQ ID NO: 110903 - DNA, 306 bp, Glycine max
tttgcgtcctttgaggaagaaaggatgtggttagcagggttgaaggtgacttttcatgcacttttgaagctacaagtgcaattcctgtttagaagaatgcatatggtggcagcatgaaaaatggtttacacataagccctgagagttgttcactggccgccaaatttttaagagaagggtaaactgaagcatggggtgtggagccatatgacatagaggatgctggtaggtactgctagggtctagtgcagaacggcattggacgtgttgcatatataaaactgcctataccatacagggcaaaga

SEQ ID NO: 110904 - DNA, 270 bp, Glycine max
cttaaatctttggaagctaagttgcaatctgataagctagtattcactacatgagcttttcctcctcttttttaatgattccacatgctttatagagagcttgggaattattgtacctgtaaattgttaggtaggtattaccagccatcattctgcttaacacagaataggggttagattatgtgtttcattttaaattatactttttactaaatatgacaaacagttaaattgattatttatgctgagtttgtgtagaaattctcgctt

SEQ ID NO: 110905 - DNA, 308 bp, Glycine max
ttgttttttgatgatagcaaaagatggatgatgtgagatattggtgtggagaaaagccttatatatatatggttctcatgccctagcataggcatccatgttgtgttttgtaatactagcacaagccataggccatgccactatccctatgcctgtgaatcattaatcatttggtgtacaaccctttggtgcaaagaaaattggagtttcaaaatcttttatataatttttgttaaaaaatttatatgtaataattattgggaatttagttatatacatggttgtacacaacaaaacaaaaaaaataa

SEQ ID NO: 110906 - DNA, 275 bp, Glycine max
tttacaagcactctaccagagacacacacacgcgtatattgagagagagagagagagaagaacaagaaggaagcccaggacgaagaaggcggagatcttgagagatcaggtcgcaacttacttgcagctcccgagaacctgatcttctttcaccgccaaagtgaggccttttccttttcaaaatggggatacgcgtattgggccaaaagatcatggggcgagaagttacaggaatgcacggtgtggacaacaagccaaatggcgtaataccagct

SEQ ID NO: 110907 - DNA, 318 bp, Glycine max
tgtgagttgtccaacgacaacttttctcccttatttgctctacgcacggtcacttcagatctgaccaatgtgacaaagtgcatggtgaggctatggtgttgggcgatggagggggagtcataggtgggtctggttgtaagagaagatgttggtgacttttgtgatgttaatggcgatgcagagggagggtcagagtaattacaactggatctcttagtggtgaggactagggagggagttaggagtgagtaacaaatgtaagagggtaatttcatctatttgagtttgttggaggtacataaagcaaaaaaaggggtc

SEQ ID NO: 110908 - DNA, 392 bp, Glycine max
tttacgcgtcctgttttgcttcgtgtgcattttgcagcgttattgcataaaacagcttctgtttgtttacttatttatttctccttttcatattgttggctttttatgtcctaatatgacactaatttttagccagaaaatattagcatgagttttttttttttttttctaatttatgctgacagtctctgattctcacttttgtttattggtctgtccatggttccagaaattgaactgagattgaatgttttggttcgggaaaggtgctgttactgtattatggaccttaaatgtttagaatcttttttctctccttgtgatggatgcttgcaggtccttatcatggacgttgttggaaagtaagagttgagctgtcatatgcttatcct

SEQ ID NO: 110909 - DNA, 187 bp, Glycine max
ttgcgttttttttgacctcagccacaacaggggtaagcctacaggtcttgataatttaatttctccttctctatcagggcacgtataaattccatttccatataacttttgtatgatagatttttttattcgttagaaatatactttttaacacattttcttttataattgttcaatattaatttct

SEQ ID NO: 110910 - DNA, 419 bp, Glycine max
tcggacgcgtgggcggacgcgtgggttttttcaactttctttgcagttcttgtttcgtggttctgacttacataggctcctcactggggcatgagtgagtgaactttggataagttttttgtgtgaagaatttgtataataagtatttgagctttgccatgtcagcttttgatttttgatgttgtggtgtggcagttgaagtcatactgaaaaaaggtaactcttttgcagtggcaggcatggcaagaggaagagcagatgtgaaatctagaaaaaatttggtcactacaactgtgttggttttggtgactgttggtggctttttctacttctattctcagaatagtgattcatcatcttctggtgagtatggtgctaaatctttgagccacactggtttgggaggggacaaagatgat

SEQ ID NO: 110911 - DNA, 417 bp, Glycine max
tcggacgcgtgggtcatcatccacaattcctcatccattttttcccaaattggaaatcacaaaccctaatcatattctctttgaaatcaccaccagatcctccaaatacctcccctgaatcatcgattctggttcctacaagcctgtttcacgcgccaacatctttggcttcgatgtcctccagtcctatttcagagcactcgatgtgccttgtgttgccccgctctctccttcgtgattttggggtacagaactgcgatggaggtcggcgtcgacacaagacacaggacgaccaccatacacccatatctcattttttcttgattccgaggagaaagcagcgacgagaggggtgaagtcgaggatttccagatctcgttttttctggttgggaagaaaacgaaaaaatgaacgcat

SEQ ID NO: 110912 - DNA, 404 bp, Glycine max
tgggaaaacacaaagttatgtggatttggagggtggtttgatgtacattttcggggaagaagtgaggatccagctgaacacgagattgagttaactacagctcccagtgtagattatggtacacactggggccaacaggttttcctcttgcatcctcccatgcgtctgaatgaaggtgatgatttaagggtttcttttctaatgagtcgctcaaaggaaaaccatcgtttgatggaggttgaacttggatgtgagattcatcagcattctggcaagatacttgcacctttcaaaaataagtactacattgagtagcaatctggatttcaaattctggggactgcaagatacaaggtataattatatataattacataatgatattatacaagagaaatgatatc

SEQ ID NO: 110913 - DNA, 362 bp, Glycine max
  unsure (1)..(362): unsure at all n locations
ttaaaaaacactttcaacaacctttgacacaacatagtggagcaagaagaatcgaagttgtttggtttctgttttttttttttttctttttctcctatgtaatgcatcagaagaaatccgaagtccagatcggaaaagaaagcagtggcgtctcttccgatttcaaccaccacccactcccaatcctaactccgaacccaaaccaagatgctctccaatcactaacctccaccgcaccctacaaaagaccttccctcaccacccaaccccatctttccaaatccccaaccctccacaaattcccaaccctaaaaccacgccacgttaccaccaccaccgtcgtcgncaccaccaccaccacc

SEQ ID NO: 110914 - DNA, 415 bp, Glycine max
tttggccatacacccctttactacaacaagatcccattctctctctctttcttttttcttctcacaaacgatttctcatttttggacgggttcagattctgtcctggtaactggttttggtgatagcttcaaattcaataatcaatcaaggctgtagtatggcagagaaaagcataaggtgttctgcgatatctagaagtaaaagtgatgttacagcaatgagggacacgcttcttgcgcagcagcaacttctggaaaagctatatgctgaattggatgaggaaagagaagcttcaacgaccgcaacgagtgaagcattggacatgatactgcgtctgcagggagagattgccgtggtgaagatggaggcaagacactacaagagggtggcagaggagaagataggccatgctga

SEQ ID NO: 110915 - DNA, 228 bp, Glycine max
cctactcgttcggttacgcgtgcgtttgaaacaccattctcctatatcacacaaacatatctttgctacctgtgtacaccacctgcatctatcctagtaaaatggacccatttgcaccaaaaccagcttaatctcatttatagcccccctatattctgcgcctatgattccatacttctatcaaaataaaccacattatacccattacccattaccaattacacattc

SEQ ID NO: 110916 - DNA, 234 bp, Glycine max
ttgccacgcgtccggttctagatcgcgagcggccgcccttctatttttttttttttttttttatcattatttctgtgtgtgttagaaggtatcctcaagctcaccatagaaccctgactccttttaatcctcaaaaatgggggccgaatacactttatcagatttagaccttttcttaccatttttgggtgaccttggggcgaccttttccaaattagagacacttgatggcct

SEQ ID NO: 110917 - DNA, 237 bp, Glycine max
tttaacaaaagtacctatatttgaccatttgttatgtcatcaatagtctttgctcgcaaggatattgatgacataagatatggtcaaagaacaaaagtacctatatttgacttggaaagtggagctcggagcggcttcaaggaactagaagtttctgaagattgtggagggattatatttgaaggcatctatgctctgcatcctgatattccaatatcccttgacttgtggattgct

SEQ ID NO: 110918 - DNA, 246 bp, Glycine max
tattcaatttgaaacttgaactaccatgttatagatttcaccttcattgatttgtgtcttggcataatcgccttatgcatgttgctttaaaggcgttccgacaaaataggtagctattattgcgtcaaaggagggggatgctcggtgtctttagcattaaaacccttgattgaaaagacttttatctgcttttcttttatcttaccatataatgaacgcagctgcgtagaaaaaaaaaaataaagg

SEQ ID NO: 110919 - DNA, 154 bp, Glycine max
ctcaggcctccatcaatgaccatatgacatgccactggacatgtttcaggtgttacggtgatgattacgggctacatgacatattacctatcatattttgataatttacatgaaagattacatcatggacatatttgggtacttgttaaaaatg

SEQ ID NO: 110920 - DNA, 390 bp, Glycine max
ttctgtcttttgcgcatccaatgccctagttaattccctccggttcctcaccacaatgtctaccgacacctccttcccggaccacaagctctgcggtttcctctgtgcggttctcacactcactccccgcgatgacacggacaccgacatagccttcgccgagcgatgcgaaatcttcggcgaagggggcgttgtcgggttccggacccagaacggcgtcgttttggacccggtgctcgattcctcgcaatgcggcgacagcggctccaacaagacgaagaggaggaacaagattgggatggtgaacgggagcatgagcgtggtccaccagctccacgctatggtcacccgcaagttcatcaaaattgacgctcgcgtggtctgcgtcga

SEQ ID NO: 110921 - DNA, 66 bp, Glycine max
gtcctgccagcctttagtatttaaggtgaaaaatgggcgaataaactttttatcaacatgtttaat

SEQ ID NO: 110922 - DNA, 137 bp, Glycine max
tcctttcttccgttttggttggattatttcgggcaagataaagagagaagggactccaaattgttattaaaaccaaacgttgctaggctccacttctaggaatggcttgtgggatatctcttgctcttctgatcaca

SEQ ID NO: 110923 - DNA, 310 bp, Glycine max
ttatttcgaagggtcaatcccttattcgaaacgaatactatctttcattctctgcctttgaacatctctctaattattatatatgctttcatgagagcctccatttgttgttgatgcttttggactcatcctactttgtcatgttgtagcacctataaaggaatggatccgtaccaattccacagcgtcgtgtaaagatataagccactgggtcctcctcccatctgtttgcatttcccaacgcctaaaggagatatggtgagccgtgaagaccaatatggagaaaagcctccacttgtccaaccagacc

SEQ ID NO: 110924 - DNA, 363 bp, Glycine max
tccttcaccccgttcagctttaagagaagaaagcaaattgaagtcattttgaaaagaagaataaaaaacacacacacacacaaaaatgaactcaaccatgagtgaatcaggagcaggtggtttcaaaaccttgagttctcccattccttacctctctggtggattagccatcatgctagcactcatagcaagtgcattactcatcttagcttggtcttattggatacaatactatactacttcttctaactcaaacagtgatgaagagaaaccaccacaaatcacgatggtggaaaaggaggagattgtttcagaaccaaagattgttgtgatcatggctggagagggcaaccctacttactt

SEQ ID NO: 110925 - DNA, 208 bp, Glycine max
ttcactcccgcccatgcgtccgtccacacatccggttaactgacagaacagaacatcaagggtcttagatggataagaccctcacatcaaccctttcaaccactccccataatccaaccctttctcacatgcacaggtaatctatatctctctgtcccccacacaatttcctcacttatgaaggtatcggagtcttcaaatatagaat

SEQ ID NO: 110926 - DNA, 389 bp, Glycine max
ggcagtcatcccaaagtcaaagtccacttggatgactgctaccgcggcatctacattgttaaccaaaacggcgtgtctgtcgatctccaactgttggccaactcccaagacccctttgccgaggaactcaagagacgcaccgagggtttgcacaacgaagaggagctgctagggtttctgagggacttgccgggccagtgggggagccggaggaagaagcgcatgatcgtcgactctgcggatttcggcgacgtcttgccgcttagctggaagattctcctcggtttgaagagaaaggatggtcgcgcatggatctattgccgcagatacattagccccagtggacagcatgttgtgtcttgcaaagaggtttcttcctatctgcagac

SEQ ID NO: 110927 - DNA, 258 bp, Glycine max
ttaacactgagttatgtcttattttttattatgttctttctgttaagaagtatcttgcctatgatccgattgcattgaattactaggatattaagatgtttctccactagctgggtggagatcgtagatctaggtcgttgttgtaaaataacatggtgatgtacctaagaagtaacatgggtatggttctgatcttttacttttgaattcgatttaataaaagtgttgttttgttcaaaaaaaaaaaataataataaa

SEQ ID NO: 110928 - DNA, 196 bp, Glycine max
tcgttgacgcgtgggcggacgcgtgggccagttcattaaacttggttcttggtagaagcaggatgagaagcgaaacagacaaacaacacaatatttaattgtaccacttaccatctgattttgatcttccaacagatagtttgtcaaaattgacaagtacccttttgaggatcaaggaatagaatcaagaaccacc

SEQ ID NO: 110929 - DNA, 144 bp, Glycine max
ggaggattgccaaagaagttgtttcatttagcctacgctcggaggttgcaagcagttaatggtagttggtttggagcttggggcttggaaaaggctctttgggattttcttgtgttcagaatggtccgagcaattctgggtggt

SEQ ID NO: 110930 - DNA, 437 bp, Glycine max
ggaataatgggtatatgcatatccgttgcagaaggagttaacgatgataatgtgacaatatttcaagcaagaaaggtcccgaatgagagtcagagactttgctctgtttactcccaacagggtagcaaaggactcaaccaagatgctgcctctgttcacgaggtttgccttacagtttcattacttgcacatgaaataattcacaatattttttttgtaattgtttttatttttcacctatttttcatttcttggcatttaggcatctcacaagtattggctaaatgagaaggaacaactcttgtgtaattttttttatgttgaataaaaggagcataaaatttatattagagaaagacacatccccttataaggttaagaaagaccacgaacttaagcaaagatttatagtggagtttatttgtttagtaatagag

SEQ ID NO: 110931 - DNA, 428 bp, Glycine max
attatcaacaaaaggttacccatggatatagatccgtcgaaaatttgatacctttctagcgaattatttcaatggaatatgcatccgttggaatttaaaaattttcccaaacataacgaccccaaccctaattgtctctcactcacttttcaatcttatatcatttcttcctcccacgacgttgtcgctcgctcccatcatgccactgacgttgtcgcgccaccgttgtgagcccacaccaccgtgcccacaccccgacatcgttccacactctcgtgcctacacctctcacaattcaggatttgtgcatttccaggttcgtggtcccattctctttgtcctttgcctttgtattccctgacaacaatggtcgattgaaagttgaagagcatttcaaattttttcattttatgaaagaatttgaaatt

SEQ ID NO: 110932 - DNA, 118 bp, Glycine max
cacactgttacttggaagtattttgatctgcttctgctgggtgggtggcaatgtctgtacctatgatcattgaccctatggtgatatcggcaccagaaactcattcaacatcagcagc

SEQ ID NO: 110933 - DNA, 376 bp, Glycine max
ttcgatgctcacttttctctatacctgcttcttcttcttattcttcttcttcttcttctatttaataataataacttgtacgtaactgatacataaccgcgatcctacgatgattcacgttaatcggattcttccgccattatggtgtcgttatgagtttgagatcattgatattgtcgattggatgcaaatgtggatgaagaattctagaaccttgcatttttctctttgcttcaccgaaagtcatacgaattgtagcttcaatcttaggagcaaatcaagtgggacgcgaaacaccttttgcttgtgtttgtagttattgaactcattgttgacgtgtgaatgatcgactagctatgtatgcttgattagagag

SEQ ID NO: 110934 - DNA, 215 bp, Glycine max
ctcacgcttccggatggaccagcatctcttcatgaagctttgagtgaaggacttagttcaggttccaattggtctgctagggttgctgcctttaattatcttcattctttgttgcagcaaggtccaaagggaactctagaagttgttcagaattttgagaaggtaatgaagttgtttttccagcacttggatgatccccatcataaagttgcaca

SEQ ID NO: 110935 - DNA, 218 bp, Glycine max
gtaatttgaatttgctgggatgaaaagcaaaaaggcataaattcattattgggggctgcgtggcgtacgtgtgatgatgatcaggttcctacaacaaggcgggaatcttggaatctaagatggggtcccacgcgcaccgtacgggacgcattgagtaagcgtggacctgaacacagattgcagaaacccaagagtagtgcatggtgtccacaaatgaa

SEQ ID NO: 110936 - DNA, 341 bp, Glycine max
aattttcaactcaacaattattcctacgggactgatatcaaatcttactcagttgaattatttaaacatcaaagttgaccctgaagatgagcgatggaatgataatgttaatattgtttttgtggaaattattggattaaagaggttggagacagcgagtatatatatcccaaaggctagccttttgaaattcatgcctgtccacaaatccctcaatttcagattggttgttgggaatcatatgcgacgtttcatatcgcgtgtgacacctgaactggaggaaaaattcaaactttgtgactatagtttaaagtttgttaatggtgtaaatgttccaaaca

SEQ ID NO: 110937 - DNA, 281 bp, Glycine max
gtttcttttaaggggtgattcggatccatcgttgtcactggtttgctgttgtcactttactgatagcaagcattacggtcatcgttgctctcttcacttgtatatatttattctttcggttatttttattacaaaataattggcggaaaactaggagggaatcttgtggattgcgtatgttacttaccttgagtcacactctaggattgttcatgcttgatcatcaagtaaatcaggcaacatcttatcaatctatagatccccatttccttgtgattggg

SEQ ID NO: 110938 - DNA, 430 bp, Glycine max
ttcccttacagccataatcacgcgtcatgaataacaaaaaaatcagctgcttccaatgatttattctagggggttaaaaaggtgctatacaagaaaaagtttcattcctctacgtgttgctgggcatcaacattttgcagtccttctgatgttggccttatactcattttcactagtggaaaagtagaattaaggtggtgtttttctcagtctgcactttatttgagaacatatgatggcgcgaaacatatgaaaagacttaacatcatttgttaaaataacgactcaatgccgattttgacttttgaggatagtatcagtgacaaaaaagaggaaatttttatatcattgtttgtaatataatgctaatctcccaccatttgctggcataatcccagtgtgcttttcaagtcaaccaagcaaaatgcat

SEQ ID NO: 110939 - DNA, 186 bp, Glycine max
tttcacgcgtgcgtccacgcgttcgtccactcgttcggtagagagtgccttgcattaatcatagcgtagattcataaacaagatgagagcataagtaggagagtgggagacggatcaggtgttgtggagggtgttgcctttgctgacaaaccttgactcctttgaagtgtacttttacttgcagga

SEQ ID NO: 110940 - DNA, 265 bp, Glycine max
ttcaaatcctgcgccggtcggtaccttcctttcccatctcaacattcaccgctcgctgtggtttttttttttgctccgtcgaggatttcgtagatttgaattgtaataatgcttacgtgcgtccgtcaagagttgtgtgattctggtgtttgttgcatcgattttagcgagatggaaatgttccgaattcctgtggtttggggaaggagtgtggagataaggttttgaagaggaaaaaaaaatttaggattagaaatattgtgtg

SEQ ID NO: 110941 - DNA, 346 bp, Glycine max
ctattaatgtatggaaaacatgactaatgcgtcaacaaagttggaaaatgatatttcatatatctttcatataataaagaaagagggtttcaacggtatatatactttcatatatatatatatagactcacttactttaaaagtaaattcttcaagctttttattttatttttttatataatgtagaaagaaattaatgttaattattatatcttaagaaaataaatgataaaaacataacttacaagaactattcttaaaagtaagtgaattagcaaatctctcatgccagccttatatatatatatatgtatatatatatatatatatatatatatatatatat

SEQ ID NO: 110942 - DNA, 341 bp, Glycine max
ttggttcaagggtcttcgacccgacggggtggcaagaattgcggtttccgattttatcggcggcgctgccgtgtcggaaaattgcttgcatgagttgagttaccggctgagggactgggaagggaagggtaacggtgtgatctatttcggggagagggtggtgccgtcagaggaacgttcgaatgctgccgtgaaaccggtgaagggaatgacggtgagtaaggattccggtgattataagtctaatgaagttgcgtgtcccgtgtctgtggaactaccctaacgttatttgaatatttgtattttcctattattattttatttgacgaatattggcaaag

SEQ ID NO: 110943 - DNA, 305 bp, Glycine max
ttcacgcgtccgcccacgcgtccggtttctgataaatatgattgccatagagactatgctgacaggggattggttgattcttttcaaggttcaattcagtcatcagagcaagcatcatccaagaatgggtccatgtttatcaaggaaaagaagagggaaatgttggtcaatggtggtgtcagtggttcttcctcaagagcatcaaatcttgatggtgctgttcatggtggactgaagggaaagagaagtgagagagaaaggaatcaaagccgggatcagagcggacaaaattctattggcagagc

SEQ ID NO: 110944 - DNA, 224 bp, Glycine max
tccacgcgtccgggttgattatgccaatcgcttttttaattatttggttttcgattaactatttttcctcactttaattcactggacaatggatgtcaggacttagggcataatcgcaagttcacagtgcttgacgagtacaagtcaatgcatatgtaaaattatatgctggttcaatagcatgggaatgcattctccgcgtggtttaatttttgcattactta

SEQ ID NO: 110945 - DNA, 383 bp, Glycine max
ttcagcataaattagtgtcaggccatgctccatcagcacctccgtatgtggcaacagcaactcctcccgtcccttcttcatattctacttcatacccgccacctccttctgctacttgctacccaccaccaccatcacctccctctgcaactccttaccatacaactggatcttattcttacccaccgacgacgccacctcctacagcttaccctccctattcctcacattcatctccctatccaccatcatcataccccccacagccctcctcgtatcctcctcctcctcccccatcatcatatccccctgcttcagcttatccatatccaccacctgcaggctatccttttggaatataccctccaccaccttactgactg

SEQ ID NO: 110946 - DNA, 327 bp, Glycine max
  unsure (1)..(327): unsure at all n locations
ttcctaacttagggtgctagacccaccactgattttgaactgcacttttatcatgtaggaggttcaagcaacaagaagggagccattataggcggtgttgttggaggtgtcagtcttgttgtcatcctccttgcactatttggcttgcttagacggtataagaaacccaagagggttcctagaggtgagacaatttggaaagtcttgaatctgatgatttttcaccaaagaaaataccgtggcacacatcaattcacgctgtgaactaccatttgcaggggacttctatctcatgtttacaagactttntaaacccttaatttacaa

SEQ ID NO: 110947 - DNA, 196 bp, Glycine max
gtttctctttgttaatttagtatgtctctatcactgaatattatatccatgatcaacagcagcaactcagtcataaatagaagaaggccctactgttgatcatggatataatatttagtgtttctctttgttaatttagtatgtctctatcactgaaaatcttaattgaggataattcaatctgatggcttgattc

SEQ ID NO: 110948 - DNA, 402 bp, Glycine max
cgtagagagcgtcgtcgtcttcgctatgtcgcgacagagatccagaagagccgaactacctcccgctcaggagaatattgaaaaattggagaaagttgtaaacgatggaaattattatggagctcagcaaatatatgtttctgctcagaggtactctgaagcattagatatcctacattcaggagcgtgcattcagttgtctcatgggcaggttacctgtggagcagagttagctttattgtttgtggagacattagggaaagggaaaattccttacgatgaggaaattcttgaacgtctcaagaagatctacaaatcatttcctcgggtttcattgccacaaaacctatgggatgtcgatgacatgcagcagctttctgaaaacattggatgtgcaaagac

SEQ ID NO: 110949 - DNA, 224 bp, Glycine max
ttttacaaatctttagttgaatatattctaattgaatttacttacatgtatatgcccttgtgtgagtcgtgtgacttttgggccacctcttgcctttgcaaatttggagttatctatgtaggttatctgctttgttgccataaaaaaaaaaaaagttgtctgccccaaaatttttagtttgtgggcaaagtaataaataaaatagaatttaatgctgcttgaag

SEQ ID NO: 110950 - DNA, 294 bp, Glycine max
ttaaatgaaaaaaagaaaaataaaatcatgattaatttgttttgccttttcaggcaaagttgttgcagccaaaagatgagagctggtctgaatgtgctcacaaaggatatgcaggtatatatagtatgctcttacaaactattagcagtctttaatatattgacattagattattgttattttgaactatatcaaagaaacatcccttcaagtctctagtgcataatatcttgtgtgcaaaatttcgctttctccttcttggtaagatgatgttacaaaaacatctggagatgc

SEQ ID NO: 110951 - DNA, 221 bp, Glycine max
cgtactcgtgggcggacgcgtgggcggacgcgtggggttttacagttttaacagtcacatggtttagattcctaagtgctttccctttaaagtcactggttgtgcatttagctaatgggaaaatgggagtaataaagataaaaggagtgctagaaatacctggagacacatattttagagtttaatgatgatacactaatcatgtaaaataatttttcatt

SEQ ID NO: 110952 - DNA, 205 bp, Glycine max
ccttcgcgtccgtattcctctctgtctcttcctttgtagctttcactttcatttgtctggttccgatttagggctcccgaactcgggcttcgactcaaaactagcgattgatctgctgctcaatcttctctgaatggatctgcttcaaatcttccacatggtgctggacggtcttctgcttcatcggtttctggagctattcaag

SEQ ID NO: 110953 - DNA, 384 bp, Glycine max
tgtttcgcgtgcatgcatttgcagtatattatggagaggttgcccagttctgagaagactgtttgcggaggcaagagtgggaatggcttcaattccaagttgcgcaagtttgctggcaacgagaggaggaagatgaaaccgaggaagagcgaattggggttggacagagtgagcaagaggagcagcagcagcaacgatgttgagaatggtggcgaagtggagaagcagcagcatgagaaggtgcagaaggaggaagtggaggagggcgaattgggcactttgaagtggccaagagctgacctggagaatggggagtttgtgccggagatgccgccgccaccgaggagaggcgaggttgagaacggtgagattgtgagtgagaaa

SEQ ID NO: 110954 - DNA, 232 bp, Glycine max
tttttgtcgcgtgggttctttctttcctccaaggctctttttctcttttgttttctgagcccaaggtagtctttttattttgccattctcgttgcgtggaagattctaccaagtgggtgtgtgtgtgggtgtttgactttttctctgcgttgatgggttgatgatgtctctgggcattgcgaaagacatgggttttgatgacaaattgaaagacaatgagggtgcaggggat

SEQ ID NO: 110955 - DNA, 377 bp, Glycine max
tatttttcttcttcttttgattgggtagtgtagcttttattaggaagtagggaccatcttgctatagcactatagcagtcaaaatcacatgtcaacatttaggatcatatgatgatggttactagacttgtacaattgagtcatattctaaatgattggctacaagtaggactgtgtcaagtaaatttgacattgtcccattgccatggtaaattgttggagttacaactcacaatgtggttaacaaaatggcctcttggcctatagattttatggatgggctgagttgagacacaatttgaatggactgatgggtgtctggcttgaaatgaaaaatatggtccatctagacctggcaacttgtgttttatgcattt

SEQ ID NO: 110956 - DNA, 249 bp, Glycine max
cccactgtgttcgcttaatctctctctggcttgctcatttgcgcacctctccaacctttcactttcagctttatctgaatccctctctctcctttacaaatggccagcgttgaggttattcaaacacagttaaaatgcggtgattatcatattgactttctttgtacattcctttattagtccacgtgtgtaggagaagtagtcggtcatatggttcctacatgcacacggtgaaactcaacactttag

SEQ ID NO: 110957 - DNA, 368 bp, Glycine max
agacattatttttcctgggaaacatatgaagggtcaaagtgtccattaggtaatgaataacaaaaacaacaataatgggtatgttgggtactatcattcaaatttcatatcatttgaacaaggagggcaacatagacctagtaatgctcaagtgattttccatatccccttccatgaaggagcccctttcattccttgaataatgaagtggtggagagttataagatgaaaggtaagtggccatgaagggttgtggagaaaatatattaaatatatacatagaaaatttataatattgaggcattgcaattatatattatgcaaaaataaaataagttaataacctactgtagttaggaggggaaaag

SEQ ID NO: 110958 - DNA, 376 bp, Glycine max
agtcctgagaagctgagccatatcatatcagatcctgcttcttcttcctttccctttttctcactcccactcttcaaacttgcctcactctcaccaacacccaacaaacaaagttacttcattgcaaactctatattagtctttactctatttgtttattccaccactgaacaaaaccagagaaagaaagaaacaaccaccccacgaagcaagtaaagcaaagcaacccattacgattcccgcgtaaagcaccgattttgacactgaatcccgagacccagatggcgcaatagcccgatacgtaattctcctcaaatgggtcactccaattcttcctcctcctcctcgtcaccttccaagcgcggccacgcgctgc

SEQ ID NO: 110959 - DNA, 338 bp, Glycine max
atttatatttgatgctgtcggattaaatcggatatggcggcttatgcggaacaagaatccgctttctccgttccacgattgatagatgttgtagccattgagctcgaaatcagctctcgtaactgcagtttgggttctttctggcgtgattctgaaagcttggatctggatatctcctttgcttctttgctatggaagactcctattcagatgctacattgatagatactactacttctaagatacaacagcatgcagaaggcatttgctgaacttgaaagttatcgggctgttactcttaacttgaaatggaatgaactagaggaacatttccatgg

SEQ ID NO: 110960 - DNA, 190 bp, Glycine max
tttgactctgttctgcggctagggttttgtctttcactcactctcttctctttcttttcttctcatttcccttctctttcgatctgaacaataataattaaccatggaaccgtcgctgaggtaacctttttcttctgcgcggagctgttctcttttgttgattgggtacttttttttctttctgagaagg

SEQ ID NO: 110961 - DNA, 143 bp, Glycine max
ccttcttttccgaacgtgttggatcaatgctagagccatcttctgttaaaaaatatagtcggtcacggactcccaaaacaagccattcatgttcgacctactatattcttaaacgtgtgtggatcaatgctagaaccatattc

SEQ ID NO: 110962 - DNA, 269 bp, Glycine max
gtgttataatgggtttgcagctttggttcctctggaggaattgatgtagttgaattttactaaacactatgggactgctagggatcctgaggtcataggtatccttgacactgcctccaagactaaaggggtgtttatgctgttatccttaattactgtgacttatatcattctgcagttaccatgggaagaaattaagtatggtgtaagtgtaattaacatgaatatgttcaacctttgtgtgtttatgttggtgatttgaaacaggc

SEQ ID NO: 110963 - DNA, 392 bp, Glycine max
gatttttcttgaaaaatcttaaaaggtagactctttttaacttgctaattttctaaagaaattataattgagtttctcaagtttgcgatagttttattaatttgaagtactcaattataatttctttagaaaattagcaagttaaaaagaaaaaagttttattgattactagttttgtattgaagaatcttgaaaaatcttaaaaggtagactcttttgaccggtggagtttcagcttggacttcatgtcagtctaattttttttggcaggtattacctaatttatgtctgatattgcataattcaaatagagatttaaaaaatgattaaagatatatgactttttttttaatatgaaatagagacatgacctttattcttgatgtgaagat

SEQ ID NO: 110964 - DNA, 354 bp, Glycine max
cactcctttctaagttttcttgagctatgagctatgggcgattttatagagaaacaatctgatcttccttttcattatgtcattattcaaaactgccaaattcctttgtgaatagtttaacttcactgcattggctacttccatagcttatttattctatcttctttgtctcaaacacctattcttccatggagccaatcttgtttgagatatggttaaacactaaatgcaaacatctctcctgttagactcaaacttgctgaatcttgattcactatgttacgagaaattaatgtcttctgttagacttaaacttgttgattgctacttccatatagctaactgctgagagag

SEQ ID NO: 110965 - DNA, 363 bp, Glycine max
tgatcctttcagatggctgcttccacctttcaagtgtcttaactcttaagatgaggtaaaagaactttctcccaaacatatcattagatatagagctcttccatcagtcttgaaggctttgtgtccataacttcactgatcttggctattgcttgcatgtagttttttaatttgttttctggttattaccggtagtagactagtagtgatactgacccaaagtggggttggtgcaccttggtcactgcttataatagtgactatcagcatatgtatcaatcagatgtatgtagtagcagtcatgcatatttctatgtatatcacatgttctatgttcaatgaaatggatcttcaatttttttg

SEQ ID NO: 110966 - DNA, 455 bp, Glycine max
ttagagataatgcagagggaaaaagcaaaagccgtcctctcccgccactatggccagcaacactgaactcctcctccaacgttaccctttttcttcttcttttagatttcttcccttaacaacaaccaccactctctcattctctctccttcgccctcgatcccttccttttcccctcaaattccatgcctccttctccttcaagtccccgacctcaaccctccgcgccttctccgacgccgaggaggacgaagaagacgatgaagaagatgatgaagaagaagaccaagaccatgaccaagacaacgtttctgccgacgaatacgacgacgttttgggtgaggcttccgacgacgaggccgacgtgttctctccgcacgatggattcaagtggcagagagtcgacaagctatgcaacgaagtcagggagttcggcgccgatctcatcgacgtcg

SEQ ID NO: 110967 - DNA, 485 bp, Glycine max
  unsure (1)..(485): unsure at all n locations
tagaaaaattgttggtcaaagcatgtttcgagggatgagcgtggaggctcccatgagctggtgtctgtgtttcaaaccaaaaccaaacattactaataaggtgcgagcgccgcaacaccctcgtagccgccaaggatatactacctctattactgcttcccagactaacgcgatggcgcttacttttgaggttcttggcagattcaaccgtgctcgcgctgcgaggttgacactccctcattttgtgtgccaaactccgttgtttatgcctgtgggcacacaagtttgctcccgagtctttaaagttttactctgctcccttgaagtatttttgttataccaaaatattcctttcatcagtttaccgcactgatttggttagtttggtgacacatggcaagctgtgaaagatcccacgtctgatgggcatttgccacattagtncaaaataatattgntagtgcaaaaacatgagggaaggatca

SEQ ID NO: 110968 - DNA, 445 bp, Glycine max
tttccacgcgtccgcccacgcgtccgccaaacccattccgcaatgtccccaaactctaaccccttccagccctgaaaaccctaaaaaaaaattctcaatttgcgtttggtccatgggagtgcgattctcttcttaaaccctccctcgcgattcatctccgcccctcgaatctgacgcttccaccataatcgaaatgtctcttccacccatagagtgtgcatacgtaacggaagagtgtattcgggaatggaggagtggcaaccctgccctcaaggtttcccaacctgttccaatgcttcgctttctctacgagctctgctggaccatggttcggggagaattgccctttcagaagtgtaaagtagcattagattctgttatattttcagataaagcttccaatgagaaaatagcttcaaatttttctgatatagtgacccagatg

SEQ ID NO: 110969 - DNA, 395 bp, Glycine max
ttctatctctctcattcttgctttctctctctctggcggaggatgacataggtctggatgtcgacgccctcgatgaggaggagggcatcgtcgttgagtcgggcggcagtggggaactttcctgttgttcttgcccttcaacggtgccttcccggtccacgaccgcggcatcgtaggtggcgcgaatggcggctcgcagatggcgatcggcttcaccttcggcgtctcagaatagctgaattggaacttgaacagcacgtcagggagtaggtacaactcgtcggaatccccgattacgacggtgtggcccgtcgccgtcgtgaggaactagcttgtggtacttggagcggcgatggtgtttgaggacggggttctgtggttggggttttttgcgg

SEQ ID NO: 110970 - DNA, 403 bp, Glycine max
agagtgaaatgatgggcagcagcaccaactgagggctatcatttactactgctaattggcattgctgtggaagcgctttgattatatctttgaagcctcaaagtcagatcataggttctccacctgcctctcctcctcctccttctcctcctcgacctcctcctatttcgaacgcattggcttcgacgtctgccataaagcggacacgcaaagcctcacttctacgatcagtggtgcatgttgatcatgctactgggaaggccgacggtccccacaggaaaaaattaagaacataattggggattgtggcacgtgataaggtggacatcacctacgagaactggaaggaggtccctactgctcagaaggacctcatttgggaggatattcaggcggaatttga

SEQ ID NO: 110971 - DNA, 142 bp, Glycine max
tttacgcgtgggtcaatggtggaaggtggaagtgtgtttgatgtcaaccttgtgaatatctcacctacttttaattacaatgtctccgaacactttgttctgtgaatgaatgctttttagctcaaaaaaaaaaactactaat

SEQ ID NO: 110972 - DNA, 324 bp, Glycine max
ttcacgcgtccgcagaaatcgtgaccaatacaaagtgagaaaatgtaaagaggcatactaatgttatagctgactatacttaaaatatatatatcccaggatcacgtcaaacttctccgaaattattttgattcgaggaatgcgttccacgtggctattgatgtgttctggtagccaaaaagaaacatagttgacgtaaaatcaatgaagtgtatagtgagggtaatgctgttgagctttaatgtttcattttttttcttggggtcaagtattgagaattttatgttttgcactgtaaattaatgacaggcatggaccgatgag

SEQ ID NO: 110973 - DNA, 199 bp, Glycine max
atgcttttggagtttatgttcatccatattccctctgcgagaaattggggccaaaatatgcatcatttctgctgatgaatggaataaccatcatgacttctacagggatcttctcagggaggatatcaatatgactgttagacttgttgcaaatcgcaggggtatgaaaattaaccgcgcgaaagatgcttttgaaaaa

SEQ ID NO: 110974 - DNA, 262 bp, Glycine max
acgttgtgagtgtttttgatcctcaatcaatctaattctcccatttctcttccaatggcgtattgtcttttcaccaaaccatactcagccgacgctctatccgcctgagtttctgtcaatgacgatctacgatccctctgccccgactacctacgactctcactccgtactcgtcttcccaagagactttgcatacaggcggttgggagtacctatggaaaatactttcgcgtacaaacatatggggaatcacatggaggag

SEQ ID NO: 110975 - DNA, 318 bp, Glycine max
gtgttatttaaaacagaaatcacatgtatggctggtagcagtaaaggataatattaatgttgaatagcggatttagatgcctacgaaccatgtttttgtcgggtattcctatttcctagtttgattcagctcactgatttcaattacattgcataggcaattttgtaaatcagaggcaaagagacttgtagtaatttgtaaagacgcctctgaattttggtccaccaccacacccttcttctcatctccaccacaccagaaatggcttccggagctgtgccaactacgttttctaccctcaagacatgggattccagt

SEQ ID NO: 110976 - DNA, 494 bp, Glycine max
cttagtttccggccgccgcgaacaaacgaagagggcaagtgtccgcaaagccggtactcttactcatcacatgaacccctaaatcctaattgctttgttttcccccaattcccaatggcgaacgactcgtcgtttttgttcgccggcattcgtttcgatagaaagaagttcggcgccgatattgccaggttccagaaaaaagacagtgatactgattcggcgatgattttgagcgccgccgaagacgaaggcgagaaaacaatagaacctctggaagaagagaaagtcgcggcgtcaacgacgaagaagaggaagcgcaagggaacctcttccggtaattcagattctcttactacactatgctatctcttgcattcaacgtgatgcatctcacttttgcttcattttcgtaaacgcacaaaagaaacggtcgaaggattcaatgtgttcagaagttcgacgtctgtggcgcagtcgaatgatgaagtccgagt

SEQ ID NO: 110977 - DNA, 166 bp, Glycine max
attctttacaagctctgtttcagctttgtctctgttgtacaatggctagcaccaccgacgtgttgacgctagccgccgaattgttggaaaccttcgacggggataagtcttcaccgtactgaccagctctggatccaaagggcacccgcgttggcacacctgaaaa

SEQ ID NO: 110978 - DNA, 340 bp, Glycine max
agaggcttagaattatatgtttggcaaggtgaaattccacagtggtgtgcttggaaatgttcatgatgtgctatcccaaggagccaaaagaacttcatattcagggaatctcacaattgaaaagacattgtacgtagatactgccagcacagccaaattatcatcttcaaatataagttctttagatatcaatcagagggtagatactgtggttgcagacttagacagaagcagggggaaaggaagtaattcctcctttggatcttctcaagtgataaagcaagtacatgctgtggaagaaaaggtcacgtttgatactgatgtgttaagttctttggat

SEQ ID NO: 110979 - DNA, 380 bp, Glycine max
ttgttttcctcaaactttttcccacttaattatcaggttccacacacccctatctctctgtctctctcactttgcgtctctcttgcagttagggtttcctctttaagggtgctctttctgtgacaaatctgcgccttatatctctcattggctaaggctcttttgtcttgtgagggtaaaagagcagcttcctaaagggcctcccaacaaggggaaaaaaaaaggtacttcccttttagttcatctgatcaaagaaacctatacatcacaaacaggcaaatcagaaaaaaaatggcatcatcaagctcctacaattctccatgtgctgcctgcaaattcttgaggaggaagtgccttccggggtgcatctttgcacctta

SEQ ID NO: 110980 - DNA, 239 bp, Glycine max
ttttagttctgctgattatgattttatgatcatgatcatgttgatggggttctaaagtcttcaattattgaaagtgaggttgcttgaagaggccttttttatttattgcctttcggttctttatcctaaagtctgaaacttgcgggaattttgagcatgaaaagatctttgaaagagttttatggaaagatggggtttaggaataatgcaattcatgctgggagtttggatgtgggaaa

SEQ ID NO: 110981 - DNA, 370 bp, Glycine max
tccacgcgtcctttcacgcgtccgcccacgcgtccgctcacgcgtccggtggttttactttatgttacgtgtgagtggtactacttctcaagtgtttgaacatggaggccagtggcggtgttagcggcggcgttacggtggtgggatcggatgctccgtcggactaccatgtagctccgaggaccgacaacccggctccggcaagcggatccacgacgcagattccggcgacggcgggaagtgttccgccgtcgccacatccgccacacacggcggcgatggaggcgtatccggcgaagatgccggcgaaaaagaagaggggccggccgagaaagtacgcaccggatgggtcggtgaccatggcgctgtc

SEQ ID NO: 110982 - DNA, 440 bp, Glycine max
taatgaaggctgttcttgtgggtgctgttggattggaattggagagaaatggagagcagcgccgtctacggaagcattcgaccaagttacccgatctgcccctctcgacgttcttcctctcttctctctcaccaatctcccttcctattcgagccttctctttctctcaagcttcgcaagcagtttcctctcatttcgcagaattttctggaatccgcttctcctctcaggccttctgccactttgtcttctgattcctaccggtcctttcttctattttactatttgttattttaaataaatgctctcgttgtttaattgtaattttgacttggaaatttcaatgtaacagtgagacgattgaattagctgatatagaatgggacaaccttggttttgggcttcaacccacggattatatgtattccatgaaatgcaca

SEQ ID NO: 110983 - DNA, 357 bp, Glycine max
tttcttttcatgactccctcttttccgtttccctttctcccaaaaaagtgaaaatccaaaaatcctcccacatttctctgtgaaagtgaaaccaacccaacaacaggtcagaacttagacccacccattctcattcattccgagtcctaaccatttgatggaggccaagaaggaatatgaagtggaccatctgaccacactcacagggaccagtttctctcagttactattcggagatgacgacgacgattatgatgaaagtgcattgggactcgctgtggaccagtcttacacccgttcacctcttttctccattcacaaggcaccccaaatgctttgttttgccaaccatcaaaa

SEQ ID NO: 110984 - DNA, 75 bp, Glycine max
ttttttattgagttttaagtagatttgttgatgttttgaatgtttgatatattcaaaattttctcgagttcttat

SEQ ID NO: 110985 - DNA, 394 bp, Glycine max
cggactcgtgttcggacgcgtgggcggacgcgtggggtttgcggttaaagtaataagatagttggaaacttggatggataggaatgatctatataggtctctgagagaaaattttaggagacttgatcggttttggttctacgtagaagaagtctcttgcaggaaaatgcaatttgcatccaaaggggactacccagttgcagaaagctcctgctgcatggatactattactctattgaagggaagaatggccaaaccagtatatctctgccttacccatctctgtttgtctttgttcaccctctactttgggcaaatgctttggaatcatttgtgatgttgttaaagcttaatgtgggatatcccttttgcattattcataggaaatatcctt

SEQ ID NO: 110986 - DNA, 268 bp, Glycine max
ttttccatgcgtacgttccaagcatccgccgcgcgactggttgctctttatgcttctagtacttcgcttgcttcagtttctattcttgacttagtttattcttccgctcttaagagctagctggcaaatagaaaataaatactagataaaatcctctggtgactgataaaatatttccatggaatctgaattggtttgtttataattattgcttgctgcggaaagcaactctattgtgtatgtctgtgtgtctgcggcattctctaaa

SEQ ID NO: 110987 - DNA, 432 bp, Glycine max
attgtttatattataggtgaatgttatttaaggccccctggttcgttagattcaaaatcatttttatggctatttcatagacaatcccatcattgagttcctacccttatcaaatttcggaattccttggccttgcacctgtacattttacactttcaactctggttcatctacatggggcattgttcaccagcattgtaacagttgtaagttgtaatagcagttctgttctgggatgacttcagctatagcttgcttggttcagtgttttagaaagagggttcatgtccacttagaagcaacatagtttagtttctgcatcttttcagatttttggatatgctcgtttgagatgtgcaaacaaacgcacattaagctgagcttgtttctaattaccaacattcataggcagagagagttgaaaatttagtt

SEQ ID NO: 110988 - DNA, 385 bp, Glycine max
tttccattcgtccgcccacgcgtccgctcactagttcagctgccgctattggcaacttcctcgtggttaccctccttctcgtcgccaggtggtcctccaaccccaacctcatcaagatctccggggatgaagtagttcaacaatgtgctaagttagtagttcgacaatggcggagttagggtttcaggaacgaagctcgtggagaaagagagaaaaaaaggctaaagttcaagatgatgaagatagggatgctgatattcaagaacccgtggagttggattctgccagaaactctttctctttagccctcaaagaatgtcaagacaagagatcaaaatttgaagccttgttgaagaaggctgcttctttggatctgaacaatgac

SEQ ID NO: 110989 - DNA, 350 bp, Glycine max
aggttttatgcgtttcatgttccgttgccgtgctttctccactgaaattcctcactaccaaacaatcttttgaggccattctctcgccaactgtgagcaagaaaccctctgttcataaacaatgtggaacattgctcggacactaacaggagataatgaagatcaagaagagggtttgttgggtgaggattcaggtggcctctgctccctctctacaacgcagtcaatgattgtttttgcaaaacccatcaaatttgcagcattgttcacctttggcaacctgttagcagttggaagtacagcctttcttcttggacctgcacaacaattgggaatgatggttgaccctg

SEQ ID NO: 110990 - DNA, 200 bp, Glycine max
ttattatgtaagctgaattttatgttgtctcatggtctcctctctctttttaatgcctctgcgtcactactagggtcattagaggagaattgtgtatcccattgtaacacatttgcttatgtatttggccattatttaccagaatggctttcaattgacattcttgcataaattagaattaacttctgcatttttttttt

SEQ ID NO: 110991 - DNA, 468 bp, Glycine max
cggtttcgtggggggctaatcacagtgaaggagctggtcattcaaattcccctacctgatcctcctccacacatacctctacttcccttggctattgagttttaagatattgcacaagttttgtaaccaagttgttgtagaaagtccttagatattttcttatgacttttttttttactaaaaatgttctttactcctgttatctgggatttaaatcatagaggtaaaatacacagaaggtgacagttttgatgtcaaatgaagtcccaccctcttggctggttactatgttatctccttggtacagaaggtgaactgaaatttcgaattttaaaatttggaagcatgctcaatgtttcaattggtccagcttctcaagattgtgacaaattaaagctactgttctgacttagtcatattccttacaccttgggtaaactattaatcacaccactgtgttagttggga

SEQ ID NO: 110992 - DNA, 415 bp, Glycine max
ccctttcgtccgaagacccatcaaattaatccgcgttttcctttttctttcgtttccgcttcaaagcatgaagaagcctccaactcagacctcttccatttttttcagtattcatttccatttacactttctttttctcttcttcttcttcttctggctacctcattcttaataagcacaactaccaaaagtgggggcagttttctgaatcacaagattcatctttcaagttggttgtggataaagtgttgaattggtgtcagttgtagctggatagagtgttgaattagctttaaaagttgaaattgtgttaattttgtggcagtgaacctctctagagagagtcttgtgcaagatgattgagttgtttgagtatcaagagaggtcaagtgatggttgatcaagctgatttagt

SEQ ID NO: 110993 - DNA, 268 bp, Glycine max
aacattcccaagagaagagtaacaaggccctcatacatgaaggattacgcctgagggtaggatgggcaaggcaaaatcagcagcatcagctcagcactaaaacgtatctagcttgattgtgcttgtctcctatagtaggacaagaataacaaattccattaggaaggatattcccgtaggcaaatgaatccaaattctgttagaaggaggatcctatatatatcaatgtaaataatcaatcaagcacaatgaaaaatatactttactt

SEQ ID NO: 110994 - DNA, 473 bp, Glycine max
aaagttcattatgaagcaaaaaagaaatttgcgggctgtacttgacggtttctcgtactagggagggcaggtgctaaagagtgcaaataaggttactactaaatgaaactatttttcgttgcaaaatactttgtatactgtctgctttcggaacacgcactggaatagtaaatgcaaatggcaaacgcaggccaaggggaccaggagtttaaaccggatccatccatccactaacctagtaacctgggccatgttattaacttgaatggcctatttttgtgtataaaggaatctgtagttgcagttgatagtgtaattcattttagaagcaatcctcttgaatttttttccttcaacttttccccttttattttatctaaaattttgggttggttaagttttcaatgtgtaaattgtccctgtacaagtgtagacgttaaggcagtcatcaaagtcaaatgtatcatgttcat

SEQ ID NO: 110995 - DNA, 505 bp, Glycine max
attggtgagcttaatcagtagtctctcaagtttaggtctgactatgttgctgctttaaatattcgaagggagaattttgtcactcacagctttattagccgtttagtttctcctgctatggtctctaaaaatgaaactgataggtggccctgccaaatcatggcgaaaccatgaaaaagtagaagcaactaattgttgtttcacctttatcatgaaaaattaagtgatttttcgagcaacattgcctatcctgctatggtctctaaaaataaaactgactagtatataactattttattcttactttttcagagggcaccaaagtatatgtttggattttaattgagaggactcaacagtgcttttactattaaagcaacaaattttttcttctttatgtgtattgaaatgcgaaaacatgcattgaaattcacaaaaatactttcctagcttttattgaaagtccaaacattgcaggattaattcggatacattttttaaaaat

SEQ ID NO: 110996 - DNA, 447 bp, Glycine max
ccctttcgtccgataatttatgtagccaacaagaaagggagcccaaaatatttgacaaggatgaagctggaaacatggatgtcttgaatgaaatggatgtccgagacctttccaatgattttgccaatactattatgctcgatgaagagatagagcttgagcaaaagatgctaataaggaagactgaactttcttctagtggaaggaatgatgatgaagatgatgagatggctgtcattgagcaggatgttcagagactagtaattgtcacccagaatggtgatcctaaacaaggatctagaggtggtgttaaagaatcaatatccatctccaatgagcttgcttctgcaataaatgatgggctttacttctacgagcaggaactgaaacataggcggtctaatcgtagaaagaataactctgatagcagagatcgaaacataaaat

SEQ ID NO: 110997 - DNA, 507 bp, Glycine max
ggtctttctgattgtccctgacataatcataagagatatgagtatgggcatgatagttcccagaactaaactatttgattgaagatatgagcttttgtgggcttatcagaagcaaggaaactgatttatgatatttacacatgaccatggttaccaactttgctgaattatgtattagaaattagatcatgcatttctgattgtggatcttttgcagtagtatgcaatccagacttccaaatgcaacctatcctcttagaagtaaaataagagggagactgaagcttgcattgatggtttgacgtgtataacttagttaataagttgctaatctctttattcaaatgggtgtctaactgtctattgtataaaatggttgcttcataagtacacccattattttcttttgcggctctcgtgtctgtggactagattatcagatgcatatctgtattcaaaccttcagcacatccttatatgatttattaattattatggccatttact

SEQ ID NO: 110998 - DNA, 335 bp, Glycine max
cggattcgtggggctcagaggtctgaaatggctacgcttttgggtttgattctggtggggttcggtctcggggtgttaacagttgttgctgtggaagctctggggttgttatggatcatgaaacggttgcggcacaagatcaataatgacgaagcctacttctcttccaaaaccccgacaccggcactgcttgatccccaacagtctctggattttgcttatagaaagcagggtgtggtttgggttctagaatcaggaaagatttcaaaaccgtcaagggagcaaaaaaggaaaaaggagaccttggaggtttcccctgttaagacgtatggaca

SEQ ID NO: 110999 - DNA, 407 bp, Glycine max
gctattatgtattgggatctcttgaccccaaacagaggaaaattttatcaaagtcatagcatcaaattgacacaggattcagaagacatgctctgtacaaccttttatgctaaatggcattgattatttatgatgtctaatgaaatctataaaaaattattactggaggttctttatttggataataatactgaattggtgacatccccgcaggcagcagacatggaagtgggagcaactggtaccataaggtctgaaggagacatattcttaaatggtgctcaaaaagggttaatgactgaggatgttgggtgcaacatgtctcaccctagagaacactatccatcttggacagtggaaggccctacagactatctgaaacagattcttcatcactgtactggatg

SEQ ID NO: 111000 - DNA, 173 bp, Glycine max
atctttagagtgaacaatttgttaatggatcaacatagaggtgtggtattggatccggttcatgataggaatttgagtcattcggttgaaggtgttgcaattgcaagagctagtataagtggagaagtaggagaggtggatgaggatttgggatctgattaggaactaaagga

SEQ ID NO: 111001 - DNA, 172 bp, Glycine max
ccgatgcgtgggaaaatttctaactatagagtgtgggattttgttcacgctcatgggcggtacttgacgtaatggtaatcatgtaaaagtgataatatgtcttaggagaaaaaatatatgaatgaaattcgggttccttcatatgaaaaacatgttgctcatgaaaaattga

SEQ ID NO: 111002 - DNA, 346 bp, Glycine max
gcactactttcttattattataaggtactgagtacggagacaatgttattgcatactaactccagtgtttttggttgggtgagaatatatgcggtgtggattagttggttggatcagtatctgttgagaaacattgttttttgggatggggttacagaatcagaatgctgatagattatctggtgctcctggtgagagagagtgagtgagtctctatctatccactgctataaaatgctatctttaccatgaatatgaatggctagagtaggagttgacccacttttgatgtaaccgtttaacagccattttgatgggatggatacagccttgttttattcccatg

SEQ ID NO: 111003 - DNA, 384 bp, Glycine max
aggaagcagtgtaaaggaagggctaataataattcatatgcaaaacatcaaaagcagtctcaagataccagaatggcttctcaagttcctaacaagaattctttcaaatcccgaaatggctgaggatactatattatatcatatagatccttgtgaaaaacctgcataatcttacagattctactgattaatttgtctgccaagtttaataatttgtggatctaattctttagcctttaggcaataattgtatggttaattattttgtattgtttatgtataggtaaatgtacatgggaaaaccttatatacctaaatattaggcatgatgtaggaaggttcacccaaggttttgctaccttcctctgcagacaagcatttcat

SEQ ID NO: 111004 - DNA, 322 bp, Glycine max
acaaaacctggaagtttactaagtgatactttgaaaaatattattcaggatccaattgcaaggtatgggacttggagtccaacattggaatatgggattctagtgcggggtttttagggtgttgggctctccaactacaatagctagcttttgtgtgtggttctcccaaggttcttaacatttaactttagtcttttgggttagttagttcataaagggctgttgccatcttgcctgagagggtatgttagagattagagatgtagtttaaaaaccagtctttacctaacagcttaagcttcttgggtaattattcatgacg

SEQ ID NO: 111005 - DNA, 455 bp, Glycine max
  unsure (1)..(455): unsure at all n locations
tatcacgcgtccgcgatatcaatatccttatcctcagttcccgcgcgtctcacactcctcgctctcttctccgctaccaccttctactgtctctacaagtctcgccgcttaagacaccttaaactctccctaaaccctaaccctaaccctaaccctaagattctcttcctctccgaaacaggcaccgccaaaaccctcgcgcgtcgcctccaccggcacctttcctccaacgatgtcgcattcgacctcgtcgatgcgcagcactacgagcccgaggacctccccaaggagacgctcatcctcctcgtcgcctccacgtggcaggacggcgctgcccccgccgcctcccgcttcttcgccacgtggctcgccgacgccgccgncgacttccgcgccggctcccttctcctctcccgctgccgcttcgccgtcttcggcgtcgggagccgggccta

SEQ ID NO: 111006 - DNA, 295 bp, Glycine max
tataaacaaactcgtgcctgcaacatcttcctcataaggcattcatcattcattggattataataggagtcacacacacttgaagaagattcaattcaattcccgcaacaacaacaaatatatatatagagagagagagtgaatagtgatgacaacgagtacccaagcctacggtgaaccatggtactgggacaaccgctactccaacgaacctggtccctttgattggtaccaaaagtacctcactttggctccaatcaccaacctttatgtccctcctgcccaacccgttctc

SEQ ID NO: 111007 - DNA, 470 bp, Glycine max
atgcattaacaacatcagcagatgcaaaaccaacagcagcatcttccgcagttgcaacaacagcagcagctacctcacatgcaacaacagcaacttcctcagctccaacaacagcagcaacaacttcctcagctgcagcagcagcagcagcaacttcctcagctgcaacaacagcagcaacaacttcctcagctgcagcagcagcagcaacaacttcctcagctgcagcagcagcagcaacaacttcctcagctgcaacagcagcagcaacaggtccagcagcagcagcttgcgcagctgcaacagcagcagcttccgcaaatccagcaacagcagcagctacctcaacttcaacaactcccacaactacagcaacagcagcagcttccgcagttacagcaactgcagccgcagcagcaacagatggttgggtcaggaatgggtcaagcctatgttcaaggccccgggcg

SEQ ID NO: 111008 - DNA, 472 bp, Glycine max
gtttatatcataataattttgatgatatggtgcatgtattcattaacatctgcacagtatgagaatgggactataacatctgcgcagtacgagaatacgactatagcatcacgaccaggttgtgatagcaaatgtggaaatgtttccattcctttccctttcggaatgcacgatcccaaatgctatgcaagcaaccagtttgaaatagaatgcagacacaataacaatacttctcaaggtcatcagaaacccataccccacctaaagtacataaatttggaggtaatgtatattgatattcaatacggtacggttgggatcaagaatccgattttccatcctggctgtggcaagactgttacaggcataaatcttgaaggcagtcctttcgtgtattcccagaattacaactcatttgttggcgtaggttgccaaaacgccgtcataatgttgtcaaacgacacgatactta

SEQ ID NO: 111009 - DNA, 513 bp, Glycine max
  unsure (1)..(513): unsure at all n locations
tgttgggtggtcctttgaatggatctaggatagactttgataccatcttagaagagtttggacctaactcaaccccaaaagctaactcatagggtgaggattgtgctccacttatatactttatcttgacactatctctagtcaatgtgggacttgggtttttcccaatagcttcaaatatgtaatttgagaagtacatccttggattaagagtgtttcaaataaattcaaccagcttttggcttcctctgctgacatatatacatggtatcagaaagcttctactaatacagatggcacatgtacttctgatggagattaaactggacgtccctttgggaatgagaggaagttccttttaggggaggataagaaatcttcctaaattaaaaaaaaaaaaaaaaaagtgagacaatgtggttcagaaatcacaaatgcaacagataaatgcccttgaaataaccacgagtacangacctgagagatgtaatgagttagcatgtaaaattatat

SEQ ID NO: 111010 - DNA, 301 bp, Glycine max
ttcttatccattcagtaaggacaggttggagcagctgcaaaaggaagacaaagtgaagcgtgataaccagactctcactaatttactagcaaaccaccatagagactacgttttgagtcacactcacacgggactcaaaaaggtaaatggcttcaacacctttaattgtctcgcttgcatgcatgcatgctactgttttccacgttttgttaattaattatctaattaatcctttttaaagattagaatatatatatatatatatatatatatatatatatatatatatatatatatatat

SEQ ID NO: 111011 - DNA, 187 bp, Glycine max
tcccacttcgtacggttctagaggggaattgtgaacaagggcctgtttcatttgttgcatccaacgttgtggtttgggtgctggttggtgggttggattggggcaagtggagggtggaatacccaattgggaaaagttgtgatctttgatggtggcatgtgtttatgcaagggattgatagtgtggg

SEQ ID NO: 111012 - DNA, 393 bp, Glycine max
tctcacgcgtccgcccacgcgtccgatctgagaaaatggtgttgtctgatctggagatctgcaagccaacttcaagttctcacaataaagttggtatttctagatctgggagagatctgccaccagctcattacttgttcaaaattgaatcatattccgaattgatgaacacaggagtggagaagtatgagactaatgttttccaggctgggggatacaaatggaatttgagggtttatcccagaggaatcgagtccgagagaggcaaaggtctatctgtttatttacagctcacagattgtgaaaggttcccagcgaagagaacagtgtatgcaaaattcaagttgggaattttagaccagctcaacaataaatatcatgagagaacagata

SEQ ID NO: 111013 - DNA, 168 bp, Glycine max
tgaaagcgtctcacactttgagagaccgaccaaaatactgaaaataggtatttatattttcgttccattttactattctatctcctttcatccaaacgcttcaactcaattcataatccacaaattcttcctttcttgtgcggatcaccactcagagactcaacaaat

SEQ ID NO: 111014 - DNA, 446 bp, Glycine max
tcgattcatgcttgccacaccattccggttccggagattacttttttgcggcggtgctggtggcggagactccgcgccggaatataccttcccacgcctcctcctccatctccctcaccttcttcttcttcttcgctgtagcgttcaaaacaacgtgatctctcttgcattctctggttcggctcttctcgtcgttttatcgatccggcttctagaacttccctttctcattgcttctcctctctctcgcctaagcgagaaatttcctagctgatttggctcgattcgtcttttccttgttcaattccatttttcaggtcttggatctttctttttctttaacccctaatttatgtataaaaaaatttatgctttagcattctgcattcgctgaggacgcgttgactgcaatagtgtcttcgctttgtttttttttttttataaaa

SEQ ID NO: 111015 - DNA, 312 bp, Glycine max
ctttcttcttctattcctcttttcgttttttcgtttataaattctaaaattccaaacacagttattcacacatgacatttctccaacctctcactctgcgtcttcgagctacatatgcctcatcctctctcactctgcgtgttcttcctcgctaatctcaccggcaactacgtcaccgcccaatcgaaaagagactctttccgcgatcgcactctccgttgttactttccacgcgcccccgcggcgcgtcgtgttgccttcgctggataaatgcgtgtcaccatcgatctagggttctggagcctggtcgtc

SEQ ID NO: 111016 - DNA, 282 bp, Glycine max
tcgtccacgcgtccgtcgttacctccgatctcccgtcgccgcatcccgttcccgatctttcacccgtttcagtctcgagccaccgtgccaacagtgctgtttcgccgcgcattttagtaggccaccaccgcgccacccaaccacacccactgtgccccccatttctggagaagtacacttggagcaaatcttgagagaagaggaactgttgactcttgagccagctttacaccacagcacggagggtgatagggttttgtggaatattctaggaaaaacttt

SEQ ID NO: 111017 - DNA, 179 bp, Glycine max
tggacagatagttgtgtaagaaagagctcctgagccaatcaaacaatctctttgtcttcccttgtagaaggagaaatggggggaaattaaaagggaaaaaggcatataaccggaaacaatcgcgtttcgaattcaaaatcactcgattactcgcttctcctttcgttcgacgcatgaat

SEQ ID NO: 111018 - DNA, 106 bp, Glycine max
  unsure (1)..(106): unsure at all n locations
ccttggtttaagaaactcgacaccgacaagatgaggggcttttaacaaggagccccgaaacccaaaccctaatcngattcgctttcgattatggcgtctgagagcg

SEQ ID NO: 111019 - DNA, 429 bp, Glycine max
cttgggttttttctacttcacaactatgatttcattcactaatcttctttctcttcttttccctttgttcacaacttcttttgttagagtttttgcctctgaggtctcaatcaaaacaacaaatttgtcacctttaaattgctcttccaagatcagaacatgtaatgcctcactctaccacatatcccaaaatctcacaattgaacaaatagcctccttttactcagttatttcttcccaaatcacacctataatgcatggcatcaaacaagactacctcatcagggtaccttgttcatgcaaaaacacaagtggccttagcggatacttttatgacacaacctacaaagtgaggccaaatgacactttcgaaatatttcaaacctgtttcagtggccaagtttggccggttaatcatacattgcaacc

SEQ ID NO: 111020 - DNA, 377 bp, Glycine max
  unsure (1)..(377): unsure at all n locations
cgtcncgtgttcggacgcgtgggttttgnactagcatctatggattaaaaactatccaagtatttgcatggtcaatctgtcaaaaaaagaatttatgttcctggcaagattttgaacattgttttgggccgcaaaaacattaaggttggtgtacagtagctgctttcactcttgcgtccatttctactggaagcaactgtcaaccgttaaatttatgctgtgcctggtcaacttggcaatgaccctgtatccgcttcaaaactaaagcatatgtaaagaggtgcatatataactagccaagtattcacctcttatgactgttaatttatactccgctttaagaggtgcatatataacttaatagaagagaggcggcg

SEQ ID NO: 111021 - DNA, 247 bp, Glycine max
  unsure (1)..(247): unsure at all n locations
agtaatttgttatgaccaaaggaggaccatntgctgaagctgcatagaagattccctaagagcaggcaaaataaacacactgagaaagaaatcatggatgacttagctgagaataattctcatctgctgcatagaactcctaaaaggaagcaagctaaatgcatggaagaagatgataagccagaagtggtggaaaggggtagcaaggatgaaaaacacaaggaagatgatcaagaggaggggaagg

SEQ ID NO: 111022 - DNA, 207 bp, Glycine max
ttgactcgtgggcggacgcgtgggcggacgcgtgggaattaggatgatatggcgctaaaagtcttgacccaatatggacacgaggatataaatgggaagagtaattcaaccattctgatccctcttttgaggtgaatgagtaaatgcctctgtgtatcctgcacgcgatgcaatccattcatggattggatagtggtggagaagggg

SEQ ID NO: 111023 - DNA, 125 bp, Glycine max
  unsure (1)..(125): unsure at all n locations
acattgcggaagcagaacaagcgccgcagccanggggaagnaccccagagaacccgacaancccaccaagnccggcaaggccagaggcgcngaccncagagnncaaaanaagaacacnagggaga

SEQ ID NO: 111024 - DNA, 199 bp, Glycine max
  unsure (1)..(199): unsure at all n locations
ttttcgtgtctcgtgggcggacgcgtgggctatgatgagttccataccttatatactccttgcctcccccctcgcagnnnccatagcagcagacacatcatccatttcaccatcccaatccctcagtttcggaaaaaccatagtttccccaagtggaacctttgaacttggctccttccatcttggaaatccaaacaaa

SEQ ID NO: 111025 - DNA, 105 bp, Glycine max
ggtcctttcgatgaaaacctctgatttttttgggggttgattgcgtgggcgaatcagcgaggtgactcaaaaaatgcagggtttatgagaacgttggtggtggtg

SEQ ID NO: 111026 - DNA, 185 bp, Glycine max
tctagaactggaaccagtatcagagtcaaatccacttcactctacagtgacttctttgtttttgagttttctcaaggagtgtgcttaaagtaattagaggatcctctgaccgagaaggctcaattgctatcctctttttgctccttgactatcagctctagaaataaaccttacctaaaaccctt

SEQ ID NO: 111027 - DNA, 329 bp, Glycine max
  unsure (1)..(329): unsure at all n locations
agattcttttttttactacngagnnnaggaannngaaggcactctcaactcacaagactgcagtgacgacagctcaatattcaaggctctcacttctgatcttaatcattacgctgatgattggccagctctcaagttgctgcaaggccggcagatggatgagtaaagaaattaagcaaaaagaaaatagcagctcttctcagcagtcctcaatctcatggcatttctataccaagacacaacaggtacccagcacagaggaggtccacccaatttatggagcttctctacgagatgttccagggggtccaaacccgcttcataactga

SEQ ID NO: 111028 - DNA, 290 bp, Glycine max
ggcaattttgcggacatcacaatcgagcactgcatctgcttgcaacacctatttcaaattcactgccacttaaaattggattccatttccaccaaaacctaaatgtccagagggagagagaggtgggggggaggaccttagagggggaagcggtaaggacggaaagggatcggggtcgctgagacggagagaggcaatggaggcaacaattgtttgagtccaagaagtagaggcgcgaggcttctgtctatgcaaggaggttccaggaagcagtggtggtggttgtacca

SEQ ID NO: 111029 - DNA, 287 bp, Glycine max
caacgacgtagcatttcacctcactggggtcgcaactacagcaggtcccctccatatcgtcctcgccgtgattcaccttatgccaatgcagattaaaatcagaatgtgaacggagcaagtgctgaatagttgttaggatgttctctctgctatagtgtagttctctaggattggttgagcataccacagacatgttagttatgctgatgtcatgacaatgggtattgttaagcacttggcttttgatggaactacatagggctgtagctggcaaaagggtgcgttgg

SEQ ID NO: 111030 - DNA, 231 bp, Glycine max
agaatcacgcacattattatacccattaagatgataccgtacctacgtgcaatattcctactattcatacatcctaccttcagcgagatgagcagacactaacatagataggccgacgatcacaatgttttggggcacggttagagatgcgacgataaaaaatttccagatcgcgatgagcgagagaacctgaaggcgtattacgagctattcagggaattcatggatcgc

SEQ ID NO: 111031 - DNA, 219 bp, Glycine max
cggaaagcgaagagagaaactcagccagagcttcatagctcttgcaagcccttgttcctggcctaaagaatatgacccaaggcttctatgttaggggacgctatcgagtatgtgacagagcttacagacggttgacagtcttgaagagcagagcaggaaacagggcagaatcgtagtggtttgacaagcagacctctctgggtaatgattctcttcagt

SEQ ID NO: 111032 - DNA, 270 bp, Glycine max
atctgatgacaatgttcaagcaatggagtctgatgacaatgtccaagcaatggaatctgatgacaacgaacaagctgcagaatctgatgacaatggtcaagctgtggaatatgatcaaggaaactgggaaataggttttaatggtgcccctagcagatggagtagggattggttggaatgagtgatgatgatgtggaagcttctgaagacgatgatgaccatgagcatgtcattggcattgaaaacatggacaggagcttcagaggcaat

SEQ ID NO: 111033 - DNA, 283 bp, Glycine max
ggctctcttcagttacttaggaagaattccagagccaagcatgccaaaaacataagtcaagaagatataatttctgatgaccaaatggagagtcctttgcaaaagcggcaaaggagaattcctaaaagcaggcagggcaaataccttactggaaaagtataatatctgatgaccaactagagcataaaaagaagaagcagcaacggcagaatcctaaaagcaggcaagccagatacctcaatgaagaggatattgcatcagatgaccaattggagggccatta

SEQ ID NO: 111034 - DNA, 245 bp, Glycine max
cgctcgatggagacgacaagccactcaggcagtggaatcagccctagcgcctcaccggaattcgagttctggatggctcgaaacccctctttcccacaaccaaacatttgtctcgccgatcagctcattgtcaacggggtcctccttcccctccacctcctaaaatacgcgatccatcttctgctccaatggactctcctctccatctctccgcggccacgcgtccaaggctggaagacatttca

SEQ ID NO: 111035 - DNA, 282 bp, Glycine max
ggaaatgaagcatgcggtgccagctaagctggatgtcggttcctcgtcaataatcgtctttccctgcctcatgccatcatccagtgggttagggtcggagagcttgccctcacttttctcttccatcttcactctcagtctcattaattaacaatcaacattgccctttgcgtcgctataagcaacacgtccttttcgatccagatatccgggggattagaaggcacacaggcgtggggaacaaaaaagatagtgtggtgtggagaaggaccttgtgattag

SEQ ID NO: 111036 - DNA, 301 bp, Glycine max
catcaatgtaagacactgctatttttaggcagtccgtgaaactcaacttggttgtaggttgactagttgattgaattgattctcttttgggaaatattcaacatgtatttatgtacacaatattggtttctctttctagctcctctttcacttgtttattgttgcaggagtatgattcatttgtcattctcaccttaaaaaaaaaaaaaaaaaaaaaaaaaaaataaaaaaaaaaaaaggggggccccccctatagtgccctcctcccccggggattttttccgggcgggtccccgggggg

SEQ ID NO: 111037 - DNA, 214 bp, Glycine max
caaaacttaggttctctaatttgaatatagcattgatacccttgttcctcaaaattattaatagttgtcatgttatatatattgtctttgaatcatgttttgaactagagttttgtctgttgcaacttgcaagccctttcttctttagatgtctaattttttgcgactaagtggaatctgttagtttggagatcatcctccgtattaccataga

SEQ ID NO: 111038 - DNA, 334 bp, Glycine max
tgtcctccaaagattatcactaaattattccttgaaagatttcatgtcaccatattagtcccttagaacctcagagatctatgatgtgtctatttaccacataagaccttttgtatatgtctaaaatggtgacaaagagaatatttaacattgtgtttagatgatgcatttgaagataacaatgcaactttcaaggttattctaattgctactctctaatgctctggttgggtatttaatagaaggatttaaagaattctcttaacatcttaatcctttgataaagccaggaatttagaattccatctaaatatgtggcgatttaaattttctc

SEQ ID NO: 111039 - DNA, 334 bp, Glycine max
ggaagacatgctttcagagttcaatgacaactttaaaggaagttgtacgtgtatatcccatggtggctgtcactgattcatggaccaaactagcagttggagatgtgattggagaaattaacaatgcaggcattagggtttatgatatgcaaagtgtgacaatggtaaaggttttggatgcaagtgggcctcctggacttccaactctgctcccagcagcaacatcaggaacaatgttgactactgcaatttcagcactgagctttcaccagatggaaaggggctgttgccttttcctgaaatgggctacgattagatggtggtcactgggatc

SEQ ID NO: 111040 - DNA, 334 bp, Glycine max
gatttatggaatggagcgtgcaatcgccacttgggaagttagacttgctgcttccgcaacagcattgcttcacaaactacagaaaggtataccaccgtgggttcctttgaagggatttgaaaagaagacttataagcaacttcaagaagaggctatagaaagcaagagacgtgatttagcagtattggaagctaatgatggtctttggcctggagctaaaattccaagtcatgccctatttctttgggctagtggctctgaactgaccactatattggaacaggatcacatgcccaacaaatacattcccaaatatcttagaaagaagttggct

SEQ ID NO: 111041 - DNA, 325 bp, Glycine max
ggttactcaaataactggttagggtttggatccgcgcgtatggaagcaggtttctcccatcgaaggcaaagcagatagaacggaagagagtatctcaatatctcaatgaagtattgaccttccatttagatctttgctggatcattgagacaaacctttgcatcattcatatgtgtgatacttttggacatgtgagacaattgttttctggagctgaaatctgaatggtgctgcaatattcatggattcatctacagtcgtaggtagcactatttcagggctgcataatgtagatggatttggaatctcatgaagcggcatatgc

SEQ ID NO: 111042 - DNA, 344 bp, Glycine max
  unsure (1)..(344): unsure at all n locations
ctcgagcgagaaaaggttattttgaaaagatatttggattgggtaggaacctttgatatataggtgtggaggcttgaacagatgttgaattgttgtgtattgaaagagagaccaccacaagtgaaggtgaagagaccaccacaagggaaggtgaaggtggaggagtgatataagtgtaggttataccgtttgttctccatttttgtatggaaattgttaaaaaataaattacaccatatcaaggaaaggaaattcaaggggatattgacaaatcatgaggagacatggggtatggaatgtaaagtttataagtanaccactctcattgtctgatgctgcgacaa

SEQ ID NO: 111043 - DNA, 321 bp, Glycine max
caaaagtgcataaagcttcaaaaacaaatgaagcaaatccattccctcataatcaccaatggccacctccatcaacaccaaaatgttccatcatcatcattatcccttccatggatgcctactcttctctacaatgccctcatcagtgccttccacattcacaaccacaacaaggctctttccattttcactcacatgcttgcaacccaagcctcgcccaatagtcacactttccctcctcttctcaaaatttcccctcttcctttgggtgctaccttcactcacagacctcaagcgtggcttttatctgcggttcatcca

SEQ ID NO: 111044 - DNA, 343 bp, Glycine max
caagcaggatattacacagtcttcctttccacttgtggggtcaactcctccccctccatcttcaaagaatgaagattcttctatcactcctccagaagcttggggtggtgagcggttaagtgataaatatgcttatacacgtcagcctgtcaatgcaccatctcgttttggggcgttggcttctgctggtcagacagcaggatcaatgttatctggattgcaggatacatcctcatccgtgggtgttagttcctataccagttcaagcctaagttttgcaaatttacgggccaaggatgcttcttcaagccaggcaacttccttggggattactgatcacatg

SEQ ID NO: 111045 - DNA, 314 bp, Glycine max
aaacaagttcctcttgtctttggttttgcttgcattgatcattttctgccaagggttccactccattgagggaaggtatctcaagtctggtgaaaccatcaaacatcaaatgcatagtggcatttcaacaacaaatgtagctgacgtgtctccaccaacgccaccctccgcggcggttccaggtcgtgacgttgataattttagacccaccgcaccgggtcacagccccggagttggacacaccgttcacaactaatttatatataactgcctcaactttagtgcgtgagtgttatatatgtaggtcattggat

SEQ ID NO: 111046 - DNA, 334 bp, Glycine max
  unsure (1)..(334): unsure at all n locations
gaacactctctttctaagactctgattgattagaatttatcggaacctaccaaaattgatgatttccaataaattttaactaataactaatcatatagagagtctttgagggagagtgtcaaagagagtgccgctaacattccttgactagactattataactggatttcatactttgtgactgtaacaggaagctcacgtttacacctgcattttactttcttgcaatctttagaagcgtcctanaagcttagtgattttgcatgtcagaacttctagcatatttgggcagaagtattttcaagtactatttatatatatatcttactaatat

SEQ ID NO: 111047 - DNA, 331 bp, Glycine max
  unsure (1)..(331): unsure at all n locations
cataaaagttatatgaccaaacttgttggcatgcctcatacaaacataagtcaatctgtagaaagtacaagccacttgtcaactgtgcacgtaccgagtcattatgagcagcacatgtatatgaatcagacaactgacgaatggcgtgtggtgaaaaagtttgtcctctctcttggttcaattacttatacccatacttgattgttgagaatgtgcttgagcagtctgcatatgcataaggccaagctcctacacttctaacacaggtgtactgcagagaagaagtgctgatggttgcactaagagtagggacaatgatntacacaggttg

SEQ ID NO: 111048 - DNA, 120 bp, Glycine max
ctttaatattattggtcataatttaaagtgaatgacctgatttactagtgttattattttctgaagcaagaaatagacgagccgtcatatctaaaacatcataaaatgaacagaagcttc

SEQ ID NO: 111049 - DNA, 274 bp, Glycine max
ctcgagcgcttttccatcatgacatatggtatggccagcatatgtgggacatgaaattgggaagaacacgtttgatggctttgctgtccggtaacatgcaagatgattgatttgggaactaggccaattgttttgtaactatgtccatctgtataaaaagatagatttagtgcgtgtacagaaacaattgttttgtgggattcattatgctttgtcaagtcaaggcatacccccttgtcatggggattttgtattgttacagactcgagaagtc

SEQ ID NO: 111050 - DNA, 163 bp, Glycine max
aagtactgggtacttggtgattgccactggacaccaaccaagtactgggtacccataatgtctgatatttattccttgtctcgtatatttgttgggtctgggaatttttggtaccatatgttaatgttcctatccttcaatttatactcttatgattaatttt

SEQ ID NO: 111051 - DNA, 306 bp, Glycine max
cgtggatgaatccgatgtttcatatctgtccactagaaaattggacatgtgaagttccatatgaatttagttcctttgtctttctctatctcccgcacctcccacacctcccccatcagccatatcggaacctcctcggcgaacacccacctccgacaccaccaaaccagccagatccgcccaataaacatcatctttgtccagatgcgtacccataacacccagatccgagcctccaccaaacacggcgtgccaccttcgcgtcccctcttccatgggtgattcgcttctgccgccaccaaccac

SEQ ID NO: 111052 - DNA, 339 bp, Glycine max
  unsure (1)..(339): unsure at all n locations
tattggctcctggacagggttaatgctcgaccatcaggacttcaaagtattgaattgtcagagacagcagaagttcaaacaatcaaatcaaaggtgcagcctggctggactgaacaagctgaatgcctctcagatatgaaaagcgagacttacagttacagtagaggatatgaggcttttccatctgacagtagtccagagttgaaggtttcttgctgtgaaagcgtgactgaaatgaactctgaaattaaaagagagcagtctaaggatgtggacattattgatgttgctagtgagtctttctgtaatggttntgaaacatctcatatgcatgattct

SEQ ID NO: 111053 - DNA, 339 bp, Glycine max
  unsure (1)..(339): unsure at all n locations
tggcattttacatctgtccagttggttctctctcacaggaccctggcccctatactctactctttgtacctccactttttctttctacctttgatacaatttcaaattgcgaatcatccggtgcaagagctctatagtttttatattcatggaggttcttgcacaagaggcttgaaacatcgggaagatcaagtgtgctgaaaatcttctcaagaagaaagggagggacttcagacttttttacctcttcactgcagaacagcaggattctctanaaggtggtaagtggagccatgtagttaagatgaccgaggaagtttaggtgatgcaagacattgc

SEQ ID NO: 111054 - DNA, 120 bp, Glycine max
cttacgtctaaaatatgttactcatttctatagtttgaatatgaagctgtgtcgagaacataatataatccgtgtctcttgtgttattgcagtaaacattaaagtgccacacaacagacg

SEQ ID NO: 111055 - DNA, 329 bp, Glycine max
cacatcgcatctcaccgtagtgttggtgttctctggtcaagcgtccgtacatcaatggtgtgtgcatgagatgagagtgtatcggattcggaggaacccaacccgatccgaatttaactctcaaggttcatcggagggggggcaagttatattagaaaggaatatgttgtaatcgggctgattttctctccggtaggtattgtgctggactggacagtagggcgatggatcaccaatctggccagggatttaattcagatgatagtgaccgtgatatgcaagcagaaattagtgagaaacacaagacagtagatgaattttccaaaaac

SEQ ID NO: 111056 - DNA, 330 bp, Glycine max
atccaattgcataatattggaagacatttgcccatgctatatcattggaaaatgcaactttgcgagattgtatagtagctggaatggattcaatatcatgtgttaccaacagattttgaatttcaagaatctatggaatttagcattttatgcaccaggttatataccctgcttggttttgcagaactcatgccccaatggcaaacatgaactaaccataatatcacactagaatgtctatgcgctcatggactaggtcttctcatttattttcatccccagttgggtagttagtttccaactcataccattttatcagccttaagcagc

SEQ ID NO: 111057 - DNA, 301 bp, Glycine max
tggaaaacagtggatcttgaagcttattcaccacctcgagagcttcttcagatattgcctcctaaatcatccagtagagggtcagattgtggttcacaaatcggacctaataatccaaagtttgcatcgggaatgcaagctcttttggatctcatttttgcagttgaggggtctgtctcagaagctgcaaaatatcttgggttatccactggggcactgtctcggttaatcctatctgatgattcacttagaaaggaagtaaacgatctgcgggcaacaaaggggtatgagactctcaagt

SEQ ID NO: 111058 - DNA, 329 bp, Glycine max
cgcagaatgaactcgtttactggatcttccgtagaggatcttccttcataggtggataaatagctgtgtaggatctctcgttatagtcatggactattggttcgccaccctctcacatggctgcagcaaccacaatttgctatggtccctcttctattgtgctatggtcatatttacttatacgaagacacttgaaatacacttgcgtttactgatcgtgtttctccttcaagatcatgactttgtagcggatgtgtgccgaggaagcctgctttgggaatgaactctttctgggtatcaaaatcattgatgaatcgtgggaactctgc

SEQ ID NO: 111059 - DNA, 211 bp, Glycine max
ccgagcttgtgagttcgccgcaagaaacatgattgatgctcaacaatgtcattctcacgaaggttaagggtgtctgtctcgctttccattcgcaaggtgtcctctggtcgtcagtactcctcacattctcacttgggctctcagtgtccatccattcagaatgtggacgtagtcgtttcccaattcgatcggatgctgtgtatgcgtcata

SEQ ID NO: 111060 - DNA, 351 bp, Glycine max
gatcaatgatattttaactgagaggacttaattaatgtgctgtaacagaaatggactcctttccaactggtttaggaagcaaatcgaagccatgcacaaagtttttcagcacctctggctgtccatttggtgaaggatgccacttcctgcattatgttccaggtggattcaaagctgtctctcagctgatcaatgttggtagcaatcctgttattcctcaagttggtagaaaccctgttccaccatccttcccagatgggtcttctcctccagttgttaaaactcgattgtgcacaagtttaacacagccgaaggttgcaaattggtgacaaatgtcactttgcccatggt

SEQ ID NO: 111061 - DNA, 271 bp, Glycine max
ctggcgatggcggtggcggcgatggaggtggcggtggcggtgggggatgtggcggtggaggtggtggtggtggctgctaagtgcatggaatatgagacaattaattaaacctgcagcatgcatgtgttggagttccctttctcaaggtagaaataataatctagtggagatgtaaactaccatatttttaagtttggtgggtcagcataatagtgataatacttcccttacttttgcttcttagtaatttactagaacgtgggtttctcgg

SEQ ID NO: 111062 - DNA, 285 bp, Glycine max
gatcaatgaaattttaactgagaggacttaattaatgttctgtaacagaaatggactcctttccaactggtttaggaagcaaatcgaagccatgcacaaagtttttcagcacctctggctgtccatttggtgaaggatgccacttcctgcattatgttccaggtggattcaaagctgtctctcagctgatcatgtggtacatcctgttatcccagtggtagtaccgtccacacctccaatggctctctcagtgtaaaccgatggacagttaccagcgagtgcaat

SEQ ID NO: 111063 - DNA, 322 bp, Glycine max
accagatttcgcaaggcgtgccttccccgggttctattgggttaagagagcgcttcagtggcatgtttgctaagaaacttgactgggtttcactcaagaagatgtgtttagaatggtttagggacccaatgaacatatcccttttggtgtggatcttgtgtggtgctatgtcaggtgcaattctgttccttgtcatgactggtatgttgaatgctgtgctgccaaggaagtcacagagaaacgcgtggtttgaagtgaacaatcaaatactcaatgcactgtttaccctcatgtgtatgtaccagcatccaaagaggatcta

SEQ ID NO: 111064 - DNA, 321 bp, Glycine max
gagaagagggagcgagagcttggatgtgaagaaaattgtggttgctgtcgaagatgtggatgcagctagaactgctctacaatgggctcttagaaacatcattcgctatggtgacataatcacccttctccatgtctatcatcactccacaagatcaaaaagcaaagcacgtcttctacgcctaaatggcttcaaattagccctctcctttcaagacatgtgcaacaactactccaacacaaaggttgaaattattgtcacggaaggggaccaagaaggagccaagatcgcagccacggtgcgagagattggagctccatg

SEQ ID NO: 111065 - DNA, 115 bp, Glycine max
aacagcccttcttcagggtcaccgctgtcagggttaggcgttttccaccttctttatgtacgaatcttcttctactaccacttatcgctcgttccctctcttagtctcttcaatc

SEQ ID NO: 111066 - DNA, 127 bp, Glycine max
  unsure (1)..(127): unsure at all n locations
canatcgactctcactaatcacaagctgaaaaatgcgatgctatttgtgaaagtatcttttgctcccgtctgcaccaatgtanatagatccagtaatgcttcgtttgtctaagatttaggagcagtg

SEQ ID NO: 111067 - DNA, 224 bp, Glycine max
tggtacttacaggtgatcgttattgtgccacatgaaccaaacagatctcgtagttatttatcagtaacatcatcatcaaagttctttacatgaaagtttgatgatgatgttaccgataaagagctacgagagtggttttagccggcgctggaaattttttaaaccccagatggcttcccttggaccgagcctttccattttagaatcacaatttctgaacacca

SEQ ID NO: 111068 - DNA, 144 bp, Glycine max
aacaaaacaaaagggattctcattcgattcgaccccaccaccgctgttccatactctgccttcttcaaatcgccatctcttcctttctcaccaaccaattacaaagactatggggagcaaggcaccaagttggtctgaccaatg

SEQ ID NO: 111069 - DNA, 260 bp, Glycine max
gatggagatggatcctccaccgaagagctggagcatctacacccgatccgagatctcgcaaaatacgaggtcatggagcgggtcgggtcggagcctacgcgcgtctccgtgagcgcgctctccgacgctcacgtggcctcaggaatccagatacagtcgcttcgagaatgacggtgcagtctcaggtcccaagtctgttgacatatctgcggaagagagcgctgctgatccaacgatgtactagcgaagcagcacacctc

SEQ ID NO: 111070 - DNA, 246 bp, Glycine max
cggctcgaggaacattgttgtcaacaacggggtggtgcccagaaggattgagactggttatttcagtcaaattccaccggagcttttccatcacatccttaaatttctgtcctccgaggaccttgtttcttcgtccttagtttgtaggtcctgaattatgctgcatcagatgagcattatgcgcgctgtactgatcgagggatgctccctacagcagtaggatgcgtgaatgttcatcacgtagaa

SEQ ID NO: 111071 - DNA, 132 bp, Glycine max
aatagtttgtgccaaatactctctaatggagtgtaacgcccatgttacctcattggctcctggacagggttaatgctcgaccatcaggacttcaaagtattgaattgtcagagacagcaggagtttcaacaa

SEQ ID NO: 111072 - DNA, 117 bp, Glycine max
cagaagcttaagacatactacgtacgcattgcaagagacccacaggggcgcgtagcacaggtatgactctttcagaaccctggataatctaaaatcagccatgggttcaataggtac

SEQ ID NO: 111073 - DNA, 345 bp, Glycine max
  unsure (1)..(345): unsure at all n locations
gcggaaatttccttctccaactcagaaataacctttattgtctcggagttgggcgactgcaaggcaatctaactcctaataacctcagactcttccttgtgccttctctcaagattgctctctcctcaggttgcttcttaagatgctcttgtgcctgcaggatctggcgattcatctttcgtccaaagtggaaattatccttcccgacatcaacgccacctggtcggatccaaacccaaaatgcccaaatccaccaaaatgttgacgccgcctggctcgatccggtcatcgaaaacttcattactgaagcanatgaattacgccagaaaggttactattactctt

SEQ ID NO: 111074 - DNA, 328 bp, Glycine max
cacaaataaaaaaaagtgttgcacttgcatgcacctggtttttcggattataacatacaaaattgtatttgttatctcttagcatatgtatagagaaaaatgtttcataaccgtttaaggtacaaacagacaaattaatgggacattgtctacgtccttccattacattttttttttctttctttaaattaaaatctctaaattgggataattactttgtacaaatgcaggtatctctagcatggtccttagcctagtggacatttcaggttgaaactttgcatagatgaatacctgcatgaacgagtccagatatatataatgatgt

SEQ ID NO: 111075 - DNA, 337 bp, Glycine max
  unsure (1)..(337): unsure at all n locations
tgcagatgatatagtgatatgggcacaaaaaaagactagtactcctgtcattcggataagttcagtggcagaagcagaaaagtttctgacaaagtatcaaacatttcttattggtcggtttgaaaattttgagggacctgattatgaagaatttgtgagtgctgcaaagtctgataatgaaatccagtttgtggaaacgagtcaggtagagcttgctcaagttctttatccagatatcaagcctaccgatcgttttcttggaattgttaagagtgaacccgaaagatacagtgcttatgatggagctttcatactgaatanaatactggaatttgta

SEQ ID NO: 111076 - DNA, 340 bp, Glycine max
  unsure (1)..(340): unsure at all n locations
aagaaaattgaaacgcaagacagatgctgaagttgctgctatgtcacaatctgacagatcaataagtaagggtacggtaatggcacaacaggacactcatattggtggagcagaaaatgatttcgagagaaagcctgattcaccacctttaccaaacaagcacccaccaactagctccaagcgatctggtacaaagggtgaggtgggacgaagtcagactccaaatgaactccanaatatggataaaggccgagactcaagtcgctattcaatcaatcgtggaaaaggaaaaggatctgaacgtcccaatcacttctatccccagactaccattcctaga

SEQ ID NO: 111077 - DNA, 331 bp, Glycine max
ggtgaaccagctcatgaaacatgtctgcaacaaacaatggataagggtaaacaatctgcaactgctactgcagaaacagatgatcatcaagaaggtagtggtctccctactaacattcaaggaagcaacactgaaacagttattgagcatgagttgaaggcagtcagttctgttgccacacagaatactgacataccttcagtgagagcttggaaacctgctcctggtttcaaggcaaatctctcttagaaattcaattggaagaccaacaaaaggtacagacagacaagcttgtatctgaggttgctactcctgtcaattccatgagctc

SEQ ID NO: 111078 - DNA, 328 bp, Glycine max
gcttaatattccgataaataagaccagtaagaagaaggaggaactgtctgcaaagttgttgcaatttttggagtccccacatgctacaactgatgttctgcttgctgataaggaaaagaaaggcaaaaagcgagccagaaagcaaaccccaagcaaatcttctggggaaggatccaaaacatctgccaagaagcaaaagcaaaattcacaagttgggaaaaaccaaaagcagtcttctgacattgaggacagtgatgcagctgaaccttcagatgcaaaagttgattctcaggaagatgatgattcaagtcaaaaaagtgaaagtgat

SEQ ID NO: 111079 - DNA, 144 bp, Glycine max
atctttccattgttacaattttaccagtgctcagatcactgatttacatctcttattttgaactttggtcatctgtatatacaaatatcttttgtgacatgttcatggcattttctatttaatgtatacaatatttttttggtg

SEQ ID NO: 111080 - DNA, 357 bp, Glycine max
  unsure (1)..(357): unsure at all n locations
agaanataagaaatcaaaccaaacatgttttcagaattcaaatcttttgaaaatgcaaacagttttcagaaaatggaatcaggaaatgaaaacagaaaatgaaaatgcaaaccaaacacacccttagtgttgggagttgtttgtgttaatagcataaatataaggttttgttcctattcagcttagaacgaaaaaattacgtgaatggatcacctacagttgtattttcaactgcacctcctgtagttacaatctaagggccaaatttgtttttaacacatttagctttaacattttaacttcaaacaaataaagttaaggtcaggatctctgcattctcctttttaaactgcagag

SEQ ID NO: 111081 - DNA, 359 bp, Glycine max
atgcgtaaaaccctaattaactgagcgaggatggaggaaagtagagcgaaaccggtgtgtgcagaagaagccctcgcacttcttaattgcgtcactcagtctccctatgaagaagacaaattccttcgccttttgcattcattgcgccactgcgtcctcgtcaagaaagtgaagaacttttccctagctggacaggaaaaataggaaactaaacccagtggcaagaaggcttaattggtatgactgcatcccaagtgccttctaattcaaatattcatgtaccagaaactgttcagtttcagatctgaatttctaccatccacaaataattgattttaacatattgtttttggttaagt

SEQ ID NO: 111082 - DNA, 264 bp, Glycine max
attggattgtggtttagaacatggtgatgatctgtattattctgaccctgtggatttaaatgacaacgttgggtttctgaataatagaaatagggaagacagtactgataaaaatgaattacatgaaattgaagatggagataaaaagcagattttgttctggcataatgaacaacttccatttcatgaatcatcaagtcatctggctttaatcatacctggatagacgcacctgcaatgcagcatctgttgagtcattcaaaa

SEQ ID NO: 111083 - DNA, 203 bp, Glycine max
  unsure (1)..(203): unsure at all n locations
aanaatggttaacaactanaaactagaagatagtaaacccaattcttttattctttttttttctttccaaaagtgagtttgtcatgacatgtcttagtgttgacaaattttaattaatgccatgaaaattaatcataattgatgtccttaattccaaaaaatatgtgcttgaaacagcattatacaatcttttgttatcaatt

SEQ ID NO: 111084 - DNA, 325 bp, Glycine max
tgttggaaagcatgtcacagttcacacgtacataggtaaagaccaccaattttgacacttccacctcccaagttctgccacctactatataaccacctcaaactcattacacatttcgctcactctcttcaatattgaaagctagctatggtttcctttcacaaagctttggccgagaccccaatagcagaagttccatcagaattagaagctccaccaaggaagagaaagtgggaagacgagacactcactgaagaattcttcaagcatgatccaacagatgagaagagaaaatccatctttggtatagagctacatctagaga

SEQ ID NO: 111085 - DNA, 147 bp, Glycine max
  unsure (1)..(147): unsure at all n locations
cgatccgaagaataccctatttcatcgctctctacaataatcatcatcttcctcttcttcttcagtanattattgtacctgacgacttctcggttgatctatatcatggcatttttagcagactcgatcaaggaatcgatgatagac

SEQ ID NO: 111086 - DNA, 331 bp, Glycine max
agttcgcaagctcaacccaatcaataccatctcttttgttcagatattgggaactggcatggatactcaagatacttctccgtcagtcttgcttttcttcgacaatcaaagatttatattcaatgctggggagggattgcaaaggttttgcacggagcataagattaagttatcaaagatagatcacatatttctttctcgtgtctgttctgagactgccggtggccttccaggcttactgcttactttggctggcatgggagaagatgggatgtctgttaatatatgggggccatctgatctcaagtatttagtagatgccatgagatct

SEQ ID NO: 111087 - DNA, 294 bp, Glycine max
ggcagaaaatcttttcatttatagaaacccttcattgggaacacatatgtacaacacagtgttacattatcttgttgaagccaaggaaagtgacacggtgattgcaattttcaagaagatgaagttatgtggctgccaccctgattctgaaacatacaatataatgattgactgttgtaccatcctaaaaagttacagatctgcttgtttgctgctttcaatgatgatacggaaagggtttcatccagtgatttgtacatataacgctatcattgagattttgtgggaagatga

SEQ ID NO: 111088 - DNA, 292 bp, Glycine max
caaaaggtgattcaggtgcggaaactgttacagtagctactgcttcgaaagaccggacattgaggctatggaagctcaatacagaggaccctgtaaaccatcctatgagggttagggcttacaaaatcttgcgtggtcacaagtcttctgtacaaagtgttgcagtgcagacttctggagaaatggtttgttcaggttcttgggattgcaccatcaatctatggcaaacaaatgacttcaatgcagaagatgaccaagtgtccaagaagagaaaagttggaggtcaagttga

SEQ ID NO: 111089 - DNA, 273 bp, Glycine max
  unsure (1)..(273): unsure at all n locations
gagggtaggaatgagaatttgtatgataggagggaaggtgggagaatggtgtctggtgagaggagcaatgttagaggcaatgtgggccataaaatggggcttgttgatcagcttgatcgccccgggccgccggccgggagtcacctccattcgggttcgggaaatgatgctggcattggtgaagttggtggtagggatggtaaacataagganattgggaggttgaggatggagggtgttcctgagtctggtggagggggtgctgatgttgat

SEQ ID NO: 111090 - DNA, 313 bp, Glycine max
aaaaatataaaaataaggagtgtgaatagataaaagagaagggaatcatacgagaataggccaatatttaaaatggacgcagcaggaaacaacaatagtgagagtgagagtgagagtgcatgtagcaacatcctgacagttcaaatgacaattagacgagtgaagataggcccaaaaaagaatgtaaagaaaaagaaatttaaacagtaaaagtttaagtactaatctgaaaaaaaattattgttgaatttatactcaataaaactagttaaaacatgatactactataaataatttattagaaataataaat

SEQ ID NO: 111091 - DNA, 238 bp, Glycine max
gaaatgtatagttttcttaaagaaatccaatccaatggtaaaattaagttgattcttaatttcttcagataacccatgatctctgcatattgaactcatgttgggtagaggtgaggaagaactcacgagaatcccatggctgattttgactcaataatagtctcttctctcttcgatctctttctccctctccttgatcgcagacacaacactgtagcgcatcctcgggaacttcatt

SEQ ID NO: 111092 - DNA, 325 bp, Glycine max
acaaaactcaactatcttcgaatcccatctacacctaggttaagaagaaagatctcaaacctctgaaaaccctgaaccctctctttctcttcacatcattctaaacccattctgaaacccctcacattatttcctccaaccatgcttcgcatagcatcaaagctatcatctaggttttcttcctcttctactgccctcactgcaaacccactattcgcacaagatctctccattcctcttcatcgtcgacattcacatggctggaattgaggcacaggtcgcccgagcatcagtgtcactagcttgagactgagacgtagtattg

SEQ ID NO: 111093 - DNA, 352 bp, Glycine max
cttttggcatcaaacaatcaagttgactctgttccatgtgtttcagaattcatgccctcttgctcagcacatccttcagcaccaaacagtcaagttggctctgtatcaggattgataccctctttcttggcacattcttcagcatcatacaatcaagttggctctgtaccatgtgtaccagaattggtgccctcttgcttggcacatccttcagctccaaataatcaagctgacgttggcattctaccttttcttgattgttccatagaagatgatgacacattggctgtgaatgaaaacaacagcattgagaacgttgatgatcctgatcaggcaaacaatgcagaacgtg

SEQ ID NO: 111094 - DNA, 366 bp, Glycine max
acgtggactatcctcggtacctacatccacaccatccccatcgttggttcatgcacgtggaccatcctcggtacctacatccacaccttccccatccccggctatagccaacatgcctacagatgaagatgctacaaatttggcgatggaagaccacccccttaatgattgtccaatgattatgctaataaatggagcgttccatccatctaaggttccaacaaaggctgtctccttgtccattaggcaacaatttggtcagccttgacctacttgggagcaattccaaaagatcatcaggatgcttttttcccatcgttttaaggtggttctatcagcttgcaagatcacgtcattcgcttgtca

SEQ ID NO: 111095 - DNA, 256 bp, Glycine max
  unsure (1)..(256): unsure at all n locations
agttgtgaaaagcaaacgagggaagatgttggctgatctagcacaaccttgggatgaagttcttgttgcgaggggaggacaaggagggattagcttgttagaaatgccacagcataaaaggaaaaagatgatggctctgacaactaatgtgatgagagatgactcggacaaggttttaattcacggtcaacctggggaggaagttaagctggagttgatcctacgangtgttgctgacgttggtctgattggactt

SEQ ID NO: 111096 - DNA, 229 bp, Glycine max
caggcactgagacagctcttgccgattagtatcgcggtatactagatcaagctggagctccacctgatacacgttagactacaagtgctcaagctgctcatactccggctggagttcgacaggtagtatagctagtatctgctcctcccagcggatcttatgccagtcctatagctctcagactacagggcagagcatctgttgggactggagctgcaggagctggctc

SEQ ID NO: 111097 - DNA, 232 bp, Glycine max
cattcccacgctcctctttctcagtatttcatttcctctgtatcttcttacacctacctcctcagacaacacaaacttgatctacaaaggttgcgccgaccagaaactccaagcccatatcccagaactcaaacgtgtggactccagctcggcgtcggacaaaggttcgcggataccaaaggtcacggggacaacagggacttcatcgatgaactggtacagtcgggagtac

SEQ ID NO: 111098 - DNA, 255 bp, Glycine max
atttgcatggacaaacattactgaggtggattaaatatcaggaaaaattatctcacctcactacaaacatgtttttttgggagtttctgggtcaaccatctccacagtggctcatggaatactcattggacaaagaatgccatctatgcgtggcacccttctaccttcaccaatgccatggacgtctatgcactacaaagagtattggcgtgtgtgtcatgattcacttgatgcatgcttcagatgacaatgggc

SEQ ID NO: 111099 - DNA, 240 bp, Glycine max
  unsure (1)..(240): unsure at all n locations
tctctacgcagatcgcagcaaaccagagattgaactccgacgatgcctcncgtcgctcctcgatccggcgatgccatattcgccaagtcgaacgcgtcaatgcggactgtttactttgacgatgcgcaatggcgcaatgccacggtctggaaagtgagagtaagacacttgacaatggtcatatgaatcatatgatatttacagctagccaatcagatcaaaatatgttatcaagtgtta

SEQ ID NO: 111100 - DNA, 332 bp, Glycine max
aattcctgcaaagcttctggcaacacctgctctcctctctactactaacacccagaaaagcaagaacaaaaacatgtacctcagagaaacactacccagaagcagtgatgttctccaaagtcttcatgaagaagatgctcacagtcaaaaggttattctgcctcaaggttaatccagtggttttcaagggtgctccagcatatacctggcactagtgtccgagcctatgactaaatctttcatgtgttagtctatcttttaaaactttgcaaatttagtcgtgttgaactgatgttcattttgtttttcttatacttcacacatggtgtgct

SEQ ID NO: 111101 - DNA, 332 bp, Glycine max
caccaagtcaaagacccaggggtgtgcttgggttctgggcatccttaatgactgcattgggtaacacaggaaatatgcgtgtcagggtaaaccagaggtttaatgagaatgtatgcatgaggaagagttctatgattaccatggctatctcaaatgtccgataggatctactagccaagcacttcagcttctctcaggagtcgatatattgggcaatgcaagtagcgcacttggacacatgagtaaaggtgtagctgcattgtctatggataaaaaatttattcagagtcgacagagactggataacaaaggtgtggatgatttgggtgatg

SEQ ID NO: 111102 - DNA, 321 bp, Glycine max
agccgaagttgctgagactaaaagtttggcagctgaatttgccgagctggaaatccatgatttgagtatgctgaatgtaccatccccatctgctgttgctgctgctacgtctgagtatgaattggatttgttggcatttgacagtttcaaatatggatttgattatgacatggctttgatgatgattttgctgccctggaagacattcacatttgcagttttgatgataatgagcctagcaagcttcctgattacgattttgatgactttggtgctgatgagtttgctggttggattgaagaaccctcaatatacttgcgt

SEQ ID NO: 111103 - DNA, 314 bp, Glycine max
gtttgacacccagtcttactatatttttttatacgtgatgagagatcgactatctgatcccatgtataatttgtgttgtacattcatcggtgctttgtttggattttattgacgttgatttgtttcctgtttgccacggtttttctttgttttttgttttaattgaacatgggatttgatggcaactttttgacacccagtcttacttgctccattgctgcactctggtgaaaattaattgtctcatcctttaattaatatgcattgattggcttgcctagtaatttcttattattctgaataaatttcccctt

SEQ ID NO: 111104 - DNA, 311 bp, Glycine max
gttccgaaggtgggaatgggaatgggtgtgttaggttcgggttcgggttcgggttcgtcgcggtcgagaatgaagatgtggatgatacgggcgaccacatcggtgttactgtggacctgcatcgttcagttaacggcgttgggtgacatgtgggggccgagagtttgaaaggttggccttcttgtttcactcacgagtctgccgttagagcaatggatgtcgagctaccgtcaccgcgtcctcctcttctccctccaaagagagtttataaaaacaatggttatcttatggtctcgtgcaatggaggactc

SEQ ID NO: 111105 - DNA, 201 bp, Glycine max
gacgggacagtgcctgagagtagttccagactgcagcctcaacgctggctgcattatctgatggtaatgcaaggattggtgctcatcatgttcccccacaagatgctgttgtcgacaagggaaagaaacctatatcacctcaagttactcccagaaggagaaggtccctttctgaaccactaaagagtcaagagttgaagg

SEQ ID NO: 111106 - DNA, 330 bp, Glycine max
  unsure (1)..(330): unsure at all n locations
caaaagagtataatctaaactcgagttgtggagaagcttgaaatttgtcatgtctaaggatatgaaatgcaagttcaacaagacatgagttgggtacgatttagaggtgataaattggggattacgtcattgcacaagtaacattgtntatgcatctgtggatctatattacaacatcacagggatgtcaacataggatttgagtgataatctataactggatgaagtgaataaatgcttcacatgcaattttacataatataggattgtaggtgtaactttccaaattgaaaggctgttagacataatcaatgctgacctgggggaagt

SEQ ID NO: 111107 - DNA, 228 bp, Glycine max
cattgatgaatctactgcagaaaagcgtgctgtgtagtatttatttggtcttatgttcaacaagcagatgcaagcaaagttagacacgcgagttctctggtggttggaggatgtggatttctttagcacgtgctcgattgtatgaaccctaccatccttggacttgatgtaccaaccaatcactcttattttgaagcttgtgtgtggctcgtagagtatctgaagaag

SEQ ID NO: 111108 - DNA, 344 bp, Glycine max
  unsure (1)..(344): unsure at all n locations
aanatttctgaagcatttgtctgcctagaaagagaagggttgatataatggaaaaggtcttgtgcttcaagcacccctcagctggaatagttataatttgtggagttaaagtgggttgtctttgcatgaaaaggccagcccgggatattatccatccaaaagttagtaatcttttccattcattgattgatatatcattatctttttcctttcacctttgggtttaaaattgaatgatgagacaaagtcattatgttggttaatttatatataaataggcaccgatgtatgaatatgtctagataataaagctgtctacatccgtcgtataatgaccgatgtag

SEQ ID NO: 111109 - DNA, 103 bp, Glycine max
gcatctagttagaacccattcaaccgctgtatctgaatcaaaccaaacttataaaccatttaggctctcgtaaaacaaaggtcgctcaaaccactttccacac

SEQ ID NO: 111110 - DNA, 127 bp, Glycine max
ccacatgtctacagaggaaacaatatcagaagcaacttaattagctcttaagctagtagtagtactctaatttgataactgttattatgacattggtcaatgctattatgtgacgagatgtgggcat

SEQ ID NO: 111111 - DNA, 304 bp, Glycine max
  unsure (1)..(304): unsure at all n locations
cactaatttaggaagtattaagattttattatttattagaatgtgtctttatgcgttctcgctctcacatgatgttctatataaacttatcttgtatatgccatggtttgacttgggatatcttttgaaattaaccctatagttatgtatgctatttgctaaggtaagtaattatatcctagcctataactcaagtacagcgttgttgtccttaatagtagcattacatgccatagtctatgccttctgtttngagacagatttgagtctatggaattttggttcatgtatcatgcttctaata

SEQ ID NO: 111112 - DNA, 350 bp, Glycine max
  unsure (1)..(350): unsure at all n locations
cattaacataatctagttcataaccacgtccaaatatacacgatactttatgtcttcttcttccgtttcacttccccagtatcagacctttcttctaaacgtttggattgtcgagcacgtatctctagcagttttgatcttgcatcatgaaaaagagcatctgatcttgaagccatcatttgtgaaagatcatttcaaaattgaatcagtgtgtctatcaatggttagtaacagttctgcagaaactttgatacaaacctgaatatgatccatggcggcaaggttaataccatagatgtctttccatccctggctacaggttcagataccanattgtctatatgatacag

SEQ ID NO: 111113 - DNA, 278 bp, Glycine max
aagatagttatgattcataattttttttcactatatataattacataatttaaattcaaaatttcgaaataagctgaaataatctcaggtgaattcatggaattcatccatgtggatagaagataactctttattaattataacttataagtatattaaaatgtaaactgaatatatatatagttatgatggccagaggcactcagtaatctgtaactataggagatacatttaaaaaaaatgaactgcacaggatgtgagtctcataatggtagtgt

SEQ ID NO: 111114 - DNA, 334 bp, Glycine max
  unsure (1)..(334): unsure at all n locations
gtcaccgctcatgtacactgtcgccgacaatcccagctacctctgcaagttgattggacatgtagcatagtagagagtgtgattgggaagtatggtgttgtagcttttgggagcacgccctctatgctcatattcttcttctttgcgtctcagacccctcttatttcgcagtaaaataagctttgttcatggccaggcacctatgggtggtcnactctggtacatgataccatctcctntctttgggtacgttagctttcattcatatcgcattcgcnctgttaacgataaggttgtagagcaacaacatcaggcttctctaaatgcctcaagt

SEQ ID NO: 111115 - DNA, 282 bp, Glycine max
taggattataatattaagtattagtgtaagaataattgtaactactatgatgttactaatatggtggctcattatatgaagatgacagtatttgatattgatgaggggagaatgtgatgtgtaaataatgtattatatattattcatatataatagtgtattatgtgcaatgtgaatcatttactgatgttactaaataggctatatcataagtttactctatgcatcatggattagttagaaggtataaatagctggatcgggtggatatattacagttgt

SEQ ID NO: 111116 - DNA, 104 bp, Glycine max
gctgtaggtctacggtctacgtcgagctaacagagttaagtaaactgtcgcatcagtacggtatagatatataatggctgtggctgtgacgagtctggtgaccc

SEQ ID NO: 111117 - DNA, 262 bp, Glycine max
tttgtttgcgagctttgcgtggtattgcattctcttccctgttggcatctctagttgccaaaattcatattaatggcagagccatatttttttattacactcagtggaccttcactctggttataatttattttgggtttgcatctacgctatcagcgtatgggtgttatcggcataacaagtcaagcaccatcaataatgttaatgttgctagatatagatgtagagcaatggccatacatgcctttcttacaccaagata

SEQ ID NO: 111118 - DNA, 331 bp, Glycine max
ctccaagcctcggcttttgctggttctaggaccccatacatgttatgcagttttggcaatttctaaacgtccccattcatctctaatacaaagacccattttatacaaagtttttttttattatagaaaaacacacttaaggtatttcatttatgatgaaagaagaaatacaatgatgaacttgatatgaaacatgactacatgcatataaacttcacattctaactaagctgtcagcgacaagattagcttgaagccgtacaaaactcaccactgggtttgggaaactggaaagaagagatttacaactatttactagatttgaaaagtt

SEQ ID NO: 111119 - DNA, 337 bp, Glycine max
aaagtacccaagcttataaatacaatggctatggataaatttggttgtgtgaagacaaaagaatatagagaaaagagaaaaaaaatatctgaatctaggtagagagaaaataatgtggaatccacactatattttgaaaatttccccttaaatggtaacttctctcccacaactacccctatgagtgaatgcggtgggggcagagaagatcacgcaaaagaggagttgagttgagagggaagagagaaaacaaatatgaaggagagtgttttgagagtcatcaagtttctgggaagagaagcagcttcggtggagctgttgtagtatttgtgctatg

SEQ ID NO: 111120 - DNA, 344 bp, Glycine max
gccaattctttatcctttcgctgcgaatgagcaggggggatataagttgagtccaacttatgacaaccatagatacatacgtgtacgtcttgatcatatcaaatcttgggtttggtgtgatgcaaaagtagtgtatgtttgtaaaggaccatgggatgttgccttactgcagcttgaatctgttccagatgatcttttgcctataacaatgaatttttctaggccatccacaggatcacaggcatttgtcattggccatggactatttggcccaaagcactgattcttcccatctgtttgctctggtgtggtagcacaagtggttgaggcaaagactcctcaat

SEQ ID NO: 111121 - DNA, 257 bp, Glycine max
atatgttttaaggtaggaatatttgacagtagttatctaccaaaaaaatgatcaaagtattgtagaaatattcattagaagtatttgttttgagatattgaatcattgtcctaaaatcatgtttgccattgtgacataactagtcagaaaatgagattcattgtgattgtgatattagttgtgcgggtgttgtattcattttttaagaattaattacgtctgctgatgttcctattgtagattctcattttgttttt

SEQ ID NO: 111122 - DNA, 118 bp, Glycine max
cattccatacttcaaacagtgtgtaatggctgctaatgtacaaggagtccacttgtatgacaacaagagcatatatgtgtagtggaagtgtcaatagttaccaatgcccatcacaatg

SEQ ID NO: 111123 - DNA, 271 bp, Glycine max
gccaagaagaatctcaacggcgtctgtcgtcgaggctcctatgttgtcgtttcctattatgcccttctctggctcgttacgcttttcaacctcgcatggtcttttcttcagccatggcagtgctctcctgcaaaggaggttgcatggaatctcctgtcattatttacagcatctggtatgttgtgtctagagataagcttgatggctttcttgctgaaggataactacatgagtggcatggaagctctagcacactctttccatgcatcag

SEQ ID NO: 111124 - DNA, 268 bp, Glycine max
aatgaacatgattccaatgagctattcgcaagtcatccagttacttgatgtcgtgttgtaagttattgaaattgtttcggcagaccatgcagccttgttctatttttctttccaggttgattccaacttgtcaaaattcactggttgaggtagaattacaaaaagggaattcttaaaaaatatatttagttaggaataatgaactacttaactggttaacattgttctgacttctgagttgttaatatgcatccagatactgacttga

SEQ ID NO: 111125 - DNA, 319 bp, Glycine max
  unsure (1)..(319): unsure at all n locations
acctgctgaaaatataatagctgcatttcaaagaagccaaaagattgtgtttgccatctctaataatacatctgaagctcaggtgtttcttgagctttaactctgttctttcagttgcaacccttggatgttgtaggcacttcaacatggtttagatggttatgaaagttgaagatgttgagcctgttctcgagctaaaggaatattttgaaagaagaatggaagaaagcaatctactgagcttgaccanagccactgtaacacatattcaagtggctggaatgggtgatcggggttgtgtagactctgcagctcatga

SEQ ID NO: 111126 - DNA, 274 bp, Glycine max
  unsure (1)..(274): unsure at all n locations
atttgatcttgttgttgcttcttgttgaatttggacgagtgtaaagttatcatcagggtcttacgtcttaagcttctntgacagaccgttctttctcatttcagttaccatctttagctgcattcgtgtcacactcctttgaacacccgtcacctcaggaaaagcaaagggcatcatatcaccatgaaggcactaattcttgttggaggggttggaacaagggtgaggccattgacactcagtgttcccaagcatctgttgatntgctacaagc

SEQ ID NO: 111127 - DNA, 240 bp, Glycine max
ctttattgatatgacctggggatcatatatagcattggtcttgttccatgtgatggaattattaagtggagcagcattggtcttgtaagttttctttctttctagaaatgtacgagagtatttggtttttactcatttctacattctcaatgcaattattaagtaaagcagcattggtcttgttcaaaaaaaaaaaaaaaaaaaaaaaaaaaaaaaaaaaaaaaaaaaaaaaagaggggg

SEQ ID NO: 111128 - DNA, 299 bp, Glycine max
ctctaatatttggatttctgtcttgactctccagagaactgtatagagagatatggcagctcgcagcatctgcgtgcctgtgtttagatggggttgaggatctaccttctttgagtggtaggaacagggatctacaagccttctgggccactagctattaggagtgcataggttggtgctggctgctgtatactgttgagtcctgagaggactcattgtggtagctgctgctgcaccaaagaagtcattgctccctggtgtcagaggtggtggtctcctcgtcgtaccagaatggttga

SEQ ID NO: 111129 - DNA, 337 bp, Glycine max
gctgtttagagacagagagagagagtggtgctttgtgctgtctattgcagaccaccgttcgcattcgcaaggctcattctcctcctcctccaccgtgaatcagaattcataagcattcattgttttggcactcgctctacctctttctcactcgctcccatgctgtttgcataagcattcattcattctcgaagccgtttgtttcctcagtcagggagggaacatgacttccgtcacctccgtcgaactcaaccttctcgtctttcgctactttcaggaatcaggtttcacacatgctgcttttacatttggaaacgaggctagtattaacaaagcc

SEQ ID NO: 111130 - DNA, 129 bp, Glycine max
  unsure (1)..(129): unsure at all n locations
gtgagtttggacaagtgattgtgcctgagctcagccanagggtggccttnttcctgtcttntatcttcgctctctctctctgtctttatacgcgcaccgcanataaatgaaaggggcttgcccattgca

SEQ ID NO: 111131 - DNA, 197 bp, Glycine max
caacttcacagaagaatgactttcatcctattgggaaggatcgtgctaagggctatgctaacaaaaatgcccgcatgcacattctggaccttgctggctcagaggataatctgaagaaatgctaaggaacatgacagcaatccaacagctgtcgcaagctcgtttagtcagacagacaacagctgacatgaagtggc

SEQ ID NO: 111132 - DNA, 142 bp, Glycine max
cgggaattggtgagacatgctagtactagatttgccacttcttatctaaccttggacaggcttcacaaagagagagccaatattagaaaaatgtttacttctgatgaatggaccttgaacaaactatctaaggagcctaaga

SEQ ID NO: 111133 - DNA, 121 bp, Glycine max
  unsure (1)..(121): unsure at all n locations
gcaatcctcaccctatgagctagtttttggggttcagttaggcccanatccacattcttaaatgatatccgagactatcgtagatccattaaacaagccacccaccatattattatccaca

SEQ ID NO: 111134 - DNA, 139 bp, Glycine max
gtctttgtttccataaggagatggtttcttttatactgtcagaacttttgcgcattgctctgataactcctgtataacatagataagttagaaatttaaatactgttctaatattttctgtattgagtgtttatattga

SEQ ID NO: 111135 - DNA, 148 bp, Glycine max
ctgatactgtgaagagtgacaacatgccgcaagacttggcattggctttggaggcgcttcgccacctccagagcatcgtcaaaagacctcgaacgctctctctactcgcctccgagattcgcatcctcgaatagttatcgtcatcaga

SEQ ID NO: 111136 - DNA, 147 bp, Glycine max
  unsure (1)..(147): unsure at all n locations
atgcanatgcacatttatgaagatgtttatgcttcacttgtttttatggtaacagaggcagacttgcttcattctacctgctgcagatatttgcgcaggcaaaatacggtgtaacaatcatacgctggaaacttaaatgtgttttaa

SEQ ID NO: 111137 - DNA, 168 bp, Glycine max
tcacttatccattgtaatccttctggtaagagatgaagaataggtcaaacattataaaaagcaaagatgtaaaataaaactcaagacaaattgggtaatcctcaagtagatatttggtctttataaaacttcgtatcccattacccgaacgctcttcgctatgcgggg

SEQ ID NO: 111138 - DNA, 244 bp, Glycine max
actcgagccgcgagttcaagaagcagtatgctgtgtttgacgaaaaggtcttgaataagatcccgaaaggcccattgaaagggaagaagttagcttagtgtttaagcatttgtattctcaagaacaaaaatagaaaagactcaagtggagcctcgtttcttttaaaccatacaccaagcattgttttggattttctttaggcgggtgtggtattcatggttttagcttcaagatgtaacctttt

SEQ ID NO: 111139 - DNA, 236 bp, Glycine max
ctcgagccggattcaactcaggtgcttaaggcaatgagagaatctgtttcaacaaaacctactatctttgcaatgtctaatcccaccatgaatggtttgtttgtacacggctcattcagcactcacaattgtttaataatgtccatgtttttcattttgactattgttttgttatcattgtgacagctagtgcactgctattgaagctttcagtcatgcaggagaaaatatagtgt

SEQ ID NO: 111140 - DNA, 344 bp, Glycine max
  unsure (1)..(344): unsure at all n locations
aanagagatcaatcttccaagggatcattcagtgtcaaaaattgatgacaaaatcataataagcagcatctcttcaggactagaaaaggaatcaaagaacttgatcatgttagatgtctcctcacttaaagggggtgcacctggacggacaagagggttagattttcaagtcattggttcattttcagatggtttcaacggcaatggaccattttgacattcaatgaacttggtcaaactaacttggtttctctccattcgtatacaattatttaagaaaataggttacaggctgaggcactaggttcatttcttgagttttttttttcatttcattgttgtgg

SEQ ID NO: 111141 - DNA, 105 bp, Glycine max
ggaaatttttcaacagaccaacagacacgtgatttcatgattggcaggttcttgcctgcagcaaaggcaatggcttctgaaacacctcaaattccacacaacata

SEQ ID NO: 111142 - DNA, 280 bp, Glycine max
  unsure (1)..(280): unsure at all n locations
gttcactgttcacctttcccttttgttccgcatcagataacaaatacaccattaacaccgacctcaatcacattcctaggtaccancttcaacccttctttttgttttatccttctctgtctcacaaagttagatagatatagagaggaaggtgccacgtcaccatcacagtttcttcctcaccanatcctaggaaanagtttccaaatttcttcacatcataaatacacaccacaccccattgcgttgaagattcgcctcctcgctctcgttggatttt

SEQ ID NO: 111143 - DNA, 329 bp, Glycine max
  unsure (1)..(329): unsure at all n locations
atagaatcaaatggcatagctgtttggtcgatagtcaagattcctattggagcctccttcctttcaactcaggtcctgttttttttgttacaaaacccagggttggctaatctgcaacatatgaaggtgtgatcttgatttatggaaaacagaagaaatcttttcagttattatataatttggtttggcacttgtggctgcttagatggctttcactgattctgctcatcggatgtatcaaggatgactctcatttggggagaaagaactagattttatacatatatggggctttgaaggtgataaatcattcatgganagccgcctgg

SEQ ID NO: 111144 - DNA, 250 bp, Glycine max
gctggacatatcttttgagctccatgatgcaaatacttttgttttgtttggagaaattgtgctggcacagaaggtaatgtatgaaaaatttggggatgattttctagttcattttgtatcgaaaggattttcttctgcacattgcccaccagatctggcagagcaatatcgtcaataattgcagggtggtgatttcaaggcactaaaatctttctatcagtcactagtggaaaatttgagactgcagcag

SEQ ID NO: 111145 - DNA, 250 bp, Glycine max
tggaatacaaaaccaaagctttgttatgtttctcagttcgtgcttttcagagtttgctgcatctttcctccaacagatattgttcagattaaagggattggtgaatatcttgaaggtctgatcccgtatagtcaaaggcattttggcaggataatagattgttaagagcaccttttttgttaagctaacatcctatcaggaatgcctgtaattgaaccacaagctcaactgacagaatcaaagactgagt

SEQ ID NO: 111146 - DNA, 239 bp, Glycine max
gtgatgagattctctatgattgtatttcaagcacttttgagctactactgtctttctctcttatattgcattcctggatagtttaattcaaggcatcgtcgacggtctccgattcctggacccttttagtctgaagctctactgatttatgaattatagtttgattggatggtgtaaacatctcgtaaataccactattttggataaaaaatagttgaagaatatctcttatttgatgg

SEQ ID NO: 111147 - DNA, 243 bp, Glycine max
aaaccaaccaacggctgaggcgtgcttttttattttattactggagctgcccgccacccttcttctggttttgattattcccatcaactccaagccctctatcaaggcataaattgttatcaataataacaatcaatcaccatcatatcatcataagcttgtatatcaaataaacatctttcaagtttaaattaatttatactataaattgttgtaatatcattatagttgaagttcaagctg

SEQ ID NO: 111148 - DNA, 238 bp, Glycine max
acaatttgtccaaccactacctgtttgacacattgttcctctaacacaaaatttggatttttagtatctcttccaattgcttacactccataggaagcctctagagcatcataatttttggctcagtctttatacatctgtaataccaaaaactgtctacacataccaccacacagaattgatagagtgtgcaatcttcagagtctcttttataacagataccaaaacatggttagta

SEQ ID NO: 111149 - DNA, 239 bp, Glycine max
caagatatcaaccatcaaaatgagagtcagaatatgaatcctgatgagcaaaaccgcttttatcctattgatgaatttgaggttcgtattatggagccagaaaagtctggtggcccttggcaaactaaggcaacaatacctatgcaaagttctgaaaatgcccttactgtgaggatggttactttagtgaatacaacctcaaaagaaaatgaaacacttttagccattggtactgctta

SEQ ID NO: 111150 - DNA, 248 bp, Glycine max
tgatcaattgcgggataacttgcgtgagaagcaaaaacaagcagaggaaatactacaagaattagagggcttaggaagatctattaacaactggcaagcagagtcttgcaggagttacacatgaccgtgacaagcttaagtcagtatgtgatgcaaaagacaaggcacttcaggctgaaattctagagaaaagatgcattgaagcagagatggccgagttgagtcatctggttactcagaacactacc

SEQ ID NO: 111151 - DNA, 244 bp, Glycine max
aaagggatgtgctaccatgccacctgatttgtctaagtatcctgcagattttgttgctatctcattttacaagatgctgccaagttactgaagaagacttattttagtggaggaacggttagtgcatcgattgctgatattgatttcattaaaagaagggaaggtattgaggaactgtttgaggatgggactgtttcatttttgagcatagtatctatccgccatggcttcaaaatcctgaatt

SEQ ID NO: 111152 - DNA, 244 bp, Glycine max
gaacctctcgccgctgtctccttcggacgatctgttcttcaagggaaagctggtgcacgtggacccttccgaacctaactccaagcctcagttcaccgcctccctcttaaaatccgccaccaaattccgcgtcttcatgttgggcctcaaaaagcccaagcccaacgacaaagactccaacaacggttccgattccgcaattccagaggcccacaaagacaagaagcacttcaccgtcaaattc

SEQ ID NO: 111153 - DNA, 170 bp, Glycine max
caattttccaaacttgaaacacttagatgtatcgttcaaccattttgtgtctctcccagcacacattaaacaatctactaagttgacaagtcttgacgtgagttattgtgataagcttcaagaaattccagaactgtccagtcaactagtgtcagaaagtgatattgcaa

SEQ ID NO: 111154 - DNA, 236 bp, Glycine max
ggggagtattgacatgactactagagacgatgaaggagcagattggccattcccacgatctgtcccttcatccatttcattacaccttaaaacatgttttatcagatgttatggaggctcaaaaggtgagcttcggtttgcaagatatattatgcggaatgcaaggcatttacgtaccatgaaaatctccacttatgcaagtcgacagcagaagtttaatatgtaaaaaagttatc

SEQ ID NO: 111155 - DNA, 256 bp, Glycine max
cttgtgcaccgtaagggttgtgaagcaggcagagaagagccatggtgcacgtttccttctaccgaaactgtaagtactctaaaccctctaactccttcctgctctctatatagtctatgcatttgtttatgtgaaatgtcatttaatctgattgtgatgtttctgatctgaggataaatcaatatttcctatgaaattgactaggggcgattattaatttgtttgtttggggttgaatagatgggaaaaccttcaa

SEQ ID NO: 111156 - DNA, 252 bp, Glycine max
aaaatacttctattattgtttcttgagtgtttttgtgttacatgaatatgttcatcatttaggttagtgccttttgtctcgcagactacctatgaaaatttccggtacagagctgaacgcaggatcaatgtttttaaccggggttgtttaaataattttctggaagtgttttgcacaaaagtaaagccctcaaggaacaatttcagggcatttgctcgagaggaggtaccaccgagacctctggctccgatc

SEQ ID NO: 111157 - DNA, 253 bp, Glycine max
aaagagcaatgctgctggatgagcaagcttttctttttgatcctatgctgctggatgagcaagcttttctttttcctgatctcagctaaagaaaagcttgctcatccagcagcataggatcaaaaagagcaatgcagagaatcggccaactgtaccaaggaagtttgataaggacaagcagttcacatcagaaagaatgggaaggcaactgtcatctaagggggatgatcccagtttggcaattaagagaatg

SEQ ID NO: 111158 - DNA, 252 bp, Glycine max
attcgaaggggtggaccccactccactacacggcatggaaggggcacgtgaaggccgctgagtgtttgttggaatgctccaacatgaagtgcgcgagggatagggaggggagaatggcattttctgttgtagcagagagtgagcacgaacaatctcacgcgggcacgtgcttggtcgatttgctgggttggggcgacacgctgttgcgtgcggtgagaattgacaatgttctgacatgaagaaatgtttggg

SEQ ID NO: 111159 - DNA, 256 bp, Glycine max
gctcattctgccggcagtttttacaataattatgatttgaggggttacaaaataggtgttgcaatggcagaaaaatctgctccaaaagctccacctgcatataaccatgggggaaataggagtggctacggtggagatagacgccagagacaattatagagatggaggcagttctggacctgataggcgtgataattatggtgggaatcgatcacgcccatactgagggcttcgatagtaaacattttctgtacta

SEQ ID NO: 111160 - DNA, 250 bp, Glycine max
acacaatgcgagtcacttccaaggaggcctctcatgagtttactttggcttctcgtatgccggagatagaagcaccaaatcaagtccatagttgtcatgtataggtaaagctttcttccaaacttgtttttgtagtggatactttacctcttcctcttttctgcttctagttttagttgaaagttcatttaagtgcgcactagcgttgctttacacagcaatcgttgggtaaagggagactatttgaact

SEQ ID NO: 111161 - DNA, 249 bp, Glycine max
cgtttctgatagtgtgtcctagtcattgagtttctcttgagaatagcttatcattatccagtatcaattcatatagggttgctctgttcatgatattgttatgcattgttgcatatttaggaacaaatgaaaaaaataatacttttgtggctattagtaaaagttgtccatcttgttctgatagtgtgtcctagtctttgtgtttctcttgagaataactaatcaagtatccattcttatatgggttgc

SEQ ID NO: 111162 - DNA, 257 bp, Glycine max
gaagaaagcagataaacagaaagttgcagaaaatagaggtataaaattcaccaaagactttgagcaatgtcgagctcagacacagagaaagagaaagccctgaggttgaagatgacagggaggaaccaccggaccgggagagagtacagaaagaatacgagcatggtctagcttttaatatgctttaaaaacccattgacccgacccgacccgcaaagttcgcaactgagtggttatatactgcccagaaactcaca

SEQ ID NO: 111163 - DNA, 260 bp, Glycine max
gcatattatcatcacaaccttttccaacattttcaccctaccaacgctggcacagcagcgtctgctgttacttctgccaatgcaaatgcactaactgcactgccaccaacagcagcagctgagttctttatttggcctatcagtcttattgatctaatcaaaactagaaatcatcttttgttaatttcctggttatgctaacaaatcaaaagctatagtctctggcacagtttagctgacccccctcctctattattaac

SEQ ID NO: 111164 - DNA, 258 bp, Glycine max
tgtgggcctggttactctttgcacacccttttttactaaacataccccctttgccttctttgctgattctttttccgtaacattacggaactttacggattatgtaacgatacttgttttctttccgtaatgttgaaaactttacggaatacgcaaccatcccctctttgacttctagaatgttacggagctttatggattgcgcaacaatgcttcctatcgactcccgacatgtcgcgacacttcacggattgccta

SEQ ID NO: 111165 - DNA, 256 bp, Glycine max
aaacacctctaaaatactccctgtattctattgttcacttctcaaaccccacattggtccacttcctaactccttcaaccaacttcctgcttcatctcattacaaccatcctctagtcctgcctttaactattcgaagtcgaaatgggatcattccactattcctcccacacgccatgtcttggttcaatggcttggcctacctgatgactctagctgggaaaattgggaagaaatgtgttctgtctcccaccttg

SEQ ID NO: 111166 - DNA, 252 bp, Glycine max
aaaaagaaacctctcgtgacacctcggatgattccgaccctgaatcttcccaaatgcaagagtctcagcctttaacgagtagatagttgcagtctttgagttactcaagttgtccatgccttattcagaagttatgagactatatagtagttttcatttttcacataatgtcactagagggcatcaaaattcatgtagtatataaaagtataagcaagcattttggttcaatcttagaaacagtttctgcta

SEQ ID NO: 111167 - DNA, 138 bp, Glycine max
ctttctttgtggtttgtgagaaattgcatcctgctcagccaggtgctagtcacgactcaagtattcctgttatttcggatgttgagtatgccaccacatctgtaactccccagaaagcatctggaactgctgtaaagt

SEQ ID NO: 111168 - DNA, 272 bp, Glycine max
cgaatatgtagacattgttgccttaaaaatttatctgtttagagtttagacattggcgaaggatgttggtatcttgatgaagacgtccttgaactattaaatgggtatccagatattttatgtacctattgacgtgtacatctaatgcttgtgtggaatagtttaagccagcttctagcatgggataggtctctcacggtgagaaactaaattttcaccgtaagggtttttctttttcatcaatcaatagcatcgcatcgcctctaatgctt

SEQ ID NO: 111169 - DNA, 264 bp, Glycine max
cctgggacttcgcaaaaccagagtttcctcttacagcaactcactctcacattcccattgcgctatcttctctgctccaaagactcatactttcaaattagtctgcctccttagtccttgcccccaaacctttgccgttgtttttgactcacatcatatggttatgaatggatggtgctgaaaggcggtgaagtaagcatgtctgagaagaaaagggaagtgatggtggcgattccacatgagtgtggtctagtatctttgatg

SEQ ID NO: 111170 - DNA, 270 bp, Glycine max
gaagcataatttttacatgcgaggtagctttagctgagacattgttgtatgatataacggttttatcctatgttgttcaatgtatatatgaaaatatttaaccctattaatcatttagaacaattttgttggatatattcttcattattcctaaaagtgagagcctttttattgttactaaactctttgttctaattttttctttttcttgttttgatttaaatagcttttacggatcaagattgtttaatacaagttagcttttgaaat

SEQ ID NO: 111171 - DNA, 267 bp, Glycine max
gaaatacagtgagaagaatccttcttggataaggttgccacaagagcccttatacaaacaagagaagcatttcccttaccccccaaaagcaccatgtgcaaagcataattcaacatttcccatgacataagccgaactgtttgtaaccttacatgctgatttttactagttcagtgagcagcatgttgatttgcatgtacattatcgtatttgtaactgcaacaacatttgagttgtttggcataagctggcaaagcaatattaggc

SEQ ID NO: 111172 - DNA, 268 bp, Glycine max
aattcaaccacgtggttgttgttactctttggagatcccatcatgcgaacaaaaggtttgtgttgattcaaatttcaactaccctcccaaaagaaaaaaagaattatcgttatttataatatatgaattaaaacatggtgtagtaatgacttgaatggaggtgctcaagtgtggtccaggtatttttgttcaagaactatgttaaaaactttgttggacaacagcattaattattaacatcctagcctgccttaaattgagacctcat

SEQ ID NO: 111173 - DNA, 122 bp, Glycine max
ggatgatttgagctagaactgaaatgtatctgtattatcaactgtggccgagatacattctaacttggccagcgtgtttagtagtttaaccctgtgatattggatatcctagttaccgtgtt

SEQ ID NO: 111174 - DNA, 264 bp, Glycine max
ggaggatccggcttcggcgccaggcgcaatggtggcagcggcgccgcgtgctaccagtgtggtgatttcggccacctcgcaagggattgcaacaggagcagcaataccggcggcggtcgaggcggcagtggcggtggttgtttcaattgcggcgggttcggccacctcgcgagggattgcgtgcgcggaggaggcggcaatgtgggtgtagccgcggtggcgggagcggatcttgctttaggtgtggcggatttggacacatgg

SEQ ID NO: 111175 - DNA, 198 bp, Glycine max
caggcggtcagttttgttgatcctgtatactcagcagaatcctcagattcagagttttcatcaagtagcatatgagagggggaatggtctaccaaaaataatagtttatcaccttcgaccaattggtggacggtgatgaactattatttttggtagaacattttctctctgatatgctactagaatgatcactaacaa

SEQ ID NO: 111176 - DNA, 200 bp, Glycine max
gtttgtttcatactttcatcaaatgtcaatttagaattcaaagcgaactttaacactgctggaaaagctacccctttcgttgatttgtgaaaaaaaaaaaaaaaaaaaaaaaaaaaaaaaaaaaaaaaaaaaaaaaagaaaaaaaaagaaaaaaaaaaaaaagggggggggggagggttgagagacgggagaggggggtt

SEQ ID NO: 111177 - DNA, 265 bp, Glycine max
cgcccctccttctgtgggccaccacagttccatttgaactgccaaaacggtatcgttcccgagttgatcatctcatcagtgagttaccgagtcattcatgtaaactcggaggctcacactctcaacttagcaagactagacctttggaacgagacatgcaccaatgtgtacgttaactcaacttttgatggccccacattcagctacggttcggggaaccagaacctcactttgttttacgagtgcgaagctcttcacggatcac

SEQ ID NO: 111178 - DNA, 262 bp, Glycine max
atggaggttggtgttggaaatgatttggagagtgtgagcgttggggttaaggaggtgaaggatgggagtggtggcgatgatgatagtgagagattgaggatgattccatatatatgtcacttggagaactaagtatgccagatttttattaatggcttttgggggcattgggagcaacctccatcgcaggattatcagaaacacttttgatctgtgatcactcagaactctcaggagacattatgtagtggtatgtttagtc

SEQ ID NO: 111179 - DNA, 267 bp, Glycine max
ctcccctggcttggcacaccgcccccgacacgcctccccaccatctatgtcgcgatttcccgcaccaagaaagcggtgacgtttccgttctccggggcgacgaggctgatgaaggaggtggctttgatgcacaaacgtgaatctttcaaggaagggccttaagatctcttttttggcagctgaacccctcctgtgacgacatcgtaagctagagcagaaacaaaaatatgcagtgtggaaagccgccgaaataagaaaagctttgaa

SEQ ID NO: 111180 - DNA, 264 bp, Glycine max
cgagctcgtggtggtgaagcccatggattatgcctacctacagggcttcataagcgcgcatgacggtgacggtgaggttcctccacacatgctcttttgcactcgctccgattccctatttttatggagcactagaccaatttggaggcgagatcttgaggtcgaaggcatcatcggtgtagaactgtaacatgttgcttttggccccggagcctttgtcgggttttgggtttgctggtgcttgcgcaattctagagctagttt

SEQ ID NO: 111181 - DNA, 166 bp, Glycine max
atgggattagagtttcagcaatgaggctcaggagtggtagtttgaggacaagaggtgttgaaagctataaagagtttcagatcccaattggggtttttgaacagccttatgtagagaggctggtttttgtgtacataacttaggcaattggtctgagaagttttat

SEQ ID NO: 111182 - DNA, 257 bp, Glycine max
gtctgtgattttggattgtccagatttaaggcaaacactttcttatcatcaaaatccgttgctggaacagtaagtttctcgttctcagattatgtgcataagcatgatgataagaaaaaaaaattatgcacattaggattgaaaattattgagtagcaatttcaggtttgaagtaaggagagttcataactaatgttgctctacatgagtgctccttgattcaaatagacaacagtgctctacatgagtgctccttg

SEQ ID NO: 111183 - DNA, 259 bp, Glycine max
aactcaagcattgcatccctcttgatttgtagtttgttttgtgctttagataaaagttctgccaaatcaagaggggttttaagatcatagtgtgtgttttgcaacaatggctaagttctttgctgctatgatcttggcactctttgccatttccatacttcaaacagtggtaatggctgctaatgaacaaggaggccacttgtatgacaacaagagcaaatatggaagtggaagtgtcaagagttaccaatgcccatca

SEQ ID NO: 111184 - DNA, 251 bp, Glycine max
cgttgctatagatgatttaaaagtataaaatcattcttgtatgtttaccaaacaaattaagctttgggtgacatgatattagagtctctatgagcaagtggtctagagttggatccttgttttactcatccttctaataaaagttggagttcatcacaaggttgttagataggcatgtgctctgtgcattgtccacaatttaaacccaaaggccttctgcacgaggggtgtgttataaaatgaaagtatga

SEQ ID NO: 111185 - DNA, 247 bp, Glycine max
gatttttaattataaatgtacctgggactacgcaattatttttgttccccagcacgtgaggctcgttcttgagaattatttctagtagcatgtggggggcagttgtttaatgcttgcttaccttgctatttttgtgttacgagaagcaggggtttaggatggtacttgttatatctagccatcactgacaagaatgaatgtatgtataattgatagagggggaaaattgatggagagaaaaatgagg

SEQ ID NO: 111186 - DNA, 163 bp, Glycine max
  unsure (1)..(163): unsure at all n locations
agttgctgaagatttggttaccaagaactttgtaattgctgaggaatatgtaagacacggatttccccagaagatctacttggtgttcttcgagttatctggaatgacgtgctcctgatagatgnaagtacttacaggagagcagctactctctgagatcatt

SEQ ID NO: 111187 - DNA, 254 bp, Glycine max
gaaaaacacaaactcatgaaaagaagaaacatggatcagatgaagatcacggcgctctcgatctttttactaggatgtctcttggtcatggctgtccaaggagattcatcagcaagagttcttccagttgaggtagggaatataaacaagcttggagtgtcatctcaaaaggaaccatttatgagaactggagctggtcatcacatgaggaagcaagggcttgggggaaagaaatttagcacaaatgaggtgac

SEQ ID NO: 111188 - DNA, 254 bp, Glycine max
ctttctattccactttaccaaaaccgtcaaggcttgtgttttttaactcttggtctcatttgccaatggaaaaagacttttgtgttggcatgcttgttttgattccttctatcttgtgaaacaaatctttcaactggtgttggtgttggtgttgcgttggcgtaagtatgtactcttttgcattgtcaagttcaaatttcttgtcatttttcttcacaaaagtttagctggtcttttatcaaatgcaagtgcta

SEQ ID NO: 111189 - DNA, 246 bp, Glycine max
ataggaaagaaattgaagatacaatggagattgttcgtgaagtgagttattacatgttcttctataggttacatataacatgtgaaattcaatttctaatttctagtgccttgacatgaactactatgctttatatttttgtgttcaatttttaaaatttatttataaaatagtaaaaggggaaattaataaaaaaattgaatttcagataacttgacaatttattattttgtgttcaccttttgg

SEQ ID NO: 111190 - DNA, 241 bp, Glycine max
agagaaagaactccgtagaaagaaccgagcaagattagcgaagagagagagagagggagggttttgtgatttcttgcagaatcgcgttttggagttagtcggagatggagctgtcgactccgaattcttcctcgaagcacttgtccattacgccgggttctagggttttgagaaaccctctctccgacgaacagatctggaagcgactccgtgacgctggcttcgatgaggaatcgattaa

SEQ ID NO: 111191 - DNA, 252 bp, Glycine max
ggaattcttgacttctgatgagagtgaaagtgatgatagcaaggataacaacgagacagatgatcagcctgataaaatggcaaaaaaaacgagccaagtaccgtgctttgctccagtctggtgatgattcagatggaggcaatgaacatgataatgcccagaatatggaggtcaccttcaatacaggtttggaagatttaagcaaatatattatggaaaagaaggataaaaaatcagaaacagtttgggatg

SEQ ID NO: 111192 - DNA, 182 bp, Glycine max
agagtcgatcgtcacagagagggggtctcggcgtgggtgttgggtatcacgtgagaccactggaggacggcgatacgattacctcacaagcttctctattggcgatagggtgtgggaaagagttgtctgctttatgcgatttatctgcatggtatcctatcacataccagttctctatcacc

SEQ ID NO: 111193 - DNA, 239 bp, Glycine max
gatagataacattagagatctctttggacacaaggtggatcttgggcttataaagaagaatccaatatgtcgacttggaattgactaaaatgattcatgtttgtctcttgtatttcttttcatttataaattataatttatttttgtctctaagattaaacactagctgtagattattagttcaatttctatatgtagaattttgatacgacagataagttatgcccttgttattttta

SEQ ID NO: 111194 - DNA, 252 bp, Glycine max
caaagccgttactcttgctcatcacctaaacccctaattccaatccccaatggcgaacgactcgtcgtttttgttcgccggcattcgtttcgatagaaagaagttcggcgccgatattgccacgttccagaaaaaagacagtgatactgattcggcgaagatttcgagcgccgccgaagacgaaggcgagagaacaatagaaccagtggaagagtcagtcgcagcgtcaacgacgaagacgaggaagcgcaa

SEQ ID NO: 111195 - DNA, 240 bp, Glycine max
cacttactttgttgcttactctgatggttcgtgtacagacactaacagtgcacgagcacctgacagaatgctaggtgaagtcagaggaagtaactctaggtgtatggcttcatcactagtacgcacaggctttgtacgaggttctatgacccagggaaatggttgttatcagcacaggtgtatcaacaattctttagaggttgctgtggatggtatctggaaagtgtgtcctcaagctgg

SEQ ID NO: 111196 - DNA, 236 bp, Glycine max
cgaagaagttaggaaggctgcagtttcaggtattttcttggctctaagaaccaaaacctcgcttatagtttgtttatttccaatagcccttgttggattttcttcaaatatcacctgtctgctttgtttatagccatgccagaactgttgtcctcggcaaaatcagctgtagagaagggacagtcgcaaggtcgtgataagacttacgtaaaacagttgtctgattatataatacc

SEQ ID NO: 111197 - DNA, 243 bp, Glycine max
acactattcttcttcttcttctaaaatgccgttccccatcagaatcactcttcaaggggctcaagcaatgctggcaacaagaatttaactgagaaagaagtctatgtaaaccatgctgagttagcctggcatcaaatgaggacagaatgggttggtgatcaatcaaaaaaattacggaggtcacctaaaggttcaacattaagcgtcacaaggacttatgaagaggtgcttgcatctagagaa

SEQ ID NO: 111198 - DNA, 249 bp, Glycine max
ggaagatctggtttccattatctcctccatcttcacgttccgaaattgtagatagaagatcacacttgctcaattcccttctcaagttattgttggttggcaatgcaatatccaaggattcctttagtcagatgggattctagatctagtaaaccatggtgggggtgtctctcatgccagaaggcatctctaggtcgagtgctatcgaatggtgtcgtggaagatggacaggcatctctgtctttaaaa

SEQ ID NO: 111199 - DNA, 248 bp, Glycine max
gcatgtcctcatcatgcgaaggttatgatgattcaagaataactgaaaaggagacatgtttactttcaagtcccagaaaccctgcgcgctacatgagaagcaatgaacacctgatgatgcctagaaggatataaggtgggatattgcatgccaaaagcctaagaacacttaaagagaagaaaactgtatgctatccgtttgcttttattatttataatacaaagccagtcagtcatcaggatctagtt

SEQ ID NO: 111200 - DNA, 248 bp, Glycine max
aatgagtgtagagttgaaactcgggatgggataagggatttgcagccaactgttgttacgtggacgacattaattgctgcgtactgtaagcaccgaggaattgatgattccttttctctttatgagcaaatgattatgagtggaatcatgcctgatgtggttacttgtagttctattctctatgggctttgcagacatggtaaattagctgaagcggcaatgttgccgatagagatgcataatatggg

SEQ ID NO: 111201 - DNA, 245 bp, Glycine max
aatttatgtattttatttaatttttttcctatccaaatagctttttttaaagaaaaaattaaaattggttcactgttgaccaaaggctttaactgccagatccgacctgttccagtttggaacagtagttactggtttatagaattgaaaggaatttctcaagatgagaggatttgaaaatcccccattaccaatcttaaatatatcaaaaggtgctggatgaatttaattctttacttaataca

SEQ ID NO: 111202 - DNA, 240 bp, Glycine max
catatttatgtcttgttaatatgtcgagtcctcctgaaaaaaccatgttaagatttgtatgatgatatgatataaattgtagaacggaagatattccgcttaactgctaaccggttttgtgatgtgatcggagcctctgattttggtagttagtggtttatatatcggtgcttccatgttccaacatgattatagatagctccaaacgcttaatatttcccttttatttcaactgtatat

SEQ ID NO: 111203 - DNA, 240 bp, Glycine max
atggtcaaagagtctctcatggggaaagtgcaaggttttagccttctatcttttggtggctgctttgatggttgtcgtgaccatactcaaggctctggttacggaacaaggatatggaacctcagtgatcgaccagtggagctgcaaataagggtgggatcaatactgaagaagattcacacgttgaagccggggtcttctaaaagattgaaatctaaaagcatatataaggcttatatg

SEQ ID NO: 111204 - DNA, 239 bp, Glycine max
aatttaaaaaaaaaatattggaaatttaaatataatctgcttaaattttatgtctcctcccttcatacgaagaaatagaagggaaggacatgatgtcactgttaacaatgataatcatggagattgtggtcattcctgaacccgacgtacattttgttaggatactgatagctggtaatgcatcattaccttgcacacccttttgagttgagagtcaatctagtaatctgctacatcta

SEQ ID NO: 111205 - DNA, 236 bp, Glycine max
atccaagaagagaggctctgtcgccaccgagagggtcagatcgaattgggttttgcgaatcgacgatggcggtggcgacaacggtggcgacgagggagagggagagaagtataataacggggaagaagatggggatgacgatgatgggtatcgggaatttgaggtagagaattcgaagagccctttgaaggagcaagccctattcatagtatggagaatttgggggttgatgggca

SEQ ID NO: 111206 - DNA, 241 bp, Glycine max
aacagaataaatgactgctacaaagtattctattatcagtaggaatggggttgggaccacaggtaaacacttacctttacttgtgaatctcttcgaagttgttgttaatgttccagacacagtatttttccagtatagtgtatgttgaccatttctgtctctgcaatttcacttatatcttatcttggactttaggttattgaaggatttccaggtttctattaactttgaagataaacga

SEQ ID NO: 111207 - DNA, 254 bp, Glycine max
gctagatacaactgaaatcattgactggttttcagggatttcttgccgctggctgaaatggcatgaaaattgtgccaactttgatgagataaagctcttgatttcaaatcatgttaggaaatcatgcattcgtactttagcagcaaagtatcgggtacatgaaactgagatagaaaagcagtttgatgtagaacttagcaggattccatcaacacaggacatcgagaaggagatgataaatgaagcattggatg

SEQ ID NO: 111208 - DNA, 100 bp, Glycine max
caaaagtaatgatcctagtaatactgagtctgctctaaatgcaagttcaactgtgtctcatgctggtgtaaaagtgacaaaagttgatataattattgtt

SEQ ID NO: 111209 - DNA, 248 bp, Glycine max
ctggagtacagtggcgtgtgtgtagaagacgaagcagccactggcactgaacaattatcctttgatggagttggcttttcattcagccctgtacccagcatctctgtcttgtcgagcgaggaggttgtccttggtgccttgtgcattgaagacacgctcttgtatcgaggaggctctggtgagtgtggaagcatgcaacatggcatctcaccctatcaatttctccaagttggatggaacatggcgcc

SEQ ID NO: 111210 - DNA, 279 bp, Glycine max
caagaaaggtttgttaaaagatgaacagattattgaaactgcaaaatcaccatcacattctgatgatgttaaatcaccaaaaggagcagcatgtgaggaagactctgaggaggagttctatgatgttgagaggttagatcctagtccggatatgcctgttgttgatggcacaaatgccttggcaaatggtattactgctgatgctgcacaaccagagcttcatttccttggaaagaagagttggaagttctggttcgtggtggagtaccaatggcattg

SEQ ID NO: 111211 - DNA, 281 bp, Glycine max
cttggataagccaagtcatttcaagatgagaagagcaaggaggatataaagttgacacccaaagagtcgcaatttacatgtagtgcatgatgttgttaatggttaatcttgtaaaagttttctaaatattttgtttcttcttatgtaactatttttacttatttgcgcgtgggtaatgtcatgttgattaagtatgtatgggtatagtctgattttggggaaatcgtacatgtaatgacaatgggaacatatcttatttatgatacaagtataggcacaat

SEQ ID NO: 111212 - DNA, 274 bp, Glycine max
attgtgttttaaacatggtcaaacttaccaaaaataccagtaaacttcctttcctttcagagaggctattgtccctaggttttgatgtaatttcaaatatactggagactgggccgggatggcgattagtttctccacattttacgactctattggaatctgcaatctttccagcattagtcatgaatgacaaggacatgtcagagtgggaagagacccagatgagtatatacaaaagaatcttccttcagatataggtgaaatttctggatgg

SEQ ID NO: 111213 - DNA, 273 bp, Glycine max
agttgagactgtaaatgcaggccatgtgtgttgtattctgataactcaagacaaaatatggctgaggttgcagatgatatctccaagtgtatcatcaaagaagttgagaagccagccatggacaggactggtggtatcccaatgaccaggcttcctttacaagctcctcaaaatattcaagttgcttcaggtgttgctgcgcggcccggaaagttgtaggttcaatattgcattacaacaactgtggggcagcagttacagctgatgctgagc

SEQ ID NO: 111214 - DNA, 272 bp, Glycine max
catatattaattgttcccaaaaaacgagtaccaaaccctcgtgatccctatcgaggttctagtctgatatggaaaacgatattttctcgtttggttttagtcaagggaccacttcatcatgacattgaccgacactggtaataatatgttcatattttttgtaggatatgaagaatatgtgcaacgaataaaagaaagcgatagaaaaggagaagaagcgcttcgcgatgcacgaaagagaagaattggaagcaaagtttcggcgttttgtc

SEQ ID NO: 111215 - DNA, 267 bp, Glycine max
ggaacttgccatttagtgttgagcgggctgacgtggaagggttcttcaaggatgccggagaagttgttgatgttcctttaaacttcccagtatcatctgtagccggctcgagctcgagccgcttggaaatgctattgaaactggtcagaatatttggttcagtaatctattcaactgtatcagctacacaacctgttggtgtcgatatgaggcagagaacaggctagagcgttgcaacctctgcttcacagagcttgaaaaagtcaa

SEQ ID NO: 111216 - DNA, 271 bp, Glycine max
gaagcaatcactggataaaagcacctcattcaaagaacaaagtgctcatgttacctctgttaagaatattttagaaaaccatgctagttacctgatgtctgggaaagagctctccaagcttgttgcatttgtaaaaggaactcagtttgatttagtggagtatctacaacgtgaaagatatggaagtgctcggttggagaattttgcttctggcttgaactaataagccaaaagcttcaaatgggaacattacagagccgtttggatgctg

SEQ ID NO: 111217 - DNA, 266 bp, Glycine max
acttgtcacacacaatctcatcgtcatcatccttgccttttgtaaggccccatttagaggtcaaatatgacttaaattgcctccatcactgatatgaaccctcatgtggtgtcatttagtcctcctccatttgggccatgatacaactcacaaccttggacttttctccttgaaacttgggcttgtattcaaacagtatggacagccttgttgaagagcttccttggctttccttgatctagcccttgtcataggtcctccaagtc

SEQ ID NO: 111218 - DNA, 249 bp, Glycine max
gtgtggaatagcctagaatagcaaaagagcgagtcagtgcagtgtgttgtagcatatataaggtgttgttgctatttctattatttcagtgacccctaattatgatggaggaattgaacaaaccaatggacggatcagcaaccagctggttatccgatttggaaatggatgattacaatttatttccagatgaatgtcccttgaacttgaacatgtttgatgaccgagagtttctctcacaagacattg

SEQ ID NO: 111219 - DNA, 251 bp, Glycine max
aacctaccgaaatggctctttaaagaagggctttattcacaggaaaatttggagagggtcgaccagtccatttatcatcccaccactcacccaagcaagctcaggagttcaggtgctttagctgcttgaagcccgatcgtcagtaacttccacctaagagatcttgtttttgtccttctcgggttccagtccaatcttctgctgcaacctttgcctctatctctacttctgggtctcgatctcgaactcaa

SEQ ID NO: 111220 - DNA, 247 bp, Glycine max
gtgtgaattatgcattgtttatggtgctatgcctattttggaggaagtcctttcaactagaatgtcatcaactcaatcccaggatgcagtaaatcagtatacagtgacagcccttgctcgtatttgcctctattgtgaaactcacaagcatttcaattatttatacaggtttcaggtattaaaatatgaccatgttgctgctggactctgctgcattcagttgttggggaattcttcttcacaagag

SEQ ID NO: 111221 - DNA, 241 bp, Glycine max
atgtggctaggtgtgcgtatggatcttcaggcactcctactatcttcaccgtaaaatagattcccttgaatcagctggatcaaggaatatggatatgagaagttggccgtctgcacctctggtctagctatgctggtgaagtactgaggtataatagggctagagtaatcctctagcgtcattctctgtggatgattttctgccataatgcgttcttcgaagaaggagtgtgcattgttaa

SEQ ID NO: 111222 - DNA, 251 bp, Glycine max
gtggaaaattaaggttgatgtgccagcaattgccaaattgcgattgtgatgcagttattgagaccttgaaatatatctgtgtagttgccaagctactttcttgtcatttcctttctcaacaaggagttaggatcacaacaacagaatccaattcatgacgtcaaatatttctgtatcccaagctcatggctaatttcaaacaattccccactgttgaaagaatcaactttacattcatggaatctgagata

SEQ ID NO: 111223 - DNA, 251 bp, Glycine max
attgaatttacgacttagggtttattggtctctgaaaaaccttcgtttcgcgctagaaatctaggttttttggagctggggtgacagggctatcccactttgtcgttcccgcccacaaaaaggctgtaacgtaagctgctagattgttataaactggagttgctatcatcacgatgttggatgtgaattgtagtagcgggctttatatctctagttgtcttctccacttggctgaatggcacccattggaa

SEQ ID NO: 111224 - DNA, 267 bp, Glycine max
aaccctacttctacttcccccctttgctctcaaaccttatcacctaatccttatcctcccaaaccagaaaaccatgtctacctccgcagcttccctcgcactcccaaccctcactctccgaacccgacaacctctatttctccccaatgcttctcctcgtccctctccctcacacccaacaacaaacccatttccatttctgctgtttttctcaaaccaacaactctgtcgtcgtctcgcttcgttccccacgtcgtggtgtcgtcg

SEQ ID NO: 111225 - DNA, 250 bp, Glycine max
actactttaaaagtgatattgaaggtgatttctaattagttgatatggtagtgcaagtctttacattgataatatacatgaaaattcaactctcccttgattttaatgtgtagaaactggagttttttcacaaagaaagtgtttctaccaaggacgatgcaacagaagaatcatctggtcgtactctcaaactttttgggaccactctactgataacagatacatgcaaaccttcttcaccaacaatgga

SEQ ID NO: 111226 - DNA, 135 bp, Glycine max
aaaaagttttcagtttctacaatatctttctccgaacagaaattccttattaaatacttagttagggtttaacacttctgatacttaatctacgtcaagttgtgcttcaacctattaccgcattcaatttaccag

SEQ ID NO: 111227 - DNA, 249 bp, Glycine max
ggttgtctaattttgtttgatttctcttactaattatttatttttcttattttgaaaaatattacactgtttagtcttataagaagggtttgttctgttgtaatgaaaaaagaaaaacaagggggttatgtgtaaaattttaggtgttaatttattctaaaaagatgttttattggatgctttatataaattaatttgatctcattgtgagtgttttctggagccacaacgtaaaatggtactgcggca

SEQ ID NO: 111228 - DNA, 252 bp, Glycine max
gagaagttgaagtgaaagaatagcaaaagatgaagcacaggcagaagaaaatgcactggatgggcttttgctctcacaagaaaaatgggtaactacctaagcaattgctcttctctcttttttttttaagcagtttgtatggcacgcttagcgcaaggctacgcttagcgtgtccatatgatgtttgggttttaaagcccatgcgcttagcgccagttctcgcgcttagcatttcctgcagctcaaattggt

SEQ ID NO: 111229 - DNA, 254 bp, Glycine max
gatgattctggtctccgtgcgaccatggttggtgacgttgttgcatatctccgtgagccacttctgctcctttctctgttcaaaaggttttttcagcgcaaacaagtgaagcccaattgccaacgttgaacgttctggtattttttgttgttttcgtgtcactacggtaacgatgttaaaccaaggatcttttcatagatgtgttgaattcaatcaaaatagggtgctaagttatgaagacataagcattatat

SEQ ID NO: 111230 - DNA, 159 bp, Glycine max
caactctaatctagattcttcttgatcttgaatttcaatggcttcgctcgtgcttctacttttcagaactcgatcacaatcacgagtgggatgctgaagctctcttagcagcatacccttcttctaattttaccaaacctcatcatcttgtgctgttgc

SEQ ID NO: 111231 - DNA, 244 bp, Glycine max
ctcggcgagaccgcgaacagatccccttttgtcggtatgaattgcccacagatgatcctgattacgagcagagggctcgtcgtggtggcggtggcggtagtggtggtgatggtgccggaagtggggcagcccacaagtgaattggaacatggcattggggcccgctggtggttctgcggattcatccggtggcggtggcagtggcggtgatagttcgcagaggagaagatttagggtgtctttg

SEQ ID NO: 111232 - DNA, 246 bp, Glycine max
ctgatggagtgcagagaggcctggtaaagtgaaaacttcatttcttgcacttctttatcatttgtttgtgaaacaacgggaacatgctagtgcaaattgtctgcacattttgcaatatggtccccactatataaattattacatagggtccttatattttcaagtctcaactaatctccacatgatgatacctaatgatttgttattaattcttttttaaattaaaaaactcaactatgtgtaaca

SEQ ID NO: 111233 - DNA, 246 bp, Glycine max
gatcttaagaatttgtgcacagctgctgcttatagacctgttagagaggtacttcaacaggacaggttgaaggaaaaggaaaagaagaaagcggaggtagaagttcaaagatcagaagatgcttctgagctaaaggagataaagatgaagtgactactttaaggtgtttaaacgtagaagacattagacactgtagtcaggaaaagaagaaaacggaggcagaagttcaaagctcacaaaatgctt

SEQ ID NO: 111234 - DNA, 268 bp, Glycine max
aggggaatgaccgggttaatcatagtggtccagctcctcatcagggtggtggttactttaaacctgatcacgggcggcagcagcagcaaggatatggttctggttttcagagtggtggtggcggtggctggaatggtagaggggtggggagggaccgtgggaggcgtgagcgaacccttttgagaattgttgaatctgaggatcaatcttttagtgagcaagagaatacggggattaactttgaggcatatgatgatatccctgtgga

SEQ ID NO: 111235 - DNA, 206 bp, Glycine max
aggaagatctggtttccattatctcctccatcttcacgttcgcgaaattgtagatagaagatcacacttgctcaattcccttctcaagttattgttggttggcaatgcaagatccaaggattcctttgtcagaggagatcttgaataatccaggaggggggaaaatcaactccacgaaggggagctttaatatccttttgcaagcg

SEQ ID NO: 111236 - DNA, 209 bp, Glycine max
atggtttcaactcattataaacagaaactgtcacaaaatctagatttgttggatactgaaatttcagatcattcttgtaaaggagttcaacaagatgttctagatgaacatatggaaacaattgttaatgtgatggatgagtgcagtcgtgtggatttcaaactaaagccaacgtgtttgcaatctaattcatttgctgagacagaaaa

SEQ ID NO: 111237 - DNA, 274 bp, Glycine max
atttggatctcatgatgtgaatctgggagatgtgcatttagaaccatttggagtaataaagcatagttctagagagtttttgatggccccctccaacttgacacagaatgaaagtgggtatgaggaatactcagacgagtttcatgatggttgggctgcatcacatcttggaacttccacttcagctcccatcttcaggaaaagcgtgatccacaatcaaagttataatgaactgtcccatactaccagcagtcattggtgggctagaagtgat

SEQ ID NO: 111238 - DNA, 253 bp, Glycine max
agcaaaagctgaaggaaacaaggcatctggaactctggcttcagtaaatgtaaaaccagctaaagctgcaaagcccccacagaaagttgataatgcttcggttgcagcctctgagaagaaaggggtgaatccaccaccagaaaaatttagaaagaaagatgttcctcaaccacgtctgcaatacgatgataagagcagagtggagaaagccaaacggcgtgctgtggtaaaacaaactgaagctaagaacaga

SEQ ID NO: 111239 - DNA, 192 bp, Glycine max
cgcgaaattatatcaacgtagagactatactgatgaattttctatactttagggactacttgtgtattttcattactttaaagactctataggagagagggtaatactttggggactaaattgatggtttactctttttatgcgttatataatttgcaaacaaactaggtcatggaggaacaagtgatgaac

SEQ ID NO: 111240 - DNA, 264 bp, Glycine max
cttgcaggtagttgtcttttatcactattttaatcgttagtaggatttttattatactgtaatttatggaagaccataatacttctacctgcttattctgtttttgttggtgaatgatgggaactgtgtgatacatgagaagccactgtgtttatattgatggccctacctgatgaacaaatgtttctcatttgagtctttcaaactggggttaataattaataagataacaactttgtgtggggagaaatgagaggtttaaat

SEQ ID NO: 111241 - DNA, 267 bp, Glycine max
ggacaatgggtaggtggttgaaagatcaagaggagaggaaaaagcaggaaattagaacccacaatgctcatttacacgctgcagtatctgtggctggtgttgctgctgctattgctgcagttgcagcttcaacagcatcacctgaaatgccttatgcaaacccaaagaaccctccccccgcttcttctgcaattgcatctgcagcagctttagtagcctcacactgcattgagattgcagaagatatgggagctgagcatgaccaaa

SEQ ID NO: 111242 - DNA, 182 bp, Glycine max
agtgctatgcactgttcattcatcatgtcatttggaactttagtttttcttacaatgatacgatttgtgttttgataattattagcgttcgtgtgaacttttaacacttacttttctcttgtaccatcattgcatgcctagcgagtcttttgttgtcacaatttttttgaaatgaatacaaa

SEQ ID NO: 111243 - DNA, 234 bp, Glycine max
attcaagtgcaagtaatagaagcaagtcaaatcatagtaacgctactgatgagactcgatttagatcaaaatttcccaaaactcaatctgacacatctcatgatgaggcagcaaatttgggtagccatgaacgcagaagaaaagctgcaatagttgaaaaattagcaaaagatacttctaaatgcagaactgtgccttacttgagtggttcaagtaagtatgttgtaattgatg

SEQ ID NO: 111244 - DNA, 234 bp, Glycine max
ctaaccttaaaactgggtatatattaagcttcactttccgtagctagcttaacttggctaatgttcaaaattatcacgtgaggagaaaagatttttggttgctctctactgtcacaaagcttttaagcgaattcataccaaaactctcacatgatgcagatggtctcatatttcaagtgggtttaatttctttcattgtattaaacatgaagacaaggtttgattttctgatat

SEQ ID NO: 111245 - DNA, 236 bp, Glycine max
ggaagttgtgagtgatgttgatgggttgaccaggtcaagggtgatgtaatgcatgcaagtacttgtgtactctgatactcacatgtgtgcatttggaaaagagagtgctccctacctacagcttttaagtgagtccaagcttgaactacttatactacattcttatttaggattccttacccaggtgttaaagctttgatggagtaccctaacttaaaaagcataccaacccactg

SEQ ID NO: 111246 - DNA, 239 bp, Glycine max
agttcccattcaaaggcaccatctactaatggacaagctacgacgactagctcaacagagggtagtagtgtttggggtggagatgaggactcaagaagcatgtttagtgttcagtcggagcgctaccgccgacacagcattgcaggatcctcagtgagagatgatgatagccttgcaagcacacctgccattccaagttacatggcagccacaagctcagcaaaggccaggtccaaaat

SEQ ID NO: 111247 - DNA, 241 bp, Glycine max
aaattttcttgttaaccaaattttcttacacctccatatgttgaactatttcccaggaatcaaaggatgacccagttgactctgatgtaagtaaaactactgattcctgaaatcttttgtccatcatcagttacactgattctgacgaagttaatgttttctataggctgatgaggaagaggaagatgctgatgaagctggcaatgactccgatgctgaatcaaagacggaagctggggaa

SEQ ID NO: 111248 - DNA, 231 bp, Glycine max
caaagtatcaacccaaagtcgctatcattttgatgctcccgacaaagcattgaagttggtttcagagctctcactgcgactctggcgcatggagagctctgaaaccaagttcaatgctctccatgcgcaagagtcgcagtgagggaaattttggagttctgtaagaggatgttccataccaaattgatttgttcaccgcctttctttcagtatgtgcatctatttactttg

SEQ ID NO: 111249 - DNA, 135 bp, Glycine max
aaaaatcttttaacttgaaatacgatgaaattcatactggttctcatttaagtggttcccagaaatccaaggctactgacgaggtgaagaaatccattgttaaaggtaagcggtcatctgtttctacagcacatt

SEQ ID NO: 111250 - DNA, 218 bp, Glycine max
gcagtcgatggtgattggaaatgttgcgggaaaaagataaaggatcatcgaaaaactgatgcaggtcatcggaataagtgcgatgactagaagggagacggttttcgggattccctcaacctagctctcatacaatgtaaaatgagagatgatatagagggatatttgagtgtaaactgtgtgttagagtacacaacggatgcttgtttatataggat

SEQ ID NO: 111251 - DNA, 265 bp, Glycine max
  unsure (1)..(265): unsure at all n locations
aacacgcttatctcttgcatattagaacatactcatcttatatattaacaaattcaaagtgcaaacaccctttcattttatttcatagaaatctccaattttttttgataaagcatagtcctcattctatactatagctacacaatcttccgaatcttcgattaaaccgtgttttttttaacggttgagaaaaatagcaagacatggctgaaaatacccaagtttatgaacgaactctggagganacaccaacctgggctgttgc

SEQ ID NO: 111252 - DNA, 262 bp, Glycine max
ataaaaaaaaaaaaaaaaacatattttgaggcgtgactcggatacccaattggcgttttcactaaatccgcaaagggggtttaagcaatttggcttgagaatacggggacgaaaaacctctacatcatatcaattaaagggatcaaacggcgtttgaaacttcggggctcaggttacggttacggcatggtcacgtgacaccgtgaagaaccccgaaacccgatgctggcaatgacggttttgacaactatcattcttctcc

SEQ ID NO: 111253 - DNA, 261 bp, Glycine max
atttgaatttgaaccctccatttgaagactctctcactcaccctttatagactatgatcaaattaacatatcaaccacctagcttgttcaaaaaaatatcaaccacctagtgtatgctagtttagatgatctgtgattcctttcaatattaaaaaagaaattgcagaattttgaaaataggagaaaaggagaaaaaaaatatgtacaaaacttgaatgcatttataggtgattttggtattattatttttttatcagaatc

SEQ ID NO: 111254 - DNA, 257 bp, Glycine max
cttctgaagaagaggagttcatgtgggatgagattgacaatggtatgattgatcatggacccaatgtatcaaaaactttgagcacggacacatggatggcagatgttgaaaatttggaaggtgaagatcacctccaaattacacgcccttttggggcaaaggtcaatagagaaatatccactgttaagaatcaattacctggtttggggggccatccaccatcatcgtggcaattgcagaatctaaagccaggctac

SEQ ID NO: 111255 - DNA, 136 bp, Glycine max
aggactgagaattttatgcacggtgctgacattgtatgtaattttagttggtcagtgtgcagttatccaagttgttatcttaaaaatttctattttgggaatgaaaaactgaatgcttgttggcagtatttgctct

SEQ ID NO: 111256 - DNA, 251 bp, Glycine max
agaatgtaacgcaagaaaggcgaacattttccatcgagaaattctcaacagaggacaaaattgaatttctgccggaattcaacaatcaagcaattaattagcttgcaaattttactacatgcagggaattcagcaatcaagcaattaatggcttttggtcaagatgtcagctgtttgctgattggaaggcacaaatggcaagcaaataattccagcatccaatttctcaaataattgctaggctctcggta

SEQ ID NO: 111257 - DNA, 211 bp, Glycine max
attcgaaggtcactttaaaaataggaactaacttgaaaccttgcctcctctctgcttggacatcaaaaaccatgtaattggtttcactaattttaagattggattttcacttttccttttactatttcagtgaatataggcttacccaatctatatagtcacagagatttttataaccgagtgaatctactaatactgcttctggctgggt

SEQ ID NO: 111258 - DNA, 275 bp, Glycine max
gcagaaggaagtgatgctgtgactgagaaaaatcgttcatgtccttaacaaccaaattgaacgactgcgagccacgaacccaatctccgacgacgacgacctcggtccagggacgacttatctccggagacccacaacttttccggcgaccaaccgtgcgcaggtgcaaggataagtgtgtgatctatctataaacgcaagatgtcagctgggcctggacttgaatctcttgtagatcagacaatttcagtcattacaaatgatggacgaaatat

SEQ ID NO: 111259 - DNA, 272 bp, Glycine max
ctcaaagacccacttcaagtggcatgagtagcaccgttgagtccttcagtgggccccgccctcccaccaccaccactaccaccacaaccacaactgcgacgccgtttttgactgctacgcggagatacccgcgcactccccctcttgtccctgaagactgccacagtgactgcgactcttcctcctccgtcgttgacgacggcgacgacaacatccgttccgtcgtcgtttcgacctcccttgccgtttgatctcaacgcgctgccgtttga

SEQ ID NO: 111260 - DNA, 203 bp, Glycine max
ctatcggttatatgaaggagctcttggaaaagattaataatttgaagcaagaaatagaagtggattcaaacatggctggcattttcaaggatgtgaagccaaacgaaatcatagtgagaaattctccaaaggtatgtgtactttttaagtttgtggaatttgaatttttgtcttaactttaaaactagtttatgagatgagag

SEQ ID NO: 111261 - DNA, 279 bp, Glycine max
aaacaagtcatcacaaggccgattggaatcattttttaagccaacagtaaatccatctgtacctatcaaacgcaaggaaacaccagtgaataatgctaaagaaactaacaaaaagaccaaggctggtggtggtaagaagaagaaatagttggctttgtgtcttgacaaggttagagttcttgatgtctttcatcccgtttatgtgactgtcacttttgcatgctgacatctgtgactgtgcctctattttcccctgatttgttgccattggcatgaagg

SEQ ID NO: 111262 - DNA, 197 bp, Glycine max
aatacactctgcccccagccccgccccgcacccccccccttctctaattttttgggcaatgaaaattttggtctgcctttttggatttattgctgtaatttatttacaaaactttagtttctctacaatttctatatttcctacccgaagagaagtaacaaaacctcaaaatatgtattgaggtttcgattttccgg

SEQ ID NO: 111263 - DNA, 145 bp, Glycine max
ccttcgtaggcgaggcgtacgaaggtgttcatgtcgaggacacagtggaaggtgtcgatttgaactacttcgtaggcgaggcgtacgaccaggtccgctagctctccatctgccacacaagctaataccctgcgaagggcagtag

SEQ ID NO: 111264 - DNA, 263 bp, Glycine max
cagcgatcggattcggattcggactccgtctcgggaaaattcgagaagatttttcgaatttttcaccactgctttgtgcgcacgatcggtttcggattcgggctccgattttcgcctctcgcgaagagcttgggttcatttgcactaatgtaggggaaggaggtttgcgcgtcggagtcggcggttgatggaagccgcgacgtttggagttcggagccctcgctcgcttcctccgcggatcacctcgttgtaatggtgaacgg

SEQ ID NO: 111265 - DNA, 266 bp, Glycine max
caagcatatctcatttgaatacattccttgtagtttatactgaaagatgggtttgaagatggcgttactgatcctaggcctttccctcatgctccttttggtctcctctgaggtggcatccacgaatacaaaagagggtaagctatacgtcattttataatgtctctagttaattatattcttatgattcttttacaataaaacatactaattaacaattctctttaaagttgttaaagaattagaaaaataaaataaaatgtaaa

SEQ ID NO: 111266 - DNA, 248 bp, Glycine max
agagaacatcttattgatgttactgaagtgtttagggtacttaatgctgagaagaaatatcggatagcaaaacttgctttatacttaacggttctcattgttactatcttcaggcttacattaaccgccgtctactatttaggcatcgaagacgatgaagacataggaaacctttggtaacccacaacatttgcagtatgagtgtatgacactccgggtaagttgcttggaaggtccctttttggtgg

SEQ ID NO: 111267 - DNA, 270 bp, Glycine max
gacagatttgcaccagcaagagcacaagaatcatataattcacttttaggggacggaacatccttcctccaggagtatatgattccaagatattcaaattctatctgtctgtatgatacacgtagtttgtcggataactcagaaaaagatgagaatattagaatgctgaagagttggatgacaaaaggtgttcaccatggagagcttgttgtcaggaaaacagataatcagagattgaggaaaagtttgaaggggaaagctcacaagaaa

SEQ ID NO: 111268 - DNA, 262 bp, Glycine max
gagacacggtagagaaggaggaaacaacggcgcgagcggcttgacaagcaaactaacaaacagaaggtcccgtcaattgaatagtctccactctccaccgtcgctcaggtttcggattttggacttttatgttttctgcagctttaatcacgggaacaaggcgtgggttttcctgcacatttaataggccaagcgaaaggaaacttggttggttgagaagctaagaaaatttgatgtaccaaaatctcctccagaaacattt

SEQ ID NO: 111269 - DNA, 166 bp, Glycine max
ctcgagccgattttaaagacaatgacacataactagttactttttaaaacaggaaatatatatatatatatatctgcgcgtgtgtaaatatatgggtacttttgtgtctctgtgccatatagagctacacacatacatatttttctagccttttccatatctagag

SEQ ID NO: 111270 - DNA, 174 bp, Glycine max
caaatgttacacaatgtctaatataaacaggatttgttctttaggttggtaatttggttttacgtgtcttatatttatcattgtttgtggaactagtggcaagaatgacaatctccagaattagattgtagcctctaccaacgctgtataataaaattttagttgtccctcttt

SEQ ID NO: 111271 - DNA, 266 bp, Glycine max
ccatggtgtgcaggggtggaggatttatttcattagagaatctcatcttctttgcgatgaagtatcctgtaagtttcttccattgcatttgcattcatgcacacattaatgagcatgtttaatatttcttatcaatacattattattgattatccttttcattatatttaaagttataatttgcttaccgatttctctctcaaggccaaattctacccccatccttgtaaaaagagagtgatttactttattacctttgtggtaaa

SEQ ID NO: 111272 - DNA, 263 bp, Glycine max
gtaacccagaaattcacaacacctccatgaccaaaccagaagactcccactacacattgacaagtttcttcttcacttcagttgtcgttgttgttgttgccatgacaacaatcacaaagcacagttacaaactctccctcaagagagccacaaagagaataacaagaaggagaagaagacacccacagcacaaccacccaaagagcaccaccacaattgtgcacagacagtgcagcaacaacaacaataataattagctttgt

SEQ ID NO: 111273 - DNA, 214 bp, Glycine max
attacaaggtatcaccggctccatcagcattgacagagttgagtccaagaacctgcagtggccattttgaggactctttcagcacagcacaaagcagtcctcaccctcagttctactctgcagtgtcaagaacagaagattcaaagcaccattttgctttccctaggccagcttatgcagaatctatgtcctaagactaccctttggttcccaa

SEQ ID NO: 111274 - DNA, 260 bp, Glycine max
cctaattgcaaaaggcgatatgctccttgctgtcatcttcaatccattgctatatgcacttcggggagtgagaaatggatttggtttcatttcatcaaaagtcttgaaaaatacttctaccagcaatcagcctgattttgatggactttcaaagaagaaagcttatcagcatacttctgccaaggagaatgttgtaagaaaatggggtagtgactagtgagtaaatcgtcatgtaaaggtttggcattacccctttgatg

SEQ ID NO: 111275 - DNA, 262 bp, Glycine max
gttcatattggtggctaaacataagtttaatatcgtagagtggcaagtctgcagcagtctatgcttgtgctgaagagcaaaggtttgagattttagagcttaatgcatcagattgtagaaatggaactgctgtcaggaattattttggagatactcttggttcacttgggtttaaaagggcatcagaaatcacttcaagttcacagaagaaaactacaaagttgtccccggcttcggctttgcaaagtggtaaagctgctga

SEQ ID NO: 111276 - DNA, 242 bp, Glycine max
aaaagatgctgagggcaagatctctcataaattccatattcttcggaacccaagttttttttgtggttctggaaggtacatatgtggcaaacatgttgatcagaagcaaacagatggtgaatccagcaatcacacaattatggttcccaaagcttcaacaaactactaaaaatattgagtggcccaaccggtttaaagatccctcttcagatttgattaagggaggaataggggaaagggtt

SEQ ID NO: 111277 - DNA, 136 bp, Glycine max
ggggtgcagttgatatgaccactgaggcaaatataaccaagtcaaatggaaccacatggtgcattgcttcgagtaaggcctcacaaattgacttgcagaatgccatagattgggcctgtggtcctggcaacgtgga

SEQ ID NO: 111278 - DNA, 274 bp, Glycine max
aaaaaaattatgagttaatcataacatggaaaccaagggagactttttccttcagttaatttcatggttagacttttccattcaacatctacagtccatgaagttccgtgattattgcctccaagtattccaccagatgagtcaaggtttatactttgaattagtctcatcaattatggctaaattgttgtctttctgattcttctcatatcgatgtgtaggagatgcatgtttcttatactatactttgaattagtctcgtcaaggtttatta

SEQ ID NO: 111279 - DNA, 267 bp, Glycine max
ctgcaaagtagtggagcagcttcatcaaaaggtagcagacagagaagctctctaactgaagctagtgagccatctagtatttcaaaacgaagacatgcgtctaaatctaaatccaacttgtccgaggcctcacatggtcacagcactggcatttcctccatgtccccggatcattctcatgaaggaaaagcaaagagaagaaaacataaggaataataatgtttcctatacttgccgttggcctatttatggtgcaatatttagagg

SEQ ID NO: 111280 - DNA, 121 bp, Glycine max
gtggatgctcctttgatgtggaaatgcttcggatttggtaggagtccgttagagtttcggtcatagctaggcgtcatggatgggaactcccctttcacacttttcaggtcttggctataac

SEQ ID NO: 111281 - DNA, 243 bp, Glycine max
tggctatgagacgatctcctactcgtctgacatctacgacatccgtcttccactccttgtccacaataatccctacgccatttctggatctgagttttcccgtataccagagcttaaatcccaatttgtctaattctgtcgcgttttcacctgtccactgagtgtcttgtaggcacataaaatagatcttccgccgcaccataagatccacaagtgccagagatttgccaataagtgtgctga

SEQ ID NO: 111282 - DNA, 192 bp, Glycine max
ctagaaccatgcaaaaaatggaactacttggatgaagcacattgggcttgaaaatgtgcgcgataactccttgttccgtcatagactactgccgtggcaagatcacttgcgagcagcatccagcaaaatcatccgtgtcaatatcagtgcagctcatccttggcataatcatgggtattgactacgtggaat

SEQ ID NO: 111283 - DNA, 226 bp, Glycine max
agaagacagcagaaggataaaggtcatgcatgtgcagcggttgtgaagtctactatctctactgccaaggaacaggagaaacttgtgttccaggtatggaccaaagcactcaacgtaccagcaagctcaatgtggtgcttaataaatcctccggccaaagcgacagtccacatactgagcataggcaactttgaatggtcggccaagtacaataccgagcaggaga

SEQ ID NO: 111284 - DNA, 252 bp, Glycine max
cagttatggtctttgggaggactgaggaagtgaattataactattagcagtgacaagaagagaactggccaatcacatattgaatacgttaaataggtataattaacttcgtcagtcatcagtgattgtctttgtgatgttctgaattctctctctttaggctgcaatctttatcatgtagacatgcttctacgtctatgtgggaaaaaattgtaaagttgacactgaaatatgtgctattataatctcgtg

SEQ ID NO: 111285 - DNA, 263 bp, Glycine max
caatagcattgaagcaacggcggcggcaaccaccgttcaacgccggagataccatctatttctactgtattcttctcactctgatttattctcttcagtatgttgcgtgaacaattggaacaattggctgaagaaaggacactggaaggcttaccaaggatttcaaaggctatgttgaatgattattcagagaagattgaagccattgcttccaaattggttaatcatgtgattgacgcacgagtacctgagaaggacttcta

SEQ ID NO: 111286 - DNA, 260 bp, Glycine max
aagtcaatctgatcaactgcctgcaaacagtgcttcgcaggttagtgcaatgacagagggttgtatggattctgctagtgtggtaccaggtgttactactgctgtatcttctcagtggaaagcatcagaaccaccatttgattccgctatgaacaatcaaactcaagagagctccttggggagtgcacctgttgaaaattccacgggaaatgagcaaccaacaattagtcaagggttggggccaaggtcagttagcttga

SEQ ID NO: 111287 - DNA, 260 bp, Glycine max
actttgggactaagcattaatagtgtggctgccatagaacctgaacatgtacccaaaaatttggtgcctctgcattttggactgtgtatcaaaattcatccaagagtcagccaacagccaataaggatgctttcaacttagcagggatatcaaacctttgaggtgctatagaatagcccttaatttttatattcccatttctttgccggttatttttgtatgaataatctgattttcctttttattaattataatgtggc

SEQ ID NO: 111288 - DNA, 259 bp, Glycine max
agaggaggaaggagatccactgtgtgttccaaatcctcctgtaaatgatatagaagagggagaaattgattaagtaataatggtcattctttatatgatgaatcaaggatcaaactaaaattatcttgatctccagaaattccccaagtattctagttctcctaatgcatgaatttgtcacaaatgggacggaacgtattttcttgcagcagccttcggttcggactcaagaatgacaatattgagttacttttgcaac

SEQ ID NO: 111289 - DNA, 249 bp, Glycine max
gaggaaataggtaaaatgccaactgttggaagagttgaagaaagcgaagtgccaactgaccatgtagatggacatgttggtgataaatttgctagtgaaaaaacaaatattgctcctgaaagcaatgctgaagaagttccacaagaaatgacaaaacagcacaatattgatggaacaatagagccagtttgtgcacaagatactgggaaagagaaaatttctgaagatgaaagtgaaaagcatagtaat

SEQ ID NO: 111290 - DNA, 253 bp, Glycine max
ataggccaccatatggtcctccacctggtcctcctccaatgatgagacctccacttccgcctggtcctcctccaaacttccaggaagaggatcatatggcaactaggccacctcctcctcctccgaaaccatcatatgttaaatctgctgcttctactgttgttaaaaggccattagctcaacacactccagaactcacagctatggttcctgcatctgtgcgagtgagaagagaagcggcggtgtctaaaac

SEQ ID NO: 111291 - DNA, 157 bp, Glycine max
aaacacttcacaaaacaatggctttgaatttgactcatcaaccagccattaaagcaccgtcttcctcctctttcgccgcctctcgccctttgcgggccccgcaaagcgtccccttgaggagcccgcagcgctcacttgccgtgcgcgccgcggccac

SEQ ID NO: 111292 - DNA, 266 bp, Glycine max
atcatttctctttttgtcttggacttaatttatatgtgtatacaatatgcaatgattgacttttacccccatctctgttgctgcttggtgaattgatttagttgaaggaagagttggcaaatggtgttgagcagaacggaggattatcaagactgactgagagactgaagtgtcttaggtggtttcagaatgcgttgcctgttgactctttggaaccaccaaaattcttgtagacatatatatatatatatatatctgctgtggca

SEQ ID NO: 111293 - DNA, 271 bp, Glycine max
aaatgatccaattgttgaaactacttttaaagctaagggagttgaaatagccactgttagtcatcaggaagctcaaggtgctctacctctacatgatgatctgtctgcttatcttgatctctcacagaagttgctggcaatatggggtctccaactgacaacaagatgggaactaatgtgatatcaaagttgcttgtgggttgtcaaagagattttcataatctctttggctgcatgaatatgtgcctgccctctgaaataacaagagatt

SEQ ID NO: 111294 - DNA, 269 bp, Glycine max
ctgtaggtgaaatattgcattggactttatccatttttgacgttaaacccacactcaacaacacagttagttattggaaaaattgccaaatcccaagttctagctgctgctcttagttacctgacagcatcattaggattgttactgtccaggctttgaggtttcttgtcagaaaatcccttgggaagtcatggtcagccaatgcagttgaggcagcatgctctcacttgtcacagtatcataccatgcggaatgtcctctatatggcc

SEQ ID NO: 111295 - DNA, 260 bp, Glycine max
ccaaagcaccgattctgatttcaagaattacatcatcatatcaagaaaaccttggaactacacaaaaatggtgtcggcgaacaaggagatggtcgtgcactgctttgacaccctcctcgctcactacaacagcacggagcacctcctcctgccttcgatcaggctcaacagtaatccctctcatcttttatttctttaataaatattttttattaatactatatacgcttttctgtaaatggtaagacatatttctttga

SEQ ID NO: 111296 - DNA, 206 bp, Glycine max
gaatatcttcttaatatctcatatgtggatgatactgaggtatttaaggtctgtctggactactggaatgtcttggtttcagaactgattgagccacaacgaattttcgagaaccctgcagcagcaaatatgataggcttcaggtgcccggtatgattgatggcattggctcacagcttcttcagcgccgacagctttatgccagt

SEQ ID NO: 111297 - DNA, 241 bp, Glycine max
gaagaaattactgaaaaaagatggaagaaaatcaagaatataaaggcactggctgcagagaagaaggcaggcggccagaaaacttctgaagcccgtcaaggagatggaaaagaatccatggcccaggctccacccaggtagtgaaaccagaattgaccaggaaagtggagcgtccagccaaggcggttgaacccaccatactggtgatcaagttccccctagaaacatcactaccatctgt

SEQ ID NO: 111298 - DNA, 237 bp, Glycine max
caaccaaagacattctggttgaggcatttctgcttgggaagtgtttttctgcaattttggaattgtttcctgcacttcccatattgctctcgaaatggtcattccagaagtaatatggggagtgcgggaagcattgccttctgcttaagtctgatgagggctgtccattggggatcatttgggctaccatgtgtatcatgttaaggtggtgccactaaggagataaatgtgaactag

SEQ ID NO: 111299 - DNA, 246 bp, Glycine max
gttctcaggagtcgcttagttttattgaaacgctgagggaggagattgaagcggtgactagggacaagagtgagattcaaagccgaaacaatgccctagagaacaaaatcggttatctggaaaatgagttgaaggactcaaccagtctacgaagaaggacgaggagattactcgtacaaagattctcgaactggaaggtaaccttggccttgcgttgcagaaggaagaggatagaaagtggaaatt

SEQ ID NO: 111300 - DNA, 235 bp, Glycine max
aaaaagtaatgatcctagtaatactgagtctgctctaaatgcaagttcaactgtgtctcatgctggtgtaaaagtgacaaaagttgatataattattgttgatgtcaatcccgagcttgggtctgctagtcaacatcaacaataattatatcaacttttgtagatgttgactcttcagacccaagctcgggattgacatgccctgctccggattttttggatgagtcttttcttg

SEQ ID NO: 111301 - DNA, 227 bp, Glycine max
ggatgagagcttcggtgcggttattgacaaaggtggactggatgctttgatggagcccgaacttggccccaaattggggaaccagtacttatcagaggtgaagagagttttaaagcctggggaaagtttgtgtgccttaccttggctgaatctcacgtacttaatctacttttctcaaagttccgacttgggtggaaaatgagtgttgatgccatacctttaaagtc

SEQ ID NO: 111302 - DNA, 266 bp, Glycine max
atgaaagtgatcccgtggagaatttggcagaacagagagggtattcagacaaattatagaaaccaccgatgaatcagtgagtagaatatgcttcttccttgaagattaactatccctagtgggcaacttgttaatgatgaattgaagacccttcaaaccgtgtgtgctaccttaggtaggcgtggaatatcaattatttccacactaggaacaaaacatcattaaactaatgaacttactcagtcccttctagcgtggaattcgca

SEQ ID NO: 111303 - DNA, 266 bp, Glycine max
acggtgatggctatgttttcttctccagatgatccaagagctccttcaaggaagaaaggagcaccatttgtagcacagcaaatgcaaaggcctcctcctactacaaagtcagtcaggcctcctttgattccaaatgaagatgaatttgagaaacaagatgagggcttctttgtttcccttggaagactattcctgaactctggcacatgcatgagtgaaattctggggggcttgttctcaggatccagaagaaaatcactgcagta

SEQ ID NO: 111304 - DNA, 122 bp, Glycine max
ccgcagtttaactgatgaggacatggtcacatgatgtacagaatttttgctgtgtaggctcggttactttgtatttatgtctttagatataaatactgtgtaaccgctggtctatggggtta

SEQ ID NO: 111305 - DNA, 264 bp, Glycine max
acctagttctagatcgtgcgcgtcgtgcatgttcggagcgaagggaatcgcggcggtgctcgatcgatgcgttactttggaggatctcacgctgaagcggctccgtggggtccaccacatcaccgacgtggaggttggtgccgcggcttcgttgaaatctatatgccttaaggaactcgtcaacggtcaaagcttcgcgccgcttgtgattgattcgaagaagcttcgaacgttgaagattattgggtgcacgggggattggga

SEQ ID NO: 111306 - DNA, 257 bp, Glycine max
attggtggatgcaattagggtaatggatttgatggaggagaatggggttcagcctaatgaggttacttatggtgtgatgattgaggcttattgtacagggaggaagccgggggaggcggtgaatttgctcgaggatatggttacgaaggggtttgtgccgagttcggtgttgtgttgtaaggtggttgatttgttgtgtgaggagggagtgtggagagggcttgcgaggtgtggagggggctggtgaggaaggggtg

SEQ ID NO: 111307 - DNA, 249 bp, Glycine max
ggcttcgtcaccttccgccacgtcgacggcgcgcttctcgccctccgcgagcccagcaagcgcatcgacggccgcgtgacggtcacgcagctcgccgccgccgggaactccgcgtcgaacgtcaaccccgctgacgtagctctccgtaagatctacgtcgccaacgtgccgccggacctgcacgcggacaagcttctcgcgcactctccgtgtacggcgaaatcgaagaaggtccgtaagggtttgata

SEQ ID NO: 111308 - DNA, 256 bp, Glycine max
aagaaacatttgataatgacgttactggaaatgaagaagtcagaagaagtcaacacattagtacagatataggtcaagtgttggatttgttttctgccaaagacgatgaaaacattccaaatggagtcaagaaaggaaatgaatttgtcaaagaaaaagatgttagctcagatgattttagacctgcaattggtgtcaaggggaggaagagtatcctcattccaggttagttacttcacaacaacgaaaaggtgaa

SEQ ID NO: 111309 - DNA, 240 bp, Glycine max
tcagtgtttcttataaacaattatgatatgacaattactgttctgaaggaagcaggtcctgaaggtgggaaaattcaaatgcactttgaggaactgctgaagagcaatacaacaatctttgtgccgaggacccaacatcaaatccggataagcccataactgttgccgaagtcgagccactagtgaaggattttgcgagaagttgaaaggctgcaatagagctgatgcataaagacgtta

SEQ ID NO: 111310 - DNA, 126 bp, Glycine max
tatctttcttcgtcttccactctcacacaactctcaacttccaattcacaaaaccgtcactatttaccaacccacttcacttcccccactcaacaacagtcgattccattccacaatgcattttcc

SEQ ID NO: 111311 - DNA, 235 bp, Glycine max
agaggatccaactacaccagtcctagctgtggacacttctcctcccactactctagtgcttcagctgatagatgaggaggatggtcagacacatgaattttgattcctgatgatactttttgctttatgatttattattataattttgtgtgtcgtacagtatttcctttttgtctacgtatactgctagggttatttatgggtaattagtttgctcatcctgaagcattttgaa

SEQ ID NO: 111312 - DNA, 229 bp, Glycine max
gagaaatccaagcgcgtgaaggcattccgatgtggtgaatttgatggatgtattgaaagggcggagtccgcccagggtatgccgttaaagaaaagagagaaatatgcacgcagagaagatgccattcttcatgctcttgaactcgagaagcaaatgttaaagaagcaagaaaaaataggactggagcaacttggtgtagcacaccaagtaaagaggagcaaattggttt

SEQ ID NO: 111313 - DNA, 164 bp, Glycine max
ggttgggttcctatgaagattatactgagtattacgtgtgccttaatggtcacttgcttggggtctgcacattgttaccattgtccgattcagaagatgtgtctgaggagtaagatattaatgactcaggtattttcttgtatctgttgtaaagtcctatttag

SEQ ID NO: 111314 - DNA, 154 bp, Glycine max
catatcgcacgctgctgcacgagaaagggagagaaaaaggaggcattgacaccaaaatcgcgaatctgattcattctcctctctcgctgatctctccaccaccacgcacagactgactcaccaaatagcaatatcaatgcctgctcagaagcgt

SEQ ID NO: 111315 - DNA, 167 bp, Glycine max
atgacaagcagccactacatgtggttatggttgagccaaaagtatcaaataagtcacgttttgcacaagagcttatctcaactattttgatcactgtagctgtggggttagtctggtttatgggtgctgctgcacttcaaaatacattggaagcttgggtgggattg

SEQ ID NO: 111316 - DNA, 230 bp, Glycine max
ctggattgtggttgtggttgttgttgttgctgaactcactgtaactgctcgttcagggagcctcggtgagtgctctgatcatcacagagagcgttccctggcgtgccttggtgaccgtttggtcacgggttcaaattcggaaacaacttctttgcatattcaaggaaatcaggagttgttcaatggcaaaagattctgccgatgctgattcccatcacaggcgtcttggt

SEQ ID NO: 111317 - DNA, 263 bp, Glycine max
atccgttattcgtggacggtttttaagtagacttgtggcatggttatgaagcaaagcaaattgtttatttattactaccattactgggatgacgtttgaggaaatgagataaaacacagcgtaacgccccctggtgaatcgagaccgtggaaattaataagtagagagaaaaaaaaagttgcaaaatccacagtacccacccacccacggaccccttccattcaattgattgattccccggtagtaagaatgaagagaaggcg

SEQ ID NO: 111318 - DNA, 258 bp, Glycine max
cagctatataggaacatatggaggatgccgatgtgtcttattaattgacttaacaatgctgtctcagaatcacagcaattctaaaatgataggattatgagttgtcacagagaacaaaattgttagtgcacaagttttgtggttatctaatccttttgtttccactttccttttttatctctttccctacttattagcccacaaaatcattaactagcacttgttattaaatagtaacaattgtaagtgtaaatatga

SEQ ID NO: 111319 - DNA, 257 bp, Glycine max
atttttgtattgtctattgtgtgcgtcttctctctcactcccctaaacccttctctctctctctctctctctctctatgtgtctctttctcactctaaaaccttgaattaggaagcaatcttggaacgccatgccctttgtacttctacggaaccgaatgatccattgcgtggtggtctaggtttcgtagatttttctgcaatattgcgcacattggctttggtttgaatgtgttttgcttcgactgcactgtacct

SEQ ID NO: 111320 - DNA, 255 bp, Glycine max
accaaagacgaaacgtcgtcgttttgtcaagtcttcgccgaagaagacgcaacgaagaaacagcaagaagaggcagaaaaagaaaaacgcaacacagcgcagaagtacaaagaaggctactacctgcaactcgcgtttacgaagaggctatcttgcttggcaagtctcgggtccgaaccggttctcgctctcgacgctggcaccgaaacctgggacgctgaatccgtttcgtatcgtctatgggtgagtgggtgc

SEQ ID NO: 111321 - DNA, 257 bp, Glycine max
ctttagattaagaagaagaagaagaagaagaatggttttagttgaattgaacaattgtgcgtaaaaccctaatttactaaaaagcgaggatggaagaaagtaaagcgaaaccggtgtgtgcagaagaagccctcgctcttctcaattgcgtcactcactctccatatgaagaagacaaatgccttccccttttgcattccttgcgccactgcgtcctcgccaagaaagtgaagaacttttccctagctggacaggaa

SEQ ID NO: 111322 - DNA, 265 bp, Glycine max
gaatttttgatgggtactttgtagtatgacctttgtacttgtgtcgctgtctaattataaggggatgataatagaagaaaaaatattaaacatactgtataatgaggtcgatagtgtaaagatgcttcatacacaaacacaatattatcctaagcactagttttgtttgtgtcgatgtggatggtagtaaatagtaattatctgtgcctaactattgtgtaactacccagtttgtaattgttaaaataataacaagaaatgggta

SEQ ID NO: 111323 - DNA, 264 bp, Glycine max
gtatctgaaggcgattagcaaattgattagtggttaatagaataatgcagtggttgaaacctcaatgttcttttttctttttaatatgatgacgtcattctcagcagccatacgtcaattctttatgttattttatgaataagaatataaaaaatcagtgtcaatggaaaatgcgagaatttcctccaacgtgatgtaagacttcttattgccacctgctcagaaaatgcatgctgagatacgaaaattgggcctggaaaaatt

SEQ ID NO: 111324 - DNA, 203 bp, Glycine max
acgtaatggtctacgcaactccatctctctcaataatctttctctacgagactcgggtcttctcatgctgctgcctccgatcaaggcatatcatagacaaagcgcattatgtactgcttcgtatcgattcttagcttctggttacggcacgattccaggcttacacaggatgcggcgcagaatccgaattgatgtatccaagc

SEQ ID NO: 111325 - DNA, 254 bp, Glycine max
gcacaccgacctggtatggtagagggtcgtgattgtgcgcaaaggaggggtggcggtgcaaggattaagaagatgaatcggcttgggtagtggtggaaggatgaagaagatgaatgggttgaggcggtggggccaggggtggattgggggctggattgtgaaggaggaggaggaggggagggaggcagtggcggggatgctgttggcggtgacgaccaccgtgaagagcaacggtggcacgggagagaagaggg

SEQ ID NO: 111326 - DNA, 257 bp, Glycine max
atttgacacgtgtacaacgataattctaaatacattgatctaatgctagtatttgtcttcgtataacttcattgcaattgtgttaatcagtactttgattgtcaaaaaataccttactccccaacgctttacaatctcatgtgcctaaatgaaattatcaaaattatcaatcccaatcgaaataactcccttcaattatacaatcaactttctcaatttttttaccatattttgatcgcttttgaaaggattcttct

SEQ ID NO: 111327 - DNA, 253 bp, Glycine max
ggcaacaccctctttctgaattaccttcaaacaacacaatcgctctcttcgatttctagggttttgctattgctttgcatccgttcccccttctcacaaaaacaacgcgttttctcttccccttcgtatctattctttgcgtttgtttttggttgattgaaggcattcgcagcgtaattcgttgctgcattttaatcgatttatccaaccaatggtgaacgcgatggagtggcagaagcagcgttgttggcaa

SEQ ID NO: 111328 - DNA, 255 bp, Glycine max
attgcagagaaggcaagatgcaaatgtgtagatcactgttgcatgaaatgataggacatgggatttgtcctgacagtgtcacctgtcggcttatagttgaaggatttgctagggatggaaagctgctgtcagccttgaatacggttgtggagcttaagagatttagaattaagattcctgaagatttatatgattatcttatagttgcattgtgtattgaaggtcgaccatttgctgctagaagttttctgctta

SEQ ID NO: 111329 - DNA, 265 bp, Glycine max
aaagagagtagcgaaacaaaaattgatagcccatataagacgaacctcagacaagaccccgccagtattgcagcttgctcttctaaagttcctactccacccaaaattgaagacaacgagaaacctttgttacttgcctctaaagccactaataagctggaagcttcttattcaaaaccaaaaatggatgtgaaggaacctctctgggagaagtgcaagagggttcagatcccatggaaaacaccagcagaagtggaacttaaag

SEQ ID NO: 111330 - DNA, 272 bp, Glycine max
atcctcttctgcatgcaacgaggaacaaattggaatggaagaagaccaatggaatcaagagaagaggtcaaaactggactgccagattactactacaacaccaagcatggatgggactgtgatggggtttatgccgtaccgaagaagtggacttgagggtcttggatcagtgtcactcactttgggtcttaggcatggtgttgaaggtgtgcaacaacaacaattgcaacaagaggaggagcttaggcgtcaatttggagggcatatgatct

SEQ ID NO: 111331 - DNA, 268 bp, Glycine max
cgacgactgcttcgtaattttctaacccaccccatcttgggagttgttggtttttgggagtttttcggtgggataattgtgggtttgggtgttttgcttccttgatgagttataaggccttttcatttttgccattgaacaccccatctcgagatttttatttttgttacatttttgggtgaaagaattgtgggtttgtgttaaagttgtgagcttgcttctgggttttgtggtgggtcggggaattttgcttgtttgatgagttatg

SEQ ID NO: 111332 - DNA, 267 bp, Glycine max
gagaatttgaactcaaagtggatcgggtgcaatcacttttatacggatttacacgttaaagcatttgtgactgttggatgatgatcagagggcacagatttcaaatgtgtgttttaaggttgatttatctcaagacacgatcttaatctaaggattctgttgtgtaaatactgaagaaaaaggggggggggggggggggggccccccaacaagtttttcttttgtcggtttgggtaaaggggggggagaccccctattaattttttt

SEQ ID NO: 111333 - DNA, 268 bp, Glycine max
atcatcatctccctttctgaaacttttgtcatcatgagagtgcgagccaaaccctgttatcagccttaaagcgaaacagtgagagagatagagacaccactttgcatgagaacgatatcactatcacatctcatcatcttattctaccatggccttcctaccttctcacggtttcacgtttaacactactcatgaagaagatcactgccacttccctccaacctctctcgacgccttcccctctttgccaccccagcactttcaaggg

SEQ ID NO: 111334 - DNA, 261 bp, Glycine max
ctttgttttctcaagcttggtgcctgagctctcctcctctgtagcttctaacaccaggagaatttggaggtggaaagtttagttctaaatgtcttttttattttttccttagtagcattactctcagtactcgactgataccacagataatgtagcttaatgtgccgtactacgcacactcttagtttcattagctctctcttggactacacttttgttctttttgaataatggataatggaccagctaacctctgacttc

SEQ ID NO: 111335 - DNA, 260 bp, Glycine max
gtctagtgggagttccgggcaatctgatgttagcctggaacttgatgaaaatcatacatctactgcttttgtcagacctaagaagaggctgtgccttactgaagcagctgatgccaaagaagcagctgatctggttggccttagtacagaaaatctgaataacagcaatactggaaacaattctgggaaactggttgggcacacaaacaagacagcaaccattaaagggaaaaatgaacatgcttcacaccatttaattg

SEQ ID NO: 111336 - DNA, 260 bp, Glycine max
ctcaattttggattgcgtttcgagtttttcatgtattgtgtgatgcgcaggctatggcaggatgcggaaagtagggcatattttattgaagagcttgaaaaaagaactggtcagggtcaatctgctgtttctgttgatgatacactgaaagttacagcctgcagggaacaacagaagaagttgtctgtccttgagatggaactagctgcagctagacaggaaggttttgttccaaagcgtttgccaggacatcatgggaa

SEQ ID NO: 111337 - DNA, 257 bp, Glycine max
gtgcttggagggtttgcaagaggggatgagcatgctgttcgttctgccaccccgcacttgttcttgctgtcgtttcagatacttactgagaacatcatcggtgggttgtctatgttttccccaccggtgagggcgttggtgccgatgatctatacagtgcggaggatctttgtggatattgattggatcatgatggcctggctcaacaagactctgcctgtcaatgccacatttcaggacctggcatggtattggtt

SEQ ID NO: 111338 - DNA, 177 bp, Glycine max
gatgttttatggtattttctcgacgggaacattgatctcaataataacctcattgtacaagttaacttattttacttgttatttaaattttccaacattattacggattggcatttaatgtcgttgagttgattattttgcttttgtgatatacgaattgtaatatgtttattttgt

SEQ ID NO: 111339 - DNA, 101 bp, Glycine max
gcttgccaatatactcaaggaaaataatgtaaacaatgaagggatgcgttttgaccctggtgcacgaactgctttagcatttgttacattgaggagtgatg

SEQ ID NO: 111340 - DNA, 155 bp, Glycine max
attgaggtaaatacctctggttccactccaaaagatttgtttgaggatgttgctgaggatcttgaaaaacagtatcatgaagacaagacgctcataaaagatacagttaagtcaggcaagatcactgtagtgactacatcagtatttgaggagtt

SEQ ID NO: 111341 - DNA, 172 bp, Glycine max
gcgctccaacagacaaagatgaacttcctcaatctcaaagcaacaatgaatccgacgacgaacgagaaagaagaatggcattggaggaaattaagctcctccagaagcagagggaaaggaaatctggaattccagcaaaccctagtttgcaggtgcagagtggaaccggcgg

SEQ ID NO: 111342 - DNA, 99 bp, Glycine max
gcatgatgtgggagaatgaagatccaacagttgtcagaactgagcttccaagtgcagcacttctttctgccttagttcagagcatggtggatgccatct

SEQ ID NO: 111343 - DNA, 237 bp, Glycine max
gaaatattcaagtaatcaacgagaaacaagtgaagagcctgacccagtatggaaccactatggggatgaagatttgcagtcacagggcagaagttctgtacctttatccccaacacttcctattgcacaacctgaacttaaagctttcacaaaaaaggagaagaatgatccagttctgccagcctctaaatgggcttgggagggtgatgagagtgatgatgaacaaaggagaagtgg

SEQ ID NO: 111344 - DNA, 239 bp, Glycine max
atcatcttcatgaaatatcaataacactggtaccattagtattgatatttcatgaagatgctgaggcatttaaatcataataaaggtctcaagctgaatcagagattggcatttaattcaattgctggccaaaggtatagctcaatttcaagctatgggagaaggaatgtttcttttagctcacagccacggtcaattcgccttacagtttcctgtgctgctaaaccagagactgtaga

SEQ ID NO: 111345 - DNA, 244 bp, Glycine max
gcaaacttgcacttaaaagctggtttttgcctcattctcttccttctattaagtccacgcttcatgctattgcttcctgtctctttctctttctcatgaccccttcatggattcctcgcacaccaacaccactttgctcaccaacctactagtcttcaacaacaccctccaaccagagttgatgaggagcgtgcatgtgtaccgccgagggggtggagagaaaagggaagttgagagagatttt

SEQ ID NO: 111346 - DNA, 165 bp, Glycine max
aaggaaatggttatcacaaccttcaacggaaccggcgttggatttggtttcggcataggttgcggtttcggtataggatggggtttcggaggtatgccattgaacttattgggtcttggtgcaggtacagtacaatactcatgaatcttgcttccttttgtaact

SEQ ID NO: 111347 - DNA, 246 bp, Glycine max
ctcttgctctgctattattaacctggtctaccagggccaaagctgagtttctcccatcaatacaagtgcactcttggccatcaagcaagacttcatcttctcgtcacgctcatagaaagaatctttctaagcagctggattccagtttccgaaggatacctccaagcaaatcaaatccctcacaaaataagtaactcttactattagcagtttcaagcctttccatcatacgcagctaccctactg

SEQ ID NO: 111348 - DNA, 219 bp, Glycine max
gaaacttctaggaacggtcgagacctgatgaagggcgaaacagacggagtgaggaagaggatagaacgatggtagacgtctttgacctcgccattgctgtagtggtgttctgtcgccatctcgagcgccaccgcacaggtctcacgtgcccgatctcctcaatcatgagttcagctcttctttgtttacgtcaacgcacggcctcaatcgcccatacat

SEQ ID NO: 111349 - DNA, 241 bp, Glycine max
cgaacgacgcgttctgccggcggatcgcgaaggtgtgcgacgtggtggtggtggcggtggggtaccggctggcgccggagaaccggtacccggcggcgttcgaggacggcgtgaaggtgctgaattggctggcgaacaggcgaatttggcggagtgtagcaagtcgatggtgggtgggaagagtggagggcataatgttggtggggagtttaagaaatcggattcgcataagcatattgtt

SEQ ID NO: 111350 - DNA, 199 bp, Glycine max
gttagagaacataataaaaagagtaaccatggcaaacaagtttcatgttcgctcaattagttttcccaatggatctcatcctagcaccattgcagtagaggaagagctgagcaacctcaaaacttgggaagccacatctacatccacatcaaagtccattggcgttggcttatccttgcttcaagatttgcaaactggc

SEQ ID NO: 111351 - DNA, 225 bp, Glycine max
  unsure (1)..(225): unsure at all n locations
caagtgttcgggtcgtcatcatcagaagaatgtgattctgatggatacagcgagagcgagagcangtgggagcccatctcagaagtgaatggcctatggctgtgccctcacttcctctcaccacgccgccagtctcacatactctcctccatccaagccgacaattggttcccctccccttccatcaaccaggccatgcgcttcggcctacaacacctcccttct

SEQ ID NO: 111352 - DNA, 116 bp, Glycine max
ataccgacatttctcgtccattaaaattttactattttgccgtcgtaaatctttacacaaattggtatagatttacgacggcaaaatagtaaatctataccaatttgtgtaaagaa

SEQ ID NO: 111353 - DNA, 259 bp, Glycine max
atttcaaactatgtcaatttctcttgttttctgcttcacatctggttatagcaaggtaacctgttactgttgctagctaagcttttgttcctttccgtcatcatctaagatatcttctttgattggttcatagccataggctaacagcttgaaatctccaggcatgttaggaaaattcgtgatttgaattataatagaacatgaatcaatcacctcaaattttgggaagtgctcataggattgatatttttatctgtaa

SEQ ID NO: 111354 - DNA, 256 bp, Glycine max
  unsure (1)..(256): unsure at all n locations
cattagtgagctcatggattgaaccattacaagaggaggctgaacttggctatgagattgattatatttctagatatattgacgagggtggcctaactggggagcgtaaggcntgggtgcctcgaagaggtaaacacctctagatcctgatgctcatggatttatatactcaaacccaatggagacctccttcaaacaaagatgcctggaggagttgaagttgcacaataaaaagcttctgaagaccttgcagaat

SEQ ID NO: 111355 - DNA, 255 bp, Glycine max
ggagcactgagactcaaactcaagcagtgtggagcagattctggatctcctctacgcggccagctacgtcgacgtaacaaattctgacgcgccgccgtctcagaaaatcgctgccggcctctcctggtgcatcgcgccataacgcaaagacaaagacaacgcgcggagatcgaggaatcgttaggattaattggatgcccgcactctcttcgaacatctcacgttcaagatctcgatatcgaggctctgtttcct

SEQ ID NO: 111356 - DNA, 261 bp, Glycine max
gtaaaataaaaaagtgccatctatgtatgttcctttcctaacttaccattctgaatttgttttgttttctgcttgcttgtgctgttttcccgtttccctttccggcattgtacatattgaattactttttcatacatgtaattgttcatcatggtacttgtgagtgagagagattaacacggttcaagtcaggaacttctgtatcacagtgttaagatcgatgcactgagtgggtcataggaattttaatgtaacatggat

SEQ ID NO: 111357 - DNA, 255 bp, Glycine max
attttcattcatcagaggttgggaatttggggggctcaggtgttgagggtttgaggatgttgaaagtgggaaatggggaagagggtgatgatgactccgaggatgatgatgactcagaggatgattcggacgagacgaagatgattcgggagaaggtggttcaaggggtcatgtggggcatggacatgaagatattgaggatgagaatgatggaaggtcaatgagaaagagggcaaggaaagtaggaggggtttc

SEQ ID NO: 111358 - DNA, 253 bp, Glycine max
gagagagagagagagagagaagcatcgacaccaaaatcgcgaatctcgttcattgttgtgcttccgtttcgcgttggtgatcctcctctcgctgctctctccaccaccacacagagtgactcactcaccaatagcaatggctgctcagaagcgttccttccctgatgctcctaacgataacaaccgccacgccaaacatcaccacgaagaagcaaaaactgaagaagaagaagaagaagaagaagaagaagca

SEQ ID NO: 111359 - DNA, 255 bp, Glycine max
atgttgttgtacatggcaactgcagatcctgcttctatgtttactcaaccaaatgggccaataactgtgtctgttcattttgtaaatggtgttggtgctttgagcttggttatctattattcacattttgttataagaaaactactaatttgtttgtgtcaaacattgaattaagtctaaataatatttgaaatgatgtatcattgcatgtggcaaattgcgatgggggcatggtattgaggaacactgaaactg

SEQ ID NO: 111360 - DNA, 264 bp, Glycine max
cggagataagtggacatgctagacatgatatgattaagaacgaatacattagagaaaaaatggggtaacatccatgtgcacaccatctgatggcgtttgtcccaacttttcaccacctttgacaaagatggataccagcccttttcctgtatttgtacaactccaagcagctgtttgatggtctattcatggtggcttatcctctctgtggatctgctgctgtttggacttgtaaatattatgttctgtgctgtttgtattatg

SEQ ID NO: 111361 - DNA, 258 bp, Glycine max
cgaatgctttggctgctgccaaggaagctgaagcattagcagaggctcgtgcgaacaatgaagcaagaactgagctagagagtcgtctgagagaagctgaggaacgtgaatctatgctagtccaggcacttgaagaattgaggcaaacattaagtagaaaggaacaacaggcagttttcaaagaagacatgcttcgcagagacattgaggatcttcaaaaacgttaccaggcaagtgaaagacgggtgaggaactgat

SEQ ID NO: 111362 - DNA, 185 bp, Glycine max
gtttatcagtgtgaatgtaaaatctaattgatgaacttcacaactgccagatggaatttgctggtatctacatttgctgatcgagtgtaatctaccaaataccttgacaaacacaatgtagataccagcaaattccttctggcagttgtgaagtttatcagtgtgaatgtaaaatctaattgatg

SEQ ID NO: 111363 - DNA, 254 bp, Glycine max
agaagaaagagtctaggtcaggcatggagataatgaatttgcttcagaaggaagggaggcaacgtggaacatggaatgggaagaaagctgacaatgatttttataaaaagattgtggatgcttatgagtcaaagaatcaagaactgatggcagagaatgctgatttaagagcattattgagatcaatgcaggtggatatgcgtgatttcttaaatgctcctaatggactaccaaagcaactctcactggcaatg

SEQ ID NO: 111364 - DNA, 252 bp, Glycine max
ctaaaaagtaaccccctttggtttcacactttgctcattctcgttttctgatttttcccacataaataaatcccatcccttcttctcttacactcttctttgtttcagcaatcaatcaatttccccaccattagggtttttcatttgaaatgtggaagggcaacaatggagcccattgaatccgaatcagttagttcctccgccaaagaccagcaactgggtgaaccttcttccactgttaccccctcgatc

SEQ ID NO: 111365 - DNA, 251 bp, Glycine max
atttgtttcacataaccagtagaattcgggaaaccattttcccaataaggactcctccaaattttagtgcaccaccacatttgccaccgtttccagaaatgccacctcctttatttaggccaagaaatcacttgatgtcctctggccaccctcctcctcctcaagttgggcaccctcatgaccattcaactgttccccccatgcctgttgaccatcagcagcatgcatttgtacatggttgggacgtggtc

SEQ ID NO: 111366 - DNA, 261 bp, Glycine max
cctaatcctaaattggtaaaccctaatcccaaatttccttgtccttcatcgttagttcagttaatgattccaaggtatggacttacaaggtgctgttaaggacataattgcttgggatggtactctctcttcaagtgatttttccctttctgctcatacattttctgagaagtggaaaaggttcaatccttcctttcctccatggcagtggatcccatgtttaaaacatcatttggtggcttctcataaggtggaggatac

SEQ ID NO: 111367 - DNA, 247 bp, Glycine max
ctggaatcatccccaagaaatcaattaccagtaatctggatccaaggaagcgtccatctcagactggggttcagcctactcagtctggtaggcctaccacattaatttcttcagggtctgctgtggcatcaccatcttcattagatcctctgcataatgattcatctacactgccaaaaaaacctaaaggaaaggctggacaaccaccacaaaggctttctactcaaccacctgcttcctctaatgt

SEQ ID NO: 111368 - DNA, 251 bp, Glycine max
actacacgctcattaaaccataatgatagctaattaaactacgcaaaggtgggaaaagaaacaaaatcagagaaggaagaaattaccagaaaaacgaaaatttaagggtggcctaatccgactaaactcatgtacaatcgttgaaaggaagaggcagggagcaacgtttttttttttttttaaatcaagctgtcaggaaccagtgctgcaatatgcgggcctaaatgtttaggccaccgaggttttacgta

SEQ ID NO: 111369 - DNA, 158 bp, Glycine max
attttcaagacaataaaaaggatggtgcactttagctggccacttgagaggcctctccttacatagtcacaatggcagcagctctcacagtggaagctttgattttagtgattgatctcttaacttaaagaacctctttttttaacctttgaagttga

SEQ ID NO: 111370 - DNA, 258 bp, Glycine max
gaacttttcgtcaaaccctaccgacccatcatcggatcacgacgaatcttcacctggggtgtccccccaaaacgacgccgttaagggctcggtcacgcccaggaacgaattggtcgctttctgcgagaaaatggacggtgtaggattgatgaattacgtcaatgacaactttcaggatagggcaaggattcaggcggagcttcccggcgcgtttcgacacgcgccggacgccggcgcgatggttctgggagctttgga

SEQ ID NO: 111371 - DNA, 253 bp, Glycine max
ggataaatggcttcctctccacactctgctgcatgtggagaattttaccttttagattctctgttgaagcacaatgttgatatcaatgttctgaaaaatgaagattcagggccattgaaggaatccacatccttgattaagcaccgtaagtgggatggattatattgtcttccttcggagaagagtgagattgtttcagatgagtatcttcctacaaatgatccaaagtctaacaataatataaatgatgaag

SEQ ID NO: 111372 - DNA, 254 bp, Glycine max
ctcgagcggctcgagcggctcgagggtcagcagcctccacctatacgtgggcctggcatgcccatggactcaccgcaccctcgtagtgcgcgcgctgaagggcctggaagacgccgtgcccgtctcggtggcgtcgccgggcctcgacggctcctgggagttaaaacgggccggtgggcccgacacaaatacaattgctccgagtttggatagagcgaatggatgcaacacgttgaaggaagtttataggcttc

SEQ ID NO: 111373 - DNA, 251 bp, Glycine max
tgtgaagggcagctgtctgttgttgatagtatactggacttgatttctaatggatgggtagggtgtggccaggctgtttttagttgattattcacatgtgattatgtctgggctctttctgtttttagttaatggtatatcgcaggctccaattttcaaaattacaagtaggacattgtagtagtgccattttttagctgtagccccagtgtaaaagaattttttatcgttgagattttacatgtttgttt

SEQ ID NO: 111374 - DNA, 166 bp, Glycine max
attgtggatatgttctgctatgcatcttccgatctttcgagtgtgtaatctttttattgcaattgcatgaaaatgatggtattactcgttccttttcttgattgaacgaaaagtgaaataattgtgagtagtagttgatgtagttttgcataactgagtgatagtg

SEQ ID NO: 111375 - DNA, 252 bp, Glycine max
actgcttcttcacatttcttatagccgaggaggtgggattgtagaaactgctcactgtcttcgaatattacatcaagtagtttgcggccttgtgattttaagatggggaaggtcttaacttcccttcaaacgttcaagtgcatgcacaactttaacctgaggttgcccatattacgcgacagtgcctcaaagttccagacgttgagtgatgttcttcgtcatgcaatatctattcatgccaaagagcttgca

SEQ ID NO: 111376 - DNA, 250 bp, Glycine max
gatttgaatgtttttctgggagaaacagctattcatttgtatcctggctctgggatcatctggatatgtatttaaatttgtatgtacaacctgaagcattgcaggatgaagctcctaaaaaaaagcttacagcggaggttcaagctggagatgatgattctcagcatttaaattcacagtcagaaagaggaaaatctagtaagttatctagaagtcggcataacaaagattggaaaggattgatgaagga

SEQ ID NO: 111377 - DNA, 251 bp, Glycine max
ggtggaagtcataactagttttgagtcagtttctctgattttgttgagatactagatcatggattggtactatgggaacggcattaatgattatctggttcccagagatcaggatttattggacaggcatccttcaccagactattggtcaaactggggaataagtgcaactgaagggattctgtacctgaaggtcttccatgtgttgacgttgaaaacctagacaaatccatcaacatttctcctgaaaa

SEQ ID NO: 111378 - DNA, 142 bp, Glycine max
caaaaacaacccagccatatcacactaggtagagcttatcactgctataccaaaatcaaatatcaaatgtatacaattttgaatgcatagttatcaatgcaggacaaatgagaagatcaaaattactagagtaacattgact

SEQ ID NO: 111379 - DNA, 222 bp, Glycine max
agcatattcagttaggatcgaagatgttcttagtgctggacaactatttgtggttggctagttgtataatcgggccccaagtagcattagggcttattttattgtaaagtggatactgaattgaaagttaatcttagaaaaggttgcatatcctaatgagatggtatccatagatgttttcattgttgccactccataattagaggaaagaggtgttttatc

SEQ ID NO: 111380 - DNA, 262 bp, Glycine max
cggaagttgatgcttaacttagtggatgatttgcaacgtaacaaaccattggttttaaattccaattttgttcaagggttcaaacgtattttatgtgactcaagtctggacaaagtatgcttcagttttcctcaagattatccattttgttgatcctgatgctgttcatactgttcggactttcatcaggaagcagcttgcaagtgaactgagatcagagttcctcagcacagtggaaaataacaggagctcagaagaatat

SEQ ID NO: 111381 - DNA, 269 bp, Glycine max
cattgttcatttctgtctcactgagagaaactctctctctctctctctctctctctctagaaaccctattgcacgttttgcaatcgaactcgacaatggccaacagcaacctccctcgaagactcatcaaggaaacgcagcgtttgctcagtgagccagtctctgatattatgatgatctgctgatgcagcacctggtattagtgcctccccctctgaagagaatatgcgatatttcaatgtgatgatccttgggcctacccagtcgcc

SEQ ID NO: 111382 - DNA, 257 bp, Glycine max
gttgtgccattgggctaatggttcttcaactctgcagtaatgaactgctgtgggccaaagcgaaaaggaatgaagttctattactgagatttgcaggtgatcatttttgtctcaaactatttactctactcggggaatggtgtagttagacattgagaattcaaggtgctgatttgtatatttgcattctttagcttcatgtagacaataggaggaagaccacacggattggatagatagctggctatgtgactgga

SEQ ID NO: 111383 - DNA, 285 bp, Glycine max
aggttacctctcaatccggctcgagctctcaccaccctctctagtctctacccttttcactttctatttatatacttgttttctgtctatttatcttcttgctttcccttttggtgcttgtactaaccctaagtagcagccagggacctcactatcagcaaaataataaatattcacaccacatcgatctcatacatatcacaggttttgaaaatcctgccggtttgctacggatacatattgaacggtgcgatacagaatcaatgatgttctattttcattgtg

SEQ ID NO: 111384 - DNA, 156 bp, Glycine max
acttgagactcagaagacttggaagaacgtcgcattattacccttgcttgggatagctaaacttacaagttattattatgtttacatttggaatggtaatatttcttttttgttcttgattccacaaatagaaaaattaagggttaagatttatct

SEQ ID NO: 111385 - DNA, 260 bp, Glycine max
ctcatttcttgtgagtagtagtacactggcatgaaaccagttgaggcaataagtcatgcttaattgttagattattgcttctctttcattaacatgatgatgatgtttatcttcatatttgtttgttccctttctatatattacattcaaaaagaaaatgctgtcatttctgaaaaaccatataattgcaagagagtttgctataatagactatgaaaggcctcttttgacaaaaattgatattatctagagagataata

SEQ ID NO: 111386 - DNA, 191 bp, Glycine max
gttagttcattcctctggagtgccagttcccaccaatgaatttgggttcttgatgcagaaccttcggcatggcgaaagctactttctggtatcaaagccaacataagtatgaacacatcaacctagcagcaaaggaagcttcagtttcgtgtttctctgattgcctttgtctgctcagcatgtcattttaa

SEQ ID NO: 111387 - DNA, 264 bp, Glycine max
attgagtgaaatcagattaacacgatactaaacttacataaagaatcaaagagaagaaaagcaaaaagaaacagaaaactaaaagctcatgcgctctggccaaaaaatcggggttgtagcactctcgtcattatggattaaagagcttcctgaaaggcccatctttcctgtctttggcggcttcagttagagctaggaaccgcttgaacccagtggtggcagctcctcgtccaagtgcagcagccctagtaagaacatcctctc

SEQ ID NO: 111388 - DNA, 263 bp, Glycine max
aggctcgaggaggattcaagtgagattccaaccatcaatcttaacatagaagagttcactctgaatttacaagattacatgcaagaaaatatggaacttcaaggaggtgaaatgtcaaaggcattggttgctttgaatccacaagctgcttccatacctatgcccaagctaaagaatgtgggccgattacgagcatagcgttgtgtataccttgtcgaacagctatgcggtggagctttccactgaatggcacctatttccaa

SEQ ID NO: 111389 - DNA, 259 bp, Glycine max
cttgaaaatgtagtgtgtaatatggtagggttgaagcctcctttagctcttaatgctgttgcaagaaaacttgtagttcattgcttcaatttgctcaaggccatgtggcatttgaacacacaagactacacttgtctgggtacattgatgctacctttttttttcttgttgaggctgagacaaaagcagcaagcaccactaagtaggtgctacttgttgtgagtccactgtttcaattcttgtagatatggtgtgatat

SEQ ID NO: 111390 - DNA, 256 bp, Glycine max
aaactaccaataccccaggaatgctttcagttccatttcctttgatgttccccgcgaactatatcgttactatggtgaaaagattaagaattttcaggagatgtcttatttgtctccctatgctgatgctcgtggacttaaggctggatcattggagtttgatataaagggactgttactgttatgcatgaactgcttagtttcactattgagaagaggttggtcaccgatcacctcacacactttcgttgggagc

SEQ ID NO: 111391 - DNA, 282 bp, Glycine max
gtgagcctctgtcctctgtcccctgcccccaacacccaacaacaaataaaactcatactcactctctctactctattcccatggcttctcttctcaccctcgctctgttactcttctgcattgcctttacctcccacgttgcctgcaggcgcacatggaggacacggccttcaacctcatgtcggacgccttggagtggcccaccacaatgtcgctctacgacgaagacgacgcccaagaggatgtcgagaacgcttacagtcggagatcgttgttctggcg

SEQ ID NO: 111392 - DNA, 286 bp, Glycine max
  unsure (1)..(286): unsure at all n locations
cgccccccncactcccctcttcctcttcaacccctctccctcccaaccccgcctccggcagccccctctaccacgaaaactggcgcagccaatcccgccaccatcctcctccgccggcacctcccatgcgctctcccccgtgggctctacaaccgcgccacctcggacacctacgacccccgcgccctcctcgacctcttcggcgattggatggcctcgcagcagtggcacgacgtcaaattcctcttcgagtcatggtccagctccctcgacaagaccggcaaac

SEQ ID NO: 111393 - DNA, 278 bp, Glycine max
aacaattcattcattgagcctcagtttcctgtacctcctctgaagtcaaccttcaacttgaccttgaattttgccaagcaggagctgattcttcctccactaataggcaaatattttcaagaatcatttgttagagttttaagaggagaatttaaaagtatgagataaaaataactttacctttttctctaaatgtgatatttctctttcatcatctagttagatgaataaaaacagtgtcttgaagggaaaagtgaaggtaagcacaaaactttaat

SEQ ID NO: 111394 - DNA, 276 bp, Glycine max
tcgagatacaaacattcgtactagcataagtactgcaccaaacagcagtgttccaaattttaaacgcttcagaaaggcacaaactcaatctggtaatagctttgagaatcttgttccatttggaaaatatccatacaagattctgactgtgggaatgaggacgtgactgagcttgtgaaggaggagaaaaggcgaaagaaaatggaagctatggcagatgacatgtttaataatgaggcaagaaaacgaggcacagctggttcacgaggcactgtt

SEQ ID NO: 111395 - DNA, 275 bp, Glycine max
cagatattgaagaaatattactgactggttgtaaaagcttgactgaagtttactcctctggattcctcaacaagctgaattttttatgtttaaatcaatgtgttgagcttaggagtttgagtattccgagcaatatctatggagatcatcaggattaattcttgtttctggctgtgacaagcttgaaacgttttcaatgagtaatagaaccgaagtggttcaattatccggttgctcacaccatgatacatttccgactgggagaggatcgtatt

SEQ ID NO: 111396 - DNA, 271 bp, Glycine max
atctgaactcagggtgctcagatgaattacatgcattctgtgaaagtgggacccatcattagatttttgtgcaagaaggactaaatctattgaagaatttctcctccattgatcccttgatagcaagagccactaattaaccgtttgatgatcttagacccatcactatggcgatggcagtgcttggttatactcaatcagaaaagtgggttgagtaactttatgaacaggtaagtcctcaaaagaccttttatcatcatgtatgttaaaa

SEQ ID NO: 111397 - DNA, 275 bp, Glycine max
cttccagtagaaattatgaccccttgcaaccacctgtatctggacttgattctgcatgctgtataggtgcagatcaacccagtccagtctcggtgctagaaccttcttttacagatgatctgtcaccttgtttagattattttgaaagtctcaatgttgacatacaagggcttcgaatgcaactccagttgctgaagctggaatctgaagattttgtggaagaacccgtgctaattcaaagtgatgaagatggtatggaggcatctactggaatt

SEQ ID NO: 111398 - DNA, 275 bp, Glycine max
cttcatcactcgctccatacccagcaacctaaacattcactcaactcgaccaaccatatcaaccaacatgctttccaacatcctcttcctcgccgccgccggctacgtcgctgcccaggacgtttccagcatcgttgcttctgccacctctctcggtggtgatgctgctaccagcgcggttggatctgccctttctggagacaactctgcagtctccgctgccagctccttcgctgtgaacaaccctagcgaggcctcttctttcctcgcctcct

SEQ ID NO: 111399 - DNA, 284 bp, Glycine max
cttacacacaaaacacaaacacacaaatttcctttcttttaaaagagagaagcaatgcgtaaagaagagatagaaaagagaaagaagagaagatgaaacatagtgcttcctcctctgatattctctgcttctccattccctgaaccaaaattttcaatttttaatacatataaacttctggggttgttgtaaaagttgaaggcttttgggggtatctgatccattgggatcatcatcatcatcatcattcatcagcacatggccaagcctggggtgttggagtc

SEQ ID NO: 111400 - DNA, 276 bp, Glycine max
ttagtttccaacacaacaacaccataaccaacaccagccacagaaataagtttgtggaaaataagataacaacattttactgttgttaccgttctaccttgagaacaacctcaaactcaaacacaacacaataagagttgtttcggtttttgctatagtagtaatagtacaatacaactactgcaaccatatcaaaccaaagaagcattgtgtggaattattgactcagaaatttgaaaaccactttgtcccatcccacttggacttccacctcac

SEQ ID NO: 111401 - DNA, 272 bp, Glycine max
gttgagagcgaagaagaaaggggattgaatggaaggggaaggggggcgatggttgcattttaggagcaatttagatatagaatagaacaatgtaggattggtgtttttgttttggcacgggccacaaaaacagtcacgctgctttctgcttttgttgtggtgtctcctcaagtggacctcaacttacttatctccttcttcccgcatgatcccaaccaaaatgcagtaatggaggactctgatgaagatattgtctgcaactgggtgccttc

SEQ ID NO: 111402 - DNA, 160 bp, Glycine max
cggaacctggcatctcacgggccttgtcactcatgtagtggatggctcgcctcacgctgtacactgcatcgagccagctggaaccgctacagcccatattacacttgcggcttgaaaaccggatgattatcggcatctgactctgtgtacttagccattg

SEQ ID NO: 111403 - DNA, 270 bp, Glycine max
atccaaaggatatttcccagatggtggccaactgttatcaattccaacgcttctgtttttgacgccgatgaacaggaggaatacaagacggaggcttatagagtggttcgagcaattaccaacagtagattgggcggaaatgacaacatggagagtgatataattcaacctgaaatggagatggttagccggggcctagaaaaacacttgaaaccggaacaaagagaacaacttatgtttctctttggtaaagtttgtggcgaggacagt

SEQ ID NO: 111404 - DNA, 239 bp, Glycine max
ggaaagcaagaggtttttgatcgtgaagcagaaggatatgagaagttagcccaggcaaattatgatgtgtttgctgatgatgacgagcatgataccagtaagccatctacggatgagaatgatgcagttagtcgatcttcttcagatgccgtggattctggtcctgagggtggagcgtctcaaagcgattacgtgtatgatgaatcttctgggtactattacagcggcaatttgggcta

SEQ ID NO: 111405 - DNA, 150 bp, Glycine max
  unsure (1)..(150): unsure at all n locations
actcttacgtaatctctgaattcttcacnagttcatgttcataatttgttaancaaaacatccattttcttctnattctaccaaatctactgttacacattccatttcccaacttcctctttctctccccattctatttcctttttcttt

SEQ ID NO: 111406 - DNA, 161 bp, Glycine max
aggcaaaccaggtctcgatgtgtaatttcatgttggaccatcaaaagcctgcttagttggattggatcattccgatgtttgacaatgccaatctttatctttcaatccacccagaagggaatttggatttgtgagcaaatatccagttgcattgtccagtt

SEQ ID NO: 111407 - DNA, 264 bp, Glycine max
atatatttggttggactatgaaaaccacaaccccaatgttatagaagactataagtccactaactctggactgatgttttgttttctttacaagtaaaactttcattttgtccatgaaattgacaccattgatcaatttagtcctcgaccttaagaaaagccaaatttagtcattgacttcgttactatctgtcaatttagtcttgaatttaggaaatatcatcattttagtctttgattttgactcctttcaatcaatttgat

SEQ ID NO: 111408 - DNA, 261 bp, Glycine max
gctaactgttagtgactgtgatgggtcaagtgtgagttttcggttgtgcccgtcttcgttgcggccaccatgcgtatgatcgacaccgcaatgtccgtttgtgctgctgttttcagaagcgaatgtcggcctcgctctgctgctttgtccgcctcgttgctcttcgacgaaactcatacacggtttgaggaaagtgttgctcggtttgcggcggagaatattgcccctcatgcttcgagaatataccagacggattgtttc

SEQ ID NO: 111409 - DNA, 171 bp, Glycine max
caacatatgaaggcacacataaccatccactgccacctgctgctatggccatggcatcaaccactgcagctgctgctaccatgttgctgtctggatcaatgtccagtgcagatggagtaatgaaccccaatttgctagccagagcaattctgccttgctctacaagcatgg

SEQ ID NO: 111410 - DNA, 216 bp, Glycine max
gaaggaacttcaaaaacaggataatactatgaacattgatgctcaagaagaagaggctgcagcagcaaaagagatcacagaagaagagaatcaactcgttgatgctgctgcagaatgcagtagcagttcaatcacaacagcagacaacgtggacagccatcgattttatcctcctggcaggatcatgcatattgtctctgtaccttccttggatga

SEQ ID NO: 111411 - DNA, 270 bp, Glycine max
catcgaccaccctttccttttaattcttcccacaaacatgtcacgccccgctgcttcattcggaattctcctctgtctgttctctgccgccgccgccgtcgtcaactgctccgatcaggcaaactgcagcaccacatgcattgcggacagtgcgacagtaagatattctattaattaatttaattaattttcttatcaacaaatattaattgataatttattagtttttgttagaaaaagggatgaaacctgcgactttttcatctttct

SEQ ID NO: 111412 - DNA, 269 bp, Glycine max
gacatttaatagtattagataaaaagtctattattctgtttactatctatctttttatgctactagtaatttatataacataaaattgaagtggtaaaatactattaaatgtctattattctgtttactatctatctttttatgctactagtaatttatatagctttttaccacttcaattttatgttatattaattattggaatcttttttttttgtttaaaactattgaagaataagatttttttaaaattatgttattgttattga

SEQ ID NO: 111413 - DNA, 263 bp, Glycine max
agggagatggagctattgatgtgattaatatagaaacagaaatggctgctacaaaatcaaaaagctcttcaaattcacgaaaaggatcacactcaagatcaaaagatggtagttcatctagcaatacagatgcagatcaaaatggaaaaaagaggttgcatttggattacactttgggtggtcacactgcagctgtttccagcctggcattttcattgtttggggaaagagggaaattcttgatatctggaggaaatgataag

SEQ ID NO: 111414 - DNA, 250 bp, Glycine max
tctattctgtgatatggagtagtaattccaaatcacctactacttcattctagagtatggactagtatgtgatttggaattactacagaaggattgtcatgttcttgttctgtagtaatactaaatcacctactactccatactccagaatgcaagaatctaacctttggaagttttggatctggaaaccccctttctggatctgggtcatttacatctaggcctttgaaaagtagcttggaggatacat

SEQ ID NO: 111415 - DNA, 264 bp, Glycine max
tccaaatatacatctatatacatgttctttcacttctctttgaaaattgtttgtgtccttttcaattgaggtttattcaagttattcttcaagtcatgccaagttgtcctaatttctgaacacccggaggtttttatttttgtaagttttaatgtgataagattagaatgtcaaatttagaccatttataaataattgtatggttaaaattaaataattttaattctcacttgtatgtaagttcacaacctttatgtctgtaga

SEQ ID NO: 111416 - DNA, 258 bp, Glycine max
cgacaacagcaacaacaacaacagcaacagtcccatgaacgaaaacaacaatagtaacagcttgttggggaggatcagagaagaggacttgatggaagagacgaaccctttggcgatcgtgccggataaccaccctctggacccggttccgtcgtcgtcgtctcagggactaaggggtggcggcgctgcacgtgaggagcacgtgtcggttcagcgggtgaagaaggaggaggttgatgccaagatatcggcgtggca

SEQ ID NO: 111417 - DNA, 258 bp, Glycine max
cttattttgggtatatcctcagctattggagaatcatattagatacagagctgattgacaagagtcgacttgtccaggcatatcctaatcatcggcaaagtatagcaccttcatccgagcctcgaagatcagcctcaatagcgtgtggatctagtgtgttcgaagtttgtatgcgcgttcccgcatgggctacacaggttctgagacagcttgcacccaattcggcataccgcagccttgttatgtcgggagttgcta

SEQ ID NO: 111418 - DNA, 257 bp, Glycine max
gtttttctctcttttttgtgaaactattttcatttatatttaggatgttgatagagcaagcacaaaaagagaaacgagtgattttgacgtgggatgcaaagttgcttagacatgattatctgacacaaaaccaaatctatagagtgaagagtcttctaaaaaatgaacagctacttgaggttattgaagcttttcagataaaaattaatgaggataagctaatgtcaaggtgcacaaaatgcaatgggacatttatt

SEQ ID NO: 111419 - DNA, 141 bp, Glycine max
caaatattcgttagagataaagaagaggtagtccgggtttatggcacattgtgacattcatcatgcatctgttttgtattgttgaattctttttataattttgaaactatttgttaattatgctaaaagaaaaaagaaaaa

SEQ ID NO: 111420 - DNA, 134 bp, Glycine max
atcacattgcaaacaaactacacattacattactaagtctacgctcatatgaatactactgatggctagccccaacgttgcatgtctggttgctgtgatgtgcatggttctcctcgccatgagtgctgcaccca

SEQ ID NO: 111421 - DNA, 222 bp, Glycine max
caataagtttgtccagaaccctaagaaacaataatcaggaggcccctcgaaacaaaaggaacccagaaaaaaagaaaacaaagaaaagaaaaaggaaaacagtattgggccattggtattgcaattggaattgaataggcattagcattataatagcccccgaaactgaaagccacatttgactgaaagaaggagacaaaaatagaggaggaaaatttggat

SEQ ID NO: 111422 - DNA, 269 bp, Glycine max
atagaaacacaaaatggctgtgcagaggcaaaacaacgtccacgttcttgttctgccataccctgcccaaggccacatcaaccccctccttcaattcgcaaaaagattagcttcaaagggcgtttgtctacgactcctttttcccgtggtctctcgacgtggccaagcagcatggcctttacggaaccgcctttttcacaaactcagccgccttctgcaacatattctgtcgcattcatcatggtttccttcagcccctgttaagacgg

SEQ ID NO: 111423 - DNA, 258 bp, Glycine max
atcgcttcactgccattagtggggagcccaaagttcacaactttcagggatctgtatcaatatactattactcatcaaccttcccagtcttttgaatttgaaatggaagaaaagtctagatcatgcaatgtgtgtgacacgtggcactcattttcattatatgtgcatattgaacaagtggcagcaacagcagtgtggggattgatgactttacttataaaacctatgaaggaaagcggaccagtacgtgctctcata

SEQ ID NO: 111424 - DNA, 124 bp, Glycine max
ctcgagccggtttctacgtggtttcccggcatcgaggacgcaaagcaaaacctcagcaacaaaacaagggcgcttaaaaccctatccactttctgctcacctctttctcgtcccaacaccaaat

SEQ ID NO: 111425 - DNA, 151 bp, Glycine max
  unsure (1)..(151): unsure at all n locations
gacgaactgcatcgatttattggagttccagcttccaatgcaatggggacctgatattggtgagcttgcgcttggtcctgnaaggaagccacaaaatgctgcttctttacagtttagtttcatgggtcccaagttctatgtatacacaaca

SEQ ID NO: 111426 - DNA, 202 bp, Glycine max
aagattgcttataatctagacagctagtagtgttcaatacgtgtctatttacgaaggaatgtagtcatgctattttgtacggtgaaatctgacgaatagatgatgaatatcacttgttttacttttaaaaaaaaaaaaaaaaaaaaaaaaaaaaaaaaaaaaaaaaaaaaaaaaaaaaaaaaaaaaaaaaacaaaaaaataa

SEQ ID NO: 111427 - DNA, 145 bp, Glycine max
ccggcttcggcggatgtcgacgacgccgcagccgcagccgccggtggttttgccgctgcggccttctacttctgtcagggttggaatctcctaaataccgtgcgaggcctggctttgaaattaaagaagctaccccgaagaagca

SEQ ID NO: 111428 - DNA, 112 bp, Glycine max
taaagataagcgaaaagaggcttttgagaaggaagataaatccaagaagtccgtgagcatcactgagtttctgaggtatgcttccgcctcagcaggcttcagaaactcagtg

SEQ ID NO: 111429 - DNA, 110 bp, Glycine max
catggtcattgacaccaataggacaagctaccatacatgcctcttgacttgcaaaaattctgaagtgcttggagagaaagatgcatgaggactggcatcaaatcacttct

SEQ ID NO: 111430 - DNA, 110 bp, Glycine max
tttatacagccaccaactaatcctggacccatccttcacaattccatcaccgttgtctttgtctctaggagattttcccagtgaaaggctccaaatgttgagtcagagag

SEQ ID NO: 111431 - DNA, 110 bp, Glycine max
gggacagtcatgtcctggtcattaacaaaatcgtcccacaaaattggaaggtatgataattgataaacagagtagcttgtaaaagggcaaatagataaagtcaatgttga

SEQ ID NO: 111432 - DNA, 104 bp, Glycine max
gttattggaatgctgttttgggtagcagtaggattttatgtggttgttgctgaacactgatttcttagtagggtacaccttgtgctctaatcctctttttaata

SEQ ID NO: 111433 - DNA, 99 bp, Glycine max
tattgtttgagccaaagcttccagactggatagtagctgccattgctgatcttaggattggacttgagactaaaatcagtttacactttgaaaatgtgt

SEQ ID NO: 111434 - DNA, 162 bp, Glycine max
ctaagctatttggtgaagctcttgagcgaggaaccggcttcttcaagttaatatcatactaccagacacagtcaggaccttcatactgtggtctccacactcctttcgttcgttgtcctcaatgcccttgctattgaacatggaaggaaattgaaaggtatg

SEQ ID NO: 111435 - DNA, 263 bp, Glycine max
cgttgtttcaggcatggaggttgcctagtcaaggaagaaacaatgttgcaaatcgttacaatcgtgaaggcatctatgttactcatccttctagggcattccacgatgaggaaggcaaaagcttttgggtggaaattgagattgtagataattacagatacccatctgggcatcaaggaccatacaaagtcactacttccttgctagtacctggtaattaccaaggagagagaacgataaagttgaacaatacctatgatcaa

SEQ ID NO: 111436 - DNA, 256 bp, Glycine max
agaaggaaagcctctcataatgtttatttaataaaaataaaaaagaagaaatgttgtactctcggaaaaattgttggataaaaaattcttcatgtttctagcttaccgatacaataagggacaagcaatttacgtgtctctcggaatctatattttgacaatggaaattaattccctctgttacctaagtgccttgaaattgataaacatattctgcctaacaatttgactacctttttcttctcacatataaata

SEQ ID NO: 111437 - DNA, 117 bp, Glycine max
gcacgcacgcgattcggcgcgaggctctccgctgcggcttcagacacgttatcagctaccattgagagcctaacttgtgctgctgaaatgaaaactaatgattccacacaacatacg

SEQ ID NO: 111438 - DNA, 159 bp, Glycine max
gcaaatattgaatgaaaatgttgtcaagaggtatctcaagaatgccttcaattgaataaagtttaggaagaatagctatctctctctctttttctatatatatatatatatagttgtccttaatttctcagttgaataaaaagtttgccttgtttgtct

SEQ ID NO: 111439 - DNA, 272 bp, Glycine max
attgcatgtgttatatcatatattgcatcatttacatgggagtcttggttatgtggaactgcatgtcaaatggggggcctcaagaaatgcttttggttgtttgcaggtaagaagggggcagaagctgaaccaatggatgcaacaaatgatgctacaccccaagaacaagattgagagacagaaaccctttgattttgcttttgatccctttcaattttggtacatttttcaccaagttgtatctgcttgattgtgaatttagtacagctttc

SEQ ID NO: 111440 - DNA, 280 bp, Glycine max
  unsure (1)..(280): unsure at all n locations
ggaattatcttcatctggactaggtggaaggaatccagtacctaactagagttacctcctggcactgtcatgggtgagcttgctgagggagcatcgttggattcacttagttggtagaagagtgcgaacaagatggcctgatgacaacaactgttatgaagctgttatctccgactacaatcgatccgaaggtctacatgctttgttctatgacttggggactgcanatgaatcatgggagtgggttaatctgtcagagcttggttgagggaatatcgaa

SEQ ID NO: 111441 - DNA, 280 bp, Glycine max
caatttgaattgggaaaaaatcccattatagctccggagtggttttacagtacaaagatccgggacgagggaatttctggagcggtgttactgatatctcccaaagagaaaatttaaacagagtccaacgattttgattagaatcgtgtaacacagaagtagcaaatcttacattaaataaatcctcaaggtcgatctggactgctcgagtttggtggtttgcaacatcttgctgacaacatttgagagattaaaggatcaggttaaggtcaacaagaga

SEQ ID NO: 111442 - DNA, 269 bp, Glycine max
cgtgccttgactagatatgatggtccatcgactactaacataggaactttgcattaatattaacatcattcgtagcatgtttatttaaaggttataatcagaggcaagaaaggaagatagagaaaagcccattgtcatggtgtcaatgtggcttagtggtatctgtgactctgagattatgcattcatgtactcaaaattatttagtttgtatattgttctggaagaagaatgttggcatggtatttcgtgccttgactaggatatgat

SEQ ID NO: 111443 - DNA, 170 bp, Glycine max
ggcgattcttgtcttaacttggaagagttgtgctttaacattcttttcatgaaactgaaacaaaagacacatgatgaaccggagcaacgtattgtagcagttaagcatttgggaatacttcttggtcaatgtacaaatggagaaacagctgagatgaattctaaaatttg

SEQ ID NO: 111444 - DNA, 271 bp, Glycine max
atctgtctcttacttctggtgttgttggtgtttttcatattgggtgagataaaggctacagtaacaacagcggctttggcaaagaagttttcggagaaattaagaggaagatagaagttcttttattttgattttattaaaatggtgtttatgttttttttgtctgattttttgtggtttttttggatgcttcgttgttattttttccttaaactcatatttctgatattgttcagagttttatgggataatctacgaggtgatgtgtttg

SEQ ID NO: 111445 - DNA, 185 bp, Glycine max
ataaaaacctcagcagctaggtgctttctttgggcaaagtcaatcgacgagtgagtagtcagaacatcattagaggtgatcggcaatatattgccaagtgacagtgggttaggtggtgtcacaaggattcttaagggtggaattcccctggtgaatgataagatgtggctagagtgcaagtgctc

SEQ ID NO: 111446 - DNA, 273 bp, Glycine max
agacgggagagagctaagagagtgttctaacgcaaatcgtattccttgtagaattaggtttatcaacgttctttagaacatacatgatttttgccaggtaaatgatgtgacagcagaagtggtggaaggtgatcctagcaatgttctttgtgatgctgtagataagtaccgtgctgcaatgttgggtgtgggtagtcatggttatggggctataagaggtaaagcttcgttttgctctctgttatcatccttgctccgcaatttgcagtgata

SEQ ID NO: 111447 - DNA, 250 bp, Glycine max
ccatcttcgaaacctcaatcgcatctccatccaccgcattctccaccatcgttttcagcctctccttaacgctactactaggttcttcatcgatgctgctgcttcttcaatgtctcaaccgcagcccaaacaacaaccctcggccccatcatcatccttgaagcacaatgagctcgccaagttcgccgccatcgccgctacctggtgggattctgaaggcccctttaagccattgcatgtgatgaatcca

SEQ ID NO: 111448 - DNA, 247 bp, Glycine max
ccatgttctcgagccacttcaggactttaaccacagtcctcatcacgcctctactccttggcttgttcgctaaggagtagacccttgatgagcactgtggttaatgttctcgagccacttcaggactttgatgatgttccaattggaccctttgtttacactgttccagctgaacaacaatcctacaatgaagtcgcaaaagagagtgaaacacctaaggagaggaagagggaaaatggtcatcatc

SEQ ID NO: 111449 - DNA, 248 bp, Glycine max
catcaattaactcattcacacacaattattccccacaaatcaattatgggccctctagtaggacacgtagctccaggcatgggtttcatgctaatagggctatggcacctcttcaaccacataaagctccatgccctaaacccaacctcctacacatcaccaccatggttcccaacctccaaacacaagtacctggagctcctcctcatcatgttaggctcagcagcctccatctccatggaactctt

SEQ ID NO: 111450 - DNA, 248 bp, Glycine max
tagacttcctcccttccctattcaaccgcttccactcggcgacgacactcgctctacgatgcgcccgaaagtgcgcgcgataaacgacgacgctatggttctcatctctctgcggtgcaggattctcacgcgcctgacgctgcgcggctgccgcgacataactgcactcggaatggccggcgtaggcgaaaactgcaaggcctagaagaagctatcgtacgcttcgtgtatcttcggagcgaagggaa

SEQ ID NO: 111451 - DNA, 247 bp, Glycine max
ctcacacatgatggcatgtcctggccagtttttggattcttcaatagtatctgattcacgtcgcaattgttgttctgaatctgctcttggttaatcatttttgggcttgcagctctctattcaggtttttcgccactgtttggtttgctttctctctcccccaattgacccataatctcctatgcttttggatctgccctctttggctcaaattgtgtactgtgagatcagcttgacctcagagtcg

SEQ ID NO: 111452 - DNA, 243 bp, Glycine max
tgatttcactaaagattctttgcataatttactaatttgttaggttggcaatgtatgcagagtaaatctggcacttttggacatcattgcatgacaagttgatcacttttgcatcatgttgttaatgatgttcaactgcatactataaacctgaacatatacatcttttttcaacgatgtcgataatttaacttctatccatgttcactacaacgttgcattagtttctcctaattttaacgt

SEQ ID NO: 111453 - DNA, 164 bp, Glycine max
  unsure (1)..(164): unsure at all n locations
tgaaaattttatgnagttctgttacttgttttacttatgaagtatgttcgtgaagccatgtggtgttanagagttacacgtggcgatgtttgggtcggaccgacgttgattgcgtttaacaggatgatgcgtgcattgtcgttttttattttgggagacatttc

SEQ ID NO: 111454 - DNA, 255 bp, Glycine max
ttagagaggaagaagaagaagaagtaggaggaagaaaaggggaaaacgcaaagaaaaaaagaggaagatagatcaagatctcccttgcgtttgtctcagttgaagaaattcaagagcagaacgagactaactcaacggtatcagacgtttcagggtttcagcacttccattttttttttttcccggatttgagttggaagaagatcaaagaggttcctagttgcttggattgttcctctgggtggtggaactttt

SEQ ID NO: 111455 - DNA, 262 bp, Glycine max
attttgttcgtgctaatgaacaaattccaaagaaggatcagggaacgtcaaatgcatcagaacatattgtggacgaggatttacctcctgtagatgtggatgtaaatttagtaaaaagcttactcgattccttttcttcccagcaagggcttcctggtccagcttccaatttgcttggcctcatgggggtgcagttaccacaagatggcaagaagggcaaatgaagatactgaaatatttttccaggccttggtgatccatc

SEQ ID NO: 111456 - DNA, 258 bp, Glycine max
ctcaactcaaagatgatcactgtttctttgtttctgtatatctcaaaaaggaaaccgacaactcaaaggatttgcagaaagtgcagctagttagttccattttgcatcctccctccctccattgaatttcagtcaaaacaaaacctcttttacgtgtgaaattccacaagccaaaatcatctccgagacaccaacaaccgcaaccacatattctttatttattgaagtggatcaatacatagaaaaggttaattagta

SEQ ID NO: 111457 - DNA, 101 bp, Glycine max
ctgaattagaattttaattggttgcattgtcggctttgtaagttttgctacaattagtcgcatgcctcatccttctaattgtagcaaaacttataaaccca

SEQ ID NO: 111458 - DNA, 262 bp, Glycine max
tcgagagctcgctcctgggaaaaatgaaagaggtaaatgcattcgaacaagagttgcttgagcatattgacatgataaagcttgcgcgcgaagagaatcatgcggatttggaatcgttggggactcacttcatcttctcctaggaatcattgaaagcattgcttaacatgagaagaaatgcaaaagagaaagagctagaagcattgctttctggggagcaagattctggttcatgctacattgaggttcaagctggggctgg

SEQ ID NO: 111459 - DNA, 242 bp, Glycine max
caagagtttgccacatgagattgataaggcacatcaacaaagatgggatgaagttattgttaatcaatatctgcgtgatcttagagaggcaaaaaagcaaggcagaaaagaaagaaagcacaaagaagcacaggcagtgttggctgctgcaactgctgctgcagcagcatctactagggctctccggaaagacaacttagatgaatcaatgcaacaagagaatttgttaaaattggatactc

SEQ ID NO: 111460 - DNA, 252 bp, Glycine max
cttctgtattcatgttggatgggttgctgtacgcctccctcccctctgtgttgcaggcacaacaggatctctcttcccttaagaacattgcaggagagactggaaagaagctcagctcactggcctccacattgatgacagatcttcaggaccgaatcctctaaaatgtgtatgctctgtatttaagagaatctttggagtttgttacatatgccagccaattatgtttcaaatgtaatagaagagttcaat

SEQ ID NO: 111461 - DNA, 265 bp, Glycine max
tacaccaggagattactcactaggtactgatgcatatgaagattcagagcatagctttcttgcattccgacatagatggaaagatatattcaggatgaaccagaatgaacttgaatcagaaataagaaaagtttctcaagattcaactcttgatccaagaagaaaagcatatcttattcaaaatctaatgaccagtcgctggatagcttctcagcagaagtcgtctcaatcattgggagttgaatcttcaaaaggagatatattg

SEQ ID NO: 111462 - DNA, 258 bp, Glycine max
ctcgagccgctactgaggatgcgattttcttgaggcttgtaaagtcgtgattgaaacgggcaaaaattggggtttcggaatgaaatgaccaaaagaatttttggaattttaaatgctttgatttgattatgtttttacagtatatgaatgttggttggtttaattgcgcatgcagattaagggggaaaagccatggaagagatgtcgggtttagcaacagcaataaactcttccaacataggatttcagctattgaag

SEQ ID NO: 111463 - DNA, 150 bp, Glycine max
aaatggtaacagttacaatttgtcgagcttataccaataatcgcctgacgtttactcagcatattggcgacggcttcaagaatattgaagtgtgcatcatgtataaacattttcaaattttgcttatcaagttggtatcttggagttgcc

SEQ ID NO: 111464 - DNA, 262 bp, Glycine max
taaatttctagcaaataggtggacgaattctaagagcgtcatggattcacagagtgagacccaacaacttgcggtgccaaaaatggaagatttttacttcggtgatcaccagcaagatctgaaggcgatgattgttcctgggttcaaagcgttgtctgggaccaactcggggtccgaggtggatgactcgacctccaacaagacggtgactcgggttgcacccgctgcgttgggcggtgctcactctggcgaatctaattgt

SEQ ID NO: 111465 - DNA, 249 bp, Glycine max
gaatttccgagccatgcgtgtatggttggaaatgtattagaaactgctggaattgctttgtctcatcctaactgttcatttgatatggccgtagaccttgttgctgtcactacgtttttgctggaggcactcccatctctgaaaacttccaatagtagagaaagctctgtgattgctaaggatgatatgattgaagacgatgaagtcatggaaatagctttagatagtaaattggagcagcaaatttat

SEQ ID NO: 111466 - DNA, 255 bp, Glycine max
gtagaaacgatgaaggaactatgggcacaaatggggtcactaatggccactattgtgttcatgtacacaatctttgagcgcttcttccctccacacttgcgtgaaaagaatcaagcctatactcaaaaactcaccaaccatttcaacccttacatccaaaaggctcaaagctgaagttgtgaatgatagccaaacccctcttgtcctcagcatggatgacaacgaagagataactgacgagtttcatggcatcaa

SEQ ID NO: 111467 - DNA, 252 bp, Glycine max
caacctccttcttcacccttctccaccgaccacttttgactctctggacaaatgtggcgccgaaacttcttgaagctccaccacctcagtctcagagcttcggggaagaggttcgtggcgttgtgggggaacggtgattttgggagaattgggtcttggcaacttggattcgcaatggaaacctgtcgtctgccccgcgttccgcgaccgaaccctaaaggccattgcttgtggtggtgctcacaccctctt

SEQ ID NO: 111468 - DNA, 249 bp, Glycine max
ctcctcttctcattctccaagcccctcagcttcctacccaaacactgcaatagagatctagaggcaacaaatcttcttgatggagctttagaggtgacagatctgttcatagatctctctggtgttcctgctcgtgtttgttgccataattggaaccagcacggcctcgaagatgacaatctcgtagggcttttaccagaatagaagtctctggtgtttctgctcatgtttgttggcatcgtctgaacg

SEQ ID NO: 111469 - DNA, 252 bp, Glycine max
gatcatctagctgaattggttaaacagtagtatctgagttattataaaaaatttatattattttcgatttctactcattagaaaaacgttgtgacaagtagcgggacaacattgaaaatggcaatgatggtggtatgttgaagcggggaggccaagtaaaacatcctcttatggttgcgtctctgttctctcctctccactgtcttttcccctgccttcctctgttccatctttgagttgaaagcatgtcag

SEQ ID NO: 111470 - DNA, 267 bp, Glycine max
atctgatgcactcccaggaagtggactaagcactgaggtagctgacatgcagattagtgaaccgggctttgttgacaccacacatgatatgttgaaatcaaggagtgttgaaattccaaatgagaatggagttctcaatggggacaaagctcaggatctagctttagattgcttggaaagtgcagaaactgaatctactaacagcttgtcaaactataaagagggagacattgatacggatcagcgactagacaaagattgtaattt

SEQ ID NO: 111471 - DNA, 185 bp, Glycine max
gtcatgtttttttactgaaatcggttgaagcacagatggtgatctctcagatttggatacttttgttggagacagtttggaatagttgtcatgtacgtcatacacctttctaaggtcacgcatatagttacaggtgtcattctgcacttatgtcttatctgtgtagaacttatgtttccttcttg

SEQ ID NO: 111472 - DNA, 120 bp, Glycine max
atgctactatcagtaccatactctgcaggctaccctttaactaatgccggtctcattgggagggatgcctgcagagcatggtactgatagtagcagtgtgtaatggactccccattttcc

SEQ ID NO: 111473 - DNA, 269 bp, Glycine max
cacaaattgcaactccttctcggctcttcctaatcagcacgaacacaacacaaacacaaacacagagagagacatggattttgaactgagaagagcgagagagaagctagagaaagagcagagggagaggaaggaaagagcaagactgaaacttcagaaggaaaagaaagtggtggtggtggtggtgttcagcatgagaggaagttctaaacgaaagttgaagagaagaagggttttggggaaaaggctgaactcgagggaataacaag

SEQ ID NO: 111474 - DNA, 181 bp, Glycine max
cttctaattccaaattggtgttttattgctgagaaactccaagaaaaaaaaaatacagcttttccgtgtattgatgatcctctgtgcactcataaaacttttctctttggtggttcatgcagtctaaggtactagactctacacacaatagagattcttacatcagactgcatgacccact

SEQ ID NO: 111475 - DNA, 243 bp, Glycine max
gtagccattatcgttacccggcccctccctctcatcagtcaagacacactctctgctctgctaatcgcggcgtttaattgattctccatggcaactatgagaggctgtaatcaattagaaggatgaaccactggactactctacttcaatttttgaaggaagaaagggttctaataacagcagatttttgtccatcatcatattactgaagttctggtggaaaatgctctgaaggtagatctg

SEQ ID NO: 111476 - DNA, 254 bp, Glycine max
tgtagaagaggcaaggagaagcctctaagagaggaaccagccaggagcatcttgttggggtccaggggagcctgaaagcaaagaagacctgcaccattgggcctagcaatggactacaagagtgaacttgacatcacattttcacccaaaacctgaagtaattgggtatattggtctgttcccttatgttaccgtcatctagcccagtctgaactaatgtggaacttcaaacaaacttgaatttccaacacatg

SEQ ID NO: 111477 - DNA, 266 bp, Glycine max
cttagacccaagagttgtcaagtgtgtttttaaattaaaagggggggtacaagtgctatcatcctcagagttgtcgagttttttgtatcaatggatgtcacctttcattaaatagaatccttccttgttagccgtcagcttcagggggagagtatactattagccaagtctatcttagggtcactacctcttttgtccttgtaggatgtccaagacactaatcttgaggaagcaccacaatgaagatgtagaaaaagataataatg

SEQ ID NO: 111478 - DNA, 167 bp, Glycine max
ggtttcacttggagctatatgtcgtgtggcctatgtgtgcatgcttgctgctactttggtcttgggtggggatatagtgcaccatgatgatgttacccccagaagacctggtgttgagaacaactttgtagtggtaaaagtccccacttggatggagggtgtggaaa

SEQ ID NO: 111479 - DNA, 112 bp, Glycine max
acctgataccccaaggtgtatacaactgggggttagtgcctcttccctatgaaaaatgtccctcttctatttgtgcgctttcttatttacaactgtcttaataatctcctgc

SEQ ID NO: 111480 - DNA, 261 bp, Glycine max
gttacagaatagacacaatatacaataccgtatattgattggggtaggtgatggtgttgaggggcctaatcttaggtgctaaggttaggtgagagatggatggagccagcagatccctcttgttgactgaggccctgctccttcagttgggtgtacaccatgcagacctttagggtattctttccattttcccctcatatgtgaggtgttccacttaagttctcggtggctggtatgcctggcccatgttatcatcagttt

SEQ ID NO: 111481 - DNA, 124 bp, Glycine max
agtctcctatcgcaagttccttataaggagagtttatattaaaaaatgttatgtgatgatccatgcttgttactctgaagtggtaacactataccaactagtgtatgtcacatatcccttaatc

SEQ ID NO: 111482 - DNA, 273 bp, Glycine max
tagagggagaagaagaagaagtaggaggaagaaaaggggaaaacgcaaagaaaaaaagaggaagatagatcaagatctcccttgcgtttgtctcagttgaagaaattcaagagcagaacgagactaactcaacggtatcagacgtttcagggtttcagcacttccattttttttttccggatttgagttggaagaagatcaaagaggttcctagttgcttggattgttcctctgggtggtggagactttgtgtatttttaaaatattgacaat

SEQ ID NO: 111483 - DNA, 274 bp, Glycine max
gtggtcgccgcatttgataatgcaatgagctcaaaatatttgttggagacaaaaccaacacaaagcaatattgaagtattatcttctcttttgttcatataatttctccttgcattgatcacctaccaaaggagactaattaatgttaaaatgacattctgcaggagttctgcaataaccttgtgcaagggtctttgtcaccttacttcaagtcacagccaattccagataatacagaatcaagtgtccatgttattgtcgggaaaacatttga

SEQ ID NO: 111484 - DNA, 122 bp, Glycine max
cacttatctgagtgggttcggtggaaccaaagcgtgcttcctcttgctcctatcctaagtcctaattcagcatcgtgctgttccaattcgaaactcatatatataaatacagatcccaactc

SEQ ID NO: 111485 - DNA, 116 bp, Glycine max
tgaggctacaacacctgagaaaaggcaacttgtagccgatagaagtgtagatggaagtctgagaatggttactgggcgagcctgtgctcgaagaatcttgaagtcaagctcaggtc

SEQ ID NO: 111486 - DNA, 182 bp, Glycine max
cagcagcagattatcatgctgcagctcgtgcaatttgtggatgtcctatttatgttaggtacattgatgttttatgtcacatctttgtcttagatgaaattggcacaaattgtaatgtgtgattttgtatttatgttgttttttaacagtgacaagccaggcaatcgcaattgtgatcttca

SEQ ID NO: 111487 - DNA, 185 bp, Glycine max
gagagcacatcagagagaagcaaggaaaattgtgttgcaattctgtatacaatctgttttagtgatagaacaaagttgaaggaaattagagaagaagaaaaagccaatggtacactgacaaagcttggaaaatgtggaacttcaagggcaaaaaggaaggctaatggtattcttgagaggcttaa

SEQ ID NO: 111488 - DNA, 263 bp, Glycine max
ctggtaaatgcagaagaggcagtcactgtcattttcttcatgataatcaaaatcacgaggatggttgggaagataagtacagggaagatggagctcccagatattctgctccccgcgagggtagagactattctcttaagagcggtagatctgatgaagcttgtattaattttccaaaaggaaggtgtagaatgggagcatcatgcaagtttgtgcatcataacaattctgatgggcacagtaaagtttctgtggatggatta

SEQ ID NO: 111489 - DNA, 264 bp, Glycine max
gtccaatacgaagtggaattcatcacttgtttgtatgtatgacaacacacagtactcattgctagatttttattgtacatgtcaaggaggacagatatgttatggtccttttctcaggcttcctagagaatctcaagagctctctttatgttccctttactatttctcttatttggacctgctaatttaaaggtcaatacgcttgttgttgcctaagtgcagatctagatccctatgtgttatttaggatcatagaggttctcc

SEQ ID NO: 111490 - DNA, 263 bp, Glycine max
tctggcgcgtcggcttttccttcagcaatccgcgcgacacgagaaccctagatccggctcagtcatcgggagagagaaaggtgttgtctttgagacagtattgctagggataggaacggtggtgggcttggcaagaaatggatcctggtcgctatgctctgcatcaaggctgggataatagcagcgtaattgtggtttcctccttaaataattcacctatatggaatatatggggatcatgattcaaagaaactactagtagg

SEQ ID NO: 111491 - DNA, 250 bp, Glycine max
aaaagctcgagttaaaagattgccatcctacgaatgggtcatcatcccttttaggaactcactgtctggatccatttgctaattgtgtccatttgaagaatttgcacctaagtgaaatgtcctttaagtcagatttgaaccctaaggattttgtgatatctgctcctaaacttagtaacttgaatctgatgtgcaaccgctttaaatgcaagattgtggtggctgcaccacagcttcccaatttcatgga

SEQ ID NO: 111492 - DNA, 177 bp, Glycine max
gttgaaaatctgtctatggaatgtgagatttatgcatgaatttagtgtttccttttcatatttggttttggtgttcatatcattttggttgattgcacttacgagatttaaattactatgcaattttatagtgcttgcgtcaagtttagccttaactttttctctatcattctaaat

SEQ ID NO: 111493 - DNA, 246 bp, Glycine max
gctttctcaaggtacaatgcagccttaaaccctaagaaatctcccactggatgtgttggaagcaattctactcataataatagcttagaagttacaaagaaagattcatctcacgatattcaatctcattctagcgttataagtgcgccagcagtagcatcgacaaccaaatgtttgtaccaaacatctgcttaccagcctgaaaaaaacaaccttgtttgtacctctcaacaagttgtcttacat

SEQ ID NO: 111494 - DNA, 265 bp, Glycine max
gaaaggtattacggaggcatggagtgtatttgagcgtactgctaaaggatactatcatgcccatggtcgttcggatgatacgatgaaccttgggggaatcaagtttgtttggacaggtttctcaagtagtcacactgccatctcttccaaggacggcatccaacaaggttatgagaagggttttgcgacagaacttagcgaaactaaccaaaattctaaaatataatacaatcatgtaatctaatattgaagattgatatcctgg

SEQ ID NO: 111495 - DNA, 263 bp, Glycine max
attcctcgaatcatcacatctcagcatttagcttcattctcacattcaatcaggttctttctctctctagttaattccttgaatcctattatctttgtatcattttcgtgagtttcccctaaatcaactcttcacttgatttgcacaacgttgcttcttctctcaagttagttcgctgaatccttacacttctgatcgatatccttcaatctcaagtattttttgttggtttgtgtttgtagttccattgtcgagtgcacaaa

SEQ ID NO: 111496 - DNA, 262 bp, Glycine max
cagaagtgattaatcctggttttgagactagtggtacactgggaggactgtctaagtcctcaaccattcaaagctatcatgcttatgatggcagcatctcttcaaacgatggggtggacgagcagttccctaatcagtatttagattcttttgagaacacttacactgttgctaatggtgtttctgagggagggtccagaaagggaaaaggccttgttaatagcatgttacgcggtgatcttgaaacacaacgcaatcatat

SEQ ID NO: 111497 - DNA, 258 bp, Glycine max
tgcaccactaatgttgtgccggaagaacagggggctaatcttaatctgtgaaggaatcttctgttgtcacctctaaatagcaaggactttgttgaaagtgacaataacttcttgttccttccagattagagaagctctttgtctcttcttgcacaactgccggtgcacatggctactggttcttttttattgctttggtgtaggtatggggttgatttgatttacaggcagcgacctcttataagagggctggtgtat

SEQ ID NO: 111498 - DNA, 181 bp, Glycine max
ctcaactgtgtaaagctcaaagctttttgacagtttgagcattccactcaaacatccccctccccggatcgaagattagtggagatggggggttagtgaaggttgatccaaaacccagcaatggttttacctcaaaagtgggtgatttgttggagaaattggctgtgaagttcttgtatga

SEQ ID NO: 111499 - DNA, 255 bp, Glycine max
cccttgtatcagtgcaagttagttacaagggcatcgtctctccaattcctatggattttgggccaccatcctgctcaaatccataggcaccatccatgccatgcccttgtatcagtgtaagttagttacaactgagtaatgaagctcggtcttccggatattttcttattcttctgagtaagaattgtagttcgtttccttggctaaacttattttaaacttgtcatcgtgtatcatatgactttcgtttcccat

SEQ ID NO: 111500 - DNA, 274 bp, Glycine max
ctcgagccgccagtcttttatgaaccagacttatcagttatcaatacacactcacacacacattttatattgagagagagaggggaggaatcaagttactccaagagtaactctaaaatgagttttcttttaattgttttaacgagtaattcatctttgaccattagattaaaagaaaatgagggtgctgataagtaactcttttaaagttattcttagggtaacttatcccttcttttgaagtcaaatagctaacaaagtgaggtgtaagctt

SEQ ID NO: 111501 - DNA, 268 bp, Glycine max
atcctcagttcctttcaggtcttcagcagataacggcaccgtgttgaaatttggtcccgatatccctctttgcgaatcgatggattcaatgcttaatcttagagaccagagaagatgtgttgatgcaagttctatcagctgtgtagagtatagaggggaaccatccttatatggatcttcagtgacaactaatggtgctcaaggaagtgaattatcagaacatagtccatcaaattggctgcaatgttaccctgttcctccatgggta

SEQ ID NO: 111502 - DNA, 265 bp, Glycine max
  unsure (1)..(265): unsure at all n locations
cgcctccgttttcaaacttcaacacaacataaaaaacaaaactctgagacaaggcgancgagggtggcaacaagagctacgagcgtcgtgaccggctgcgcgagatcgaatcgaatgtacagaaatggtgggaagagaaagagtcttcagagccgaaccgggcgagaagcccccttcgcccggcgagaaattcttcggcaacttccccttcccttacatgaacggctacctccacctcggccacgccttctccctctccaaactc

SEQ ID NO: 111503 - DNA, 264 bp, Glycine max
gcgtaatgtactgcgtgaaatgtttactttcctagaaaaaatagagtaaattagaactgagaaaattaaagaaataataacatatgcagtatttccctaggcttagatgattttattatattcatacattgaaggcttcttgaatcatatcagacatttccacggctcatgttccagaattcaacttcatgctcaaggacacttagcaacataaccggctcgagcggctcgagggataatcttgtaatataggtgagacccgtc

SEQ ID NO: 111504 - DNA, 255 bp, Glycine max
atcactacttgatcccaagacgggtcaggtgagcagaaagtcaccccgctgtctcactgcacagcatagtgcagtaattagggtgatttagaatcatacagtctgtgtggtatagttctctagttgaatagctcttggaagcgtgtccctaagatcaatgggaagagcattgctgttggagttgtcacaagagtaattgaagaacaaggtcaatttattctagtcatcgcacaagatgcaatgctgatagcaagg

SEQ ID NO: 111505 - DNA, 106 bp, Glycine max
caatttcacgtatgtgtacatacggaagaagctacgtttatgttcttcaacccctgaatcagtttggagctatttgtttagaggcaaggaagaagaatgtttaagt

SEQ ID NO: 111506 - DNA, 264 bp, Glycine max
agcgatcggattcggattcggactccgtctcgggaaaattcgagaagatttttcgaatttttcaccactgctttgtgcgcacgatcggtttcggattcgggctccgattttcgcctctcgcgaagagcttgcggatcatttgcactaatggacgggaaggaggtttgcgcgtcggagtcggcggttgatggaagccgcgacgtttggagttcggagccctcgctcgcttcctccgcggatcacctcgttgtaatggtgaacgga

SEQ ID NO: 111507 - DNA, 256 bp, Glycine max
tgcctttttttcattagggcgtcctgaataccttcaggattctgacattgtgtccagtcgttttcagaggagagatgtttatggtgcttgggagcaatatcttggtttggagcatactgactaatgctcctaaaagacatatgctgttaaccaggtttgtaactttgcctgaaatagctgatttttatcaagtacattttggtcttttaattgttttatggttgtccatattctggtaatactgggttttaatttt

SEQ ID NO: 111508 - DNA, 108 bp, Glycine max
cgctcgatctctcgcgtgcaatgtcacatcgttctacggattagtgaacactgcaactctctcaaccacatactgggtatccacgtagtaggtatttactctattatg

SEQ ID NO: 111509 - DNA, 252 bp, Glycine max
tgccttttctacattaaggcgtcctgtatcccttcatgattctgacatcttgtccagtcgttttcagagtagatatgtttatagtgcttaatgaacaatatcttggtttgtagcatactgataatgatcctaagacatcatatgctgttaaccaggtttgtaactttgcctgaaatagctgatttttatgaagtacatttaggtctttaaattgctttatggttgtccactattctggcaatactgggtttt

SEQ ID NO: 111510 - DNA, 255 bp, Glycine max
atcttatcttagcaataactatccctatcacaacaatactctcttatgcatgaacacgaaatgcgcttcgacgactagcaggctacgaatcagatcgagcagaagcccgaggaggccgccgcagcccgccaaggtgatgacggacacatgcgtgtcgcatagaagctcgacttgcgttgcgatggatgcgtcaagcggatcaaacgcacatatcgccacttccaaggtgtggaaagcgttaacgcagctctatcg

SEQ ID NO: 111511 - DNA, 255 bp, Glycine max
cgtgtgccttgaaatttatcgtcttgtacaatatatttcattagcttgaaaaaccaagcatttaatgattttttccttctaaacccctgatttagggattctttctcttaaaagtatgacaattgaaaacgccttaaatattcatttgattctatcaatgcaatatggatattttcccgagtcatgcactttaataggaaagagcatatgctttaaaagtatagcatcttcaaatctatatttgcatatgtgaaa

SEQ ID NO: 111512 - DNA, 253 bp, Glycine max
cgtggttttactgaaaaaattgagtattcctgacacctcttatatgccctttgaattttttcgacagatcaatgttgcatgcagtatctgcccctagcttttgtttaagctatcccgggaaccttcattatctccttcttcagttcaaaaaacatgtttttctgttcgttgttcggtttcacagacaaaaaatggagctaaagtggaatatactccttggctcattattggcttgggcaatcctggtaacaaa

SEQ ID NO: 111513 - DNA, 252 bp, Glycine max
attggattctctctttgcaattgtgtaggatcagatggaatgttactcatctctgcgatgttggacaaatcttgtgggatatgaatggattcagaatcagtgtggtcatctccgcagagatgaggctcattcctctgatcctacacaattggattctctctttgcaatattctgccagtgtgcagagcttaatccagaaccaaatgatggggaaggagaagaacatggttggctatttagtgctgatcagat

SEQ ID NO: 111514 - DNA, 274 bp, Glycine max
cggctcgagcggctcgagcggctcgaggaaagagaagaccatcatagtttcacttcagcattatccggattagggcttcagtttttgacccaacctctgacgtatcgacaccttaagtttcggatcaggtctgagcaatctggttggtagaacctttggtcttagagagtcaagtattatgtctgaattagacgatcaaattcctactgccttcgatcctgttgctgatgctaatgctgatgactcgggtgctgggtcaaacgagtatgtgcat

SEQ ID NO: 111515 - DNA, 224 bp, Glycine max
gaggaagtacagcgtagaaagagagaagcagtcaaggacataatacggctgaagtcgacagaggatgaacaccgagtggtaagggtgtgcatggggataaagtgggagaggagaaggcctcagtgctgagagctgaacacgcgagactcgcaggagaggtacacggcggagagtggagctatgaagcgccacatagaaggaggccagcagggaaagtagaggct

SEQ ID NO: 111516 - DNA, 187 bp, Glycine max
gcacagaggtcttgttgtatgaagattgggtctttctttactgccagggaggagtgctgttcaaaggatacttgcgagggcaagctgctaaaagttatgataacatatcgaagagattggaagctcgatttggagctgaatacaagcttatccttgaaggaaatccagcggataatatacccatggc

SEQ ID NO: 111517 - DNA, 269 bp, Glycine max
tttgctcacttaaaataaacaaatcctctgtgtgtggatatgttctctaatttctgtatgtacgtttatgttttacagaatattctttcgtatgttaaaactactttttgtgtttctaattttgttatagtaaatgttggactcctattaatttgtaaattgctgatgagatgtgtttcaaactctcttaacagttgtctgagagtgctggaaactacatactgtactgtacagttcaatttcttgtatatgaaaggagttaaggagat

SEQ ID NO: 111518 - DNA, 209 bp, Glycine max
acaaaatagagaaagcacaacctgtttcattggaattgtctggaagcaatatagtctgcagtactcacagagtaaatactgatcgctaaagctgatcgtgacactactcgagatcattctaacacggcaaactgggatcggcatactacaatggatgcgtggaaagaatctcggaacgaacctggctcggttggaactagtatcgatga

SEQ ID NO: 111519 - DNA, 260 bp, Glycine max
gctttttgcagggtggggctttttttctccagagggattttagtgcaagtgtgatgtctgtcttcccttgaaaagttgtcttgtgtggaaacaaaactcagaaagagaaaaaaaagaaagaaagccactttttttttctctctctctctctctcacactaatatatctgattttctctttcacttcttctgttctatgtaatgggtgttggaggtgcttagtttcagtgtgcaacacaacaccatcaacatcatcatcaa

SEQ ID NO: 111520 - DNA, 156 bp, Glycine max
ctcaaacatgtaaaagttgagtatcagattttcgagccatttttaaacttagtctccccaaaattctgatactcaaacatgtattagttgaagacactaatacacaggttaccttatcagaattttggggagactaattttaaaaatggctcgaaa

SEQ ID NO: 111521 - DNA, 212 bp, Glycine max
tagcttggaagtttctgtacaaaaaatactcttccaatggttataatggatttacctccataaatatgattgctcaagcagtgagcctggctttgactcgttcttatttgctggttcctggttttttggcatttgctagtggaaagctagcattggctcagccaaatggggcagtcacagaattttacccatctcagaatgctttgtatatg

SEQ ID NO: 111522 - DNA, 266 bp, Glycine max
gtgatcactccattcgtctttggtggaagggttcaagcctgcggtgctttagaggtcacaatggtcctgtgttgtccctatcaaataaattattgggagaggatggcagaaaagtattggcaagtgggggagaagatggtactgttcgactatggtcccttggctcaagtggcaaacgaggacagcttgctttgaaggctacactctatgggcatgaaaaacctgtaaatttgatgtcagttgctgggtaagtgtttgggatactg

SEQ ID NO: 111523 - DNA, 179 bp, Glycine max
atcagtacttgatcccaagacgggtaagatgaccaaaaagtcaccccgctgtctcactgcaaagcatagtgcagtaattgaggagatttagaatcagacagtctgtgtggtagagttctctagttgataagctcttggaagggtgtccctaagatcaatgggaagaatgattgctgttg

SEQ ID NO: 111524 - DNA, 164 bp, Glycine max
gtagtcaaagagactgctgtaccatgatattgaatcacaatgcatgctcttctgtgtactttgctccatttcctgaatggatagatatactgtgattaggcaaaggaaatatttacgggcaaagtttggtggaggagatgatgaaatgcatgatgttgatgatg

SEQ ID NO: 111525 - DNA, 191 bp, Glycine max
gtcacgcttgtctcataagtagatacctgcaggattgctatatacttcgctcagttgacgccgacattgacactgtgtaataggatgctccgcgtagctgccgcggtgtaacggttatgagatagaaatccgtccgctttatgtatgatcgtcgtaaccacgacggtgacaactggtgtaagttactctgg

SEQ ID NO: 111526 - DNA, 153 bp, Glycine max
gaggaaaagagataggtagagaaaaacgaagagtctctctcatctttatgtcagggcacaaatctttcacctcttcttctttcttgctgacacatttcagaaggaaccaccaaaaaatagaggcagaaggttctagaagccgccaattctttt

SEQ ID NO: 111527 - DNA, 257 bp, Glycine max
cagctccatcttgatgaggaggtgttggatacccacaagatgcatcaaatgaaacaggtcctttatttgatgcatcttgtgggtatccaataaaggacctgtttcatatggcgccccgtacacttccttttcttcagggatatttaattcgaaaccttctggaacggttacgaatcatggtgctgcagggcttcacagagggaggaaaactaagaaagatgagtcccagatggcgtcatcatggaaattcatgcgtc

SEQ ID NO: 111528 - DNA, 256 bp, Glycine max
gtcactggggaaaacacagatcatagttcatagacacataacagcacctgactctgcttttttccttaaaaagcccgaaacctctttgcaaccaacaattccttggttaaaatcaaaactctgtttggtctcaaacactaaacacgtatactttctctcactctctcttccttaacggttacgaaagtgaaacaaaaatggtggcatcagacggtggcggtggagggagattgatgaagaaagttctgggcttggg

SEQ ID NO: 111529 - DNA, 263 bp, Glycine max
gaaaaccagcaataagaaaagctcaacttctgccttttctagtcagacagctccaaatttccttaataaaacagaaaatttagcagcaagcatacagcatggtcttgaaattatcgatagttaccaacgtaattcagctttgaggcagtcaccatataggttttcattacaaccaagaaaatctaaattaacttttccagctagcaaagttgatgtgggcctacagacttctcttgatgatattgttggagaagattctgttt

SEQ ID NO: 111530 - DNA, 152 bp, Glycine max
gccagttgccatccctggccccaacccctttcatttttaaattttttttgtctcccaaaacgcggtcgttctattgttcttcctctacaacggtgtttttagtttaacccagattaccgaattctgatcggatcatctctaaatcctagatg

SEQ ID NO: 111531 - DNA, 131 bp, Glycine max
ttcgttcattatttttctttacttggttatgtttttctaaattgtaagtagttgtactcaattttgatcatagtgaaatttgtttgttactatgcccgtggatgtaggtctatatgaccgaaccacgtaaa

SEQ ID NO: 111532 - DNA, 258 bp, Glycine max
ggtcaaattttccgtggccgctaaaaagggctatctcaattttttccttcttctcctctgcgttgcaagattcttggaaacccccaaattcttgtatttgattagaaaagattgtctgcatcatgcatcacatcatgatggttctcagtcaaaaaagctttggtcaaacagtttggccccgttgggagttttaaaaactgattccatgctccagctatcatatttgggttggttttttaataataaaaaattgataaa

SEQ ID NO: 111533 - DNA, 257 bp, Glycine max
caaacggtgacgttttgggtcaacttcttcttcttcttctccctctgcatctcagtccagtatcaaagtatttgcactctgacaaaagtgaaataggataatggctaagtttgttgagtctagacacctgattatcaaagatgaaaacttgaatcttcattccaaaaagactactaagtcgaagaattccaagacaaatggaaagaaaggcggttcagggactgcaggtcgaaaagctctaaatgatataacaaaca

SEQ ID NO: 111534 - DNA, 172 bp, Glycine max
ctctcgccagcctatagatgaccgaacaattttttagctcggccagttgaagtatgactatcggattgatgtatgagctgcaaattgtgcagatggttgtattcttagttttgacaaaggtagccattaacaagaaaaaaaaaagggggggccccccgattagaaccctctt

SEQ ID NO: 111535 - DNA, 215 bp, Glycine max
taaaactgtatcatttattaataacttttatcctatatatgacctccatatgtgtagttcagatacatggtttgccacatggtatccagagtctcaagagattcaaaagtggtgcctgtccactggactcactgtcttctgtcttttggtcaaaattcttctttatttttttaggcttccaccattctggctggtgaacccattggatgacacat

SEQ ID NO: 111536 - DNA, 256 bp, Glycine max
gtcctcaacgcgctacactgagtagattgctcttgtagcgcgttgaggccaaagttgacgttattattaccaccctcacccgctggtcatggatgtcattcctgtacacgagtcacctctgagtagattgctcttgtccgtagattgggtcccattcacaattattatgcaatcgggaccgtagatagggcaatcgctttgtcagtttgcttcgggaatcctaagcttatctattcctccatctcctcttcccctt

SEQ ID NO: 111537 - DNA, 170 bp, Glycine max
taaagaaccaaattatcactctattactgcactgccagagatgggagatgggtgcgcggttagagagcaccacggggatttcaaattacaataacaacaacaatgagaagaagaccaagaagacgaagagcaggggtggaagcaagaagaagatgacccacgagcaagtt

SEQ ID NO: 111538 - DNA, 106 bp, Glycine max
ttgagatttctctcaagttgtttccttatatcatccacctaattctgcgttaactatagttagacaaaccaaaactcgtgctggtaattatagtcaattttttagt

SEQ ID NO: 111539 - DNA, 159 bp, Glycine max
cgctcgcgagcctgttgatgcttgcgcagtttgttatctctgcccggtgccgtatgactatcggcttgatgcatgtgctgcaaattgtgcagatgcttgtattcttagtcttgaccaaggtatccattcacgagttcaagtccaagtgcggcgagcaca

SEQ ID NO: 111540 - DNA, 101 bp, Glycine max
gttagctacaccagggaaaactcccgatcctcactcagaatatggatggccaccactggcaacaacgatctagtgcaacgttaacctagcgttcagctgga

SEQ ID NO: 111541 - DNA, 163 bp, Glycine max
tcaacaatgagatgctgttttcttttccttttctgttcaaaataattggaagccatggtgggggttaggtgaaatttgtatgtgttaatgcactgcagtgcggtacgtaactgttggatcgcaccgtgtttagacaaactacataggaaattatacttgttgt

SEQ ID NO: 111542 - DNA, 191 bp, Glycine max
gtgagaagaagggagagaatggaggaaaaggcaaaagctgagcagaagaagataggtatgaccgagacttggttgaagaagcaccgtcttctttacaatggagccactagacaccctcttattattagcattcgcgatggcaccatcaacactgcttccttcaaaacatggctcgcacaggattacttgtt

SEQ ID NO: 111543 - DNA, 264 bp, Glycine max
tgaagacctcttggtgcaaggtgatcgtctgagggatgttctccaacaactacaggatgctgtttatttgacaaagacaaatatagtgcgctacaatgaagaagcaatcaagaaaatgaatggttctactcacatacttgctgaatcatcaagatctcagttgttagatagctctccaggtgatgtctctgcaaataaaatgaaaaaatctagtgagtcactatctctaagtgctgctgtccagatatagagatgccactacca

SEQ ID NO: 111544 - DNA, 252 bp, Glycine max
attttccagtacgccaaaacaatgaaagtagcttcttgggatttctttgtcgtctgatgatggggatgctatagagtttattcaagtcattctaatcatccatggagattctagcaaccaaaagctcacctgggttggaggtaccaaaccaggcaagaagaaggaggaggagatgaagttaattaatttctatctttctcttgtattatgatcaattgagaacatttttttctctccctttcatacttgaga

SEQ ID NO: 111545 - DNA, 256 bp, Glycine max
gttactgccaaagccataattacttgccagattcaagaatctggtcggaatctgctaagctctcctaaagtgtttgagcaaaataatgcaaagacaagactttcactggcttctgtgcacgaggacccaattccaagcgttgatggtaaaccctaacatgggatggttggagttccaaatctcactgtaactctccagtgcccttccttttcatatcaaaaatagagatttcttacatccaggaatctgtcaattt

SEQ ID NO: 111546 - DNA, 105 bp, Glycine max
aaaatcttgttatacctcgtattcctttatggaatattgaggaacgggtgaattttggggaagagaaaactttatgacaataattttttaagtgtgttgtggacc

SEQ ID NO: 111547 - DNA, 246 bp, Glycine max
aatatttttgtggagatatcactaatgatggactgatgtggatgttgcgggtcattaagaaaaatttaaaacctgcaaggtatccagatgcagcaaatgcagatgatgatgatgatgaagatgatgactttatcgatattgaagaagaagaaattgatcaagctgagacaggtgaaacaggtgagagtgatgggcagacagatgactctgagtcagtagttgaggtgaggagactgatcatggcca

SEQ ID NO: 111548 - DNA, 279 bp, Glycine max
  unsure (1)..(279): unsure at all n locations
gttgtatcagtaacttccatattccattaggaggggcagtgtaacagtatgactccataagtgcgtttgagctggatctctatttaatgagccagctgcattttttttagactgggctgacaaagaattgtctttcaaaattctggaccagcctgaagattatttcgtttccgagccaaactggctggtttgatgggataaaaactaccaaactcaccaagctttgtttccttcccccaagtgttaacgatatgtttttatattctaagntccataaat

SEQ ID NO: 111549 - DNA, 272 bp, Glycine max
ctcagagacagcattttttgctgataaccagaccattgatatcacacccttcttgaaacaaggaggttcaagcaacaagaagggagccattataggcggtgttgttggaggtgtaggtcttgttgtaatcctccttgcactatttggcttgcttagacggtataagatacccaagagggttcctagacgtgacatattgggagcaaccgagttgaaatgtccagttccctataggtacaaggatttgtaaactgcaacaaaaaatttcagtg

SEQ ID NO: 111550 - DNA, 213 bp, Glycine max
  unsure (1)..(213): unsure at all n locations
tgcatggatgctaacgcagtactagtggccattttattgctgaaagggtgaatttatggagaaggggcaccttaatctagataatntattaaccgcggagttgatttcgggcccggtacttgggggggtccccgttttcctaaaaggagtccgtttggggttttggggaaaaaagggcaaaagggtttccccggggaaatttttttccggccc

SEQ ID NO: 111551 - DNA, 265 bp, Glycine max
caatatccttagtttggaggatctgccagattctatgttagagaagttgaaatgcatccatgaagttttgactaagacacagaacagtcctactggttacagttttgaatatctatcaggaagtttctcgaggaatgctgattttatgaaatttatacagaatgctgtcttactttgtttaaccgtttttccacgtaattacatgtgcagaaaagctgttcttatttctgaagagctttatgttacaaaaatgaattcttctgga

SEQ ID NO: 111552 - DNA, 229 bp, Glycine max
tgtatctccagactgttaccagggaacacatgatggaccctttgttgctgactcttctcttggttttgtgcctaacgctattaattctcaattgtggccatatgaagaaatgatgaataacattaaggctgaaaatgtggagctaaatgctgatattgcatatatgagtaatggcatgccttcaagcactactgggtggatgccttgtcaggatagtcaacttatgtta

SEQ ID NO: 111553 - DNA, 269 bp, Glycine max
aacttccttaacaacctagtatttcagaccattcttcttgatcagaatccttattaatcatcaatcatgcagacttcacttcttcaaattgttggaactccagtaatctcagcaacatatgatcagcttcaaaagtcagttaacagatacttacctggtcctgccactcaatgtcaatattcaaccacaacatcaaagtccagtaaatatttgtctttcctttacacacaaacatcaatccgcgttcagacgtatttatatgtacctga

SEQ ID NO: 111554 - DNA, 262 bp, Glycine max
gacggcttcgcgtttgacttggctccgttggggtatcggattccgacgcactccggcggcgggacctatgcgattatcaacgctaccaccagcatcgacctccccgggaatcatgatgtcgcggtggcgttcgtcactttcatcggctccatcgactcgctcgacgaacctcgtcggcgtggacgagaactcccttacctctgctgcgtactgcaacttcgacatcgacgacaatctcggaaaggagtgctacaccttgatc

SEQ ID NO: 111555 - DNA, 188 bp, Glycine max
atggtggcagtgtgtttgttctcatcaaagagggaagctctcttttgacaagataaacaagtgcactttggtgctcaatatatggtttgtgtttataaataagtaaagggtgtgaattatatacaacgattctgaagttacatgtgtagaacagtttgttaatgccctgttgcgaattgttggttgtt

SEQ ID NO: 111556 - DNA, 265 bp, Glycine max
cgagcagttattgtgggtagaagcgatcagtcatggatacgctactatgatcgtcgtacaccacctccgctcacgagtctcactcgattcgtgtctggaactgcatcttccgatttctctacgacggcacgttcggactctgactggcatcggcactcctcaaatgccagcgagcatgctaagccctcaccgtaaacctcttccactcgcttactcgctgtcgtccaggcatagcacaattttccatcgctggcgccgtcatcag

SEQ ID NO: 111557 - DNA, 225 bp, Glycine max
gaatcagcaaagcaaagaccacacaaggagaggaagcagacacgacgttgcctgatcacgaagttgggttgtagatgggggtgccgttcacgaacctgcgcagcagactcactgcgaagatggagacacgtaggcatatggcaagcccagactgcgcagggaagagtatcagcctcaaaggactccagctaggcgagatagacacaattatccactacactggga

SEQ ID NO: 111558 - DNA, 243 bp, Glycine max
cggattacaagtcgattgctctattataatcaagtaatcatgactacgctcagttgttcatctgaatgagatagttagcaatattcgatgaaccagtaaaaaaagactaaaaaatctgttatgatttaattaagaaaattaaaatagatgatccacattgaaagtgatgcatcatttcaggatcagaagattagtatacccgtgataacgtgtatctgtatgaccagttgaatgatgaaaatg

SEQ ID NO: 111559 - DNA, 250 bp, Glycine max
attgggatttggctgtgtggttctcagtggttgccacctgtacttatttggtggaagagatccactgaagggatctatgagacgtgttattttctacaatgcccgtactaataagtggcatagagcacagatatgctgcggaaacgtcatctgtttggttcttgtgtaataaataactgtctctatgttgctggtggggagtgtgaaggaattcaaagaactcttcgatctgctgaagtttatgacccca

SEQ ID NO: 111560 - DNA, 246 bp, Glycine max
aggttacggatgaccttgcatcatgttctgttctgttctgtgctgtctttttttttcatcttcgactgtatgcctgccttttaggttagcctctgtacaatctgtagttgagagttgagacatcgaattgatatttctagttatttgtgcttatggactcgatttgctttgccttctgggtttaaaactgcttgccatttgggtatgaatttgcctgcttcctgcgtgtactgctaataaatacta

SEQ ID NO: 111561 - DNA, 113 bp, Glycine max
catgtacttccctacaatctgtgccaacaataactcatggcgtggtatactcgccactacgatcgatcaggtccgaaggttcatcgagtatgagcgacgttgagaagccaacc

SEQ ID NO: 111562 - DNA, 152 bp, Glycine max
atgaaggagtcagtagtagggcttgaacccaataagaaagagtgtaggtgccgcggtgcaagcgacaatggcaatcctggtaattcaatgagacacgaggggtctttgattttgtcgttgatgtattcaccgtggtcgtgaaagtagtaata

SEQ ID NO: 111563 - DNA, 121 bp, Glycine max
accatctaaaacctcgcgtagtaaaaatccaaagatgttcctgttccaaaagggttctcatcttcatcgactccttctgtcatggaagtactactaccattttccgcttccacacaacata

SEQ ID NO: 111564 - DNA, 224 bp, Glycine max
gttgaatagcaataataatgatggtcatgctttgccttggcatcagtctcttccaatgccatatgtacaagctcccagtgctaatggaagttcattagagaatgcaagaatgggtcctcagagatatcatgatacagctggcagcagaagtggccacagatttcctcatcctcctcttgtcaacccacactatcatagctttcatcatcaaacacagcctgtgc

SEQ ID NO: 111565 - DNA, 264 bp, Glycine max
tgaatatctagaagcttccttgccttttcttgtaagcatggtatggcagagagtatctagaagcttccttgccttttcttgtaagcatgactgctgacgaattgtctcaaagttcgaggtgtgtgattgcctttcttagtaattcccaaatttaggtgacaaaccttcaacttgcaaccctcgagtgatagcaaaggcaacttgtgaggtcatgtatttgtttaggacttctattcactggaatgatagaaaagtagggcagca

SEQ ID NO: 111566 - DNA, 230 bp, Glycine max
aacaaattctagtcatatcatatatccttcaacctctcatcattaggcattcagcaaccaagagcacacactgggcacaatcatgctagtctacggtagcctcattaggttatgctgtttcacaatcgatatctatgccttctcacctcactggattgaccaatgcccatgccacttgtaacacgggtagtcatgcttcaggtactattgggggagcccttgactatggg

SEQ ID NO: 111567 - DNA, 258 bp, Glycine max
tggaaaatgccttcatttgtcatttacaagaccattggttttgtatccgcaaagtgaatggggagtggtataatcttgacagtctctatgcagccccacagcacctttctcaagttttacctctctgcgtatcttgactctttgaaaggctttgggttgagcatattcctggttagatgacattttccaaaagagtgccccatctcctcatctgaagcgtctaatggatgtgggcagtggctttcatcagcagatgct

SEQ ID NO: 111568 - DNA, 265 bp, Glycine max
aacattcagaaaaacttgtgttagtttaggaggtgctctctgtcaaggacgagtttacttctcactttggtcgaaagaaggagtcttctgtgtcttgcagtgtctctagccgacgcaaaggttcattctaatcatgggagattctgatcaactctccaaatctgccaaaaaccagaaaactgaacaagtttatcagccaaattgacaagcacccatatcttctacggacaagccactcacaccccaaattcgaagtaatggcatt

SEQ ID NO: 111569 - DNA, 105 bp, Glycine max
ctcgagccgctgcaattcactctgtacaattcttcgttcgttctctgcagttatatcctttttgagcttcaatggcggacgctgaaaccttcgctttccaggctg

SEQ ID NO: 111570 - DNA, 251 bp, Glycine max
ctccttcgcccctcacagactcgaaacgccatcaaaacgacgccgtacccccatccgccaccttcgaaccctagtttctttttctccttcgagagagtaccgaagatggtggctacaccgggttcggttccggacttcgaggcgctgcgggagctcttcaagcatcacatagagtccttcgattacatggtcgatgctggattagataccatgctcggacacatcaaacccgtcgaagttttcgatgattt

SEQ ID NO: 111571 - DNA, 256 bp, Glycine max
ctttctccacctactccttcccttagcttcatgcatcaaaacaaagcaggtttatgtagttgagttgtttggagatcacactagtgatgacaaaacactgcatgaagttgagaatagccatcactcttatttgctttcggtgaaagaaactgaggaggaagcccgagcttcccttctttatagttacaagcacagtatcaatggctttgcagcattgcttaccccaagagaagctaaaatggagggatggtctttg

SEQ ID NO: 111572 - DNA, 254 bp, Glycine max
aatctttctgtgtgttatggggtacacatctcattgtcattaatttgttcatattcataatgtcctatctttgtatttacattatgaattcatgtttctgcaattagtagttgaggagattgccttgattgtttatcataactgaaacttggaaattgtacgaggttacttctaggactgaaattcaaattaatttatgtttctagttagtcctcaggatggttggaaggatattaggagatttagggcctgtt

SEQ ID NO: 111573 - DNA, 218 bp, Glycine max
  unsure (1)..(218): unsure at all n locations
cacaaaacttccacacgagagaaaatacaagnantaagactacaaatcnncaanatcccaatggcgtcgcggcaacaaaaagaggaccgagctgacgcagccgcgaaagtggcagcgcaagagcgcgaacaaccaaccgacagaaagaccgagattccagggtaggcgtagcagaccagcatcagcaagtcggacacccgaaagaacaacgaaagcgt

SEQ ID NO: 111574 - DNA, 171 bp, Glycine max
gaaggtctaaccggtctaatgagacaagcagtaagtaagagcttttctctgaatttttggttgacaaagacagtgtaccagtaagcattcttcaatatgttgatgatacagtatttttcggggagcctaccatgcaaatgtcagggtcatcaaaccgatcttgaggggatt

SEQ ID NO: 111575 - DNA, 122 bp, Glycine max
cagtctttaacactcggagattctctccttttcaaatttcagaccttttcccccaaaactaacagagacctcttctgggtcactctctgtaatcgcaatcgtgcatgggtcgtcttcactga

SEQ ID NO: 111576 - DNA, 103 bp, Glycine max
  unsure (1)..(103): unsure at all n locations
ctcgagccgatcggatggtaggccagatgaggaagttgcatctcgagtgctggacacatcatatggcacgaaatgattcacacacggncgatggatgccaggg

SEQ ID NO: 111577 - DNA, 239 bp, Glycine max
agaagatgatgaggaaacattggtagaagaaattgaagagagagagagagagagagagagagagagagagggttagattggttttcttcttccttttctctagagagtatctgatctcaatcctcattacagattcttcattcctctctgagtcttttctgttttccccctttgacatcctcgttttcgccgaaacaaaaacaactaagattttgtgtgtgtgatgtttatcttctcct

SEQ ID NO: 111578 - DNA, 254 bp, Glycine max
ggctgcagcaaggggcctgtcggttcgtccccacggtatgcagtggacaatgggaatgcagacggagcaaagaaggaagcaaatgacattcctccaagtgattcaattgatgccaagaaaggccaaacaatgcctgtgcaagaacaggaacatgctccagttggatcacattctccggttggactaggcaagggcttgtcatcattggatgctaagaaacaaaaatcgaaaccaaaggctggggcttgaaattt

SEQ ID NO: 111579 - DNA, 257 bp, Glycine max
cgacaaaggttgcatgcatctgcatccctaaaaatcatgttaactgcatagatttcctacatctaatgtccaaatcttgtggatttgggatgaccggccctctcgatgagtcgatctcttgctttctcataagggtggacccttgggtacttgtacctatcacttttagaggactacacgtcctcgccaacagagggctgcacgccctcaccttcagaggactacatgtcctcgccttgacagggctacacgccctc

SEQ ID NO: 111580 - DNA, 255 bp, Glycine max
acgagaacgaggtagtagaccactagatgaatagatagattcatggcggcaacccaatcaccgcagggtccggatcgtaccatcgaagagatagcggccgaaccagataacttgaagaatgaaagtacaaaactataggtcattcaagggagaccacaagtcaatcaggatctttaggttcagttggagattgtcctctgtatcctcctaatgtgtatgctccccaagcccaggcttagttatatagaggttttg

SEQ ID NO: 111581 - DNA, 228 bp, Glycine max
tgatgggtttgatcagagttgcttgattcaggggtcggtgtacaaaggcgtgaattgatgggtctgtctttgccatcaggaagatgaagtggaatgcctatgaggaactcaagatcttgcagaatctaaaccatgggaatctagtgaagttggagggattttgcatagacccagaagaagcagattgctatctagtcctatgatatgtagagactggatctctatact

SEQ ID NO: 111582 - DNA, 190 bp, Glycine max
gatttaatataaaaacaaagataacctaaaaagctatagaaccaggatgtagatcctgcaacagcgtcagcatgactggatcatttaaagtagaagggaaaatttgcctccaaaagtgagaccttgattgggccggcgaatgatggagttgcagatgttgagaagtgtaagacagaggtagagagagaga

SEQ ID NO: 111583 - DNA, 215 bp, Glycine max
cacaatggttctgaattgcttccagcagataaggtggtaggggtatcggctgatcaagttaatgtgattgaaaatatcagtaatcaccttgatgagaaagggcggtggagtcggtgcagagtggccaaagttagtcttttgatctgcccattttggtttttagctcaactcacttttaacctgtcattgaagtatactacagtcataattgtaag

SEQ ID NO: 111584 - DNA, 185 bp, Glycine max
taaggttcttctatggtgtggatcacgaagctcaaacctcttgaggcacttacacaagggattctcgccagcaatatgctcattacctgttccgggttatatgcagaggctgcaagatatggttttacagctgtggacaggccagaagggttcttagttttggccattgcttctctaggaattga

SEQ ID NO: 111585 - DNA, 204 bp, Glycine max
caatggctcatgcttgcaatacatcttcacaatttccttatggacaaggaatgacagaggtttatcctgagcaagaaaggattgtattaacaaagtttagagattttctcaatcgggttatcaccatgggagaaataaacgaaacaaagtgttcttcgttgaccagaaatgaattagagagtcaaaaggacccaatccattgga

SEQ ID NO: 111586 - DNA, 204 bp, Glycine max
tgacaaggtaataatactattattaatacatgctagttttagttaatactataggtttatgttgtgagagaggggttgtgtctaacgtgcgccggggagggtagaagcgtaaaccgggtccacgagatctggtcctgagtgtgagacggtccactcaatgtgaccggtataaatgggagtaaaagaatgtggttcaaatcccaa

SEQ ID NO: 111587 - DNA, 178 bp, Glycine max
tgcaatttcggagtttagagttaatttagaaattcaatgctacaactaagaggttactagttactgctataatttctgttatgaatttaattgatttgaattttaagaatgtcttgttgtaatactatatatagtaataataatgtgtagctgcatgatgtttattctaataagaagg

SEQ ID NO: 111588 - DNA, 201 bp, Glycine max
cagaaggaagaagagccaaaattcaaagccttcacgggaaagaagtattcattaaaaagttgatccttgatgggctatttttgtgttgttttttcttttgatttacggaatattagttgagacaacattggttggatcttaatccatattccactcttgcatattcatgttttttttatgtcatatatattcgttagattt

SEQ ID NO: 111589 - DNA, 264 bp, Glycine max
gtgtaacttttcaacagatttcctttactggaagctctgcaactggaagcaggattatgacagctgcagcacagctaacgaaggtatttttaagcagtattatctgcaaattatgtacaatttatattgtcattctgctttaaaagatataatagaggatactaagtaacaagcataagatgaaatgatagaaatcctttttatttttcctttcatattttcattctcttttctttgtgagatcgtgtaatatccaatttgggg

SEQ ID NO: 111590 - DNA, 261 bp, Glycine max
atctgagcccaatgagaaccacctgattctgttgatgacttgtactgtggattgattaatcggaacgcataacataatttggtggatggaattcgtatgaaagagcaagatggaacttctttcctgtttgatgctgcgagatcagatccatttttgtccttggttagttataatgttaaccggtgaccactaaagtcatggaatcacacacacatttgatatcatttcttgattatagatagattcgtgcacagttaagtc

SEQ ID NO: 111591 - DNA, 259 bp, Glycine max
ctcgagcctaccaattgctagatcagattcaatatttatgacctttgagagtggaatgaagcatctagttactgtgtgtatcaaaaggactgaattcttttccttgtaatgttgtcttccttctactcatattgtcaaaacaaaacattacaaattgtaatttttggatacaggttggatttcatgcagaatattcctatgctaggagtgtggctcattttagtgcatctctaggtcctattgcttggaaaattgcttc

SEQ ID NO: 111592 - DNA, 248 bp, Glycine max
ataaatgtcctggtcccaaaaatgtggaatcaagtttttcattcatgaatcttttgaatgggagtaaaaagcaggagtccaaacccaagtcaagcgcaaccacatcatctaaatggactacaagctttcttaatgcggcttctaacattcgagcttcggctgaggctggtgtctcaaagttgagtgcctggcagacagcaaggggtggggtgggtcagagccatagcagtggtccagtggagcaatgc

SEQ ID NO: 111593 - DNA, 257 bp, Glycine max
ctttaaactgcgatctctctacgtccttgcttttccttctctcgcgcgattatcgctgtttttcccgaacaagagagcatggccgtagctgatcccaagcctcactccgaacctaaggtctggaacttcttcaccatcttgatcatcaacataaccaccaccaccaccaagacgaccaccacaaccctaataatctccccctcgagggttcaacttcacaaacatcaaattcagtatcatccgtcgcgagatctctt

SEQ ID NO: 111594 - DNA, 256 bp, Glycine max
aaaatattttggtatatatcttctcaacaattcaataatgacagatggagaagcggtcttactcaattgttgagaagatatatacaaaatattttggtaaaaaattacagggaataaaaaaattgtataaggtataatacttttaatgaaagatataagaagatattttattgttattatttagtcattgagtaaatttttttttaagaaatatataaggacctcttacaatagtgcaaatagcatttcacatttg

SEQ ID NO: 111595 - DNA, 254 bp, Glycine max
gataatattagtcatatgagtttttaaattctagactaaagtgagttacatattaaattttcaagatatttttaaattctggactaatatatatgtactacacatcaatttttttatactaacaaaattatttattgtcatgctagtcactgagtttttttattgtattgtttatgtattcagcctatgattatgaatgaactaatgagatctttccttaaaaaaccaaaattatttactaatattgatagtat

SEQ ID NO: 111596 - DNA, 256 bp, Glycine max
gaacaaccaccagagcttccatctgatatgcggccaggtgctatctctagggaccaaccaaggacactatagatagaggttgtggatctgttctttctgtgagtaacgtaacatgcaatagatattttatgaatagagagagttaaaagagttgaagaaagattgttgttcaatttgaaaaatttgcccatcaagtaccctttttctgttttcattttttggttggtcgtgcttcctatttcgaaccctgctcttg

SEQ ID NO: 111597 - DNA, 233 bp, Glycine max
  unsure (1)..(233): unsure at all n locations
tgaagctgctatagatgaagttgaacatatgtctcaggccctttgtttcttcctttgaaagattttctgctactaccctccatgttaacaaaatagacaatctattagtctggtatatattattctctacctccttatatgtgtcttaccaagcaagtgtaacacgatttttattccaaaattttcacttaactttccacataacatacgacccatagnaagggggatgtgct

SEQ ID NO: 111598 - DNA, 248 bp, Glycine max
ggaagatatcgtaaaagctaaagtgtgcatgtgtctctttgaagctattgtttcttatattgttatttctaatccaaaatttgaatttatgtaacttaattttctgtgaataggtgcgaacggtggttcctgcggccacttcttttcgtgaggattgtgctcggattctacgtgcaattagaattgctgctcgcttggggtttagtatttcaagggaaacagctcaatctgttaaaaatctttcatat

SEQ ID NO: 111599 - DNA, 239 bp, Glycine max
gttaggttcatttgtcagtgctgtcagagacccttattgtgtttcagttttgatggttatagtaaatcgttgggtacttctaatgtgacaaatttataaaatagtgaattgtagtgtattactggatttacaatatatgataaggtttctgtggtggttttataaaggggaggtacacagataaatgtttttttttaaaaaaagaaaaaaaaaaaaaaagaaaaaaaaacaaaatatga

SEQ ID NO: 111600 - DNA, 246 bp, Glycine max
gtcgatacacaaacccaggattcaaccatcttaatgttggtaacccaaacagcatttcccatcacagtcaccctcatccgctaatggaactctcttcctcctttctactctccccaaaaccatgctcatccccgccacctaacttctctttctcatcctcccttcccccatttccaattcaactcttgatcagaaacggaaactccaaattcccccagaccccccctttccgaattatcgcggtgg

SEQ ID NO: 111601 - DNA, 253 bp, Glycine max
atagtctttaataatcaagatagtttattattctttgtcttttctggttgtttccagccttaattccattgcttcaagcacagttttgagtattaggacaggacaatgtgtatgtgaaatacactacaatattgtcatttgatttgcatctaaagtgagattgtttccttcttgtggactttgctgtattggaaagaggctgcttgctaagaatcaagctttataaacaattgtgattaggcagaagctattc

SEQ ID NO: 111602 - DNA, 213 bp, Glycine max
aacaaaaccctgcctcccttcttcactctttggcttcaccgttcggtcacagaacacatttttgaattgaagagaattggaaagcaagaaagcaagtaagtaacaatggcgactcgcgacggcggcatgaagtcgacgtcaataaacggcgttaagatgtacacgatagcgtcgcagcaaccgtcactcgcttcatggcttccacacaacata

SEQ ID NO: 111603 - DNA, 261 bp, Glycine max
gttacttaatgaaaagttgcatggtgaagcaagaagagtgaagtcactggagagggagagtgaccggctccggtcagagatttcattattagaggcaaagtttgactatctacatgctgtttttccttctatagttgggtcatggtgatttttccgctgctaatacaaaagttctgcggatggtgaatacacttactgtcgataatgaggccaaacaaaccatagaggcactgcaaactgagcttcaaaaaacgaaagaga

SEQ ID NO: 111604 - DNA, 257 bp, Glycine max
attacactgaatcgaatcgaatcgaatcgactcgctgaatcccaatgtcgcagcaattagggttcgcgatcgagctatacctagaccctgcgttggagaatcaggttctgaaagcatggaacgttcttgcgagaagacaaatcagcacgcacctgatagaaatggagtctcggccacacataaccctattctcggcgccatttctagaaccttcgaagctcgaatctctcctgaaaggcttcgcatcgaagcacgat

SEQ ID NO: 111605 - DNA, 134 bp, Glycine max
ggctgggaccacaaatacgatagaatgttctatattacttcctgataggctgggaccactatatagtgatgtcaattttataaatattatgaacattacatgggaatttactctctaattccttccacacaaca

SEQ ID NO: 111606 - DNA, 250 bp, Glycine max
ctttagttgcttttatgtgttgctggtaccatttaaggtgatgttttgagccacaggactaacaagataatttgcactaatcgctcagctttgaagacacaaactccaacagttaaaaataaatattgaaattatttatttttcactaaatgggttttttttcaagcttaaaataaatgtaaaaaagatgttgacacttttcagcgtgatcattctaaaattatgcaccaatatcatggtggtggttgga

SEQ ID NO: 111607 - DNA, 260 bp, Glycine max
atcctatcagagcagagcttataaaagttgaacacatgggtttggctgcacggatttcgttgataatttgcgtggctatttactttgctattggtttctttgggtaccttttatttggggactccatcatgccagatgtgctggtgaactttgaccaaaactcccatacaagtactggtcgattactcaatgccattgttcggttaagttatgcactccatcttgcacttgtgttcccaatcatgaactattccctgagg

SEQ ID NO: 111608 - DNA, 100 bp, Glycine max
aataatggtaacatcaaaggctcatcgagcacttgtagccagccccggcatggggcacctcattcccatgctggagctaggcaaacgcctcctcactcac

SEQ ID NO: 111609 - DNA, 270 bp, Glycine max
gcagatcaatccactcatcctcctcaacagttgaggagcatgtataacattcacaatgctcactatcagccctatccaccagcatctgctccttctggcaatccttctcaagtggtatctggcagttctcatatccaagatactgctgccagcatgcagcagcaaggtgctgtttcatcaagacacatgcctaatttcatgatgcctactcaaagtggacaggtagctgtatccccccatgccagtcagaattatcaagttgaggtctcc

SEQ ID NO: 111610 - DNA, 196 bp, Glycine max
cttgtttcatgactctttggtacacttaacagaagatgccaaattatctgaattgtgtcattaggcagagaaagttggatccggatttgctgcagatagggaaaacacacattcaccaaacaattctaattaattgattgcgtgaatgtgtgttttccctatctgcatgaaatcaattaattagaattgtttggtg

SEQ ID NO: 111611 - DNA, 163 bp, Glycine max
cgcgtacgtcggcactcggctcgaggctatgcttatctatcagaccttcattgacaagttctgttataatgcgaagagggcatcacttgttcaatctagaatcaaggctttggatcgaatgggccatgtggatgaaattgttaatgatcctgactacaaattt

SEQ ID NO: 111612 - DNA, 260 bp, Glycine max
ctcagcaatcaaagtatcaaactagttaagctcttgatgcaaccaacagtaatgtgaaatctaaggaggaaaataatgtgcctgcggaaaaaacttccttgtggattggaagtagtggtaaagcctctacggaaccaaagtatgaccttatgcagagcaaagaacctagggaacttgatcggcagtttaaatttaatgcttcatctcttaaagagaacttgacagataatgtcttgtcaagaactgatgagaatgtgaat

SEQ ID NO: 111613 - DNA, 142 bp, Glycine max
aagaatttggaaaaaattgtttctttaaataaaaaaaaggaaaatgttagcgtgaactgtgaactgtgagtgtttgttcctggattttgaatactgccactctttcacggtgaaattcaagctctttttccacacaacatac

SEQ ID NO: 111614 - DNA, 258 bp, Glycine max
taatattactgtagccattacctggtttagtgaagtgtgatcattataatattgcagggattctattatttcaatattttttgtttacatcaaattttagctctgatttggtacaggaagcatgctgagaatgatacttctgttcctgatgctgcaaataaagctgaaaattttgctcaaaggtgggtctcttactacctcctttttttggtccactttgagaggtttgttgcatgacaacgacctatatatatatat

SEQ ID NO: 111615 - DNA, 258 bp, Glycine max
tctagatggtctgttatacttcccttaagttgggtcaaagccttctggattccgctcatctctaatggggcacatgcaataggtttgcaagagaagaactggatttcatgtgaaatggggctaccatttttcccttcagatttcccagattgtaaggcatactcttgcttaatggaagccaaagctgctgcatttaataaaaaagcagaactctgtcctcttgtgacaaggcatttaagagttcccatactgcctcca

SEQ ID NO: 111616 - DNA, 278 bp, Glycine max
aaacgcatggcccaggagcgtttagcaatcagtcttctgtcagagcggcttctttgtgtgctgaatcttttgacgtgggcttatgtggttcttctaatttgttggatcataatcggtgcaatgataactggcagaatgcagctcaattgtctaaatttcctgccaattccttgccactttgtgaggctgtcagcaatgaccaactgcctcccactagcatcaatgattcgaactcaagtactcatattggcaacaacagtccagttgatttttcttct

SEQ ID NO: 111617 - DNA, 209 bp, Glycine max
actggctctccaactctcggtctctctatcttttttcacaaaatattgatggtgtttgtgatcgtggttatactggtgtgatttttgcagtccatcatcacgtggggccgttggagcttgttgttgtaaaaagatcattttttcatcatgctttctctgcatccctgactagctctccatctctcaatctccccaacatcatgcacaaa

SEQ ID NO: 111618 - DNA, 110 bp, Glycine max
ctatgatctacccatgaattacatatagaaactgggcttaattaacattgaatctctcagaatatacacctctcttggtgtttgtccctagaaaaaatagtcgttggttt

SEQ ID NO: 111619 - DNA, 237 bp, Glycine max
  unsure (1)..(237): unsure at all n locations
cccaatatcagaagcgtcttcaaaaggttcaaaaactcgaaacattaataagtcgcggtcgcacgatcaccgcaagaaggttcctcagatcccttcttcgtaccaaaaccgacttcatctcatatatcgaacatcacgcatacgacatctctcccatcntttcggacaatttcattttgcacatnttcgatatcaaaattcatgtcgaagccaccgacttgttctcaccatcgaaaa

SEQ ID NO: 111620 - DNA, 263 bp, Glycine max
aagaaaatagaagccttattttgctctctgttctttctctcaacaatcgttccaacaaatcaagcttcatttctaccactcagaatatcatggatactaagtttgcacgaaggactgagcgcattggtagaacaacatgctcttattggagagctggaagatgtaacagaaatccttgcagatttttgcacatagagacaccatctccacctgctgcttgtggttatggcaatactgcatatagctacggaaaaaagccccat

SEQ ID NO: 111621 - DNA, 251 bp, Glycine max
tagacatgccattgacaaagaccaatttgatcaggaaaaggtgcatgacgtgagaagaaaaaaacatattgcaatcaatgatcctttagtttttaatgaccgggaaaatcatgaagtccaaggaagttctgctatagatatgcatagcattagcaaaggattgactcacatgcctaagacatccaatgatgagatattgttatctgcaagtgcaggacagtctggtgatggttggtctggagatgatgtac

SEQ ID NO: 111622 - DNA, 247 bp, Glycine max
tggcacccaacctaccccggggacagaagaaattgtccaatttatgatggtaaactcatttctctcagagtcttacgagtcctggctgcagcatcgtcgtgcttttctgcagcgcggaatttaccatgcctacatgcagcacacacattctcggtctgctatccgtgcaccatcggttacagctcctgcacacggtgtggaatctggaagcatgggccaaagtgctacaacagaaacagggcagagt

SEQ ID NO: 111623 - DNA, 262 bp, Glycine max
tgcagaaagaaaagaccatcaaagtttcacttcagccttatccggtttagggtttcggtttttgacccaacctttgacgtatcgaaaccttaagtttcggatcaggtctgagcaatctggttggtagaactttggtcttagagagtcaagttttatgtctgaattagacgatcaaattcctactgccttcgatccttttgctgatgcaaatgctgatgactcgggtgctgggtcaaaggagtatgtgcatattcgcgtacag

SEQ ID NO: 111624 - DNA, 260 bp, Glycine max
gaaattcccctatatgttttgccagccttgtctttaatcaaccttgattcaccactatcgtcatacactgatctgcaacatgtactatttgaagaggaacaaaatgcatataatcaagccatctacaaaatatgagggatgggaaagtgcatccactgactttcatacaccacacttcaacttatcaggcttccttgtgcaagctgattgaatattggtcagagcaaaatgtccaatttttgttcctccttattttcttt

SEQ ID NO: 111625 - DNA, 108 bp, Glycine max
ctctgcttgtctccgttcgctttcgcttttcgtgtcgccgccggtaaggcaattcgatacctctgaggccaaaccagacgcagccatcgttttggggcgaaaaagtgt

SEQ ID NO: 111626 - DNA, 266 bp, Glycine max
caacgcaaggcaaggctgttctttcttctttgttacaactctaattttccattccaattgcaatctctaaacgttgattttataataaatttgctcctctgcaatcaggaattatgtcttttggatggaattgcaagcacccggacatgatttacatggtgtttattggtccacctgtgatggaaacaacttcaacaatggcaaccggaaacgaagcaggatcagctattatcatgggaattctaacattcataataattactggg

SEQ ID NO: 111627 - DNA, 242 bp, Glycine max
ctcagtcaccgttgtatcatccctcgtgtcactgcggtgatggaggaaagttcggttgggtgaggactctccggcgagtgggtgaggatgatgatacgaagtggtggaatttttgtgtggtgatatgcttcaaatctcgccgcggatgaagcacgctgcggcggaggatttggttccggcaaccaccacgacgacaacgaagaagaaggcaaagaataagaaaaacaagaaggatttggtga

SEQ ID NO: 111628 - DNA, 259 bp, Glycine max
atttagtaatgcaggttgctaacagactattgatcaaaggattggcaggcatgttggatggaagttgtgagttattagcagtagggaatgtgcagtatttgttatttatggctgattgtagaagaccttatctttttcaaagccttgactaagattggagactgtaaagagatttcaattacaagtggttagactgtggaacataaggtgtgaattgtgattggatataatagcaatagtaactatacatttgctctga

SEQ ID NO: 111629 - DNA, 274 bp, Glycine max
caagacgcaaacccggaaccctaaccttggggacaggcaaccaacaatggcgtcgtcgtcggcggcaaagcgatgccactacgaagtcctcggcctcccccgtgattgcgccaccgacctcttctccttcttttccaacaccgtctattccggctacaccaacaccgcaaagggattctacaaggtctattccgatgtattcgataaaatccacgccaacgagatcaatttcgcgcgcaaattggggcttgactctgatgcggttagacaggcg

SEQ ID NO: 111630 - DNA, 141 bp, Glycine max
atgtttataggaatagccataggattgaatatcatccacatggcttgctagcatatttgcctcacacctccctaaaaatgttcacgcttgggcggcttgtatagttacttatttggataactcccgacaagacactcagcc

SEQ ID NO: 111631 - DNA, 274 bp, Glycine max
ctggggaacagaatgaactgtctctggtaaagctggtgctggcatggcaacatccagaactgacaccatattctggatgttgccatgccagcaacgcttaactgtggaacagaatgaactgtctctgttagagattttgcagccgttgaccccacaaatagcagaggatgttgaagacatggtggctattgaacacatgactgtccatggagctcttgcatcagaaggtcatcgtgcttcagttggtgaggtaaaggataccgttgatgctgct

SEQ ID NO: 111632 - DNA, 278 bp, Glycine max
ttctaccatgaagctgccatatgcatgcaaactcatgattcaggaactccaatcaatgagtattgttccccgcttaaaactggctgatgcgtgagtttatttgatgatccaattctgggaaatgcatatgctactgtttggtcaattacaaggcagaaaaattgccattggccactgttgatgaatttctactgattctttgtatattagcctcttcaattttgctcaaccctccccctccttttcacctccttagaaaaaattgtaaaacttaggga

SEQ ID NO: 111633 - DNA, 120 bp, Glycine max
ggcatactagggaacagggttggtagacgatcacggattaggcctcctgggagagccaatcagcacgttggcataccactgccaatgatgggatcaccctatggcactcttggtatgcct

SEQ ID NO: 111634 - DNA, 254 bp, Glycine max
gcaaaaaactattttcgggtaattggaaagccggaacattggaagaaggatgctgcaaaatacctgaactgtagcttgttgtactgattgttcatctacttgggcataccaattggggcaaacccaaggcgttgagttgtgggatcctatcattaacaagtgtgagagaaagctagcaaaatggaatcaaagacacatttcttttggggaaagagtgacccttataaagtcagtcttaacatctatccctattt

SEQ ID NO: 111635 - DNA, 164 bp, Glycine max
taacaaaccaacgcagttaagagacacgcaataccgaagaaccagaaacaacaccagagaactaaacacttgcttgcacgttctcttcccagcgatctcttctccttttccttcttcttcctcttatgctcaatcctgcaccctgcactttcttattattcact

SEQ ID NO: 111636 - DNA, 248 bp, Glycine max
cagcgtcaagaaagagaaatggcaaagtttgctcaaattgctgatgctcagaagcagcaacggcttcaactgcaacaagagtctggatcagcaacagttccatcggaatctaaaactgctactgcacttacggatcaggagcagcgaaatactttgaagtttgggttttcttctaaaggcagtggttccaagattacatttggtgccaagaagcaaaatgttgcaaagaagcaaaatgttccgatctc

SEQ ID NO: 111637 - DNA, 263 bp, Glycine max
cttattctttaaaaaatatttttttcatttatgtattgaattgtagtcaattttcatgttacaaatttgtgctgtgggactttaagtttgactttgttggttttgctgtaactcattttcttgtaaaaagaaaagcagagaaacatgtgttaaaactttatgtttaaaaaagcatcattgggtgtgttctgatctggatcactgttattgtgggaattcaggaaagttagggatttatattgttgtttttcatatatttgttc

SEQ ID NO: 111638 - DNA, 130 bp, Glycine max
aaacgacacacaacaacgctgagcgcagacaggggaaaaggggattagggtttaggaagcagcgacaacaatggatttcacagtggagaagaaggaatcagagaacaacgccgaaaatgttcacccaaca

SEQ ID NO: 111639 - DNA, 169 bp, Glycine max
  unsure (1)..(169): unsure at all n locations
cacaaaccaaaaccatgtgtgcgccttttccactgcctctggtttactananaaantaatagtctagngnctgngnnnnccattattgtctgaatctcacactatatattatcgaaaaaatgcaccccatattcattcatcttcaactcatcattaaatattctccata

SEQ ID NO: 111640 - DNA, 265 bp, Glycine max
aagaatgtacttcaggtttcgaaacatgatgcactgttgaatttattgtagttttgttgtgtagtgaaatgacagtgatgagtgttgaaggcatgcactcactagatgctgaagttgctgatgcatatacatgtgaaagagaaatgaaataagagatgtgctggaacagttaacgagaagaagtgagaatcaggagaagctaagctagggattatgatctatgtgtctgtctatgtcgctcttgctagccaggagaaacagatac

SEQ ID NO: 111641 - DNA, 149 bp, Glycine max
aaattatcacactcttgtttggacttgacgaggaaagctatgcaggcgtgatccgtttacaattgcagtgacttagatgtctttgacggtggtgcaccttccagttaatcaggagttcgataagtgttgtgacatgagatgaaatagtg

SEQ ID NO: 111642 - DNA, 112 bp, Glycine max
catggaaagatcacgttggcttgaaatggccaatggccacccctattgggaagagcggcatcgtcgttagatcttactctgagagaagacctcaatttgtatgccaatgttc

SEQ ID NO: 111643 - DNA, 107 bp, Glycine max
tcgatctctctatgagtcatacttgtgagtattgagtagctcattgtcaaaagtgtgactcatagagagatcaatgcagttatatagactatacccattccagtata

SEQ ID NO: 111644 - DNA, 252 bp, Glycine max
cacagaacaacccactctctctctctctctgttattttcttgcagcaccttcattgtcactcagacttgtatccctaatgtaaatatcattttccacccttttcaatatatctccttaaacctcaaatgctattattattcactgtccacacctctttccttcaacttcaacctctacctcaacctcaacccccacttaccagttttcccaaattttcgttcttttttcctttccatgagttgatgcatctt

SEQ ID NO: 111645 - DNA, 247 bp, Glycine max
gcttcgtctctttcatcgcctacgcttcatttgaatcaacactccttcctcttcgtctttctcgtccattttagttttttggtgtctaagaacataacctaaaagctcaaggtgagtgaaaagaagatgtcaggtgtgtctctagcagtgtctcatccaccggcatcagtgggagaacaaaacgtgcctcaagcaggcacaaagcctaaaccgcgaacagaacaggcaccaattggtggcatgatgg

SEQ ID NO: 111646 - DNA, 188 bp, Glycine max
  unsure (1)..(188): unsure at all n locations
tttgtttttctgtgtcactgttctcacataatctggcgcggcggtgccgancacaaacatgtccaactcgagggtagctgtgaactcaaaactatcggttgtgtcgagcagacccgttagtgcttcgggtaagggtaaggctcatgcgctatccgcgcttgacagtgccatgggtccacacagcatac

SEQ ID NO: 111647 - DNA, 255 bp, Glycine max
gcccaaaagcagctctctgctgttgctgcttgggaaaacagtaagagagcatctcttgaagctcagctgagaaaaattgaggtattatttgttgctcagttattggttgatacaatgacatagttttttctattattcatgatgcatgtttggcctagttctgaacattataatcaagataagaaagacaaaataatgtaagaatttatgttgtcctgtgttagatggaataatatacatgattctgttaacaca

SEQ ID NO: 111648 - DNA, 100 bp, Glycine max
gtttatgtggaagttagctcccctgactccgtccaccaccacgtctcctgatcatttcacctgtcgtttgcttaccctccctttacgtcaccgtttgatt

SEQ ID NO: 111649 - DNA, 257 bp, Glycine max
gagaaatgttaatagtaatccacatatttctcaactgattgacatcagaaaggttcaagacaatgcaagtgatccctgtgtggaagttgaagagtcggtgaatggtgacaacattgctttgtgcgggagtactgatgtggagcttggaggaggctggactcaatcccaaaacttcttgtggtggaacttctcaggaaatggtttgccctggtggtgagagggccttcattactcgtattattgaagatagtactcaa

SEQ ID NO: 111650 - DNA, 271 bp, Glycine max
agagaaggctcggaggtttgaattcgtgcaagggcttctgatgtccaccattcttgatgataagttatgactgcatttgtagctcatatgccaatgttgaaagagctggagctgtaagctagagagagggagagttatccaaaacgatacgaagctgcatcggataaatatgttttgtcttcaagattttattcgatgatccaaatacataaaaagggtgagacggctggagtgtcaatttgagctagtcttctgcaccaactggttgaat

SEQ ID NO: 111651 - DNA, 262 bp, Glycine max
aatgaattctatgatgatgatgaatactacacagactaaagtgacaaataaactcgtgtgtctagatttcgaacattccataagtaagctatcctttctgtaacgacaatgtttattcgaacattactagaaagacaatggataagtcatacatatgcaagatggtttgtaaattatttgtcattgtacatacatagtttgattgatatctatttcttgttaaaagagaaggtagctttgagagtaacagggtgggggcaga

SEQ ID NO: 111652 - DNA, 267 bp, Glycine max
aagggtaagcgtctttcatccaaagctggttccttttttgcttattttgaaagaaagaaaaattggtgtttttgttgatggaacccattggactaggttgtggaatgttctctgggttggtaggagtggaaagccctttacaacagcaacaacaggaacaaaaccctcaccatttgcaacaccatccccaaatggttccctatgccacacaccatgacactccaaaccctcatcatccacaccttcaccattctatcagacaagggt

SEQ ID NO: 111653 - DNA, 111 bp, Glycine max
aagatttcgaaactacatatattgttttgattctagcttgcagaaatatttaaagaagttactgtctcaatatgcatccttctcttttaagatgccttccacgcaacatac

SEQ ID NO: 111654 - DNA, 265 bp, Glycine max
gcgaatcttcgtccctgagctggcaggaccattagcatttgtcatttatgtgtgcaaactctataaatacgactatgaataaatgagaaggcatcagaaaattcaccaaatttcctcttcttattctaaattctaggaggcagtcctgacctcgaattcaggaacattgatccacttaccacttgccttaccatggtggtgaatctccacaagaaatgatttggaacagatgctggaatctactaatgagggggccaaagttata

SEQ ID NO: 111655 - DNA, 263 bp, Glycine max
acagtttgttcctatatatgaaaccaggccaatcaagaacgtgtatgggattgattttgaccacagctttgggctttggtttattgcctgctggctgaagcctcatctgatgattgagagtggtgcttttaaagaacttctagactattataatgtgtttggattaactaaaatgtttagtctcgagggaaaaaatatgactttgtcatagttaatgactattccagatatacatgggtatctttccttgcacataacatgag

SEQ ID NO: 111656 - DNA, 254 bp, Glycine max
caggtatgctaggagtatcccaacctctgctgttaacttggtgccatttaacttgcaaaaagctcaaccttcatttgctcaatatgatgctacgtttaatcagtagagaccacatcacaagttatataaattcttcaagaaaaaacatcacatcacaagttatataaattcttcaagatttttcattatttttaggttgatgtggtctctactgatttaacttatagtatacattcattgaattacattattgt

SEQ ID NO: 111657 - DNA, 254 bp, Glycine max
  unsure (1)..(254): unsure at all n locations
ctccaggatggctgttctcaacgagccaaaaccttacccagaaccaaaactctttccaactattgctcaaacccactacccttcttctgtaagccactcccaattcgcgccagagcattccactgcaatgaactacctttctgntcaaagctatgatcattgcatgccagaactatccagtgaagttaaaactcagtaccccaaaagccataatcagtttacgacagagttatctacaccaaccaaacctcaat

SEQ ID NO: 111658 - DNA, 278 bp, Glycine max
attcccaattattcagctgctttttaacttcaattggtagattacgaattcccccacctgaaacccctcccatttctagatgacccagttgtacattcccaattttgttgctgaatttcatctgtgtttggtagtttcatttcatcttcgcaccaatttccaggtgaaaatggccctactcgatctgtccaagatagtagccgataggtatctcaagcgtgaagtccttggtgaaggtacatacggtgtcgtttacaaagccgtcgatacccagacag

SEQ ID NO: 111659 - DNA, 259 bp, Glycine max
gtaacaaggaagaacaagagagaaagtagaggcagagaaagcaagatcaatctaggtaactagacttgaagcctcctgaagagaacaagctgaaaccagaggtccaaccaagaagggtgttggtgacgcccatggttgttgccgacccgaaataggaggagaaaatctgctccccatcctcgaagagatttctaaatgcggagctgcagctgaagagctagttcacgcgagcaatgtataatccgcacaaactagccag

SEQ ID NO: 111660 - DNA, 276 bp, Glycine max
cggctcgcggcgagccaacgagagagtatgcttctcctctactcacaattcaagcaggagaacccccaccccgagaggaagaagagagcgaagaaccaattggcaagactgattctgccgaggcaagacgcgaggcagatgaaatgtctgagagtgccacagcagcgcagaacgcaggctatgacacggccgcagatcaagcgcggtcagccagcgacagaacaagggatttcgcacacgacgcaaacgagaagacgtaggcagctgcggggtcga

SEQ ID NO: 111661 - DNA, 280 bp, Glycine max
aagacgatgtatgcatgaaccaccctacccacggtgtatcatactatcctactgtcatacaacatacattctacaccaacatgcacctgaatcgtcttcaccagaacccattaaaggagcagtccaacgagccaacgatcaggctggctcatttcacgggcactgtttcatggtgatgacaatgacgaagctagtgaccctgccgaggatcgaactctactggggcatacacgcatggccgtacaggaagagcagcgaagacaaattcaggaagcaatgg

SEQ ID NO: 111662 - DNA, 270 bp, Glycine max
  unsure (1)..(270): unsure at all n locations
gtacttcttgcaatcaaaccatcccccctctncnnnnctnnctgngcccccctccgccattcccgccanggacattttgaagcatgttcttctgtctctgcgcgcatttactctacgacttcctcgcaaaaactaagcttgcagtactttaattccacgaattattgttgaaatcagctgaggatttagaaataaacccatgttattctgaacgtgaatgatgtcactatgtataaggatggcttttacatgtcgataaaaaaaccacaa

SEQ ID NO: 111663 - DNA, 268 bp, Glycine max
accggcacttcatttgtgcatgtcatcaatgcaaaaacaatgtcagctgatcctgttgcagttgctgaattgccgcatggaaaccatatggaactctatgcggcaattcgtcaactgcaacaggatctgctgacattgtcgaattgccgctcggtaaccatatgtaactctatgcggcaattcgacagcggaacaactgcaagagcagggtaaactgtgataattttggcatcctcactgtaccgtcctgcctcagtctttgtataca

SEQ ID NO: 111664 - DNA, 258 bp, Glycine max
  unsure (1)..(258): unsure at all n locations
gtcttttggaaatggaaagtccttgaaactgttctgtgtactcaatctgccttgcccactatatcggaaaagatgatgtataaagtcttagatatgctcttcaacatgtgcctaacttagaggagctggatctcagtggctttcaattgaagatgaaggcatcaggaatttaattccctattttgttggagcatctgaaacgtgtcctcacatcacacgctttctcgtagngacttgtgntctgtcctgtgttggagt

SEQ ID NO: 111665 - DNA, 255 bp, Glycine max
ggaatatcgagattaagtagcattttccacagcaaaatgctacttaatctcgatattcctatctctatcctcagaagctaattcagcgagcaagagataggaatatcgagattaagaagcattttgctgtggaaaattctgcggctacattcattgtttgtacaaagacaccacattgatagcaaatgcataattcgcattcataattaaaaaaaaaaaaaaatgggcggcccccgattagtaacctgttcgccc

SEQ ID NO: 111666 - DNA, 258 bp, Glycine max
gtgatttctatgggaagttttccgacagagatagaagtaaccctagaggttctagggatcagagaggttctagaagttcacgaggacgggaaggaggccaagactctaatgatgagtttggacgaagtggtagaagttcagatctggcaacaacaggtctcgaacaacgggaaaaagcagcggcaatgattggctaattggaggcagtagtagatcaagcaggttttcatcatccaacagagatgggggccatggagg

SEQ ID NO: 111667 - DNA, 127 bp, Glycine max
atgtgtatttccttgcggtctttagttgtgtgtggggtcttaaagcccctgtattccaacaacaacaacaaatcacactgcacctaaagttgtgtgtgtgactgtaatacaaaatcttttacttttt

SEQ ID NO: 111668 - DNA, 256 bp, Glycine max
gtgtaaggatggattgtggcttattttgtatgttataatgtcgtctcctttcgctggaaataggagtactacacagtttgagggtgctgttttatgacttttgtttttttggtgtaagacattatcctctatctatttaacacaggttacacaatactcagaatgagatgaaatagtgatctttaacatttaagtatgtacaattctatgtagtttcttttattattgtgtgcatcatatgtttctgttttttttt

SEQ ID NO: 111669 - DNA, 252 bp, Glycine max
agagaataagtacacagcaatattaatcactaacaggtcacatatcaagtcaaaagcggcatatatgctttaatttgcctctatgtgttgacgagcgaaatcaactcattataatgcagaagaagacttaggcgcacaatttctgtatctatctcttaatgcaatgagtaatatggtccccctccccttctagtatttatattactagagaaatggagagattttacgggcatgttgctatccctagatgat

SEQ ID NO: 111670 - DNA, 169 bp, Glycine max
cacgatattacgtggtcactatgaatgtgtgaactcttgctggtttaatcaacaagatcaggagtctttaggaagaaaagagatgaaattatgataaaggttaaagatgaaaaggaagccattggtttgacaaatgaactagaagccaactgacaaaacacaaggtgat

SEQ ID NO: 111671 - DNA, 111 bp, Glycine max
cagcagcacgctctccggcgacctaactccaaccggctcctcatactctgcctggtcattggcggcggcggtgacccgaaacatcctcgcctgtatcgccgcgagcatctc

SEQ ID NO: 111672 - DNA, 103 bp, Glycine max
  unsure (1)..(103): unsure at all n locations
ctcacgcgtgcagaacagagtgagcgacagagaagcagccatggggcggagacctgactcggngttacaggcacattaagacaaagccataccccagggcacg

SEQ ID NO: 111673 - DNA, 257 bp, Glycine max
ggtatatcactatcaggtacatggtttagtctagagtgaatcatatccaagattttatgagaaagctcacttttcaattaaaagaattcctttaatggccaagtaaagcatactagtatttccacatatggcatatttttcagatgtatctgtcaacactgttgagctgctactaagtttactatggagcaggtgaacattggctctttattccttgctctgtcgactcagaaacatcagaaccattcccaaccagc

SEQ ID NO: 111674 - DNA, 266 bp, Glycine max
cgaacccactttcatgcaagaagaagaaaagtgaaaaacaaaatattggccctttgaaggtagggttagcaaaatttatatgttttttcaattggagcatgtataactcgtacctggcttgtaaactttggatttaattttgattcaccatctgggtaaagtttccatcataattgtgaaatcattaaatgagtttgattcgtgtttgtatcacaaccattcagattaaaaccatactttgactcattttacctagttttttttta

SEQ ID NO: 111675 - DNA, 230 bp, Glycine max
atttgttttggttttaagatggtgaaacgagtgttgtggttgtgttagtgttcagatggagagaataagcagtgggggttcttccatcagaaggcgttcattgagcatatcaagtcacataagccatcatacagacaatgatgatgctgagtgtgagagtgtttcagaggctggagacatcggagatcgtgttactattcgaagcaagaggatcagtgagagcagcagca

SEQ ID NO: 111676 - DNA, 197 bp, Glycine max
gttgcattacacgcaccaaccagagagtgagagagagagaagagactcttccttccttcaatttcttcaaccaccaccagcatgcaagactccggctccatgaagatctcccctctggatctcatgtccgccatcatcaagggcaagctcgacccctccaacgtctcctcctcctcctccaacgccgcagctgccgt

SEQ ID NO: 111677 - DNA, 147 bp, Glycine max
cggatctagagtcctcagtttctcctcgttgatcttcggtttcctggtttcaatttcggatccttcggtaatttaataagatgtttgggcaggcacgaagaagagcgataatacgaggtactacgaaatcctcggcgtctccaagaa

SEQ ID NO: 111678 - DNA, 257 bp, Glycine max
gtctatttggttaggtgccccgcggctattcaacaatctgtaaggcaaaaatccagattgatttgtctaagtttgtgctactgttcaatagtttgattcagatattggaaaagctggtgaattatattgaggcatggagggtgtgaagttggggggttctatcgcctgttatctattattttattgctttcaaagtgaagcattggaatttggctgttttgtttatttatatagtgtagtttccattttagcaaagt

SEQ ID NO: 111679 - DNA, 175 bp, Glycine max
gtagacgacatgcatgtttaggtatgaatgtcgtctacttgtgatagtgaaggtatttacacgtacaattgcaaggttaaaaaaagaaatggaattggacacagtttgcgtaggttcatacctaaacatgcatgtgacttttcatcaatctcaaaataaattcttattttatttt

SEQ ID NO: 111680 - DNA, 249 bp, Glycine max
ctggcaggtgcagaattccagaagatatccttaagcgcaggacgagttgtttgctgcagaactggttatactccaacgtatccccattgtccttcttgaattctgcacctgccagtgcttgaatggtatattatatatatgatgtctgattattgttttacaacaccatttgtcgaccttgttattttattttatttttgtttaggaactttgagttttgttgataagatctgtttgtgttttgttgtt

SEQ ID NO: 111681 - DNA, 259 bp, Glycine max
accattatggccacacttcaagcctcacttctctgcagaacttctctcccatttagctctcaccatcctcaactctacaaactccatcctcactctttcaacttcctatctccatgcaaaatgtttcaggcgcgcctttcctcttccgtctctcgcagcgtcgcttcccgctcccaatccaatccctccggcgccgattctagtgtaattgaacacgaagcgactccgagtgtcgtcgacgctgagagttccgatcctt

SEQ ID NO: 111682 - DNA, 217 bp, Glycine max
gtagtttttcttgactacgatggatctctctctccaattgttgtagatccagataaggctttcatgactagataggttttccttttgttcccatttttctcttatagtcatatccattgaataaagcttgtgtttatgattaatctgagactttgttttctcaaattagatgagagccacactaaagggtatagcaagacatttttccacacaacat

SEQ ID NO: 111683 - DNA, 250 bp, Glycine max
agagtgtcttgttctcgtttatggaggatcaaagcggagaagctgaaggagaagaacaacaaatacaaccttcactctttcattatttaataacaattattattctcaatgggcaagactcctttctcctttcgtcgctccgcctctcgccgccgccccaagaagaccgccgccccgccccctcctccctctccgccgcaacatccctacgcggccggattcgccgcctcacccgacgcaacaaccgtct

SEQ ID NO: 111684 - DNA, 249 bp, Glycine max
gcgaatcatggaccagaatacagttcagcattgccacttaaaaggttcaatccaaaggagttggagattgccactggttttttcagtgcagacagcatcattggttctagcagtttgagcacagtttacaaaggtcaaatggaagatggccaggttgtagccataaaaagattgaatctgcaacaattctctgcaaatactgacaagatcttcaagagagaagccaacaccttgagccagtgagacata

SEQ ID NO: 111685 - DNA, 246 bp, Glycine max
ggcaattatgttgtccaggtaaatctattatgattacatatagtttggacttttcaatgccacaattgtgaaaggtacttatggtttgggtttacttttggttgggtatcctaacaatgctcttatgttttcctgaaattaatccctcttttttggagttttttactgagattctgtcaattgactttaaggtatggatgtcttctctttgttttgatttaaggtcatttgctaggatttaatact

SEQ ID NO: 111686 - DNA, 247 bp, Glycine max
gtctttcattattcagtttgatttagcaccaagatgaaggttcaagaaacgaggtcgcatgttcatgcacctggggaagaagagaaggtgatgacaaggaagcagaaggctgagtccaaggcacatgaagtggagcattctccaaagaaggccaaggtggacaaagaagatggccaaatcaacggaaaatctgaaagagtttgcgaggctctttgatgaaataacaggaaatgagtatgaacttggg

SEQ ID NO: 111687 - DNA, 245 bp, Glycine max
atactggttactcctttggttttgtttcataattgaaattgggtcgcatggtagttgaactgggttctgttggagactgatactattctgttaaaagtgaattgatgtttaactataatgctccgagctaagtaactaacagttaccaagtgaatcttgggcccgactttgctatgttattgtacttttgtgctaatctttgttttgccttgtttttgatgcaggtaactgttatcctttcagtg

SEQ ID NO: 111688 - DNA, 217 bp, Glycine max
tagtcgagaacgattattgtgaagaacgatagctagcaaaaatgtttcatcagggagttgtaatttttgtaagatggaaaagaaaaatcaaaatagaggtaacttttgttttgtttcaactttcgagtaatgtggtagtttgtgtttaggaacgtaattatgattgaattggatggttatgagtagtatttgtgaatctgcttttgcatgtggaaag

SEQ ID NO: 111689 - DNA, 277 bp, Glycine max
catctacaagggaatcctccaatgccttaagctcagaacaatctcaaactgatgttagaattacttctcataacaatactcctctgctatcaaccagttcagtccacagtcaagatgctcctggagaattgagttcagggccagatgctgttgccatgccaactcgtcatagagaacctgagttttcaccccaattggcggtgccaaggtctcgaagccaaactttatggcaaaggtcatctgagtggcttgttcctagggtagtgtctaatcctat

SEQ ID NO: 111690 - DNA, 276 bp, Glycine max
cgttgcttgttttgaattggtagaatgggaattcagctgagttaagttcatggcttgaatgctgttatgtctttgttggaatgaagtttatatttttttggactgctttgggactgaagtaccgtagatgtcaacattactttatttggttggataaaatgttgttgggaagtgatagaacttttgttgagaggtgatttctgtttatggttgcacaggtaagaggggagggatgtgagaaggatgtttgctgatttgtttgttgtaattcttctg

SEQ ID NO: 111691 - DNA, 277 bp, Glycine max
cactctctctctctccttctttaatttaagatctttcgaacctttctctctcccaccgaaaccctaacaacgacaatcgcgtgttcttctacacaccagaagatcaatggatccttctaacgccagatcgaggtaaaccctactcgaatcagtggtattttgtgtctacttttgtttctatttattggggcaatgcaaatttggagctggtggtgacttgcgcaacgtatacatatggacacttgagtttgttgggtatgcccccacttggttaaga

SEQ ID NO: 111692 - DNA, 267 bp, Glycine max
gaagaacgaagaagaagaagcatcacagaaccgaacccattcagaagcaaatccgaaaacccctcacttaatattactggtattcagctgttcatgacaaaagcctgaaccaatcatgtcagaaggtgcagaaattgatgagcgtgtggaccttgatgaggaaaattatatggaagagatggatgatgatgttgaagaacaaatagacgatgatggagtggatggagttgaagaagaaaatgctgaaggtagttttgaagaagatga

SEQ ID NO: 111693 - DNA, 273 bp, Glycine max
ggtctgcaacaggctgacatggcacaaaaaaatgttttggcggaaagcagatggaatgacaatactggacgtaacagatgatagcaagattgtctcagcttggccggtttcaaagcctcactcatccaaattgaacaatgatcatgtgctcgaccaagttgacaaggagagcaaagttgagactgctacaagttatcggttgtttggaattgaccttattgatccttctaggaactctccttctgtagagaaggcatctgcacaagcagtaaa

SEQ ID NO: 111694 - DNA, 270 bp, Glycine max
atgaggagagatgatgttgataattttaggaagccctcaaattttcattcttctcctatgagtgatctaaaaaacaatgataaaccttctgaccacacttctgatattgttaaagtgaatgatgctccagttcccagtttaccatcatgtgaaagtaaggtgggtggttttgatatttcatcagaaccaatacctgctgatcataccaataaacccaatgaattatctggtgatttttgtcaaagaaaacaggaaccggtggggtctgaa

SEQ ID NO: 111695 - DNA, 262 bp, Glycine max
aaaatgtacaggtcacagagcgtaccaagatctgatcatctgaacagtgaggatacattgccggatcaatatggtggaaatgattataggaggcacagctaccatccaacttctgcgcattcagatattaagtttgatgaatcagattgtgatgaagaaattgaagcagaagaacctcctgtggttactatgccccctaatcggtttccaccaccagtaccttcatctatggttaaacaggatagccgcattcatgttcatc

SEQ ID NO: 111696 - DNA, 266 bp, Glycine max
tgtggagcagcaagttgtgagctctaaagatgctgtccctccattaatttagaagaatctgctagtctggttttatgttgtgggcggctgaaggtgtgttacagaataagaggtatgttttggttgcgaggctttcaggtcattgaagtgagtttgctgttttagtctcaaagcaacctgaatatttgttagatatatggatgtacctgttcagttttagaaagtgaaagtgcacaaaaaaattatatatgtaatcatctccatca

SEQ ID NO: 111697 - DNA, 188 bp, Glycine max
gaaagagagaaaacaaagggcggtggtgagtgcttctgcttcatcatcatcagagaatggcggctactgtgtcttctgcttggtcaaagccggcgggggcctaattcgaagaccgagcgagtcttcacaacacaaaccacgacagcatccgcttctcctggcggcgcacagcagagagaggcactatc

SEQ ID NO: 111698 - DNA, 267 bp, Glycine max
  unsure (1)..(267): unsure at all n locations
atcagacatggccatgccaaaagagaaagaggatgttcagaacagtgggaagagattgaaatgtacgaggaatgaagaagatgaaaaagaacaatctgaacaagttgaagctgatgaagaagaagaagaagaagaagacagtgagcttcctctaaagctaggattgttcttctacccaacaatacacagatccnttgttgtatctgatgctcttgaacccgattttcccatcatatatgtcaacaaggtctttgaaatcgccactgg

SEQ ID NO: 111699 - DNA, 260 bp, Glycine max
catccccaatggcacatggtatgggggatggaggtgttgaaatcaaaagtaataggctctgagttgtagccatagattttcacacctcgttccccaatggcacatggtatgggtataatctgtgcgagactccttcttcttcataccaactatcccctcagaaatggttcatgagtttggttctaggctctgttcttagtttttggctgtaataatgttatgcaattaacttaatcacacatagcaatacaccttttaca

SEQ ID NO: 111700 - DNA, 251 bp, Glycine max
tggaaaatcaagacattttggtttcatagaatttgaatctcctgaggtagtatttgtttcagctgactgatcaatgtattgtgacttctggctactattacctcgttctaatataatgcattgatctataggtagcagaaattgtggctgatactatgcataattatctcctttttgaacaccttctccaagtttatgtaatacctccagagcatgttcatccaagaatgtaagtgattcataaatttttt

SEQ ID NO: 111701 - DNA, 256 bp, Glycine max
gaagaaaataaggacagatgatatttacatgtacaatacaaatcatatgaccatgagagatggatcaagcagtttgggcaattttaatgaatcaggaaaagctaacatgggaacagaaaggattcatgttttttcaggtactcgtaagcattacagcacaaaagagttgtcgttgtttgaattacgaaatatgttgatttataaggctcagactgaaattttcaagaaacttcaagagtggagatcaatggctgaa

SEQ ID NO: 111702 - DNA, 254 bp, Glycine max
agaatttcctttggcaatttgaatcttgagatcatttccttggcttttcgattcaaactcatgggagtctctttaataggaacatcatggatttgccaagcaatctactagccagggcatttactcagtcaaagagatactaaggcagatacctatacttccctttttaggcaggcatggttcagctagggtggtcagcatttggtaggcatacaagtcgaaaacaggtcttgcagctataggttcccattttg

SEQ ID NO: 111703 - DNA, 253 bp, Glycine max
gcacattttaggggaagtttttgcggactttgatccagttgctatctcaaaatttaatgagaaaaagataatggcaccgggatccactgcaagctccttactttctgaccttaaattgcgtgctataatcgagaatgcacgtcaaatatcaaaggtcatagaagagtttgggtcatttgacaagtatatttggagttttgtgaaccataagcctataattagcagattccgatatcctcgacaggttcctgta

SEQ ID NO: 111704 - DNA, 235 bp, Glycine max
aagaaactgccctgtaaacacatttcagttattaaccattaatcatgaattatttttattattgcagattgttttgaagataatatctttaaaaatgttacttgattgcttgagtgttcacattttatattatgtatgaaatttgctttcttcctttttttgtttaaactctagtttttgtttataattatattcgtttggtataaaaaaaaaaaaaaagacaacagtagggatg

SEQ ID NO: 111705 - DNA, 263 bp, Glycine max
gtttcttctgagggttgtagtagttactttgcattccttaatagctatatatataacgtgaaatgcgtcaggtttggcatcccgtccagaaaagttcaattattggctttgaaaagttaaattacatgtttggttttgtttttcgatcaactaattaagatgcaatacacgtcctgattacaattttgaaagctcaaatttgagtaaacgctaatttttctaaaattttgggataatcatgatttaggaaccattatttttta

SEQ ID NO: 111706 - DNA, 268 bp, Glycine max
agattgagagtattttatgccgaaggttacctccccatgcttggtgtgtatatttgtaaatattcagtctatttctgtaaaatttaggccggatgattctactgtcatgatcagtcttgcttgtggcagtctttcaggagttgcatcatcaacaggtaagtgcttatggattgttgctatatctccagtatcagtttttcaattctcggcgtttcttttaaatataattttagataatagattacatatcctgttccagatatgatac

SEQ ID NO: 111707 - DNA, 273 bp, Glycine max
agaatgtataaatttgtgttaagatccgattattgattatttgagctgttagtgattcatctacattaaaacttggcaaattatcttacaatttatgatacttttttttttacgtctctagagattgactaagtgcaacattgtttacccaaaagaccataattttcagcttattttgaatacttaagtatgtaatcttttttttaattagccaaaaagacctgaaaacataattcaatgtttttcttgtattttttttaattttcctttttc

SEQ ID NO: 111708 - DNA, 261 bp, Glycine max
gaccaacttccctccggcgccgcctctctgcctcgacctcaacgtcccttcctccgatcaccgctggccccacgtcccccctcgcagcctcgtcctcagcgagttcctccacaccgccgttctcatagacattgaaccgccgcaactaccttttccacccgctgccgccatcgttgctcaccgaagcccccacgccgggggagttcaggtggtggagagttctccaacggcgtcgtttttgggtctcgttaggcgcggcat

SEQ ID NO: 111709 - DNA, 258 bp, Glycine max
actcaagtcacttaagttagagcttggtgaagacctgttcgtgcacttggttttgatctcgcttcctgcacactttgggcaattcaaagtgagctataacactcagaaggacaaatggtccctcaatgagcttatatctcattgtgtgcaagaggaggagaggctgtagagagataggactgaaagtgctcacaataagaaaaggaagaagactaaggatgttgcggaaaagacttcttagcaaaagaaacaacagaa

SEQ ID NO: 111710 - DNA, 263 bp, Glycine max
tgtcactctcctcttactcgatgttcctcagtacacccttgtcgccgtcgatactcagattggcaacgcgacattgtttttcttctctgtttggttttgtagatgttctctgtggggcctgcttttaagggtattaagatgattcctccaggcgttcattttgtgtattatagttcatcaagcagggatgggaaggagttctcatcaattattggattttttattgatgctggcccttcagaggtaattgttcgtaaatggga

SEQ ID NO: 111711 - DNA, 239 bp, Glycine max
  unsure (1)..(239): unsure at all n locations
ctctggtgcatctcaagcaatgaattaccggtatatccatcataactggcttgagatgccccagagtttacacactggccagcgcagattcacagttgcattgttatcttctgggggctttgatgaccatcacatttctctttgcttccccacagcatgtccttttcatactgggctttttttattgaggtattatcgtggcttgatatgntattaattttacgtcgtgttgtattttg

SEQ ID NO: 111712 - DNA, 261 bp, Glycine max
tgcaaatggaagcaccaccatgcgatggaggtgtgctgagatgggaaaggggaagagagtcgcgtagaggcattgtcgatgcgacagctcatcccggcatatggacagaatgagagtgactaaagaagatcgtgctgtcgcgacacgacatcgattgatatcattttggggaatgcacgatgtaaagaatgggagatatctactgtgatgttgctgttgcggcaacttttcgtggtgacatacagagcgcgaggaagcgag

SEQ ID NO: 111713 - DNA, 112 bp, Glycine max
gtacaatccaatgttcgtggtttcacaactcggcagagattcctgcatagagaagaacacaaagctgccacttctattcaggtctattggaggatgtgcaaggctcggtctg

SEQ ID NO: 111714 - DNA, 258 bp, Glycine max
atcgatagcaggtgtaatagcttaattttgaatggtgaagggcatcaagaatatcagtctagcctgcaaaagcaacaattaggaagctgctttatcacctgcttcattggtagatcaatctaccctggcatctgtagttggaagttttggaagtccaaataataattatactgcagaaagaattagcagtcctattttccgagagaggacagctggggaggaaattgatccttgagaggaagagggagaaggagcctc

SEQ ID NO: 111715 - DNA, 273 bp, Glycine max
tcgagccaaaatgcttcttctttcatctcttgttcatccttccaggggcaacaatgcattctgccatcttaggtatattgtgtgacaccctaaactggtgcacatgtattcccataattcaacttaattgaatattatcatttaccaaaacttttcgttaatcagagatatgatttgatatttgtagttcagttcagctcgtgttttattgtatagaaagttcaatcaatcagtaccatatttaatttgaaattgaaggcttacaaccacttt

SEQ ID NO: 111716 - DNA, 151 bp, Glycine max
tcaatgtcataaaaatgaagctgatcagattgagggagctgaggaaggaagagaagtatcaccacataatgatcctaagttagtgcagttggaaaagtccacaatcatccagccaggataaaacagatgcaaacatcggagaattaaatgt

SEQ ID NO: 111717 - DNA, 232 bp, Glycine max
atttattaggcttaaatatctttccaatgtttacagaagaaggaaaagatggagaagtgagagtgagacagagagcgaaagtgacggtgtgattagagcaagtaaagtagtactgtactgaagagtaacgacatagatggtgttagcacgtcggactgataaaggcttggttttggttttggatgagaagacgaggaattgacacgagtgagtgactgagaacaagacattg

SEQ ID NO: 111718 - DNA, 272 bp, Glycine max
aaaatgcagttagaagtattcgaagtgtccataaattgaaatgagtatggcatgaatacgattattattttgaagtattcaaagtgttttgattctttgacgtatttttggagtatcagaattgactcgcaggtcttgtcattttgaagtactcaaaatgcagttagaagtattctaagtgtacataaagtgtttgacaaatatgtgtgtggcaggagtatgccacgaacaattattattttgaagtattcaaagtgttttgaagtatgaga

SEQ ID NO: 111719 - DNA, 274 bp, Glycine max
gatctatgaagctaatatgggtgctacataaatccgcaagcagttattagatcgaaaaaagatgtacacattagacaatgtaagcctagggatctaataattgcttgcggatctatgaagctaatatgggtgctacataaacatggaattttccttccaagtctaggttgatgccttgataaggcaatggataaagaaagatttcaagctttccgatgttgtcaacttaggattttttttttatcatttcttctcctttttttattttgttctt

SEQ ID NO: 111720 - DNA, 273 bp, Glycine max
atctgataaaatatttattttctcccaaattgctattatttttgctgccacatgttgtggataagtcactgtcaaatcccttgtattttttcactccatgtataaattggatctttagattgtaatgcaacaaaaagtgcatctttataggtgtgtcagttaggaaggtttatgcctggatacactcatacacctatgtagttttctcttatcattgattatgagacactcctatgttataataatgattgaggaatatcctctagaactcca

SEQ ID NO: 111721 - DNA, 273 bp, Glycine max
aataagcatagagagaaaaaaagatgcaatatccttagtccacacccacccaccgaccccattccccggtaagaatgaagagaaggcgaatagcaacatgaagagagggccaaggaggatgaggacaaaatggtccatcaaataaaagaatccaaacgcattgatttctctctttgtcgtcttcgaaaaccatcaaaaacaggtgcaccccctaatgaccttaacctttagttcacctgccccattacccatccttgcatagctttcccattt

SEQ ID NO: 111722 - DNA, 257 bp, Glycine max
cacaatccaaacagggccttaaatttgacgcaggaaggcgagtccggaaatcaccgtactttacgcaaacgcaactgaaacagacagaacgcactcgatgcgaaactgaaacgggcgtttgcgtttgcgtttgcgtttgcgtttgcattgttgttgctgttgctgttgctgctgttcctatctgttgctctgaaatctgaattcaagaaataaaaactaaaatataatagcataacatggccaggattctgagaaga

SEQ ID NO: 111723 - DNA, 259 bp, Glycine max
  unsure (1)..(259): unsure at all n locations
agtctctccgttctttcacgcgacttccctcacaaacaacgtacatcnctttatcacgccggaggacgtcggagttgtcgaccggaggacggcgcttcctacttcgttttccggtacggtccgaggtctctcttcgctcttcagtcttctctctcccttttccggcactgtccgaggcggtctcacttctctctccctgttccgacgaggtcaccactgtttgtgcgttttccggcgaagtactctccgtgattttcgc

SEQ ID NO: 111724 - DNA, 133 bp, Glycine max
cagcgttgcagcagtctgactggttagggctattcttataacatggttttaaaaaacggtccaccccatcaaggcttataactgttcattaccgcaattggaagcgcaaacgtcacaatccacaacgcaatgg

SEQ ID NO: 111725 - DNA, 258 bp, Glycine max
gcactccctcctccttctctgtctccgggttcaatttcaaacccataaattcggcttccaaattgagcggatttcagagattatatttttcttctactcttactttgcgaaaaaatggaagaggcaaaggcattgcaccagcaacagcaacagcagcagcagcaacaacaacaacaacaacaacaacttctgttacaacaacagcaacaacaacaacatcaacaacattatctgctcttacagcaattgcaaaagcag

SEQ ID NO: 111726 - DNA, 252 bp, Glycine max
ctggacatctctagaattcaccagagacatcgttgttcaacagagggttaatgcttcttcagttactggaagtcaaagaccttcttacccatcctcaaaacaaacaagagattgggacaagattgaagctcaagtcaagaaagaggtatgtttgctgtctttgtaaagtctcttaattctttgtattttagtgattgcaactcttgctcctaacattcttcattcatttcaggagaaagatgaaaagcttga

SEQ ID NO: 111727 - DNA, 252 bp, Glycine max
caatctttcatattgttctagtcttgtgagttttccggaaatattaggaaaaatggaatacactgccataagtatattgccataacttttccgactttgaagtttacaactacacagatgtggaatggttcagttgccaagtagcattgtcatgttgtcagaacttgaggtgttgagtatttcgcaatgtgaaggactgcaaaaatcaaaacaggacaaagatttaaaaaatgagagattaattgtgtcgtc

SEQ ID NO: 111728 - DNA, 250 bp, Glycine max
aatctacacaatattaccacgacatatttggacagtcattctgaagctggcagtaatctgacagcagtgatctctggtggtaacttggcaggaactagtgctaatacttcatctgaatcaaaccaagctcaacatggtactatgaatgcaacagtcactgaagatgccaaaaatgtgcagacagaaggattagagcagagtggcaatagagtctctgaagaaaacctgcctggttctaactcaacagtcc

SEQ ID NO: 111729 - DNA, 251 bp, Glycine max
gtacagcaagcagcaaccttgttttttcttttaccacaactcttcattttgtgggtaacaataatccatacagataataataatttggaatgttttaatcaagctcttcagtgtatttgatagcaagagtgaactgtctgaaaaagaatgtttgaatcaaaacataaaataaaataatttgaaaattattagtgacatcatttttatcaagcagaaacttttaatctgcagctaacgggttcaattgattc

SEQ ID NO: 111730 - DNA, 241 bp, Glycine max
tcgattgttgcttgctaatccaacgggaataaatcccagacagaagaagaggatttagatcagaagctgtcttgttggtcttcttgaaccaattcttattggatttgccacaatgcagctaagttttgaacagaagcttgacttgtcagaaatattataccaaataacatcgaggtttgacagcttgcgcataacaccaaggtctctggatattcttgctagaggatctcctgtttgtgga

SEQ ID NO: 111731 - DNA, 241 bp, Glycine max
cacagttggttgtttggggatcttcttgatgaagggttttttgaacaaaaagtgattcattcctctaggtatagtcagctttttaggttcaaaaatatttttcttcactgtgacaacccttctgttaagaaaggtgttgagacattgccagttgaagatagattcaggagacagtcattttaggatcatttgagggtcagtgagaggatggtgctcacttgaaattttgtcacttcgcgga

SEQ ID NO: 111732 - DNA, 232 bp, Glycine max
gatctatccatccacctctattcctaactctccttcgtttatgttaggtctccaagaattggtaccaattcatgctgcagatatacttgaacttcaacttatcccacattctccactctctatggcttccactctcaaatctggccgaattcatacaggggcaatcaatgatgatttatacaaggaattgtggcatgcatgtgctggtccccttgtcactctccctcgtgaa

SEQ ID NO: 111733 - DNA, 229 bp, Glycine max
ccttttcttctcttcgtctttgcgtctctggtcaccacccactgtcaacaacatcaccgctctccattcccgttcgccgagtgagagtagtgtgggcgaattcatgtgcgccctcgagaaagttctagagaataatcgcattgactttagatttcggtagttggttatggattcgagcgacagtggtcgcggttactccaagcgcgagagggacgacgaggattgggag

SEQ ID NO: 111734 - DNA, 261 bp, Glycine max
gtcactgctctggaccaccgcgtgtaggcgtgtagatcagaaccagatcgtgtactcctccattggcacccatggcaactcaaatgagcactcagatccagtctgttagcggacgcgactgttctttaccgtcctgggcgaggttctgacacgtgaattggcggaggacgtttactctggcgtctcagttagggttacgccggtagcgcaccgagatcatcatcagatccaccagagcccgagccgtcctaacgtgcaacg

SEQ ID NO: 111735 - DNA, 288 bp, Glycine max
  unsure (1)..(288): unsure at all n locations
gcagcgtcgagcggaggaagtcaaacatgagcacacgtgcgatgcaggaagcaaccgaatgatattgtatgcctagcgggagtcgcatgatgtcgaatcagtgtgattagtagatggggaatattcgaatcgggattgctgaagttagagagaagcaaccaagtgatatgttatgcctaggaggtaaattgtggtgacactcaaggtcaattgaattatactgatcattngggcgtgatcaagggactttcttgcttaagtgtgctattgatcactggataggaatga

SEQ ID NO: 111736 - DNA, 234 bp, Glycine max
cctcctaattccaactcaatttccaaagcaacagccggctattatgcttcaaagttcacagcattttaattcgcaaatggcacctatgaagtcacgtgttatgtctgattatccatggttcccatctcggactccatggataatcagacataatggctgagcgtatttgtgattttctggcagatgaggccttgaacttcaagagacaatgcagtgagggccaagttcagtagt

SEQ ID NO: 111737 - DNA, 265 bp, Glycine max
gatgaatactgtgaaaaagctccaactagtcaatctgaattggcttctgctcaggacatgtcccagctgagtgctatagacgaagatcgtctgagagatccggccatccaaattttgacagcagagactggcactcagccttctgttactttcagtgcatctctacatggcaccccttcaaaagttacgcacaatgtatggaccagtttttctagcaagcaacatcctaatgcttcaaggtttctatcccagccccaacaaatta

SEQ ID NO: 111738 - DNA, 264 bp, Glycine max
ctcgagcgaaatgcttccacatgcatgaaaggtggcgttacaattttgctagtcaagatagaaatactggatgccatgaaactgtttcttgtggaaatgtgcgagcacatgttgacaacaatggacttgggctttctgtgaaattagtggaagagaacattcagaaaccaagttttgaaagcagcatgctggctccaaattccgaggggaaaatacttgctggtaaaaatttagaggatacaaatcatatcagttcattggagg

SEQ ID NO: 111739 - DNA, 250 bp, Glycine max
ccgacacgttacgtgcagtctagctgttggaagtggtggccttttatgggtaggtgttcggtttgtggagctatgggtgggctcttgtatggatcgcaagaggggaatctctgaatctgcctgcaattgcaatggcggcgccaagaaatctaggccttgaacgtactcctttccaactggttgaggaagcaaatcggagccaggcacaaagtttttcagcagctccggctgtccattgggtgaagtgatg

SEQ ID NO: 111740 - DNA, 262 bp, Glycine max
gaacgagggccacgattaatgtgtgtttgtcacgagacccatagggctgccattttgctattgctcgctagaaatactggatgcactagaagttctgaagaagcatgtgtggaggtgctatcatctcagacttcattggtgtgaagcgtggccgcaacctcgccgcgcagtaactgtggtccgagcttgaccctttctctgacctccttggcttcgataccatcaccaccagcaccaaccttccaggctttccagacaaaaa

SEQ ID NO: 111741 - DNA, 259 bp, Glycine max
tagggaagatctctattgggatttaggtatctaaggggatggagcaaagggcacccaaaagcaagcaacccatgaatcctgattttaaataccaaaggagttaccttgcttgggatgataatttattctcccctagttataatgtccttatattttcaccaatagacccagatttactcaactttgccacattacttggtagtatctcttgtgtaagtttattggttcaaatgtaagtatgctttgtgcaatggtcaaa

SEQ ID NO: 111742 - DNA, 252 bp, Glycine max
atttggaaacagggttggtggtcgagataattttttccactgcaagaagtgtgctatgcattttcaccaaggcagccaccattgtagtttatttattgttgctttggcatttcccctccctcctacccacccaattttggtgatgtttcaaaatgactatttgcagattaatagaagactaaagtcttttctgggcttgtcaatgctttatttattttcagaagtacataagttgatgatactagatagatc

SEQ ID NO: 111743 - DNA, 276 bp, Glycine max
ctttttcagtacacacaacacaacacaaacaaaaactctctttacttttcagttttcacactgttcgagattcgataagatgggtgaagagcaccaccaccatgcaccgccaccggtcaggcacctccggcaggtccaccaccgccaaatctagcactttctagaggccccgtttggaatccaactgaacaactctcgcagcttcactattgcatccactcaaatcctttatggccggtagcacttctactgggttttcagcatgacattgtgatg

SEQ ID NO: 111744 - DNA, 151 bp, Glycine max
gctgggtatgaagaagcttgcccaaatagggtgccgtttcagtccaggttagattctttcccttcttcttttcctctgtccaaaaacactccaagtgaccgactgacggcggggcgctcggtggtgacggcggcggcactctgttcagcga

SEQ ID NO: 111745 - DNA, 269 bp, Glycine max
ctagtatgcaaaatgttaagacaatcaaatcgatcctgagggcttttgaaatggcatcggggcttaaaataaattatgcgaagagctgtttcggggcaatgggccaatcaaacagtggaaaatgcaggctgctagctacttgaattgcagaattctgcctttgcctttcacttatttgggaattccaatcggggctaatccaaggcatagtgagttgtgggatccaatccttagaaagagtgacagaaaattagctagatggaagcaga

SEQ ID NO: 111746 - DNA, 158 bp, Glycine max
gcgggtgttggaatgtgtacttttgctaaatgctgactattgtggtttcaacataactatatgactccattacgatccagagcaggcccaagagaacccacaagatactgcacgataccgtgaccctgcgtgaaggatacctgctgatagcctgagga

SEQ ID NO: 111747 - DNA, 204 bp, Glycine max
  unsure (1)..(204): unsure at all n locations
agtagattggctggtatctattgttaattcatactctacatatggtacatctccatctggtgcagctttaacagttgatgggagtatccccttatatagaccagccaaccctccatctgttaaagctgcaccagctggtgctgtaacatttgttgcgtatcaattgacagtagattggctggaatctatttggacttnattttt

SEQ ID NO: 111748 - DNA, 265 bp, Glycine max
aaattttaactaattagagatagtgtattttaagggtgtgttcctagcacttctcaaagtctgttaggcttcaagaattagcagcctttaatttgtgtgaacctaaaatagatatttcatacatttgtgttactattaatctaataccttgaaatacaaagaaaaaagtagatgtagaaactgaatcacataagaattcttgatcgtacgtacagtgttggagtagacaatatactacttactaatgatgtgaatatagttatta

SEQ ID NO: 111749 - DNA, 283 bp, Glycine max
  unsure (1)..(283): unsure at all n locations
cggagatattgctcaaaagaatgggcttactttcctcagttattcttataatactctcatgtttgttgttttttaacttgaattctagatttgtcctactcatttgttgttattgtttatgttccctttatttgataatttagtacgatcaattaagatgtatgtattatttattgtgctgtctttgtattttattcctgtatatttatgcgctttattttattttctattgtactagttaccaatcccctttcaataactanattgttgtatttctttattt

SEQ ID NO: 111750 - DNA, 280 bp, Glycine max
  unsure (1)..(280): unsure at all n locations
taatgatttttactttccatttaatgttattttaatattattgtttcctttctaactttattgccttntatgatttgatcatccatttatatgtatgttataaggttttaatcattgaaaaatatttttaccctaagaacttgaatgagcttttaagtaatccatgtctaaggatagaatgatgttatttagccttatttatatatctttgttcttaaagtttattatttggtatagctcttaagggattaagagtgaaattagatgatttcacatgaga

SEQ ID NO: 111751 - DNA, 116 bp, Glycine max
gacagaaagttctataattcaagaggataatgtattcatggcagaagcctgtacttatctgtggctttttgttctgattgaaatatctattcaacaaaatgcaacattcccttctg

SEQ ID NO: 111752 - DNA, 276 bp, Glycine max
tggaacttgcccttgaagtagtggttccgccttagcatcagacaattgagaatgagtcatctcaatcttttattgactaaatcaagtccaattaatcctgataaagagcgtgtttacaatgctggtgctgttaagagttctgattcgttcattattgctttttgcttgtatggtgcagttaaaacttttagacttgattgaaaagtttgctatgctggtccgttcaatcaggaaagcctcatgtcagtagaggctgctaatgtccatgaatatcga

SEQ ID NO: 111753 - DNA, 283 bp, Glycine max
cttagctggctgtggcctactgcaaaccatataggttctggacttaggtatcgcaccatctatgatctcccaaaaggtgcttcgacgtccaaatgagattttgacattgctttgctgtggtcatttgcaatgttattcatatttaacctttgtaagaatggttgagtgatgacaatgctgaatgactggtaatctgctatctctagtccacaatccaaagtatatgattttttaatgtcaatcacccaaaattgctgaagtgtaggtgatcacgagctgtttg

SEQ ID NO: 111754 - DNA, 281 bp, Glycine max
ggcggagaagttgggagcagcagaagagagctctaattcaaaggcttttcaccatacggcgacgaagctcgtcgttttggcagacctcaacgtcgatcctcccgaagccgaagccgaagaagtggattcttctcttgtccctcctccaccaattaccattcaagataaaagttcgttgtctaaagacactgatagcattgaaggtgaaagtaaaaagttgaacaaactgagcaaatcccgctccagaaagacagattcttctcttgattgtgtagctgatg

SEQ ID NO: 111755 - DNA, 280 bp, Glycine max
caaatcaatcattatttgaagaacaccattcacaacatggaccattgttctcaaccaagcaactacaaggcctaatgcaactccaagatctccaaggcaacacaaacaactccgattcttgttcagttgctgctcctaattccaatcttttcaacctaagtttcttcccaagtagcaatattagcactggcaccataatccctgatcaattcaacaacataagtggtggtgaccaaggaacaacaacaacaacaacactctatggcaattcaatagaaaa

SEQ ID NO: 111756 - DNA, 272 bp, Glycine max
tgattctatccattattggatgtgaataatagacactgttactctgttagttttagtaaaggtaaacttggcatttgtaactgaacagattcaaggtgcacttatcagtccatttgtgcttttgttttcttgtgtttttttatttaaaatagtattcatccttgagggccaagggtttatacaattttaaattttgttcaagtctgcttggattataaaaaatagtttatgatgtgaagagaaaattgaagagtaaccaccaatcagttttc

SEQ ID NO: 111757 - DNA, 271 bp, Glycine max
atttttactctctttctttccacttcacaataaatacatgaataaattatttaaatattatgagacaagttagatataattgataaaataataactaaggtgaacttgaacttttcaagaagccacaaattctccaaaaatccaacaattaaaaaggagcaaaaaaggagcacacgtagtaataatttttgataattttgatgaattggataattaagttttatacttcatttgttcctaattattagtcaatttcaactaatttatgtcc

SEQ ID NO: 111758 - DNA, 258 bp, Glycine max
gtgaaactgtggctcagaaagtagaaaacgctgctgttgatcctacggataatgagccaagaacaagaataagtagcagccttcaacagtcatcatctccatgggttgatagtctaagcaatataagcatagggggcctcctgtccgaagcatcattatttggtgggcttgatccaaaatcatttgctggcatacagccgtgtgatataacttctgattcattggatgcttttattgccgctgctcaaattaataatt

SEQ ID NO: 111759 - DNA, 262 bp, Glycine max
ttcacctatcagagacaaagcgctctctctccaaaaaaaaaaaaaactcgctaaattcgaaaaatctgttcaaatcctctaaacggaaaccctagtcataaaaccctagatttgacttaatttgttcccctcaatcgaatggtttttccccttcggaaaaccctaattccttcctggatatggaagatggacatcgagaagaagcaatgggagctcatggacaatttcgtaaagcgtgcttacgcggcatcggacgcggttg

SEQ ID NO: 111760 - DNA, 257 bp, Glycine max
atgcaccttattgaatggaccctttcaatgttgcgtgaagtatggtatgggcatggagtattgaaatttgacgtcttcgtgttcaacgcacttgttctcatcaattgtatgtgtagtaagtattcttttcatttcattcatcgtcttattgcgcacgtcccccatcctcggcttctccttcgtggagcactcttactccgtcacccaacacatccaggtaaggatctctctgtaattttaattcattgcaatgtctt

SEQ ID NO: 111761 - DNA, 253 bp, Glycine max
ctcgagtcgaatcggctcgaggttgacaaccatggccgactcatactcaagaccttgaccagcttctcgatagtgctttagatggttttcagtccttcaacctcaatcatcgcactccaagttgtgaagcaactgtgaatagcaagaaggagagtccgtctttgccgtcgggggttcaatggttgggcatgggcttactcgatctcgataagaagcacaaggggaaacagaatgcttccaaacacagccacct

SEQ ID NO: 111762 - DNA, 254 bp, Glycine max
atcaatcacgatctcgaaagcaactaagtgataaatctgcagaacaaggatcctggattgctgatgggagagaagccctaacacaacgagctggtgaatttctacgaaatatggagcaagatctggatgcaattgctaaggagtattcatcattgcaagagggattcatttctcaattgcctgtacagcagcatgttgatctaaagtttctctttttccgtcttgacttcaacgaattttataggcggttgtgt

SEQ ID NO: 111763 - DNA, 213 bp, Glycine max
tccagaccaagttttatgactatgggttatcagactctatgtccaaccataccaagagaactgaaactcatcagcagtacattgctaaatcaggtgctaatgatgaagaatgggcataccatcaagatgaaagaggaaggaagagtgatttatctggttctgggacacctggtgaagacctgaaggtgagatatgctgatgatgactatgatt

SEQ ID NO: 111764 - DNA, 124 bp, Glycine max
cgggcagcgcaaatggctcgatgagtttttctcaagttggaggggttgggcgtaatcatgatggtgggacaaaatggagcggcagattcgtgtgaagaattatcgttaaagcggagatacagat

SEQ ID NO: 111765 - DNA, 196 bp, Glycine max
attctatctctcatccgctcgatctcggtgatgtgttcggccaattaccaactgttatgatcgtatcgaccgtagcgtctgcgccgttcccatcgtgctcgggtaacagttcgggccatgctggacatgctgaatgctgcatatcctacgatcacgcgcgacactatattatgcgacgctgtggtcaccaacactg

SEQ ID NO: 111766 - DNA, 250 bp, Glycine max
taacaaaccatctatgcagataaagcaggcttccatgactctggtcaagacatacatgaaaagagtgacaatggagcttgaatccattcggaattcagacagagaatccattcaagattctcttctgcttcagggcatgcattttgcatatagggctcatcaggtttttttttttttttaccactctgcagattcttttgtcattagttttgattttcccgaaattttgaggctgcaaatctgtaacttg

SEQ ID NO: 111767 - DNA, 247 bp, Glycine max
gtgcttcaatggggtttggttatatgaaataagttatttaaagggatggaaaatgtggtaaaatgaggcacaaacatcacaagatgagcttatctcatcctgtgtttcacatacgatgtgacaagatgcgataagctcatcttgtgatgtctgcgcttcaatggggtttggttatatgaaataagttatttaaagggatcgaaaatgtggtaaaatgaggcattttttagtgtattcaaactttttt

SEQ ID NO: 111768 - DNA, 253 bp, Glycine max
actagatctaccatcttacacaagagtgttttctttgccacttcttgtagattttgcgtattgcatgtgtttgatttattttttaaattcaaaatggtttttaattaaaactttactgaagaattaaaacaatcttcataaaataatcaaaattaaacaagcaaattctgatcaataagaatcctgtcttcaaaagctaaaaactgaataaagttattttttattcaaccaacaatgaagattattttttaat

SEQ ID NO: 111769 - DNA, 249 bp, Glycine max
cgaagactatgctgagggaagtgagacagggttttctgagtcacctgcaaatcctgctaatggtcctgcatccccacctactgcgcggcaatcagcacctacatctcgcaataggtgcaccagccacacctccacctgttgcacctgtgccagatttacttggagatttgatgggcatggataattctattgttcctattgatcagccagcgcctcctactgggcctccattacctattttactacctg

SEQ ID NO: 111770 - DNA, 248 bp, Glycine max
ccaaaattgaatcccagaaaactggttgaactaactcatcgttccaatgctgaaaccttcactgatggctctattgaggcagacttgacaaatcccaagaatcaaaaacccaaaacatctatggattcaaactcagcatgtcaagtagattctgagaaggttagtccattagcggtggtacgatcaatggtcgctgtttgtttattagggcgagtacccttctcaccaattgattcttccaccgtgtc

SEQ ID NO: 111771 - DNA, 247 bp, Glycine max
atcagagtgtgctttcaagtgggctccgatttatgaatcacctccaatttttacatcagcaagctctagtttgctgtgcttcattagaggactgctacaggagtatctttgtttacatcatttcagaagaaatgttataagtgcaatgaatgatttgctggagatttcagaggaagaggtcatacatttgttacgatctttctgtgagacaatgcaattggataaacagaactcagattttgtagat

SEQ ID NO: 111772 - DNA, 244 bp, Glycine max
ctcgagccttgatttgaataaattttccattttcttattatttctgatccagatctttattattgttggaattgggaatttgtttggtactctggcattgttttgggctctataatcaatgtacaatctcagtccttttttatttctgaccagtattcactgggctagattaggaattgatgcttggtctaataattctagccttcaacattgacttcataatatgggtatcttagggtcggac

SEQ ID NO: 111773 - DNA, 111 bp, Glycine max
gatggttatgctggttttgcaatcaaagaccatgtaaaataagctataacttttccaactaactgaagcgcctaaattggaaaagttatagcttattttacatggtctttg

SEQ ID NO: 111774 - DNA, 233 bp, Glycine max
  unsure (1)..(233): unsure at all n locations
ctttcactttccacgcatattacgaattttaancactctcacacacgcccaacaagccaaccctgttgtcgcattagaagaattttctcgtaccaggttactcggtcagaacgtaccctggataagcatacccgaagatattcgctctttgttcgaaaaacatggaaaagtcctcgaagtcgagctttctatgtataaggactacatacaccggggtttggcctttgtccaaa

SEQ ID NO: 111775 - DNA, 239 bp, Glycine max
cttaactgtcagtattagaggttagagaccaaaaatggtcaaatcaacatatgaaagattttcaaaggattttgtaatgggaggagtagcgcaatcatatcaaggagtgcagcggcaccaattgagagagtgaagcatttattgcataaccaaggtgaaatgattaagagaggacaactcataaaaccatacttgggtgtgtctgatggctttaagagggtcttcatggaagagggttt

SEQ ID NO: 111776 - DNA, 102 bp, Glycine max
gcaattttgatgctgagaggtcccttgaaaagtttcaggttggtcagatttgggcattttatggtgatgaggatggactgccaaaatactatggtcagatta

SEQ ID NO: 111777 - DNA, 99 bp, Glycine max
tctcttctcacccttataagaagaaactcattttaactcagactttgcatttcaccttatctatctatctttgctaacatggctgctgggactggactc

SEQ ID NO: 111778 - DNA, 100 bp, Glycine max
gaagatctcttgaacttctacacaaaactcaagttgaaggtgttcctcttgctctatgtcaatttcaaggaagattacttgcagggataggacctgtgct

SEQ ID NO: 111779 - DNA, 255 bp, Glycine max
attaaataccatttattcattaggagcatgtccttgtttatatatgttcatgttttcgtgtgtgttactgcagctgttgggcatccaatatgagaatcaaccagttagtgattcctccgagttgctgtctgctcaatccttgattttggaggataaaagtgagcttaaaccaagaagtgtagaggagagcccaaccgactttcaccatcaggaaattgtgttttctgactcttcgcacccagaaagcgcggcatc

SEQ ID NO: 111780 - DNA, 253 bp, Glycine max
cgacagacaagtctctcttgctcttctctctcctttttcttctttccttttccctcattttcgtttctttgttaatttcttctcagtcaaccatggactctccgatgtaccaccaagagcaccattactaccaccaccatcatcgtgtgaaccttcttccttcgccgcgacacagtttgagttcttcatacagcagcactagcagcaccagcatcaacaacaatggtctcaccactcctaattactgtcagct

SEQ ID NO: 111781 - DNA, 251 bp, Glycine max
gccttgtcaatttaggcttccattattgaagacatttaatgacaacggtgctagtaaaattgaacaatccttgatgagggtttgcaatgaatgggttagatatagtctttgtattagccaaagcgcacctgatccaaaacttaatatcataccgaattagatttctggcaaaacgtcaaattcatattgtacattactgtttttagttttacttttgcaatagtcatcatggacttttgcacaattgatgt

SEQ ID NO: 111782 - DNA, 243 bp, Glycine max
ggctgacctgaacaaacctccagaaatgatctctggcaacatgacaggaggtttatcatctctgttcctacaaaatgttgaattttttcttggcatatggtctgttgcttattatgtctcttgtttgttgttaatgctgcagcaatgtgtgtctattcagcattgttcatgagatttgcatggatggttcagccacgcaactatctactttttgcttgccatgcctcaaatgagactgttcaa

SEQ ID NO: 111783 - DNA, 252 bp, Glycine max
ggtggttcgatccttggcgcttcggcatgtgataaagaataggggtcgcccactcttcttccaccgtcttcttctctctctcccttccaaatcctctctcttcgccaccaccgccaccgccactgcttcctctcggctctctctcctcccctcctttcaccactctcgctccctctcctccgccgcagctccttccgacgttgtccttgttaattctgaggaagagttcaacaatatcctcaccaaagtcca

SEQ ID NO: 111784 - DNA, 240 bp, Glycine max
cgtttgaagaagaagaggaaggtggcgaaggggatggagaagacggcgtggcggattcttgctaaccagctggggcacttgagagagatggaaacgcgggttcagcagcgttaagtggagacggcacgcgagaggcagatgctggataatttgcgagtggagcttgataagcagtgggataggaagcttgacgagtgggaaaaggagatacctgcgacggataaggcgagggacaagctt

SEQ ID NO: 111785 - DNA, 231 bp, Glycine max
ccgtgccggtcgtagagccggcggagggtttggcggcggtggcggcgtacgattccgcggcggcggacgaccttgcggaggtccacggtttagaggaggacccgggctttcgcggtcgtcaccggtgcttggggcgaactctgaatacgtgtcgcagaagggtttgcatgtggcagtggcggtaaaactcggcggtggtgccgctcgatgatttgcagcacgaagtggacc

SEQ ID NO: 111786 - DNA, 216 bp, Glycine max
cgaagcttgtgattggaactcacagcgtgaagacaagaagcgagagtgcaggcaaagactgggatcaggttttcgccttcgataaagaaggcctcaattcgacgtcattggagatttccgtttggtcagaggaggtcaaagaaggggatgagaaaagcgagagttctctcggaacggtgtcgtttgatctgcaagaggtgcctaaaagagttcctc

SEQ ID NO: 111787 - DNA, 194 bp, Glycine max
atgaggagggagacagtggaaggaaggaacactcaaatcactgaaccagccatggctaccttctccaaggaacgcgagaactttgtatacgttgccaagttagctgaacaagctgaacgctatgatggttctctctctctctctctcgattttcactgtgaagtgaacactcgttctggttccttcattttagc

SEQ ID NO: 111788 - DNA, 261 bp, Glycine max
gtcacaacacagaccctccgccggtgggaacggttacggttacgcttccggtgaggaaactaatgacaacaacaataacctgttttctcccacttccgtgcttcacagttgttccttgtccgaggcagctgagtccgtaaggggcaaagacgatgagtactcctccgtgtcgatgagtagggtcaaggctgagtcaccatttccggttccgagcgaaatagaatttgactttcgaagtatttcgccggtgcctgagagtgt

SEQ ID NO: 111789 - DNA, 259 bp, Glycine max
ctcacatgtcccagtctctttccaactctaccagtctaagtttgtaactcttgttgattccaaagttgcacaccacactcaacttaccgttccttttcctctcccataaaaccagcaagcgactcactcccacactcagcccagtcaagagagagaatgtcgaaggcagtgagccaagaaggcctgcagaggcaggactacgtagaccctcctccagcctctcttttcgaccttgccgagatcaagctctggtccttct

SEQ ID NO: 111790 - DNA, 135 bp, Glycine max
cgcatggtcacccctgcccctcgtttccttgaaagaagtttggagacatcatataatcccaacatgtggatttgtgtgagggttcctccaatctgacacgcgaatgattcatcttctgattcgcagtcctaagtt

SEQ ID NO: 111791 - DNA, 124 bp, Glycine max
gttttattcacaggaaattagcggttcacgacttccttcagcatatccctattgtagagccaagacccaacttggtcagagaaatcagggaagcattgctaaggcatctcacggctgttcttgg

SEQ ID NO: 111792 - DNA, 123 bp, Glycine max
ccaaagaataaaaaagtaccagctccttcaggctgcttgaaatgcgtcgcatgtggacaatctgattggagtattgaggatccagcattcaatgattttggtgttctattctatttattgatg

SEQ ID NO: 111793 - DNA, 112 bp, Glycine max
cattggaacaccggttcatcacacgaggatccagcactcttctcaaatcccgaaacttttgatgcttcaaggtttgacggggcagggcctacaccattttcatatgttccat

SEQ ID NO: 111794 - DNA, 154 bp, Glycine max
ctcgagccgcgcgcgcaaaggattagggtttcgaacgtagcgcttttggagcttccattacgatttcatacttgcgcacgatcaggagggagggctttggagttgaatgcattgctcgtttttactgaaaggagaacccgcgctctctttggtt

SEQ ID NO: 111795 - DNA, 278 bp, Glycine max
gaccaaattgtcctttataataacttgggtgatccttcatcttgaactagttttgtaggttgagttaggtttagtccattttcatctaatacaaacttttgaaagacgtttcatcttcctttgttgttatcaatgttgttaaaatagccactatagtggcgctattgcattgcagaatttcttggatccacaattgctactctgtccactattgtgaacgagtggttgcgacagtcatccttcatctttttatcatctttgacgagtctccatccaat

SEQ ID NO: 111796 - DNA, 279 bp, Glycine max
aagcggcaaaaccatacttatcgtcctaatagaccattgagtcacattgaggaagcacaatctgttggacaattgagagaagtgtccaacaaggttcacaatgcagaactgaaattgtttttggaagtggaaccggggatggattcatgtcccatcgcaccacctgacaagaccaaggatgatatattacttttcttcaagctatatgatcctgaaaaagaggagctgcgttatgttggaaggctctttgtgaagtgtactggtaagccattggaaatc

SEQ ID NO: 111797 - DNA, 272 bp, Glycine max
acaagattctgtagagaagaagagcaatggcgtccaacgattccgattcgcagatgaagatcgtacatggcgatgctggttacatacttgaagacgttcctcacttcgccgactactattccaaatcttcctacatatccgaatccacttctatccaatcctgcttactcggttgttaagcagtatttcgtgcacatggacgacacgttccctcagaaggttctatgtgtttctacttacgctagtgacctgtttgtgtatttagttctcca

SEQ ID NO: 111798 - DNA, 263 bp, Glycine max
ccaagttcctatagtcaggtttcagtcggttctccaggacactacggacccacatctcctgcaagaggaacttctcatggatcacctttaggcaagacagctgcagctagccagtttaatagaagaaaaaattggggacattccggaagtcctcaaactctagaagcattttcttcacattggcaaggtcaatatcttgacagcacaagccatactgagggaacatcacaagctcttggcagttcaccatcatatctacagtc

SEQ ID NO: 111799 - DNA, 226 bp, Glycine max
tctcgagccgattcggctcgagttttatgactctgttaataaccaattaaaaccaaagttttctattctctgtagctcacatggtgggctaagaatatctgactttggggtggaaagtatggttggcaaggagagtttgagaactgaggtcttgaacttgagctttgagaagcttatgatggttgaatgtggtggaaatagtgggaaaggagtgaacattaaagct

SEQ ID NO: 111800 - DNA, 228 bp, Glycine max
cgtgagagtaaacccaattcttcctccaccaccagcaccaaagaaaccaatcttcacagatgctggtatgattgactatctcagtggtgatgcatacaaaacagaagcatcccatgaacaatctgaaccaacttcatatgccgtgccccttcattctagtcctactaatcctgcctcaaccgctgcaacactatcttcctctccaccttattccccaagtactccatc

SEQ ID NO: 111801 - DNA, 220 bp, Glycine max
tgtccttgtgttacttctcgttggtttcaccatgtcttgctatttgtatcatcttgtgtaccttcttaagctttgagcaattcccttttacttttatttcactccatcatcatcattcacacatcaaacactactagctccttctaagtgttctctgtctctctctttcttttggggtatggagttcaacaagttcagaatcagaagctatgaggggcaa

SEQ ID NO: 111802 - DNA, 218 bp, Glycine max
gaggctcgcctaggcgagctgatccaactccaatttttctacttcgatagaaaaactcatatctcacattcaagatgttatgttgtaaatcccaacggtcagaatgtggataattttcatagccacctccgacaaaatttgaaaatgatccaatggttaacgaatcagggatgattactttactaaaataggtttaggtaaaatttgaactctcataa

SEQ ID NO: 111803 - DNA, 216 bp, Glycine max
gtgaccattcccatattcagtttttctctcttttcttttgtttttccttccttctccaaatttctcactggtttatgaatggaggtcacggaggtataaccaacaacaatagagagaggggtttcatggaaacttgttcccagtttatggtctctgactctgcacataaaagttaatttattgactgcagttttgcacatgtctcgtacactgtag

SEQ ID NO: 111804 - DNA, 205 bp, Glycine max
ggagcagttcagtgatagatgatagttcttcaacatgttctactgattctttgccgtcagtagtcatgaatgatccccacaagggaaactgcttttcaaattataaagtccaaaagtcacctagcagaggtaagaaccaaggcaaaacatcatctaatgtgggtagattgacgattgaaatagatagtctgccatctggttctgc

SEQ ID NO: 111805 - DNA, 233 bp, Glycine max
attctgattcttaaactaacagctctagcactcaacctagttcagctcattcgtgttcctccttgctccacttcagatcagtcccaaaatagctatgagaaatcacattttcttcttattcgttctcattgcacttgcccccactttctctctccacttgcaatctcacgccgctcctgcagggccgttgattaagcatatttcttcactcatcaaatggacaaggtctacct

SEQ ID NO: 111806 - DNA, 215 bp, Glycine max
cggctcgagcggctcgaaaggaattacattttgcaaagcattaagctattcagtaagtaacaacgctgaaaactatgtcagtagcaaaattgactttgatatcaattaatttggttgctttagagtggtgatagttatcagttatcacgggctcaaggatctcagaggaaactgatgaaaataaatttattttaattttgagttatacaacaaca

SEQ ID NO: 111807 - DNA, 122 bp, Glycine max
attttagagacataagatggtagtaaaatgggggtcccttattctccttgttaatgtatggatgtattaaaagttttgtcccttgtaatttctttgtttggcttaatgaaaggtagtaaaat

SEQ ID NO: 111808 - DNA, 270 bp, Glycine max
gcttaatctgcctccagggcttcctgaagcttgatcaatagaaatgaaactcaacaccgttgtgacttgcttaatgcatctcttgctagtcaagtgcctatacagtgtcatcaagaagcttccaataatttaagatccaataccctgacattggtttcccctggcaacttggttagcagtcgcatttcttctgttcaggatgtggtcagagatggaaatggtactagagaagtgccggatatgaacttgttttctccaagaatcatactg

SEQ ID NO: 111809 - DNA, 195 bp, Glycine max
caaaaaagaatgtcaacctctgagcattcttgaccgcggtgaaatatattttctccgatcacctccaaattatacacattcactatcatcgtgattatttttttgagcagaaaatttgttcagttttcacgtttaagggtcgcttagctgctttatgatggttgacttcgtcattctgccactggatcattgtaa

SEQ ID NO: 111810 - DNA, 259 bp, Glycine max
tctcgagccgattcggctcagaaaacaaacatggagaaaggacactaggagctgtattcatgaagtagactaaattgatactttaatagttctatatatataagcgtaattaagcatatgaaatcttttactctttcctctaactttctcttgaagtttaacagctgagcttttgggattcaacggttacattcgtccatatgcaagggctagaggccgagatatacttagtggagtcaattatgcttctgcagtgccg

SEQ ID NO: 111811 - DNA, 127 bp, Glycine max
tgactagttctagatcgcggcggccgctcggatcttagaactagtctagctgcttcttcagctagctccgttcgtcctcgatctcattctgattctcccaaatcttcattcacaagacaagatgggt

SEQ ID NO: 111812 - DNA, 247 bp, Glycine max
acaaattcgagattagactaggttgtttgttctctttgcgctgtcccacaagcaattaagcacagagcacaaagctgtgtggtggtaaagtccaacttggcctagcgaagtttcaagttgctgttgtttgcaggagaaaaatgtggttcgtgtacgtgtgcgacgaggaagagaaggaacttggaaggcaacaagcccctgggtcgtgtccctactgtggagccaaagttgaagccatggatgttga

SEQ ID NO: 111813 - DNA, 221 bp, Glycine max
tttgtttcccgctagtgcagcaaattttagtacaatatattagactatcttctgttactgtatctgatattatgaattatttttattattatcatcattctttagcatcttttaatataactactgtgtatttgttaggtagtacttatctatttgtccttagttctctttgtagtttagtaatgatgtatgtggaggagtttgcataggaataatgtctt

SEQ ID NO: 111814 - DNA, 221 bp, Glycine max
actaaactcatattccaaaacgcagaaccaacaatgtcgttccccttcaaccatgactccttcactcacggaggcggcagcaccgtgcaccacacccctcacaacaacgcgccacccaccacctctgttcatcacttgagccacctggttaacaccggtgttctctcgagcaaacccactgtgagagttttcaccaaagccaatcccaatttctctctcac

SEQ ID NO: 111815 - DNA, 264 bp, Glycine max
aacagcttatcgccattgcaattggcgagacctgttgcaatttgctctgacaagccgctgctcccgctgctgctatgctgttctactgctctgctacgctgctgctctgcaaggctgaccctggcctggccaactcgtgaccagctggcacgaaatcgccattggtgctggcctctccactgccacgtggaccatccatggaggactcgccattgctgctggcgggttgccttcatcctggaaatacttttagaacagacccat

SEQ ID NO: 111816 - DNA, 253 bp, Glycine max
ccaacagcatgaaaaatttgggttaaggatgttcgtttctctcgccacaaccttttccccgccgcatactccgtcatcctcctccattccagattcgttcctccgtgccaccttcgccagtgctgttggcagcaataacatttgggaatacagatctgcccggcagcgatggaggaagcgccagatctgaaatatgctcccagtattgaacgacactggtgccgaaaagcttattacgattgtactatattgt

SEQ ID NO: 111817 - DNA, 279 bp, Glycine max
attcggctcgagcaaaattttagattagtagctctttgtccttttaaatttgcgtttttttcttctaagtggaccactcaaattgtacttttgcgcctaactggttcatgcatggttatatttgtgtctcatagagaaaccttcaagggagttgttgtgttgaaggattccttctttgatccttggtttcaatggagaggtgttacaatgagaaagagtacaagtccaagaaaatagacctttgtctaaagctttcaacttgtggtgagaatgcagaag

SEQ ID NO: 111818 - DNA, 272 bp, Glycine max
cacgaggtgctcttcgcttctctctctatagagcgtgcgtgttatcctgcgagagcgacagagctcgctttcgctattgtgacatctatagcgcatgcgtaacttcagcaatcactgaactcgtcctagatctctctcgcactcctctagcaaatggtgtcccatattctatcgagtccgcactcagctcgatattcgtcattctcgatctcatcgatagggcagatgtctctgatctatgcagtgcggtcgctgctggcagtgagtctcgc

SEQ ID NO: 111819 - DNA, 263 bp, Glycine max
cgagtcactcactcagatctgactcttgcagagtcttggtttgcatctgacacatctactgggtaccttgaagatgctattgcaggttggggtatttggtgcaagcaacacaacataccatcctattctcaagatcaaaagaaaagccaatatttggttgatcaggaggacttattgccaacattttcttcaacttcccaaatccttcatgaccataaaaacttcagcactgccactagggacctatcatcatcacaaaatga

SEQ ID NO: 111820 - DNA, 260 bp, Glycine max
ccacgacgaacctgcgcatctctctctctctcgcgcgcgccgcttttctctcagccagccctgcaggtactcctccgtctgctctcagccccaaacggctcttcttgttttctctgctcccaagggttttgcataatttagctctttttctccgcccacaatgggtaaagctaaaaagggaccaaagtttgctgttatgaagaagattgtcacttccaaagcaatcaaaagctacaaagaagaggttttgaacccagaaa

SEQ ID NO: 111821 - DNA, 258 bp, Glycine max
gccgacaagtggttagaatgcctatcaaaaatttgtgcctttcataatttgccacttcccactgacgatgaaaggcttccagtcggtacgggtagcaatcctgtttatttagtgggaaactctgttgttaagatttttgttgaaggaggactggaagcttcactttatggttttgggacagagctagagtttcatagtctgttgcatgaagtcaactcccctctcagtaaacacattcctgaggttttggccagtgga

SEQ ID NO: 111822 - DNA, 147 bp, Glycine max
ctagttctagatcgcgagcggccgctcggatctagaacctcgacccgctttataatgttgtcggtgaaactttctggtcatctacttggtgcaacaaccctgcatttgaagggaaacaacttgaggggacaaggataacccttgtaa

SEQ ID NO: 111823 - DNA, 155 bp, Glycine max
cgatggaggaagcggtggacccggcgcggctggtggtagaggcagtggaggagtttctgaagagcaaggtggcgaagtccggggtgacggataagaggtgggcgtgcgggcttgtgatacaggcgctgatggtttcgtcagagtcaagggaacat

SEQ ID NO: 111824 - DNA, 238 bp, Glycine max
gtgaacaatattttccctcctctaaggtcccaatttttcttaaaccctaaaacactctcacttaagcagctgctgcagaagagaatcccgatttttccaaaatgtcgatgacctagagttccaagatgcttcagtacttcaactaccgtatgcgtgtcaccattcagagacggtcgtcaactcgtcggaaaattcatggccttcgaccgccacatgaacctcgtcctcggcgattgcg

SEQ ID NO: 111825 - DNA, 255 bp, Glycine max
gtcagttttcactaattggtgtcattaatatagtaatatttttttttctgcgtcattaatataatattaaatatcgttaaaaattgacagcacaataatgtgttaatttcattgtgaatataattttacaaatattataataagtttattttaacattaaaattgctctaataacaaatgaaggcgtattttcaatattctcttaccacccaaatagcagtcacatttgtgacacttttcatttctctaaaactt

SEQ ID NO: 111826 - DNA, 248 bp, Glycine max
gaccgtaccatctgtaagtgtttgcaatacctgcattagaagattctcgcttccatttggggaagttccaagcagcacttgggcgcatattacagggatcatcacaatctggtccagtgcttactccggctgaagttttaattgcaattcatggaattgatcctgaaaaggatggaattcccttgaaaaaggtcacagacgcatgcaatgcttgctttgagcagtggcaaacttttactcaagaagtt

SEQ ID NO: 111827 - DNA, 234 bp, Glycine max
caaatgtcctgtactttggatattaatgtattcatagttaaaaaatgaaagaaattagaaatgaaagagataggcttcaaagtagagttgcaaacattgagaggcttgccgagcataacaatgcattgattcgagaattgatggaaagtatgaacaagccatctacaatagatgaaagtcaagatgaggatgggagtaactgagtgaaccataatgactcattgatgctgattt

SEQ ID NO: 111828 - DNA, 271 bp, Glycine max
aaatttagtcagcaatgcggtaaagtttacacatgaaggcaaagttggaataaacctttatgtcgttccagaaccaccttttgccaaagcagaaggccatcaaaagatgatcacagaacagtcaacaaattcagcaaatggggtgaaggaagagaaacgtgcatcaacgccgcgaagagcagcgatcaaaattgtcttgatggtcagaaacacaatgaccatcctagccaaaatcatgcattcaatgatgaatgtagatcttcagttaaaa

SEQ ID NO: 111829 - DNA, 227 bp, Glycine max
caaagcctgtgaggtctggtggtaagaaagtccaaaagcacagaaattcagatgatgatgagaggaggaagctgttgcagaatttgagaggtagggttgagaagcttagtaaattgtgtaaggtttctgctaatgatgaagaagattctgagtctgaggagggcattcatgataatggggtaaccaatcatttgattggtggaaggaatgaggtgccccaaaacaaa

SEQ ID NO: 111830 - DNA, 243 bp, Glycine max
ctcgagccgttgtttttctatttcctttttaaaattatggtccggggtcgatgatttcactacactttttcgaagtatgaggaggaagagtgcctcggtattggcgatgaaaaattaagactcaatcatggcgttcatgatgaataagcggggcactacttttttgaccaaagaaaggcaacaaaaataaaagaagcaaagggtggaaataaaagttgtccctttgacaacacttcttagctc

SEQ ID NO: 111831 - DNA, 200 bp, Glycine max
agaaattgcagactttattcatcgaatgagtataccataacaaattttgcaaggtaaataagggtgaatgaatacacagaagtaacgaaaagcttgcatagttaaaggctcttttcttctttttggctaataaaaagttcaaattgaggattttgaaggaaatcactagcttgagagacaatgaagatatgaatcatcca

SEQ ID NO: 111832 - DNA, 229 bp, Glycine max
caggatattcccttcttagaaagaagagatgagtcgccagggtttcagaagccacctgaacaagatcaattctatgcatctcttgttactgccaaagccataattacttgccagattcaagaatctggtcggaatctgctaagctctcctaaagtgtttgagcaaaataatgcaaagacaagactttcactggcttctgtgcacgaggaaccaattccaacgttgatgg

SEQ ID NO: 111833 - DNA, 255 bp, Glycine max
gtggtatttattaccaagggcctgactcgcggaaggaacttaatgagaagaaaggtgatggtttttttgtgccggatgtctcgaaaagggaagacagtactgcaacctcaacctcagagaagagtgaggtggttgtgagggagcgagaacatccggagaatatgttagaggcagaagcagagtataatgccctccttgatggtttaggtcctcggttttttggatggtggggtacagggattcttcctgttgatg

SEQ ID NO: 111834 - DNA, 253 bp, Glycine max
tcagattgttggcctaattggtagtcatttatgcatatggaggcggaatgggaaaagaagcatatttccttcactggaaggcaaatttgtaaaaggttcatgcatgcgttactttgatccagaagctgtggttggatgtgatgatggagctgttcgtgtttttgacatgtacagtaggaaatgttctcaaataataagaatgcactatgcaccaataacatgcttatgtttgagtgaagatcaattgatcatg

SEQ ID NO: 111835 - DNA, 250 bp, Glycine max
atccctagtagttgaggcacttcatgcattcatacaagatgaatcagagcacaagtgattgctattggtgtctttagtaatatggtgctatccaattggcaaacctcatgagtagtagaagcagcagtcaagagggaaagaaccatggcatatgccttctctcatcagtggagggcctgctctagccaaggcctaggtaattatgaacttggcaaagctagttggagttggagctagaaggatcgttgga

SEQ ID NO: 111836 - DNA, 251 bp, Glycine max
atgctgtgaaggaattggcatacagaaaatactaggctcttgtctagggcgcttttccacaaaaaaattgtggcggtaatttcaactttcttcagtctgtcaatgttaccgtctgttgctaagcatggaccttgcgagttacctgacatcggaataaaaataggcttaatatgccattacgtcggtataagtatgtcaattttttgtgtgccctttttaaatttttggtttttcttgttatttaaaagtga

SEQ ID NO: 111837 - DNA, 191 bp, Glycine max
ttataatccaaagatgcacttacaaccggcgttttccgtggaaacaaaaaaagggtctctcgtctaaacccaaaccgccccatcccacaaaagaaaaattccctttgtattcttagaatttgaacctttgattctttatctatctgctcagggcaacgtgggaacataggatttgtcaaacccatccgaca

SEQ ID NO: 111838 - DNA, 253 bp, Glycine max
gtcacagcgatcgacggcgcacatcagccgcagcaactttaaagcggcggctccagcaaccgccacttgcgtaccggaaccttacatttgggcctacgtctgagcgcacgagttcgtaagggctttggactcagtctctgcggcggtcaggccggcgtgaacgatcaacttcctacagtcctacgatcctttcggtgcagcctccgctgaggactcgggcgccgggtcagatgtgtacgtgcacagtcgcgtt

SEQ ID NO: 111839 - DNA, 105 bp, Glycine max
gtttttgagaatgccctttctgcctctgatggaattccaaactatcatgtccctctcagtcatatctgttttatttcttgagcttggagaattctcatttgtgtt

SEQ ID NO: 111840 - DNA, 148 bp, Glycine max
aggctcgaggaaaatgtgagttcaaagagtagtcttgtttcatacttgacagctgctttaattgggattgttttggggaacatggcatgtgtgaccactaagagcactagtccacccagaaagtgcttgttcccttgctacctggggg

SEQ ID NO: 111841 - DNA, 125 bp, Glycine max
ccaccgaactaccgggcacccagagatagcaacaaaacagcctgataggactctctgctagatgcaacagatcgtgtcatcgaacactgttacacctagacctaaccaagtttaccacacagaaa

SEQ ID NO: 111842 - DNA, 125 bp, Glycine max
ctctagcctatctcttggaggatatgcttgatatctatgcggccatgaataatgggtgtcgcgtgacttggttacctgttctggactatttctgataactcggactgcgctgatggatatcgtcg

SEQ ID NO: 111843 - DNA, 128 bp, Glycine max
ctatgatttttctggactcttgtattctgagctgaactaactctgttcttccctcgtatagtgaagtgcataataaggacatagaaccttgcgtggacatggcaacaacagcgttgtccacgaacagt

SEQ ID NO: 111844 - DNA, 268 bp, Glycine max
gtgcattttgattcaatcaatgtggcatatttcaaagtttgggttgctgtgcagaaagagcagaaagaaatatcagagtagagagcaccatggtgaataaacttatcatgtgaaaaaataacataacaatggcatgctttaccgattagagagcattgcagggagctaagaaagttacatgatggctgccaaagacgtagacattcatgcgattcgtgtggagtctcatttcttatttacaacaaggtcattttattttattgtccgt

SEQ ID NO: 111845 - DNA, 208 bp, Glycine max
ccctcgagccgaatcggctcgagctctcattcttctccctaaaatcacctcatggccaccgccacatcccaaacccttcgattccaatctccgtcactccctctctcctcgaagctccccctctcctccgcgttctccgtctcgctccgtcctcgctaacgcggctcccgccctctcgtgcctagtcgtctccgtcgggctcgacgcg

SEQ ID NO: 111846 - DNA, 259 bp, Glycine max
gtcattcaagggactatctagtgttagttcattcgggaaattgggtagccgcagctctggaaggattgctgcagagtggcttgataaacagtgatggcaatttgcaattacttgtggtaatcaatgattccatattggcaaagatacggtaactacaaaggtgcttaaccggcaaggcaaaaatcaaagttaaaagggaaaggaatattatgtaattttgggaaataagcaaagtgagttgaagtgaagttcgcggtag

SEQ ID NO: 111847 - DNA, 170 bp, Glycine max
ataagccggaacaactcaaagtcaacttcaaatcactttacacacaatatatattattacaatggttccatgaccctatgcgattgcgctactcttctgtgactgtctcttcttgtcttcttatctgatgaatgacatcacttagaaaaatgaagttcgaagattgacga

SEQ ID NO: 111848 - DNA, 251 bp, Glycine max
tagcataatccgcttttgctgtcatttcatgcccttcgatttcaattcagcaaaacacactcacaacggtctctcacaaccccaacaagtgttcatccgcagagattaacactgtgacccaaaaactgtggagagagagagagagtggaatgaagaaacgcaagtgcattccgttggtggtgctgagaaagttgctcattgcggccatatgttccatagcgtttgttgctctcttctctgcgcgcgtacac

SEQ ID NO: 111849 - DNA, 245 bp, Glycine max
gaattaattagttgggcacagaggtctagtgtgtttttctgccttttgggttgggtttgaagttgctttttaattggtgtactggaagttgattcttaattttatacctgtgttgattttcagcaggagtcttctgtgtttagagagattccggtggtgatcatgtcatcggagaatgttttgacccgaattgataggtatgctcttgattagtttacacttattgaatctaatggattttacga

SEQ ID NO: 111850 - DNA, 244 bp, Glycine max
taaaactgaggtgtatgccatttatactgacgtttctgatgatgagttgtctgattcagaagtaaatggtactaatgagaaggatgaaagagattctgcgtatgaaacagataaagagtcatttatggatgttttggcagcattaattgttagcgaagaatttcaggggatagtagcatctgaaacagggtttagcaaagttttggatagtggctcaaatgctggacctagagtgtcaaatctc

SEQ ID NO: 111851 - DNA, 156 bp, Glycine max
gtttatttacctgaagaaatacactcgaacgagtataaaacttaggagaaggaggatcgaaacggcattgtggttgatgttccttcattcatcttcatttctcttgcaagtaactcttcagattttggttttttgttccctatccgctctctctta

SEQ ID NO: 111852 - DNA, 250 bp, Glycine max
gtccttttgaagtcaaatgtccttaatgaagttcagagatccttgctagatggtggcatgcatgttgaggatctaccacccttacctcgttctggatcatctcctcatttgagtcagcataggcttccatcagattctcctgaaagggaacctacttgtcgcattggtggtgttgctgggttgtggcatttcatatatcgcagcatttatctggatcaatatatatcttcagagttctcatcaccaatta

SEQ ID NO: 111853 - DNA, 247 bp, Glycine max
cattgtccccatgcattggccatttttctctgtgtgacgtgtgcgatgatgctacctgcaaacattcctctacggttgcggctctaaaagaaaacaagcatttgtcatgtctctttgtataacccgtgagactagaatctagaccttgtgttattggagttcatttttgcattctcaaaccaaggagaaatcctagagtttctcctttggttgagacatagggacctgtgagtgtcataaacatggg

SEQ ID NO: 111854 - DNA, 242 bp, Glycine max
cgagagataaactatatcaaatctttaggtttcttatagaatcaaagttttgtttatactttgtaaattgtaatgtaagtgggagaaaaactaatctacgtagtatttcacttgatcgagctggattccaccccttgatacagatataactgtgtcttggacttatctattctatgatgctatgttgttatttcaaaagaatatgagcatccatatgtgatactgtcgtttgaatttgatac

SEQ ID NO: 111855 - DNA, 173 bp, Glycine max
ccagcccacttcattccttgcttgctggagagaccattcagtttggggcagtagcatctccgactgttcttccgtctatcaaccgtgttgtgactcatcgcattggtcgacctcgatcatctatatcacacgttccaatgactcacaatcttactgcatctgataacgattgc

SEQ ID NO: 111856 - DNA, 264 bp, Glycine max
ttcttctcttcgtctcctgattgcttctgtctcctaagatactttcctcttggtacctttaatgtttcaaaatctgagttttttttttctttttgttttctgacagacaagaaagcagggaaaaaatcaaacaaactttcagcaattagttccagattcgcagaacaattatgacggcagcttcctcatccactccatttttgggaatcagagaagaaagccctcagattacaacacaccatcaaccctccacagtttctccaa

SEQ ID NO: 111857 - DNA, 255 bp, Glycine max
ggatagctggcttctgttatgttagagatttaatagtttaataattaaagaaaagaagaaaaggaacagcttagttctggattgtgcttgttttattgattctccattttagggttcgttgaaagatactgcagaaactgtcggttttattagtaattcagcacaaattcttcggtggagtttttcttgtgtcaactgttataggctgcgtttacgctgtgtttgttaagttgcctggaaattgttcaaattggt

SEQ ID NO: 111858 - DNA, 256 bp, Glycine max
agcgacggcgccctttttttttttttttcacaaagtgaatttcataagcatcccttgaaagtggttccaaaacttgctagagttctacaatttagaatttaaaaacttttgtcgttttgaataaggccaaaaaaccaataaaaaaaaaaaaaaaaaaaaaaaaataaaacacataaacttcaaaaaaaaatagaagattggtgaacaaaaaaaaaaaaacctcgaagaggggggccccctcatacgggaaattcac

SEQ ID NO: 111859 - DNA, 239 bp, Glycine max
atctgaagttaattgctttctctttggttcctagctcgcgctctctctacgcacgcctcatcatcccttctcttttcacttgctttgcaggctccattcatgaggtctccgtcgttggctcttcgccccattggtggcctcagttttgatctgtgccggagggacgctatgcttctgaacaagggccttttagcgccagcctctctcataactggcacctctagtgtcgcgttagtttt

SEQ ID NO: 111860 - DNA, 257 bp, Glycine max
gaattgaatcaatggctctgttacaccgagtcatgcacactatcactataccatccatgtatcagcatcagcggtggcaacatgcttggatgctgcctcctctcaccatttggatttgtggcatataatttttcatcttctttaggttccctccttcccttgatctctctttctcatgcattgcccttttgtttctttctttctatctgttttacagtttcaatcacactccgttatggttattacggcgattcttg

SEQ ID NO: 111861 - DNA, 257 bp, Glycine max
atcacacccaccataataatatctttattgttctcatctactctggtaccatatcaaacacacacacacacaacaacaacaacaatagaccatgtcggagtgcgagcaccacaacgggaataacaggaagatcttccggcaagtgatctggtgcatagtgcgtgttcctcttcctcgtgctgaccacaactcttttgatatgggcaatccttagacccaccacacccaccttcagcctccaagacgtcacggtctac

SEQ ID NO: 111862 - DNA, 201 bp, Glycine max
gatatttcccttctgagcattgattagtgtggactagttgttgtatactcgatgagtaaggcttctgccactatgcattgctgaacactgcgactaaggggatccttgatgctgcttgatagctacaggtatgcacctgctgcttcggccacactgacatatcagggattataggaacacagagggaaggagatgatgaag

SEQ ID NO: 111863 - DNA, 259 bp, Glycine max
ctcgagcgctactgctgaggtatacatcataacagttttgaaaggtctcaagtatcgactagcagcaggtgcaagattacccaatataatcattttattgcctgtagaggaaacagaagttgtgtctcccaaggggaagaagattattaaccttggaggaagagctggccaagcagttggagcgttattgaggaggcttcagattcctcaccaaggtagtgaatcgaatggaaagcttagaattggtggtttggctctg

SEQ ID NO: 111864 - DNA, 263 bp, Glycine max
tctcgagacgtttgaaatttacatacttatgtgattaattagaacaattgcacaaatgtagtaaaacaaagactcattattttcaatttgacccacactaacaagagggactacaaaacaaccttaaaaacctagagactaaaaaaataaatttaggtcatttttattgtctttcaaatttaaatttgacagacaaatcaaatgacctacatttgagaaattataaacatgtttaagcttacaaaacactttatttctatcta

SEQ ID NO: 111865 - DNA, 191 bp, Glycine max
ctatcttcgtttctttcacaaccacttcgtcttctccgattctcactagagtcacatcgcgcctccatttcgctgcattccctctgcgttctccaacgacgaaactcatatctcacactctcgcatctgacactctcggtctcacacataccttctaacatcgaaacacccaagatatctttaggttctaa

SEQ ID NO: 111866 - DNA, 263 bp, Glycine max
tgagcacatctcagctcatctcggctataggcctgatatgggattctgccagtcgcccgctttcggttttactttcgaaggaaactgtgaatcaggatgataaaggattccagaaagagaaaattctggatagcgttgatgagagacaaaatgatttggtatatgcttcaaccgacattaagtactatcctgttactgagggaggtgcacagattgtgcagggaaaattggatttccctaaggtaatgcagaagatatcagta

SEQ ID NO: 111867 - DNA, 275 bp, Glycine max
gttagagagagagttattatggtgactatggaagagagtccaaggagcccagaggcgaagctggggttgcgagtggaggatttatgggacattcaagaaccacagctaagtcatgatgagaagctcaatgcttgctttgaaacatccctgtctctgccttccctccacctccttcgaatcaagaagttgagataatatcagatgccaccctagccgaggcagtgaaactacttgcagaacacagcattctcagtgcacctgtggtggatgtagat

SEQ ID NO: 111868 - DNA, 272 bp, Glycine max
atctcgagcgattcggctcgaggccagaattaaggattaaggattattcagtcacaaggtatttgctcataaccatgggtgttggtacataaaatttgagcgtgattaagctgtatttaatttgaccgtgattaagctgtattaatttgaccatacttagtgtcactttttaattagtcctcttgaacaggaatggctttataccttgcacaggaagttataaacaatgcttttgctgatttaagtattattgagcataagaatagtggcat

SEQ ID NO: 111869 - DNA, 266 bp, Glycine max
aactgagggaaatggccgtgagagaagttatatttctcgccaatctgatgatggagcaaggtcaaacacttcattggtgcaacttgaacggagaaaaaaagtagatgatggcattcatgtgtacacttgctcgaggttgatcaatccaatgataaaatgctggagagttttaatgggaaaaaattgactccttttggtgctaggaatttttgttattcagttgctgtgcaaaatggtggtgacaaggatacaacacaatttggctt

SEQ ID NO: 111870 - DNA, 158 bp, Glycine max
gtgccagtgtcaccggacaaaaatccttgaaatttctcccttcggcacagagtttagggttttacactttcttccttccttcctacattctcgttccgttccgtcactatccaagtatggatgaaacacccgaaacgtctcatactgtccgttgtcgc

SEQ ID NO: 111871 - DNA, 265 bp, Glycine max
ctgaacttgtttatagtaaacatttgagttctctagaggcatgcttaaagaatgctactgatggtaagttccctgagtgtggtttaatagatgatagagttaagtttcacaagcatttgatggaggcgcaagctaatccttgttggatgactctggtgaggaagaggcgggggatgaacttgagaggatagtgtgtgactgtaaggatgggaggaagttgtgtggtagtaatagagtgaagtatgtgaaaccggagtcaaatgtg

SEQ ID NO: 111872 - DNA, 264 bp, Glycine max
cttgagagaaagagaggagagaatgggagaaaccggtatcattctcagcttccccggaaacttagacccgagagcagaagagttcagacccaacaccataaatattcaatgccaatggtaccctcttcctcccctcttcctcttcctcttcccatacccctccctcctcctaacctcaccacctcctccacccgctccctcctcctcaccccggtccctctcacctcccactccgccctccgagccgagctccaggccttcgga

SEQ ID NO: 111873 - DNA, 162 bp, Glycine max
ctcagcttctggttacaacaacaatagcgacataccagtctttgatctaacgagaagtacaggcttatcagaaatttcaggtgagttaggcttggaagggaatcaactaagtggagcagaacttccattgtcaattttagctacattctagcagcaacaaac

SEQ ID NO: 111874 - DNA, 238 bp, Glycine max
cggtcacatgtcattagaaactcatatacactcacatgcagacactacagtgtccatctgcactgctataacacgcagaataccacgaaaacgactgactcatgaaggaaatggattctcgggctcattaatcatgacatccctcagcccgcgctagaaacgccacacgtatatcggactcacagtgaatcacccgtcgccagatctggtaacaccttggggagattatagtcgtgga

SEQ ID NO: 111875 - DNA, 230 bp, Glycine max
aattctttgtgatgtttcatcattcagtatctgtatgactgtattcccaagcagattagggtccttgtcaaccatgtgtgtaggttgtcaatgtgaggaagtcttgtattccaatgaagtgaaccatgatttgtttgcatcacagagattgatatgacattaatttagtcgctggtagatggggagacatcaattcacttgtctatggaaaatgcggttgtggcactatc

SEQ ID NO: 111876 - DNA, 270 bp, Glycine max
gcagagtatttccccccctattgttactgttggacctaattccttaactgttctttgctgtgctgatggccggatatatggcttttttgtctgaggaaattgttgtgttgggtaattttacactgatttctagcatctggtttaacgggttcattcaattgatgatttgcactttgtgatctgattgtgaaattagggatgcttgcaacacaatttctattggttaatgtttgttgaaattcacaggattactagtgaaagtcattacat

SEQ ID NO: 111877 - DNA, 257 bp, Glycine max
gagagaagccagtttttcaagccccgccgttaaagccaccatcgaacagtccctcaacgccgaccccgtcaccgttaattccggattgggattccggccaagcgcggtggctccggtgaattccgccccgaggcggagtttatatctgcacccgctgctacaacagcatagcagtgctgcacagcacaggggcgatgacgtgatacgacctctatatatattgcatacgacgaagatgaggcacccgatcttggtcg

SEQ ID NO: 111878 - DNA, 257 bp, Glycine max
gtcaatagttctatgctgtctctgaaagacctacatttcctttctattctttagttgtaatagaaatgaaacatacataaccagacgagagtacataatatttcaggaatttccggaagccttattgtaatttaattctattctatttcgattttccttccctttagtgttgttggttaagttgatgcatttagttgatagagtttttattctttttacccttttgtgagttttcggatctgtttacaatcacggaa

SEQ ID NO: 111879 - DNA, 262 bp, Glycine max
tttctgagagattcaaaagtgggtggtggtggtgttgatggggtttttcactcaaaacccaccaaggttgttgttgttggtggtggtggtggcagcagctcagggtttcaagagttgaccctcagctacctttgtgataacccaaaattcaatcttgctgagaaagagattcctggtaaaagcctgctgaattccttggaaaaaatgagccacaaagggaaagaggttgtgatctgtgagaattcaaatcaagatgggaaat

SEQ ID NO: 111880 - DNA, 253 bp, Glycine max
tgctaaagttgtctctaaacaagatcatatacccaagcagaagtttctcagaagttaaaagatcaacttggctacaagcttaatgttaaaccttctcaaatatctcacaaggattctggccaaggtctatttttagatggtgcagctgatgttggtgccgtaattgccttttatcctggtgtggtctattctccagcttattaccaatatattcccggataccttgatgagcagaacccctatttgatacaag

SEQ ID NO: 111881 - DNA, 254 bp, Glycine max
gagtttttggtaccaactctttctctctctctctctctctctctccccctcttctccagcgtagtttcagcagaatttcagggccaaattaaaaacgcacctaaatctcaagagatgctataaagaggaggataagagcacagaactttgctacaaggagagtgagaagaaaggctttgatcagctttgggattgtaaaagtggtagtggtcggaaaaaaaaatctccctacacccatcatccaagtcgatcaa

SEQ ID NO: 111882 - DNA, 248 bp, Glycine max
tttatccctgctagaactctgcttcattacattgcctgttgacttctgagtatagtgtagctgccctgttggctttttcttggatgttaattgttaggtgagtaaaaatttaaaggttttggtaggaggtgaggactgcaaagctttattggttggggcatgctgtatggtctatctggttgaagtgaaatatatggaatttcaaggagatatattatcctctatgaagccccgataattaacaaaga

SEQ ID NO: 111883 - DNA, 272 bp, Glycine max
caatcttaaaaaactgtgtggctccttgttctacttgcggggtaatcatggacgaaactaaaagcacagaaccaagtgaattttcaagtcctctgcttcccataggagcacaagggtatggtggcaaccatgactatgaggaaaagaggcagaaagaaacttggtgggatattcatctcctgctcagactggaatcatggatgatctcaatgttggtgtggccgagtattcactttttggatcaatactgacaattggagcaatgataggtg

SEQ ID NO: 111884 - DNA, 265 bp, Glycine max
  unsure (1)..(265): unsure at all n locations
cgaacattttctcttatttttagtatcaattacaatgcttagtgtttttatatgcttgatcacctttcaaatgttgtgctggctcatttttatgatactaataatgagatataagtagtatgcttgctgcgtttggtaacataatgaagttaatccagggaaaaacaactttgggcaattgcttcttgcactccattttttgtttcctacactttcaaatgtnttaaaattctaatattacccgcctttattatggaatgatcat

SEQ ID NO: 111885 - DNA, 160 bp, Glycine max
gcagaaagtttagagcttggctgtctttgaagtcatgttgtgaatgagagacaattgagcttgtatactctattctaaactgagcttcaagatgtcaaactcaaggagcactcttctcaagttagctcagagggaagcatccattgtgattatctgagat

SEQ ID NO: 111886 - DNA, 131 bp, Glycine max
aattggcgctgtagtcatcttcacaggcatggttgtggtggatcctcctgattggctctcttgtcagcattgtcctcgcaatggcacaacccatttgaccctctcctccagaatcaccacgaccatcacca

SEQ ID NO: 111887 - DNA, 261 bp, Glycine max
ggttgcgtaatccgtaaagtttcgtgacattacagaaagaaaacaagtatcgttatgtaatccgtaaggttccgtaacgttacggaaaaagaatcagcaaagaaggggggtgaacttatcaagataggggtgtaaatagcaatttgaatctaggcccttccggaacattttggaagttgggttgcttaaggaggaagcaattgggcgacaagctcctccacgtttttgaaaaatggttcctggggcttccctggcttctgt

SEQ ID NO: 111888 - DNA, 267 bp, Glycine max
atcaaatttagctaaaggctttaagcatgttgcttcttcagggacagagaagtcaggagcagctccaaatattcctgtaaataaccatgatcgcagagccctgccacagagaacaagaacccattcaaaccactttgtggcaaattttggttccaacatgcaaagttcaaatccacagatggcagggccattcaaggaaagtttcaataaacacacaagggatctgaatatgcctgcaggaattgttccaacaaagaggcattttac

SEQ ID NO: 111889 - DNA, 143 bp, Glycine max
ggtgaatctgaatcaattcaaactcaaaattccagattggatcggattgaaaaattgcaattctgatttgtttggattgcatcacggatttcactttgaaaatcctatctaatcctatccatcaaattgcttagtattttttt

SEQ ID NO: 111890 - DNA, 268 bp, Glycine max
ctgatttaaaatcaaacaacactgagcaaagcgtaaagaatgtcagcaagtccgaagtagactcaagcaaggataaaaacaaagttgaggtaaattaatctattgctttttcacaaaagttccaatatatatttttgcttttatttttctctataggaagacgacctagataaagagatatgacatgattaggttatgaccaatgataatgataaaaagacttttccggagaaaagaaatttgttggtgaaccagtcttgatccttgt

SEQ ID NO: 111891 - DNA, 245 bp, Glycine max
tctcattttcatagactgcgttaataggtagccgtacctaataatcggcaagcaaagtactcattacttcagctcatgaatctcgcaatggcaacagacatattcgcatacggtattacaatggtgggaaaatcactaccctgtgcatgttacaagcttcgtgaataacgctcatctgcgatgcctcgtttagtatctaatcaatctactatcagatctagctcattaaggctgattaagacctc

SEQ ID NO: 111892 - DNA, 127 bp, Glycine max
gggtgctgtcatagttcaacattttctgtgatcactcactttatctcgcttccaaccttgccatgctctgcgggcattttccgctatggccgaagaatttgtgaagggctctgttcatcaagacggc

SEQ ID NO: 111893 - DNA, 247 bp, Glycine max
cccgctggtgctcacttcgatcccgttggcgctctcttcgattcagatgcagatgcaacaaacgcagcagcaggccacggcgacaccattctcgacctgcactcctcctccttcctccggtggctccgcgtccgaggcaccgccaaagcaggtggctcaagcaatggacaagctcggacaggccgaacgaatcatcgccgacatccgaatcggcgccgaccgcctcctcgaagcgctcttcgtcgcg

SEQ ID NO: 111894 - DNA, 246 bp, Glycine max
agcaagttttgttttgtttggtgttgtgttgcactgtcactgttacagttgtcggtgtaaaggaacagcggtgggtgagtgagagagggaggaaacatggctacggcgtcggcgtcggcgtcgtgggaggaactgacgctgaaagtgaaatggagcggcaacgaatacaccgtccgcgtctgctgcgacgacaccgtgggcgaactcaaacgtcgaatctgcgagctaaccaacgtcttacccctt

SEQ ID NO: 111895 - DNA, 251 bp, Glycine max
gtggaaaagattgaaaatgaaagcccgaaatactatagagaagattcttgtggaaacaatgaattaggagcatgctatttgtttttgcattgctcttgaagcagttcgtatatagtaataatactatgattgcccacgtaggaccaatcgcatcatgtcaactagattttttgaggatctgcgattagagtgggaacagttttctgactgcacttgaggaatgatgccgtgccaatttcgaaagggagaaa

SEQ ID NO: 111896 - DNA, 245 bp, Glycine max
gtgagtcaggattacacattttgtctgatattttgtaaacccatgcatacaagatcatgtgaaggagctgagaattgttaatatacattctagttgattttgacttctcatattttgtagttggatgaattacaacctatgattattgaagggagaccttgttgagtaatatcaaatattcttgacaggattcacctttgtaagaaattaatatgcaagggaattttcttccttcccgaaactga

SEQ ID NO: 111897 - DNA, 256 bp, Glycine max
ctttctctcaaatcctctttcttactctaaaatgtctcgtcgaggtggctctaaacaacaaccagattcacgccatccagcaccaccgtctgcggcgccttctcccgccggaagaggacgcggccgtggccgcggagaattctcctcagttcccgctccttctccggtgaatgcaccatccgctcctcctccggcttccaccatcggcgttccttccggcgccgcacctgttcgtgccgcgtctccgtctccggcg

SEQ ID NO: 111898 - DNA, 251 bp, Glycine max
ctcgagccgaatcggctcgagacggggaacatctccactttccgtactttccacagatactgcgatctgcaccagcccagtcgcagcatctttggaaagaggggcagagacaggcagcgatgaggctggtgctgagtgctgcgacgggcagaggatggaccacgggttcagggatggacggcccctctgttccagtagttggtagggatagcgaatcggggacggggaacatctccatttcccaaggtctc

SEQ ID NO: 111899 - DNA, 230 bp, Glycine max
ggaagacgagggagaatgagggttggattcaagggcggtgacgcggttgataaggctatcaagcttttccgaaacgtggatatggctagtagcgagtttggcaattgcctcctgaaggcgatcaaaggacttggaacgggtagattcagccatggctcaatgaaagcaccagttggtatgacccgaggtcaaggctagaattcgaggttctagcatctcctagagaaaag

SEQ ID NO: 111900 - DNA, 254 bp, Glycine max
  unsure (1)..(254): unsure at all n locations
gaaagaagcaagcatgtgtggcggacaatcatcgcagatttcatacctcggcagcgtccccgcaccctcacagcctccgaactctggcccaagcgcacgnnacctcaacctcaacctcctcctcctccaggtgagtcaatatcttcttctctttcaacattaatttcccaactaacaaaacaagctcacgtgacgtgacagttaagaggcagaggaaaaacctctacagagggatcaggcagcggccctggggc

SEQ ID NO: 111901 - DNA, 186 bp, Glycine max
agaaagcgtaaagaggagaaaaagcgtttgcgtgatcagcgtagaaagcagaagaaaaagctaaaatacggggatgaatagaattgtatacataactgagccattagttaaaattttgcatcaaccaaagttttcattagttgctgaattttttaaggcagcgtctgtagtttctccttcctagtt

SEQ ID NO: 111902 - DNA, 248 bp, Glycine max
atccgatgtagttaaacgatattacgcttaaggtctggggcaatcgagaggaccgttgcacgtttttatttctgagtttttttcgttcctcttggtctcctctagggattcccattcattgtatttgtctcgtttctttgaaaagaaagatgggcggggttttagtcctccctttggtgtttcaaactttgtgctttagatttgttataacttgagccctcttcgctcggtgtatggggtgccgcaaa

SEQ ID NO: 111903 - DNA, 249 bp, Glycine max
gcttggaccagtgtcacaaaattgcctaaattatcatttcttgaatacctgaacatgagtaactgtactattgattctatacttgaagatgataaagctcctttggcaaagcttattctctctggggccatgttcatgaatgaagctgaagctttgttatatgcaaatacaaatttcctatcctttttggacgtggccaattccagctttcacagattcttcttcttaagtaaaatgaaagtgatagaa

SEQ ID NO: 111904 - DNA, 263 bp, Glycine max
atttattttctgaaaatctaaaggaccaaggagctttacattttagttgttaggtgaaaggatttctctatcagttcatttatcttcaattgttgcgaatgtgtatttaatagcctaagatgattacttcccaataattattatattattcattcttacacagtagtgtctatgcagtataattgtagataattatttatttattgttattgagtgacagtacacattcatcctaattgcaagcaaagaattacctaagcaat

SEQ ID NO: 111905 - DNA, 269 bp, Glycine max
atttgattctgcagtcagaataatggctacttatttcttcttcagtaatgactaaatggttctttcattgtatgctgcatgatggattacttatttacttgacactaatttcataaaaaggaacttggcttctgagtatgccatagttgccatcctactcctacctgcatttttatgaaaacttggagctttgctgcttctgtgtaatgaaaagctaggatgctttgaactctgttggagtggttatactgaaatttttcatactatgc

SEQ ID NO: 111906 - DNA, 266 bp, Glycine max
tctcatcaaaaccatttcccattacccagatctcctccgatctccgaccactctccggccacaaagccaccttccaaatccaccaaatgtgctaactttgccacttccaaccatcttctccacactcttcttataataccacttcttacacacacccttttcaatttgtgatcgacccagaaggctattcaacgttgttgggtcgaatctggtccaaagttgtgttctttgggaggtttgaggaggacccttctgaagcttgagat

SEQ ID NO: 111907 - DNA, 257 bp, Glycine max
ttctggcatgctttctcgaaagataataagaaagatatttttgtttttccgaataaaagaatgattagttgattaattaataaatagcactacacacacacacctctcaactaaaaaggaattcaaacaaatgctgagttagatcagtctggattaatacttaagcaacctaactcctaagtaacattgcttaagcgttaatatattcctttttttatattttggatgtactttagggtaatcatgtatttatgttc

SEQ ID NO: 111908 - DNA, 250 bp, Glycine max
atggatttcatttgtaatcaagatgatgtatatccaatttttgtacaactaatgaatagatttatggaagcaatattcaatcttaccattttaaattactacttggacgaattggtgcacttgtcaataagtaacagtgctaggaagataattcagaaaagtgaaggctaatccaggaaagattgaatattgcttccatcttgattacaaatgaaatccatatggaagcaatattcaatcttaccatttt

SEQ ID NO: 111909 - DNA, 250 bp, Glycine max
tgagaattgaggaaggtgtaaggtagcatttctgttggatgaaatatttaaaagcagagtaaaggagggaagagtgacagagatggagaatagttggttatgagtggggtaagtctctcaggctgggggctaatctttggttatgagtggggtaggtcttttttttctctctcataaatttcatttttattcctttgttattccaagaaaatctataatcactgttatgaagatagcaatacagattata

SEQ ID NO: 111910 - DNA, 264 bp, Glycine max
ggaacattgttacagatttgagggaacctttcaatcttcaaaagggttggcttttgtgggctggaattggacttgctggtgccatacttgccatttcattgaccggagttgctgtgtctttcttcaatggagaaaccccacaaagagagactgatgctcttgttcgcttgcttccgttaattggatcttcaaatctcagcactgcctgcttggtgggcatcacaggtgttcttgctccactccttgaggagactgtttttcggg

SEQ ID NO: 111911 - DNA, 238 bp, Glycine max
ctagaagctaataagcacaattcaagttaaggtgtcaattttctgaaaactcatcctcttcctactccaatcatttctatcatacatttctaacatatgcttccatagaaaaaaggcgtaaccacgtcccatatcctaacaatgtcatgagccggttcctgttgcctaagtctttatgcttacaaattaagagtttaactgcaaaggtctttcgagaaaggtaatgagagttaaaaga

SEQ ID NO: 111912 - DNA, 219 bp, Glycine max
tctcgagccgaatcggctcgagcggctcgaggtgtaattggcatggattgaattataattgggcaacattcttcatgtaaggaagttgagtatctggttacatgaagaatgttgctgaattataattcaattcatgccaatttcccttccagtaaccagttagttaatttggcaaaacgtgggaagtcactattcactagtgtatcctatatttcgttt

SEQ ID NO: 111913 - DNA, 256 bp, Glycine max
gtaaattcatgcagttcctagctttcgattgttgcagtggtatatagggttgcctgttagagggatgttgatataggatctatgcaacgttatatttcccattgaagatgacgttatatttttagtgtataaataaatagcactacactgtctaaatctgcttgatactgaaattgcaaaattggacgctaaaattatattatccagagtaacaatttgcaaagcggggctagttttcaattatcaaacaaatgac

SEQ ID NO: 111914 - DNA, 254 bp, Glycine max
gtcgagccgattcggctcgagctccgaaacacagttcctatactgtcttgccacatactagtagattattatgtatgctacgagtgtgaagccaaacttataccactagatacgtctctttaatttgtgttatctatataatgattagaaaccaagatgtaacatttatgaaagtaaagctggatttgcaacattccctgatagatttatacatcaaagatattcgtttttggcattcaaaattcataatttgg

SEQ ID NO: 111915 - DNA, 248 bp, Glycine max
ggaaacttgaaaattcttttttgcttggtccagtcttagtgtatccaacccctgtctacgtaaggtgcttgcatacactaagactggaccaagcaccttacgtagacaggggttggataagttggagattactttgcctaaggggatatggttgaattttgatttcaacgatacacatccgcatttgccagctttatacttaaaaggtggctcgcttttcccgtgggactccctcatcagcatgttgg

SEQ ID NO: 111916 - DNA, 246 bp, Glycine max
ctgggttgtttagatttgcttgcattagtaagagtatttctgaaatcttgtgactcaatgaactaagctttgcaagagatggatatctttttcttatgctgaaaactaaggaacgaattctccattaaatactcagtactttattaaatatgacatatatataataaatacatatttatgaatgtagttgcagaatatctctcaaggtgcaagcccaaggacaatgttctttgaagcttggacctg

SEQ ID NO: 111917 - DNA, 100 bp, Glycine max
gtcgagcctcactgagctcaccatggcgaccagagccatgcgttgatgagcaatcttcctagttctttcttctagacatgattccaaaactagcgttggg

SEQ ID NO: 111918 - DNA, 101 bp, Glycine max
gttgccactgcatgagactcgcaataagtaacatgccaggacgtgtctagatccttggaaggatatagcaccgagatttgccagggtctacataagctctg

SEQ ID NO: 111919 - DNA, 228 bp, Glycine max
atcttctccgtctctctctctgagtcgcctcataccatgttcatctataaatggatccagtatcagtagcatctccagattcaatctcgtcatgatatgtttgcatcgtaggtgttccacttacaccaatgggtagatttcgattgcatctgacatctctatctgtcaccgagttatcgcctatggctattgaagctgctccttaaagggccaatgttgatccatccc

SEQ ID NO: 111920 - DNA, 99 bp, Glycine max
gaaagtctagttcaagttacagtacttctgagtttggtcactttggagtgcgacttcccgttctgcggtgatcacagttggactttcaacttgcatggt

SEQ ID NO: 111921 - DNA, 263 bp, Glycine max
tctcgagccgattcggctcgagagtaaaccacaaaaagcataactctttcagaaaaaagacaaagtctcaatcataaacttcaacaaatgacaatgagaatactaatttgtcaagtagaattgttattatgaagcctgggcagataggctttcaaaattttgaaactggaaacaaccttgcctcatcccaagatactcatgattctgtcaaatacaatggttctccagggagaggtagttcacatttttctcttacagagata

SEQ ID NO: 111922 - DNA, 256 bp, Glycine max
cagaaaagaaggctttttttttgccaacaccagttgcaaaactaatatcctttcaaacggatttgatctacaatggcctggtttctctcttttcctctatccactctcttttttccgtggctacagagtcctaccaccgtgctgaggagaccaaagacagtgttgaatcagcagtgcaacgtgctccttctcatagcactcatggcagcggactcttgctgaagaaactgggactttgcttcctgagtgttgcgta

SEQ ID NO: 111923 - DNA, 100 bp, Glycine max
cggacacgtcggcagcaagacctcttgtggttatggagtggccactggaggacctttggcctggggtctttgttacaatcatgaaatgagtcctatgcag

SEQ ID NO: 111924 - DNA, 228 bp, Glycine max
tatcctgtgacggaattggcaccttatcatactaggctcttgtctaaggcgcttttccacaaataaattgtggcggtaatttctactttcttcagtctgtcaatgttaccgtctgttgctaatcatggaccttgacgagttaccttacatcggtctaaaaataggcttaatatgccattacgtcggtataagtatgtcaattttttgtgagcccttgttaaatttttg

SEQ ID NO: 111925 - DNA, 181 bp, Glycine max
tttagatgtgtccttgccttctattcatgatattagatggagcttagcacggttgttatacttatttaacatgcagcttgatagaaatgttgccatgtaagttaatcacttcatcatttatttggctgagaacttttctatccactggttgtttaataaacttgaagcacctcacttgacg

SEQ ID NO: 111926 - DNA, 243 bp, Glycine max
cgtaaacaaaaagttaatacagtctcttgaccaattatgtcccattatgacattatcaaaaagtatctgctgatacttgatacaacctgataatgaagttatatttcttagtctaaaatattgtttagtacaatggaaggcagacattttaatggaataaaaaatcaagttcattattataggcttaggatgatcaaatacaactaaaaaaatagtcaaaattaatataaaactttattttct

SEQ ID NO: 111927 - DNA, 104 bp, Glycine max
ggtcgagttccgctcgagctagcctagcccaagcatcttcttcggctcgagcagatcgtgccctaattcggttattccccaatggcatcgggctagtcagttga

SEQ ID NO: 111928 - DNA, 121 bp, Glycine max
tcagccttgtgtgaaagctaatggcaatcaaatatcataattgcccatatatgttgtcctttgtgaccgaggccatgctggggtactgtaagataaaatgacggaaaaccagattttacaa

SEQ ID NO: 111929 - DNA, 172 bp, Glycine max
agagacttcgatgatgatgaaatggacgaccttcctcctagtaaaatgtaactagcgcccatgatgatgaatgctcctcccaatggtgccagtaatggcggtgatgggaagacaggaggaggacccgttcctgttcctgttcaggtgcatggaatccccggcaatggaggag

SEQ ID NO: 111930 - DNA, 222 bp, Glycine max
tacttttaagatatcagaactatataaaatctatgactagtgcgtaaataatgcagggaaattgtcggtttcactcatgtcttggagaactatactgctttacacacaccctctccctgaattatttacgcactagtcatagattttatatagttgtccaagacataagtggtgccgaccatttccccggctttgataactttttttctctatatatatacc

SEQ ID NO: 111931 - DNA, 99 bp, Glycine max
tgagcagcgccggttcccattactggtgactgtggagttgtttgtcctgtgcatcagtgatctgtactcaattggcattgcgtatttgggaaaagcaga

SEQ ID NO: 111932 - DNA, 99 bp, Glycine max
ccgtctctctctcactcaatatgctgacgtcatttgcaatggctcgaaccttccacggtcattcacgttcgagatgtcggcgctccgatatctgaacat

SEQ ID NO: 111933 - DNA, 252 bp, Glycine max
tcgagccgattcgactcgagcggctcgagcggctcgagtatgccttgacagaggttgaagacatactttgtgctcattatgctaattgcatgatatatcatattggagtgttggttgaaaaatctcttagttggtatggtagagttacattacatgacttgattgagcagatgggtaaagaaattgtgaggcaggaatcaccagaagagccagggaagcgcagtagactatggttaccggaagatataattc

SEQ ID NO: 111934 - DNA, 241 bp, Glycine max
aaagtcgcaggaagagaggaaagcagtggataaattatatggcaacaggattgaagatgtcaatagtccttcgctgaaaaaagatttctcaacggcaatgttggtacgtcctgataaaaatatgggtaatgagacaggctgtagaagcctttaagaaacttcaaaatgcatatgagattctaatggattcgttgaagcgaaaagcttatgatgatgagctaaggagagaggagattttgag

SEQ ID NO: 111935 - DNA, 108 bp, Glycine max
tagcaaagctgatgcttagggacagagctgaataagtgaaaacattgcaatattctactaattatcatcataggagattaattagagtagatccaaatatcattgcag

SEQ ID NO: 111936 - DNA, 239 bp, Glycine max
tgcatacatcattatgtatatgtgaggtatcctaaaacttgttagtataatacacaatgtactcttaaaactgttttacatatgtctatagtttattaatttattcacgcatattagtaaggaaatatattttgtaattggtacgtgtgtttattaagctaattaatttacagttttgtaggtagattttatagttaatcaacaatattaaggtagaattttattcattttggctagct

SEQ ID NO: 111937 - DNA, 263 bp, Glycine max
gagagacagagacaccggtcacagtcacaccacaccggcaaatattttggtaagtaaagaaaagaatagtggctggagtcaacgaaatcgtgacgacaccattcgaaggacttgtttgtttaactacgactgagtatatcgtaattcgttcgtccattagcattgcttagggttttggaacagattcaattcagcgttacttcaatccaagcacatggcgaaaggaaagcatacgcatacccgagcacaggggaagaagtggt

SEQ ID NO: 111938 - DNA, 261 bp, Glycine max
gtctgtgatggactatcttcatcacaacatggtggattgcaatctccatgggcggcgaacccaggtcaagtatcaatggctgacattgtcaggatgggtaggccacaggccaaggcatccatgcctaactcttctctccacagtggtagccatcagaatgattttgcactcccatcagcttcacaaaacaatttgcattcagtgcaagttcatgcttccaagttgtcagagacaaataatgaccatggctttgctattgac

SEQ ID NO: 111939 - DNA, 249 bp, Glycine max
gaaaaataaaataaaatgaacttatcaaaaagaaaaggaaacgctttacggcgcccttaccgaactcgtgctagagctagagtaatgggtgaagtagaggagatacaagagaagatgaaggccgacatggaggccattaaagagaaaatggccacaatgatggaggccatgatgagcgtgaagaagataatagaagccaatgcggttgcaattgccgctaccagcgttgttgctaaggtgaacctgatg

SEQ ID NO: 111940 - DNA, 248 bp, Glycine max
ctcgagccgttgaggaggactcgtctgaaaatattgacatacatatagttgccaaagaggaacaggagcctccgccggattgtcctactatactgcaaaatgagaagttagataataacaattctgactttgaaaatcaagaatcacagctgcatgaattaaataaaaggacgtacccgctagatgcagaagctatagaaattgctaatgaaggtgaagttgatttgtttgatggaaaacggatagac

SEQ ID NO: 111941 - DNA, 151 bp, Glycine max
tgcaacaggtacaagatcaagcagcactggggcgccattggaagaagatgcagcaggtagaagatacggcaatggggtggcattggaagatgatgcttgcactaccataaattgccatagaatcagttagttagttagttacaaccatatt

SEQ ID NO: 111942 - DNA, 240 bp, Glycine max
gaagaagctaaagctgctttattaggaagaattcaacggttgactaagttaattttggtctccactaaagcgccacacacaactagattttctaaccgtcctggtcctcgtagaagacattcctttggggaagaagagttggcataccttccctacaaaaggagggatttaatctcagatgacgaaaaccctgatatgcatgttaatttagatggaaatactgaaacagctgatgattct

SEQ ID NO: 111943 - DNA, 210 bp, Glycine max
ttctactaatttgaacggccgggctagacgaccacacaagttgaggtgtctcaagtaaccatagggtacgtgatggaaacgttcctcgtctcttacatttgatttcaggtatagcagcgcctaatatgctgaggatcaaggctttagcacgtacgtacgctcgtcgatttcgggatgcatctggtggctatgcacgacctcgtgatacgt

SEQ ID NO: 111944 - DNA, 219 bp, Glycine max
agaagatgccatgccagtatctagttcaaagccaagtactagaggtcgaaaagggtcatctggtgcgtctcaaactacaaccagaggaaggggcaggggaagaggaagaggtacaggttccagcaccatgaagcagacgactgttgatggagctttagggtttcgcgtttctcagaggtctgcatcagttgctgcagcaactgccatccgaagtggtgc

SEQ ID NO: 111945 - DNA, 239 bp, Glycine max
tgaacaagaaggggcaacaacaatggggggtttcgcaatgggttataccttcgattccaaatctgggctgacaatggctgctttgcttttgatgattgtgtccttctatgctggcatcctttttggcaacaatgctcccctttacgtctctcagcttgtttctcattcttcatcttcttcttctcctcccaacaatgtctcatccaacggtactaccaaatttactaacaaagttgctc

SEQ ID NO: 111946 - DNA, 185 bp, Glycine max
gaaaaaattatttggagtttttcttactaaactgtacagaactcgatattctcttcacttagctgcgagatgtaatttactcggtatgatgcaagcaacacaaattttgagattgtcataaatatttgagacttcaagagtatgccttcattgatttatcaacttaggctattgtttaagagtcc

SEQ ID NO: 111947 - DNA, 225 bp, Glycine max
aggaaattatggacaagaccaccaagcgttgcaacattcttcatcatctgcacctttggtgcgtgatgattgccttacacaggctccacaactggaacttgttggccactcaattggatacgctccttttataggaatgtctcatgccagaatggctttgccccttgagatggctcaagagcctgtttatgtgaatgccaaaaataccaaggaattctgagacga

SEQ ID NO: 111948 - DNA, 221 bp, Glycine max
tagaaaacagagcactaaaggagcattggggcattctcatgtttgtctttggcctgataggattggaaactgctcttggattgctgagtggaattggcttagtcatcgtgcttcaattaagtaaatagcttgtaacttttgaaatgaagttaattcctggcctttagcacctgcaatgggcaaatactaaataaaacaaaatcatcatggtctctgttatg

SEQ ID NO: 111949 - DNA, 221 bp, Glycine max
taaaagtgttgattttattattattttagagtaaattacacaaatctttgtaactatcctccatttttaacccctacaaaactccccctgattgtggagttaaaattacacgaacctcccctctacttttaatgaaatttggttccgaaaataccctttccttcaagtttttaacaactgaacacttgggaaaacaataagatcatccaatgctttgaaga

SEQ ID NO: 111950 - DNA, 218 bp, Glycine max
ggcaaatccacctctgcatcgccatgttgccatccctaatcttcaatgatgttgggaatcattcatttaccagttttcctttcaaatagttatggaaaatgttgattcttgagaagatcaagatgactactagctcattctaaataatgctttgccaactaattttctccgctacaggccccatctggcttcttctcttcttcagccttctctccatg

SEQ ID NO: 111951 - DNA, 212 bp, Glycine max
caggacattcccagtgccactgaggccacagtaaaacagcaaaacgtacaatctggaaattctcctatttcaactcctgcaaaacagaaccagagacgtgaagctagtggaagattgattaggagcatacttctaaataatgaagctcgtcaaagtcagtctacaactggggattctagaagagcattggacgaaaagttcataaaaaggga

SEQ ID NO: 111952 - DNA, 258 bp, Glycine max
gcaagatgaagttatcttatatcggggccattggaacttgattgcgacctggatttaaatggttctgcatcaatgcaccatacaccagctgcacccccaactaggccaacacgttccaggagaagggtaaggattgaggaagaaagttctgatgaagattcaccttctgcagttcctaccacccatcattctgtaataagtcgctcacagagagcaagcaaaacggcagcaatgaacaagatgtctttgccactagat

SEQ ID NO: 111953 - DNA, 264 bp, Glycine max
ggaaaatagagcctgacttgcggcaatattaatcatggagcatgtcctcttgttgactaagttcggtctctctcgcttcattcctgaggaacctgcttgggtaagagccaaccgtgcaaaacacactacacaggcacaggatatgtgttctaagaagcttttaaggactatttccggaggagataagacatttagagaggggaaaaaattggaatgatgcctttccagcttattatttacttcattaccacttcacacgagaga

SEQ ID NO: 111954 - DNA, 261 bp, Glycine max
gtcatccatttactgtattccaattacaaaatcgaaacttggatgcataaaatcaggacattaaaagaaaagaagcatgtaacgacagaactgagtgaaattcaatgggacattaaagtcacagtggtctatccttgatggaatttatatattagatcaagactgatgtctggcagcgtggatgcacaaatcaaaatgagaaagattgagtgaactcattgttctagctttgtattgcatgtttcatttcaatttcatttt

SEQ ID NO: 111955 - DNA, 202 bp, Glycine max
gcctgttcttctttccgaaacacctctacctgttcttgttctctctaccggtaattgcatgaaggatggttggtcaatggcaaaaccagaagccagtttgaaaataatcatatcatcattttgacctaatcaaatcgaaacaaccacctaatctcactctgaaaatcgtttccctttgctgaacttgaacaggtcggagaaa

SEQ ID NO: 111956 - DNA, 269 bp, Glycine max
cagaccatggccatatcttttgaggttaccgagttaccagttagatcagccttggattctggcgagtttatactctggaactgtctgcatctggaactaccaatctcagaccatggccaaatcttttgaggttgatctatcgcattgatgtcaatgtgaaaaacctctactgggctgacagtggtgatctagtaacaattgctagcgatacatcattctacattctgagtacaatcgtgatgttgttgtatcacatttagatagtggaa

SEQ ID NO: 111957 - DNA, 163 bp, Glycine max
cccctatgaatcccttgtattttttgtccagcatctttacatgtacactaattggtgttatgataagtggtgttggtatccaataagcctccactgaagtctgttgaacagccagatagggccaatgttgtggccacaattgatcccctgggagagttggtta

SEQ ID NO: 111958 - DNA, 274 bp, Glycine max
ctcattaccagtcccaccatcttctcttcctcgcaaaccaactgaaacttctctttcttcttatccttctttgcttcttcataacaacaacaacaatcttagtgacttgaaacccattgttgtcagtggagaccccccaacttttgtttctgctccgggtcgcagaattcttgctgttggagacctacatggagatcttaagcaagctaggtctgcacttgaaatggctgtgtattgagctctgatggtcaagacttatggactggtggagaaa

SEQ ID NO: 111959 - DNA, 261 bp, Glycine max
tgtaaattttcctcacttctggttcttctttcttcctttcacttgtttctctaaacttctaagcctttgactaataacagaagaagaagatatttttttatttgaatgttttgaagcttcttctggaattgagctttgcccatttgttgttgatgatggagaaattagtttaaactttgtttgcttaggaagttaaaacttttgcttatcgtgttgtctacactgattcatgggtttctcaattcttgtgtaaaacttggt

SEQ ID NO: 111960 - DNA, 158 bp, Glycine max
gtgggttctgggacatttttttttgttttgttgttgattccttctgattctgagacagaggaaggaagaaccagcaacagaggaatccaagttccttcctaggaaccgcgattcctcattcatgcttcttacaactttctaccttcttttcctccctc

SEQ ID NO: 111961 - DNA, 128 bp, Glycine max
ctgctcgaggatttgtctgatactgcttatatcattcacttttgctgctgcgactggatgtatcgacctttctgttgggcaggagaaattccatggtcaagccttggatacccaccatttttttgaca

SEQ ID NO: 111962 - DNA, 269 bp, Glycine max
cggctcgagcttgctaattgatgtgttattatatcttgatcgaagtgtgggattcttgtgtaatgtgattgataattgaaaagtgaattttgaatgacgaagtggtgaagttacgtgagctatgtttaagcaagtggtatctcatttatataatatgtatatttaattgtcttgtttctctattagctaggaatgtaataactcactcccagtttgctgtctgtgtttggatcctgtgatgatcttgaacttgcgttcggggaagcaga

SEQ ID NO: 111963 - DNA, 263 bp, Glycine max
aaagaatggaagatgcaaccatcttggttcctttcattaatctacattatcttccttacgcatcattaaatacaacaggccatgaaaatgtatcgaatttgcataaaaatgtgtgcaaacattataatttaatttataggataatttttaacgaacgtgtggattaatttatgtgtaattgttttaacttaactaattgagtataatggaataaaatggccacttgtattgttaaaaaaaaaaaaatacaaacaaaaaaaata

SEQ ID NO: 111964 - DNA, 237 bp, Glycine max
attcaatgtatagcctcacaattgatgaagttcagaatcatttaggtgacttagggtaaccactgagtagcatgaaccttgacgaacttctaaaaaatgtgtggaccgttgaggcaaaccagtccactggtgtggacattgagggtacagctcaaactagacaagctgcgctgcagcgtacaggctagtctttcattaactagtgctctaagcgggaagactgttgatgatgtttgg

SEQ ID NO: 111965 - DNA, 261 bp, Glycine max
tagagagagaccccatcgcagcacaagcgagttgtttgtttgcttcacttcccgtttgtcctcttcatccatgaagctctcatccaagtccattctcagcccaagccgcagcagagaccctcctcagatttccctctcttcctccctcagcaggaggctcaagagcaatggcagcatcaagggtggtggaggtggtcaagcctctccaatgttcccaaccggtggtggtggcaagagaagaggctgtggctttgagaatcc

SEQ ID NO: 111966 - DNA, 205 bp, Glycine max
ttccgctggcggccactccctatccgccgcgcatccatcccgcattccctgattctcgcttttctctaaataaaattaaaaatttctctgaagaccgtgttatcattaccggtccctgagttacgttatctgttatctctagggtgtctttattgtgtccaataacaagaggaggggtaggagagtcatgctgtaagaagatgaa

SEQ ID NO: 111967 - DNA, 246 bp, Glycine max
tgctgtactcggagtcactttggttctcctttgggaactagccagaacattgcatctctgtgccggcagcaataagcttggaagctttgctagatccttgctatttggcatccctccttcagtccctggtttaagtttatcgcttgctgatactgggtatgcatgtgtttctaccatcatatctgtcttcatgcatgaattgggtcatgcagttgcctgccacaagtgcggagatacaagtagagt

SEQ ID NO: 111968 - DNA, 155 bp, Glycine max
ggccaacatatttcttaaatcatttgcttttgtatccatagtttggttccccctcagaattttaagtctgactgtggaaccatttatatggatctcttttgtactatgagtacctctggtacttctttttatataaatacttatctttgccgatt

SEQ ID NO: 111969 - DNA, 191 bp, Glycine max
ctcgagccgcacacagaaactgtcaaatgacagttattaaaactaagtcctaacattgcagtattttaaactgctataattattaaaactaagtcctatatttccttgaataggctttccaaataattggtctctttgggttaacagaatgtatcttatttggtagattgaattggatggcatatgacgcc

SEQ ID NO: 111970 - DNA, 193 bp, Glycine max
atctttttctttcctctttgatggatccgggcagaataagagtaattttaatttttcaactggcaagtaacatgacaagcccaattgtaatgttttgtgtatggcttttgatagtaattgaacaaaatatgggtgaaccatatctgtgataattattagcaagagaagacaggaacaatattaatatattctt

SEQ ID NO: 111971 - DNA, 131 bp, Glycine max
gtgaatgggactaaggttatcattgaacagtgaggagctgatacaaatgatggcagtgaaagagattggggtttgcggtatggagttgcgatggatggtcgtatgtgtacactagatgaacaacatgatgt

SEQ ID NO: 111972 - DNA, 237 bp, Glycine max
gctagctattctttggcaaagcagcaatggctttagtaggtgaacaaaagcattcactcatggtgaagaaaggtccatgttcgcattgtggagttactcatactccactttggcatgatggaccaactgagaaaccagtgttgtgtagcgattgtggatcacaatacaagttaaaaggaaatttagacaattattttcccaagaatcccgttgttcagtcattccacaataagttta

SEQ ID NO: 111973 - DNA, 143 bp, Glycine max
tgcgttccagtttttattctcagcagccatgtgcagaatcctcgcagtgttgggccgcgtcgagaaatattacgccacctgggcacacatgatcgcacagtatcgcaggttgcggtatagaggtcatgatcagagtggcatag

SEQ ID NO: 111974 - DNA, 236 bp, Glycine max
gggacatgatagtgaaaaggagagatttgttatggaaatggaagctattatccaggagcaagcatctttggagaaccagttagcatcattgggaacactgatcagtaatcttgcctctgaagtagaagaacaaagatccactgttgctgctgcacgggataatcttgatcaagttcagtcacagctgaaatcagttcgcctaaaaatgaaggaatgtgataaggaaatcagtgcta

SEQ ID NO: 111975 - DNA, 163 bp, Glycine max
ggaatattaaagaacattgaaacattcaaaaactttaaattttagagataaaaaacctccaggacttctgttcaagcacctcactgaacaacatttcactcctttggtcccttattcctatgcttcacatacttccatctgtcttggcatgagatccttgcta

SEQ ID NO: 111976 - DNA, 170 bp, Glycine max
taaaattcttccaccaagttatgggtttccagtgttcttctttctacccttaggtctccttctagtgagatatcaatcatgtccaatgacctgacaccagttacagcgaaagggttctgtccattgaggtacatgcgtgtcacgacacgaagagcaaaattagttcagat

SEQ ID NO: 111977 - DNA, 289 bp, Glycine max
gaggaaccgtcagccagcagcagaatcccctgcccctgctccagcatatagtggcccttcttctggtgctggctctagttctggtgctggtaattctggatccagttatgctgcacccagaaatgattatcgtcctgggtatggtggtggtggtggacgtacaggtggatggggaaacaaaagtggtggatgggatcatggcagggagcgggaagtcaatccctttgaagaagaggataacgctgaagaggcattcagtgagcaggagaatacaggaataaattttgat

SEQ ID NO: 111978 - DNA, 167 bp, Glycine max
attgcaagttgtgccccccttgtctcttgttcaataagaatcgaatttgaagtgtatgtagtcttgatctacctaggtaggcattgccattttggtttttttcgtattatcttaacttgacttcgacttctttgcttattggctaagcgtataacatggctagggct

SEQ ID NO: 111979 - DNA, 285 bp, Glycine max
tggaagttgttatgcagcatatgcggtgtatcttatggtgcctgcatccaagtaagtcatctgagttttaaattaaatagtagtttaagttggccttttcttggtcaattggcaggtaactcttgacagctgaagcaccaaatatctgttacctaatccacatcaatgatcaatcaacaaccttatgtctaaagtgacaatcaaaacatacatgaatttcactgccattttttgaaaagatttcatgtgtgtatgtggggagcatagctggtgtgtgcttgagag

SEQ ID NO: 111980 - DNA, 115 bp, Glycine max
gctgaagttgatcttgaaagtgggttggttttgactgattatgagtcaaaggatgtctctactcaatggcacacaaaacaaggagagataatacttactcagagatctcgtgggg

SEQ ID NO: 111981 - DNA, 264 bp, Glycine max
cggctcgaggtcatgatcatgagactaatctattcaacaagggaaggcaacaacaacaacagcatcattggtctcaaacagtgacacctatggactacttcagcacaggcctcttggtaggaccttcttcatcatctgcaagaactcaacaacaccaacaccaatcttcttcagcacatttccaactgggacatgcacatgcccttccaatctctccattcagtggagaaaaccactcagagcagctgcagcatttttccttca

SEQ ID NO: 111982 - DNA, 109 bp, Glycine max
cggctcgagtgaagtgcatccgcaagcaatattatcttgtgatgccatacatcgtgagaggagcattgtattcaaacaagagattgggagaatggtgctggatttcact

SEQ ID NO: 111983 - DNA, 260 bp, Glycine max
ctctcctatgttgttataggccactcatctttctggtgacaccagagtatttcagtgatcatagggtgagtgaacttacaagagaagaacctggacaattacaagttgaggaattaggagatgaaagtgaggtttctgagttgttgaggaaatggagaagaagcagaagcaagagaaaaactgtactagcacatggtggtgtgccagaaaccattgttggttcatcaacatccagcattagcatgatgactactagagaa

SEQ ID NO: 111984 - DNA, 265 bp, Glycine max
tgactggcggggtggctttgacaagtggcttaattgcaggagtagaagaaagagttttacatgccattcctccaaatgaagcaattgatacagtggaggttctacaatcaagggcaaatccgacgtttgtgtcttggaagggtggggcgattcttggtgtccttgatttaggcagggatgcatggataagtcgggaggactggattcacaatggggtccacgttggaagtaacagaaaatacaaggattcatattatcttcaggc

SEQ ID NO: 111985 - DNA, 269 bp, Glycine max
atttttaaaattaaagatgaaaatttggaagtaaattgtttgaatcaagaaataccgtctcaatgtcttctaatttgatgccaaaatctaaacttggagtaaaatttcgatttgactaaatttaagcaataatatatgaaagaaataaaatttagaaataaaatgtgaaatacataacgtaggagaagccacttggggcttattgagaaagactgtaggtcttagaattcatctcacctaagaatgactacgtagatttatattttata

SEQ ID NO: 111986 - DNA, 240 bp, Glycine max
agcagattcaaaatcaggttgttaggccattccttgactgttgcagagtagtgtcaatactttgttgaggtgactgaccattgtgatgatcacaaattgattagtgatgaaacacaaatcctgtctaaatagatttgtttgctttcatgacagcacaccatgccaatgagttcaggtggaaaaaactgtagataccattcatggacttcagaactcagaacatacgcttacaattttgac

SEQ ID NO: 111987 - DNA, 277 bp, Glycine max
gcaatggatctgctcccacctctcacttcatcactagtttgggcaatggttccctaactggatctaaaatgacaaattcctcttcgtcgtcgcagttagctaaagagtctcctttgatggatgagatatcaagcattggacgcagtcagcgtcagatcatgcatcaattggacaatctcaataatcttctcagggggagcttgggggagaagtctcacccaacaagaaccaacagcaggaaaagcattgacatgtcatcggattccgtgggagctcg

SEQ ID NO: 111988 - DNA, 271 bp, Glycine max
ggcattgggatcaactggctacaaattccacgatattactattgcagctatgccgcatattggatgaacatcagcgatactcaatcagctgctagatatcaggtgacaatatttcgtctgccatggtaggaaaaggatccctctgatttcagagagccgatgctattcctctgaataagcgtagacacaatctgctgatcatgaggagctaggagagtttgcttgcgctcacgtttctcacgtcgcatgtgatcacaaatcagcagaagct

SEQ ID NO: 111989 - DNA, 276 bp, Glycine max
gtcgcgttggaattggagggagaagagaagaggattattagcacaaaagcagaagcagaatcgcgtttggatggaagcggtggcggaggggctatggggactcgcggagtaccacgagaagagaggggaaatagggaaagcagtgaagtgcctcgaagccatatgccaaagcgacgcgtcgttttgccctatcgtcgaggtcaagactcgtcttcgcatcgccacgcttctcctccagcattctcacaacgtcaaccacgccaagtcacacctcga

SEQ ID NO: 111990 - DNA, 262 bp, Glycine max
ggtgcgaatcacaacactgcacaaggattagggtttacatttgggaggtagcacgagagcagtaggtgaagcgtgcattctcaacagttgatctctctcctttcctgagagaggatgacgatggataaccgagagccatagatgcaatcacccaagtctggtctgcatatggcagcttccatattgtgaaccatggagtatcccttgatttgggtaaagaggccatgcagctatctaagaccttgtttagattactcggatg

SEQ ID NO: 111991 - DNA, 247 bp, Glycine max
tgacttgtaaaaatgcacaactcatctgcacctcctcacacacacacccccctcctccgtttcccgtttcccgtttctgtctaccctgtataaaaaagtactaacttttctttcttccgctttctgctcagcgattcattctcagagtcacacacactttcttcatcttcatacatcactgtctcattatcttctcttccttgttctggtggcgcttttcattttcagatgacaacaactgggtgaa

SEQ ID NO: 111992 - DNA, 247 bp, Glycine max
gtcctggaatgctgatgaaatcgacaaaagcattccaaggcaaagtactgcagaaagtgttagctctgataatgaggaaggtgaaaggaacaattttgaccgtgagaatattgatagagaagcagcacaagatagtggattgcattcttacaatgcattgatctcaaagggttactcatcacgaataagcaattgggatgaagagtccaggaacttggattttgatagaaagcatgatatggtggtt

SEQ ID NO: 111993 - DNA, 248 bp, Glycine max
aagcaattgatagtgaacgtctaatttcgaggttgaggactgaaacaataggattgtaaaaaactaggggaataaattcgtgaattaaattataagaggaccaaaatcaaattctgagacaaataggatcaaatttgtaattttgcctaaaattaaagaaaagtaccattttgatcaccgaaaaatagggttgacattagtttggtggtctcttaaaaaagtatgaccggcattaatttattccttga

SEQ ID NO: 111994 - DNA, 237 bp, Glycine max
ctagttctagatcgcgggcggccgctcgcgatctagaactattactaacccaaattaaatatgagttaattcagtctggtctgattatgattcaatgtgacttagtctgtaaaaattcgtcaaaagttctgaaaatttggatttttataagatttgaatttcattttagagattcgaaccataattaggtttactatccgtatcagaccagcatgctttaaattgtgttgcgttgtt

SEQ ID NO: 111995 - DNA, 232 bp, Glycine max
agcaggacttgttgtggagtggagtgtttcggaggctttcacatacgaagattttcttatctcttcatattcttaagaggggatttcacctgataccttgagagattttgttaccctacccttagtttcttcgtttcttactttgagatttcctttctctgattccatttggtttcctttctgggtattctgaggggtttttggagggtttttctttctcattttttttcca

SEQ ID NO: 111996 - DNA, 146 bp, Glycine max
cgaggtcacctgatcttagagcagagttatacaatgagctccatgtagatgactggcagcaacatgatagcgtcagagtcggggtttagaggtccagagagttagggctgagaacccattagtcttgaggtctgatagggtcgcaa

SEQ ID NO: 111997 - DNA, 101 bp, Glycine max
aacattcacacgttcgaattgcaattcggagatcgtgacacggaccctacaccaccatggactccgtcgacaaattctgggctcatcgactcgctcttctc

SEQ ID NO: 111998 - DNA, 272 bp, Glycine max
tcgatctggagcaagtcggggtgcagtacatgggcaccacacccaattccccctccaccgcttccctgtctctcaccattcgcctcctcttcgccgccaccaaccccaaccaggtcgggatcaggtacggccagtccagcttcaccgtcatgtaccgcggcatccccctcggaaaagccaccgtccccggcttcttccagcaacctcacagcacccgacaggtgatcgccaccatcgccgtcgatcgcgtcaatttgcttcaggcggacgcg

SEQ ID NO: 111999 - DNA, 270 bp, Glycine max
ctcagtatagccctcctcaactacatttgcaatctcataatgaaccccaaccactacagtatcagcctcagcctcatccacacttactgtctcagcccccacccccaccacacttgcatcctcagccccaaccccagccacaatatcagccccaacccgggcccattcagcaacctcaaccgcagtcacaatttcagaatcaacattttgaataccctgcaagatatcctcccccaccatgggccgctacacctggatatgccaactatc

SEQ ID NO: 112000 - DNA, 99 bp, Glycine max
gtctgatatacacgctgaattgaataatacaagttattgtcaggcatggataaatgcagcctcctagaatggggtgattcaatgtcctggaatgatggc

SEQ ID NO: 112001 - DNA, 101 bp, Glycine max
ctcgagccgcttcgggagaaattatatgttggaactgccgtagggtctctcttgatagttttgggactctattctgttctctggggaaagagtgaaaaggt

SEQ ID NO: 112002 - DNA, 99 bp, Glycine max
gcctctacaatgagcaacgacaaggacacattcaacgtcgccgatctcacttctgctctcaacgaggacaatagagcagaccttgtcaatgctcttaag

SEQ ID NO: 112003 - DNA, 265 bp, Glycine max
gttccaactcttcaagcgctatgattggaaggttctacggaaactcctattctcatcagcaacttcaacctataaatggaagccctttgggttcgtggcgaatccccaccgccgccacaactgctcatgcgcaaagtaaccctattttcaaccgtgaatgctcgttgcatcctttgcctttgttttcaggtgaggaaatggtgaacgcgaggatggggttctccggttcgcagaccggtttggtaattatgaccccaagtccagc

SEQ ID NO: 112004 - DNA, 181 bp, Glycine max
ggttgacatccctactgtagcaccataagaagaacatgatgatgacgagaatggcaacaatgcgcagactgatagtcaatccagcattcctattagttgtgagtgttctcacagctaatggagtgtctctagagttcggcgtgactgcttctcccgatgagatttccattgatagcttgtc

SEQ ID NO: 112005 - DNA, 267 bp, Glycine max
gagaggctgaaacaaagaagtgaaaataacagcaaaaagtaggagctgcagcagctcccccgaagcttatctcagcggcagactctgaaagctgtttgagtagcctcaacccggagaatagcaccaatgggagaggaggaaaacaaaccagaggaacccatggcaaaggagaaaaacccgaggaagaagcaacccaagagaaaaaaccggagcaagagtccaaagaggaagttgctgctgctgctgctgctccgccaccgccaccgc

SEQ ID NO: 112006 - DNA, 261 bp, Glycine max
ggcctacggcgactccttcaacgccgtcgcgagggacctcgcgaagacctgagggcgctcggcgcggcggaagtcgttcccctgttcgaaggggacgtcgacggcggtgacgtggatgcggtttacgatcggtggtgtgagaaggttgtggcggttttgaaaagtggtagtgttgggaaagctgtgataatgatggtgctgaggaatctggcgtcgttacgagttctgaagatgagtctgatgtggatagtagtgagattg

SEQ ID NO: 112007 - DNA, 120 bp, Glycine max
gattgcgttactgcctgcaagtgatcctggtatggaggtgaagaccagatcagatattgtgcatcaagagcaacattctggaagagacagctctgtatctgatccctctccacacaacat

SEQ ID NO: 112008 - DNA, 216 bp, Glycine max
ctcgatcctaaacgatctctctttctctctcatacacttttttataataaaaaagcttttcgacttattttcccatgaagtgatcccaaagtatattagagcttacattgtttcttgtctcggatttcataattgataattaattaatttcaccaacttgttggcttttttagttcttaaattccccgcttgaatcacatagagtcctctcttcca

SEQ ID NO: 112009 - DNA, 265 bp, Glycine max
cttgtatcaaactcttttttgtattgactcaaaattagaaaaaattacacagctatgaactatcttctccagaacctctggcacttttcatataatgttgtggtgacaactagggttttaacttgtgtccatttcttctccatcttcgttttggtcttgacgaatcttattacctttttcatttttcagtgttgcggtttcttcgtcacccttggtgatttcttccttcttcatattgagaggcagtggcaatattttcttcacc

SEQ ID NO: 112010 - DNA, 276 bp, Glycine max
cagaaggcttaccaggtctgtgtatctcacgtggtggagggtgtagatgtcaagcttctggttgtacagaaggggcacagggaagcactatgttctgcaaagcacatggtgggggaaaacgctgtacagcaccagggtgcaccaaaggtgcttgaggggaccacaccactttgcaaaggccatggtggaggaaaatgctgtgcagaccacggtggtggaatttgtactaaaagtgtgcatggaggtaccaacttctgtgtggcacatgggggtgga

SEQ ID NO: 112011 - DNA, 181 bp, Glycine max
aagtgattaggtaactctcactcacatcactgcaatgtgcaacttatttgagaagaagaaagaataaagaatcaccaaagctctttattacaaacaaattgtgtgtcaaggggatctagcttagttgattgactaaccataggaaccatgaaacaagagccactggcatcaccaacgacat

SEQ ID NO: 112012 - DNA, 152 bp, Glycine max
cttgactcttgagtattttaacccaaaaccttacacacatacatcagagggacacgaactcaaaccgtttaagcttctccgagttttgacctacaacactctcgaatcccctcttgtgtgttgtagccgccccgtgaccatcaatggcggaa

SEQ ID NO: 112013 - DNA, 119 bp, Glycine max
ttttctttcgccagggctttgttaaaattgacagggatgattccagcctacctctggttacatctcctatcagacatgccacccaggaaactataaagttactgcctttggaagcccct

SEQ ID NO: 112014 - DNA, 256 bp, Glycine max
cataaagtgaaaggagccatgggttgtggaggagataaggccaataatgatgctaaaaataacatgggcgtgaaaatggaacatggaagggacaaagtagccgaaacttttgaccaggctaaacgtgaagtgggtgaagcatatgtatcagcaaagaataccatgactgaagaggccaaagctaagtacgaggctgcaaaggagaaggcttcggatgcaacaggtgatttaggagctaagatgaggaacaccccaa

SEQ ID NO: 112015 - DNA, 257 bp, Glycine max
attctatgtacccatggtggtccccatttgtttcgtgtacttttattcttagtttcatttactttccgtacccctttttgacgtgcttcagtcatttacttaagtcattttctcgcctaatcaaaaaataaaataaatttccaacgatcatttgaattgtaatatccattaatttctgttaaaatgaaatccaaccgttcggtcatgccataaccacgttggaaaccaaaaagaagtaaaataataatataataata

SEQ ID NO: 112016 - DNA, 247 bp, Glycine max
ctagaatctcagaaaagagagcttgagttgcggagaattgaattggaaaaacgtgaggcacgtaacgaaagtgaaagaaaaaagttggaagaagagattatggagaatgcattgaaaaatagctctcttgacatggctgatctggagcaacagaaagctggtgaaaatgttttgaaactggctgcagatcaaaagcggcaaaaagaacaatttcatgctaaaataatcctgcttgaaagacaactgg

SEQ ID NO: 112017 - DNA, 100 bp, Glycine max
cggtacggcaatgctcacgaaacaagttgtaacggttctatcatggttcgtactgagctgtatacacatatcgaacttcactgtggaaatgttttatccc

SEQ ID NO: 112018 - DNA, 104 bp, Glycine max
caacatacaaaaatcaacgtgtgcgcttttcttctctttacccgttgaaacatccttagttttcagattctgaaatcttgattctgaattcatcacaatgaatt

SEQ ID NO: 112019 - DNA, 155 bp, Glycine max
ctcgagccgctcttggccagctatagagaattcaggtggctgagtcacatagacctcttacatcaaggggaccatttaagaaagcacacttcacatcttgttggtgcattgtccaattctttaggctagaaattaccactactgttctaatagtc

SEQ ID NO: 112020 - DNA, 212 bp, Glycine max
ataaccgatgagaggagtggtatgcgtgagatcgacccactgtccgatatcttcgctcgagaatggtaatggaaagggttcatcaggaacatattagaggtcacctgagatcataatcttcgagcttgatcctatggggttacggatgataatgaggagggttcgaaattcgggaaggagaagaagaggtgatttctgattggggaaatctc

SEQ ID NO: 112021 - DNA, 256 bp, Glycine max
gatgttaaaagttaataaaatacttgacacctttctttatgtcaatctaagcaattaattaatgacgtgagaggagcatcatagattcatcattcttgttacttgttcacgtccactatgtaacttcctttttattttcgtgggtcaaggattagagcaccactcatgggttttacatgctgcgacaagttgatgattatgattataatcctgctctctttctaccttttgtcatgactcctaacaaatcataatc

SEQ ID NO: 112022 - DNA, 269 bp, Glycine max
cccatgtggaattgtacttccaaatacagtgctgttggagaggatgaatattgcttgctcctttcttgagcaagttgggcttataaagttagcagcacatatctttcatttcatgggttgtttacacatttttgtgagcgctaaagaggatgaaatactcaaggaaattggaaacttgcattaatttctgtatttcatcaaatagtctaaaatgactgcaaccttcagtccgtcctcctgtctattgctcctgatttgaaattctaatt

SEQ ID NO: 112023 - DNA, 226 bp, Glycine max
tccaaatacagcagtttgcatatgaatttttatctgtttgcttataggagaaacataatctttattgttccttgtttccataatgaagaaaaagtgtgataaaacctcaaagtaaatcgaccttgtatgaaatgaatctggctatgagaaatacttgtttcagaggatttcctgtttgaaaccagtttggaatagttgcagtttatatttatggggaccattgaaa

SEQ ID NO: 112024 - DNA, 255 bp, Glycine max
tctcgagccgaatcggctcgagataatgtccctcacacgataaaatacaggtgaaaagctcatacgcgcgggagagagaagagactaagaacgtgtaattggggtacgggataggtgctcaagttcaactacggatttatggtcaacttaattacaccagtgaatactgaatagccaaggagattgatcagattcataaagacatgatgatcgcaaactgtactataatttctcagcatctacccaataatatat

SEQ ID NO: 112025 - DNA, 245 bp, Glycine max
aaattaagtttgaatctgcataccccgcctattacataaacgaaaccctaatttctaaccccttagagtttggattgggagattgcactacagtgatagggcaagtgtctttccaaactctaaggggttagaaattaagtttgaatctgcataccccgcctattacataaacgaaaccctaattttgcaaataaagttcagttacccacagcagtgtgaaagaaagaatccttggtggggcattt

SEQ ID NO: 112026 - DNA, 242 bp, Glycine max
cacaataccaattagcctaacactctcaacccaacacaagttttttttttttcttcagtttttctcttcccaaagagtttttgttttgtcttttgtccttctcatgggtgggtttgaacagaagatgaaggatagggcaaaggagctcaaggtcttgctcaaaaaaggggtgaagattgtgggaaattcttgcaaaaagggttgaaccaaattaaaacgattcaaacgtgattagggggatt

SEQ ID NO: 112027 - DNA, 191 bp, Glycine max
gtcgctcctttgatcgtcagccctaccgtcaatcgtcaatccccatctgacgacgacgatcatcaccactgacatcccaccctgaggcagcgacttgtcctccaacacaagcgaccctcgcccatccgtagcgacagggagcgcgcatcccttgggaacaatgcgcatcggcgcaactcgacacaacacac

SEQ ID NO: 112028 - DNA, 251 bp, Glycine max
  unsure (1)..(251): unsure at all n locations
ctacgacctctctttcactaccccaagaccttcatttctctttccacacaacatacgatatatcnagcancaanaaaaaactgncaatatggagaagaccaagactctcagncagcaacatctttgatcagtgttcttcgtagttgtgggagtgtaagaatatccttttctgataggactccacaaaaggtatccaatattatagtgaaagaacttggaaataatcggaaagtttatatttgggatgggca

SEQ ID NO: 112029 - DNA, 254 bp, Glycine max
cccggcacccacactctgcaggacgccaaccagccgaggtacactccctcaatgccttggagacaactctttggagatatgcaaatacaatgctaccttgaaagtgaacatatgtagttttcattcacataatgcagcataagtagttttgtagcatgaatttgaagttcattgttttggtaaaaaaaaaagtaatcaacagttttggctattcttggtctactaagggtgtgttttgctctgatatgataaaa

SEQ ID NO: 112030 - DNA, 256 bp, Glycine max
gcccaactcaccacgctgaacgtgagccacgtggcgaaacgactcccgttcttcgtcgtttcggaccgcagtacgattttccgccggggcggttcggggtgccggtggcggcgctttcgagcccgggcccatatagtggggccaagtgcaggccgtgcaggccggcgtgtgagggtttgtgcgtggagactgtgatggataacgttgagaaggagtggagttggacccattgggaaaacggtgcgcttcagctctg

SEQ ID NO: 112031 - DNA, 217 bp, Glycine max
gacaacgtcacagagcgagaagggaaggaaaagtggtgttggtggttgtcctcctcattggtatggcaaccctttcctccatcctctgctcctctcttcctcttgtccatcgctaccctaacgctaacccttcgctctttcgcacgtgcatttctctctcttgtctctcgcactaaaccccgttagcccttgatcggtctcgctgcctcttcccatg

SEQ ID NO: 112032 - DNA, 251 bp, Glycine max
cttacgccaatcacctcaacgaaactcccatattcaatcacaaacaacaatgtcttctaccaacaacaacatcgaggctgtcgccaaccagatgcccactgggggctctggagagttcaaccccaagcctgctggcgctgcccgtgagaaccacgatggccacaaacccggtgtcctcgtaggcaacgatgccgcccccgagttccacgcacaggtcctccctgccggctccgccccatccaacgcatcct

SEQ ID NO: 112033 - DNA, 250 bp, Glycine max
tgaaattctacaatctcatgcgcgccatgtgataggtctccttctcccaccactttgggtctttggcagcacacacttccactctcactcactcctaactataaactataaaatcctcccttcctcttccggaatctgattattaaattcgcatgtgtattaattactacatatagctagatcttagggagcgtcctctgtttaatttctagatcttgcttcaaggaaaatccaggataccaatggctca

SEQ ID NO: 112034 - DNA, 247 bp, Glycine max
accaccccttccggcacggacccccgcaccaccgtccaatccaaagacgtcaccatcaacgcccaaaccggcgtcgccgtccgcctctacctcccacccgccgccgcttcctccgccacaaaaaaactcccccttttgatatacatccacggcggcgcgttctgcgtatgcaccccctacaaccccgcctaccaccaccacctcaacgccgtctccgccgccgccaacgtcgtcgtcgcctccgttc

SEQ ID NO: 112035 - DNA, 251 bp, Glycine max
ctcgccattgccgtaggagagcacttcaattttctctccaataagacaattcgttctttcccttctcaatttccggcgagttctcccaatctgtaatttgcccccactctctctattcatcttactgttaccagaaagttggaatatcctccctcttcaatttctcgtaagattcatcgatcacgaacttatattgatttcgctattcttacactgatcttatttttcagtcgattttgttctgcaacatt

SEQ ID NO: 112036 - DNA, 248 bp, Glycine max
atgacgaagaggatgatgatccgtttttggaagaggatcttcctgatgagtttaaggagactcatttcagcttgtggattcttctcgagtggttgagtttgatttcgatcattgggttgttgataaccaccctttgtgttccctttctgaggaacaagaatctgtggcagcttaggttgtggaaatgggaggttatggttttggttttgatctgtggcaggttggtgtctgattgggttgttaggatt

SEQ ID NO: 112037 - DNA, 143 bp, Glycine max
atgttattgtaggaactcgatttatggagtttacatgcttcttattaattcatagtacatttcaattctgtgtaatgtgaatttgggatttatcttatagccaagctgtctgacaaatttcacttggcactgtgttccgaatt

SEQ ID NO: 112038 - DNA, 229 bp, Glycine max
attcgtccatcgatatcggcttcttcaggtgctatgataatggctcgctcgtttctacgcgggtcgctgcttcctctcacgatcgtgtccctagtacgtctatctgtgattgccattgtattggagattcccacgacgttgggtctgttcattatgattgatcttgcaacgacctatttcaggggtacatttctacagctatctgccatatggatatcatatccagtga

SEQ ID NO: 112039 - DNA, 242 bp, Glycine max
ctctattcaccttctctctcatgaatggttaacattaacattttcatttccatttcactttcattattacaaccatgccatcgcgtccgccgccactctctcctcctgccaccgccgcatctcatcggcgccaaataatcctctgcggcgcaattggcggcgcgctctttctaacggcgctaataatctccgtcacgattttcatctaccgcaagctctcctactcccgaacggcgccgttc

SEQ ID NO: 112040 - DNA, 249 bp, Glycine max
tcccaaacaaagagaaagaaccacaaacacattctcttaggctcttttttttattctccggccaccggagactcgccggaggaatggaggagccgaactccgattgctggctgccaccaggttggactgtggaagtgagggtgagaaagaatggtaagagagacaagtattacttccccccctcaagtggactaaaattcaattccaaggtggaggtatttcgctatcttgacaatgctcagaacaaag

SEQ ID NO: 112041 - DNA, 241 bp, Glycine max
gggcattgagaaggaagctaagaagcgtaaacgtcttgcagatgattttgttcatctgctacattctaccaaggactttactgtgtcttcaaagtgggaggactgtagaccacttgttgaagatagccaagagttcaggtctattggagatgagagcctttgcaaggcagtatttgaggagtacattgcacagctaaaagaagaggcaaaagagaatgagcggaaacgaaaagaggaaagg

SEQ ID NO: 112042 - DNA, 250 bp, Glycine max
aaatcaatctttatgtgatacaagcacctctctctcccctctcttttccacacaacattcgagcttgcgaaaggggagagtacagttcactctctcttcccaaatcaatacgaaatatggctgaaactctatacctcacattgctactctcagtctgaatcatcttcacaaccctctctcttaaaacctctcgcacgatcacaaccccatcacacagcaatgttctcgatatctcttcttctctccacca

SEQ ID NO: 112043 - DNA, 243 bp, Glycine max
cgagcactggtattaaggggactcggccaccgatgctgaagccgccgccgggggcgagggttcaggtggtggatgatagcacgtgttccacgtgggaccttttgtgggacttggctcctcaaggggaagaagggttaccgttgaaccgttccgagaatgagagtgaagtagcgagagaagtagagagaggagcggtggagaaggaagaaggggaagttggtactagagagagtccgaagaggg

SEQ ID NO: 112044 - DNA, 242 bp, Glycine max
gaaaacaccaccaactcaacacagtcatcatcgtcactacaaaaaaaaaataataaaaaaaacacagagtttaaccctcgaccacactacagagatccttcttcttctactttgttcctctgtttctctctcttactttctcactctttccgtcaaagtttgcaatttttcttcccagttgttagctatcttcttctcagtaggcaaacacggcattggccacctgaccctccaccacgcga

SEQ ID NO: 112045 - DNA, 243 bp, Glycine max
aacaaaaatccctctcagctcgagtccgaggaatgattaccgaaagagaaaaagggggaaagaaaattatagcatagtaagctgtagtattcataagctaaattaattacattagtgttatcaattttgctgtgtgttcttcttctgtatcgtatcaccgtctcgcgattttccatctccatgacttcgagggtttagctgtgttgttgaagcttcagaaacgaaaccctagcttgcgaatcg

SEQ ID NO: 112046 - DNA, 241 bp, Glycine max
cttgggtttatgggttttgattttgagagaatttaaaacattgtggtccgatcctgggaattttcttttgggtgcaggatgtgggacccaccggaatcaaacgggttgcttactgcgcacatcagcgggaccaacaacagctacaagtgatctcaggggattgtgcaaccaagaagatgcagcccaaggatgcagtgagcgaattgcagaaaacccatgaagccattcaagctttagataa

SEQ ID NO: 112047 - DNA, 235 bp, Glycine max
ctcgcccctcgacaaaatgaaacactcaatgcggtctgacggctacatctccaacaatctcggtaatgggccaaacgcaacacaagccagatatgctgggtacgacgagcgaaagtcgacgtctgatcactctccgcctcctgcgaaccatgataccgcctacggcaccgtggaggaccactatgggggcaagaaactaggaatgactcgaacggcgttgatcttctttacgaat

SEQ ID NO: 112048 - DNA, 259 bp, Glycine max
ccactccttcaaatgactcagttatgcaatccaagaaaaacaatgccactcaatcctctggtgatctagaccaaaccagcctaaccccaccaagcttaaaccttccatcactcacatttgagcttgatggagatgtggaagttcagtcaccagatagttcaatgtgggaatctttttttgctgaccacaatttagatggtgatttcatgatctcttccccagtgaggaccccacaagcctcttcctacaattgcaacta

SEQ ID NO: 112049 - DNA, 259 bp, Glycine max
tggaaggataaggcaaggaaatctgcgaatgttacggatccttctcagcaaatttcgcttgctactagttcttataaaaccgtgaaggacgtggataagttgtctttggtaattgctgaacttggcagaggattggttggagaaaataaagcccgcttctgtgttgccatagactcgctaagtgaacttttgaggcatgcatctatgcagtcagttgcaggccttctaagcaatctgcgtagccatgatcaaatttcaa

SEQ ID NO: 112050 - DNA, 107 bp, Glycine max
  unsure (1)..(107): unsure at all n locations
gctcggttcgtttcggggttgacgttgttcacaatcactttctgcgcgtcagtgggtcccttcgtggggtnngctagctgtgtcgaactcgtgcgaaaatgcgtgag

SEQ ID NO: 112051 - DNA, 266 bp, Glycine max
cttggctgtgtctatggatcgcgctcagcttctgttgctgggtgtacccctcttcctcttctgctctgaccaccacccaccgcaccaccatcaccacccaccccaccaccaccatcatcacccgccccaccaccatcaccagccggtgacaatagatttccctcccgagaaacccaccaacaatattgcaactccgggtctcggcaacactgtccacatcaatttctgctcttcctgctcttacaagggaacagcagtgacgatga

SEQ ID NO: 112052 - DNA, 225 bp, Glycine max
caggctaccaactaacctcttatcaagtcttgtccattactgactagtgtgttctccaagttggtctgtcttgctttcatgaatcaaaattcagaagctctgttctgtcacttatctgtacaaaagccatggcacgactatgtgggattgactgatactatggatgtgagatgtagtgatgttctagtatcaaaagatcaagaaaacttgttaggaaaggcatcc

SEQ ID NO: 112053 - DNA, 254 bp, Glycine max
ctctcttccactcttttgctgttcccctttcccaatccacacctcattcatcatcccctttccgtgattgatacaggactcattgacttgatagcatacacccgtagcaacatgacggcatggcattagttaagctagataaactataaaaccctgtcaactactgccgctgctcagcttccaagttgctggtacctcattcccagccatcttaacgtccatcatcatgctcaacaaaagagaaaactcaccac

SEQ ID NO: 112054 - DNA, 222 bp, Glycine max
  unsure (1)..(222): unsure at all n locations
cggataagtagcctggtttcctcgtcctgaaagaaacaccagcaaaccactctcaacctaagagtgttgcaagtttactgaaagcaatggatttagtggcaccagccgaacaggtttgctcatttcaccacttccacacaacatacgattcctccncngnngattctgnnanacggcctttcgttctagatcctgatagtagtgttagtcatcacttctcaa

SEQ ID NO: 112055 - DNA, 244 bp, Glycine max
  unsure (1)..(244): unsure at all n locations
cggcacaccagatcggagtagggatgaggatgacggtttggggatccgtgatcgtgttcgccctattgctatgtgggaccctctcatgcactgctcaagctattcataatagggtttctctctccaccaccaccaccacctgcancatctgtcctgctcggtctctcctcgattccatcttaggcgttctagattccacctgccctcttcccacttcgcttgtatcctttgccgtcaccgaagt

SEQ ID NO: 112056 - DNA, 249 bp, Glycine max
attatgtcaagcttcaaaggtcgatcatgatcgccctattacaaaatttcgacttaactccaaagtcaaatacaattgcttctctcttccagaacaaaacttgggcttgaggtttcaaaaagacgccacaaaaaagatgagcatggttgtctacgccagcatacctccaggaaatttaccctctgctgattcttttcctggtagctggaaagcttggatgattggaacagtagtcgctgcacttctttc

SEQ ID NO: 112057 - DNA, 160 bp, Glycine max
ctctctctctctctctctctgaagatggcttcacgcaggctcgtatctctctgattcgatcctccctcgagatccaacggcctaattcagagacgacccgataacggtacgagaatggacgtcggagcacgcggtggacactctcgcgcggaagatgggg

SEQ ID NO: 112058 - DNA, 221 bp, Glycine max
ggctcgagggtgaaacaaggcaaagtccaccatatgaagcctatatctcgatctagaaggaaaatttattatgtgtttttgtcattttctttatccaggtcaaggtctccgttgcggtcatactctccgtcgcattcaaggcgttattcgcgtagtggtcattctgatgatattcaccgaagcaaaccaaggactcctaaaatagaatacattactgaatt

SEQ ID NO: 112059 - DNA, 229 bp, Glycine max
cggctcgagctcgacgaatcggctcgaggcaccattgggagatagacagagagagagcgtgaacgagagagatagacccttacccttctctatcgctcgctttcctttgacgcttctgacccttgctttgtctgcgtcttccttctttctttctttctttctctgtgtgtcgtaatggctctcccagactcttcttcccgtcgcaactccctgatcccctccttcatct

SEQ ID NO: 112060 - DNA, 230 bp, Glycine max
atcgcgagcggccgccctttttttttttttgctttttacgtttgaattcgattcccatattttaagcctagaacccccgatgtctacatttcgtttccatacaagacaataacggtaattaaaaacccaacattgaaacctgaaaccgattagagtctgatagccagaaaccaaaaaggattcccattgttctgagatcaaacgtttatttcaatgcgggagttgagaaa

SEQ ID NO: 112061 - DNA, 224 bp, Glycine max
tctaaaaggattctccctgcagtacttaatatagttcactcactcactcatgcttcacatcaccatcaccatcagcataatcatattctttgtttgtctttcaagctcctcagatacttgtgtgctggagaagctgcaaaccaggactcatttcttgagcttgatggggtggcggttgtttgtagtgttctgaggtcagaggctgcttgttcaggccctgatca

SEQ ID NO: 112062 - DNA, 140 bp, Glycine max
gtttgacagcacagcactcggaaatttctggcgatctctgcgttttcccctattttttctgaatctaacaacaaacattcctctggtgcgcatttctcttcttccctttccgatctattatgcatgcatgctattccatt

SEQ ID NO: 112063 - DNA, 248 bp, Glycine max
aatgtcttgagtgtctcttcctccccaaggctgagccccgctcgttacgggtctctgtctcctttcctttcacgtatgcatcatagtaatagtaattacgaagagagacggaggagccgcagaggagtaaggaggagagcccagaatgagaatgagaagatggtggatctgccacaggaattgatacatgaaatccttttgcgcttgcccgtcaagtctcttattcgattcaaaactgtctgtaagtc

SEQ ID NO: 112064 - DNA, 242 bp, Glycine max
acagaggccaccacgcccatactatcccaatattctcttctttttggtggcagaagagaagagaaacaagaccacatccgcattcatcatacccaccttaatttcccctttccctttggcatagactatagactaaagtgtgtcaaactcactatgatactgacactactgcgtcctccaaaatttccattcttgaatactctttttctcctctgcactactctcctcctcccaccttgcta

SEQ ID NO: 112065 - DNA, 246 bp, Glycine max
tgtcactgtcttcagccacaccaagagtccctctcttgcacttgcacaccaatctttacacacacactctctctctctctctttctaaccagcattggagccttgaaagcatggaactttccttaacctgttccataacttgaaacttctagaataatgcattaatggggttgcaagcaaacgtcacctaatccatttctcaattttttttataccctccaacttctctttctttgttttgttttt

SEQ ID NO: 112066 - DNA, 99 bp, Glycine max
caaagtttgttgttttgaatcgaacctcgcgttgggaataagtttcgcctgggtcggaagatcggaagtggctcctgtggggagatctattgaggcact

SEQ ID NO: 112067 - DNA, 245 bp, Glycine max
ccacacttccggcaccgtcggaactcagcaccgcacatctgcaccccacactcgtcatctcacaaccgtcaatcgcagtcacagcgcacagcttcgagttcagaggtcccccccttcactgcaacgttttcaccttgatttcttcagaataacggcggttatcctctatcctgctatattggtttttcggtcggctgctatgtgccgctactcaagattcaaaacattctgctctagttctctct

SEQ ID NO: 112068 - DNA, 240 bp, Glycine max
caagattcgtattagagtctcttgtcacagtccagatcatcgcgccactctgcccaggcctgccatacatcgccatatttgtgccagcaacttgtcttgccagccctccttgcatccggcttctgaatagacttgctcgttcggaagcgcataccaatagaccgacactcggtaatcatggctaccatggcagcggctgctcgtgatatcttccaggcctcctcgagccgagacaactta

SEQ ID NO: 112069 - DNA, 247 bp, Glycine max
gaaaacaactcaaacaaaaaaggtaatccatgtagttgcctcccgttcttcctcctattttgaaacattctctccttctctctcctccaccacattttagggaacacccacgcttctttctgcgaccctcatagctgttttttatttttggggttgtttatttgctggtttcgttttgtttttttgtggctttacccttcaaaatcgctcctttaccaaaaatttgagcgatgaattgttgggatca

SEQ ID NO: 112070 - DNA, 240 bp, Glycine max
cccccttcgagactccgagaccaccatgagggccgcggtcctggttgcgttgcaggcggcggtggcgtgcgccgaggacgagaagaagacagagaagaagcaggagaagcgcggcctggtggactcgctcggctacggctacggcggtctggaccacggcctgaccagccacagctacagcagcctggacctcggccacagctacggccatggctacggccacgactacggccacagcta

SEQ ID NO: 112071 - DNA, 257 bp, Glycine max
ggcactgacactatcacagtagacctcaaaaatggaaatgaaggaaaattgaataatctcacaattaggtgcacaaaatccatctaaaatggggtaaacttcaatgaagacactggaggtatattggggctacgctttgccaaggactcattcattgataaagcagcttatgaatatggtgccaagttctcctattgtttagttcaccatttaagccacagaaacgtttcaggatatctaaccattggtggccacca

SEQ ID NO: 112072 - DNA, 265 bp, Glycine max
ggagttggcggcgaccctttctctctctgatttcgatcatggcagctgttgctccttcttctgacacccaattcgaatccattgcagaatttgaccctggactctgagtccaaacccattggagttgctgagcctgcgaagaagaatggacccactttttccagtggtgcagctaaagggagggccaagccattcaatccaaattcatgctttgttccaaatggatacccttctgcgtattattatggaggttatgatgggcaag

SEQ ID NO: 112073 - DNA, 260 bp, Glycine max
gatctgcttggcttgatttcatatgttgacgatttctactcaaacacttgctcgactccaccgtaaggttccaatcatccgaggcctcagcttcctcagagacttcgccatcggcccactctaattcagtcgcaagagtgtgcaacgtcaacaacggacttctagaaggcttgcttagctcctagccagttccacatccgccggctcacgggtcactagccgagatggacgatccattcgctgagctacagcttcctgag

SEQ ID NO: 112074 - DNA, 252 bp, Glycine max
tatcatttgtagagtcaatccgctttctgcttgaatctattcgccggaaacttaaaggctctagccacgtgcctgatagctggattggcaaggctgctcaccaatcttctcaatgttttcgaaggtctattgagtggaccatcaaatcagtgaaccgaaatgcttacatcatgattgctataacgggtaaaagtttctttagagcttctgctattgcaacagaattgatcatgaataacatcctacggattg

SEQ ID NO: 112075 - DNA, 250 bp, Glycine max
cgcaacaaatcataacaagagaagagaattacaggagcagaggggctactcagtaaagggtaattcaaaagaatctattgaatacattcttcaggccctttggagaactcgaaaaactggtcttggcactaccgaccgatgcatcatccaagaacatgctccagctccaaaatgaatctgatctcgacccacttctggtttgcctccgaatgttaatcaggaggtgtgtttatgagaacactagcaagga

SEQ ID NO: 112076 - DNA, 260 bp, Glycine max
ggcttcaacaacctcaactcagaggcagcgtttaaggcccaactcacgacgctgaacgtgagccacgtggcaaaacgactcccgttttgcgtcgtttcggaccgcaggtacgattttccaccggggcggttcggggtgccggtggcggcgctgatcgagcccgggcccactgagtggggccaagtgcaggccatgcagggaggtgtgtgagagtttgtgcgcggaaactgtgatggattcggttgagaaggtgtggagtt

SEQ ID NO: 112077 - DNA, 250 bp, Glycine max
gcacaggctattgaccctgcaggcgatgcttataatgatgaaattgatgcaactgtcagagagcaagcacttgctcagcgggggcagtgttatgaaataattatcggtgctttgcggtctctgaaaggtgacaccttacagagagaatttgggactcctattagatcaactgcttcacaatctgctcttgatccagcctctcggaaaaaatatatatgtcaaattgttcagctgggtgtccaatcacctg

SEQ ID NO: 112078 - DNA, 262 bp, Glycine max
ctcgagccgctcgagccgattcggctcgagcacgaggtctcacataacaccaaatctcatcatgaccatcatcatcataatcagcatagcataaccctcgttatctctctctaaatctctctcaattctctctccttagatctgcgaattatgcttagattccgatagataaaatgaaattcaatcaatagtcagtttggatcctcgcggcggggaatggaagcgttgtggttgttgttggtggtggtgcggtgaatctagc

SEQ ID NO: 112079 - DNA, 254 bp, Glycine max
gtgggaatgtggcacttgcacacactccatgctcacttgcctttgtctcagttttcctcataaacccaaccttttagccccaacgccactccttcttcgtgctcgcgacctcctccactcacgatgcgtaccacgcgaacctcaacatcgccgccctctcacgcgccgggaaagccgacgccgcgcgcaaactgttcgacgaaatgcccataaaagacgtcgtcacgtggaactccatgctctccgcctactgg

SEQ ID NO: 112080 - DNA, 258 bp, Glycine max
aaccatcattaagtagatgcggcccaggtattttgtggtatcaagtttcatgagtagtgaccatttaagcagctcctcagggaaattgtgataaactcgtgactgatattgtgtagtagttagatatgtcgaacctgcagtaatgaagcggcttcttaatgacgcagagttaatgtagaccactatatttgtttctacgaatcatgtatgttttcttgccaccatatcattatagtttacgagaaatgcgacccccaa

SEQ ID NO: 112081 - DNA, 122 bp, Glycine max
ctctcactttgggggtgaagatgcggtatttggtgggccggagattttgggattggattatttcatctgagaaaaggactctcatgtatactcagaatgcttagccagcacttcaggagccg

SEQ ID NO: 112082 - DNA, 251 bp, Glycine max
ctccgctcgagctcgagccgctacattttcccctctttggagaaatcacaagaggggaacccatgattgctcctaccatcttcctttctcttccagttcctcctcctctttcctctcatactctcccattccgattccgattccggacaccccgtgctcccgcgcccgctgatcgtggagtacccggagttcgacgcggtgctgcggtgcggcgcgtggcgcgtggcgggggaggcgaacaacctaggcgc

SEQ ID NO: 112083 - DNA, 253 bp, Glycine max
gtaagaccctcctctccaaatgtgtaccctccgtaccagccaaatcaagcaacaaacccaacaccaaaacaaacccactaagatggcttcctttgtatccttcctagtgctgcttcttgcagcccttatcctcatgcctcaagggcttgctacttactacaaaccaattaagaagccaccagtgtacaagcctccagtgtacaagccaccagtgtacaaaccaccggtttataagccaaaaccaccggtttac

SEQ ID NO: 112084 - DNA, 99 bp, Glycine max
ctcaacaaaagcgtggcttgagataatgggaatcacggatatatagatgtggtcaaaggtaatatagtcattgaatgtagctattagatcgtaactaca

SEQ ID NO: 112085 - DNA, 242 bp, Glycine max
ctcccaactcaatttttcttacaacctgccctttttagcataagcccagcattgccacagaaactgcaccctccacctagtccttcatggggacgcgcctcctggaggcccactccgtggcggcgcgggtgcacgcacgtttcgggtttggcaagaagaaagccgccgctccgaagaaagtttccagggcgtctgcctatacatcgacagtctgtgtcgtcacaagctccacgcgccccttc

SEQ ID NO: 112086 - DNA, 248 bp, Glycine max
cttcgccattccatggagttcatggttcggtgttgtagctcgtgcgcgctatccagatttcgttttagccttcgattcgccattgttgttttcgagattgtattgatattggcatggttggaagtcaacaatgcaaagctccaagaacaccaatttcaatggggaggtttggaagggaggattgagaacattgcctcacactcttgcatacatgaccagatacttcaacagagaaagcgacctggtcg

SEQ ID NO: 112087 - DNA, 241 bp, Glycine max
gtgagatgtccctccacgactatgctagggttcctctcttccttttgcgcagaaggctttagagctttaatagctacagttttgtgtggattttcaccccaaggccttgtacggaggaggaggattggcttcttcaattccctgtggaggggtacctagaggaagaagaagggagtagtgaagcatggttggttggaaagcttttgacacagggtcctttaatagcaaagcgttcatgagt

SEQ ID NO: 112088 - DNA, 135 bp, Glycine max
aagctaacccacttggcgtagtagtaactgccgcttccatactcctttcctcgactcttcctctcttcatatttgtcattggcttggtcctcttcttcttcttctatctctctgtcatcttccacacaacatagg

SEQ ID NO: 112089 - DNA, 240 bp, Glycine max
caagagcacatgcagcgccaaaaaagcgaggaaacatcttttccacctcgtccatttcatactcacttgagattttgcgtctcttccttcccaccttcaccttcaccccatgtttatcgtgtgcacttctccatcacattactattaattattaaccttcttcccttaacccatcatcaccactcaccatgttgccatgcgactactgcgactcaaacccgccttactcttctgccgagc

SEQ ID NO: 112090 - DNA, 245 bp, Glycine max
tctgtctcttaggaaatcgagaaaatcaaggtggtcatgtgttctgccctcggtgaatgcatattgtgaaattcatgagggatattgctttgtcaacagcacattttgtttggtcaaggcgggtgctgtttctccccttattcaattattggaagatactgagagagaagtagttgaagctgctttgcatgccctctcaactcttttgcaagatgaaatctgggaaggtggtgtcaattccattg

SEQ ID NO: 112091 - DNA, 282 bp, Glycine max
  unsure (1)..(282): unsure at all n locations
agcagacacaagaacactcctcttcgaacattgcatgtgactccacgtgagcgatgtggtgggtaacagcgcccttgtgacgacggctggnnatcccgagatccatagacctcagtcgagataggagaagcaccgccaattgccgcgagcattcgagctgcatcgcctccgtagaactctcacctgcctgtcgcagntgatcgagcgccctcgagcagcgccctctaccaacaaatgactccgagggcatgcccggcaaccgctactacggcggcaacgaat

SEQ ID NO: 112092 - DNA, 243 bp, Glycine max
ccaaaagaaagttcatgcagaagacagacacgtggcattatttgaagacagggctgacacatatgataagcctatggacagtgaaatggaggggcacccaacaaacaacattctctggtcagcacaaaaagatgagcatatttccttttctacccccaaagaaaaaaattctttgctgggccttcaaacaaaagttgggctagacggaaatcagtggcaagtttattcaaggaagaagaggtc

SEQ ID NO: 112093 - DNA, 242 bp, Glycine max
ggaagccaaggacttggtggagaaggttccctgtgttttgaagaagggtctcaccaaggaggaggctaatcccatcatggagaagctcaaggagttgggtgctgctgttgtcttagagtgattatgaatttctgtctttttttttgtactccagagttttgtgttagttgtagaataattgacactttttgtgggtattgaatgataaaaatgataagttatatatattattaccccacttc

SEQ ID NO: 112094 - DNA, 228 bp, Glycine max
gctagcaccacattcacctgaggcttccaaagccatggcttcccttgtagcatccactgctgctgcttacccttggcatgacagaaatgcttggaaaccccatcaacttcaatggagacacaaagccagctccatctgcttctaatcctgacacctacaagactgtggctcatttctccgagaagatggctacagcaacatctccgagaaaagctgctgctgctgctc

SEQ ID NO: 112095 - DNA, 210 bp, Glycine max
ctcaacatcaacatcatcctcttatcaaattctgcagcaccatttcggactccttcacagtctcctacctcatcacccgcttcggcttctccccagagaccgcgctcagcatctcccgcaagttccgcctcgacagcccccacaggcccgactccgttctcgccttcttggccacccacgcggtctctccgttccaacatcggccacgac

SEQ ID NO: 112096 - DNA, 234 bp, Glycine max
gacgcaacctctctctcttcttttcttcagttcggtggagggagggagccgtagcagcggaagctctagcttgggtcgcgaatcacaatggtgagtgttgttgcctaatctcctcttcacaatggtttcgatcctttttctttcgacattttacttgaattaactctccaatctgcgagaggattaaagaagcatctgaagaggcttaatgccccaaagcattggatgcttgac

SEQ ID NO: 112097 - DNA, 234 bp, Glycine max
ggacggtaaagaggtgtgacctttgtctaattccgacgatgttccctttttatctattttccccttggacagaaacatttcacaacaatatgattcgcaggtcagtgttgaagaataaaggttccatttttatctattttattcctttttgttgtctaattttttgtggtgatttttgggacaagctaacggcggtgctgaaggtgacgatgttttgccatgcaagggccttct

SEQ ID NO: 112098 - DNA, 235 bp, Glycine max
aggccacatgggtttatggagaatatgatttctacacaaatgacgatttcacctatgaagctcgaagtaagatgaaaaaactgaatagtgataatacatttgtatgcactttttctgttttttgaatcatggatagtttgcagttgaaacctcgttcacattagctattagcctattaggcaccgcaatagtcaatatctatgaaatcctggcagaagcatctggaagctaagta

SEQ ID NO: 112099 - DNA, 233 bp, Glycine max
gtagggaaagaaagcaacaaacccatgtcataaacacgcttggaaggtttggctgagtgaagaaggctgaaagataaagaagggcctctggacaaggtgaaggagagacatcgtcaagtatcaagcaaagtgaacagaataagtggtatgagattatgaggtcactccttaacttcttacagtcacaaccaaaaggatgattataagcacaaatagaacatccatctcacaat

SEQ ID NO: 112100 - DNA, 233 bp, Glycine max
cgacaacactctctcctaattgttcaacttctggagctacttccaccccactagctacatacattgtattttcagtctccaaactccaaaggtaaatatcattccttccctacttgttcatagtattttttttccttttctttttaaattctcgtcgctagcttttcccatgcatacgttttctggctcactttggcatttttctacgttaataaaaacataagagtacatac

SEQ ID NO: 112101 - DNA, 212 bp, Glycine max
ctcgagccgtttcatttcattcacaagcttttttcttctctaactataaataatagactgctcaattctgtatgcagatctccaattatcacttataattctcagataccacttgatctcgattatcatcaatcattatctcttcctgtctacgttaaatatctttaataatagactagtaccaaaccaatgtcggagtgatcccaacttcc

SEQ ID NO: 112102 - DNA, 253 bp, Glycine max
atttccagctggctaatgtctaccaaaagttcaagtacagtgaatgttgaggtttgcgttaacaaaactaacattcgttacactcacgaatctgaaaatagcgtctctctgggtcattaacaaacctacgcagatcatgcagtagcatgcatttttcatcttggcctacactgcttagcatatggaggattactggctagcatttgttatggcccccattcacatttggtttgtcatgttcaaaatgttctag

SEQ ID NO: 112103 - DNA, 250 bp, Glycine max
caaaccctcaaatcccttgcataatccagtcctctcacagcaaatccaccttctcctctctcttatcttctttctccagctccaatgaaaccagagaccaaaatagaaacaacaacaacaaaagcaacagagaattctctgcagcaaccttcagaggcttcggctgcactgccggtgcatcgcagaaggtgtcggtgccggtgcctgcggtgattcgctcctcggcggatagggaagggaagagtagcag

SEQ ID NO: 112104 - DNA, 251 bp, Glycine max
tacgcagggctatatagcataaacatttgagtcttcattgcacaatgtcgacctcttccattaacgggtggtgcctctcttccatctccccagccaaaacctctctcaagaaggccacattaggccctctgtcttcgcaaccgttagcactccttcttctccttcttcttcttcttcttcttccttcccttctctcattcaagacaggcctgtctttgctgcccctgcccccatcatcaccccaactgtga

SEQ ID NO: 112105 - DNA, 229 bp, Glycine max
cgaacaagtaccgcgagggatagataatataggaatgtgcagtttgtatgtaaaacagaagaacaaaatagagaaaatgactgacgactgcatgcagcgcagttcctgagaaaatcctgggtggatcagcggttagcaagccgtgtagcaatctgtcggtggaaatggatcgtaaaatgtcatttccttgtgaagatggtaaaatgcacaaaatggcgatgggagctgc

SEQ ID NO: 112106 - DNA, 235 bp, Glycine max
cttcaatcttcattctccattttctttactaaaccccccacttctgcttccaatggcttccatcaacttcaaccccttcggtggaaactggttctcaaaaccccccaatcccctctctgtcccttccctccccaacaacctcaccgatgcaccctcctcccttcctcccaacttcgccgcgatctccctcccaaagcccttccgccgcagggcaagcccaagctcaagctcgaag

SEQ ID NO: 112107 - DNA, 225 bp, Glycine max
ggcgaaaggccactgttttcagacaacatgtcatccaagaagatgccgcattggtgattcaatgctatattagggggcatttaactcaaaattggaatttaggtggtacttctaacctaagtgaagtcattcctgctggctacatttcaagaccatttggctgtcgtagttttcaactggaactatttttgctttcagttgtgaaattgcaacgatggtggaagg

SEQ ID NO: 112108 - DNA, 270 bp, Glycine max
gaaaattagcaaaatgtaaataaatcagcatcaaccaaattagaacaatgtttcccctccaatgcagcaaccaccccatgtgcgctttctccgccgccgtcaccaccatcctcctcctattcccggcagcgacatcccaagcccagattctaaaaaaggaaacttactttttcggtcccttcaaccagtcctacttcaccacgttcgcggtgttgcccagcgccgccatcaacctcggcgccctccaagtaactccggacagcaccggca

SEQ ID NO: 112109 - DNA, 257 bp, Glycine max
caagaagtacacacgtcaagggtctcgtgttcttggtctggcttacaagtctcttgctggcatggacagtaagagtattatgggtgttacactgtttcaggagcctttctccactgtatattcaattatgcagaggagaacaagaatagtagtttcaagtttcctgccttgtcatgttagttatgtgaagtgggtagacttaaacatgggcaatgtgtggctattttggctttaagtcttaagaacacctaggtttg

SEQ ID NO: 112110 - DNA, 257 bp, Glycine max
ggaccacctcaccctccccctccattactcccactgcatcttcttcaaattcctgtcctgaagatgacagcaaagtggtatctcattgtgtgtgttgtagcgatctgggccgttgatctgggttcatcatcacaccatgcccgtgccccagcaccagcaccgtcagtggagtgttcaaacctggtattgaccttatcggattgcctcaccttcgttagcaacggcagcaccgtcaccaagccacagggaacatgctg

SEQ ID NO: 112111 - DNA, 253 bp, Glycine max
cgtgtgcagtgtgatgatgatgcattcttctggtcaaacctccgtcgtgtactcgatatgtcccagcatagagatcaacaagaatgaggtattcattactgaaggcttaggagtagccgtcaatgtggaggcggtgagatcattgcgaacgtgcaaagggaacccgattgatgatatacgggagacggtagattgacccattaggtaaagtacatgggggactcaagtacgcctcataagtcgtaatcaggga

SEQ ID NO: 112112 - DNA, 261 bp, Glycine max
ctcccggcacgttccacttcctctcccgcggacgcttcctcttccccactcccctttctctttttcctcttcctcttcccctctccacaatgcgacggtgccgccaaattgatgcaccttcggcggtgcctcggtgacatgcatctgttcaggtatttttcttcctttgcatctttttcttgttgcttccctcccaaacccgttaagctacttttgggatctcgagggttcttatgcaagatccattgtgctacactggag

SEQ ID NO: 112113 - DNA, 258 bp, Glycine max
ctctctctctctctcttctcttacacacacaagcactaccacattttctttggtctctcattttctctatagctagatgggttctggtgctttacaacttcttctgatcttgggtcttctggctagctcatgcttagcacaagccccaggtgctgcacccacacaaccacccactacaaccccatcaccaccaccaccaagatcagcacctgcaccagcacccaccccgccagcaacaccaccaccagcaacaccacc

SEQ ID NO: 112114 - DNA, 239 bp, Glycine max
  unsure (1)..(239): unsure at all n locations
cattcggttggtctcgttggtggcctctcagtacgaatatcaacccaccctgctgatgtacattagagtcttacctcatatctctggtgccactcagtgtacggaacagtgtattaaacgttttcgtaacagtcctcaccctgaaccttcgcgttctgcaacaacataacagcataancctctttctcctccttttcgcgttctcaaccaatttgtactactcattcactaaaaagaca

SEQ ID NO: 112115 - DNA, 249 bp, Glycine max
tcccgtcaaagaaaaaaatgacgggaaagctataaatggaggtaagaacgaacgaagttgcaaagcaaagaatagaagacgaaggatgaacgttgcgttcagagaagctactggattgaacataccacagatttgtccgtagagtcaatgatgctcgattccaacgcctctgatctcgacaaggaagaaagacccgaagttttgtccctactaccagcatatgaaggaaaatcagttgtagaacttgga

SEQ ID NO: 112116 - DNA, 249 bp, Glycine max
cttcattcaacttggcttccacacaacatacaactctgcttattacccttgcaatggtggcagagtactcttaaatatctattgcacccgaacatacaaatcacaatacaataataaagcatgaacccctattaaattctctccacacccatctttctcccttagaaaactcaatgactaaaaaaccatagttttcttcttcctagcacgtaaaaatgttcatgagtccaatcactccaatggaaaaga

SEQ ID NO: 112117 - DNA, 263 bp, Glycine max
ccagattgccatgcattcaaggaatggccatatggaaaaggaaacaaatgcacagtcacatttacaggtcgccagagccattccgtggggagatagtggtggtggttggaaattcttttagtggacaagaaatatcaatggaacttgtgaaagtagtgaaggaactccacctcagttcaaaatcacttgacatttatgagggtttatctaaagtcatatccaaacacgagaactttcatcttcgtccacagatagagaccctt

SEQ ID NO: 112118 - DNA, 246 bp, Glycine max
aagaaatgttagtagatggagaagcagggcttgaaaatgaaaagcaggtagcaagtggtcaaaagcgtgctctggaatcgtgaaacagtgactttcatttcagagcgcgttggagaggaggacagttgaacaattaaatctctcagccaaccacagctgagcctcatttattcccttcaccttcaaatatgctactctttcagtatatatagatagatagatataaatacccttactccttcactg

SEQ ID NO: 112119 - DNA, 205 bp, Glycine max
ttctaagtttttttcttcttctatccgctctctcacttgatggcgccgggaatcggaggcctgcagctgacttccctcgccggcgaccggagaaccgccgccgccgactccgatgagctggaggacatgcggctcttggactcctacgacgaaatcgacggcggacgaggcggattcaggtggaggtcaccggaatgacctgcgc

SEQ ID NO: 112120 - DNA, 240 bp, Glycine max
ctctctttctttccccgttccgttttcgcccagtaactgtttgacgaaatgccccaaccatgcacttcctcgttgcactgtccccttcgctgctctctccccgtttgagcccttcccacttccctccactctacttctcgttcaatgaaacttgattggattcgatggtttcttatacaagttatttcatttatagaagagcagagaacccattgcaaatccttaaatttcgtagcatct

SEQ ID NO: 112121 - DNA, 244 bp, Glycine max
caaccttgccctcgtcaaagaaaaaagaagcagaacccgcacacagagaaagagagagagaaaaaaaacgggttttgttgtgttgggcgaattgtgaaatgctggtgacggagttgcaacgtgccacggcggtgtgagatcttccggcggcaccgagcatttctccggcgagatgggttcggggcagattgtcggcggcggaaacggtgggagttgttgtgatatgagtgtgaaatgttcgtgt

SEQ ID NO: 112122 - DNA, 99 bp, Glycine max
caaccggtggctcccctccagcatcaaactgaaaacaacctctttctcagaactctccggtgcggtgtggtgacctaggcacctacatccccatagttc

SEQ ID NO: 112123 - DNA, 239 bp, Glycine max
cgcgctctctccattgaggcgcgcgacagaaggtcgagcgcatcgccaccgagcttctcaacctcaacaggttcgagaggcacgacttcacggtcctctggcggctcaagatgggtctacaccgctatgacgccgccccggtggccggcgttgtaacgccgtccgtcgtcggcgcgaaggtcggtgcttccgtggcggtggagaagacggcgtttgatttgaagttggagaagtatgat

SEQ ID NO: 112124 - DNA, 239 bp, Glycine max
gcctatcatgtgattctggatctcaaatccggaaattctacctttttgcaggattctcatgcatcaaggatgggaagaacatcaatagttcctgctactgcctatagtccgtctgaagattctttgagccaggatgtgattgcaactgtcgagaagagtatgaaaacacatgcggacaaccttatgcagtttcttgagggacttggtactaggctgtcacagttggaattatattgtta

SEQ ID NO: 112125 - DNA, 109 bp, Glycine max
gagacagaaagcctagtgtaagagaaagaaaatggcacctgaaaacccttcaacgccagatcccgaatcgccaacctctccttccgttggtttcaacaccgaccagctt

SEQ ID NO: 112126 - DNA, 245 bp, Glycine max
gtcgagccgattcggctcgagcgattgctcctctgatactttgtcacatacagacttcaggtccagtcatttccttttagagggtcttgagtcttgaagttccttattagataagagttatgcgaatcccttcagagaatctccaatatcgaatagttgaggcaaacccaaatccagttcacttcgtattcgttcaacaactcgtcacctgaaccgatgcatgtgagaggcgcagaacgacttcg

SEQ ID NO: 112127 - DNA, 224 bp, Glycine max
ggctagttgaagtttcaaggccagtagtaaccttccaatgcttttttaagtcttgtttgtgctaaattctgtcagtacctgaaatcatgaaccacaagccatggctttggaggaaaaaatctatggagaaaacaatccttgcagttggcaaagttgtcagttcttctaaaaccattgaagaagaggcacacaaacttccaacaaataaagaaactggattggaa

SEQ ID NO: 112128 - DNA, 199 bp, Glycine max
gcatcgcgtattggttggtcgaaaaacaaagagtgtgtgttgtgtggtttggtttggattttcacttttcttcatctttttgcgagaagacacacacacagagagatatggctacgacgaggtttgaggcagagaagaagccgaagacgaagatcgtgtgcactctgggccccgcatcacggtcggtcgcaatgatcga

SEQ ID NO: 112129 - DNA, 152 bp, Glycine max
tctacatccaacaaaaccatgtgacaaatattgttgggggctcaattggctggagaagatatcttgatcatcttatcagttcactatgtcatgataaagatatatctagcatggaacttcttctcttacagctgcttgacagttcatgttca

SEQ ID NO: 112130 - DNA, 273 bp, Glycine max
ccctcagccatggatggtatattcaggaacatgtggtccaccatgtggtcaagcttcttgcttcttcggtacctcctagtcattctggatctcagagccctttggttaatatcatcctcatgctgtgtgctgtcctccgtggcacttcctctatcgatactattcatatactttctttatatggtgtagtccccgcagttgctgcttctttattaccactttgtgagacatttggctcaattaaaccgacttcaaatagcactggcgatgagt

SEQ ID NO: 112131 - DNA, 267 bp, Glycine max
caattgttagtattttagacgagggagagatgtgcatatccaaatcctcttcaacccacttgctgcttttgtctctcttcaacttgctaacatctgcaagtcaagcagctcctacatacagcgcacatgcctgctcggatgaaggatcccattaccgacccaacacaacattcgaaatcaacctcaacatccttctctcatccctcgtctccaacgccatcctccaccacggtttctaccgtacaaacgtctcgcttggaacctccg

SEQ ID NO: 112132 - DNA, 118 bp, Glycine max
ggcgcacgtcaacaccaactgcggcatcggaaaagtcgccgcctgcttcatcgacgccttgcgccgccgcatctccaacaagtttccagcatcatccgcttaggagaacgacgttctc

SEQ ID NO: 112133 - DNA, 274 bp, Glycine max
gtcaacacgtcggttcgaaagtttgagaacctaggattgagttgaagctgcgttctgaatactgaatctgaccaccaaagtacacagtctttaggattcgaaggacaaccacaagatccagttattccttcttcctcgtaaacccgcgtgtatctctatctctgtctcccttaagcagagtgaaaaaacaaaatggcaattttagctgaaaatttcttcaaggagagaaaataccctttcattctcactctcttaatcttgctcatttgcgtca

SEQ ID NO: 112134 - DNA, 259 bp, Glycine max
ctcaactcaacgccttctgtcgtttactttactcattttcttcttctctgtttccttctttttcgttcttcccagaaaccaccgtcgctcgccgccgatcacgacggcgattttctcagcttagtttctgtttttctcgattccatgtgttttccgtgctctgccgccgccgtaagccgcttcacgtgacggatgggttgcgtgctcgggacgccggccggtgccggagatcagcgccttcgccggagcgagaagcgca

SEQ ID NO: 112135 - DNA, 196 bp, Glycine max
tccgaattcggctctacgtgctgtcgctccccatattcagattcatttcaattcttctattcttttagctttcttcttcttcctcctattcggattcgccatatacagatggagggctcaaaggaaaactgtgtgcctcggattccgctcataccctcttcaaatcttcaaggtccaagaatgaagcctctcctcc

SEQ ID NO: 112136 - DNA, 201 bp, Glycine max
tcggctcgaggtggtacatgagtggtttttgagcggaagagttaacagggcctgggattcatcgacgatgacatcggttggtgtggcaccaactatcgggttcttgagaatcaagtgggctcgattcagcatgtgctgctagattgactctggtgatcaacgatatgataattaggggtcatacagagatgtcagccacat

SEQ ID NO: 112137 - DNA, 260 bp, Glycine max
atggctgttgtgttctgatcttcctttccatgtgctgacttggttttcttcgacttgctttgtttgttctgtccatttggctctcctctttcctttgctattttgggggttgaagagccctagttttcaggattcaaggagtgttcagcaagtgggtttgtgctcatttcattgagttgtacttggctcttaccggatctagcttcatctggttattgattatatatttcttagtttttagttgaaggcatagactgaca

SEQ ID NO: 112138 - DNA, 185 bp, Glycine max
gtcttcctctgtttctttttcttccccaattgcaaaacacacacatacacacactgactctgtctctctgtgacaaacacaaacacaatcaatggcgtagctcacagctgcacccccgcggtcgcaccgtaccccgcgtaggtcctcccgtactgaaccgagaatctgcgcgaggtctacactct

SEQ ID NO: 112139 - DNA, 184 bp, Glycine max
  unsure (1)..(184): unsure at all n locations
ctattatagtttactactctactacgatgcttcnctnagaggtagatcagcactgctcatctcatgccttctagccatgctcattttaatctcctcagatgggtcagccatagaattgagagaggtcactggtgctggcttgtgcggtccttcgtggggtcatctatggtggctttggtggtgg

SEQ ID NO: 112140 - DNA, 114 bp, Glycine max
caagaatctgtaatatgtatatattccatgcagcatatacagtaacatggagttgacagctggcgttatagatccatagccatgtccatgggatcaacatggtctcatatgggg

SEQ ID NO: 112141 - DNA, 256 bp, Glycine max
gttttgaagagcgaaacagaagcagagctctttgttggtgttctatttttggaattttctgctggtgatctcgttggaaaacccgagctttctgaggctcgggatctgaattgtgaagatggattcaaattcaacaaaggagaagctgcagaacagtgttgttgttgcagatggagctgaacttaagtcttgttatatgcagaagttcaggctctatgagactcgctcgaaattttacatgattggaagaacaaaa

SEQ ID NO: 112142 - DNA, 212 bp, Glycine max
gaaaggcaccaaatcctaccacatcattagctatgattaccacactctcactctctcctttacttctcttcctactcttctccctagtccaaggactcattcccaacatgtgacacccaagaccatggttcaacccttgaagttttccatgtgttcagtccatgctccgcatttacgccgtcaagagtattctcatgggctgagattgtcct

SEQ ID NO: 112143 - DNA, 165 bp, Glycine max
acaagaagaagcgaaacgcgcaaattgagagaagatgagtagtgacggctccaagtactgctccatcatctagatgtgtgaaatccctgaactcacgttagagatcccttcgcagtacatcgttaggagcaaagatgctgtatcaaatgtgattgccgcaatgac

SEQ ID NO: 112144 - DNA, 194 bp, Glycine max
ttcggctctagagcaccacttcctcactctcactccctcaattcacaatcctcacgttgcgtcggtcacatgatactcctctcgcactccgtgtcctagctctatcactgaatcactcatccttataataaataaataattactcgaagaaggagtaagacggtctcgacgatgtagacgttgtagaagaagaa

SEQ ID NO: 112145 - DNA, 253 bp, Glycine max
attacactccggttctgcattgagggttacattcctttctcttcctcttaattattcattcagattacgttgaacgtgtctgcctttttgtaatccaccgctagccggactccactctttttaccagtcttactttctgttcttcgagcattcatcatgcgcttctctaccctcgtccctttgctgcttgcggccggtgttgccaacgcccaattcggtggtcaaggtggtggtcaaggccagaacacggcca

SEQ ID NO: 112146 - DNA, 122 bp, Glycine max
gacagcttagctcaataatgagaggtgcgtttaaacttttacagtgtgaacagtgaccgagattgcctcttccctgcgtcgtcgatcttcgcttctctcctctgtgttagggtttgctcggt

SEQ ID NO: 112147 - DNA, 252 bp, Glycine max
cccaaccctagatattaattcttcaacagcaccaaccttcttccttctcttcaactcaacattatatatgtattcattctcagatctccccaaattccgtcacacgctccctccatcaaaaacaccccacaattcttcccggacaagtctctttccctaacaattttccacctttgagcctcaaggcctctcaattttgcattccatcttgtgggatccattgaattgcactggatttgaaacccactgaaa

SEQ ID NO: 112148 - DNA, 257 bp, Glycine max
ctcctcttccaatcctattggaaccaccattccaatccaactcccgcatgccccatgatttgctctactcccatctctacatctaccattttccatctcctcatatataaattagccttataatcgttttttcattttaatcacaaaccccaaagtcctctaccaaacccaccatagcttagccacaacatggaggccaatccttctcacactacaacccctcatcttgatcatgctctacaaactcccttgctgaa

SEQ ID NO: 112149 - DNA, 258 bp, Glycine max
tcttcaacaaccagtcgatgtgtctcgtcgactgatcatgaaacgatggaccgcagtggtgaagtctataaactttctcctacttctgtctctactagcctttgctcccttatgtcactgtaaaaagacaataggaggttacctctaccctcaattctacgacggttcatgccccagagcttcaagagattgtcaaatccatcgttgcaaaggaagggcaaaaagaaccccgcatggctgcttcgttgctcagactac

SEQ ID NO: 112150 - DNA, 254 bp, Glycine max
caaatctctcatacttcttacgccacatacaccgttctcttcatttctcactctccggaacatttttttttttaaaaaagaaaaggggaaaatagaaagaaaagaaaaagggagaaggagtgagaataacatgaacaaacaactcacgctgctctgtctctttatcctcttctcatttctcagtgtgggtttcgccggcgccggagacgcggcggagaaaaaccctttcaccccaaaagccttcgccattcgtt

SEQ ID NO: 112151 - DNA, 245 bp, Glycine max
cttgcatttgcgggcctccctttactcgcacatggtcgaacagagacccctgttcgtgtgtctcaatctctccgacgacaccgtttcggggctcttcctggccatcggcgttgtctgattgtgcccaatgggccctctgggactccacgacgtccagacgtagatgagcgctttaatgagtaccttgaactcgtggcatgtccagccagcgtcatccaggcagctgtacctcagcatgttgagca

SEQ ID NO: 112152 - DNA, 262 bp, Glycine max
ctcaaacccaaagaacacggagttggcggcgaccctttctctctctgatttcgatcatggcagctgttgctccttcttctgacaaaactgcagatttattgcagaatttgaccctggactctgagtccaaacccattggagttgctgagcctgcgaagaagaatggacccactttttccagtggtgcagctaaagggagggccaagccattcaatccaaattcatgctttgttccaaatggatacccttctgcgtattatta

SEQ ID NO: 112153 - DNA, 226 bp, Glycine max
aagagtagtaactaagacaataaaggtagctaatttatgtcgttcaattctccggcggcaccgcagccgattccgcagaaggtactacttacaaggtattctactagtgatgaacaggagcgagcgctgcttgcgaacctatgcgtacagcataagctccgtcgacgggaatccgtcggagcttggggacgacgatggctggaacgccgatgatgacgctgtacga

SEQ ID NO: 112154 - DNA, 256 bp, Glycine max
ctcaaagtttatcatttccaactactcttctttatttgtcacctgatcatgtaccatggaagggagaatgggactgttgtttcttgttgtattaggtgctgcttgggcatgtgatgcaagggaactggctaactctgaaacttctgaactaagcataaaaccggatgtgtgtgcactttgtgaggaatatattaccaaggcacttgattatctacatgaaaacaagactgagacagagatcattagtatcctgcac

SEQ ID NO: 112155 - DNA, 258 bp, Glycine max
ttttgtttgaattttccttcttttttttacgttttggtggtgaaatggggtattagggaccgattgtttgggttttaccatagagggtgtttgggcttttactcgtaagactctaataatttgcactgaaaataggaggcctagacataaatgcaaaatggaagaagaaagaaaaattgaaagggagaaataaaggtagcgaaaagaaggaacaaaaatacaaactcatctttgttctgctgtctgatgcatgcacgt

SEQ ID NO: 112156 - DNA, 261 bp, Glycine max
agaaatcaacacaccacacctccttagctcttcctgcatcgcaaaaaagctaaatacacagaagaaactccacattcatcatgaacacctaaactaaaatcaaaaccaaaaccaaaatcaaatcccaaacgtcgccgctttgatttcgcgagtaacacatgcaatacagtccttcctctcccataacgatctcgttctcctaccttcccaatccctccgtcaccaatacctaatctcatccaacatcgcccactctccctc

SEQ ID NO: 112157 - DNA, 197 bp, Glycine max
aagtcagtgccgctctcacgttcagttagcagtgaggatagatgttgttctgctacttaaatacatccatgttgatgtggtttgtagcctcaagaggaagcctgtcttgattagagtggctgatagaaatccagagtacagctctggggatcgatgttgtaaaagtaagggtttagagctaggcattgaagaagtcc

SEQ ID NO: 112158 - DNA, 255 bp, Glycine max
caaaaccgaaggaatggagaaaaacaactcactccctaaatactcatgctcctactctgaatttgggttcacggaacgatcaaactcatacaatttcaacgggccaatccagaagggaagtggggtttctggagcaaatgatccagaggcttaagagggagaagaggatcaaggcggataacgtggtcactgtggaagggaaggctaaaaccagtggtagaaacggggtccagttggtccaggaccagtttgggg

SEQ ID NO: 112159 - DNA, 261 bp, Glycine max
tcgagccgaatcggctcgagataaaaacaaaatacccttaaaacggctgatgcagacagcgcgactcgcgctcctgaacgcgacgcccaggagaatcttgcggccagcgacaacacccaagctccagctccagctccagcgccagctacagctgtaggcgagcattgtgtatcagacagaccaaccccttccggtcagtcctccactggcgaagctcttaagctcaacgatgtcgatgtctatatctcgaaacccaccgac

SEQ ID NO: 112160 - DNA, 248 bp, Glycine max
agaacccttttcagttaatgtcgcacgtgagaaccctggccttttcagttctttgaaaaccctcttcgcacgtcgccgctctaaactctggcccaaagctcgtcgcaacggtgtttgcgttttccaccgtcgtcaacagcggagttccctccttcaaagcccgtcgcacgccgcagctctgaactccgcctcgaagcccgccgtgatggcgtctgcgtcttcgttgtcatcaaaagcggagttccctc

SEQ ID NO: 112161 - DNA, 230 bp, Glycine max
gccggcgggacgacgagcctcgctgaatgaatgtcaattgtgaaattatgatggatttgattgtgttcttcttcgtgattcgtatataaatatgtgttattgtgtttgtcggtgggtgggtgactttgtattttgtctctgtgactttgtttttgtgtgtggacaaggagaaggactactgaagaatgaagattcttagtgaaattttgagggttagtttttttgtttct

SEQ ID NO: 112162 - DNA, 243 bp, Glycine max
ggcgcccaacctcaacccggccatctgcatctccgccggattggtcgcgctcggcctcgccaacggcatcaacgtcaggctctatggtgaaatcgagttctggatctccctccagaggttctcctcatcagcggcctcctcctcaacctcaacttccacattgggggggaaaaccctctgaacgaccgatacggcttccgatatggaagacccgggtctgttcaccgcggacgactggtgggc

SEQ ID NO: 112163 - DNA, 100 bp, Glycine max
atcgttgttacaactttgcaacacaaacgtatttggaatttggggctaggttcatatatcggttgctacttaattcattatctatggccagtgaggcagc

SEQ ID NO: 112164 - DNA, 210 bp, Glycine max
ggtaaatgaaaatggattttcgcaaattcagcgtcaaacgtcagtgtttaccgtggcagctccaactcgtcatctctattcttctgttcttagcagttagttcacttggatcacctatgaaactcgcaaaattggcagttcaccggatcgcaccttttgatcttcaaggacagggtccgatttggagtgaagatgttatacacaatgatt

SEQ ID NO: 112165 - DNA, 225 bp, Glycine max
tttccttgcatgggctgttaagatgtctcgcacgtgctcacagtgcggcaacaacggccacaactcacggacatgcaccgacggtggcgccgccgggtctccaaggaaaaccggcttaatccgttccgcctaaaaattccttacggcagctaaatcctccttcaagaaaaacgccatttacaaaccttcacatattacgacgcggtgtacaacgccgccgacgcg

SEQ ID NO: 112166 - DNA, 264 bp, Glycine max
cacagatctgcgtcctcactctctcacgacagtgtttcctatcttcgctctcagtttctgcacacacgtgcggcgtggcagcaatcttcatcaacgttcggcactggcgatttggtgacgcaatgcaccgtcaaagtaaagccccatttgctattgaagagtaaaactgaggtgactgcctgaacatgctcagagcaaaggtttacggcggagcataataatctctgagtttttcttgctgcaactatttgatacttgctgtgc

SEQ ID NO: 112167 - DNA, 255 bp, Glycine max
ctcctcttctcaataccaatcccaacaacctccactgctcccaaatcaccgacttcaccgtctccaacttcaaacaagtcatcaaccttctcaacggaacgggcaaggccggtttcggcggtcttcaacccaagcccaagcccaagcccaaacccaaacccaaacccaaccaagtcttcagcctcaaccggaaacccaccaagggtccagttagatttcgtgaagcccaccattctaaactcaaaacccagcaac

SEQ ID NO: 112168 - DNA, 264 bp, Glycine max
atgcaagccaatgaacaacaacaacaacctttcccaaaactcattatgtaccccataactctgaagtttgaggagttggtttacaaagttaaactagagcagaaaggagggtgctggggaagtacatggacttgcaaggagaagaccatactgaatggaatcactggtgtggtgtgtccaggagaaatactagctatgttggggccatcaggcagtggcaaaaccacacttctcacagcactcggaggccggctcaacggcaaa

SEQ ID NO: 112169 - DNA, 251 bp, Glycine max
gatgaagaatatcactgtcattgtttgattttgttagtttaaagacaaattccttctgttggctctccagttttgtcagaacctgatgtaagatgccattgctttatagtatcaaatcaaccttttctgcagtttgccacttattcaagttgatatgggaaagatctatgacatctaactaaattcagaatggctttagaaaatcttgtgtattgaatcaagcttaaatttaagttagattgaatctaaat

SEQ ID NO: 112170 - DNA, 266 bp, Glycine max
tgcaaaccctagtttcatggagggcaaatatggaattggcatgattgagaaccctaggcctattgacttcatgatggagagcaagctggagggcataattgggagcggtagtagttctaggaataattttgatttttttggaaatagtgacatgtctatgggtatgactagtgttgggctgggagatatgaatagtactcaaaatgggttgccaccaaattttcatcatcatggtctttcagcatttggtggcatgtctatgtcta

SEQ ID NO: 112171 - DNA, 169 bp, Glycine max
gtggttgggtgttataggtaatgtaacgatctcttcaaaatctctattcgaaacgatgccctttagtttccgcaacggccggcaccgggactgcccctttccgagctaatgacgcttccgaaagtttcgtcgctggctctcaaacaggcttagatttttgaagacaagc

SEQ ID NO: 112172 - DNA, 254 bp, Glycine max
gagatgacttggtgagtgctgtactatttattttgggttttggcttcaatttggactgcatgaaatggattcttctatgcctcctgttgctttggaaactgaagacagcataagcagttactccattcctgaaatccctgcgttcaaacatgaccaaaatcaagatgcaacccatgtcactcactctctctagtagtgaactctgacccagtcattctaaccactagcaaaagccaacataaaagaaagcagaa

SEQ ID NO: 112173 - DNA, 219 bp, Glycine max
gaaggccaacagtgaagctctggccctgaacgtgaaccgtgacttcgacacagagatggtggcattcaacttcgttgttattacccaccgttactcgtaagaggtgagtgggctgagcattcaagcccagggttcgcaccatacgttgttgcacaaagttatgagtgcttcctccgtcaatgaggatgaataccctctgagatgatatcgacccaccaa

SEQ ID NO: 112174 - DNA, 208 bp, Glycine max
  unsure (1)..(208): unsure at all n locations
ccttccttcaccttcttcgttgcttgcggtgccctagattttctctatcctttcactcgttcccgaattccctcccgctagggtttccgcgggattccgaggacgatatgcacgacgccaacgatgtggagtcccttgacgacgactttcgtcagntgcgagaccgaggacgcatccaatgantataatagngtcaatgacgacgaag

SEQ ID NO: 112175 - DNA, 237 bp, Glycine max
  unsure (1)..(237): unsure at all n locations
gcagaagagagtgagtgaagaagcattatttccacttgacttgggtgtctccgcctttctcttctcaaatcaaatcaatgagcatggcttctctccccaattcccccgctctttcattctcctcatctctctccaccaccgccacagctcctccaagatgccgacttaccgcaattccccgccgccgcgccatattaattctgagtaagccatgcactcgcgaaactatangtccgc

SEQ ID NO: 112176 - DNA, 155 bp, Glycine max
acgagattagataatatagagcggcagctgactagtgagatcgtcgaaatgggaattaattaaggacaggtacatgcaggcgtacaagatttaaatatagtgagtagtattagagattggagtaatcatggtaatagatgtttcatgtgtgaaat

SEQ ID NO: 112177 - DNA, 232 bp, Glycine max
cgtactttctctgtttctaaacaccccccacaaaattttctcactcgagaattttcccggaaaatctcacctttttcgatttctcagtcaagacaaacaacaacaaaaactctaaattctttcttaattcttgccaaattcgaaggagagagaaagagaaaaagaaaaggccaaaaggcttacggcatcacagggaacatcgacatcattcaggcgcatccgcagcaaccgc

SEQ ID NO: 112178 - DNA, 242 bp, Glycine max
  unsure (1)..(242): unsure at all n locations
ctctcacattattcaacaccaaagtactcaaactcagcaatatccacatttccaatcatcacaagcctccaacttcctcttcaattcaattcatctccctcattgatatatataatctcaagaccattattattagcgtgtttggtttcacgtttcggatgtgatttaagaagcctactgatanttatgaattcacgacataagcgtgacatcatacatctgtaacgagactctaaacacgc

SEQ ID NO: 112179 - DNA, 129 bp, Glycine max
aagtcgaatccctcttcatcttcttctatctgtgccgagcatcatggcctcacaagcagtataattcttggctatgtctgtgattccgacgatgattttcgccattctcacagcaaagaaccctctcta

SEQ ID NO: 112180 - DNA, 154 bp, Glycine max
ctcaactctctagttgttgttgctgcatttttcattttctaggcttagtcattagatagaaagagacggacaaaaaaggctattatggcaggaggaggagctccagctaaagcagatgagccacagccacagccaccaaaggatcagttaccaa

SEQ ID NO: 112181 - DNA, 180 bp, Glycine max
  unsure (1)..(180): unsure at all n locations
tgtgaggttggtttatgagccccagccacgtcctcgcgcaattacagctcttgccggggtcacttatgtttctgcggcatctgcttctagcacccactaggtactgaattcgatcgctcaatccatccgcaagtggcttgcggcgantggaggcatagggccgaggagcttacggaggag

SEQ ID NO: 112182 - DNA, 250 bp, Glycine max
gaaaataaccaactctctccttctctacatcttttacttcgttctttgtgagttgaaaatccgtgcttgctttgagtcttttctgtgttgatcctaaattcttcttcaaaacagttcccttttttttattttacttactttttacttttgagtttatggtttacgctacatgaatcatgggaaatgtttcttcagtattacagtttcattataacgcgtgttccaacttgctccattgcatgtctcgagg

SEQ ID NO: 112183 - DNA, 272 bp, Glycine max
ctcaactcattagcaatggcaacatactattaacacccctcttcctccctctccaccgtcccgcaattaagattcaaatggcatttcacagagcctcgaaggcgaagccaaaatccgcgagatcccgaattctgctcctcgcggcagcagtgacagcgattgcgcttctcttcctgttctcctctcttctttccaccaccgtctcgaaaggcaacctcttacagcgacgacaacaacagcccttcgaaaagtacctctattggggcaccgca

SEQ ID NO: 112184 - DNA, 155 bp, Glycine max
ctcgatcccttcgcttcctcttccgagagctgtttccagtcgttacccccacagtcattcgctcataagaatctaccatcaacaagatgcgttacaccgagatcctcgccctggccatgggcaatgtggtcgccgcccagttcgacaccactcgt

SEQ ID NO: 112185 - DNA, 144 bp, Glycine max
ctctgctctgagtcacaggttgtgaaccgttgttggcacttggcagataattattgcatctaatgagtcatctgcaaaaattgtgtctctgaatgaccatcaagtgatccagtgcgattggaaagaaccttcccaattacaaag

SEQ ID NO: 112186 - DNA, 255 bp, Glycine max
atcgagccgaatcggctcgaggagaaatatgtgtggtcgaagaaagtgagtacctgtagagggtgcgtgaaaacatattcagacattttgtcaacaagatttactctcactgaagaatgatctctgtaggcttgtggcatctcctccaaatatttacatgttttctgcttttgactcaatcattttctaaagatgatcgaaagacttacatcgtctacatgggcgattatccgaaggtgtgggattcgcagaatc

SEQ ID NO: 112187 - DNA, 179 bp, Glycine max
agcgcctggatacaagttatgccttggaatggaagagaattccgaatcagctttgtctacgaacaaggaagctataagtaatgcaactaggaatctcatggagagttcgatcctggctcaggatgaacgctggcggcatgccttacacatgcacgtcggacgggaagtggtgtttccag

SEQ ID NO: 112188 - DNA, 122 bp, Glycine max
tgctctcgctcgcagaatctgaaccctaggaaatttacccttcagacgcaaccctagattctcctctcacaaatctctcttcagttccccattctcgggattcggtgtcaagatcacagatc

SEQ ID NO: 112189 - DNA, 246 bp, Glycine max
ccttcctctctatccaaatccgcgccacaaccaacctcacccttcaattcctcaaaccctaactctcctcccagcacaagcccatcctctgccgctggctctgcagcgccctctccatctactccctctccgtcctcctctcgaagctccccagaatcggcaccgttagcgcctccatcgacgccgccccctcctcgtcacgcgcctcgccgtcggctacgcgcacacgcgctcctctgggaggcc

SEQ ID NO: 112190 - DNA, 152 bp, Glycine max
caacaccccaccttcaattttccacctctgtcttgtccgaaatctccatccgggtcattagtatctgagcctatcttgtattcttttgcaacccttgactccattcctcgtttcaagagagaaaaagggttgccttttctttgtaattcttg

SEQ ID NO: 112191 - DNA, 233 bp, Glycine max
  unsure (1)..(233): unsure at all n locations
cggttagcgaattaaacgacacattaaactgatcgagcggcggacatcgaggtcagggatcgaaccagtgaaattgttgcgtttaattcgttaaccggatccattccgaaccggttttcgcgtctggaccgaaccgcttttctcggaaactcgctgctctgcgggaagcctttgcagctttgccccggaactgaggagaagaagggntaacgtttcggctgcgccanttcggg

SEQ ID NO: 112192 - DNA, 249 bp, Glycine max
tgtatagcaaactgacaaatcacaccataagaaccagtggtggatcaaacttctctgctctggagtggacatcaattgcttgggccacaggactagccctggctgctccaattcttggcttcatttcctttcaccttgatggccacttcccaaagctcatcacagcagcagccacaggcattggagtgttcttctgccttcctgcaggcttcttccaggtcacagccatcttcatgtccctacatgccg

SEQ ID NO: 112193 - DNA, 242 bp, Glycine max
  unsure (1)..(242): unsure at all n locations
attaactacccttcttgttccacactatcactaatctgctcttnctgcaattcaacccatggaaaccacccagcttgactacctcactaaaagcccaaaccccacttccccaacgcgcttgaagctcttgggtttcagcgtacaccacgaagacatcatggaagaggacgaggtggtggtggcgcatgatgacgtggcggactccaccaccaaggctacttccaaatccccttcccgtctga

SEQ ID NO: 112194 - DNA, 181 bp, Glycine max
ctccagcttccaagaaagcttcaggccttcgactgccttcaccaaagattggtttttttgatggggtgaagcccttagtgcgcactccacgtgggtctattgtacctggtggcttgccaaaacatggagctgaaagtccaagagaaggccaagacaaagcagaactcgggaagtctcaacc

SEQ ID NO: 112195 - DNA, 211 bp, Glycine max
cagctatgcacacaactgagagatagcgcaacactcccagagattgaaaaaccctaggttttattcctctcgataagttctcgaagtagatagatagacaaatagaaaaagagatttttttcttcctttttttttgttttttcatgttatgtgttccactggttgggtttgaattagggttctgagggattggttaaattcgatttatttg

SEQ ID NO: 112196 - DNA, 202 bp, Glycine max
gtaaccagtccccagtcgtgacccagaccagagtaagtttccaacaccaacacagcatcaacccagggttagggtttctgcaattccccaatctccatcttcccaaaattagggtttcttcgcgccatgacggacggctactggaaccgacaacagacgcttctgtctcaatccggcatgctcaaacgaccgcacttccgac

SEQ ID NO: 112197 - DNA, 248 bp, Glycine max
atttaggttctcttaaaacaaaggctcctcaaacttctttccccacactcttttagtgtgtcgtattttttcctctctttctccacaattaggtcttggaccgacccttttgtgtaagtgcaatggccatggctaagcttgtatgtgttctgcttctggcattccttggcatttccatgatcacaactcaagttagttaatttgtcccttctaaaaaaatactataactcattattattcactaacat

SEQ ID NO: 112198 - DNA, 238 bp, Glycine max
ctcacagcacactcagatctctcttctctttcttacaattccattgttgtttggttcccttcactctcacaatgcgaatactcgtcctactctctctcgacaaccttctcctcttctcctccatctctcccaccttctacgaccacctcgctgacgacgaagacctcagcttcctcgtcgaaccctccgccgcgccggagcacgactatcactacggcgccgatgactccaatttcgg

SEQ ID NO: 112199 - DNA, 230 bp, Glycine max
attttggtatgggtgagggttgtgacagttgcagaaacagaaagagttgttgttgtgtcccgccatgtcactagttaccaaacaaaaagcttttcattccgctgctcattctcagcctcttattactccacaaccttagcttaagcttttcatacactaaactaactctccctcaaataccatttcccaacaaaacacatttcaattccctttccttcataccagcccac

SEQ ID NO: 112200 - DNA, 192 bp, Glycine max
gcaaccccgagttcatgctccccaaagtcattcttctcatgttcgccttttgtctcaacagcaggccaagctagtgattacctatccatctcctcctcgagacaatgctgttgcacccaaaagggcacctcacacaaacattcccagcactggcatgaactcccatcttactgatcacccaattgttggaca

SEQ ID NO: 112201 - DNA, 237 bp, Glycine max
ctccatgcccaagaagaatctacctgaataatcccacacagattccaaaaccatacccatacacacacctttttacacatcactcttcattgcttaataattattttactaacatgaatccctcttgtcgcttctcttcaactaaacacacccctttccttcacaactccaaacccacttcccctattcttcctagacactcacacacatcattccaccaagcgaaaccattttcca

SEQ ID NO: 112202 - DNA, 187 bp, Glycine max
cctctttagattgctcctcttctccaattttgaacgaaacggcgatatctttgttaaatttagtgcatcgtattgctcgtggctaaggagctccttgatgcagaaatgggcaacacctagcaagccaaagaagattctcataacaggagtagcaggcttcattggatgccatgtatgcaacaggata

SEQ ID NO: 112203 - DNA, 273 bp, Glycine max
aatgacccaacacagattcacaattcagtttcagagagagagagagagagagagatccactcttacaagtcaactaagtctcactctccacattcatttcacacgcaccttgagacagcaatgtcccttttgctcttccctctttgcctccatcttcttctcctttgactcaacaaccccccctctctctcacagagagacactttctctctctacaccgtaatggacgccggcgaagcctctctgacgatccgaatcggcccaattccgccg

SEQ ID NO: 112204 - DNA, 104 bp, Glycine max
cggagagtgaaagccaacgcaacgcaagagaagagggtcctgctaccataccaacatccacagcccatacgagcgtgcgtcgcgaagccttctgccatcacaaa

SEQ ID NO: 112205 - DNA, 268 bp, Glycine max
ctcgttgtttagaaaaccctaatctgattcaattccagcatggctcaaaaacaaaagctgcgcccttctcctctggacgagccacccaccgcttcctcttccgattccgaggaagaagaggagcaacaacaacaacaaccatcctctcagcaacacgaagaagaggaagaagaagtttcctccggagaagaagaggaagcttcctccgaagaagaggaagacgaaaatctccccccaccacccatctccaaaaaccctccaccccctc

SEQ ID NO: 112206 - DNA, 230 bp, Glycine max
gtccggtgcaaaaatgggtacggtgtctcttctcaagtgctacagaccctttttctctatgcttttccctcactccgctccacccagactccacgccgccatcttcaggagcaaaaacttttctttttgcgccacctcgtccccgccgttgacggcggagaagggttgcggcaaatccgacgccgagtgtcccaccttgccggagtgtggctgcacaacaccatgagtag

SEQ ID NO: 112207 - DNA, 105 bp, Glycine max
cgacacgttcaccacgtacgctcaatcctcggatggcgcaacataagtaaggttcacttcctacggcgtagacgacactttcgcggattacgagaaaaagggtac

SEQ ID NO: 112208 - DNA, 225 bp, Glycine max
gcttctcctggctcagcagttgcagctgacactgcagcagccatggcctcagcatctgtggtccttaaaaagactgatcctacatattcaagcactctaatcaagcatgcaacacagttggttacttttgctgaccagaatagagggtcctatagtgaggatataaccggagttcagacataatataactccactgggatatggtgatgagctttatgggcaact

SEQ ID NO: 112209 - DNA, 119 bp, Glycine max
ggaccacactgtttccttacgcgaagaggactgtttatccgtacatcattgattccgcctcatcttggtgctagttgtgcccgagcctcctcacgcatttgtttccgtccacactcaag

SEQ ID NO: 112210 - DNA, 228 bp, Glycine max
gtagagtggggcgaactacctccagaactcctggaatcaatctcgaaaaccttaaccatctacgtcgattacctcagattccgttccgtttgccgcagctggcgatcctccgttcccaaaatccctctccaccttcctccccaactcccatggctcatgctatctcgccgcgccttcttcgacctctccctcaacaaaacccatctcctcaaccctcaaccctctcac

SEQ ID NO: 112211 - DNA, 230 bp, Glycine max
ctttccgatttctcacacgcttcgccaaaccccacatccccttcccctccacgcgccggtccccactctcatctctccacgcgcctccacctcaccacgaccaacccaacctcgacgaccgcctcgtcctcgaccactctcccaccttttccccacactcacttccaaatcccaaaaccctgttttccccaatccacacccaaatgcagcaaacgctgtcgatgcgtttt

SEQ ID NO: 112212 - DNA, 245 bp, Glycine max
cgtacggctcctcggaattcagcttcaacgttggcagaggcggcaacagaagtacgacctgcaacttactcgatgggtcgcgtgaggacaattacggagaagttatctatctgcttggttgcttactggtactatttatgcatggcactcgattttaggccatcaatgagcttctctgtaaagtggccatccatccttccaataggctgcggaataagatcgcgggtttctccacgcatctcatg

SEQ ID NO: 112213 - DNA, 228 bp, Glycine max
agatcgcgagcggccgcccttttttttttttttaattttatttatttaattttcgaatctttttacattcgtcttaacctaaaatggtaacctttatatcactacgtacacgtacgcacatacaacatacatgcatgtttacatataaatatacaaaagttgcgtttttttgctggtgtcccggccagttctaggcgagattataaataattcttgaacgcttggcgg

SEQ ID NO: 112214 - DNA, 218 bp, Glycine max
gttttgatccctcccccaaacgaaacgcaccctctcctctttcggaaccttcgcgggacttctacggctaaattgcccgtggtttgtcgcacttccgatgcgatctccgggcagctcattcagtgacatactgtcctgcggcacagctccgtgttagccagctaagcctgcaactactgtggaatctagtctaatgtagggctcgactagagttttgg

SEQ ID NO: 112215 - DNA, 216 bp, Glycine max
ctcgagccgcgctacccaaccataacggaatctcgactccgagagcgcacacctctaacaggtccaaggtgcagcggagtcagcttgttgttatggggcgcatcatgggaaggggtaataagaccaaggtatgaaggtggatggacgaacgttcaagctggatgctccagcgggagcaaacgacgtcgtagaggactactccggtcacgttttggt

SEQ ID NO: 112216 - DNA, 204 bp, Glycine max
caaccacagagaatggactcgccggctagagtctctcatcatgcatccacttggggtcgcgtgagtactttgtcggtgaggggatcatcatgccaagagacgtagcgctgctactcgcgctggtctcacgatagcactcgcagagtgagctgctcgtagagctaggcgtgattgcttcctagaggttgcgcgtggtgatcgtgg

SEQ ID NO: 112217 - DNA, 218 bp, Glycine max
tcctgacacaagaattttgacacctcactgagtttctcaatttcaattgagcagccttaatcgcaggagcgcgacaattctgaataaatatgctggtttcgggtgctattagcgacgttttggtgtgcttccaccttcggcatctctcagacttccggaatttcgccatttgcatgctttcacagtttctgacgccaagggttttctgtctgggggat

SEQ ID NO: 112218 - DNA, 154 bp, Glycine max
gtaatggtcacgggcgttattacgagactgtgtatgaagcggttaatgcggagccggatgatggggtatcagaaggtgtgatatattcacatccagggggttatgtacagaaggtaaatcgtcccttagagatgagaatgttgtgttcttagga

SEQ ID NO: 112219 - DNA, 245 bp, Glycine max
gcagagccaaggttgtatgtgaaagactctgatgtgaggcatgagaatgagatcattagcatttgttgtgattctgctccttctttcacccaccattgtcaattctctctccctccctcatactccatctccatctccatctccatctccatctcctccttccacatcatcctcatcccgtttggacccaaaacaagcaacagcccttgaatccctcaacttccccacatcgtaggacccctgcg

SEQ ID NO: 112220 - DNA, 109 bp, Glycine max
gttctcagctttaatggcgatctcggggaacgtgccaccgttgctagtgcaggttaacttcaattgggtttgctttctactttgaaaattgccaaaaaaacaaggagcc

SEQ ID NO: 112221 - DNA, 123 bp, Glycine max
gtcctcgacttccgtgtcggaagctgctgacgtgtccatggaagatcgcgacgtgagtgctcaaggcctgttgccaccctcacctttctcgagaacactcaacaacagtaatttaccattacc

SEQ ID NO: 112222 - DNA, 208 bp, Glycine max
tttcaagaaccctacatgcctttattgaagaaaacaccttcacattagaagttcccgccatttgtataacatcttttccggcactcacactgttctcaattcaatcgttcatgctcgcattgcattttcgcccttgctttcctcttcccttcaatggctccctaacatttagggttccctctctcttctctttgcctctttctctctc

SEQ ID NO: 112223 - DNA, 240 bp, Glycine max
cgagtactggctaggctaagaacaacgcctttaaggcaggctagctggactaccactgcctctactgatggccttagagaaagaacttaactcatcaatcagtcagtctatagccttccagttttcaggatttgctggtcttaccgttgttcggaggagctcctccttctgagaacacgggttcaagggccttgctactccaacgagggcacccttatttaggcttcttcagtccatcgg

SEQ ID NO: 112224 - DNA, 241 bp, Glycine max
aattttcaccggatggtcgctatattttaagcgcagatcgtgatttcaaaattcgagttactaattttcccaagaagcctttaaatggagctcaacagatacaaagtttctgtctcggtcatacagagtttgtttcctgccttgccttcattcaggctcaggaatgccctcaaggctttcttctatctggcagtggtgattccacagttcgattgtgaatattgactctggagcacttctt

SEQ ID NO: 112225 - DNA, 198 bp, Glycine max
caggtttttcttcgcccccttttgtgtttctttttttggttgtttgttctttcttctcgttcgtcgctttgtgatctctctctgcaaccatgtccgccgagaaagagagagagacccaggtttacttggccaagcttgccgagcaggccgagagatacgaagaactgggtgagtgtatgaagagagtagcaaaacttg

SEQ ID NO: 112226 - DNA, 230 bp, Glycine max
ggaagtttttgagagcttttctaccaaaaatatagaatattttttggtagagaacctctcaatttttaaaataaattctaattgaaaacatttcacacctttaattacttataaatttaaataaaaagaacatttttcttaaaataaaaaacagtagtatttaatttggatcatcactgttagtgtaaagtgggtctctgaagatcaatcctcatcttctaccatttcag

SEQ ID NO: 112227 - DNA, 139 bp, Glycine max
gccgcgaactacctcatcctgggcaagttgatcaacgctaccggcggcaagtactcattcatcacgccacggagcttcagcatcctcttcatcttctccgacttttgctgcctcgtcgtgcagggagctggcggtggga

SEQ ID NO: 112228 - DNA, 270 bp, Glycine max
aaattcccttcccttgttgctctagaaaagaaagcaaagaaaaccaagacacaccctctcctccaaatatagcccattgatgagaattagaaaagactcactacagagacattaaactataacactcattgatcacagtctgtcccataaaaacaactaccatacagatacacgccccaacacaaattacaaaaaacacaaacaaaaacaacttttaacaccttcaattcccatgcgatcatgaagggaggtagtgatgacttccaccac

SEQ ID NO: 112229 - DNA, 265 bp, Glycine max
ggagtgttaaccctcacaagaaagacagcagcaatacgcaatcccacgcaagcccatccaattattgtccaataaacaaacctcatcaaatcctgatagatagatagatagataggttaaagatttcatctttcttcttcttttccttcaaacaatcaaatccacccacggcaccctctcacataaaaaaaaatctcagatttcttcattccttccattcaattccaatccaaaatggatcaacaccacttcctccaccaccacc

SEQ ID NO: 112230 - DNA, 203 bp, Glycine max
agccagtgttcccttctcacatcttctagtgtatatattttggctgaatcattaaaatctcttctgaaagagttgtaccttgatgattgccaaggcattgatgctgcactaattgtgccagcactaattgagcttgaacatttagaagtgttgtcagtagctggcattcaaacggtttgtgatgaatttgtcaagaactacat

SEQ ID NO: 112231 - DNA, 266 bp, Glycine max
ctctactcctcgcttcaacggttcaatcaatcaactcttcatccttccctttatacccccccttctttgtgttgtacatatttatatcgtaacatagctaggctgctttactctagtgctctcctacactcaatgaaatgctgtgacgtgatttgcagaggagaagagggaatggcggcttacatgtgtgcagacagtggcaacctcatggcgattgcgcagaagtcattaagcagacgcagcagcaagagcagcagcagaagcag

SEQ ID NO: 112232 - DNA, 170 bp, Glycine max
tgtcgagcagaatcggctcgagcagacaatgggcagtgcttctctgagtacagtttcgtggtagtcttggcggacactttctagtttcaaggaaacggtgacaaccatggacgcaaaaccgtggcctgaagcacattcggaacgcaagacgcctgatttccgtagttaac

SEQ ID NO: 112233 - DNA, 182 bp, Glycine max
cgtgatctctctctattctttgaaaccaaagttcagactctgtcttccctgggttctatttcgacatcaacgacgatgcgttccacagaggcagcagccaccgagcactacacacctcacagggcaaacgacgacttcacagtccgtttcgcgttcctacacagctggccttcagtttcccg

SEQ ID NO: 112234 - DNA, 191 bp, Glycine max
tgtaaagggttggcattgacccctttgcacaacggcaaagacggtgttgctgtgataccagactattgaacttgcgtccgtctccagtagttcgcagggttttcgttttcccatttccacattttttgggtttgggagggaagcagactcactagaattaagcacttggttgctccgtacgacaccgatgt

SEQ ID NO: 112235 - DNA, 196 bp, Glycine max
ggagaaaacgcaacacattagacgagtacatttctaccattcagaacgacgcgtgccctttcgaactcttctagagccacctaaccatttaccgtccaataattacattatcatcattagtaatatgcactttgcctctaaacgcatccatgccttccccttcagttcgtagactcacaatggccgcactatccaa

SEQ ID NO: 112236 - DNA, 158 bp, Glycine max
gtaatttctgccagcctcaaaaaagcacttgctctgactctgaccatgtctgagtacgactaccgtgacatgcgccactcagtatccactgttggagctgtccacggagctccactgagcttgcacaggtctggagacggaccttcagttcgcagttc

SEQ ID NO: 112237 - DNA, 105 bp, Glycine max
gtaatgtgtcatgcaattgcagtcacagcatctgaacgctgacacatactccaccacacaatgatgcttaccttgcttaagcaaagatctctgatttcgccacta

SEQ ID NO: 112238 - DNA, 215 bp, Glycine max
gtagatatgataaggtgctcaagcttcagtggacaccaaccaaccactgaacaaaaccgaagcttgacatcatcgacgaacttgattacgcatgccttccttccatcatcccttgcccttaaaccacgtagccgtcttgtaatgccttgtcagaaactcagaagacccttgcactcatttccgtcaatggattcgagtacaacaaactccacaga

SEQ ID NO: 112239 - DNA, 284 bp, Glycine max
caacaattacagcttagctagcctcgatctccctcttgttgaattcccctaccccaaccacaaccctttgtcggaacacaaaaaacaaatgatgtctggttggatgcaagacacagcagaagaacaaaactctgcttctgcttcatggccaaactcaaacgccaacaacgaattaagctgcgtgtcattgtgtgcttacaaaccgatctcctcccagatccatgaagcagaatggcggcacgtgaccaacaacccaacacacaccaacgttgctgcttctgata

SEQ ID NO: 112240 - DNA, 235 bp, Glycine max
tctctctaaaccacgcctagagagagaaactcgccgccggcaccctccggcgatgacatgaccgcgtttccctcatccttcgtagactttgatgcgccgatcgaatgccgatcgagcgcgctcaatctcaacaacacacgaattaatggatcgatcaaaccaaaccgtcacacttcgccgaactaagcggatcaatcctcgtcaatctcgctcctcggttctctctctgttctat

SEQ ID NO: 112241 - DNA, 170 bp, Glycine max
gctgtttttctacatgctacttggtgttgctgtggttatgtgcagttcgctgggcgacattggctgcggtgatcaagggatggatttcgttgttggagctgcttgtttcttccctggtatcgctttttgattcaaatgactttattgtggagcaagagagcatcattcat

SEQ ID NO: 112242 - DNA, 286 bp, Glycine max
cattaacctttgactcaaacgcatgagcgaggattgcaattctggagccgcgtcgctgttgttgccctccccttcgaattccaagattgttggagagaagcgtggaagcactcacaggggtcacagcgctcggaaacgggtcaagatgaaagatcttgacgccgttgttcactccgtggaaacgaatagccgttattcggagtttaaaaacgacaaagaaaacaccgtgcaatggtcgttgggtgctacggatgcttctcaacaagtgacaacgggaaggaatgcg

SEQ ID NO: 112243 - DNA, 190 bp, Glycine max
gtcgtctcttgcgctgacctcgttgttctagccgcacgcgatgctgtatctctgtcaggggggcgaatatttgccgtgtgactgggagggagtagatggtctgagtttcagcatagacggcacaggttaccttccgagaccgtcttcccggaacgggcagctcctcgggagatttggcggcagagacttc

SEQ ID NO: 112244 - DNA, 240 bp, Glycine max
gccgccctttttttttttttttttggcatcataacaaattttacctttaaaaagtccaaattgaaggggttcgaaaacaaattttaagtaatgggaaatgttctgcaaataacccaatttcccctggcaaacctaaagtattccaaggtctagttttcccaatttaacaaacggattaagacccagtggcggtttccaaaagggcccttcggggttccgggttggccaatggcccatggc

SEQ ID NO: 112245 - DNA, 259 bp, Glycine max
gaagaggaaggcagtgaaggggatggagaagaaggcgtggaggattcttgctaaccagctggggcagttgagggagatggaggcgcggttcgagcagcgtgagctggacgagggagcgtgataggcagaggaggagaatttgcgagtggagcttgataagcagtgggagaagaagcttgaggagagggacaaacttaggaggcagaggatggtggagtgggaagctatggagaaggaaaatgaagagatggaaaggaag

SEQ ID NO: 112246 - DNA, 258 bp, Glycine max
cataccaccaaacataccctataccactcttcgtacacgacctcgccctcccgatacatcatcccggctctgccagcagtgggacaccgccttgctctgctacaccccccagagtcttcacgtcccgcccgctgggactgcgcctgcaaaccactcgaccctttccaaatcccacgcgaacaaccgatgtcatcgatcacggcaccccgccacaaccacaatcaatcaggacattcacgaccgcatcaagaagatata

SEQ ID NO: 112247 - DNA, 119 bp, Glycine max
caaccatcgcgacgccgggctggggctacgttccggtgcggtgcggtggaccgcgttcccagcgtagcgcaatgatggaaagcggatcctgaggattgaagggatccaagccatccaaa

SEQ ID NO: 112248 - DNA, 252 bp, Glycine max
aacaagacaacgagacagggttcccacttccagatctacttactacgtttctctgttctgtcactcatcattctgatagtttaactcctttttgtgtaaagtttaaaacttgaagcaaaaccaaccacccatttgccatttggtgataaaaatcgatcaatggagttcactgaatcttacaagcaaacgggtccctgttgtttctctcccaacgctcgcttcattgccgttgctgttgattatcgtctcgtc

SEQ ID NO: 112249 - DNA, 224 bp, Glycine max
  unsure (1)..(224): unsure at all n locations
accaaacacatttctagattcacgcttccaccattccacacactctantactctcgnanagnanatggnanntantancancgtanntatttgtanacttcnctnngatttcgtcaccggacgactagctccgtcagcaatgaggacccctaagacgcgcgtggaccacacgctccctctcacctccgtcctcaagcatcccttcaccattctcgacggtcctc

SEQ ID NO: 112250 - DNA, 210 bp, Glycine max
gttgtttcatatatccaattctacttccaaagtttctcgctgtctccattccaaattcactctttctaattaaccattttttttctttctaatccttgtttctgttccatatatcaatgcatttctccattatcggtgcattgatcacaaatttcagccttggaagcttcaacatagcaaatacttcaaaagacatggataattctcaag

SEQ ID NO: 112251 - DNA, 247 bp, Glycine max
gcctcgctctgtttctgtctctgtgtttgcggctgaggattccgaacgagcgaccttcttcgtttctcgcaaagtttaagtcatcatgggtaaggaaaagactcacatcaacattgtcgtcattgacatgtcgactctgggaagtcaactaccactggtcatttgatctacaagcttggatgtattcgacaagcgtgtgattgagaggttcgagaaggcagctgctgagcatgtagaagaggtcatt

SEQ ID NO: 112252 - DNA, 251 bp, Glycine max
ctaacacaaagtctcattcactttgatctccaatttttttcagaaacccaagaatcaagtcaaatttgggtttcatttctctctctctctctcccaatcacactgatagaacctgctagctaggttggttactccaatctccctctgcttttcttcaccttttctgagttgtccacgcattcgaacattaaacccattggtccccggtcatttatatatgcaatatctggttcaacagtaagagggtcttt

SEQ ID NO: 112253 - DNA, 212 bp, Glycine max
tacttgcgttattagggtttagtgagatagtgcgcggggtagtgacattacagtgtgagcataagattttcagagtcggcgcgtgatcttgccactactagggattcagggaatcgcgcacatcacttacaagtccataggctactgcatcatgcccccattggagtcggtcgatcctccccagaatccatacatggctagctggcctcgaa

SEQ ID NO: 112254 - DNA, 218 bp, Glycine max
cggctccttgggtcttcgcaattgctgcttgcacctttgacagagacttttgccgtcctttcaccgtcacagataggctgtttacgagcacgcgtcttttcgtggttttgccacccattcatgccttactctgataccttgcgtctggtgcttggcttgctaattgcgcccattcgcgctgctaaccttagttggcctggcgcgcttgatgctgtcgg

SEQ ID NO: 112255 - DNA, 213 bp, Glycine max
gcccaagccctatacaaccaaaccctaacacacacccatttgattcagtttccatggctagcctcaaggttgcatttttggctgcagtgctctgcatggttgtggtgagtgcacccatggcacatgagctatcacgtgcgggcaggtgacgaatagcccgatcaattgcatcggttacctccagaacggaggaacgccgccgtcgggatgctg

SEQ ID NO: 112256 - DNA, 253 bp, Glycine max
ggaagacgaccgaatcgtcgcgagtggcgtggcgttgttgaaccctaactctcgtaaaccagatctgagattcagaacccttcgttcgcatcgcaaaaccctaactctcgcatcacggcgattattcgatgtcgagtttccacgtcggcggcaaggacgtggaccaagtcgatttgctgaggaagaagcgatggccctggtgccttgacgtttggcccttcgctattctctacggcgcgtggctttccacgat

SEQ ID NO: 112257 - DNA, 217 bp, Glycine max
tggagggtgtaaagtctttgaatttggaccaagttaaggacagtgattgtgaaggaaaaatgtgtggtgatgacaatagcaaggaaagttgttaagaagaaaattattgtaaaggttatgttaaaacaccattcctctggcattgcaaaccgttaagacaattgaagaccttggggggaatcctaaagaccaaggggaacttgcccttcaaggggtt

SEQ ID NO: 112258 - DNA, 100 bp, Glycine max
cagacgacatcattggaaaggtttctgtacgtagggtgttatggtgacatttgtttacaattcgtcagaggaatataatgattttaagtgataaaacaaa

SEQ ID NO: 112259 - DNA, 220 bp, Glycine max
gtttattttttcgtgtttgcattcaccgttccacagaaggtaaaaaatataaattgttcctctctttctgtggtgtgtctcagataaaaatgtcatcatcacgcagtaacaacttttacttaactcttgaaatttgttcagagttggatttgagaggcatgtctgtgaggagtgtggagtctctgggggagaggcaagaagagaggatacacaaacagtg

SEQ ID NO: 112260 - DNA, 259 bp, Glycine max
atcgtagtggaatagctctagaatgtctgatcgatgcagcacagagccggaagatggcattgagatcgatgcgagatttagcgattagcgtgattctgacaaacattacgagaactcaacatttcgacagtgtcgtctttatccaaaaagcacagattctaccacttccgatgacactctatggatcaatctctgcttcaatgtactcgcatctagcaacccctcgatcagctcgggaacccactctcgtcctgcaagg

SEQ ID NO: 112261 - DNA, 260 bp, Glycine max
gccttcatttaatgatatgtgatattgggatatggagagggttgcagagccaaaggtacttcctcggtccttgcctgttctagttgaggtatctaatggacacaccgctgcaataagagaagctggtcaaagactaaatgggcaggatgtttcgagtgtgtgtgggattccagcaagagaagggaatcagttttcaaaatcacgggatggccctatggcacgtcttgcctccatcagagaagtggctcagttatcgaatg

SEQ ID NO: 112262 - DNA, 258 bp, Glycine max
ctctctcgcagaccatctaggtaagctgactctatgtcggctggtcatagcttgagatcccgcacctgagattgcttctatgatcatttcaggctcaggcggtcggtagtgctcacgacgtgcagtattacttaatactgcgtcgactatgtggccgtcttcgctgatggtgccgtgcgtctaggattgtacgacgacttctagaatatcgtaacatgactatgctgactactactttggcgttttgtaggcgtctac

SEQ ID NO: 112263 - DNA, 181 bp, Glycine max
agcctcctcggcactctgtacggcaggctgtccttagaagcatgctgcgtctgagctgtcaccgtgcataacattgctcgtactcctgctgatgaccacgacttcgccagttacgaccactacgtctccgtcacgcaaatgtccgatgatatcacatgccgccgtaccatcatcgttgtgg

SEQ ID NO: 112264 - DNA, 205 bp, Glycine max
agcggactcccgatagaacgcagttgattgttgtcgacgggaattggggttcatcctatgacgtgtcgaattctagacgacgcagaagtcaggcatcggattctggactgttctttgcttgtctgaatgatgtcatgtctggtagtaactcgtatacctctcgattttcgtaccgactgatcccaaaagaattacgtgaccgtat

SEQ ID NO: 112265 - DNA, 223 bp, Glycine max
attggttgaagtgtggtggttatggttgatacttgcgagatagcaatgtctgtgagaggtatatatatacagcaagaatgcaagatagttgttctgtttcttttccttgttattgttagatggaccttggccatgtcgggagcgtttgcatggcgggtccgaaaagcgctattaaaatttaatatggtttttcgttttggggagggaaggtttcgggggtgtt

SEQ ID NO: 112266 - DNA, 227 bp, Glycine max
gaggagtcatgactttgtggcgattacttctgcttctggctggtgcctgcactgcaacctttgccgagaagcgtgccctcttttttgaggactttacatttaaggacatacaaggtaatacagtttcatatcttgagactgacttttcgaaattggacccatcaacattcgaaaactgcaaagatgattcggacagtgacgtcgagctgtgtcgtaggtggaaagat

SEQ ID NO: 112267 - DNA, 268 bp, Glycine max
aagctcgggattcggctcgagggcgtagcgcgtgccgcgcatgttcgccgcagaattcggatccgacctggaagcttcatcggagatagattcaagccgtagcgtgtgcccattgcccatggctgcccctctgcatcggggccgcctactgtaccgccaacggcatttccgccatctccgctgtcctcctccagctatgcagccacggcgaacacgtggtcgcctccagatctctctacggtgggacccacgcgctcctctcacagtt

SEQ ID NO: 112268 - DNA, 251 bp, Glycine max
ctggtccctcccgttcacactaaccccttcccccaaacatttcttcacgccgtgaacatcgtcaactctcaccgcacgcagcagcgcgtcgccccaacccagcaaatcgaccaggcgcgtgcgcgcgtgagattgttcgtgctcactctccgctgcaacagaaaacgccgttctcccctccctgtccctcgcgcacttcacgttggagcattccaacaaacactctgcggccttcacgtgccctttccacg

SEQ ID NO: 112269 - DNA, 110 bp, Glycine max
gtttttacaaaattgatgtatacgatatttagtttcaagcaggtaaactgaccaattttaagttctctttacgtattttgatatgagaagtttctgtaggtagtggatca

SEQ ID NO: 112270 - DNA, 148 bp, Glycine max
ctttagtgtatctgagcaaattagggttgtttactgagtgatgtgcacacaggctggactattttatttattccaattttgtatagtggttgcgcttgtgtttgtgtcagtctcctactactccctcagaattcgcaatgctgcctca

SEQ ID NO: 112271 - DNA, 126 bp, Glycine max
gtttgcggctgaggattccgaacgagcgaccttcttcgtttctcgcaaagttttcgtcatcatgggtaaggcaaagattcacatcagcattgtcgtcattggacatatcgactctgggaaatcaac

SEQ ID NO: 112272 - DNA, 195 bp, Glycine max
gcacttcgccggagataatgctgccgccgttggttaattctccggcttccctccggcgccggtgataccaataccatgcaagagaccctcctcactctccctctctcccaccacgaagacatccacattcgcgccaagaagaagaaaccgcaacagcatcatcacaaaccgggaagcgacaacagccaccccact

SEQ ID NO: 112273 - DNA, 259 bp, Glycine max
ctcgagccgcggcaacgttgagcatagagtgacagagtgaagaggttccgtcatggcccccagaatctctatgcggcgacgttttagggcgcctcaaccagctcttcaagcgcgtctcatcggtgaacaaatctgcaggtccattcgacgcgctcttgtgcgtgggtcagttcttccctgactcaccggagcagctcgaggacttcacgaaatacatcgaaggtggatctcactttcctcttccgacgtacttcatcgg

SEQ ID NO: 112274 - DNA, 265 bp, Glycine max
gcggcattccactttcaaaaacaacacttttgttgttgtgctaacaaatttgatccttttcactggcatattaatgttttccctcctcactctttctcctctctctaaaatcactatactgttgtaccattcaaattaaagattgtgcgaactgcagagtaaactgcagtagagtgctaactaaccctcagatcaacgaaaaaaagaggtacccttttctcatttataggttttttgtttctcactctgcagtttgtcaaacttg

SEQ ID NO: 112275 - DNA, 180 bp, Glycine max
gcagactccgagatcggccaaatgctctcgttccgaataatcaagaaaattttgaaaagctaaaagatcaaactttattcagacattcattcattgatcataatggggaagcttctctgagactgcaacctccgtcgccgaaccattccaaggttcgccgccggccgcgcttccatggcg

SEQ ID NO: 112276 - DNA, 256 bp, Glycine max
gctagcaccacattcacctgaggcttccaaagcaatggcttcccttgcagcatccactgctgcgcttcccttggcatgtcagaaatgcttggaaaccccatcaacttcagtggtgccacaaggccagctccatctgcttctagtcctgcctccttcaagactgtggctcttttctccaaaaagaaggctacaccaacacctccaaaaaaagctgctgctgctgctcctgccaatgatgagcttgccaagtggtatg

SEQ ID NO: 112277 - DNA, 252 bp, Glycine max
cgacaaactcctatgttcctttcattacagtatttctgaacaagttcctggataacagcctaagggttttcttattgatgatagtgacgatattgatgatagttacgatagtgacgatatcgaccgtgaccttgatatggagctggagcttctaactatgatgaatacgctaactatggatatgatgccagaaatagaccgattttatatcacctttcaattcgaattagcaaaagcaatgtctccttgcat

SEQ ID NO: 112278 - DNA, 249 bp, Glycine max
cgctctttgtcccggtggacgacgcattcgcggatctcccaccctcggttgctctcagtctctgcctgcggataagaaagccgttgttctcaaattccacgtgctacattcgtattaccctctcggttctcttgaatccgtggttaaccctttccaaccaaccctggctactgaggccatgggtgctggcagcttcacgctcaacatttcacgcgttaacggctccgtcgcaatcaacaccggcatcgt

SEQ ID NO: 112279 - DNA, 246 bp, Glycine max
gttggattttccagcctctggatcagttttcctggagagtttctctctgatctgtttggaggcacagatattagtttgaggtttttgtggctgtggtcaactttggaggtttttcagtttcaggagatgatcatgcctctttggaggcttatgagattgcgaaaaaagggtcaatttagtgatccttagatgctctttttcctctgatttcaaagccgttcttaatttcgccagggatttcgtctg

SEQ ID NO: 112280 - DNA, 248 bp, Glycine max
ggcagaatgtgccaagccagcctcagacatagagactacacaagagacaaagtgcacccagggaagaagatccagaaagtggcatacatcaaatgggatgcaatgcaaaggaccgatgatatgcagaagaccaatcagggcataccctccagatcatgcaaatgacaccctgtctccagctcctatatatcctatgtggggactacctggtagtcaaacagctggtgtacagatttggggccatcctg

SEQ ID NO: 112281 - DNA, 250 bp, Glycine max
caaatgccgaatctgaaccacacctactgatctacactgtggaagacaagcccaacatttcagcttttgggggaagagcaaacggaaaccctcataagagaggcaatgtgagagagagaaagttgctctttttttttttctcaggaggtttcggaaatggtggctgccatttcggaagacccattgacctcttctaatggcaccatccccagaagaccaaagggtaggcaagtttcttcaaggtacatgt

SEQ ID NO: 112282 - DNA, 209 bp, Glycine max
aatggcgaacacactcttcctctttgtcttcatgttactggcgaacaccgcgctctctctatatccgtcagcctcaccagccgagagcaccaccagagaggcccagcatcagaaagtctgatcgtcggaggctggcctggacaagtcgtgaaacttaagaggatcctatcggatggccaaggcaaagaattcagtatagtaggacaggg

SEQ ID NO: 112283 - DNA, 247 bp, Glycine max
ctgaaagttgaggattttagcaatgaacctccacaatcaagccaggtcaacttagaggaaacttataatgaagatatggtgaaggaagaagagggtattgatgcatttcccagctatgtttctgaccaatatttggatgttgtggagaatggtagaggtaaaaggcccaagtatgaacatgatgatgattcaatcacttgtcttgaaccttcttgggtggaagaaagggttgatgttgttgttgccg

SEQ ID NO: 112284 - DNA, 245 bp, Glycine max
ctccgacgcaacggtgagcttagttagtgtgaagaggttccgtcatcgtcatggcccccagaatcctactatgcggcgacgttttaggccgcctgaatcagcttttcaagcgcgtctcatcggtcctctctttccctagggtttttttttccatcattactcactcggaggcgtgacatggcaccgaatccatttcatttcatttgacgtggttgttgtattgtaggtgaacaaatctgcaggtc

SEQ ID NO: 112285 - DNA, 250 bp, Glycine max
ttttcgcccttgctttcctcttcccttccatcgctccctaatcgttagggtttcctctctcctctcttttcctcttcctctctcctccgccgtccctctccgcgccatgtcgaagcccccctccgccttcgatggcctcatgtccggcgcacgcgccgccgccgccgccaatagtaagtcccaatccctttcccaatcatcaccctcatcccccaagaaacgcaaaaccccacgctcctgttcctcacaa

SEQ ID NO: 112286 - DNA, 245 bp, Glycine max
ctccgagtcccatcgcattgagggatcaacagttacagttgagtgccaaagggcaggcaacactagaagccttacactagaagaggcaaccgatacaatccttttttgtagctccattgtccatgaccttgcatatcaggctgcaacaatagcaatgaaaaaggaatgctctgacccgtttgaaggttctgaaccaactgtgaccttgttggggaaagccaaatctgatagaaaggatagtcgca

SEQ ID NO: 112287 - DNA, 240 bp, Glycine max
gggactttgggtacgttatagcattaaacctgggcgagtttaaaatttaactagcgaaacgcaagcaccccactcttagatctgattgtcgagaatgtcttcgtcttcttcgggcttgattatccgagggcacgatgcctatcccattgacgacgcgtattagacgtagccgcagaagccatggctctccttcggctacctcctccgcgaacatcgtctccacttcctcctcctcggatt

SEQ ID NO: 112288 - DNA, 255 bp, Glycine max
gaagattccgcaacagagagtagagaagatggcgcggttgatcacagtggtgtggtgcgcggtggcggtgctactgtgcgccgcggcgggcgcgtcgtgggtggaggaggcggcgaacccgatacgaatggtggcgggggtggaggcggaggtggttcgggtgatagggcagtgccggcgcgcgctgaagtttgctaggttcatgagcaggtcgggaagagttaccgaagcgaggaagagatgagggagaggtac

SEQ ID NO: 112289 - DNA, 240 bp, Glycine max
cactctcacatggggttttctcagaacgccccaggaatctgttctgtgccctaagcaccagccttttgctgtgctagcgcacaagcgtgatcactggctcacgactcagacagcgccacctcccagctgcttctctgttcggagagcagcagcacctgcttcgatgatgagtgtggcatcgttgtgatgccgcagatgggtcaactgcagactctcgcatcagtgctgggcacaccatga

SEQ ID NO: 112290 - DNA, 222 bp, Glycine max
cacctccgcctcgtcgtcctctccttcgtccccctcctctctggcctctacctctcccgaatccactcccctgaaccgccgtccctcgccgggttcgaagccgtcctcctcgccctctacgccgccgagaccaaatcccgaaacggcaaacccctcgtggtcacaatccccgacctctcccacccctccatctaccatcgcccctccgcaaaccccaatccc

SEQ ID NO: 112291 - DNA, 119 bp, Glycine max
ataaacactccagcaactcctcaatatccactacacacttcaatatgagcgaaattcccaaggagcaatgggcgcaggtcatcgagaagaccggcggacccgatcgattacaacgaaga

SEQ ID NO: 112292 - DNA, 232 bp, Glycine max
accacatgccatggcaacaacgtcaatatgtatgagcttcagcctggtaatagcattcaagggtctctctttatcttcttctacatcgttcttcggtggaagtactggtacactccgcgcgggtcctaactcggtggtgtcgctgccccggcgctgaccactgacgatagagaacgcatagtagacgtgggcgggcagctccaataacggctgcgagtcgcagggcaagctc

SEQ ID NO: 112293 - DNA, 233 bp, Glycine max
cctctacacgtggctccgaaaatccccaaaccctaattccaatataatcgattccgcggtcgagattctctcgcacttccatccagatgatacctcttcccccgaaggtgttcttctcttgggcgcgttttccttcgtgccttccgtttccgaaaagaccaagacgcgctgtctggacatgatgctgaaagtactgttggcggcggagaagggtaaattgctcggtgaactgc

SEQ ID NO: 112294 - DNA, 159 bp, Glycine max
ctctctctctttctctctttctctctgtctagaatgcctctattctcctctgtcggtcacacacagcgatagattgataatagagtagagaagcattcataggcgccaattgtgagtgagagagacgtttctgttttttctacttccccatttttgtgg

SEQ ID NO: 112295 - DNA, 161 bp, Glycine max
cacggtccctccctctcatcatgatgatgtcttccggtgatatcctcgtaatgatgctacatctatcgacgcttcgttcgcgtctgaccccaccacacaaatgtctctcccaactgcgacagcgacttcatcgactaaatcaaacacacgccctactctaa

SEQ ID NO: 112296 - DNA, 232 bp, Glycine max
taaacacagagtaagtgaaatcctacgtacgtgctcattccggtggaactatcatatcctctccgggatctgaatctgcgaaatgtaatgtacttcttcttctcgagaaggatccagaagaagaagaaccacactcaccaatgagcaaaatccgtctctgccagaggattctcctcctctctctcttctttctctccgtcgtcgctcctctcgtcttcgtctctcaccgcct

SEQ ID NO: 112297 - DNA, 236 bp, Glycine max
gaagaagcacgattttcattcttgaagggtggatacgttgaagattttgaaaatcaagcttgtatttcatcagaaaatgttgaagaagaaagagaaactctagctttagtaaatgcaacagaaaaggcactgcagttgcggaataactctaacgttctaatgaaagggagtgcgagatcaggagcggaatttttggcaaatcgatcttatcagggtctgaacatgtccagtgagaa

SEQ ID NO: 112298 - DNA, 235 bp, Glycine max
aatgattctgaaattactttaacttatgcaatttgaagcaaagatgtaattcactggtattataagatgagtagatggcatgtggatttgaataaattcagataagtaggaaagaataaaataatgttaaagtatttatgtagtgaaaaagattgagtttgcagaggggatggcgagctaccagcaggcatcaacaatcgaggaagtgagaaccctatggattggggatttacaa

SEQ ID NO: 112299 - DNA, 239 bp, Glycine max
agtcagtccaactataaccgaaaacccgtgactcagcccacttttgctttgcttggcctaaccactaaccaaaccaaacctctcaagtctcaatggcttctcagcaacacgacgccgttttccgcgaagaagacatggacgacgacgacgacgagtctcaggaggacggagactacgaagaagaagacgacgacgttttggccgacgacgaagaaaacgagccctctccctccacggct

SEQ ID NO: 112300 - DNA, 232 bp, Glycine max
attgcctgcgatttcgtctcaaaatttgatgccgtgatccaaagggggagttgctggttgctgtcactgtgaatctttctgcaggttctttgagtcacacttagttttctttggtgcgaagtaagaataagagtaagagagagaactttgaggatgggagaccgttgcagacatttttccattgaggaattgccaccacatttggtattagcaattctgtgctcgggcaggc

SEQ ID NO: 112301 - DNA, 214 bp, Glycine max
gcaacctgcaaaaacaggaagacaccaagatagtcaccaaattaaaaatgatgagcaacatttgttctctctgcctcagtttttcattactcttctacgtggctctgggagccacagttactttcacatacaattgctaatacacggtgtggcgaggacgcctaaccggagaccacaatcctcagctgtcaacaaccgttttctctgttggctc

SEQ ID NO: 112302 - DNA, 255 bp, Glycine max
gactccaccaacatcagcgagaccatgtgcaccgacttgcactgcaccacgagtatcaagctcgaatcgccgccgtcgtcaataccgacgacgacctcacctccgccgcacaagcagagcgcaacgccgtatcctccggcgtcacacacaccgaggccgaaaacgagggtgcaatcaccgtcgatgtcggcgtctaagtcaacgacgagagttgacgtactccgacgtcgaaagcgagctcaattccggcgacga

SEQ ID NO: 112303 - DNA, 241 bp, Glycine max
caagaagaagaaggagcatatggagttccaccgcagcgactcatcatcgtccccgtcttcatccacgcccacacccaacaacgccgatcccaataaaacctcttcttcagacccaatgcattcatggtgggaatccgtctctaaagcccgttcacgaatccacgccctcgccgccatcctcccctcctcctcctccgactccctctcctctctcgccgactccgaccgccctgctctctca

SEQ ID NO: 112304 - DNA, 239 bp, Glycine max
gggaaatgcacgcgtgtcgagtaagacgttcgtggatttgatgttaccccgggtgagtttatcggacttgcacgagttatgaatgacagccaccaacgtcttactcgacaagcagggaaatgcacgcgtgtctgattttgggctctccgtgttcgcgggcccaggcccagtgggtggcagatccaacggctaccgcgctccggaggcatcggagggtcgaaaacagacgcagaagtctg

SEQ ID NO: 112305 - DNA, 279 bp, Glycine max
gtaagaagttgaggtcacgcaaaggaggatggtattaccgtattaggaattccaaagttaaggaaagtgataggtaattttatcagtgatttaggatttgaattataattaatttttagatatagaataaattatgatacatgtaattataacatttgaggaagtttattaagaggttcaatcgaggtgtgttcagttgaagaagccataaataaatcttcttagcttccatcaaatctcacactctcattcttagagccatggccatggattccatgg

SEQ ID NO: 112306 - DNA, 271 bp, Glycine max
gtgatgtggcatggaaacatggggtttcagttgaagaaactagaaggattcaatgcaaatattgtccgaaggtagtaaaaggaggtgcttataagttgaagcatcacttatttcaaacaaataaggatgttgaaccttgcaaaactgttattgatgatgtaaggaaggaagtgtgggacattgtctaaggtgtgaaagcaaaactgaacaaaagataaagttcaacataacaggaatcttgaaactagtgagaaaagaaaaaaagagtaat

SEQ ID NO: 112307 - DNA, 269 bp, Glycine max
aacgtgaatcttgttctttgttttcagtttcctggtgcagcattgatgttgctctctctctcccatccacaaaacttaccacagaatgcgggcaacaacaccttttgaagaagtcaatgttaccttaaattccttaaacattcagacacatcaaccctttaaagtttacaccccaaaactagtgccgatatcttaggcactgcacgtgttactccctactgtctcgatcaccctcaatactcctatacaaactccctctctttcccttc

SEQ ID NO: 112308 - DNA, 246 bp, Glycine max
gtattcacctgtactgttgttgctattgatatctttttttaattctgcttttatgctctgtctctcttggtcatcggtttaatatgctttgatatttatccattatgccaaggtgttctacagtatgcaatttggatgtatgttgtttcatattgtaatttcacctctcagcatcatgtctattatgtgatggttaaaaagtattctcaagaacgaatgttgttcttcgaaagctgatcgagaaaa

SEQ ID NO: 112309 - DNA, 249 bp, Glycine max
aaaatagaaacacacgcaacaaaaccaaagcatgtgatgatttagtgcatagttggcgagagaaaaagcaggaaagcttgaactcccattcaatggggtttggcacacatccaacttgtcttgctggagtcagcgagagagagagacagttttgctttgctgagttgctgccaactcccattcaatgctcctatctttcacaaccgattacgcgcgccttgttcttcacgctttacttttagttctagt

SEQ ID NO: 112310 - DNA, 246 bp, Glycine max
  unsure (1)..(246): unsure at all n locations
ggggtatcttcagcgccggctgcggtcgcgggaacctctgggttgccctcgtcgacgtcgcgtggagagccaactggtcacatgaggnatctaaagtatgctgagttcgaagggttcgagggcggattattcagttcggcggagtacgctgcagatgagcacgcggcctatgcggttataggaagccattggtcggaggatgggttcgcggaggaactgtatgcgggacgcgaagtggactcaaga

SEQ ID NO: 112311 - DNA, 244 bp, Glycine max
ctcgagccgtgctcatgccaccttcttccttcaccctcctcctcactctccttctattataccttccatatgaagcagagagcggagaaactccaccccctactcccccgccgccgttcagacccggcatagcggtgctggtgtgcgttttgacaaccataatctcccttacatcgctcctcctcctctacatcaaacactgcaacggcggcatcccagacggcggaggcggaaactcggctcc

SEQ ID NO: 112312 - DNA, 240 bp, Glycine max
ccgcactcttctggctacccccgttcgctcacttcgcagatcccaaggatctgtatttaaattcaaagtacaaagatcatgatattgttgcaagcttttatgtgcagaaatcagtttctttgctagaagacaacatcttgcagctttctaatgacatttttgaagagataggagctccctctaccaaagtgatcatcttgtctctagatcccttaccacggtcaaacacgacaaaagtgg

SEQ ID NO: 112313 - DNA, 248 bp, Glycine max
cgtgttttcaaccctcgtctcgactagtcgtcggccttctttcgcatgcggctttgatagatcgcatacacactccctactcggccgtgccgatcacataactacaactatcgtctcagccccgatctttcgttgttgctttcaccttgtcatcccgactgtgatcaacccgaatatcaagtacaacttcacattcattacataagtcgactgccgtctcgggaaacactaggtgtcatcgatcttta

SEQ ID NO: 112314 - DNA, 256 bp, Glycine max
ggctgcgttcgttccttggtgttggtggaatctctctctctgactatgctgtgtctctttcccaggaccgcgcgaaacacgtaaatccccttcaaacacaacacaaaacgcagtgtttccaccatctctatctctatctctatatataccctcacaaccaaacaatccccattccctctctaaccctatctaatctgtcttctcttacattcctttctccaccacacattcaattttaaacctctgggcgtggcta

SEQ ID NO: 112315 - DNA, 253 bp, Glycine max
cgagcaggctagtagatgtaggagtcgtagcatgacactcctcccgtctgcaacatctcttgcgacaaaccgtcgactgcactacgatcagcctacatggacgtctcgacaaagctcaagagcatcgtccacgactacaccttgtacatcctggaccacacgatgctctaccgtgacttcaccgtgtcaatcatatggattgacgtagtgggcgttcgatgcaggcgaagtcctgtttcaaaatgctgacctg

SEQ ID NO: 112316 - DNA, 236 bp, Glycine max
catcctccgaatacaaaagtttaccttgcaaataaatcaacaccaaacgcgcccacaacacacacacagagacatttttctttcttagaagcgtccaccacacggaacctcgcaattccttcacacccaccataataataatatcttcattgttcttttcttctttgttaccattaaaaacacacacacacacacaacaacccttgccaactaacaacaacaataaaagaccatgt

SEQ ID NO: 112317 - DNA, 244 bp, Glycine max
attaaggtggttgctgatcaggtcgcagtggctctatctcatgctgcaattcttcaagattcccaacttatgcgactgctgctggatgactctcatcgttcctacatcccctaccccaaagcaatttccgatttgaaggatacaattgtgtacggatttgggtttacggcggaagatgatgttaagattacggggatcagttcgagagtctccgcagtatgtcattccgtggagtaccaattcg

SEQ ID NO: 112318 - DNA, 100 bp, Glycine max
ctcagttacgaaccgaataagacaagtgaaggagcggtttatcgtactgggctgggcagcattcgtttctactcctcattgaaaagataacatggctttc

SEQ ID NO: 112319 - DNA, 112 bp, Glycine max
tcattgagctgaagaatactgaattcctatcgaacatctcaacaataacccattcattgacttctcttttcgtaccatcactccctcgagttcgctaaagagaatttgacta

SEQ ID NO: 112320 - DNA, 101 bp, Glycine max
tagcgtccatcatgctcctacgttccatggacaacgacctcgttccccaagcaatccgtggttacatatacagcacgttccgttacgtcacaaagcgtcgc

SEQ ID NO: 112321 - DNA, 101 bp, Glycine max
ttgcgaacaccgcgatcgaggaggagatgatccgaaaggcggcggatggagatccggtgcagcgaaagatatttgtccatggattgtgctgggacactacc

SEQ ID NO: 112322 - DNA, 101 bp, Glycine max
gtatgcactagtggaactgtgtgcacccgcagaggttcggattgggttcgcactggactgcaaatgacgagccacggttcggattcggtctctaacccaaa

SEQ ID NO: 112323 - DNA, 105 bp, Glycine max
tcagctcttctgttcggctccatttgccaatgagcgttaccgctgcaccgttgaagctgttagttgtgttagcaacagcacacactcagcgatggattacgacga

SEQ ID NO: 112324 - DNA, 240 bp, Glycine max
tgtttgagtttgcagtctaggtgagcaaaaatgagaaatccaaatcctataggcatgtgttttacgtgaagaaacgttaattaggagcaaaaaaacgaaaggaatgagagaagtaagagattgacttgttattaagatgagaagtaagagatttaccaatcttcttcattcttcttcttcttcttctgttttctatgctctcccacccattgttctgcttggcttttgcgtttactttta

SEQ ID NO: 112325 - DNA, 207 bp, Glycine max
tgtttgagtttgcagtctaggtgagcaaaaatgagaaatccaaatcctataggcatgtgttttacgtgaagaaacgttaattaggagcaaaaaaacgaaaggaatgagagaagtaagagattgacttgttattaagatgagaagtacgagctttaccaatcaactcaattctaagcccccacccggggtttccatgccccccccccc

SEQ ID NO: 112326 - DNA, 104 bp, Glycine max
gtcctatttattgattttcctcctgtccttcaactccagctaaaaagatttgaatatgactgaatgcgggatactatggttaagattactgaccgttatgagtt

SEQ ID NO: 112327 - DNA, 248 bp, Glycine max
gagaaaccaaaaagaagaagcgagcgaatagagagagagataaatagaaagcgaaagcgacagaacaacacaacaaccctaacgtttctcatggaaagcgtggcgcattctcggcaaccaccacacaagaaaatcaccaccggcgccggctgtttcccagcggaaactctatacgaccacgtctacggcggtgcggcgaagttctccggcggcggccaccaccactccctctccccgcgcttcgagga

SEQ ID NO: 112328 - DNA, 100 bp, Glycine max
gtctactacacgctccaccccaacgcttcctgatccggttcacctgaaccggttctcgaagttcacgttcgaccggtcctgtccacggaccgttatgacg

SEQ ID NO: 112329 - DNA, 255 bp, Glycine max
ctcatttatagtttactattgaaagatgggtttgaaaatggcaatactgatcctaggcctgctggccatgttccttttggtctcctcagaggtggcatccacgaattcaaaagaggtgacaaatggagttgaagatgccaaatatcctggtggaggctatggtgggggttacccaggcaatggcggtggtggctatcctggccgtggtggtggctaacccggtcgtggtggtggctatccaagtcgcggtggtgg

SEQ ID NO: 112330 - DNA, 202 bp, Glycine max
gataaactaaactagcgaagagaaatgtccgataacggagaagagaaattactcgatgtggagcggcacatagcgaaaacgctgggccataacaacaccatgtgtgatgatatattccacatactatagaaccctgacggaagattatcgagagagtatctttgtgaaaaaggcgaagatgcggatcccagaggctgagctg

SEQ ID NO: 112331 - DNA, 248 bp, Glycine max
  unsure (1)..(248): unsure at all n locations
ttctaatcagagtgttccataatgaatttctatccaaacgnttgaaattgattggattggggacgagagtggttggtgatgtgtgtggataaggcgcacggattgataatggcgtgtttaagagaagactgtatagctgatctcagtctgtgtcatatcgacctcatccgatgtctgtgtttgtatcctatcagtctctgttctctctcttgatctggttatcgcatgaaatctccgtctagcaccct

SEQ ID NO: 112332 - DNA, 269 bp, Glycine max
tctcgaattcggcatcgaaaaaccccagcagagtcctcacattgcactctcactctcgcaacttctgcctcactctctcactcgctcaggagtatataatctgagccatgtcagatctcgaagctcgcttgctcagcaagaggaagattgttaggtgaggatagtgtgctgaaataccatgagatcgtgcatatagtcgcagtccttcccatcccctctacgatttatccccgtacataccttggggatggaagatccgagtggaagtc

SEQ ID NO: 112333 - DNA, 180 bp, Glycine max
attgagatttagaaagcacttaattaagaatgtttcctatagaacaaaaaagttgccatatattagagcaaagtgggaagaaagtaaggtaggtagcgatggagcagtcagaaaaatcgcctaaaaaaacatcatcactgagatcatcatttccgagagatccacgtggctcactcgaag

SEQ ID NO: 112334 - DNA, 267 bp, Glycine max
gaaggaaacctggttggtttgggattcagattcatacaatcaacactaccggctaccgggagaggagtccttaattcacttgctgaaggagattttgtttgtgtatagttgctgcttcctagcttcggcaacaaggttgatggtgcagtctctttggagcaatggtgattccaatagcagtgtcgctggtggtgattctcatagggttggcttataaggccgtaaagccgccacctcctaaaatatgtggatccgtagtcggtctga

SEQ ID NO: 112335 - DNA, 264 bp, Glycine max
gtagaactgcttcaccttcttctcttctctccgcctccaccaccactccctcagtctccactccctcaattcacaatcctcacgttgcctcgttcacatgaaactcctctcgccctccgtgttctcgctctctctctgaatcactcatccttataataaataaataatttctcgaagaaggagaaagaggttttcattgttgtggttgttgtagaagaagaagaagctgaagaagaatggagtccacagaatcttcatacgtgt

SEQ ID NO: 112336 - DNA, 268 bp, Glycine max
tggcacgccaaagctcagacgttcgcgggagactgcagaattctttcattcatcaccactatccttcgattctgattcacatcgccttgactcgtcaagttcagtttcagacaacataagatagacgaatcgcgggattaagagaggaatatgcaacagaggcttaagttgcagcaacaacaacaagccctcatgcagcaagctttgcttcaacagcagcagatgtaccaccctggcatgctcgccgctgctatgtctcagatggagc

SEQ ID NO: 112337 - DNA, 258 bp, Glycine max
attttgtcgtacttacggctgtggtcctcctttgaattttctttctgcgtgtttgcacagaaaattcttcattaattggtgtgcgagttttcttttcttttcaactgtgtctggtgaaacagtcaaatgaaatgaaggcaacgcccgccgtgcgtagataaagaccaaaacttcatgtttataaaaattaaacacttgagccactaggtagcagcacaagcaactgcaccaactcgacccttccaaaggccaattttc

SEQ ID NO: 112338 - DNA, 255 bp, Glycine max
ctcggtcacgtcctccttctctctcacccggtgcctgtgcctgttctcttctccataactctggtgcgagagaatcttcaccaaaaaaaacctcggagatgatgaagcgaaagctagaaacgttggtgtggctaacacgaaaacgatcgattcagtttctaatcggtgttttttttcctctacctcgtacttgtcacactcgaactcccgtttgttttcagaaccgacttcgccaccgtgacaacaaggggttcc

SEQ ID NO: 112339 - DNA, 104 bp, Glycine max
taacacgccaaagctcagacgtaaacgggagactagagagctctttcattcatcacgaatatccttcaattctcattcatgtttccttgacttttcaagtttag

SEQ ID NO: 112340 - DNA, 230 bp, Glycine max
actgcttggctggattgcagaaactagggtttttggattttgtctcttgttttccctctttcctttggcgtttagattttgggagggagcgaggtaaaaaaatttgcaatcacagaaggagagtaaaaggatgcgtgggtttcatttatgaatgaatggtagtagattttgaaatttgaatttgaattgtagacgtacgatgagagtaaaagaaggaaagatgatgattg

SEQ ID NO: 112341 - DNA, 260 bp, Glycine max
caaagaagtaccatgatggttttttacgcctggttcttcatggatccagcggggcgcaggttatgctgtttgacacaagcaggaaactcttagatagtagattccttaagaaagatgatgtaattaaatctggtgaatcaattgcatttgattcatatttgattgacattggcaagcagcaaggaagttgtaccccagattccaatgttctagcagacaagtgtactgatgttaaggcaatgaagatggtcagacagaag

SEQ ID NO: 112342 - DNA, 217 bp, Glycine max
cctctctcactttttcctcaaactccctatacatactctcactcactaattttcttcactcttcttgttacgtcgtcatcgccattttccctcctaacctagaagaatctaaaaattttatcttcaaaacaacacaacacataaaaaaaaaaaaaaaccctttttctccttagcctgggattcacccaatttttccccaatttccccaaatttcccc

SEQ ID NO: 112343 - DNA, 153 bp, Glycine max
ccaaaccaagccgtctgttcatttccgatagaagccatggataggcttctatgttcttgttcttctgcccttaacaccagtctcaagcccttttctcttgtccctcgatttgactccgtcagattcaacccttactcagcaacgcgctgttcc

SEQ ID NO: 112344 - DNA, 171 bp, Glycine max
aaatggtaggcattgacccctttgcacaaatgtaaagaggggtggtgttgtgtgaaaaaaatattgaagttggttggttctacgtagaaacgaaaattgtcattgtcccatttctgcatgtttcgtttgggagaggagtaaccaagagtacgacatgggttggccgtaaga

SEQ ID NO: 112345 - DNA, 256 bp, Glycine max
  unsure (1)..(256): unsure at all n locations
caaggctttgttgtcagctcttgtgcctggtttcccaactcaaaacagttcgtgtgtggcagttctgaccctgaaaagggcgtttgcatgtgggattgtgatggaaatgtgataaaatcatggagaggaatgaggatgcccaaggtcgtagatcttgctgttactccagatggtgagtatcttatcagcatattcatggataaagaaagtcggagttctcacatgggaacctantcntagcgaggcagttcagagg

SEQ ID NO: 112346 - DNA, 225 bp, Glycine max
aaaaaatcttccccctcctccctctttcgcttcttcccctttcccctctttctaatctttcttacgcacagaggcttcttaattttggcatatttttatattcttaactactctttgtttatttcttcatgttcttttcgcagatccaaaacaaaacgcatagtatatatgcaacaaataattacactgttccaacgtgaaaacatgtttccactaagaagaaga

SEQ ID NO: 112347 - DNA, 167 bp, Glycine max
cgaattcttcttgcagctgatggcgcaagttctgctccattggattcttcatggcagtcatctatgaattcgataagctcaacattggtggttgcagctttggtagagaaggtcgtactgtacatcgaccagactgttggtattggactaggtgtcactaaactatc

SEQ ID NO: 112348 - DNA, 171 bp, Glycine max
ctctctctctaaaccacgcctagagagagaatactcgccgccggagcccctccggcgatggcaggaccggcgtttccctcactcccgtcgtacacctgatgtgcgtccgatcgagttcagcagacgaagtggtggctctcatatcggcaacatccgcgaatgaaggtagcc

SEQ ID NO: 112349 - DNA, 215 bp, Glycine max
  unsure (1)..(215): unsure at all n locations
tgcaatccgtctattcacaaaaaataatatacacattcaatcccccgtcactcactgaccctctgccctccctccctcactaagcttctggcctatctccctcactcactcactggctgtcgaaggtatctcccacgccgtgccgccatcctgtacagccatcggcatagtaatcttctctctgacaaagagcgtaaaggagntagtaacaacac

SEQ ID NO: 112350 - DNA, 259 bp, Glycine max
caagcgcccaatgttgtaatcaacgaagcagtgtcagggctctctctctgggttttgggagacatcgaactaccgtgtcggagagggagcttttgcgttgcgtggccaccaccacctcgaaccaacaacaacaacaactcacttcctcttcgaaacttcttcattccccattattccattccaaaaatcatgctcctcttcttcagggtttagatttttaaccccccccccccctttctatacccatggccaatccctg

SEQ ID NO: 112351 - DNA, 260 bp, Glycine max
caccacccctcagaacaaccaggaaaattacaattataacccctccgtcaacgacaacaatttcaacaccgaactcaccgttccggcggaggaggaagttgcggacttggaatggttgtctcgtttcgtcgaagattctaatttctcggaatattctcttcccttccccgcaaccgtgactgagaaagtgaaagtgaaatcaccggaaccgggaaataccgctttcactttcaaaactccggttccggccaaggccagga

SEQ ID NO: 112352 - DNA, 257 bp, Glycine max
tttgaattatgcatctccccccttttacccttcgagttcttccaacaaagatttaagtgtggcaccaaaaggggatgttcaaacgtgtggtacaggcaggaatgtttgctctggtgttgtgaatgatggttttttggttcaacagaacagtgcacttcttcggggaaagaatgtcgttgatcatgttagcatggagaagctgtatattgatgggcctggcgcaccatctgctggaaaggcttttaacaatatgcata

SEQ ID NO: 112353 - DNA, 252 bp, Glycine max
gttaactgttaagcgtaaaggatagacaaaataagcatgcttttccttgatttgatttgttgttaatgttaagcgtgtaagaatagatggatgtagttaacaagttacgcttatcatggtgtaattgctaggattgacgtcactctcagttaatggagctaaagccccagtggccaatgttttattgtttcctttttgtgttggtagacttttctatcatgagtttgaaccattcaaatgagatacaaacct

SEQ ID NO: 112354 - DNA, 257 bp, Glycine max
gcgagtgcaacctttcttgcagctcgcaaagctgaaaaaatatttgctgtattctgcagcatattaccaccagccactcactcactgccccaagaacacatgctgttccagatccctatatatgtgttcaatcttcatcatcatgatcaccaccaactccaactctccaaaacttgccacttcaaccttcctatatatgccttcctccactctctttctgagactgcttctgctatctttctgagagacctcacaaa

SEQ ID NO: 112355 - DNA, 245 bp, Glycine max
gcgaaagagaaggcaagcaaaaaaggtgatcctgggcgtacaagaccataacaccaccttccagctcactctccatataccctaacgcttcgtctagggtttcgctgaattccccaattttcccaacccccgaccggacatgctccttctccgatggccgtcgtaactagcaacggcaagcgccgccaacattggccctccgcgaattaccactttccatctcgggattccaaaagacccagact

SEQ ID NO: 112356 - DNA, 249 bp, Glycine max
gcaattttggtggtgaagggaagaacaacttaattgtaactccggtttccttggacctctttcaacttggctgctgttgttagtcattattacgtattttcaacactctctctggtgaagaaaggtgagcaaagaaagacaaagaggggctgaaaaagtgtaagtgtttttgttatggactggaatttgaaagcactttcttgggatttgagtgaagtggatcaggcaaacttacccaacatggaaaca

SEQ ID NO: 112357 - DNA, 138 bp, Glycine max
cgtccttgtgttaatttgtctctcccactttctgactttggatcttcttcttccctaaggttgtttagataaccataagaggaagaaggaggcccaaagtatataaatatatacacatggcacctgttttgcctcccg

SEQ ID NO: 112358 - DNA, 173 bp, Glycine max
actcgtccaaagaaacctgatgaatcggatccggacaacgcgacaagcgccgctaaatcgcaagccatcaaatcccttacttctcagataagggatatggcgttgaaggcttcgggaacgtacaagcattgcgcaccgtgcacggggccaacgacgcaggggcgaattcggaa

SEQ ID NO: 112359 - DNA, 155 bp, Glycine max
cccagaaggtggtgttaaaggtccttactatgacagatgacaaaacaaaaaagaaagcaattgaagcagctgcagatatctatggggttgattcgattgccgcagatgtgacggaacagaagttgacagtgattggtgaaatggatgcagtggca

SEQ ID NO: 112360 - DNA, 172 bp, Glycine max
cttcaacatctaagttttcagcagaaaaagccaatttctcttatggggcagaaagattcgattaagtttagggaaaggaaagcaaacaaagaaagccaatcggaaatgattttatcactacgcgaatcaaaaatcaaagtaggagcgagaatcaccttagggctaggccacc

SEQ ID NO: 112361 - DNA, 148 bp, Glycine max
ctcacacacccgtcgcatccaacagtgtctctcaccattcgctccaacctctccaagcccgccgcgctgcgccccagactggggccatcgctgaggtccgcggccacagcgagcatcggctgcaggaccaccatcagcgacaacaaca

SEQ ID NO: 112362 - DNA, 126 bp, Glycine max
ccggaaactttatgagcagttgcgacgtgaagcaggagctgtaaaaatacacaagagcttcagcggatacattgccaggaaatcatacttaacagggcgatcatctgcagttatactgcaaacagg

SEQ ID NO: 112363 - DNA, 180 bp, Glycine max
  unsure (1)..(180): unsure at all n locations
gttggggacgacgcaagatccttctttccggtgccacagccatggctatctcattatcgctcatctcttacttcctgttcctcgatgttaagtggactccgcgactggtggttttgttcgtcatgatttacaatgctgcctttggtttctcgtggggacctatgcccctgntagtcccac

SEQ ID NO: 112364 - DNA, 260 bp, Glycine max
acgagaacaagagaatgggttgggggcaatagtagaaagaaagaagagacaggaggacaagttggtaatttggacttaaagagagggacagtttcgttcgggttgtggttgggcgcggtgcgcagccaatcccatcgcgtcgccaccctttctttcatttttcatcattcaagccaaagtcgttcatccgtctcgccggctatgtcaaaaccaaaaccctaatcatgaatcgtctacataagaactaggagtccctcaaa

SEQ ID NO: 112365 - DNA, 214 bp, Glycine max
cattctcaccctcttttcctcgccaaacccaaacctctcctccggttcgcccgccgaaccggaccgcccctcgtcctcgccgccgtcggccaggccgaacccgaacctcctcctcctctcggtggtgggcccggtttcggcatggcggccttggccacagagcaacaaaatgaacatcagcgattatgccttcgggggactcaagaaatacgag

SEQ ID NO: 112366 - DNA, 269 bp, Glycine max
  unsure (1)..(269): unsure at all n locations
cagaccggctggactgtcagccctggcaacggcttcggcatcctctccaactccaacggtcctttcattgcctgccctgccgagaacgactcctaccaggtcttcattggcctcgagtgcgttgacttcgacgatgcttgcctgagcttcgacgccctcaccagcaacgncaccgaggccggcgcctgtgcagtactcttatacganngtgagaatctncgaacgaagatgggagacggtggagaaggggatagtcgcatgatagaaca

SEQ ID NO: 112367 - DNA, 255 bp, Glycine max
  unsure (1)..(255): unsure at all n locations
cggccgtccgcagcagacgacacaaccaacatgaagaccgccgtgtttgtcgcgctctgcgccctcgccgccgccgcccaaggcgccgagctcaacactctgctgaccaagtacagcctgatcccggatccgttcggcctcacggccttcttccacagtccccgcacccatgaggccgccgccaaggacaagtgtgccgaggtcagcagcaacctgagcgccaagggcgtgncggtcntgtgcatggacggcgac

SEQ ID NO: 112368 - DNA, 257 bp, Glycine max
  unsure (1)..(257): unsure at all n locations
ctcgagccgcgccgccagatctcagacgagactcagtcacactttctctctttctcttccacaatgcagctcctacaggcggtgctcgcggcggcgctgctcctcctcgccactctctccgacgcccacaacatcacaaccatcctctcaaagcaccgctgagttctcaccatcaaccacgaccttaccctgacccacctggccccggaaatctacggcaaaaccaccagcatcggcngcgccgtggataacgccgc

SEQ ID NO: 112369 - DNA, 250 bp, Glycine max
  unsure (1)..(250): unsure at all n locations
cgacacacgacacacgacacccacaagtataagacaacaaattccccactctctcctcttgagctgaaacaaaacctcatccatggcttctcttctccgcttcaacggcgtctccctctttcccttaccttccccacccacacgtgaccccaatctccccaaaccggtcacgcctggaacggntcgcgcggaggngaaagagacctctgcacccgccgccgccacatcctccgacgaaaagatccgtgaa

SEQ ID NO: 112370 - DNA, 254 bp, Glycine max
ctcatcatcaacatcatcctcttatcaaattctgcagcaccatttcggactccttcacagtctcctacctcatcacccgcttcggcttctccccagagaccgccctcagcatctcccgcaagtatccgcctcgacagcccccacaggcccgacttcggtcgcgccttctatgtgccacccacggccgctctcctttccaaagccgccaaggcatcctaggccaacacaccagccgtcatggtgtccccaacaac

SEQ ID NO: 112371 - DNA, 263 bp, Glycine max
gccttaaccttactatactctacactgcaattaattaatcaaccattttatcatccaattcgccatcgccatcgccatcgccatcgccatcgccatgggtcacgaacactccaagttgtcagaaggacaaggatcgcgtcgtgcccgcttcaaagagcgtctgcgtcttcactttcgccgccgcagaagcggcaatggctcttccgatcacaagctcctccacgcgataacttcgccggaatcgctctacctcgacctccttc

SEQ ID NO: 112372 - DNA, 260 bp, Glycine max
aaatgaagtgctaagctaaggctatgctattgctaaccgttccccagcactgcaatatgtcctccactaataagagaagagccttcctctccacgctactatgctctcacttctctttttgactccattcactttcctcccatcccctccaatgccaacaaatcctcatcacaaaaaacccaatgaaattctctttctttctcacaatatataaccccccaccttcattcttctcacaccccttctccccaaaccaacaa

SEQ ID NO: 112373 - DNA, 256 bp, Glycine max
atcaagtgtgtggggctcttcagattgatccatatgatgtgaccgacaaaggactcaagcaagaggaaatgccaatattgcatattttagacaacattgaggccttgaaaagttcttatgtgacaagccaagaggagaagcagaagctccttgtagcgaattctgtcctcctaacttcacttgcaccaaatcgatctgatagagaaaaagtgacgtcagagaaaagatcatggagcaagagtttgagagcatgaga

SEQ ID NO: 112374 - DNA, 253 bp, Glycine max
gtaagctgggattgttgtgggtttgtgataatgagcaggggtaggtgggggaaatgtgggtgagactgtgagaataagggtgtaaaaagatttgtttgtttttgaaggagggaaaatttgacaactgggttttgtgaagtttgggcttgatcttcatcccatagggaagttttggagaatttgtgggtgtcaggggaaaatgcagcaagatcacggaaaaagagttcagcagagatggactttttctctgaat

SEQ ID NO: 112375 - DNA, 256 bp, Glycine max
caagccgcaagagagaagagcagtttctccaactggaaatgatgagaatgatggagatgtagtgttgccgcggccagcctttttaatgagctggagacgcagaatcgggaaggaagatgaattgcttttcttcaatggttgtgagaaagctggtctaaaagtgaagcatattggatcccgtgtatattgcatcaattccatagagaatgagatatcgaaacaaaaggttgattaatgaaattagtattcaagcatg

SEQ ID NO: 112376 - DNA, 254 bp, Glycine max
gtttcgttggtgtgtcgtgtgcgtgtggaggttcttttctttgagactttccttcaaattctagattgcttccctttcttttctttcccttataaccaccaacctctccctttcccccttttcatttcttcctcgattttccatttccataaccttagtcatcttcttctttcatctttctccctaacggtatcgagggaaaaatatggcggaagacacagatgccaggcaccgcgcttctgcgccaacaattg

SEQ ID NO: 112377 - DNA, 256 bp, Glycine max
ggcaaggttgactggggcacagagtgttgggggggagcagaaggagaatgaggttgctttgattgctgagaaggagaaggtggtggagtcagagagggaagagggtttgcagaataatcagtcgacagcaccataaagtgattgtatcactcactttggcttgtttcagagcggtttgtcttttaattttgaccagggttgttggagttggagaaggtaaggttttttagttttatgaaaaattgtgtcctatggt

SEQ ID NO: 112378 - DNA, 253 bp, Glycine max
cggcactgatgctgcagatgctttagaagtaattgcactgctagccagaactaaacagggggtcaactacacttaccctccatggtcagctctggctgaaatgccatcaagtttagaacttcttgtctgctgctggctgaggggcattcccttgtgcaagagaaagcaattaaaattctatcaagactttgtggggatcagccagttgttcttggtgatttgttatctgctagttccaaatccattggttcat

SEQ ID NO: 112379 - DNA, 252 bp, Glycine max
ggaagggctgaggaaatactagctttgttctctctaaccaagagggcagcttgcagcaatatcggtatcacactttctggaagctgccctcttggttagagagaacaaagctggaagggctgaggaaataaggcacagtttgctagtaagttccctgagaagtccaaagttgttcacttagcccgaactcaggtagctgctgctgctggccacccacatattgcagcggattctctggctaagatatcagat

SEQ ID NO: 112380 - DNA, 260 bp, Glycine max
ctcttttgtgttgtctctctacctctctctctctctactctctatagtctattctctctcaatttctattcacatttcaaccaaaatgagtggcttgagtttcaagggcttcacatacatgttcctcattgcattctcatttggtccttcaattttgaagcctgcattgcaagaagaggcaagcactggaggcaaagcagggatgtctctgcttctttgtacaagaagaaaggcaaaaactatagcaatgctcacaacaa

SEQ ID NO: 112381 - DNA, 251 bp, Glycine max
gtcggttggggattcgaagccgcgccctcttcctcctccctcctcccttcacccttccccaaccttgtatctccttatataagatattaactaattaatgtcatagtacatgagtattttttatccttataatgtgtgtttggctcgttggtggccctgtttttttattatttggtttcttaatagtcctcttacggcatggaccagatgaacaataaaggcttaatttaataattcgtaatgctatttga

SEQ ID NO: 112382 - DNA, 255 bp, Glycine max
gcaagtgctatgcaggccattgtgagaagtgaaaagtgacaaggttttaaaagccagtctttaaaggttttggaggtttttgcaaccataaagtaatagcaattgtagctgcattggtcacatctttctgcattctagtaatatcaagcattgtgattgcaatttaaaaccttgaaagtgtagctataagttcagtttctatgtattgcaagtgatttatgcatgttctttttcctcttactctcagggaagaga

SEQ ID NO: 112383 - DNA, 139 bp, Glycine max
atgtgtttgtgggtggatgaatttctaatttgctacttttgtggaagctcacctgacattttgcaaagataatgtttactgatgataacttcatagagttgttggttatatttggtatttttgtcatgaactcctggtt

SEQ ID NO: 112384 - DNA, 248 bp, Glycine max
caagtacgacaaccaattgatgtagcctcgctcgagcgctacattgcggcaaatgtacctgagattcaggtcccgatagatgtcaagcagtttggttatggacagtcgaatccgacataccaattaccgacaagaatggcaagaagtttgttatgaggaagaagcctccgggccagcttctctccaagactgctcacaaagtcgaccgagaataccgaatcatccatgcccttgagaagacagacgtt

SEQ ID NO: 112385 - DNA, 251 bp, Glycine max
gtgcgaatgagaaaaacatgaagaattctctgtttctcctccacaatgcaaacacaatccacttcaatcttcattcccagattacccttccttccattcccctcacaacaattacaactaccaaaccttccctcacaaccgtcacatcacccacgcatcgaaatcgatctggtgaagaacagccaaggaatctacgcccccaaagcctccaaggtggtcgtcctctgggacctcgacaacaaacccccccg

SEQ ID NO: 112386 - DNA, 257 bp, Glycine max
ggaaaagaaggggaagaaattaatggctgaaactgcagtggcctttctacttgaccatttggttaagttactgagtgaggaagcaacaatcttaggaaaggtgcacaaggaggttgaggagatcaagaatcagctagaacgaataaactcttacattagggatgcagaaaagaagcagttgtcagatgatcaatcaagtgtcaaaagttggttgaaatcattgaggaacgtggcgtttgagatggaggatgtgattg

SEQ ID NO: 112387 - DNA, 256 bp, Glycine max
ctcatcacaacaatgactccataaggcagatagaaaaccctaaaccctttccactcactctctctcacagcaacgatggcgactcagatcctctctcgcatcttccccaaaaccctaaccctagcccccttcctcttccgctccctcaccaccgctccctcttgtccttccctccccgcgctctccttcctccgccgtatctccgttgcagccaacccctccctccgacgcgtcctcctcccaaacgccccctccc

SEQ ID NO: 112388 - DNA, 251 bp, Glycine max
tgaaaaaactaaaaatcgtctttaaaataacaaaaaaacacataattaactgcagtcttcttattcttaccatatctgtggttgaatttacaagcattggtaattcaccgtcgtgttcttatatattcttatttatttgggtcttgtttgtcgtgaacatttttaacgaataaatattaacttccaaaaatgaaaggaattcaaaattcttttaaccccttactctcttatatatctcttaacaggttgca

SEQ ID NO: 112389 - DNA, 257 bp, Glycine max
cttctccttccacaggaatggcttatgttccacatggaaatgcaaatttcaactctttattactaaaatttgcaatttctcatgtgggtatttcttctttgcccttcttgcacccgggactgaaatcttgtacagtcttcaacagagaagacaccatttggatatacaaggaaagatgtcctattaattggacttggagttactttacttggcattggcttaaaaagtggactggagtttgttggagttgactcact

SEQ ID NO: 112390 - DNA, 248 bp, Glycine max
tgagcagtggctgggtagaaaagcagataaatactgggacgataattttgattctcttacgttggacaaacaaaattgtgtcttcaaacctgaccatgagtgggtgcaatgtgacaagtgcagaaagtggagaatattaccttctgattttgatagcagaaaattacctgtgcaatggttttgttatatggatcctttcaaaggtcaatgtgcagatgctgaacagaagatggaacctggcatagtta

SEQ ID NO: 112391 - DNA, 252 bp, Glycine max
gtttctacacaagatcgaaaagaggacaccttaacactttggagctccaaacctctttcacctccattcaggtagtcacgatgagaagatcaaacttggagaaatttaaaaggacaaggttagtatgatcttgttgttcaagcatcatcaacaatgggtggtgatcagatttgcttctagggagaatgcaaactgaaatatcacagcagtccaataagcatatgtcgttgccaatagctcgatctatcaaag

SEQ ID NO: 112392 - DNA, 250 bp, Glycine max
ggaggctgaggtggttgaaaagcttaagcaacttgagctaaactcgaatcccaaacataattcagtcttggggaaggcaataatagatgcttctactgtaaacccgtcattggaaatgtggctgaaggattctgtgcttgcattatatccagatactaaagattgttctccagctctggccaatttctttaatgctcagcagaaattttctggaagcaagaattctaaaggagctcaacaaatgttgccc

SEQ ID NO: 112393 - DNA, 240 bp, Glycine max
attttgtatttttttttggtgaataaataaagttcattctaattaaacctgccttgcaaattaactcagttagagtttggtgttctatcttattacgatttcattcttctaattatttttgttctctgttagttttcaggtttggtacgtcagtcgttgaagcgttaaaaatgacattttgtgttctcctctcattcaacaatcccaaaccaagttctttcctaagttccacctttgttc

SEQ ID NO: 112394 - DNA, 203 bp, Glycine max
ctctggtgacagcttccattattggtgaagggttaaccaaaaataatttgttagttgtcgagtaatgatcctagtaacagatacattagcagaaactgagtgttatttactcagtaatttaaaatttctttctttggtatatatacccacaaacactttttgagttaagagtgtgctgttagcacttcttgtacccaaacact

SEQ ID NO: 112395 - DNA, 168 bp, Glycine max
gcactgagggtggagagagaaagggaagcaaaattcttgaaaaaggagaacatgaatctcaagattcaacttagagaaactgcagaggcggttcatgctgctggagaactacttgtcagactaagagaagctgagcatgcagcgtctgctgcagaggagaatttcaga

SEQ ID NO: 112396 - DNA, 199 bp, Glycine max
  unsure (1)..(199): unsure at all n locations
ctcttgcatccaacccttggaattaagcacgttatttcttagggttgattgcataaaaattataattaaacaagatgggaagcgatggtgtgaggaaaccgagattcctatgccttcatgggtttcgaacaagcggagaaatattgaatacacagttacataagtggccacaaacggtgtntgacaacgtcgatctcgt

SEQ ID NO: 112397 - DNA, 236 bp, Glycine max
acagaggtggttttgtgtcaaacttcccaggtatgacattttcgaatgtaagataataattttgcatacatcttaatattgcacaatgtcatgggtgcttaattttagctctattagcatatggttcttagcttgttcttatcttcttgataatattaggcttaaatatgttttagtttcttgatatggttctaatcttcttgatgttagcttttagtcccaagaaaaacagtggt

SEQ ID NO: 112398 - DNA, 185 bp, Glycine max
ctcaaggatacgcagcacctgaatatgttgcaacaggtataccttagctttgtgtaaactcttgttaccttgcattgtctctagtaaatggttaatggcctgtaatcatttatgtttatttgaacatgctatagttctagtcaattgtatgagagcctacacattgatattgaaccacacttcag

SEQ ID NO: 112399 - DNA, 252 bp, Glycine max
ccaagagaatctatttcaaacaatttggttttgtcagattcattaacaagagagccagcaagatgtttgatattgagagcaaatgggttgctttcacttcttgacttggatgatggacgggagagaaatctcactgattcagttgaactattttgggtcacctgtggtcattctgaggattaaacaaatttgattgaggaagtttcatggttagattatggtcatcgaggcatgcaggtttggtatccatct

SEQ ID NO: 112400 - DNA, 258 bp, Glycine max
gtcgatcacaccaatccttgcgccttcttcctaacctccaatagtcacccttcacaattctctcgtaacaacaacatcatcaatggccgctaccaccaacaaagacgaagccattagcaccagtgcatcttcttcttcttctccagtcttcatatccacagagaccctatgcaccatccttacccatcacactctgatgaaccacctccaatccactctccccaaagcatcaaccattctccaaaccccaattcgcca

SEQ ID NO: 112401 - DNA, 246 bp, Glycine max
tgagatgaacccacctcaatataggtggttctataattttgttgcaacaaacgacccagcagatgggaaacattttatacgatccctcgcaaaggagcaacatcaacttgctgaaagagtgatgataacgcggcttcacctttatggcaaatggatcaagaaatgtaatcacgctgagatatatcaagaaatatctgatgaaaacttggagttgatgagggaacggctcatggaaactgtaatatg

SEQ ID NO: 112402 - DNA, 258 bp, Glycine max
ggcttgcttgcatctgtcattccatgtcatctcacagggaagtccttggctcccagctggtctcgtgagagatgaaaaagcatcaccatgccttcaattctgctggtttaaacggtagcttttaacacctaccacttgcattgccatattgattgaggagtatgttctggatccttagctctcgaaggctgaaagaaagaatatcgtatgctaacaaccaggcagcgaaatggctggagcatcatacttttgcaatag

SEQ ID NO: 112403 - DNA, 254 bp, Glycine max
aacatttttaatatcacaactgtatattattgaataggttttcctttctgtctactggaacaggatattagatttaaccactgatagttgttatggagatactctcctaactctcttttgtgttttccaggttcagaaaatgttcaagcagcacagaagtatatcactggcttggatgctaggcgcctatccaagtttcctgaatatagtgatgatagtgacgacagtgacgaagatacctcaagtagctaagt

SEQ ID NO: 112404 - DNA, 231 bp, Glycine max
ctttgatatattttgaaacaaagttaagaaaaacttaattagcatatggaggacagaactatagtgaaaaatggtagtagctctagaaagggtagctttaggatggggttgggaatggatgggaaaaaagatcacactgtggttgagcttggtagcattgacacacagagacttcttctaagcaatggagagagagagaaaatattacaacctctcaccaacactctctct

SEQ ID NO: 112405 - DNA, 242 bp, Glycine max
gtctcactctacttgtcctctttgtagagccagcttgctccctgatcaattctctgcaaccaacgcatgttctcctattgttcttgtccttgaatctgggagtagtgagagctccagggaaatcgttcccgaaagagtgggttcttctgctgctgttggaaggactagttcggttatgaccacagattctcgccttggttgccgtggagatagtgaatttggatcgacccgtgtggatttga

SEQ ID NO: 112406 - DNA, 263 bp, Glycine max
  unsure (1)..(263): unsure at all n locations
cagaaactgaatgctgagagacatttgtggaatgcatgggtaacaatctcagaactccggcattcagtcatacttaaaagaatcaagcttgtgttactgaggcaaaagttgaagttaacttccattctaaaaggacagatttcgtatttgaggaatgggcccttctagatagagatcactccagttctttgcttggagcaactgaagctttgaaagccagtaccctccgtcttccagttgttngaaaaagcatagctgatgta

SEQ ID NO: 112407 - DNA, 100 bp, Glycine max
ataaactcaaaatgcagggtttaattcgcaaactggtggcacaggtacaggcacagcatttccttcgcaacaccaactctcaccaccgtatcttcaacac

SEQ ID NO: 112408 - DNA, 99 bp, Glycine max
attcacctgttacaggccattcacgtaatgtttgacatggaattcagcaccatgttctgcatgtatgcttctaatctcttcatagttcttttcaagtca

SEQ ID NO: 112409 - DNA, 273 bp, Glycine max
atgaaatctctgaggcaaagctggtttgtgaagatctcaaagggaatctgaataaaaaggagtccatcatcaaacatctcagtgccgcaaaagatagacttctagtggattgtgatgacaagttcaaaaagtgggaagacgaaaaaaagggttggtgttggccttagaagaggcaaatgagaagacacagaaccaggaacaacagattcatcaatacaaacaagagattgaaagaatgaaaggctgtctttcagtttcagagaagaagtgttt

SEQ ID NO: 112410 - DNA, 99 bp, Glycine max
cagtgaaaatggcggtgactctaacatcaaccctctttatggcatggctatctgccgcttcagctagtgctgctcttcagcctagagtacctgaagctt

SEQ ID NO: 112411 - DNA, 264 bp, Glycine max
gcagctaccagattatgaatggtcttgtaattacaatgataataacactattactaacaataacaacaatgaagacaaagacgacgacaacaacaacaatagcagcatggccttgtgggatgatgacattattggcaaccgttattggctgattaatgaagatgatgatagtgatgaaaaccaagtgtttgatgcttctctcactcaattctcaaaaatgttcatggaatcagaatcttggggatatggcttattttgatttga

SEQ ID NO: 112412 - DNA, 105 bp, Glycine max
gaacagtttactcagctcgtgcctacaaaattcctgaatgtagccgcactgctgctggcacaccacttgttcagatcttatcttaatctgatggtgaaagaataa

SEQ ID NO: 112413 - DNA, 260 bp, Glycine max
gtgatcacggagttctgcaaatcaatatgattagatggaaaacagagacaaaggctgatcaggttggccaagaagaatggagaatggcttggttttcttgcatgatagattaacatatgttcccccatattttgtaattaccatgtgagaaagtatcaagtttgaacttgatggttttcaaatgacagcagaatgtaaactctagttgtgatttttcattcttaagtaatgttctcttattttgttttgatacatgaaat

SEQ ID NO: 112414 - DNA, 234 bp, Glycine max
cgattaaactattcatttaggtcgagattcaaaatgcatcaagtcattgcatcggacggtaagagtgagggttgtaaaacatgtaacgtgagcaaagcagcaacaaacaaagcaaccacaaaatttatcagctgatcaatctctttctctctctatctgtctcttccatggaatggtagatttgctatgaaaaggttccacattggtcaggtcgcgatctcacaatggggaagt

SEQ ID NO: 112415 - DNA, 247 bp, Glycine max
tgatcatattgcattggttaccgagttggctttcttgaaagacagtaccgacactagcaacgatgttaaatagcagtttattcgatcacctgtgggtcttatgccattgttagatcatctgatgtgtgccaaggcttggccagattttgtcaccctcaagtgaaaatgtcaagtcacatccacaattttcatcgacactctttcatttggatccaaatcccgttccttaagttgccccccttaaagt

SEQ ID NO: 112416 - DNA, 249 bp, Glycine max
gatgaacagaagaaaaagcaagaacaaaggcttcagctgaatggtggaagaaatttaggaggcatggttgctggccgctgtcaaacagatggagagagctgttgccaagacaatgaagactcttgtgttgtcagaatgatgtatttgaggaaatgaccgagctctcaactgataataagagggagaatgtgaatgtgatttctcggatcaacaagggcaaaggagcattacgcaagtttagttccatgc

SEQ ID NO: 112417 - DNA, 248 bp, Glycine max
tgcaacagctccatctgtctctgcttcccaaatcgctcccgaggttgtcaccaacgaaggcctcgtggaggaagcatgggagattgtcaacgacacctttctcgccacagatgacacttggcagctaagaaggaagctattttgagcaattctattcggacaagatcatcacacgaatgctctccagcttggccgatccttatactcgcgttctctcccctcgtgaggtatgacatgactggtgttgg

SEQ ID NO: 112418 - DNA, 252 bp, Glycine max
gaaattgaaaaagaatgaaactcttaccctagaggaagaaaccacaattgagtcctatccattgggaagggacagcccaaagattgttccgcgcttctggatcacacattgacaacttgcttgctagaggaaactaacaaaaaagggtagtgaacaacagcaagattctacaacaagagagatccagaaattgatgttcctcaaacaagatccacttggatgggccattcttacaaaagggtctcatgtgaa

SEQ ID NO: 112419 - DNA, 244 bp, Glycine max
atagaacactaccctgaacctagtacagaagctagtgctaggttttgttagtgaagcaatggctcaaaccatgttgctcatgtctagtgtctctagcagttattccgtggatttgaagaaaaccttttcctccaattgcagagtctcagtttaaggcctaagttctctcagctctcattcaacccacttccatcatcaacttctctcatttcttcaccccgtacattcacaactctggccctct

SEQ ID NO: 112420 - DNA, 113 bp, Glycine max
cgtgtgcttctgattccaagtatcatatacttagatcatctttcggtatcttcggttgctctcacagaattcgtcaagagaagtccttatcatctaatgaacaagtaagtgaa

SEQ ID NO: 112421 - DNA, 219 bp, Glycine max
ctcgagccgcaagaatcgccgccggctgcgcagattcatcattccaggcagccaggccctctctttgctgagccgagatctacgggaagcccacttgcaggtgctcctcggaggaggcggacagagatccagcgacaacagcagcagcagcgccacgaacatttcggctgatcctcttctgtcgtcgttcggccttggcttccctacctcagacgcgga

SEQ ID NO: 112422 - DNA, 143 bp, Glycine max
ttatatgtgttccaaacttcttcttggaatgtcccttccttaatacccctcaaagaaaagccaccttaacatctctgctctgaaaattctctttagagagatagagagaggaagaaagaatggcagcttgcactgtctactca

SEQ ID NO: 112423 - DNA, 252 bp, Glycine max
accaaagtctctaagatatattggaaggtatcattagattctcaacccttgaagcaatctaatttactcactatccttgtttttttcatcctggaggttgagttggttaattgcatcctgaaacttcttttattttaactttttattctctaacaggtaatgcaaacaactatttgaaatagtggccagaccattgagttacgtttaaaaacaggagcaaaaagttacatttaaaaacaggtgcaaagagtt

SEQ ID NO: 112424 - DNA, 251 bp, Glycine max
ctaacattggtgttggtctccatctttgttatcatcatggccatcatcagcatagcatggcttgccatgcatccgcatgaccctggttttcggttgacatcactttacgtgaccaacttcgccctctcagactcgcaggtacgaggaaagtacgaggttggactaaccataacaaacccaaacaagatcaaagtccaagtggtgcttcaccgtgtccacacgttacggctttatggcgaggagtggcactc

SEQ ID NO: 112425 - DNA, 256 bp, Glycine max
gaaaaattgtcggcggcgcgaaaaacaacaacagaaaacatctgcaccgcgacgaggatgtcatgttcttcagctccacttcgatttcctccacagattcctccagccttggattctcctcctccgacaccgaatccatctcacgcgcctcgtgtttcgcgccacaggtggggcgcggaggaggaggaagcgcttcattccgttccgagaaacagggaatgcgcatcttcgacagtttctgtcgaacctcctccca

SEQ ID NO: 112426 - DNA, 164 bp, Glycine max
cagcgagtgagtgagcgaaccaggtagggtattcggtgttcccctcggctgtgttcgcacgcgacgatggggaccatccccgatccaggcgaattgagcgagttgagtcaacgagcttcgacgagttccagctccaaacctcactcatgaacagctgcaccctc

SEQ ID NO: 112427 - DNA, 157 bp, Glycine max
agatttcaaaatttcttgtagtagctttttacctacgtattcagttttgtcacttctttctcagtaacaattaatactccaattacttccatggaaatttggctgctcattgaaagagttgcagacacaaatgaagtaacataagcgtactgtgttg

SEQ ID NO: 112428 - DNA, 261 bp, Glycine max
cggctcgagcggctcgagcggctcgagcgctctgtggctctctacatttcatcattcatcggattaatggcactcgaggttgctgttaaggctgctgttggtgctccaaatgttctcggagattgtccattttcccaaagggtcctcttaactttagaggagaagaaaatcccttacaaactccacctcatcgatctcagtagtaaacccgaatggtttttgggtgtgaatcccgaaggaaggtgccagtggttctttttg

SEQ ID NO: 112429 - DNA, 262 bp, Glycine max
gttcctttttattttcccgggctattgacaaggaagcatccaacaggcacttttttcctcttttgctgttatgcatgtttgtttcattactatttgtttttattgcaaggttctaattttgtttgttgttatgcatgttttcttctgaataatagttatgttttcttactgatttttcaactctgtttttggttccttttttattttcccgagcatccaacaaacaagcctttttcccttttgttgttatgcatgtttggta

SEQ ID NO: 112430 - DNA, 209 bp, Glycine max
tggcacctccaatctataatcctgcactcaatcctctgatggcccggcctctaatttggcctgctgcaccagcgcaagcttggtatccgcaacaagcagcatatccacaacaatcagctgtttcagttcctcccatagttgctgggctccaccacaacagccactattcccaattcagaatgtgcctactcctatgacatcagcagctg

SEQ ID NO: 112431 - DNA, 188 bp, Glycine max
tctgtcaagcctgagctgaaggccctctgaaccgcatgcgtacagccaagtgctgcgattgtctctgtccaaacagaatcgcctgactcttagccgtttccatttccatgcatttttttttgttttgttttgttctatacccagcatctcaccaaaaagaaggctgtagggccaatgacgttgttcgc

SEQ ID NO: 112432 - DNA, 206 bp, Glycine max
cataatatgtactttttttttgtctgcagtatgtatatggcagttttttggctcactgctacaggccaccacccactatttaaccttgataaatttaatgctactaactaaattaactaatttccttagccctattgaattagtaattgggccttataaaaaggactggagggagtatctctttctaagtttctttattggtttcc

SEQ ID NO: 112433 - DNA, 209 bp, Glycine max
taaatggcaagaagcatcagagagcactgggcatgtctatgcgtgttgaaagggcatcacttgaacagctatgcaggcgcttattgatcttcacgtggaggacaatgcaaccgcgacgatacacaaggtataagaagttcaataacattttccctccatgagtgaatgcagatcgatcaaattgagaagatgactacttcaattgaaga

SEQ ID NO: 112434 - DNA, 204 bp, Glycine max
ttctcgagccgaatcggctcgagcggctcgagagcactcttctgttatgtttggtttggggttggttccgcgctgggaacctaacttcacatacgctttttaactcgatttagtgtgtattttggttacagttcaatcagtaagtttgcttgaactcaactttgtaaacttaagttttttcaaagtagatttaatgtacagttt

SEQ ID NO: 112435 - DNA, 200 bp, Glycine max
gcaagatgaatttccactggctcgaaggcaatcacttcaaagatttcttgagaagagaagaaacaggttggctaacaaatccccccatgccttaacaaaaaatgtggttcacaacccagacaagggcttttctcctgcgacacgccagattttggtttgttgaacttgaactttcagagagggatttcagcccgtggtgc

SEQ ID NO: 112436 - DNA, 161 bp, Glycine max
ctaaagatccgtgctatgactcttggcaagttcagcttttgaaggggttagcgttaccctaccacataagccattaattagtccatgtttttctaaatctctctctaaagttcaaagtttgcgttgtcttccccccggtctatctctctctagtggtggac

SEQ ID NO: 112437 - DNA, 197 bp, Glycine max
cggagttttaagtccctttctatggcttcagcaaaacccaaaccaaggaaaagactaggagaatttctaaaggagcaacaagagcctttcatcctagagctttaccttttagaaaaagggtactcaacaaatattgagaatctggcaagagcaaagagagatggtcaataagcaaaagagagagcctctcttccaat

SEQ ID NO: 112438 - DNA, 252 bp, Glycine max
acgtcaaatcaaatgcatgatgagttatactgcagtctagctatcgttcaccagactcttttgatgaccctgaccaggagaagatgaaactgttgagaatggtttataaattgcaggaacaactcaacagaacttgctatctaaacggggaaacaaatggaagactgtccatgggaagtcaaatttctgcatatcaaagccatgatcttcatgaaagaagactttatcatggtttggattatcctaggtgtg

SEQ ID NO: 112439 - DNA, 100 bp, Glycine max
cagaaactgaatgctgagagacatttgtggaatgcatgggtaacaatctcagaactccggcattcagtcatacttaaaagaatcaagcttgtgttactga

SEQ ID NO: 112440 - DNA, 263 bp, Glycine max
ctcgagccgggaccagatccggcttcaactagagcacttcttgctgagaagggtcgattagctagtgagaacgaggtatatgcacgggagaatcgttttctacgggaaattgttgagtaccatcagttgaccatcgcaggatttggtgtatcttgatgagggcatggaagaagtcacagaaatttatcccttagataccactggcactgtggttcctcgggtgttgccaaagtccccacgctcgcctttaagtcgaggaggct

SEQ ID NO: 112441 - DNA, 272 bp, Glycine max
gtgagaacggtgctgctcgcatacctcccggaacccaccagcacattatccgtctgagcatctgcacctgtatgtatgtgtggcaatcttgaaacgatatcgtggtaaaataattggagaggaaatggacttcgacacccttttgaagtttattaatgagctaagtggtcacatcaaccttgatgcaaccctcagagatgcagaggctctatgcatatgtgctggtgagaacggtgctgctcgcatacctcccggaaccccaccacgttgcc

SEQ ID NO: 112442 - DNA, 127 bp, Glycine max
tttgacctatgtgagtagtttgtatcaattgatgacttcctctaaccatagattgaggtctgaggatagtgatctttgtcttcgccaacaacatcgtccacttaaaaatacaaaagccctgaaatat

SEQ ID NO: 112443 - DNA, 266 bp, Glycine max
ccttgatgtgtatagaccgcggaccagcgcatctgtgttgtcaatctgtctttgtttcgtctttctcgccttgtatctgtactcttcacagcaatcctgtcagacgcttgaacctgattttgctgctgccccgtttggtggtggttgtccataaagttctaacgatggtgctgcaaagtctggaaagggccgacttgcgatcttcgtgctgatggctcggatggggccaatccattgggccgctggagccactgcccgcgtgttct

SEQ ID NO: 112444 - DNA, 268 bp, Glycine max
agagtttgagctttgattttgaagactcccactacgctacttaattacattacaccccccctttatacccttctgctgttagagaagaaaagtgtgttcacaagggaatactgcctctatgtttagctactgctgcttcttttgcgggataggaaaaaggttttctacttctctttcttgttcactttttgaatttgagaagatttactagtgaaatgttcttttattgatcgatcattcattcttctttggattttctctgcttgag

SEQ ID NO: 112445 - DNA, 264 bp, Glycine max
ctggcgcagagcattgcaatggcgtccgagttccgttgccggcacatagcagaaccgtaaatctttctctctgtctctgcaatattttgcagaagcatgtgaaggatttgcacattgtttttcagttctgattcattctcgttgttttaatcgccaatttttttttatttgtttcgattttgtaaaattgtttttgggccgttccaatgggttctcagcaaatgctgtttgagatctcaatttcacccggccaacatctgatct

SEQ ID NO: 112446 - DNA, 107 bp, Glycine max
tcttgattagatgctagaaaagatcccctccttaaggtgatacgttgatgtaatgatttatgtcctcaatattcgatcaccaggataaattcaggagcatttggaat

SEQ ID NO: 112447 - DNA, 267 bp, Glycine max
ctccgccaaaccccctcaaatctccgaaatgtttcagaaattcgccctcgctttcaagaccaaaaccttcgaattcttctccgaggaagaaaacaacgcttcccctctcctcgacgacatcgacggtttctccctccttgactccaccgaagaaatcatcaccgaccagaaagtttcgtcatcaaacccgaccccgatccctccctaaaatcccccccatctccgccgccggaatcccctcctcctccgcctccgccgccgccgcca

SEQ ID NO: 112448 - DNA, 257 bp, Glycine max
cttgggcagccaggctccatttccgaggttgaacagttaaaccttgaagcaggtgcacaaacagagcatcataagaacagcaaatacgtggaagccacacataagttgatgaatgcttctagaaaagctcaaactttgattgcacagtttggatgtagaagtgagcaagtgatgcgacaattgacgatttgcggaataaattgaaagcaacaactgttgcttttgaattagtcactgatgagagagacttgaataaa

SEQ ID NO: 112449 - DNA, 257 bp, Glycine max
ttctagtgcatcaagtattggaacactgtccggtcctcaatttctttggggaagcccaactccttactctgagcattcaaacacttctgcctggtcttcatcttcggtggggcttccatttacatctagtgtccaaaggcagggtttcccatatactagtaatcacagtccttttcttggctcccactctcatcatcatgttggatctgctccatctggccttccgcttgataggcattttagctacttccctgagt

SEQ ID NO: 112450 - DNA, 256 bp, Glycine max
gaacactaccctgaacatagtaaagaagccagtgctaggatttgttagtgaagcaatggctcaaaccatgttgctcatgtctagtgtctctagcagttattccgtggatttgaagaaagaccttttcctccaattgcagagtcaacagtttaaggcctaagttctctcagctctcattcaacccacttccatcatcaacttcttccttttcttcaccccgtacattcacaactctggccctcttcaaatctaagac

SEQ ID NO: 112451 - DNA, 214 bp, Glycine max
taaaaataactcataatggaattgaggtttttagagatttctaccctgttagtgatgattttgttacattagagtgtgtttggaaatcagacaagtttatattacttgacgggaagcataaaacgaatgatgaaagtcatgttgaggactctggtggaaatgtttctgtccaaacatcagatgttaattataatagtattgagtcttttcttgg

SEQ ID NO: 112452 - DNA, 110 bp, Glycine max
accttatgagatatgatgccttgtatggttcagtatagttcttgtattgctggtttaaattaattcttgtatggcagttgcactaaactgaatggcagttgcactttgag

SEQ ID NO: 112453 - DNA, 114 bp, Glycine max
ggtcctttctaccgttctccgatcccaatcgctaatctgtgtctcttgaaactctaatttagtcatctggggagatcggctgacgaatcgagaggatctcatcgctcgcgaggg

SEQ ID NO: 112454 - DNA, 212 bp, Glycine max
attctgtggtcgtaggtaatcaattctgaataagtgaatattagttattagagatccttttggtaatttacttttgaatttgaagttgtatgaaaatttccaaaaggttctctaataactaatactgtgaatgaagaattcttattctgtggtcgtaggtaatcaattctgaataagtgaatattaagtgcaatagccaaagatcaactgct

SEQ ID NO: 112455 - DNA, 199 bp, Glycine max
gagtcttattgaagggtgagggtcaccttggaaatccatccatgccatggctcacactcttacattccattcgcctcttgtaagtaccagtcctcattcaagggtgagcatccgtcatccaaggctgagagctgttgccacgaagtctggatcgttcccatcatttggactaggcaagccctaagatgattcttcttct

SEQ ID NO: 112456 - DNA, 136 bp, Glycine max
ttttcatccaaaattctatcaaactcaagctagagtgtgagaagaaggaaaaaatggaaggtgaagaaactgagatgaaacaacaatccaggttcaagaggatttgtgtgttctgtggaagcagccccggaaacaa

SEQ ID NO: 112457 - DNA, 271 bp, Glycine max
ctcgagcgattcggctcgagcccaatcagctccactttttccattccatccatacattgtcaccaccacattaaacgcagaacacaaccacccccactctaacaactgccaccgtcagccgcagcacgccgccacattactccggcaacaggtcaaccatctctctctttctccttacattgtagtccctactccctagtgttaccttaccaagccattgctttatcttttcatgttttcttatctcattttagtagtccctccctagtgc

SEQ ID NO: 112458 - DNA, 125 bp, Glycine max
atccattgcagccactgacacgggataatgctaagatctgcactagcagtgagggcaagaactattggtgggatgagccaaattaggctcatccaccaatacttcttgcctcactgctagtgcac

SEQ ID NO: 112459 - DNA, 255 bp, Glycine max
cttcaatcgtcgacctttcgttttgttgttatactgctatggtggaaccctgttactgttactgttagtgtatcctattggcaataatcaaatgtggtatggttgactactataactgaaaccaactccatctccaatgatggacaagaaagttgtctctaaggcatccattgtcaaagcaccaaagtgttatgtgcctgtaactatctcaagagtacttgtaactgaagaagattctggagacttcagttcggt

SEQ ID NO: 112460 - DNA, 234 bp, Glycine max
ctttattctagctgcaccttaatgtatccatatacatgcacataattcacaagatttggctacaaaatgtctggcagaatataaatactgttattcccaaaaaagaaaaaaaactggcttatagaatatggtaatattacatatagatttaacttggtacaatataatttttcatccaatgtacatttgtggttccctttctgtaggtgttgctgcaaggctggaaagttgtgg

SEQ ID NO: 112461 - DNA, 159 bp, Glycine max
ccaattcttctaatcttctgcgtttatctctcttttcttcttcatttccgcagcatagagagagatagaaagcgaaagaaacctaacacaatggcgtcttcgatcgcagctggtgctggatccaccgatcccacagctgccagaagaaacactaagcga

SEQ ID NO: 112462 - DNA, 110 bp, Glycine max
gtcaaaaggagacagctttgggttccatcactgaggttgtccaaactgttaaggacccaatatccattattaatgataggtatggtgatactgctaccatgcctgaagag

SEQ ID NO: 112463 - DNA, 136 bp, Glycine max
ggactatacactaatttccccatacagccatgaactaggcaaacagatatctgggcgttgcggctagactctgtgactggtctctgacatcaaccgcgcactgtgtgggatcttcaatggcaccttccttatgtct

SEQ ID NO: 112464 - DNA, 276 bp, Glycine max
aatcggcgacaggagtcacgcagaaatacagacctgagtatcgctcgttggttgagattggtgtggcttccaatggagagctgtgcactccagtctctctcaacctctcgtctctcgctttactcagctccatcactctcctctccctgacatctccagatctcaattcagccaatctcaatctgtctctctacgatgatgcatcacaatctgccgatcgtttctccttctgctcgtgcacgttcaaattcaaccctttctcaaaacgccattacc

SEQ ID NO: 112465 - DNA, 285 bp, Glycine max
gtatcctacaattacagctccaaataggacactgattgaagcaagtgaagagcagagaaagcatgctttaaccgtcgctattgcaactgcagcagctgctgaggctgcagttgctgctgcacatgctgctgctgaggttgtcaagctcactggcacttctcgctcttactcatatctttcctagggagacaaaagtttagctgccatcaagattcagagcacgtaccgtgcacatcttgctaggaaagcattaagagcattgaaaggagttataagacttcaagc

SEQ ID NO: 112466 - DNA, 280 bp, Glycine max
ctcgagcgattcggctcgcacattcacctgagcttgctgtgaggattccaaagcatggcttcccttgcagcatccactgctgctgcttcccttggcatgtcagaaatgcttggaaaccccatcaacctcagtgtcgccacaaggccagctccatctgcctctagccctgcctccttcaagactgtggctcttttctccaaaaagaaggctgcacctccaaaaaaagctgcagctgctgctcctgccaatgatgagcttgccaagtggtatggtcctgaca

SEQ ID NO: 112467 - DNA, 145 bp, Glycine max
ctcgagcgcttggaaacgtctcttctgcagaagaagccgatgcttgaactgtgtgtgtagaatatgcaggagatcctgtttatattcttgcaaactttattaaacattctcttaaaataataatatattaaaactgtctgtttct

SEQ ID NO: 112468 - DNA, 151 bp, Glycine max
gtctataccaaaaaacatagaatattcagaacaaatgaatcaaaatcaaccaatatgaaactatgtcctaaaatgatgaatgtgttgagccaatagcaattctctgatggtggtggtgttgatgatgtgtatggtgatggggtatatagag

SEQ ID NO: 112469 - DNA, 258 bp, Glycine max
cagaagcttgttgatagctatcgttctcacatagtactgacaataaccaatccatcagagtctcttcttaatgagctaagaactgttgaggacatgaagcggcaatgtgatgaaaaaagagatgtttatgaatacatgattgcccaacagatagagaaaggaaagtcaaaaagtgctaaaggtgaaagtttcacgctacagcagttgcaagcagctcatgctgaatatgaagacgaagcaaaactttgtgcctttcgg

SEQ ID NO: 112470 - DNA, 162 bp, Glycine max
aaatggttcaaagagatatttggtacaacaattgaagttgtgacagcacagttataaagcactctttaactgtgctgtcacaacgtcaattgttgtccaaatggttcaaagagatatttacctccaggtttgtattcgttctgaatttatacaatgttgtac

SEQ ID NO: 112471 - DNA, 254 bp, Glycine max
  unsure (1)..(254): unsure at all n locations
aattcttttcaaaattaaagaattcttttaatcctaagtctgaagaactcaaatcaaaagatataaagaagctcccgagcgtcgaatatttgaagaagatacatgagggagttaaggacttatctcaagatttatttatcccgaaaatcccgtttctcaacccgaaaaacccgaaactcccaagaatcccgctatttaaatctcccccaccgccaatgtaccgtttacaactanagtccgatcccccaccgcca

SEQ ID NO: 112472 - DNA, 247 bp, Glycine max
ctcaaaggtggttctcatgagctaattgatccggtgaggctgtttgaggatggccttgtttgtgtgtcttctttcaaatggttgcctcctgggagcacagagactgctgttgcagtccgcacctcccataagtttctgattgcttcatcgtctcattccgataatgatccttccaccacgagggatcttctggactctgcgatatttcgcactttgcaggggttgcttgtgaacatgatgttggaga

SEQ ID NO: 112473 - DNA, 165 bp, Glycine max
tcctcccctaaaaagttgggaaataaagcatatatgtcaaatactgggaagaaaggtaggttgcaaacagtatcgtcatctacttctgtaaatgacaacagagttaacaaaccgccatgccatgcccctcgcactgttacatcggtcatcacgaaccagaatctg

SEQ ID NO: 112474 - DNA, 241 bp, Glycine max
attctgtggctactctgctgctgcagaagtatcatcatattaatgcttagaaattaagcatagagttatgcaaatacaagtttaaaattgttgtacagtaaggaaaagaaaggatgagaagaacaggttcatgaaacatatatagaagtgtttcaggtattggacaactcatttaaacttgtatttggataactctatgcttaatttctaagcattaatatgatgatacttctgtggctac

SEQ ID NO: 112475 - DNA, 239 bp, Glycine max
caagtttcaaaaatagcatccctgataacagtctaacatttgttccttttccaccctgtgtgcaaggttaggaatctgatgcatttgaaaattcaggtgctagattttctcattttcaggagaagatggccttgccgaatctgccatttgatgaaaggttgctggccagatttcctcttacaaccaagagcatgccaaattcacatctggacctcttgcccagtttgtctataggagga

SEQ ID NO: 112476 - DNA, 238 bp, Glycine max
agaatttttggtatttccgtcacaaacacatgtcaacgccaccatacgccgcgtaagccgcaccgttcgaggacgaggaggatgttgtgtgcaccgttgcacctcactgtcctgaaaccctcgtcaccatgtcaaggtggataattttatccatgcagacatgcatcctggaaatattcttgtccgagtaggaaaaagcaaatcaactctcttgaagtcaaggcctcatgtcattttc

SEQ ID NO: 112477 - DNA, 237 bp, Glycine max
gtagtgagaaaaaaggataaggaaggagccaaactgtgagagctctaaacaaaaatgagcttcacattcaacctccatgttcccaaagctctgcctcctcttccctcttcatcacgtggaacaacttctctcttcttttcttcaaagcagaaatcataccacaacaacactagtccttgccaatcactacttataacatgcagaagccacaaaccaaattatgatgataccagccta

SEQ ID NO: 112478 - DNA, 236 bp, Glycine max
gtcttagtctcatgctaatttttcttccaattatagatttttagtatattgattatcgaattcttcataaagcatccagccacatatgaagaaatgagggactagaagactaaaacttcatctattcccttgcctgaactataggaactggcatttattcttagattagaatcttaaaactttattttgttaggttgaaacatatgaccattttgcatagatttattgttctcttt

SEQ ID NO: 112479 - DNA, 236 bp, Glycine max
tctcgagccgctcgagccgctcgagccgctcgagccgctcgagccagctcacggctgcgagccttgagttacttgtggcacgcagctccacgtactgtgaagactttcacagctccattagtggacttctttcatacctgacccccttaaagactgatcgttgaatcttgtgctctgaatgagttcaatggaagctggtgtcttttgacaatgaattcctctagaagcctagttgt

SEQ ID NO: 112480 - DNA, 125 bp, Glycine max
aaacttggtagcataagcaaaccacaacgagatttcagaaagagcgtgtgtagacgaccaacatgaacgacgatgacataacctctgcgaatcccaatcactctcttcccaaccaccctcttctc

SEQ ID NO: 112481 - DNA, 259 bp, Glycine max
aaaaagcctatcgaaagggaacaattcaaagaaggatgttttatcgtcaaatttcaaccttaaagaatcaagtacagttcccttatcttctgttactgggtcagcctatgaggtcgcgtgacagatggatggcctgatgaaaatgaaggggatgattttagcccctctgaagagtattacgagcaggtgaaaccaccattgaagaaaaatggaaagatggaatcatatgctacaacagatgacaaattgaagaaaccca

SEQ ID NO: 112482 - DNA, 189 bp, Glycine max
gctcgagcgccgatatgctctccattaaaaaagagggtaaacccaagcaactacttcgagatctcgttactcagatgttcctacatttcatcactctccgccaggcaaatagcagtattttgtggaggaagaccgcgtgaaaaccgaaacggagcgtgccaaggcgccggtggatttcaccacgctgca

SEQ ID NO: 112483 - DNA, 256 bp, Glycine max
atctctctctctctcatttcattcatcattctcttcctcccccaaagaacttgttggcctttcatttaaagccctctctctctctttctctcattctccgctattcttctctgtctattaattaagtaaataaaacccggtagcttcattttccaaatcccagttattacttactggccaaacaaggcagaagaagaagtactgttttggttcatacgcgcccacacactaacacagtgctcccctgatccaacat

SEQ ID NO: 112484 - DNA, 250 bp, Glycine max
atgaaccataatcaaagcacgtgaccctcccaagatagagttccaacacaccgagtttgccgaaatagaagacatatcaaacactaaaaaactctacgaggaaaaaacatgctctacagatccttctgcttcgacactgagaagctcgacatgctcaagaaaaaggccacagaagatggggttttggaaaagtgctccacttttgaagcactctcaggttttgtatggagggctcgaactgcagcattag

SEQ ID NO: 112485 - DNA, 217 bp, Glycine max
agaagctagttttctaaagtttcaacactaactgaaccacagtatattgttgttactattgctattgtcaaatattaatcaagaacattgatatagctatgaggttggaaagaagaagatgatgctcaagtctttgatcaaaaaggtgataaagggtcttccattattcttggcaccaaatggagtacgtagtacgaagaaggtttgttatatgagt

SEQ ID NO: 112486 - DNA, 160 bp, Glycine max
ctcgagccgagaaaattaagcaaataacaagaaagaaacaatgaacgacttgttctccggttccttctcccgcttccgcagcgaccagtcctccccggaccgccacacgacatcgagatgggcgccaccgcctccggcggcggtcgcggcggcgaggtga

SEQ ID NO: 112487 - DNA, 240 bp, Glycine max
aatttctctagctagctagctaggtgtgcttccaattttcacaaaccccacatctcactcatcatcatatatagcaccaaacatatatctgttatttctgctctctttctttcaataaattaagctccctctcacagccgttgaaggggagaatggggagaaagtgctcacattgtggaaacataggtcataattccaggacctgtgcatctttcagagcaactaattttgtaggagttc

SEQ ID NO: 112488 - DNA, 264 bp, Glycine max
caaagacgagaaggaggcagcgttgaatctttgctaaatacctgtgtgtcaaagttcaaattattgcgagttttggatttaaggaattcgacatgcaagactttgccacgttccattgatagttgaagttgtttgctgcaggttgactccactacagtcaaacctatataaacattttatacaatccaaaaatgttaagcgggcaattactgaagaactgaagcaatcaaagattttggcctacgtaacagctctcaaaaagtt

SEQ ID NO: 112489 - DNA, 247 bp, Glycine max
cttcagttctcaaagcaacttgttgagctgcatccacattttcatgtcacatgcatcgttccctcacttggttctctcccaagtgcctcaaaagccatcctagaaactcttccaccaaattacatcaacaccattttgcttccaccggtgaaccctaatgaccaattatcacaagaagacattcccgtactagtcaaaattcatctcacaatgagtcactccatgccatctatacacaaagccttga

SEQ ID NO: 112490 - DNA, 247 bp, Glycine max
gaaaagcatgtcagcgtgaagtgcgacggcaggctaggccccaccacctaacaagacaaactcaacaacggtcaacgcttcccacttctcacggaatccccgccacccaccacgtgccatcttctcatggacctcccccttcttcatctcctctcctatatctacgccttcaattctcttccattttgctacgctttcttttccttcagggttaagcggtgagatttgcgaatctgagaaatggcgg

SEQ ID NO: 112491 - DNA, 250 bp, Glycine max
cattcccctcccaactaaccgtgacagcatccttttgcgttttcaacaccctctcaaccgtcacctcccgccacgtgtcactccctcattcgccctcctccggcgcctgtgatcaccgcttcccaccgcttcaaaacccccaacacctcaacctttcttctttttttttttccttcttctcttcgtcacgatttctatcctcgtcgcactttcgaacactgaaaattgagattgcagaggaatatcaatg

SEQ ID NO: 112492 - DNA, 245 bp, Glycine max
agataatgtaagttatttgatatttgagtttttgcatctcatggtttcccaggtttttaatgccaattaactattttttatggtttttttaccatatatttccaaaatcttgttttaaattttccttgatatggtaaaaaatgatgtggttgatctattctgaaagaacaaaagcagttaacatcatttgatattcctttatagagtaattgaatgtttcatgaggctttggtcatgtaaggtag

SEQ ID NO: 112493 - DNA, 238 bp, Glycine max
atcgagccgatatcggctcgagcgagctcgaggtgaggccttgtagtcctgatcctgatccacgatgctgactcgacgaacaacggagaaacacgagagattaaccggggaagggtttagggttgggagtggaagaatcgtatcgtattgagaatgtctctgacgagcgtgacaatgtcggaggaagtgtggttaagctgcgtgactcatgcattgtccactgataccgaagagatta

SEQ ID NO: 112494 - DNA, 238 bp, Glycine max
ggagttgaacctatacctaccgttcagtactaatgtgttacccagtgaaactataatgatgagtttttcagatcttaagtttaacttcaacctaaattgttaaatatttgaattgaatggagaagctttaaaagttaatggaaagttggatcgttcgaagatttacatagaaagtagttctcgtatgcctctttcattttttttccctttcctccgttaaatctctccaagattttta

SEQ ID NO: 112495 - DNA, 239 bp, Glycine max
tctcgagccgaatcggctcgaggaactaatgggccaaaacccttagtatccgtactaataaccttggctgctcctccttagcccacttcttcatcatctttaaaacctgagatcaattaagtttgctggggaggttgttcttgtggtccattgtatcagtcagtagccccagcatcagtgaaaaaggtggtttttgataacaacattagcttcttgtccttgatctatcggatcaaagt

SEQ ID NO: 112496 - DNA, 263 bp, Glycine max
agtatatataaacaaagttaatgggataggcctgcaacttcttgtcttgtaccctttgcttaatttccctttcccttgaatattgttttcgcagttttaaaacgataatttgatcactactgacgtaatagctagctagctaatcatggaaatcttgcaagtggccacgcagagaagatgaaaatgaaattagaagatcctcgccagcaacaactcaagaactgggaacctgttccagacatggttgatcgccttggtggaag

SEQ ID NO: 112497 - DNA, 195 bp, Glycine max
ttatccaaaaccatgtccagcttcactcatgttaccacactcatccatgctcacatcaaaaccaagcacaataaaccctccaccaccaccaccatcaccaacccattaccccataaccattcccccaacatcaggaagctatcgataacctttctagccacttcaacagcagtactactagtgcatggagtcacc

SEQ ID NO: 112498 - DNA, 152 bp, Glycine max
gtaatatcaaagcagaatgttcaaattacttgctgattctaccagaatatagtactgtcaagtacgagtacgatgagtacaattccagttactgggttcccactcttggagacctaaagaaacagaaagatgttcctgcggtgcttgaatgg

SEQ ID NO: 112499 - DNA, 155 bp, Glycine max
gttcacaaaaggtggaaaatggcttgtttggaagtttgagggaggccgatctcttgctgattacatggctgatcaaagcttcccttcaaacttagagtctatcatgtttggacgtgtcttgcaaggcgtcgactcttctaaacgaaatgcattga

SEQ ID NO: 112500 - DNA, 138 bp, Glycine max
gagaaaagttagggttcacaacttttccttttccttttgcttgcgaatctgaatcacataatcaatcatccattcattagtcatcatgtacgtcggcgaagaaacatcacgctgaagagttcggacggcgaggctttc

SEQ ID NO: 112501 - DNA, 260 bp, Glycine max
gcactgaccatagaaaaccaaacccagcaaacagcaccgtctctttccatttcaagcctccaccgtcgtccactgcttcatcttcagtttttctgcctaaaaatacataaattgcaccaaactaaaaaactgaactcataacattcatcttcagcattttctgcttcatttctaactaattattgtgattattattattattgagaagaaaaaaaaatggcaaagttaataaaattctttgagttgacacagagggccaa

SEQ ID NO: 112502 - DNA, 254 bp, Glycine max
tctgtgtcacagttagaactaagaactcatgccttgcttgttccaaaagaaaatcaaccaatgatattaccgatatagttgctgatgatttcaccatagaccaaatcacaacagaaatgcattggatacgggtggattaaatgtaaactttgaagacaaaggtgcagtgcaacagtataatatactgtgaagtctgaagtgagcggatattgattaaaatcagctccggaactcattgctaaaagcagctatac

SEQ ID NO: 112503 - DNA, 220 bp, Glycine max
tcaaaagaaacaagactaagtgaagttgaggcggaacacagcaagcatgctttaacagtggcctgatgcttcagctgctgctgctgaagctgctattactgctgctcaagttgctgttgaggttgttaagagccaatctgctgctcatcaacaacttaaagaaaaacaagaacaacttcgacctgttaaaactagccatgatgttcctcattccacacac

SEQ ID NO: 112504 - DNA, 272 bp, Glycine max
agcattgccccttctgctcctcctcctcctcttcctgttctctccctccgcggcggagataaagtcgcagacgataaactccgacagccgccccatgatcctcttggagaaattcgggttcacgcacaagggctacgtgtccatcgccgtctcctctgtctccgtgggcgtgctctcctcctcggtgcaaccagaatcctctcgcctgggattcttcctcctgaacgaagaagccctcctccaggtcctgatggagatccagcagaaccctc

SEQ ID NO: 112505 - DNA, 273 bp, Glycine max
cagagttgcattttccaccttagacttcgtcacactcactcaccactcaccactcaccactcaccaatacacttcctcagaggtcaattatcgcgcgactcggttcacatggcagcatctcgaggaggggttcataaacttgtatcctcctctcgaattgaaaaactagtttcccttttatattccaaacaatatctgccaccgtggcttgagactgtgcgccatttaagctttaccgatgatcgcagtggcagaagcaaacaacctgttgga

SEQ ID NO: 112506 - DNA, 221 bp, Glycine max
gaggactttgtcgatgcaatttgctgtggacatttggagtcaagctggaaattgcatggatttgagtaccccattcgatggaaagggtcttcttgacgcaatgatgaaagcgatgagactttctgtagggagttgttctgtggagagccaaaaccttataatgcgcaaagcttacagtgtactgtcttcacacactaactttacagcttaaagacagttga

SEQ ID NO: 112507 - DNA, 274 bp, Glycine max
cgctttgaagcctggcatcgaaacggcgttgccaatagttcagcaggccggagaagaagctttgaaaattgcttcccctgccatctccgaagcttccaagaaggcccaagaagcgctccaaagctccggtgttgatactgaacctgttatctctgctgctaagacagtggcagatgctgcacaacaaacaaccaaggcgattgaagttgccgacgccatagcttcctcaaccgtcaaaaccatatcttcttcagaccctactgtgattgctgga

SEQ ID NO: 112508 - DNA, 260 bp, Glycine max
acaatatcctcaccccttcgctcattttttctttttattattaaaactagaattatactagtatataaacctatgctcattccactctttatcttttcctccaatacctccgccaccactctctctctctctctctctctctctctgtctctacaattctcgcgctagattatctccctaagatgagtgttgaacgcacaagatggtgaacgaccacgagtgtgtgcgttccgcgatagaggatgacaccgttgttgtgg

SEQ ID NO: 112509 - DNA, 235 bp, Glycine max
gctaaagatagtttggaggatattggaggatggtgttgaccctgatcagccaggagtagttcagaagtcatctcctttgtatccaaagttttcagctttctttaaaagagtaaccatttctttggatcagagactttatcccgataatcacattattttgtgggagaatgctcgatcacctgctccacatgaatgttttgaagtaaaacagaaaggggataaagaatttacagtg

SEQ ID NO: 112510 - DNA, 269 bp, Glycine max
aatgtatctatctatctatctatctattgagctttccgacaaagaaagcatagctgaggattgctactactgggctttgatgttctttttgggtgagtaaatattgaatttgaggggtaaacagaagggatcaaaggttgaattggtaacaggagaagtacatctttatggtaaacatgtaaatttgtgtaaagttatgttacaaaaaatgatggtgtataatttagtgagagttttagtgtcttgtgtgtatgtgtgtagctgctgtt

SEQ ID NO: 112511 - DNA, 279 bp, Glycine max
gtttcttgaagctcaaataccccaccattctctgccaacctcaccacagcgatcacaccccaccaccctcttcttccgacaactccacaatcttccccttcaccgacaccaccaccaccacctcctccggctcctccactgagccagacttcgcctccatcttcgcctcgcagcgcttcttcttctcctccccgggcacctccaactccatcgtcgagtcccccgacacgcgcaccttcatgatccccaccggtggcggcgtcagagtccccaagtact

SEQ ID NO: 112512 - DNA, 261 bp, Glycine max
aaaagaccgcactgtattgggagagccgcctctctcaaaatacgtagcagagagaagcttctggatgatcaatcagctgttcttaccgccatgcttctctccggttctgttctgcaatcgatgaaggtgcttgcctgtatagccaccacgaggtcgatgacagctgtgaccttgacgttgacaaaagtaagctgccattgcagttagccattctaggacgccctaatgttggtaaatcaaccttattgaatgcattgttgc

SEQ ID NO: 112513 - DNA, 99 bp, Glycine max
gttttaattctggaggcctgctggttcggttttattctgttatgggctttctcccattcccacaattgagtcctgagcatgcttctaaagaaccagaga

SEQ ID NO: 112514 - DNA, 216 bp, Glycine max
tttatggatcccaagctcagattctttattatcatcttccttttgctgtttgttgaactgtatccagatagagtcaacagcttgagtatgagattggatgtagaaaaatcaccaaccaaggtttcttttcagatgaagggaagaaagcttttgaaccttgacactgacgactacaaagaatctggtgctaatccacggaatgatcaagggaaaacg

SEQ ID NO: 112515 - DNA, 268 bp, Glycine max
ctaaagcagtgggaactagagaattagaataataacttctattaaccctctagggctgccaatttatgtttgtctataaatatacagttgatcaatattgtttctgcaatgtcaattattttgtttagtttaactattgtaccattttaccttggtcagaggctcatagcttcgaatttctttcttttgtttttcttttcttgtattttgtattctacacaagttttgtgcagcgaaatattagttaattgtccactgattttaaaaa

SEQ ID NO: 112516 - DNA, 256 bp, Glycine max
gttcaacaaatcatcggtggtagtggtctaggtggtggttatggaggaggaagtggtctaggtggactgaggactgccagcacagagagatgcattagttttgttgtgggcatttacaacggcattggaaatcgaggaggcatttacaaaggcattggtggtggtgtaggtgctataggtggtgttggtggtgtcattggtggtttcaagcatgtgaagccaaaaagccttgaaaaatcaatcaactaaggagtta

SEQ ID NO: 112517 - DNA, 261 bp, Glycine max
caactaccttggacattacctttgcttctgttctgtatttccatcatcgtcttcgtcttccatcatggctacctatagttggtcaactgagatattttcatttttggttctaacgttgttgtcgacaagcagtcacacaatgtttgctggagcacgcaatcttctcgaatcaaccttgtcaaaaccagaagtgccaacacttcccaaacctcatgattgccaccattgccggaaatccctgaattgcccaagtttgagtcg

SEQ ID NO: 112518 - DNA, 234 bp, Glycine max
aataaatctatattagttagattactatttaatgatggcgacgagaagaataggaaggactgaaggagagcctgtgtctgttgaaatgaaactgaagcatctatgaatttattatagctggaacagagtgcagataaaaatataaaatatatttcaataaaaaaaaaaaaaaaaaaaaaaaaaaaaaaaaaaaaaaaaaaaaaaaaaaaaaaaaaaaaaaaaaaaaaagggggg

SEQ ID NO: 112519 - DNA, 253 bp, Glycine max
ctcgagccgcacggcttcaacgttggttggttgttttgcttcgatcattttggcgctgaggactagaaagttttacaaaggggatatctatagaaagtttagaacggaagatgaaacaatagagaatgagatagagattaccaaggctggtaattaattaattaatgttctgttaattgaaacagaaagacgcgtaaccttgagcagcaccagggctagtactcccccaccacaagcagctcggaggacacga

SEQ ID NO: 112520 - DNA, 234 bp, Glycine max
acgccgaatcgagcgattcggctcgagctcgacgttacaaagtagtactacttggtttcaatcaaaccaaaaactcacactttggacggccacagcaacaataacaatggcagcctcactacaagctgcagctaccttcatgcaacccaccaaggtgggcatggccactcgcaacctcaaatctacacaatgcatttctaaggcttttggcttggaaccgctgcagctaaactc

SEQ ID NO: 112521 - DNA, 265 bp, Glycine max
ctcgagccgtcaggatattatatcaaaggtatttgaatcgatacttggtaaaattatatagtatatgtgtagtataactgtttccttgtatacaaatccggacatggctacaatcccgaggcaaaccttttctacagttagacatcaaaataagactatgcatcagagatagtttgttccggttggcacaaaggcattatactagtgatactagcagtacaaacaaaagtagcagagaagaacttgaagttgctgcaagagaaga

SEQ ID NO: 112522 - DNA, 261 bp, Glycine max
aacagttacaatctccgttttctgtttcttccatcttcctctttttcttagtgcatgcctttctccattttcttctcctcttcttcttcaagtgataaagaaactgaactgataaaagatttgcaaatgctcaacgctgggaccttctttggtgatgtttaggctgaacatcatatggtttattgccatagaacctgctgctttatcttttagtaccggacatgtggaaacacttctcataagaatgcagttagacctgtt

SEQ ID NO: 112523 - DNA, 260 bp, Glycine max
atgaatttcatacattgaaaactgatgtcctttagcaatacacattcggtgtgctcaagggtggtagttttgtttctactagagaacagcaccagtggaagctattctacgctagttttcatacattgtgtattttctagagaaatatagcattgtgtatatattagaaagtacaatatgttggtacggctacgaatgtaaattcgtatgaatcctgtaggttcgggatcttttggaacttttactaatgcgaagtatgg

SEQ ID NO: 112524 - DNA, 100 bp, Glycine max
tgtgagtgtatacccaacacgaactaagatcaacatggactactacacccgcgtttcagaagttgagagggaacctatcatggagtattccacacaacat

SEQ ID NO: 112525 - DNA, 166 bp, Glycine max
atcgctaaatcagcatatgtctcagaggcccacgattccacaatcttgtaccatagcgtgcggccttcagtctcatctggtggtcaccagtgagatgatccctagctaccaattggtcccattagttacctctttcctgcatctcatatatcccatgcttctcatc

SEQ ID NO: 112526 - DNA, 268 bp, Glycine max
aatgattagcttttcttacacttagttgttttcctatgtgcagcatcgctatgattacgatggtcatgtaagtcgcctttttttcctaagttattctctctaatgcttaattaaattcattgaaatataggtgacattttggtgatcaatctcctaatttgttcaccttaattcatttttgaatcacaactttacatgtcactgcattaattaaaaaaaaattaagttgagaaagaagttgtcagcacgtggttgaggaatgagtgtg

SEQ ID NO: 112527 - DNA, 260 bp, Glycine max
  unsure (1)..(260): unsure at all n locations
ccttcttatctccgactatcatattcagcatcctctttcggctatctcatccgttccatgatacattttgcgcgcactctctcggatccgtcctaagtgttcccatttctctctagctccgctatcacactgcatacaattgaaaaaattatgatgataaatcatcatgttgtgatccttctaatttgctccctccaactcctcctatctactcagataatgattacaaaannnnnnncagcaaacacatcaaagctgaa

SEQ ID NO: 112528 - DNA, 210 bp, Glycine max
gcgaactgtgattgttcctcctgaaaatggctatggtcaaaagggaatgaatgagattccgcctggagctacatttgaactaaatgttgagcttctgcaagttgtagctacctgaagactagacctcagcttgactccattcttatgaaccggttgataattttgacttcagaatttgtagcctgtgaagctgcgactattattgttttt

SEQ ID NO: 112529 - DNA, 170 bp, Glycine max
ggcagttggcttggcccccaggagtctaatcactggagctgctgctgttgtcgagcattttgcagcgacgcattctgatcggaactgttgacatggacaatttgatggctctaaatgcattgtatggatgcttgtgcgtatgcgcacattgatgacactaaacgcaatgc

SEQ ID NO: 112530 - DNA, 171 bp, Glycine max
atttgttacttcatgtagaagagcttctcaactgtccaaatatattacagtatcagcaagttctaccacagatactgatttgtcaaaggtgccccaaggtaaagggaaccgaccacaggtgtacaaccaaacaattcagagtgatagaacttgctgatactgtaatatatt

SEQ ID NO: 112531 - DNA, 142 bp, Glycine max
ctttctccgaggaatcaccgtcgtcgttggtgagcgatggggaacaagatttattaggaccatgtgatgctgagatctctctaaaatgcttgcttttgcttcttctctctaaatctgcatccttggaatcaggcgagacaga

SEQ ID NO: 112532 - DNA, 188 bp, Glycine max
attcaacttggattgacttatcatgataagcattgaaatgaagacagtactagaggctgacatagaaacaagagtcaattcccgaaccacagcacccttactcactggtgaggccatctctcactagaaagcccagggtactatcttcatttcaatgcttatcatgatgattcaacttggattgactt

SEQ ID NO: 112533 - DNA, 250 bp, Glycine max
gcaatttaatctaattttgcatatgtgtatagcgcactatgacactaggataagtaatatctagaagcttttgaaattctttagggaaaaattacgtaatcctgtgtctaaatgactatgctatgctcatcaatggatcaaaaagctttttgtatggttggtatggttcaagtctctctgatgcatgtgtcttcatgcttgcgttaagaaacaaacaaaacttgggctgaggattgtcactttaactagc

SEQ ID NO: 112534 - DNA, 243 bp, Glycine max
gtttgaaaacaattccacatgacatattagactaggagtcttttctttgtgctattagtgacactgcatgtgctctggaatatcttagtttggcttcatatgctaattacccatcacccacttttcatactcagagtgtgattgctcctacccttcctatgggtaactgttttcttgttaaccaacaacttcatctcttgtatggttaagcccattttgtctcccaaaaatcaaaattctaag

SEQ ID NO: 112535 - DNA, 239 bp, Glycine max
cgggctctacacgcgtacgctcaaggagatcgaggccgtccccaaagacgagggctaccgcaaggccgttgagtccttcaccaatcaccgcctccagatctgccaggaggaggacgactggaagcgcatcgaggaccgaatcggatgcgggcaagtcgaggagctcatcgaggaggccgaggacgagctcaagctcatcgccaaaatgattgaatcggatccgtggggtgtccctgatg

SEQ ID NO: 112536 - DNA, 236 bp, Glycine max
ggaggtgtaatggagaaggcagctcatttaaacatgctgcagatcagcagctggcacggattctatactttaattgattcaattttttatattaaaaaaatatcttggtcaaatttggtacatgctaagaatttattaatcttgttaactaggttgaagaaaaactggatggtggacaagggaaaacttcagttaggcgcttcttttcaagattttgtacaccaatatttttggag

SEQ ID NO: 112537 - DNA, 252 bp, Glycine max
attccctcggatggcgagacaagaacaagggcaagcagaacggcactgatgagtcaacaaacggtaagctcagtaatagcaccgatcaatgggttgaaacacccaaaaaggacgactcgccaaaagagggtgaacagcttgtccgaacaccggacagagacaatgaactgagactagggacacccaggatggatagtgaggtaccaagtgtggaaatggcggcgaacagtacgaatgggctggaggaccagt

SEQ ID NO: 112538 - DNA, 226 bp, Glycine max
gccaaaggaattgaacaaattccttgaaaacgtgctggatacagagacatatctatggcctgatcgtcaacagcgttacggaactcgctggagaagagtacacccgctactacgagacaaccacgggccacaaggcttcgcatcttggccctgcatctctaataggcagaaccgctcaagagtaagcagagaggggacagaagagcgtggtgagtatgcacgagtg

SEQ ID NO: 112539 - DNA, 173 bp, Glycine max
acgagggatagcttcatcactcatagggcgttttgcgatctgttggcggaggagaacgtgagatctcacgctgttgtgaaagataattcggagaatgattccaaggttttaaccttaaccggtgattcgccaccgctgcagccggtctctgcaacggtggctactactactac

SEQ ID NO: 112540 - DNA, 111 bp, Glycine max
cgttgagattctctcttcgttcaactcaatccggggtaagaacctggcaatagctgcagtatctgaataggaatggattatatctgtttgtttgtcaccttcactgcgatt

SEQ ID NO: 112541 - DNA, 124 bp, Glycine max
cactgccattgattaacgggggcaagcttcctagtaacatctgaatagttgtgacttacctcgtggatggttgaaccaccaggcgacatacaagtttgagtagccaatgcttctaccctggaaa

SEQ ID NO: 112542 - DNA, 244 bp, Glycine max
gaagtctggacccaaagtgaagatgctccgctcttaacaacgtcatgattcaagaatctatcatatcttggcttttgctattcacctgttgattagcatatagttcagtgtctgctagactcatttatattctaatcctgtgagaatgagcaaaaaggatccaggagaaaagaatcctcactggcgtttcggcttttattggatgtgtgccagaattatccgtggccccacgcgacttctaaga

SEQ ID NO: 112543 - DNA, 248 bp, Glycine max
ggacaagcctggacgcctagtggaggaggagatcccatgatttgggggaagacgaatccaagcacaacccccgccaatcgctcgatgaaaaatctaaaccaaaaccctcagcgttttcaagggctccggagggattttatgttgcaagagaagaaggaagactagtcagacaaaatagaagacgagaagaactgatgtagccatgttcatgcttccatgtaatagttcattattccatacatatttct

SEQ ID NO: 112544 - DNA, 200 bp, Glycine max
atatcatgtgccatgatatttatcacaaatctctgattgtcaatgggccaactacaagtattggctcttacaaatatgggctatccagatagagctgcgttattggataaaatgatagttgcagaagtcagatctgcggtttgtacatcaaacagccatacacaagcttgtttatgcagcatcactgaattaatcaaaaa

SEQ ID NO: 112545 - DNA, 272 bp, Glycine max
gggatatatagtactttatgtatttatatggtacgcaatataaatacatggagtactatatatcccactgcaaacatcttcgggagatatagtactttatgtatttatattgcgtaccatataagaggcccaattatgttgtgtggagtggagctctttgaaaagtgatattttccctaccccatacgttttgggggcgctttaattattctattctagttttcatttgttacatgtacttaaatttgtgttaataaattaaaattccactc

SEQ ID NO: 112546 - DNA, 100 bp, Glycine max
ctcgcttcttaggttagccgagcgtcatcgatccagaaacgataaaggcagtcataaagtgagaatggatctgtgtgctgctcatgcgaagaaccttttc

SEQ ID NO: 112547 - DNA, 274 bp, Glycine max
tgaatattcattctcatcttgctttgcaggttgatgaagaagtgggtggatgaggccgagtaactcttgatgatgcgcaaggcaagctgtagtgtggaccaagtcattcaagtttgggagtgattgcggaaatatcggtgtactgtgtctgacccatacattgcaattattgtactcgtcatgataaaacaccaccaccagagtacttagataatataacccctttctcacaaacaccacttttggaagcaaagacagacactagctattcgaa

SEQ ID NO: 112548 - DNA, 238 bp, Glycine max
cttgttcacccttccccttctccttacttctcactctctttccacaacactccctttctctttccccttacccttcttctgtgtgtgatgatgtagatagagaataaaaagagaccagtgtgcagtgagaaagactttggcacttcttgtgtggctttgtattgttctctatgttggaatttgttgatgggtgaagagggagaagaggtgtcaagagataaggaccagcaacacatgg

SEQ ID NO: 112549 - DNA, 225 bp, Glycine max
aacaacgaaaacaatattaattctccctttcctggcttcggaaagagccctgcttctgtcagacagctaagagtcaccgactcacccttccctctcaaggacgaagaggatagccaagtcgacgtggcagccgaagattcattaagaacttctataaggacctcaacttgcaaaaaaaaatggcatatcttgactccccctatcatatttcctggaacagatgat

SEQ ID NO: 112550 - DNA, 242 bp, Glycine max
atgaagccgcaatgatgactgctttgagctcactcttaactgcattggcttggccagctgcactactgacagcaactgactttatagacagtaaatggacaattgctattaacaggtgtatctcgtctgctgattggtctagaataaaacatttgcttggaagtggagaagaagcttctgcttgctggtgttacttaatatcatatatgcaatcaagggtgttagatggttagaatatcagt

SEQ ID NO: 112551 - DNA, 257 bp, Glycine max
gttgatatatagtagtgttggatgttgttggggtaatggggtttgatgttataaagtatgatgttagaatgttgagttagatgttagaatcttctaattctgaattgaaagtttgaattcccagttgtgtttggtatgagtggaagtgagattgaatatgaataaggtaagtgtttggagaatctgaagctggcattgttgcattagaccttgtttggaatttggatgagtttctcgataagcacttacaggaaaag

SEQ ID NO: 112552 - DNA, 262 bp, Glycine max
acaaagaataaggtttctcattagaccaaatttagcagatcttctcctttcttctaggattaagaaaaatttggcctctaattagatgctaaagtctcctttccatttgagtttgagatgaattaacctatcaataaactattggttatcttagtgttgagtccagaattggttcccctttcttctctcagttgacaaatgtggagttctgtgtttctctcgaaaggtagttgtagcaaccatctctttgtcttctcttcct

SEQ ID NO: 112553 - DNA, 264 bp, Glycine max
atccctctcaatatcacttgaatttttattttttttaatctttctctctgtttgcgtgtgtttattggtttgggagtctcaataattttccttcccctggttcttttgttttagccatatgatagctagatgatattttatttcgttactagctaatgttcatttttgttgtttgtaagaaagaccacttttttccagttattttacaactaacacttgttttattttggttataattttaataggaattcagatcttataatc

SEQ ID NO: 112554 - DNA, 173 bp, Glycine max
ctccggaggatggcacagccatatgacaaggcgggaagcggtgacaagaaaacgctgttaaccgaggaggatctggagaatttggcgcaggatggcatggcgatgtaaaaaaatgagggtattgttgtcatttctttttgtagccattttatggcggtagataacttgtttga

SEQ ID NO: 112555 - DNA, 253 bp, Glycine max
atggagaacagcggtatttcgagcactgatgagaattatgctgaaaaaactggagatgatatcttgtttgaggatggcgttctgattgagaatgggttagccactgcttatgaacatgatttgcttggggttggaaggccctgcagcagctgctgatgagcctgggtttcaaaatggatacaacatgaaaaaggcataatctattgccatatatctaatgttcgtatgtcgcaattcggatgcaatggtgttg

SEQ ID NO: 112556 - DNA, 258 bp, Glycine max
ggtaacaacaatactctttcatttgttcctctctggtgtggtagtgaaggtgaaaatgatgaaaaccataaacaaagagaaacggtgataatcaagcattatgtgtttgatatgatccaatttctatcgctacgttctttctgactcaccattcccacacctctctttttaattcacttatttaatcaaataattgaataattttacgacacgaagtcacgaacgaacatgttgatgcgttaattagctgttgttgca

SEQ ID NO: 112557 - DNA, 240 bp, Glycine max
ctaccctgaacatagtaaagaagccagtgctaggatttgttagtgaagcaatggctcaaaccatgttgctcatgtctagtgtctctagcagttattccgtggatttgaagaaagaccttttcctccaattgcagagtcaaagtttaaggcctaagttctctcagctctcattcaacccacttccatcatcaacttcttccttttcttcaccccgtacattcaaactctggccctcttcaa

SEQ ID NO: 112558 - DNA, 229 bp, Glycine max
gggtggatctaactgcagagatggcagaacacaagatgagttaaggtgatgactccatgatttctcttgttcatactgtcgtctagtctacacatacggcacacaggctcaagccagatggactagagagtgaaaattaatgaggacttgattcccgaatttcacaatttaactcgcattgaattcagctattcggaacataataggaactggatggagggttgaaagt

SEQ ID NO: 112559 - DNA, 169 bp, Glycine max
gctaaatcctaattctccttcatttcctaaaagcttcgtgtgttgggcatgacggtgtattggtcctactttccttttctctaaagtattcctctgtttgaacacgaagctataagtctacaactataattgttgctagttattcactgataattactatgattaacgt

SEQ ID NO: 112560 - DNA, 256 bp, Glycine max
ctctcgagccgaatcggctcgagcttcatgacctgtgcccaggataactccaacattaatgacgctgaggaaaattcctgcaatgaaattgacgagtggtcatcatcaccgcacatggataaattggccaatcaagtgagctccactggctattcttcccagatgtttactccttctcgtggacaaagagttcaagaacaagggccggattcttttgatgttatatggtgaatactttcttgtctatatttttggc

SEQ ID NO: 112561 - DNA, 103 bp, Glycine max
gaccaggacctccctattctgctcaagttcataggttgggtttttgagtatattcccagattcaagatctaaaacccaacctatgattttgaccatgacctcc

SEQ ID NO: 112562 - DNA, 100 bp, Glycine max
gcccaagttgttggtaatgcatttgttgagcagtattaccatattcttcaccattcaccaggttcggtctatcggttttaccaggactctagtgtgataa

SEQ ID NO: 112563 - DNA, 243 bp, Glycine max
ttcagtctcactcttacgctctcgctctttgtggcagtgcttcctctccctctcactcttgctgtgactctctgcggtggtgctccccctcgctcttactctccgcggcggtgcttcctctcgttctcactgttgctctcgctcacaaccatctctgcgacggtgacgagaatgcatggaatggggccctggaactggagccatccaaaagtctcgcacaccacaaggtccaagttcaagttc

SEQ ID NO: 112564 - DNA, 156 bp, Glycine max
aaactgggggatatatgctgtttgtgccagtgtggaatcccagatatactctcagtgtaatgtatatgaagcaggaactaagaaaaagacttttgaattttatactgagaaggcggcagataaagaggagcagaagtctggcttcataatatcaga

SEQ ID NO: 112565 - DNA, 248 bp, Glycine max
caatttcaagtctcaggtgaggagtagttttgacatgtaccaacagcaggagtacgggcacacctggctgctccgaatgccattgccctctcgccagttcgagtattttgacactgtgtatgcaatgatggaggattgttgagttcggttcgtgccttgcagttgctgctgttgaatgagaacttcaaaatggcgtcaattgaaaacccgaatgcgagggaagttgggggcatgattcgagatgtggg

SEQ ID NO: 112566 - DNA, 110 bp, Glycine max
aagattagtttttccgctgattctcagcttaattgattagcataactcgttttccagcgttatctgtaactggggcatttacagctacatttttggtacttccgccaaat

SEQ ID NO: 112567 - DNA, 243 bp, Glycine max
gattgcaatcaccccgagtctgccttaattgcaatctctttggggtctgccttaattacagctgcaagggtggcatttatttcccaatcatgtcctttgttaacagaagttctatagaaaagttttacttatcacttccgggatgcagatctagtattgtgtgctaataaaaagataactcatactggtataaacctttcttattcatgttagttttgcagccttcaatacttccaattcaga

SEQ ID NO: 112568 - DNA, 99 bp, Glycine max
gtcaaaactaatgtacacttaccacttgctatttgctaagtacatattctctttgcatgcctaggtttgcgggctagcaggtaatacagctgacatggg

SEQ ID NO: 112569 - DNA, 252 bp, Glycine max
gtctctataaaacccaaaactcaaccccacccagaaacagaaccctcttcttctacctctctctctctctccagattcttccccttccatggatgctttgaacttcctcaaattctggagaaacgccaccatgagcacaacctccgaaccccaccttgttgttgaaaccgacaccgaatccgacgaagacgactcattcttcgacttggagctcacgccactcgatttcgacaacaaagaaaacaacaccaa

SEQ ID NO: 112570 - DNA, 248 bp, Glycine max
gccaagataatttagtgaaacccaattggccttcatagttcaattgtgatttgtcaggtcctttgcatttgcaatgtctaaaattttatcgttgttctgctaatcattgatcagccactaataaaaatataaggctgtattttctgttctaatctcaagtgtacttcttgattttgggcatgatgataccctataacaggaatatggaggaaggatgttcaaaaaatgtggcaagaaaccatcaaaat

SEQ ID NO: 112571 - DNA, 244 bp, Glycine max
cttacaactagtcaatcaactccatcatcttcagccataagctatgaatgcatgcatgatgatagtcctatgtcaacctcatgcacatctggatcaccatctcgaccatctaacaacaatgttacggtggaagcaacagaggaaagaaatgcctgtaaaccaagctacatgaatctgacagcatctaccaaagctaaactgaaaccctataggtgtttttctcagaatgcgaagagaatcttta

SEQ ID NO: 112572 - DNA, 261 bp, Glycine max
actcactctccttctcgttttcgatctcgcgggtgtttgtgaagccaaaaactttcaagaaagacagaatccgagtttgctttttgctgttaattgcttcgtggggagagagtggaagtaaaaggagaaaaattcatttatgttcatattcattcgaattaattgcattaattttaagagaagaagaagaacaaaaaggagcagttttttgcgatctgggtgtgcgctgttttttggcgtcatttgatgacaaagcgtcat

SEQ ID NO: 112573 - DNA, 243 bp, Glycine max
aaaacatttgaatcaaaattttaaaataataaccatggccatatatagtttaatcaaagcccatatgtttatttattgatatttatgtaaaattcaactaatttaaagataagattcgctaaataaagaatgtggctcacataaactatactcaaataaaaaggtattaaatagcatattagtaacatttttctaagtgaaatgtcactatatgtttaactattaagtgtaagtttgtgtgag

SEQ ID NO: 112574 - DNA, 247 bp, Glycine max
gtataggactatatataggtttttattatagggtatcctactgcattagctacaagataaaataaactccacataagctttaagcaggtttcttgtagctaatgcagtagtataggactatatataggtttttattatagggtatccttttgtgaactcaaagacctcgttttcaggggattttctgtttgatgtccttaaggattatcaataatgttatatatggtcttggatacagtcttgactg

SEQ ID NO: 112575 - DNA, 253 bp, Glycine max
tgaaaatgcaaacaccacacttgagcaaatttccatgcttgcttcccctgatggggacactatgcagcgaatcgcaacatattttatggagtcgcttgctgatcggattcttaaaacatggcctgggatccacagagccctcaactcaaccagaatgactttgatatccgacgaaattctggttcagaagcttttctttgagcttttccctttcttgaaggtagcatttgttctcacaaatcaggccatcatt

SEQ ID NO: 112576 - DNA, 250 bp, Glycine max
caattgcagctcaatttctgggatttgagaaatttatcccaccctttgcaaacactagtggttcagacatacttaaaggtgttaactatgcatcaggtggatctggtatacgcaacgaaactggctggcattatgtataaatcaaagagtcttgtttctttcttttcttgatcttcaattggtttatggtagagcgcttgtgttacaattctcatgcatgctactaaattaacgcaaatgcagggtgctg

SEQ ID NO: 112577 - DNA, 248 bp, Glycine max
cctgactaagatgttggtgaagtctggtgttacccaacctgcaacagacactgcctagtttgctattccatgcctggtgcactttaattatccctatcttatttatttgtggtgcttttggcattagaagacagatattggctcaaacatttttcaagcttaaacattttgcatgttggtaatgctaatggctttgtattgggtacatcttgattttaaagagagattgatggtatgcgttctatttg

SEQ ID NO: 112578 - DNA, 242 bp, Glycine max
  unsure (1)..(242): unsure at all n locations
tttgaatcttattatatgtaacatttanaatatattcattttgaatcttattatatatataaaaagattcaaaatgaatatattttagttgttacatctaatatataaaaattgtacggatataaagattaaataagtaattaaatcaatatatataaaagtatatctaatgacactctagaagtaagaaaatgttaaacatatatatcttagccttaaccatatacaattctatatggtta

SEQ ID NO: 112579 - DNA, 253 bp, Glycine max
cgttaagatccttcttttttttccttttcttttgagatgttcttctctggtgtcaaaccctaatttttgttttctagtaatttatatgaaattgttgatgaataagatgtgcatcatagagtccatcgtttttcctgtaatgggtatctctctattcctccagatctgattcaattccgaattttccccccttttttatttttccaaatccacttttctttttgtgaggctttccaaatttgggcagtatttg

SEQ ID NO: 112580 - DNA, 249 bp, Glycine max
caagttgtggttcctttttattcaatattcatgaacccctaaagctttgatatatcttcttgcagtggtggcaacccatgcagaaaccttgccccctgaagtttactggaagtcgaagcttcccaccactccaatgccgaaagccattacagatatccttcacccagatttggcagaagacaaaagcacctctgtggccgtaggaaaggggggcgtaaacgttaacgcagggaaaacaaagccaggagg

SEQ ID NO: 112581 - DNA, 240 bp, Glycine max
atgaagttgatgttggtagtgtgaggacggtgcaagatgagaaggtggatttgaggagtgggaagcatgacagttctagggatagggagaggggtggatctgctaggagtgagcatggggagagtaaaacctctggtggtggtgatagggttgtgaagtctactagtaaggaggatagaagaggggattctgagagagggaagagtaaggggaagtcggattcgggggatgttggtcgtg

SEQ ID NO: 112582 - DNA, 238 bp, Glycine max
aaattctcaaaagaaaagagatggggttgttttgtcttgtctcaccacagattcttccagtgaaaccagtttctgtggatccagctcctcagtttctactgaagaagctaagacaaaagggtcttcttcacctgctcctcttggttggcctattctcaaggccacaatctccaagcgctctaattctgatgaaaaagaaaacaaacataaatcccacttggaagacaaaaagtttacc

SEQ ID NO: 112583 - DNA, 236 bp, Glycine max
gtcagaggtgcggtgctggcgagagttaaagaatgcttcactctgtcatcgagaatacatgagttgtggagaccgcaatcaaaaaaactttacacttctcaatcttcttaatcagacactattgaatcaaacagttcttaatcaaacttgttctttggttgaccctgatacaatcaaagacccaaaaaccttcaattttggaatattttctgatgctctagattcacatgtggtag

SEQ ID NO: 112584 - DNA, 235 bp, Glycine max
cattgctgtaagtggcaaatttgaaaagtgtttctctctcacacattgacactactccttctttctctctctacatttgaattcaatcgacccgccgctctttctctctctaaattcgcaatgagcaaaagagctaataagaggaaagcgaagcaagacgaacagcccaaacaacgcaagaagcgatccacaacaattaaacctgccgagcacgaagagtacttcgaggatcagc

SEQ ID NO: 112585 - DNA, 238 bp, Glycine max
aatagcatcatcaatggcacttccttcattgcaaccccgcaacaccaacctttcaaaagtttcaattttccaacgcttaacacccccaacaaccttaattccctcatgggcatgttcctccaaacccaataactccaccaccctctctccaatctcctcaaagtttccatctttcctacgctgctccacaaaaccagacaccagcgccaacagcgagacacagcacaccaataatccc

SEQ ID NO: 112586 - DNA, 232 bp, Glycine max
aagggtttgggttttattttgaatttgtttgggtttcgactttcaggacatgacttgtatcaagtaattttttattttttttgctccttatattgtttaatccatgatttgtgcaattgggtaactatcatagttgtatctgcaattctgatttagggttccagtagagagaagctctcaaaagcacttctggcttgtatccaaacaggcccataataataataacaataat

SEQ ID NO: 112587 - DNA, 227 bp, Glycine max
ccggttcctgtcgaaatcctcgacgaccacaccatctccttcgccgacatcggcatcgttgccggagtccaagaaaccaaaaagcggagaataaaccaaacacaaacacaaaaacctcccaggaaaaacgacaactatgtcaactccgaacactccgattcggattgtcccacgttgccaaccgccaccaccccgacaacctcggagccgaagaaaagagggagaaa

SEQ ID NO: 112588 - DNA, 228 bp, Glycine max
tgcgaccataaatgatgttctatttgcagttatatcatctgggatatcaagatacctagactttcgagcacctaatgggctgcgagatggtgttcagctaacaggtttagctatggttaatttaagaaagcatccaggattacaggaattatccaatatgatgagaagtaattcaggagcaaggtggggtaacaaatttggtatgattctcttgcctatatattacca

SEQ ID NO: 112589 - DNA, 225 bp, Glycine max
atttatatagataatacatctgatactctgcatctgcacaataaagtattaaagaaaatagaattctagtcctgtatagaataccaaatttgtattaagaggcttgtttattactgatctaggattacactcgttgccttttccatggccaatcatagctgttgagtgattcatttgttctctttgagcacagggcattgtgttcatttaaaaccttttacagtt

SEQ ID NO: 112590 - DNA, 230 bp, Glycine max
atcatcattttcactattttttatgttttgttaatttgtttctcgtttttatgtaatattattttatctggcgcgcagattcagaggcagttgattggttttggatcattgaattattagcacagtaagcattgatcaaatgctcaaatcacaacgcaaataaaaagagggcacaaagtggaaacgttgtgttggaagtgaagtgattattatggagatgtctctgcagc

SEQ ID NO: 112591 - DNA, 255 bp, Glycine max
gaggataacaatatgatggtgactagtaccgtagcccgctacagcaccagaaattaatcatcaatctatctaaaattatttatatgtgtccacgctctcaagatgtaatatatgtatcctgctacctattttgtgatgttattatttatccttgggtttctttttcacattttaatcggatgttattattatgttggtggtggtgcagaacaatggcagtcatggaagttgtccaagcaagaacacagcaaacaa

SEQ ID NO: 112592 - DNA, 255 bp, Glycine max
aaaatttttaaaaataaaaaatttattacaaaatattcaagcactttgcaaaaggacccttgagccctttataaacataatgcttcttaatggcttataggaacttaaaatgcttaatcaaagagagaaaaagggggacaagagaggagggtaagatacctcgcaaagcagcagggtgaagtggttgtagatctgtatagggcgttggtctggaatacctataggtaatggcattgcagccaaggaaaatgctat

SEQ ID NO: 112593 - DNA, 229 bp, Glycine max
atctttcagttttccttgaacctatggacggaagttggagtgagggaaaaaggagcatgagttacaaggaggaggatgagtacgaagaagaggaagaggagaagttaattaataatgagattattgtataaaaaagagggtggtgagtaataagagagggtccaaagctggaggctcagtgccaccttatgtcaagttgatggttgcaacgctgatctaagtgaagcta

SEQ ID NO: 112594 - DNA, 243 bp, Glycine max
gttctcttttccttttgaaaatgatctcttatattagagcaatatttatagagggtttggtgcaacattaaggttgttgccttgtgactctggttatgagttctaatagaagaagcatcgtgtttcatgggagtaaggttgcatatatctaaccctccaaaatgggtggcaacctaggaacttttttttacctagataatcttttgttgttgctcagctatttttcttgtgtatttatgcaga

SEQ ID NO: 112595 - DNA, 245 bp, Glycine max
gcatctcggaatcccctttcttcatcgcatagatactttcgctagcccaccaagtaacccttattccaattcaccctcgccactccttagatcgaaatcattttttttcgcccggcacatggatcgagatcctctcttgtttctctgtttcaatttggattcgaatttgaatttcagttatctcgttttcactgccagggttgtgttttatttttatttttttgatttgatatttctgcagagtt

SEQ ID NO: 112596 - DNA, 174 bp, Glycine max
gtttcatgtgtggtagatttgagatctagaagtaacatatatgtgttcttcacctgctgtattttttactattttttttataagccttcacctgatgtatttatctcagatctggaagggaagtggattgaattaatagataaaattttcattttatgatattatattggagtg

SEQ ID NO: 112597 - DNA, 271 bp, Glycine max
gaaccgaggaatgggtttcacaagcaagctaaagccctcgaggcctggtgtgtccatgaagctccgagtccgtgatccgtgagtagcttctctccttagttaacttcacctacctcctccgttatctgccgcgattcggagtcctggttcaaagaaatttccccccttcattaatttctgtggttttgctcgcttgatttgcatgtgatccaatgttttcccatgcatcctgatcgatgcatctgtctccgccgcatgatgacattaggag

SEQ ID NO: 112598 - DNA, 249 bp, Glycine max
ttcttttgtagattatatatactccccatagaggctatctgatttctaaaagaatccaatgagtgtctcacaaaattatatatcaacagcatcaactgggagagaaactgtcctgtgcaaagagtgtggcagcaatgagcctgttgatatacaattttgtgagacactcattggattcttttgtagcattatatatactccccatagaggctatctgatttctaaatccctccttatgtgtcataggat

SEQ ID NO: 112599 - DNA, 269 bp, Glycine max
  unsure (1)..(269): unsure at all n locations
ttatggtatatgactggagttgccatattttaatttccatgtcaaacaaacagatttgtgccattttgaaattttacttcaatcagaacttcttttgtatttcttgaggttttgaacagaatttagttgagtatttaggcattattgtcagagattgttgaaagttttacatgttcgctcgtggcttggaanagattgggaataacttgatagaatgtttttcgttggagataagtcaacaagacacattggagtaagttagcaatatc

SEQ ID NO: 112600 - DNA, 265 bp, Glycine max
ctccaatttgcattttcatttcatttcgctctcatttcccatttgcatttcatcaccgatcctcaatggacgaagaagcagagtcagtgccccatccacaatctccgaaactagggtttcccctcccctcctccgccgccgctgacggaaacctcatcacaggcctcagcaccatcatggccgcatcgattcaggacgccaagaaccgcatctcgcagatcgagcgtgtcttttgctctaagctccaccctctctttaaatccga

SEQ ID NO: 112601 - DNA, 264 bp, Glycine max
agcagctgcaacaaaatcaacacacactcattcaacagcagaatccccagttccagaggtctcctatgatgcttgggacaaatcagctttcacacttaaatccagttggacaaaactccaacatgccattaggtaatcacatgctgaacaggccttcagctctccagcttcagatgttccaacaacaacaacagccacagcaacagcagcagcagcagcctcaaatgcaaaggaaaatgatgatgggactcggacaagctgtgg

SEQ ID NO: 112602 - DNA, 254 bp, Glycine max
ctctctgttccaaaaccctaatccttcgtcttccaaggagatggctgattctcccctcgcaaggaactcaaggtcaccttccccatggaaagcgcggtcgagatcgagatctaggtcaaggtcgagatctaggtcgaggtctaggcctagacaaaggccaagatcgcgttctagaagtcgtggcagtacccagtcaccaattcatggaaggtctgaacctacaaatcctggtgcacacactttatgtaactggt

SEQ ID NO: 112603 - DNA, 256 bp, Glycine max
gtcttggcccagccattcacaaacatatgagagactagttcctggttggttctcctgggttgataatcttacactcttattaattcaaaaacacttttagtttattgtcataattctcatactatcgttttatgttgatctattttaaacaaattgctatttcacaatctgtttgactgtatatggcaatttttgtgctggctataatatgggttagggtggtgatccaacttttgactattggaaatctaagctc

SEQ ID NO: 112604 - DNA, 260 bp, Glycine max
gtcaagtcaaggtggaccgcattgaggctgatttgaagattctaaaattacaggaggaagtaatgaaacgccatccttccattgaagatagacaacttgttgaagctcagctgcttcatcccgaagacttaattaaattgtgcctggaaggtgaagatcgagaactctcaatgtcggcctttgatgtgtttgcatggactagttcctcatttcggaagatccacagaaaacttttggaggattgttggaagaaagctgct

SEQ ID NO: 112605 - DNA, 175 bp, Glycine max
ctttctctttcattctctctggattagtaacttcagttgtgtcttctcttccgacgacgacttcatcttctcttcgtcgattccgccgtcgcgagatacgactccgcccttaacatgatttattttccagatctgggatccactccacccacatctacactgacgctcctcctca

SEQ ID NO: 112606 - DNA, 185 bp, Glycine max
atttcctatgccagtttggactgcatgcattcggtgtggcggtatgtgagctacagttctgccatcctgaggttgtcccaacgtcaaagaacttctggaatccactatgtgcatctctgcagaatctgctgaggtgcagcgtcgacatccgaatcaacctatctcctatctccggcaacggggcg

SEQ ID NO: 112607 - DNA, 252 bp, Glycine max
caagggtggaacgcattcaattgaatttgggatagtcttaagaagaaatgattgtgttatggtaatcccaatatctcatctctgtttctcaacactctctctctatttggattcaaatcccatctttgttgcctcgatcactccgctttgaggagttatagcaactattcaatggcccttttctttgttgctgtgtaaatggaagcagctgttattgcacgattttttcaagtatatcagatatttgctggg

SEQ ID NO: 112608 - DNA, 248 bp, Glycine max
caacaagtggttcgggaggttctcctgtctatgcttcctccaggtgcgcctgcccagttccggaaattatttccgccaacaaaatgggctgcagagtttaatgctgctttgacagtgcctttcttcgactggttagttgggccatctgaggttatggaagtagagataaatggagtgaagcaaaaaagtggcgtgcatataaagaagtgcaggtacctggagaatagtggctgtgttggaatgtgtgt

SEQ ID NO: 112609 - DNA, 161 bp, Glycine max
gcactcctcttcaaccttttgtttatctgttcttgcttgcttcatcttccaatctttgctgcccattgtggtttcacaccttctatgtgaagagagagagagagagagcgatttagtgttttgcagtgtggagggaatactgcagaagctgagttgagttc

SEQ ID NO: 112610 - DNA, 133 bp, Glycine max
gcgtgtgactgctcgatatggctctcgtactcgacgtctcattgtgttccacttgtaaaccccatcgttctctctcaacctccaatcgcaacaaagcgtcttctacatatcctcttccgctacctcttctggg

SEQ ID NO: 112611 - DNA, 234 bp, Glycine max
caatttcttgcacttcaacggcaacacaggaaccggagcagcagcagcgaaacgcggcgtttctctggagggtgaaggttgggggagcgagtgttaggttcgggagcattctcaacgagttcaacagagccgttaggtctcattgtgataggatcccgattgggttcgcctcgcttcgagtcggtgacggtggtgacggtgctgatggtaacgggaacggcgaggggaatgggg

SEQ ID NO: 112612 - DNA, 245 bp, Glycine max
agaacatgctcatcaatgtgttgaccactaccatgcatcgcacacaagtatcaccatcgtgtccgtacgatcaaaataaggtcaacagtcaaagttagagcattgaaatcaaacggtgaataactaaggtttagaaatgttaatttgtattgtcttagtagattccatgatcctagtttctagttaattatattatgggaatgtgttggagaatatagatcatataagcttgtcagcattacaga

SEQ ID NO: 112613 - DNA, 249 bp, Glycine max
caacccctccctcacttgcactccccgtgttttatgcaaattctgcttgatatatactccatcaactgatgatataacaacgaattttaataacttgtcatgtcatcaagcagtctaatgagatcatcaagggtaattttttgttgttaactgtttttaattgcttaaaaacttcttgacatcatcaattgttatgaactgatgcgaaattaaaaacacaattttttcaaaaacaataacacgaggttg

SEQ ID NO: 112614 - DNA, 239 bp, Glycine max
cagagaaattctgactctaataccaatgtgtccagtaccatgtctgatagtcgaggcagtgagaaccaagggagtttgggggatgcaagtgaaagtgaaactgattatggtacttggtcacatgatcagattggatcaaggaatgcacatggggatcataatgggtctagcagggaacaatctcctgatcttggcgaagttgagagggagagagttagacagattgttcagggatggat

SEQ ID NO: 112615 - DNA, 182 bp, Glycine max
atcccagaagctggaatattttatgaggtttatcaatcgattaacagtttttggtaataagatcataataataaccaaaaactgttaatcgattgataaacctcatgaaatatcccagaagctgggatattttatgaggtttatcagtcgattaacagtctttggttattattatgatctta

SEQ ID NO: 112616 - DNA, 192 bp, Glycine max
aacaccattaacaggcccagatggcggttgatggctcaggaatcaccctctcacgactgcagacaaagccggcactgctggcttctgaatcattgacggccctggaaccgtacaggattttgccaagatggagcttcaagaaattgcaggacaacattcgaagtcggatgaacaaaatcttcttacacatgg

SEQ ID NO: 112617 - DNA, 253 bp, Glycine max
ttgaaattaccgtgcaagatttgatgagcaagatagaaattactgagagcacaaggggaaaagatagcgagtatgataccgtgaaaggacagcttgaagctactcaggaagccatcacaaagttgtttgatgccaaccagaagttgaagaagaatgtagaagagggtaccttgtcctttgctgggaagtctacagcagaatcagatgaaagtggaagtgccagcagaaggagagttttagaacaggctcggag

SEQ ID NO: 112618 - DNA, 234 bp, Glycine max
gaagagaagagagatagggagagcgagcgtgagaggaagatcttcgatttagggttttcaatttcgtattcagcaaggcggcgagtgtgagatttttagagagagagaggtgaggacgctgagtgctctgctgagagattccataaccccaagaggaagaggaggaggagaaggtggatagattttttttccttttttttttgtgctgtttatttatcctcagagcggtggata

SEQ ID NO: 112619 - DNA, 203 bp, Glycine max
ttgcatcatctatattgcatcatatacatcgtctttcagtgatcattaatcaaatcttgtggggttacctcattttgacaatctttctttggtttcacaccattattctattagtctcatcacaatataacagatcattagtgtcggtattatcatcatcatattactattggacttcctctgactacttctaggtttcgttt

SEQ ID NO: 112620 - DNA, 245 bp, Glycine max
ggcgaaggcgtttgaaatcgagtaaatggaagcgacattctcttcaacgacggcaagaggatactggaatcagacacgtggttcgacagatgaggctcgcgatcggaaaccgagttcactgtccattgcgcggcctagcaagttcgtgcagctgtcacttgctcgaaccaggaagagttctttctttaaggtgttatctgctgaaaaggaacaaattcacgttgtagagggaagtcgtgttgatg

SEQ ID NO: 112621 - DNA, 237 bp, Glycine max
tctcgagacgctcagccgattcggctcgagcggctcgagcggcgacttgcagccctttttacttcttatgcttcctataatcaaagcatctacttacattttgtaggagtgcatgtgttaagtattcttcaaataggttaagcattgatgtttgattacatgaaaactgttatgctaagattaggggttctaattataggttctaactaaacataatggtgatgatgacagataaat

SEQ ID NO: 112622 - DNA, 249 bp, Glycine max
gttgccaaacctcgctgaaaattagggtttcgtttcggaggtagacgaagatgttcgcaagggtatcgatgaacattccctccaccaggtactagcacatcgtctccgtcccaaactaagcccaaagctaaggtccgccgccacaaccaccatcgtctgcagcaccaccaacaacaacaacaacaacaacgtgtcctccgacctgaaggcgttctccgccgcgctggccctctcctccatcctcctctc

SEQ ID NO: 112623 - DNA, 243 bp, Glycine max
tctgtttcccgccatatatccaataagctttaaccatgtctgcctttgttggaaagtacgcaggtaacatgtctcatatctatctcctcttcttctcttaatattactcactcttgcatctctcacccacacgtaaacaagaacaattcttcattgaatgaagtacaagcttctcaagcattccactcattaacaaacaagaaacgatggcctacaaatgtatcatatatagcctcattagtt

SEQ ID NO: 112624 - DNA, 240 bp, Glycine max
ctgatcttcacactcaacaaccctccaaccaccgttccactgctgtgaccaaccgtcttcagagcacccggggagtagagaacacaagtattaaaggtgagataggaatagtgagagaagagtttgcagaggggaggcttcaagttcgtctgtgtatttcctccacccttgctattatttcaacttagccaaagaagcattcctcaaatgtcttggccttgattctacatcatctaaatc

SEQ ID NO: 112625 - DNA, 238 bp, Glycine max
taattgtgttggttgtttgccccatcttgtatggtgctgctgttgaatctttacgtatgtggagtttcagttagcatcttgttagtgctatttgttaaatcaggctacttgttgatgctatttatcacttgaatagttttgcttcatcttgcattgtcctggaggagttaaatatttgtatgggaataataacttgctttggtgcttcttttgttcattttttttctcccgtgtttca

SEQ ID NO: 112626 - DNA, 231 bp, Glycine max
tgcaatttgggaattgccatggggacgatggaggatcttccagcttcggtgttggcggaaattctgagtcgttttacggacacgacggatgtggcgcggtgcagggtggtttcgaagagctaaacgcggcgtcgtacgaggttcactcgttgaacctggtgtgttccatgtcccgctacctcaagtctcgttcgccggagaccaagcacctcgtcacccccttcaagaccg

SEQ ID NO: 112627 - DNA, 222 bp, Glycine max
agcgatttcgtcagtttcattttcaaaaccatttcatttaagctttttggagtagtaaatatatcattatcaaaatcgagcatgttggttttaataatttgtgtgagaactgaaaaagtgaattgtgaaatgggttggaaagctgctgagaaactcattatgcactggaaagttgtcagaggggataatgttatgataataaggggcaaagataagggcgag

SEQ ID NO: 112628 - DNA, 241 bp, Glycine max
acagtgttcagtgttcagtgttcagtgttcagtgttacacttcacacagacaagaatccaagacaacaagggaaaccagacacatcattaacacacgacacaaacatcctcactactcttccacttcattaagttaagtccttgtgggtcagggagcattcaagcagtgaggcccaactaattaacctgtttctctttactggatataaggcaattaaaccatgcaaacaccaaagacaag

SEQ ID NO: 112629 - DNA, 234 bp, Glycine max
attcgagccgaatcggctcgaggttaggtcttgtgtcttgctacatgctggtgagtggtagtgttcagcttctgctatcactttggttttcagtccctttctctaaatggaatgtggtcactttatgatatttttttgagatttgtattgaagatgttaaaagaactaatgtaaagaaaattgagttttgtttggggatgacattttaaaagtgggttataagaagaattgatt

SEQ ID NO: 112630 - DNA, 240 bp, Glycine max
accgcttccgtggatacagagcacgtggcagcatcagctgaaactgcgccggttgatgctgacgcggctctcggaccaagagcccgtggacggccgaagaaatatgctgacgagatgattgctgcggccgaggcaggggacattgccgtgggcgcggtggcggcggaagaggacgagggagagggcgtggtgaattgcctgcacagcccagaaaaccaggggcaaggccgtgggtcgtcg

SEQ ID NO: 112631 - DNA, 110 bp, Glycine max
aagaggaagaggagggtatcggtaactttgttgcagatgtgatgtagaaaacatcagacttcaccagactgtaccagaatacaaataggacctgttaatgtattacaatt

SEQ ID NO: 112632 - DNA, 142 bp, Glycine max
atggcttcatgtaccgcacctccctccctcatgctcgtccactctcaagacctatgtccctctcttcggtccttctctcacaggcccatgtctagaaccaccttctctgtctatcctctccttttgaagccctccaaatggc

SEQ ID NO: 112633 - DNA, 250 bp, Glycine max
ggaatttaatggctggtaggttgcctggtgttgggttgcttgcaaggaagagaacagagaagaactatagatatgaacaccaataccttcccacatgtcgacactcctattacccaagagaatcgtcatcattcgacccaccatggattccactcacagtcttagatgaaactgctctcaaggccagacaaaggcttcacaagaagcttgaacacttcttttcctcatacaggtcaagtgagaatccaaa

SEQ ID NO: 112634 - DNA, 263 bp, Glycine max
aataaatcaagtgtataagatgcaaaccatgttatttccatatgtgcatctatttgatggcaattcccgttgtcgctttaacaatttagattgagagttactactagttaaggattttataggctagatggtttaaattttacattgagcagtttggaacatgttattatgatcacctttgattgccccacagtgtggaactttattgcagattcagtgtatgcataaatctatttgtgcagatgttttgaattgtttaaagc

SEQ ID NO: 112635 - DNA, 168 bp, Glycine max
cagctgaaaataaacggtgtatagtggatcacctatggagtggtccatcggagcaatggccatttttaattagatgattaccactttatgggtcaattttgagagtaaccttttctttttctttttcaattggtaaatcatactagatgaagttaaaatccgaagttt

SEQ ID NO: 112636 - DNA, 102 bp, Glycine max
caactttactattctgcttctgcgactttaatctaaggaaaacgacaacgtgtcattacttgaaacgcgaatctccaaatgcgaacataattcatttacatc

SEQ ID NO: 112637 - DNA, 156 bp, Glycine max
gcatggtgccgcataaatctcaaggtggtgtggagcagcttgcaaatgctggtcacactgggaggatctgctgtaaaaattgccgctgcacctgctgggggaagtgggaagcagcgtttgaggtggacatctgatttcatgaccgttttgtcgatg

SEQ ID NO: 112638 - DNA, 163 bp, Glycine max
atgatttatcttctgaagtgatgcatggtctcagactgttaaaattgtgtttctacttgtatatgcagaccatcgtggttggtggacaaaagtagaattgcaaccaaaataaagagtgcctctggaacatgtggtaagttatatggaaaagcaatccttccag

SEQ ID NO: 112639 - DNA, 229 bp, Glycine max
aaagatccatggatgatagaagctctgaggttaaaacttgttcttcagttaagcaaagaaggtcaagatttccctcaacatttatagataaggactccatgccaaaaatgtctcttctagctgaagataaaatatgagctcagggaaaggtagatcaccatcacctccagtcaggaggagatcaatatccactgatagagggtctgtcattaaaagcaaggtcaaaagt

SEQ ID NO: 112640 - DNA, 241 bp, Glycine max
ctcaaaattacccactccatctccaaagcccacaccaccaactccaataccaacaccacccacaccaaagcccacaccacccactccaaagcccacaccaccaactcctaagcccacaccacccacaccaaacccacaccaactactccaaagcctagttgtcctcctccttctcctccttcaccaccatcaaacaaagcctcatgccccaaggacacattaaagctaggtgcttgtgctg

SEQ ID NO: 112641 - DNA, 246 bp, Glycine max
ctcgagcggagaataatccccgcttggaaggtccagagttgttgggactagtaagttatgacacaaactgctcgtgaataacgtgatgtggtaggatctcaatctgcgttgaattatatatatgtattcaaaatttaagtgtattacctcatagtgtaatgggaagtggtaaatgtaatctctggtatatgtaaatttacatactgaaggacattggaatttgtgacttgaatatctattgatgta

SEQ ID NO: 112642 - DNA, 238 bp, Glycine max
ttcggctcacgaacatgttgcccctcatcataagttctttggttgacggttacaataaaagtttgcttgcattatttgacaatggtgttaaagaaggtttcattaagccttgtgcacggaatatagttgtctctgctacgtcagccaaagaacttatgatgaaaatggagcactacactccttcgcacgaacatgttgcccctcatcagagctggcagatgatacaattaggtaatat

SEQ ID NO: 112643 - DNA, 217 bp, Glycine max
acaatatacacatcttcaattaagccatgactctctctaagcttatagttgcttcccttcttgcctcgcttctccttcttcatcttgttgatgctgatcaatcggttattgaggaaccgcaggcacatgtacaaacgcaggggtctattctgcagaagatagattgtaatggagcatgtgctgcgaggtgtcgtttatcatctcggccacgtctctg

SEQ ID NO: 112644 - DNA, 99 bp, Glycine max
agagagtggagtttatggggctggggctgttagtggtggtgatgatgggatgttgtgggtctgcgactgctgcggatgacttggcaaccaagtgttcag

SEQ ID NO: 112645 - DNA, 246 bp, Glycine max
atccaaacgtcttgcaataacctatggagccctagccgttcgtcgtcactatcgccaatgtcgccacctctcatggtcacaggtgtcgtcctccctcttcgttgtcctcttcgacgtgccctctctgccatttccccatcgccggcgccataggttcttacaaggaacatagattgcatggtgttttcactgatgaccattcaaagaagctagataaagatatagcaggcacatggctacactacc

SEQ ID NO: 112646 - DNA, 195 bp, Glycine max
gggactatagtgagggtaactgctttctgaattaacagttttggttttgacagaagcttcttttatctggtcatgatcatgatcagtgcactgtcagtcatcaatctaaatctgggcctgtaaacgagcacaccctaggtactataagttggcaacaaggaaacttgtatccttctttcatgctgttatcagttg

SEQ ID NO: 112647 - DNA, 155 bp, Glycine max
tcaaggaggaggacatgaagagttcggacccttgttgaagtttgaagccgttatgagagaatcgaaagctcgtggtgtcaagttgcctccggatatggaggaggctgcgaggatcattggcattcgggaaatgtttcttcttcgttacatggagt

SEQ ID NO: 112648 - DNA, 239 bp, Glycine max
gcctgaccagggtggtgctaaagagattaggatgttggtggctgataatcatgcacacttgcaaaatggggaagccaacaacaaaggtggtttggaggccggacttgatgtggaagagttcaagtttccggtaaatgggggagaacaagtggaggaagaaaaagagaaagaaaaagaagggctcaataatggactcaacaagttgggctcaagctccacggcagagctccacccgaaag

SEQ ID NO: 112649 - DNA, 250 bp, Glycine max
gcgcaatgaaatctagtgttccagtttgatcctcactcactcatcaatcaatggcttactcttcttctttactcctactcgagttcaaatttcttgcaccgcaaattacccccaaacggcgccgttctctatctagtttttgctctcgccattccgtttctctgaactccaggtacaatgttgctctcgtacgcgaatccgcgccgtcatggaagaaggtgccgtcattgacagagtgaacgacgtcaaa

SEQ ID NO: 112650 - DNA, 242 bp, Glycine max
tgcatggccagggaagcagatgcatagccataattatagaacacctgagccctttcaagatcaagttgtagttctaattggtagttctgctagtgcggttgatatctctcgagatatcgcaacagttgctaaagaagtccacattgcagctaggtcagttgaagaagataagctaggaaagtgcctggccatgagaatatgtggcttcattctatgattgacagcgttcatgaagatggtac

SEQ ID NO: 112651 - DNA, 208 bp, Glycine max
catccatgaagctctttactgatgtcacaagcaaccttgtgaactgatcaattagtgtacttaaaatgcattagagaaaacttcatgagtttttctttcccctataacctgtgatacttagcatccccagacaacatctgagaattaatatatccctctgtatgtcacagataagaccaatatttctggtgattgtttttcaacctgt

SEQ ID NO: 112652 - DNA, 213 bp, Glycine max
agcgggggctggttgatcccgagagcgatgatgaagaagatgggaacgatgaacatgacgccactgtggaaatcgggtccaaaagaaaaaggcaacgaagtaaatcgagacaccaagttcaaaagcctaagaaatttcatgaacaaaggcctgatgacagccatgaagaaggaccggaggatgatgataattcagaagacgagtatttgaaag

SEQ ID NO: 112653 - DNA, 256 bp, Glycine max
cgcgaatatgcgcagaaacactgaaagaaagtgaggttcaatgccgcacgttagcgtctttgatggctgaaattgtggccaaagaggcacttttggggaagcttaagtctcagaacagtgccaaagattctgagattacttcggttgtggcgggagctgcaagatttggagatgggcaatataaatctgagcgagaagatcaagcagataagttcagagaaaaggagaccaggtgttttgagtgttactaagtttc

SEQ ID NO: 112654 - DNA, 268 bp, Glycine max
  unsure (1)..(268): unsure at all n locations
caaaaaccgaaaaagaaacgatagggcaaaccagnatanaaatagccatgggaaatggggacttattccaattagggcttaagtgctaaaatcttctccggaattatgatgcagttgaggaaaacggacacgttgcttcgtaccgttggaacgtatcttgccgtcgttcgccacttttccgcttcggcggaggcaagagtaggctccgccgccgccagttccagcggcggtggagacacgctggggcggaggcttctgagccttgtgt

SEQ ID NO: 112655 - DNA, 274 bp, Glycine max
ctgtgttgaagcgtatgagtcagatacaaagcaggcacaagaaaaggatgctaaactcaatgtcaatgagcaaagtgacataagtttagattcagatgttgctgccgtgaacgatgatgtagcaaaggaaaaatcagtaagcatagatgctgcaattaaagggaatgaagggcgattaggagcaattgacatgcctccacatgtgatgctatgtttgctactcggtgcaggtactgttttaattgcagctgcagctttcaacttgtcaagaaag

SEQ ID NO: 112656 - DNA, 243 bp, Glycine max
agctattcttctctgactcggtatgtgctggtcatttgttatggctggcttgatccggtcatgtgaaatcttaattcagttattatgtagtttaatagaagtcaaattgcattactctctgtcttgcttgtaaagatgaattgtttgacctagaatactcaagaggaatttaggacttcggaggaggtatgaacacatttattaggcatgattaatgctcaaagcaaggggacatgtgacagg

SEQ ID NO: 112657 - DNA, 243 bp, Glycine max
gtgttgcctgatagggctacttgctctaggttggttaagttttgcattgagcataggaaattcagggttgctgaggccctgcttgatgtttttaagtctgatagtaaggttgctttcatggcttttagttctgccatgagaagttacaacaagctgcatatgtttaggaacactgttttggtctttgaaagaattaggtcgagtaatgttgttctggattcgagaggttatttacacattatg

SEQ ID NO: 112658 - DNA, 211 bp, Glycine max
ctcgagccgaaagactgcaacttcaaagtgggaagtcctcccttgttcaaatcggtagtacacttttaattcagtttaatttgtgaattttcattgaaagagtactagaaggtgcagaggaggttgctccttccattacatgcacgtttgctttattatgttcataaacattggagaatatatatgtgatcgttcgcaagttacaattttc

SEQ ID NO: 112659 - DNA, 127 bp, Glycine max
aatttacttgtcatcttagaggaaaccggaggaaattgttggcagctttcaaccatgatcgtggcacatggtacaaggttgaaagcaaccaacaattaacttgttatcttagaggaaaccggaggaa

SEQ ID NO: 112660 - DNA, 249 bp, Glycine max
acctgtcgcttgcgtttcttctgtccctcttctcctcgcacccaccacacgacctactttccattttccttccccttttctctccaaacccaaacccacttacctcttcacttctttttcttcttcttcttcttcttcttcttcctttttctcttccaccacgccaccgcgatccaccatgctgcaccacgaccctcttgtctctgacgtctacgccaccgccatttccggcgtcgttgccctgtcctt

SEQ ID NO: 112661 - DNA, 243 bp, Glycine max
tcgagcgattcggctcgacacattcacctgagctttttacgaggattcctgatgatggcttcccttgcagcaaccactgctgctgcttcccttggcatgtcagaaatgcttggaaaccccatcaacctcagtggtgccacaaggccagctccatctgcctctagccctgcctccttcaagactgtggctcttttctccaaaaagaaggctgcacctccaaaaaaagctgcagctgctgctcct

SEQ ID NO: 112662 - DNA, 248 bp, Glycine max
cttctctccatccataaccgaacaaaattaaagaaaaaaaaaccccactattcaaaaccaaatccaaaaaccaagacacccccattaggtagctaggccttaattgatctccttttctttcaccaccaccaacaacgatgtccatgctcgaaaccgaccaaatcaagcaactgaacgacatattcaagcgcttcgacatggaccaggacggcagcctgacccacctggagctggcggcgctcctccgg

SEQ ID NO: 112663 - DNA, 246 bp, Glycine max
actcgagcgcttgatttcgcggaaccgcagccaggcctgctacgtgttgtgatataacgagccgaggaggtatacaagtttctgacagtaaaaaaaaatccatcatgaacacagacattgtagtcattcttgtatctgtatatgggaagtaatggcaatggccaagccaaaaagaaaatggaaaaaaacaagaggtttggggggttgaaaaaaaactggaaaaggttagaagtaaagagaggggtt

SEQ ID NO: 112664 - DNA, 246 bp, Glycine max
gacacatttcgttagccgctgtgggcaaaaaccctctccctttggctccttccactctcactctgttttcatcgtcttcaaccaccgccatgtgctcttagacctcccaggttcttcgtggacaacccagaagaacaatttgttctgttgttttagctcttgaaatgaaaccacaaaccagtgggatgtctagagctcataaggcaaataatactcaaattgaagggcctaactggcttatttttg

SEQ ID NO: 112665 - DNA, 244 bp, Glycine max
agatgacgcaattttcctactatggacgtggcttacaaatttggagaagggatttaatatgcactacaactactggtcttctaacatcagagcagggttcctaaatagaacaggatagaatagcagtgcatgtttctgtattatttaaatgtttttccagattggccaaactatgttaagctcaattctggattgatacttgtactgttagtacctctggtactcaattaatatatattattaa

SEQ ID NO: 112666 - DNA, 228 bp, Glycine max
agtttcttcgtgctctttgagctggatttcaccctgcttatcccataaggtgtgtgtgtgtttcacatttttttcaatttcattcgaacaatgttctttatacacacacagctcatgctcaaatactctactttgcactatttcagctaaacttaccacatacaaattgtttgccacgcaacactgcaacttcctcttccaacactgtcttttgtgcattggagacaa

SEQ ID NO: 112667 - DNA, 247 bp, Glycine max
actaagactaaggtcgatatcacggtgctaaaaaagaagaacgtgtacttgtttatttcttccctggacatcacggaggaagagatttcagtactccgaccagtttatgattctattaaaactaacgatcagtataagattgtgtggattcccattgtagaagaatggaccgagcaattgcacaagaaatttgaggttttgaaaagcaagatgccttggtatgtggtgcagcattctggaaccatag

SEQ ID NO: 112668 - DNA, 123 bp, Glycine max
gaacataccaatctacaataaacgatgattctcattatctccctcattttgtctcttctctctttctcccatgcttctgtcctagatttctgtgttgcagattatgcaggtcctattggacct

SEQ ID NO: 112669 - DNA, 178 bp, Glycine max
acggctcgagatttgaggatgatacacacatctctgtagaagcagcccctacaataaacaatataatcttctctctccaaaatggagtttgctctaaattacctaaatgctactgtcactggagttctttctctaaccctctgctttttgtttttgtataatcccttcaaattggcat

SEQ ID NO: 112670 - DNA, 234 bp, Glycine max
aattctaggagtacatgcataacaaagaatcagaactaaggcagagtatgcatcttgggcttgatgaaggagacatcatcatgacaatagctgttgctgtatgttttgtaaagatcgggtttcataggctaaaaacaagctttgattaagacacacacaaaaaatatacgcattttgggtaaatcatacatagacaacggtgatcatgatggtattgatggcattatgatgctg

SEQ ID NO: 112671 - DNA, 202 bp, Glycine max
cgacatggctgcctactactcacagccccaaccgtcggaccttctctcttaccagtactatcaaccgccgcctccgccgctgctggcggtggtgccacctccccccggcgcggttgtccagccggcgcaccacgtccatccgtcgtacatggctcagcatcaagcggtgttcgcttcatacggtgtttcccaatcctccaca

SEQ ID NO: 112672 - DNA, 257 bp, Glycine max
  unsure (1)..(257): unsure at all n locations
ctggtcctggaactcacaaaattcattctaataaatagatacttaaggattattctatcttctttttttctcaaaattttttaagatcctgggtctgtaattgaaaatcttgtcaattctgttactccagtcattattgggaagaacatgttaaatcatgggcactaccacaccatgcgaataacatnntgaagacagtgtagtgtaactatcgcacacgtctgaagataaaattgtggagtggatctagaactcac

SEQ ID NO: 112673 - DNA, 215 bp, Glycine max
gctagatggcactcagaatggaatatagatactgaagatcgcgttataggaacttcagggtatttttcctgctttatcattaagatattggacatcatagttttgattctaatcaaggttaccttacataaactaggtatcttgcaccggagtatcttgacgctggaaaccttacatataaagtagatgtatatgcatttggaattgtattatta

SEQ ID NO: 112674 - DNA, 135 bp, Glycine max
gttttgtcattgaagcaaattgactctgaatattagcaaatcatgatgcaaattttccccaggtaccacctgtgtatccatatccagatccttactatagaagcatctttgctccctatgatacacaaccttatc

SEQ ID NO: 112675 - DNA, 167 bp, Glycine max
tttttttgaagaattatttaatacttcatttcaagtttccgcatgaaacaaatatttaatacatggggttacaccaatctcttctaacataagaagtgtgcaggcaatatgcaccttctattgccaatgaatctagtcatcagtaacaataagctgtcctctaactt

SEQ ID NO: 112676 - DNA, 263 bp, Glycine max
cgagcactctgctgtccgtacaccactttctcccctctcaaaggactgataagatcggtagcgtgagtgttgtcagaacttcatcatggcgtcaagtagtgtgtaattcatgtgtcagtgggccttctgtagctagtagtcatggagaccgtcttggaggtcacgcactgcttaagaaggaaggtgaagtctgtgaagagcagagagactgtaattcctgaaccagattacaggattccaattgtgctactcggtatagctgg

SEQ ID NO: 112677 - DNA, 215 bp, Glycine max
ttgccatcttgatcccaggcattatcatcatcttgacctgtattatctgtacatgagtcctaataatgtcatccaagtatgcagtcctaatctgtatatgctctatgatttcgatttgttgttccaaaagcttgcattgggtgtcgagaaggactggtttcgcagatgcaggaaatggtcaatgaatttctcgtttcgaaaaaagtttcctaaga

SEQ ID NO: 112678 - DNA, 168 bp, Glycine max
atttgttagggaaaacagaatacagtagctgcactaaattctgttttgcttaactcatcgctagatattaaaaaaattattcattgcatgatgtagttagtaattcataagttccttgggattctgaagcatgtaatcttattgttggtagttgatgtttggaactgt

SEQ ID NO: 112679 - DNA, 126 bp, Glycine max
gaagtatatccctagggaaaaataatttcttcacatttacaatgaagcaatccactctattcctgttcctattcctattccccctcgttcaggctctttcttacgaagctgcttatattagagatg

SEQ ID NO: 112680 - DNA, 247 bp, Glycine max
agtgagagacggaaaagtgggcccggcggcatcagtaaccaataacagtgccatgggaacataaacatgtagaggatcatccttattattgttaattgaagaagaggaagacctaacataaagatgtccgttacggagctgaaggagcgtcacttggcggcgacggaaaccatcaacagtttgagggagcgcttgaaggagaggcgtctatcattgctcgatacagatattgctggttacgcgaggt

SEQ ID NO: 112681 - DNA, 246 bp, Glycine max
cacaacacacacacagagacatttttctttcttagaagcgtccaccatacggaacctctcaattccttcacatccaccataataataatatcttcattgttctttacttctttgttaccattaaaaacacacacatacacacacaacaacactcttttactaacaacaacaataaaagaccatgtcggtgaaggagtgcgagcaccacaaggggaagaagaggaagatcttccggcaagtgttctg

SEQ ID NO: 112682 - DNA, 239 bp, Glycine max
tacaaatgcacattacctttatcatagtctttatgtagagatggcaattttaagcatgtccaggaacttgattagtttgatctacaaaattactgtgaaatctgagattgatatctactttgggggcaaaatagagattatctactcggtttgattcaagattacaagttttgttcggcctcttggttactaatcatcttacctgcttgagctttatctttgtggaggattgtggatgg

SEQ ID NO: 112683 - DNA, 104 bp, Glycine max
ggtgtgtgcattatttcttcgattcagcttttgatgcttactaaaaatttaagttccaatgcacttggtgacagtataaaggatgaggaaggactcaaagaaga

SEQ ID NO: 112684 - DNA, 205 bp, Glycine max
ggggaaaccaatctgttccaaagttctgtggggaattccaaatgcaaatggctatgatggttggttctataactgccctttccggattgatattctcacttatgcagatagagatgataacaatgatggagcggttcaccttgaactgcttttgctagtggtactgtctcttagctttgattctctgttctctgttttgttctgt

SEQ ID NO: 112685 - DNA, 246 bp, Glycine max
gaatgtgaataattgctcggaatatagttcatcttgctctgctgaacatgtcccgccttcaccttcttcagtagtagatacaactactacacctgtgaattcagctaggaaagtatcaactgaaaaattaaatgtccaaatgctgcttgatacattgcaaaatttatcagaattgcttctttatcattgcttaaatgatgcctgtgaattgaaagagcgagattgtaatatccttaaaaacgtgat

SEQ ID NO: 112686 - DNA, 146 bp, Glycine max
ttcttatcaatggtacaatgcttgatacctgccactactctcccttttgaggctgacaacggataatggcctcacttgcactcactattgttgaatgattttcgacctgacaattttgttatctacatctacttgtgtaaatttag

SEQ ID NO: 112687 - DNA, 154 bp, Glycine max
gtgatttacatgatgatgacgatgatggaagtttgtgtagagggtagttgttagttagagtttcaaagtcatagagactattatcgtagatgaccacaatttactggagccagattctttgtgctcttccttttccttgttagtgtaaacattt

SEQ ID NO: 112688 - DNA, 174 bp, Glycine max
gccaacaacacttggttgctaattgtgctagaattccaacacagtaatgggttgttgtgtgagtagtagtcacaaaacctcaacctcatcactagcaaaattccatgatccaccaaaacctctcactaaaccttcagaaagcaatagtactgtagaggagacagtggaaggaag

SEQ ID NO: 112689 - DNA, 122 bp, Glycine max
aagaagccatggtcgtaaatgtctctccctctccacctttacattcaagttccataatcagattggccacttcaaagtcacccatttcagaaccatggttgaggctcaaaacccacttccca

SEQ ID NO: 112690 - DNA, 129 bp, Glycine max
ttccaaactgcacttttgaacacaagcagccaaagcttcaaaacatggaacgttttgtgcgcctaactgtggtattagccatggctatggtgcatggctgcaccagcctacgctcagatcagcagcacg

SEQ ID NO: 112691 - DNA, 210 bp, Glycine max
ggctttggcattcctgtcttttgaactggttgctcacttctcagggctccgctctctttcacaaccataataacttgcacctaattcctcaaacttcggtgctccctggatggtttcacactgcctatgtctcgtggctggagttccgggtagactatattgctcccctaattcagtccctatcaaccttctgcattcttctcttcttaa

SEQ ID NO: 112692 - DNA, 117 bp, Glycine max
ggctggcaagcttgtgaagccacatgctactcccacgaacattaccaagttgtctgcacatgctttcattcggaagcttcttagttcgtcaactacaataatggcgctgcggttgca

SEQ ID NO: 112693 - DNA, 115 bp, Glycine max
attcctcccaattttgaagctcatcaaagactgagatgtagagattcttttcatgctcttcagtttcgacaggaagtccaggaactttctgctaagattttgcagaggttacgag

SEQ ID NO: 112694 - DNA, 274 bp, Glycine max
tatacatttgagaccattagttgtatatatttaacatagtgtagaaagatccacctataggaaaaaggtttagttgttgttgtagtgcagaaggaatacgtttggatatatgatgttaaacatggtttccgttgccatcatttgtaaatactcctcatacatttgagaccattagttgtatatatttaacatagtgtagaaagatccacctataggaaaaaggtttagttgttgttgtagtgcagaaggaatacgtttggtagatttgtatata

SEQ ID NO: 112695 - DNA, 257 bp, Glycine max
gttcattcattcatattttccactccctctttcgcctctctcgaaatccgtgcactgatactcagagacaaagatgatagagagaaggaagtgaaacgcaggacagccttgccgtttttgaaaggccgctaaacgacgaagcaaaacgcgttcgtaacagaagaaagaaagaagagagtaactgacaactgtaccagtagaaaaatcatcgacgcgaaaacgagaagcacgttttctcataaacctcgcactgaatt

SEQ ID NO: 112696 - DNA, 258 bp, Glycine max
gctgaataattgttttgctacttcaatttctagtataattttgacatagtttgtgactatttttggggggtgctatatttcagtatgtgatgattttgttgaatgggggagtgcctattgcatttgctggaactgaagagccagctgcttatggagaactgatctcgattctgggccttggtccgagtgtcaatggaaaactgagttctacaattgcagaaattcttgaaactaagctatacattgacagttcccgtt

SEQ ID NO: 112697 - DNA, 265 bp, Glycine max
cgatagtgacctagagtgtgagctagaagcattaccccctgtaagtttggaatgtgcatcagaggctgctgcatgtgtgaaggtaatgattgcttctcgtacactgagtgaatctgcccctagtagctcaacaatcgaggctccattgactataaatgttccagtttgccattcatctagaactcgtattgaaaattcacaaccctctaatttgatgcaagggacaagctttatttttccagttaccgttcagagacagacactg

SEQ ID NO: 112698 - DNA, 265 bp, Glycine max
gcttattcttcactccgtctccttctttttgctgcaacttacctctgtctcttcaatccatccagtttcacttttctgggcgcatggtagctatagaatacatgcgtggacctgttgcgcttgcattgctgcctgcaaaatgcaggtcctggcaaatctactcgatgaatcgatcacattcacagggtttattggcgactttaacacctaagaaactagagaaggaagctgacaaaagggggctagcaactaaagagacgattga

SEQ ID NO: 112699 - DNA, 267 bp, Glycine max
cctgacctttgccgaacataacggcgacttctccaaaaccttcaattccaccttcttcttcgcatcctcttcttcacccttttattctccacgcccaatcctcttcaactctacttctctctctctctctctctctctttctaacaatgtctcaggtagtggccactcgatccattcactcctccctcacgcgccccacctcaggatctgcacaccacagggcccaaacgttgttgaagcctccaacttttgcttccaaattgttcg

SEQ ID NO: 112700 - DNA, 274 bp, Glycine max
caggtatttctcttcagagcaacccaggctggggatttgacaagaaatgtcagttcatgggtaagctggtttgggaagtgcctcagcattacaagtgacctactggcctgcatgcattctatagaaccatacaatgagctttgatgagactacctgctagtactcttgtaataatgagtcgttgtagcgtcatggcgagcaactggtacaactcgcggatgcgctgtaatagatgaatcgcgatggtgatcagactttcatacgtgataaactg

SEQ ID NO: 112701 - DNA, 277 bp, Glycine max
ctattttcaaccataaattcttacaaaattaatatatttatgatctagacacatttccagatgttttcctattattccattcatgtattccctgttgatattgatcctatcaaatatcattgtcaacacattttattgagttgaactggtcagagtctagatcagcttgcttttgaagttctaacaaatggattacccttgaagcatttgcatgaatgtacatcttctaagaccatatttacaaaactagtatttattttatattttcactctttga

SEQ ID NO: 112702 - DNA, 112 bp, Glycine max
cttttgttagagtacaacaggaaattaaatgtatattatgcagtgacatggctactactgagatattcatctaaattcctttagtactctaacagaaggaacttcaatgaat

SEQ ID NO: 112703 - DNA, 223 bp, Glycine max
gtgtcactatttttctcaataatcagcatgatggtagcattcagtagtactttcttcattgcatattaccatgctaaaacgtgggttcctatcaccattgctgtatttgtgttttccatattctattatatgctaagttcgtctctggcatgcataatgtttgcactatattgtgctctgttaacaagaacatgattataaagatgactgttctatataaaaa

SEQ ID NO: 112704 - DNA, 269 bp, Glycine max
ccacagcgggaatcgttgatgttagctagtttttcgtgacttcattcattccgtagtgaattattgttttgatatttttcttctcgagaaaacttcactttccctgaaaatcactccgctctctctcgctccgaaatccgaaaaggtaagcatgctccatccttcttctttcccttagttttacattttccggagagattcattcgattagccaaccgctaggttaaaatcgcggattgaaaaagcgaaattctttttgagacaacctg

SEQ ID NO: 112705 - DNA, 277 bp, Glycine max
gcagcactagatagtgctgctgacagaacatagttgtacctctgccaccagcactagatagtggggttgcttttatgactgtacatgctctacttctcgctgggtttggaaaacaagagtctaattggtgggcgaaatgatggtgaacattgtcctctggcagcttgcccaacagcaaagggcataattgttgacggttgccctgcaaactagtgattttatgcctatttgaatggtttcattacaatacgacgcatgaaaaacacgtatttatagc

SEQ ID NO: 112706 - DNA, 264 bp, Glycine max
ctttaattggttctctcttcagtgtacttgtggtaagcaaacacctaagtatacttacaattactctcacatacacatagaggaacacacatattttcttgtcaacatctttgatgctaaattacaaaagcttcattttcatgaaggaaattaagaactcatgattttgtcttgatttttttaatgaaaagacctaattcttgattgtatgtaacttaaaggttatgttgtaaggcattgagtttaatgcattgttaattaaga

SEQ ID NO: 112707 - DNA, 176 bp, Glycine max
gactaaggctattggagttgggaagcaagtagtgtttacggggcactcctctggtgttgcaatagccattcttgctaccttttcggcattggcatagtatctcaaccctacaaaaatcaaaaatccacgcgatcctttagtgtcacttttgggactcccataattggcaatcatat

SEQ ID NO: 112708 - DNA, 288 bp, Glycine max
ctcgagccgcaaggaatggtgaagctctaacaacatcatatcgtaatgatcaacactctgaaatgcatttaacacagaatcaagatcaaccagctggggatgcacaagattccagtcatcaaacaacttcatcttctgcccccagattaaactctagaaattcagcttcattgagaagaggtgatggatatggtcatcgtggcaggagtccattgaattctggactgtggatctctgttgagcttgttgtcactgtgagtcagatcatagcatctatagtcgttttgt

SEQ ID NO: 112709 - DNA, 257 bp, Glycine max
gtctagacagcctctggatggaatgatacaaatgggacactatcatataatgtcaattcatcaagctccgatgcatatgcagggcaattcggtgaagagatattgcgaaattcatcactattattgctttcataggtctaggacgagaatataaagttacacggaggctcagctcggtactgagttatcggagacattacagtagaacctcaatgcagagttccagagcctagctatgatattgatgaccacagcat

SEQ ID NO: 112710 - DNA, 201 bp, Glycine max
cggctcgaggtcacaaatcattcttgtctttacttcctttttctgctctttcagaaattctgtaaaagagggtaatatatattttacagaatttctgaaagagcagaaaaaggaagtaaaatatatattaccctcttttacactcctttgaagatgaacgtactttctactttcagctttaatgcattgcttcttttattg

SEQ ID NO: 112711 - DNA, 281 bp, Glycine max
gttcctgttccattttaacgtgtatgttcagttcttggtctcaagtttcatcttgggctgtagactgtagcaaacaccatgaccaccaaggttccaaaatccgtatacgactttgttgtcaaggttggtcttcttatctgctttccctcatctctgtctctgcgttgagtgagtttatctatttggatgacctaggactcttactttcctatttttgactttggagtgcaagaaatcatttgtgtctttctttcatttctaaacatacaataaataaatgt

SEQ ID NO: 112712 - DNA, 263 bp, Glycine max
aactcttcaaggtcgtagccttaactttgctggtgttatggtcatgttggagctttgatgtatcagtacgctaccctcaactctttttactcacaaatgagtgcagcggatttaccaccgcaaattacgacttacccactttcttctaaaatctaaacgcaagtttcgcagacctgagagagcaggtgaccaaccaaagcaagcaatttgccattcctcaatcaaccatcggaacaagtcctgtctatgccatgtttcaatgc

SEQ ID NO: 112713 - DNA, 236 bp, Glycine max
aaatggttgaaagagatatttggcggggcgattgaggttgtgacagcacagtgatggggcactctttaactgtgctgtgacatcgtgaattgttgtcggcgatggttccttctgatatttgcgtgcaggtttgtattcgttctgtgtttgtcgaatgctgtatcgcgattgttggattactattgctccttggtgagggctagttctagttgtgattgtgatatgcgacaaactgg

SEQ ID NO: 112714 - DNA, 251 bp, Glycine max
agttaaggaacttaaacttgaaatatttttattgaaagataaaaaaaattaagttgttcatgatcttatgctttcttatagtttaatttattttttagttttagttgtcaatcaatactctaacaacgctggttaccaagatccttaaaagatactttatggcaggtataccctcttctggatcatgctgctaattagcaagctagcattcagctactacgtggagatattgccccttgttggtcccacaa

SEQ ID NO: 112715 - DNA, 256 bp, Glycine max
  unsure (1)..(256): unsure at all n locations
tgttgtttgggctatgctattaacccatgatcgccatggccatggccaagtctacacctttcgctttcactcctcttcatctccgttctcgattacaacaacaacaacatccccacaacgccaatttcccacaattcagatatcccgctccctcactccacaatccctttttcctcctcaacgtttcctctnctctcagttccgtcccttctttgccttccctcgacaacgcgcctcccccgctataacagctctc

SEQ ID NO: 112716 - DNA, 263 bp, Glycine max
actagttctagatcgcgagctgccgcccttttttttttttttaaactctacaaagtacaaaccccaaatcacatactttcaaccatacatcatataacaacaacaacaacaatactagaactagaagtgggaaattcaagacttttttttccccatttcctttttttacaataacaggttttaaacctagaccgggggcatataacccaaaccccattattagcccgagaatagggcctcaatgagggtcttatttagtggct

SEQ ID NO: 112717 - DNA, 242 bp, Glycine max
cattctcatcatcaacaagtgtatctgtaaccatggcttccattactctatattctacaatcccttgttaggtatgctcaggaaaaagtgggattttcagttctacaggacatacgagataaggtgaggtggtggtgttggtgttttaggggtgtatgggagtgggacttggagatttgtggttttagagtatgtttggtatgcgatatgatggtaagggtatggaggaatgtgttttgttg

SEQ ID NO: 112718 - DNA, 234 bp, Glycine max
ggctccagaagacgagaagggaagctcaaatgacaagctatcacaatctactgggaccttgacgaactcgacagagatgttaattcccaagtagtatctaatttgttgggcaacaccaccacccggggtactatgtcgcacaatttttcaaacaaaaccgtctatacatcgaagccttacaattacaagactcgaggctgctaatgaattccatggggagtacaatttctcagt

SEQ ID NO: 112719 - DNA, 253 bp, Glycine max
aaacatatatcaaaaaacgtttatcggcggctgcttaagcacggtataaaaacagttggggatctattgaaggagaatgaaaccaatccatcatctttgcaagaggtactaaggaagaaaacacctgccattcttgttatagtttcatttacttctatataatatatatagcttaaaagtataattcaatattagtaaaaattcatctctgaatcttttgttcgatctgcaacgatagaaatttggcaagatt

SEQ ID NO: 112720 - DNA, 257 bp, Glycine max
gtttcaggttgaatgggacttttgaagagcgtggatcccctaatgctacttttcaagcccctggaggatgtagcttacacaagaatatcctacatcaggatgatgaagcttctcgcatctgggcatccttgacttcaaattcccaaggatatgattttcccaaaaaggttgtttcttctcagcatcctagtagtagtgtggacataacttcactccaatctggttcatttcataagcaaaacatgaagagggatatt

SEQ ID NO: 112721 - DNA, 256 bp, Glycine max
caatttgtttatgcaacagtcgggccgaagaactagaaagtcgaatacgtgaagaggtgagtgcaagagaggagctaaagaaggaatcagacgcagagaaggagcaaacagaggagatgagaacggaggtggaagagaggaagaggaggctgagctcgctcacggaagtccaatcggagctctaaaccggctccaaatatggacgttagcgaagattcgggcggagacgcagctggagaaggcggtgggggagagg

SEQ ID NO: 112722 - DNA, 125 bp, Glycine max
caagcaccggtctggctggtcagctatctggagatattggatcactatctgaattagagactgtggatctatcttacaacaaggacgtgactggagcacttccagaatccattggggaattgaag

SEQ ID NO: 112723 - DNA, 124 bp, Glycine max
  unsure (1)..(124): unsure at all n locations
gacgaagtgaagttggtggcgacacatccagatggaggtgctcagctactagcaaatgtgaggtatcaccacggaggacgggaagaatgatcncgagcatgcanaaaagcgggcctctctggca

SEQ ID NO: 112724 - DNA, 116 bp, Glycine max
ctgatcgcttgtttctgacggatcttttcgcttgagaccgtcttcactttcgctgaataatctcagggtacgttgtttcagcgaaccagaagaaggggtcctcaactctaaaaagt

SEQ ID NO: 112725 - DNA, 125 bp, Glycine max
  unsure (1)..(125): unsure at all n locations
gtacagcatcgctgcactgctaggcaccaacggacacgtctaagacgatggtgactgcaatngtcatgacatgatgaacgtagtcaccgacggggcagcgaaggagctcttctcgatgaaggaga

SEQ ID NO: 112726 - DNA, 99 bp, Glycine max
aacaaatggagcagcagcttgaggcacttgacatatcataccctgataaggccagaggagtggcataattcaatgttcacaaagcgcacatgataatag

SEQ ID NO: 112727 - DNA, 211 bp, Glycine max
  unsure (1)..(211): unsure at all n locations
ganatctgattatcattggagagtctgatttctgacttctttttctgattatcattggtgggaacttcaacccatagtttagttcatcttttatattattactagtattgcagttaattctgccataacatttaggggntgattgcaaatggcctctatatctgcaagcctgccgccaccattgatgctccctgctagacaatatcatccg

SEQ ID NO: 112728 - DNA, 179 bp, Glycine max
gctctgcattatgtctgacacgcacaaaacaaacgcgtcccttgtagagactctggattcttatagttacaggtatactgtaaagcttcatttttttatggcgctctgaatcgtttgcagtgagggggaaagacggacatagtttacggagggttcaagacagtttttttttatcgaac

SEQ ID NO: 112729 - DNA, 103 bp, Glycine max
  unsure (1)..(103): unsure at all n locations
attagagaaaggcaaatggggtgtgctaactcgaagcgggatgatgcagcagcatannnctaccgtcccgcacccacaagcttgaaggtgatctacatccaca

SEQ ID NO: 112730 - DNA, 169 bp, Glycine max
tcgtcgagttaattttgtacattaggaatgtgttgtaatgtattaatctgtgcgagtagaaagatttctgactaaaggtgtcactttggaggtgtaactgtacgttaatactaaacgcgatgctattgcaatttcagttttattttgaaatacatggggttttagtggc

SEQ ID NO: 112731 - DNA, 327 bp, Glycine max
tgatcatcatagcacatcagcaggatggtgtagcgaaagtggagatttacttgcctagtcatctgcttcttcttcttcattttgtcttcctacatacaaggtacttttacaggtactagtggtaggactagcctcgaacgactacaaaattcgttacaccaagcgaactcatttatgctgttgtgagaagccatggtgaggacgcttcgggagagccagcttgaacaaatgaaggctgctctgaacgggatgatactgcctcctatacaccgcgaaagtgtgagggtgaccatgatagctaatgaaataattgatgcattgctgaga

SEQ ID NO: 112732 - DNA, 323 bp, Glycine max
attgttgaaagatattgatcaacctactgccacatcgaaaaagtttaaaagatctcgcaaagtgcaggttgaggatgatgatgatgatgattggcttccgctggacctatttgagatatttgaggaaatgaggaagcggaaaatattttctgtgtcagacatgcatacatagcagatgcttggggatggacataggagagagaactgaagaagaaacctcctcgtagatggtcacaggaatgggaagttgagttggcaatcaaagttatgcagaaggtcatagaattgggagggagacaacaataggagattgtgccatgata

SEQ ID NO: 112733 - DNA, 309 bp, Glycine max
  unsure (1)..(309): unsure at all n locations
cagcgggctagtacgagtgggagggcgactattgcgcatgttgggacgaatgcgatgccgacgctgttgcagcctgaacaggggcagcaggcgcaggcgcagagngcccaaggatcagatggcgcgcagatctctcggcaatcttcggcgcagggagaggcgtctgggtccggagccgctgcggcagcgtctgtggtcgaagcaatctggcggagagagacgcgcggcagaaggaaggacgggagatgcggatgatggtgaaacgagtgatggagggggatcatggatcgagcagcgactattgcgtct

SEQ ID NO: 112734 - DNA, 122 bp, Glycine max
atcagccttgctggctattagctgcataagcttatgatgtgaacctgccataatatatatctaatattgtcgatcgatgcaacgcagctcaaattgagttctctcatcatcagaatcatcat

SEQ ID NO: 112735 - DNA, 276 bp, Glycine max
tgtgggctaattcgtcaatggatctaacattgggaaattttgattggagaaggagatgtaattgaaaataacaatccgtaatgctggaattggtgtattcacctaatgagtaggaattccaaaatacattggacggttatgcattcgtatatatagtcaagcttgtcatcagtttaatgaaaatgtggattttgcattcgtccttggtacaagtaatctttgtagtgcagcgctgcagcagtaataccaaccacaatacactggacggatgtgtac

SEQ ID NO: 112736 - DNA, 133 bp, Glycine max
  unsure (1)..(133): unsure at all n locations
tgcagcaaacactgatcctattgcttttagcaaaccttgcttgctcttcaatttagcgttgttgatctacatttaaatanaacgagtatgtgaatgcaagtacccaccaactagcaataatattgaaaagaca

SEQ ID NO: 112737 - DNA, 117 bp, Glycine max
  unsure (1)..(117): unsure at all n locations
nagacttcaattgaagggagtacaagctcatgaaactgcattccaagtggcgcaagaaatggaggatcagatanaacttcctggacttcgaccttctctgtcagtgagtgattttat

SEQ ID NO: 112738 - DNA, 224 bp, Glycine max
  unsure (1)..(224): unsure at all n locations
agagaagactatactgaaaggagtaacaggtatggtttgtccaggagatataatggctatgttggggctatatggcagtggcaaaactacacttctcacagcacttggaggaaggctcaaatgttnactatcaggaaaagtcacatacaacaaccagccttttttaggtgccatgaaaagaagaacaggctttgtggtcaaggatgatgtgttataccctcatc

SEQ ID NO: 112739 - DNA, 352 bp, Glycine max
  unsure (1)..(352): unsure at all n locations
gtgaggattgagatagtggattcgggcattacagctggtatggcatctgcatgagtaaaaattttacgtgactagtgtagtaagattagagctatggcgtgtatcatgcgtcaattggtgtattcgcgtgaaattgtaatacgctgacagttgcatacaggatacaatattanncgaagagaaacgattatgggttttccatcagagcccagacactagacttctcggattcattcttcgaagggggtttcggctctgaagaggaacccttcttctcgcggcggacccggcttcacggccgtgagtgaanaggaggatacccaatgcccaccgggtctcagacagtacgaga

SEQ ID NO: 112740 - DNA, 316 bp, Glycine max
  unsure (1)..(316): unsure at all n locations
gccttaactccaccacccctctctcctcttctctttccctcttcttcttcttaccctattccacttcaattaatcaatatgcaatcatagatagctagtcttctntctnntcttttctcttcatcatccatatgtcatagacatatctctctatcttcctcctatgacataaaaatatacaaatataacacacataattagcaagaagaaaacaaaaacttgcatatgggtggtagtagtagtagtggtagtagtagttctttccctccaagtttctttanagcacttcttgtggtggggcttgtttgtcttcttg

SEQ ID NO: 112741 - DNA, 134 bp, Glycine max
  unsure (1)..(134): unsure at all n locations
ganatctgtaatttnttgccctttgattcacttgcatgttaccattttaaattttgtgatgcaagtggcaagtataatgaagtatatttccattatctctaggtggattgagagtgaagcgaaggacgcctcag

SEQ ID NO: 112742 - DNA, 124 bp, Glycine max
  unsure (1)..(124): unsure at all n locations
tgacaangagctaacaataataatatctctgcggaccattaaggccatggcttgtgttctctccaacctccaaccttcatgtttagctcaatccagatccaacaaagacgaagcaaaccttcac

SEQ ID NO: 112743 - DNA, 132 bp, Glycine max
cgagcactcgatcagcattcaggtaatagggattcacaattggctgccatcgcaccagaggaagcagaggaatgcacctctaccactggaaatgcctcttctgcatctgttgctggtgtctcagaactggac

SEQ ID NO: 112744 - DNA, 285 bp, Glycine max
  unsure (1)..(285): unsure at all n locations
cgtatacttcgtagcttcaccatcaaaatccagtgcaaacggaagcaagaagaagcgttaatcattggcaaattagtgcatttgtcatcagacactcaggaggctagatcatgatattattctgatggtggtcagtttttacatagttgttggacctctctgaatgaatggataaatgaaatactgagatgaccaattaatttcttgacggcatagctacacagtagtattcgttctcactggacgtatgtatctttagcattatnanatatttctaattacctg

SEQ ID NO: 112745 - DNA, 171 bp, Glycine max
ctcgagccgctactcacgactatacccagctagcatcgtcaagatgcccggcgactccgttgttaacactagcatccccaccaagagaccagatcctggtcccggaagaccttctcaagaagcgcaagtacgctgagaaggaggctgccgacaagggctgccagcgtgaga

SEQ ID NO: 112746 - DNA, 185 bp, Glycine max
  unsure (1)..(185): unsure at all n locations
agtgggaacagcgtcatcaactcaatcacacatccgncngcaagtgttgcggcctctaagacagtggccatggttccaccatcancaccancngcacttgcgtcaccctttaccttcaccaccttctcacgcctccacaaaaacctctcaacgtttttcatttgcacggtcgctgcctcgtctcg

SEQ ID NO: 112747 - DNA, 310 bp, Glycine max
  unsure (1)..(310): unsure at all n locations
tggcaattacaagtgattcaaatggtttctggactggcagttggtagtgttacactagcattaggaatgatgtaaatataggtaatagaaaagtgacaccagaagaaaaatgttagtattctttatttcttttctcatgctgccctatggtttagcctatcatcgagtgcttttgcctgaatatgtaatacagttgctctgttgtagctgtgacttgcaaatattttgtcaagtccaggtctttctttacattaatttgatgatcctcatggaaaaagctttttagaagtanaaaaaatacgaacaaaaa

SEQ ID NO: 112748 - DNA, 339 bp, Glycine max
cagatcatcagtctcaaatgaggcacaagttgatcgggctggtaatgattccagtattgacgaagcagacaaagatcggcttcttgttgctcaaggtgctgagttgcttcagggtgcactggttgaggggcctgctgaggtgcacagtgatcatgggccaagaaaacctctttcagatattggaaatacactggtgcgtgtcagtcattctttgaaaagggaagtccctaaataaatgatctaatcaaacctctctctgtctctgcataggaaaaatttaggaaaatttcatgtacttaaatcattgatttatgtctatcattacatgtgaactggatg

SEQ ID NO: 112749 - DNA, 122 bp, Glycine max
gagccacattctgtcactggtggactcaagacgtgtctatcataggacagttagaattatagcttgcagaacgggttcactagcgaacattgcactggactcaacctcttctgactctcact

SEQ ID NO: 112750 - DNA, 99 bp, Glycine max
aagagatgagatatgtaggtctcgatctggcaatcgcagccctgatagccgtcagcacaggtctatggtatacacatgacattcacgccttcctccaaa

SEQ ID NO: 112751 - DNA, 313 bp, Glycine max
  unsure (1)..(313): unsure at all n locations
ctatccatggttgggctttgaaagtcactaagaagatgaccatatctttaaaccccatcgtcagcttcagctcaacgaatttggaaacaaagtattcggatgcatcaagatattctgttggagcttctttaccaaaggcaacccagtttacacctttgttgatagtgtctagatcgagaaagttgtcaaggaaagaagatttggtccttgttttcatgtttcgcgatagtgatcagcttgcacagacgcttttggataagcaangattttgacaatgctgaaaattcggcaaccaatgatcagtcagcatcgt

SEQ ID NO: 112752 - DNA, 332 bp, Glycine max
  unsure (1)..(332): unsure at all n locations
ganagcagggaagccgagaagaaacgtcgcaggcaagtgattagattgaggctctgctggtatcggcgtcagcactcttcaaggctgtgccaccccagatcagcctgtatttgcgtgttttcatgtgcgtgagcgagtcatgcagcaacactttgcgtctttcaaggccgtatatggaacgaagaacgcgtcgacctgcttgtgcattcacgtgcggatttagtgtgtgttaggggtgtggtgcacgagctgggagtactaatagcatgggcgacccttcgtagtaaaattttctgagaagaactaactgatgttgttgggttgctctttga

SEQ ID NO: 112753 - DNA, 333 bp, Glycine max
ttcagaaagttcatgaatctactctagcccagcttacggagggctctcgattagctgctgagaaaattcgaagtttggaattcagaagcggaaactttaatctcaaaaaagaaagatgcagaggtattaattttcaaattagaagagaaagctgaatttctgttagaaagttctagatcacagagaaccaagtgcaaggtttactgctgaaggtttcagccttagagactgaaagcaaagaaaatacagaaagactgcacgcagaaatatcgaagaaatcagaggaaatagatactttgcaaaacgagagaatgaaactagagcagcatgctg

SEQ ID NO: 112754 - DNA, 311 bp, Glycine max
  unsure (1)..(311): unsure at all n locations
ctccgtctccaggcctgttctgggggctactgtacatggtgcctggtggtgtactgtaacataatggcaatggcatatgcaatatnatcctggtctacctgtttactctcctcacagccgtaaattcaagttccttctgccgccatcgtcatcgtcagtcagagcttctctgctattgctctcgatgtcttgtactcagcgtctgtatcgtctctagtgtgttcgacttacgtggaaacctgagatcagaccgggtatcggcggctgcttgcatggatggaatcgtaaanncatctgtcgtgacaactcaa

SEQ ID NO: 112755 - DNA, 333 bp, Glycine max
ctgaaccgtaacaatgaagaactctatggacgacgtaaaggattagaacgccaaatgaattagaatgttgggagaccttatgggtgggaataaaagggtcaatgatggactgaaccgaatggagggcagaacagaattgagggagtaaaactcaatgtaccccctttaaaaggcaggagtgaccagacgcctaccttgacagggagaggaagattgagcatgtattctcctgcaatgattatactgaagagcagaaggtgaagttagcaacagttgaattctcacactatgcacttgtttggtggaagagatgatgagactaggagggtggga

SEQ ID NO: 112756 - DNA, 326 bp, Glycine max
cagcaactgtgagccagcttcaagccggttcactgaggttcgcgcctgctaggtaggtagagtcttcctccagttttccaaagctgcatcaagagtgtatctctagataggcaggcaatcatccaaaaaggatttgtagaagcctgtgttcatttcatggccagagggcagtgctatgggaagaaagttgtgtgcatagccagaggggttgtttagttttcattagagtgtagagctgtgaacgcgtcgaatatccttgttttttcttgagagcatgtgatttattgcaatttgcatcattgtttacgtgaaataaaataagtttc

SEQ ID NO: 112757 - DNA, 151 bp, Glycine max
  unsure (1)..(151): unsure at all n locations
ttaacatctcttctctgaaaattctctttagagagatagagagaggaagaaagaatggcagcttgcactatctactaccacacaacatttcgaagccgaaaannnccaactcaancccatcaaagacgcaacncagcnnccatcacacaac

SEQ ID NO: 112758 - DNA, 326 bp, Glycine max
  unsure (1)..(326): unsure at all n locations
ganataacaagaacataaactatatacgcgtatcacattttgattttccttgttgcaaatatgttcggcaccgtcgagcacgacgaaattcgacgcgcttatcgtaagatggatctgtggtatcctgataggtggatcaaggacccaaagcttgcactagaagctaaaaagaatttcagcgcgttcaagaggcttattcagttttgtccaataaagggaagagaaggatatatgatgctggcttgtttggtctgattggagaggacgatgatagnggatttgttgatttcatgcagacatggtccttcgacgatgcagaaagtgag

SEQ ID NO: 112759 - DNA, 301 bp, Glycine max
  unsure (1)..(301): unsure at all n locations
ttagcatgccatatttttctctgctaattgtaactgttacaccaataatattagtcattagacaatcaatcagacataantcagaccttgccgtctaatgtctaatattattggtgcaacagtcacaattagcatgccatatttttctctgcttaactttatcgtcacgcttcaatctgtgttatttgctaaattgtatattctaattgcagcagttaacaagaaagggttgagtttgaaggccaaactgggtataggtttaggtattggaatcccaagcatgttggcaattgggttgctg

SEQ ID NO: 112760 - DNA, 314 bp, Glycine max
tagttgtaattagcaacctcaggtaccaagtacttgcaggaattattgaacaacggattctagaaccactactacaccgaaacaagcttatactaaccgcaacatactttaccattagaactgccaatacctactggggttcgctattgtgggtggattttgctcgatgggttgagtccagaagataaaggtttgcactttatttttccccatagtgaacctcttatacttcttccccattgtaatagaatttgacacgagatatcgaaaatctaatgccaagttgtcattaaaattgaccgtgttgatacgtt

SEQ ID NO: 112761 - DNA, 137 bp, Glycine max
atatggttggtgactaaacagagaaaataaataaagtaagagcacaatcagagcattaagagaggaataatgcatatggcaatttcgttaagacgaggtgcacttggggattctagcttccatctgagtacattaac

SEQ ID NO: 112762 - DNA, 274 bp, Glycine max
tcttattttaagaaaattacagggttaaatatcagttacaatttttgaatattctactcacgtgcccaaaggttgatgtgtcatttggaaacggtgttataaatggttaagattaatagcagtgcttccaagtagtgttgcggatcatatgtggcaacacggctttcatggtaggaataagggcgagatagagagatgttttgttctttggtgtgcggttatgtggtgcatttgaaaaaggaggaatgattgcatcttcaacaagagggatttg

SEQ ID NO: 112763 - DNA, 277 bp, Glycine max
atttcggctcgagcgtttctaagtgtcattcattaaaaaaaactttaaaatttggaattttaattggcaaaatgaattaaagtcaaccagaggcaggaaggggtagcaaccttaaattatgttagaaggaaaaaagtattaactgtagcaaaagaagaagaagagagtatcaagacaattttgaccatatataacatgataaaataccaatatacagcatgcatgcatgacaacttagaatttataaacatgtttccatttggtttcctaggtttta

SEQ ID NO: 112764 - DNA, 141 bp, Glycine max
cgattaggctgagcctgcagcgaaaattttccgtgtaaagaggcggttgacgacgacgacgacgacgatgatgttgaccatctcgcccgcgtggtcaattctcctatatattccttttggatggtccaattgtcttaatat

SEQ ID NO: 112765 - DNA, 100 bp, Glycine max
cgaatggattttaataaatcactttgcacgcatacaaagtgatttattaaaatccattcgatgttcaaatggattttaataaatcactttgtatgcgtgc

SEQ ID NO: 112766 - DNA, 252 bp, Glycine max
  unsure (1)..(252): unsure at all n locations
ctcagggtagggcagagagagagagagagagagagacagagagagataatgagagagtgggatatcgcgaaanctggtcgcgctagtatcgactctaatctcccactcgagcgccaataagaagcgagacaacttctcacgcgctgtctcaatcatagaatctctgctctaaactctaatcttcgcgccaaagatgtcgtcgaacttgtagagagggaattggacacgcatccgctgttcaattcgggccgt

SEQ ID NO: 112767 - DNA, 353 bp, Glycine max
taggaaatagctttcctcggttataaccttcaaggtggaaagaaaaacccacccactatcccaattccaataaataccttcctctctatattttcgcacaataccctctcaaccttcaacgatgagttactacaatcagcagcaaccacccgtcggtgttcctcctccccaaggttccattcttaatttattctctcaccgttttttttttgttaagattagattaggtttacactgttacacgttggattttcttgaatttttgtctcacacctttctgattatgatgacgactaggttacccaccgccggattcttacggacaggacgcgtaccctccgccagggtacccg

SEQ ID NO: 112768 - DNA, 351 bp, Glycine max
atattggcgagtaaatgtcttcccttcaatattacaagaaacgataatttccttgtagttttcagcatttacattacagcatgataggttggccatgagctcagcctttcaagtggatgaagatgctcagagcttgtggaagagcttgttgtgtttaagcaatttatcaaaaggtggcatgcattctttgataacaggaagctcaagaagatcatcgaaccaagcatcaagcttagccatcaactctttatcaatgaggtttatacccacaatttcctccactattcgtatccagtatccaagccaggcaaatagcatatcagcgagccctatttttcacctccaaagtag

SEQ ID NO: 112769 - DNA, 186 bp, Glycine max
  unsure (1)..(186): unsure at all n locations
ctgctttaggatgacacaatgaataacacctagtcatagaaatcagtctctctggtttgttttgtattatgttgtacatcattaaagatctaaatacaaaggatatacagtcttgaatctanaataatttgctaactaactattttgatccttcagagagaactactaataaaaatctanaaggta

SEQ ID NO: 112770 - DNA, 186 bp, Glycine max
  unsure (1)..(186): unsure at all n locations
ctgatgatgacatcggctttggtcttattgacgacaccgcttgtactaacatgttcaggtaacagctgaacttttcgacaaccttaaacaacggaagttccacgcgctcctcacttgggcanaagaaggctcggcgcgcancgaagaaaaggagtgaagtgaacctcgggacggtgtgcgttctat

SEQ ID NO: 112771 - DNA, 201 bp, Glycine max
ctagcaggaaggagctagctacagacattgagtcactgaagaagacaattactggaactgaatagagtggtgttagcaagtaccaagtcaagtttatcttctgtgatcatgctttgtttttgttgtgctgtttatctcatctattctacttcaagggatacatatgactcttatacatgagataaacagcacaacaaaaac

SEQ ID NO: 112772 - DNA, 207 bp, Glycine max
gcaatttcttcgtctctacttgcggtattagaaaccatcagatatatcttcatcatttcttattggtgtgttacaggctttagtacctcatttgtttgtcgcagtttttgctaacgttgtgaatcaagtgttcgactatgacatagacaagatacacagaccatatcttccgttggcatctggacaattatcatttacagctgctgt

SEQ ID NO: 112773 - DNA, 277 bp, Glycine max
gtgaattgatattgaagtgactcggggtgagttgactcagcaatggcggaagaggtgactcgggtgatggtggcggtgaacgagtcgagcattaagggatacctcatccttcgatcagcagcaagggctttcgactggaccatcacaagatcgtcggacaagctctgctcaacctcttttcttcagtcaagtcccgtgagatgttgtgcatgtatacttctccctgcgattagactgacaaagtaattaaggtcacgtgatctcacataggcagaat

SEQ ID NO: 112774 - DNA, 286 bp, Glycine max
  unsure (1)..(286): unsure at all n locations
gcgcatttggaagtagaagaacaaagactaggagtagttgatcaagagtcgaacaatttgaagctggaacttgaacaagtagaagaggagctccanagacttaatgagcaagtttgtcagccaggttctaaatcaaattggaatcagttctccttactgcaggttgaagctgattagcagctttggatcaaagtaatgggatttataagacancagagagtgagactaaactgactgaaagcattcgtgtacagtgagggctcggcctaatcaatgagaggatcgt

SEQ ID NO: 112775 - DNA, 271 bp, Glycine max
caccaaccaggttggaaggatgaggaggaaggagagagacaatggctgatctatttgcatggcttatctccttcttcctcctcattgccttacttgtcctcgttatgtaccagctaatgtgcctggcagacctagaattgattatatatatccttatgactcttcagctcgaataaatatggtggttttgccagaatatattacgcaagctgtcctgtgctgcttctaccttcttaccgggcattggattatggcactcttctgtcttcct

SEQ ID NO: 112776 - DNA, 270 bp, Glycine max
  unsure (1)..(270): unsure at all n locations
tgtcactccacaccaattgtaggatgttagtaatcaaatgttatagctctatgaacaaaatcgaatgccgccttccaatgatgtcgatggaggtgggacttccaatcggaccactgcataagctctagctactaatatgaaaatgcagctgcaaagagtaattcccaggctggagctacaaggctggaaacatcaaagactgcatcttctatggccatatttgattcaacggacccaatctctttnggcgtcccatctcaaaccatggta

SEQ ID NO: 112777 - DNA, 264 bp, Glycine max
ctggtactttaactcgaagggtgtcaaatcaccatgtcaaaaaattgtcatggctgatgttgtcagagcctgaagagggttaccgatatattcctcaacttggtgatgaagttgtgtacttaagacaggtagtatatttatgaatttttttctttcatggtttgtaatacttcatagtttgttttggaagtcaagtatccctaatctgtatcctagtatatgttcttatccttatttgattgtttgtttaatccgtttctaaat

SEQ ID NO: 112778 - DNA, 261 bp, Glycine max
atctactccaagtcctatctagcttgtataagatagacaataatgggtggtttagtttgttattgtaatttgtaaccaccccctaaattttgtttctaaaggctgagttcttttggaattttcgtattatgtacgaattccttcagatgaactagtttgtcatagaaatgtgtataggatttgaaaaatacagggacatgtatgtcacaatttaaaagtttggggagaggaaaaattattagtttatattctttggaatta

SEQ ID NO: 112779 - DNA, 264 bp, Glycine max
gatccatcttctttcttgatcgacaacaacaacaacatcatcaacagcacagcccctgttttctacgacgattccgaatatgacctcagagccattcctggcatagcagcctaccctcctcctcttcctcagacaaccacctcgatgaaatcgaaacggctaagaccatcaacaagcgcctcaagccatctccagcggagtcagcagactccgccgcgtctgagaccacgcgccatgtcgtctctcgttgacatcaggaagccg

SEQ ID NO: 112780 - DNA, 227 bp, Glycine max
atcatccatggctactgaagaaaatggcgaccatctctgctgactatcacaaccccatcgatctcccgagcagatcttgtgaaaaagctggtcttccataccggtcttggtttgccagcaatgggtaatgtggaatagtgagttgctccatggaggcacaaccttattctgtgcaggaaagcagctctagcatgttggggatgagagcactctgattgcactgccag

SEQ ID NO: 112781 - DNA, 277 bp, Glycine max
gtaaaaaggctaaaggtgtaattctaatcagctgttacaaatttctacagtatattagttaattacacctttagccttttttcactgggtcataatacgtatccctctaccagaataatacaaaggttgtgggggaactcttcagaactgtaatttgaaccagtgaaaaaaggctaaaggtgtaattaactaatatactgtagaaatttgtaaccgctgattagaattactttttaatcttcttttattaatgtatgtttataaatcgttatagaag

SEQ ID NO: 112782 - DNA, 268 bp, Glycine max
ttatttaggtaatgtaatcatgtctgtgtgcttttgctacttccttatcatttctctttcttcttcctccctgtcactgtttttgtttttgtttttgatcaaatttgttttcgctaaatatgacctagaatcctctatgttctttctttctcccaacttggacttactctttccgtttctgtctcgctttgttttcgtgagtaacagttggaaactcgtgttcaacacactatcattgttcgtaacagtgtttgtttgcttactctta

SEQ ID NO: 112783 - DNA, 165 bp, Glycine max
ataataacaagtaattgctaaacttgaaggttctactgtcagtgagcaatgcgatttatagttattaaggttttagcttgattgattcaatctttgtattttattttgttggatttttcattttaataaaagccacaagtgacatgtatttccaaacacatgcat

SEQ ID NO: 112784 - DNA, 251 bp, Glycine max
cttcagaattgccgctgtcgccgcccgcacatgtggaggaagaacgcacagacttcttccaatggttttctcgaggcctggattagtgttgttcccattcagtttttaggtacggcagtccgtacgctaggtatatgtatgatttatcatttatgagttgaaaaggtatatcacagtaattttcttaaattggaataaatgctggtataagccaatggtgaggatgcaataaaaaagatcgacgcaattgt

SEQ ID NO: 112785 - DNA, 261 bp, Glycine max
ctgccatcaagtacaagtaggcaaattcgtcaacttagtgtgtcccatgttgtttttctcagtcgtccgctgctgtaggctttccggcggcggtcgtttgtgtggttggcatccgtggccatgcctgtgcgtgcgtggccgcgcttgtcgtgtgcgtctgtcgtcgcgttggcgtcgtctcttcgtgcttcccgtgtgttgttgtacaacaagaagatgttttctggtgtctttggcggaataacagatcgtccgaacgac

SEQ ID NO: 112786 - DNA, 108 bp, Glycine max
caacaaggacggaccgcattggtgtctccaccggaattttacggacttatcgtattctctgaacacgacattgtcaagcttgttgacatcttgcctggccaatccatt

SEQ ID NO: 112787 - DNA, 178 bp, Glycine max
tcggtcgtggggtaacatgtgggaacaagagcacaaatgccacaggttttagagagttggacaacaagtactactggaccttcaaaaagcaacacctaaaattaaaggtttctatgcagctactaagacacaggtggctggtggtagtgcaaatatttatgccattgcacagtgtgtt

SEQ ID NO: 112788 - DNA, 267 bp, Glycine max
cttgttatgatctttaccttgcatacatatactatattagctgaacaaaaaatgttgtaattaatgcaattagaattttgattcaagtctggttatttctctaacatgttttcttactgtcacctatctccgtcattaccaagccatcgaggaagacaaatgggacgtaccacaagtgccaatggaggaagattagccagattctccaacatcgatttttacacttcatttgtctgtgaattacatttctaaagatattgctgtatt

SEQ ID NO: 112789 - DNA, 267 bp, Glycine max
gtgaccgggcacacgcaccagttcaaggcatataagcacgagggaggcgtggtgatcaaccctggctctgccacggagacctacagcagcatcacttacgacgtgaacccaagctttgtgctgatggacatcgacgggctcgtgtggtggtgtacgtctacgagctgattgacggcgaggttcaggtcgacaaaatcgacttcaagaagactgcgacgatgcacggctagccctatccttccactccgtgattgagtgcaagacatg

SEQ ID NO: 112790 - DNA, 263 bp, Glycine max
gtccaaagccgcgagaggcaggggcgcagaaaaccctagccgccttcctctccttttcctttcataaaccctcagccgcgccgcaatagctcgccccctcgttcgccgcctctcctgctcctaccgcagctctccctcagtttagtgttcgcaatggcggccttcaacaagcttggtggccttctaaggcacagtgctctggtgcccggtatcactggtggctcttctcctgcagtgttcaatgctgcacggctcatgtctac

SEQ ID NO: 112791 - DNA, 248 bp, Glycine max
  unsure (1)..(248): unsure at all n locations
gacacctatcctgattggcccgctgatctcgatgtcaaacccgattanatttcttggtggatgagtgccgtggacgctatcaaaacccttgggaatgagcagtataagaagcaagattataagatggctctcagaaagtatcaaaagctttgcgctatttggatgtgtgttgggagaaggaggacattgaccaagagaatagcgctgccttaaggaagacaaaatctcaaatctttaccacagttctg

SEQ ID NO: 112792 - DNA, 267 bp, Glycine max
gaagaaggcaagaaaggcagcagtgaaagaagaaaagagagaagcccggaaagcgaagaaagagctcaaaggcaggtataaatcagaaacgcagaaggctcagaaagttgctgctgttactggaccttcttccattcgcctaatggatggttgatctgtggcacgtttactgatgagtgacgactatgacagtcttgaatccaaaagaccgcctggagccctggacaaatgcatcaaatctatgaacgatgtatgataccagttcat

SEQ ID NO: 112793 - DNA, 114 bp, Glycine max
taacgctatgcgaaacacctcccgttccgcgacgccatcccaagcgcgtggtaaaacagtacaacaaatggctccccacagcgccagcactcaagtccgagatggagatgaaag

SEQ ID NO: 112794 - DNA, 262 bp, Glycine max
cagagatccaccttcccctgctcgcctccgctcacctgcgtgctccggcaacagccgctttcggacttcggtttccctccaacggcgctccaaagaacgttgacgaatatacagatcagctgatccaagaatgaattacatcaccaccaaaaaagatgaagcacacccaggttagcaaaagcatgccagattctacatattcaaagaatgacaacatttagtccatcatgaaatatatcaaggtatcatgctccatcacttt

SEQ ID NO: 112795 - DNA, 260 bp, Glycine max
gatggtattagagtaagagtctatcttagattcattatcggaccacctgtatttgctacgctccaagctggtagtgttgggtgaggagtgttacaaagccgccttaattgcggtcacccttagcttgccttgttgtggttctttggggttgccttaattgcaacctcaagggtggcggtttagtctcacatcaactagagatatgacttaaatagagcttatattcggtagtccttacttagttactttacaagctggtt

SEQ ID NO: 112796 - DNA, 170 bp, Glycine max
ttcttgtttaatttgacaagatttttatcatacatgatagaagtaatatattaagatattggaagaaccatggtgtccataaaaagattcatttacggaagcttgaattgaatgttctcctagcctttatttggaattgctttactttgttccttatgtaattctaagtg

SEQ ID NO: 112797 - DNA, 256 bp, Glycine max
tcaaaggtgactacgacgagcagtccatcatacacgacacaagcgcctgtgcagcccaggcaaaacaagtcgctcgtcgtttcggaagacccagaaaagttacttgtgagcgatgctgcaaaggatgctaaccaagtcatgcccaagatggctgaaagagcgccagaaaagaaaggcataactggtagcaagccagctgtaccactttccgcaaaggccgttttgaatgacaaaaacaatgatgcacatcgttgaa

SEQ ID NO: 112798 - DNA, 251 bp, Glycine max
cggctcgagcacactgtgttgtatgagctgcaaaacaagaagctcaattggatttggtatgtgaatcagcctgaacctgaagttaagggaacatcggtgacaatgaaagtaaacaatgacatgatccagaaaatgcaccaagaagcggaacaagtttggattcctgagttggtaaaggtcataaaggaaacaaaggaccctttcttaaatttcatatatgatagtgatcccttagagaagacttttgggac

SEQ ID NO: 112799 - DNA, 247 bp, Glycine max
gtgaggagcaagaggcagtgtagtttgcaaatcccattctcattaccaaaacgacacaccaggaggtcgtttttcattctcaggttttcataacaaatttttgaaatggaagataaaggaattaagcaggagtcaaatgcttcagcagctggggtttgtgaggtacctggagaacctactattgtaattaatggggtgcctgacataatccccagcgactgcaatgttgctcccactcccataagtc

SEQ ID NO: 112800 - DNA, 250 bp, Glycine max
aaggcaatgaagtttaccatgtttcacttggctgatataatgcggcagagcttccaaagcatgaattaagcatgtcagtattcacaacaccagggctaagagcaatggctgccaatccaggaggtagctctttagccaacgatcgtgtcaagccctcaatcgcccacttcgaagcaaaatatggagcaacctgaaatgacaatgtgcaatttagtaggcattgaggattatgattcatcagaagaaacaa

SEQ ID NO: 112801 - DNA, 209 bp, Glycine max
ctttatagcacttacagatgcaaagagctgtcgattgcacacatcaggtgatagctataggctcttgtaccacgtgtatgtttctttatgctggtttgtacacgagatgtttgtactttgtactatagtttttgtaatcagtctctctttcaagatttacgtctcatataaatagtatgtgcattgtttaagaagataatcaaaggggt

SEQ ID NO: 112802 - DNA, 248 bp, Glycine max
  unsure (1)..(248): unsure at all n locations
aagagtttaaggtgtcttaggcacgagatatntgtagaggcagtagaaggtggtcgcggagaagacaacgaggagtgtgagacgcgcagggactgaggataacgatatcaatatcgacattgttggagtagaaaatggagattatgaaagagagagtgatgaatagtgatagtagctaactattatgcgttgttgttattgaaaaatgggagtgaagtgcagagtgcgagtgcatgttttagttcatt

SEQ ID NO: 112803 - DNA, 245 bp, Glycine max
atttgcttcatgttggtgtttaattgaaactgatatcttaggataaactaaaaatgaacatttctgattatctgaattaagcttatatagtattggaaaaatttgttaataccttggcaaaatcagatggatggtgtaaagcttggtagcaaaagtgttggatcagttaatgctgctgttaacttctatgatgataagaagccctcttcaagaacaaaggaactccacagagcaagaaggggtat

SEQ ID NO: 112804 - DNA, 248 bp, Glycine max
  unsure (1)..(248): unsure at all n locations
gggaggtggatttgaaggggtggatagttgtagacttcaaaaacgaacccaaggtgagaaagtctactgaaatggttactgttgactgcgaaatgggtctctatgaagatgggattgaagcagtagttagagtctgtgtggtagaccataatttagaggtcaaactagataaacttgtaaaaccagacaaagaaattgcagactacagaacagagtttnatggtgtctcttctcaagatctagaggca

SEQ ID NO: 112805 - DNA, 241 bp, Glycine max
ggtggaagatgcttcttccgctctgttgctcgtggggcctgtttgaggtctctcaagccccctcctaatgaaagcattcagagagagctggcagatgatttacgagccagagttgctgatgagtttatcaaaagaaaggaagagaccgaatggtttgttgaaggtgattttgatacatatgtttcacaaataaggaagccccatgtgtggggaggtgaacccgaattgttcattgcatcac

SEQ ID NO: 112806 - DNA, 244 bp, Glycine max
caacaagttatacgaggaaaagttgccaaacagttcttgcagctcatctcctttccattgtgagaataatagcaccaatattgccccatttagctgaggatgtgtggcagaatcttccttttcagtatataactcaagatggttctattgctgaatatgtatttgaatctagatggcccatctcgaatgaaagaaggcttgccctccctgttgaagaaattaatttctgggagaatattcttga

SEQ ID NO: 112807 - DNA, 240 bp, Glycine max
gtaatgatgaaattttcatcacaattttttcttctttggatagtatttagaggtctttagtattagcttcctcattaattctatatccagtcaacaattgaatctcccccgaaagtgtcaagccaaaattttgaatacagatttgatttcatgacacccgtagttgccttttttcaatccctgtatgaccttacggatgagcttggtagactatggccagcaagttcatgccttgtattg

SEQ ID NO: 112808 - DNA, 239 bp, Glycine max
gatggattgcacattgagtacgcaaggtcgaagatgaggaaaagctaagttgttggactgcaaggattggcagtgtcatctcctgtctgtcttcctggaggctaccagtaggcatccctgcacacgtagctgcgtgtagctgcttgctaagcgtgagaatccagaacggtgctaattgtcctgtatgccattatacaatactccctcttttaaatcatgagatactctcttcgtttcaa

SEQ ID NO: 112809 - DNA, 184 bp, Glycine max
  unsure (1)..(184): unsure at all n locations
attgaagactctatttggttgacgcggaggtagtttcggttgtgcgtgatatggggtaaaatttagggttgaagaaaattttagagcttgttcatcattggatagaaaattagaaantcatgaagtgcttgctcgacaagggatacttctgtcgtgaagagggaaaaatgttatgtaatgctgg

SEQ ID NO: 112810 - DNA, 259 bp, Glycine max
ggtctgctgatgtcatagataactctaagtgtgatggacggacgcgattctggtgtgtctgtcgcaataggattgatatgatctacggtggtcgtctatggtgttcatctagtctatggcaatcgtgtgagcattgcacctggtgatgatgatgatctgttaatacgtatgccataggacgattcatatagtatcaaaggtccgcttgttcatgggaattagccaggagcactcgatgtcgtgaatctaggattgcatg

SEQ ID NO: 112811 - DNA, 260 bp, Glycine max
  unsure (1)..(260): unsure at all n locations
ctccgacgccggatttcaaccaaagcgcatgtaccaganaaaagaggcgcagacagccaaaaaaaagcagggcatatcggacgtgacggatccggcaggcacaaagacgtagtacgacgcccgggaataaagacggcccgaaacgcatggtagaaacgtactccgaatttcgtgagcttttttttttttgcaacattgggcactaggcagtcagcaaccacaaaagcccaaaagggcatcgccagaaaaaaaaaagcaag

SEQ ID NO: 112812 - DNA, 256 bp, Glycine max
tggagttttcagagctgcagtacatatttttggagtacctcttttgctgctccggaaactctaaaaaaacaacctagacatggagtctggagttatttactcaccactgccagtcttccactggttataagaaaaccatttaaatctggaacaaagctgctccacccgagttttgaagtggagcagagccatgccgaacacgcccttaatttattctgtgccacgtttaacttgtggttgtgcttatttacgatgg

SEQ ID NO: 112813 - DNA, 126 bp, Glycine max
  unsure (1)..(126): unsure at all n locations
ggaaattttagaagctgttcaactttggatcagaacggaggctcagagaatcaatcaccaccgttcaccaatttgctgattcaatcataccgngnaganngtcanggaaggannanatgggagatg

SEQ ID NO: 112814 - DNA, 252 bp, Glycine max
ctccaacaaagttcccaaccccaatcccctttgaaagcaaaagggtggctagcttttgctcctcatgccccgcgatgatagacactttgtctagctagatagcacccttttatctacccttccaccgttcttcttcttcttcttctctttctcttgcccgtgtgtgtgagaagaaacccaaccttgtagctcttcctttatcaatcattaatattaaggaatatggatctgtgactgatgtagcttcaaatt

SEQ ID NO: 112815 - DNA, 249 bp, Glycine max
ggatctctttgctgtcttaaagaaacgaattgaacgcgttttgattagaactgagggaggttcttaccaacagcggattctgacagaatacctgaaaggcattgaaactagagcagaggagattgttcaagtgctccaggggagaccacaatagcattttcttcgaacttgaaattggcttggcaattggatgtcatgagccaaaacattgttctgcatgatggtagaagtggtttattatttgaagaa

SEQ ID NO: 112816 - DNA, 265 bp, Glycine max
aggccatagcatcggtaatcagtggtaatatgtgatatcatcgattcgggtaacttaagtatatagatctcttagagtagatggaaaagtataagatggagagaagttcaatgcttgtggatggggaccagacaccaagtcaaagcaggataaagagataagggctgcagcagagaaactggcagagtgccaggagaccatattgattcttggccgtcagctgcaagctatgcgtcctccagccgagtcactcggctcttcacct

SEQ ID NO: 112817 - DNA, 276 bp, Glycine max
cctcacttctccaatcgtcgtctccaactttccgcatccctgctccttccgtcagcttcgaaagtgcaagcatctgccgaaggaataagtccgaactatctccaggtatcgggacaagagtgacaggcccctccaacaagctaccccgcgtgcataataaatcgacatcatcagccgcccgtatctttcccgcccaatttcttccttctccttctcaactcctctcccagacaagcaaacaatcatacgctacaatgtctgccgataccgttggaa

SEQ ID NO: 112818 - DNA, 270 bp, Glycine max
tgtcattctgcttgtaaatctactagaaatgctagggaccacagtatggtcgatttgtatcggcggtttcaaacttacatataaacccagtatgttgattgatgggcggctactgctacaatttcatatcttctatcctgttcatttctatctttcttgcaatgttcatgtttgtggctcttaagttgttcacattcttaagacaaagccaatggtttttttgtccctgtggatgagattcttggtatctaggtgaactgcagatagcaa

SEQ ID NO: 112819 - DNA, 266 bp, Glycine max
gagcgatacgtgctcacgcgcgcgtccaggaaccgcgagctcaacaagcacgcgcgcctgggctgccaggtcgtcctcgcgccggagctgcaggggatggtcgtcgccatccccgagcctaagccgtgggacatcccataatggcctgccgacgaaaggtaaggtgcggcttttgacgctgtgagccttccttaattccgctggctcggtcaagctgtgcgcctgtgccatccccttttatatgttacggatttagtgaagaataa

SEQ ID NO: 112820 - DNA, 148 bp, Glycine max
gacgtgataagcatgaaccagtcagccctagccctaatagtgcagcaatgtcactcggcacaatcaacttatatgtcacattctccagtgctcaatctcgaatggtgtcaggagtagacgtgacagctcatccatcgacaggtgagat

SEQ ID NO: 112821 - DNA, 263 bp, Glycine max
ctcacatctcttccatcggttaactgtccgaatctcagagatctcagaatcgaaaactgtgacaacattgactgtcttatggtttcacgggcagagtcgttctagagtctgtgctcttatagactttaccaatgccccaactttgtatgattctggacagttggatcgcctgcgcccaacttgattgctttcagtgtttcgggctctgacaagttgaagtcgttgcctgatgagatgagtagtcttctcccaaagttagaata

SEQ ID NO: 112822 - DNA, 110 bp, Glycine max
gagaaggtcactgtcctacacaatcgactgatgtactcaaccatactacgcaatcaagtaggacggctcgatcatgaagaacacacagctgacaatctgtccatccgatt

SEQ ID NO: 112823 - DNA, 220 bp, Glycine max
cgagtacatgtcagagcacaacaatgagatataccggttgctgttgcgtgacccaaaggtctaatgtatatgcctttgctcccatagtaagttggtgacacgtttcaaggaagattttgctccaaggtagaagttgcgagtttcttcaagttgaaatgaagccatcaccaaatgtagcttcgtgtgccatctgttactcagtagtcatgatgatcagttg

SEQ ID NO: 112824 - DNA, 258 bp, Glycine max
tggggatcaagattgagcagctgcgtcggcacgagtttcggcctctgaagcggacgaggcagctgggatcaatgtggaagagcgccagttcatctcaaactttgtgggcaggtcccctgtgcgtgatgaccagggtgctccaaggcaaattgcgaacctgaacaatccgtcagaggaagagctcgccatgttgctgcacctaggcgaccagtagcccaagcggcttcgcagacagaatccgacctcgacgggaaacgg

SEQ ID NO: 112825 - DNA, 158 bp, Glycine max
gacaaagcttggtttgactgttttgccaagctatcctccacccttgaaaatgtgaacttgtctatattgaagtgttcttatcttatctcgccacacactaatttcgaattctcgctccctcgtcgctcatacacatacataggcttatgacccaagtg

SEQ ID NO: 112826 - DNA, 257 bp, Glycine max
ctatcccacgctctaccattacctatcaccttcacagctcatctcaggatagcatccacagactctccagcaatcacagactaccctacaatggctcctcctccaccttcaaacctccctcttcaggagcgcgtgctccagctcgtgcagacattgcagttcgcatggttcgccggccatgtcatcctcctgctgtcctcggtccgttacgctctgtcgtacctgaccttccacgcaaactcaaagtgggccatctt

SEQ ID NO: 112827 - DNA, 249 bp, Glycine max
caggctgatgcttctgaccagcctccatcgcaatcccctgggcatttggacaggggcagaaagcctgtcagaataaacgttgcaagtattgtttcagtgtcagcatgtgccgatttaactttaccaagtggtgctggcctctgtatagacactattcatggtcctacgttcttggttgcccatagttgggaggctcttgacggctggctagatgccatacgccttgtctacactatttttgcgagaggg

SEQ ID NO: 112828 - DNA, 273 bp, Glycine max
gaaaaagccttgtcacaaagtccaaacttgcacctaacataaactttccggaaattctctgtcatgaagtttctatttggaagagtgaggtctatattgtcataaagtgcaaccccatgtccttattacatattggatttcctttcctttcttccttgtcttgtttcattatttgcacaagggataataggggtcaagaacttagtacaaacattgggagtagtgagatcttaactggtatagatgatgtgtttgaaccacgagaaggtttca

SEQ ID NO: 112829 - DNA, 166 bp, Glycine max
gtatttctctcctttgtattttttagatttatctgtatcgattattattagccgaccccacctagtgggataaggcgttgttgttgttgttgtatctgtatcgattattatactaaaattctactgcatcggtttgtttgcttacgtaaaagtaccctcctttaat

SEQ ID NO: 112830 - DNA, 135 bp, Glycine max
gctcagtgcatcaagatctatcgctgtgtaagcgaacatggtcaaaggagcgggtcgcgctctcgagatcgggaaaggatccggagatggagcgactgctgccaatacagccgatcaggggctcagcatgaccac

SEQ ID NO: 112831 - DNA, 277 bp, Glycine max
acagtgtctaatatccatttgtctttgtggaaattcacaagcactagtgttatgattttccacaaagacaaatggatattagacactgtttttgtggaaaatcataacactagtgcttgataattgttcccttgtatttccactcagcaagtacgtacgttatgtacgaaatgggacatcagaataagtcatctcgtaattcatgttagagatgctgtgagtttctcttatgttcatgtatgtgcttaataaaatagcaatttgaagtgacgtgttt

SEQ ID NO: 112832 - DNA, 269 bp, Glycine max
agagtcgccaagctgacaatgattgtattgaagacgaaggatttcgaggtaatgggttaccgcgctgggcatctcatgcacttgagttagttgagctgattttgaggcctccagaaggtggtcctccttgccttcctgatcacagtgaacaggtaatatcagctctaaacttgctaagatttattctgataatagattcaagaggacaaagatctgcaaaattgtttcggaaagagacattgcacaaggtgcactcggagtggctgacc

SEQ ID NO: 112833 - DNA, 273 bp, Glycine max
aatatatagtatgtgcttttgttgatgatggtgagatatatttttccagtgcatcttggtgtctgaagaagatgaggaagcaacatttgtggaagcttctaagcgtggaaagttgttacctatctatagcttagtagtatttcttccatagggtccgtttgctagagtcgaatggcatagaatgaaagtgaattgagatgaaagttttgaattaaaatagaataaaagaatatgttttacctcattttactgttcattttactcattttctgt

SEQ ID NO: 112834 - DNA, 247 bp, Glycine max
attaaatcagctgggagtggtcgaggtcagttggaaattacttatttgaatgaagatttacggtaagtcagtgattacagaatttaccgtccctgtctcacatgccaaccaggcaaccacaacatataagtatacacaaaatcaaaataataattgttcatgcacttacaaggcaggggttaataattccatattacctctatttcctcttgatattctgtcaggctcaggcagttctagatcgcga

SEQ ID NO: 112835 - DNA, 178 bp, Glycine max
gttagtgctgcgtgcctccagctctgctgtgtcgtattgcggtcacagtgtcggttgacctggatgtgaagtctactacgcgcgaattgcgtgatgtgaggactctgcatgggcgtgtctcaatctcagtgtatggggaaccgggcaagtcaaggtcctcatggaatagcgccgtggc

SEQ ID NO: 112836 - DNA, 277 bp, Glycine max
gttcctcccagttgctgaggggaagggaatgggcagcctggagaaacagcagaatgacaaaatcctgagctctctacttgccagaaactctgatgaaccgcttgatgtcagcaaggcaattacaatgtacaaggtgaaaaaggaaaagcagagaaggaaagagaaaaatatgccatcaaaatctgatcagcttaagccccagaagaaaccccacaagaaatcatcgaagaaaagggcttaggtccacgtcatttcgttgaccacagttttgaaagct

SEQ ID NO: 112837 - DNA, 258 bp, Glycine max
agaagattgaggatgaggttagagggttaaggagggaactaaatgagaaaattgaagagaaaggggaaattttggaaaatgggttgaagaaaatggaggcaaagaatgaggaattggagaggtatttgagtgagttgaagggggaggattggttatcaaaagaggagtttgagaagtttgttgatgaagtgaggagtgtgaaggggagtgggtatgagggtggtgggttggatgagataagggagtttgcaagacggg

SEQ ID NO: 112838 - DNA, 270 bp, Glycine max
  unsure (1)..(270): unsure at all n locations
cgcactaccctcccccgtcgccgacgtgcccctcaacaatgacatcaagatattccacacaacatacgacatcagtncaancaaagtgntcctcatcataggattggccgtgacgcacgaagcgtggggcccacaaatcaagggcttgactggagcaaccgtccccgacgacgtcgtttggagcgaagaagaaggcaatggtggcatccatgtatgcgcgtttgacaatcgcggcgtcggtcgcagctccgtgcctgtcgaaaaatctga

SEQ ID NO: 112839 - DNA, 271 bp, Glycine max
cttagtaaatgaaaatgttagcagtcaatcagattatttaaagtttgtctgtgattcaactttacggacaagagagagtgaaattgaaaatttgcaatctagtgatgatgttgcaaaacctgctaatccaaatagtagtacagtgaaaaatgaggagtttgtaccatatgttgctgagaatcaaattgatgataatgatagttcatcagggggccaacagggtttgccatctgaagatttgggtattgtgaagcctgagcctcagttggca

SEQ ID NO: 112840 - DNA, 106 bp, Glycine max
cgcaggtaacatgtcgcatatctatctcctctgcttctcttaatatgactcactctggcatctctcacccacacgtaaacaagaacaattcttcattgaatgaagt

SEQ ID NO: 112841 - DNA, 264 bp, Glycine max
gcggatcacctgacatgtgacggtggccgaagtactacgaactctaatgacgttggaacggtaaggatattgtgatggcctgttagtttatgggaggtgtactgtttggcattgatctcgatgtaaacaaacaatgttagccttgccccatggggaagattaaaaaaaaaaaaaaaaaaaaggggggccccccgactattaacttctccgacccggaaattaattcgggccgggaacctgcgggggaaccagtttccccaaaag

SEQ ID NO: 112842 - DNA, 264 bp, Glycine max
cttggttcaaattgctcttgttgagagcaattctgcaagggacaatcgcataatctatcctaagcttgtgaagattgttgacctgtaatctggcactgcttggcccgcgtcagtccccttgaagttaaccatgctatgatcgttgagaagtcagttatgagaaactattttgtttacttattaatgggttcactgccatttttgtggctacctgtttctacgattatgctacaagcagctgcttttcgtttcgatgaatgtttt

SEQ ID NO: 112843 - DNA, 269 bp, Glycine max
gcatgctttgatggttccttcagaaaagccaatgtgtgacactgccgatgcagttatagattgtcttgccaaagacagaggttttccccaaaagggtaaattcgttcaggctgtgatggatgctggtccattgctcaaaacattgctccttgcagggccacttcctaaatggagaaacccccctcctttacaaaacatcaaagttccacctcttaccataaaaaaatgtgatgtcaatagcattgtgcctaatacttttggagacactg

SEQ ID NO: 112844 - DNA, 288 bp, Glycine max
gcgtagtaagtcggaataggtcgaatcgagcgtgagtttatagttctcttctgtttgtagctttgaattataaaaccgaaagtttagatatcttacttgaatggatacccaaaaatcttacttgaatggatacctaaattttctgtcagttgcaggaagtatatttagtacttttttggaattcgggtgtttgcccatgattttattcatggccttgcttgattgtctcagaattgaagaaaggctttaatgtttgaaatgctttgtctcgtatgatgagaagctact

SEQ ID NO: 112845 - DNA, 245 bp, Glycine max
ctcttttggacggtgaaggacaaaagagagtactgatgaactgattgacaatcttcaatactctcttttggacggtgaaggacaaaaactgccttacaggaatttgatgggagcacagcttctgcatgacttggcaggatagattatatatattaattcttgatttgaggaattgagattaaaatgacaagtataatcaacaacaaattaagattagtctcttttttttttcacttttagctagc

SEQ ID NO: 112846 - DNA, 145 bp, Glycine max
aaaaatgcagtctacaagaaattcagctcagtttgtatttcataccttggcctgctatgctgggtggtcaaatttggcacctctacgttggaagccataaagctttggaattgttgagatagatattcagtgggtagtagtcact

SEQ ID NO: 112847 - DNA, 163 bp, Glycine max
agatttttttaccttttaaaaatgctatgtaaaatgttgtcaatttgcatgtaagaatatagcttattcttaaatgatctccttcacccatcagattttcactttcctaaagtgagggatttactttaaggaataaagttacttattgatagttgttgataag

SEQ ID NO: 112848 - DNA, 108 bp, Glycine max
atacaatgataagaaaagtgcccatgaccttgacgactagcgtgcgtcagctatcgcgactcggaaatatgcatccactggttcaactgctatgatgctgctcgatga

SEQ ID NO: 112849 - DNA, 222 bp, Glycine max
catcgtcacagacatggctctaacacttcgtgcttcaacttcagttattaatcaggaggcaaccacagtcctcaacactcctgacaatgcacctgcaatagttagactttgaatatccaagccatcatcatcagggctccgtctccgtgctaagaattcaatgcacgaagctcatctcactcgtgcgaaatcgaagacagtgttcgctacggcggtcgcaca

SEQ ID NO: 112850 - DNA, 214 bp, Glycine max
gttaaaggataggataggcaatgaaaggttatacttcttgattcagatggatcaataaggcaattgatacagagatatataaagtttcagaagattagacgtttcatgaccctctacctctccgaaaaaataaggcataaacccagcaagaatgaaaataagaaaagcctattttctagagaaaagaaacgaaggaatttttgtggtccataat

SEQ ID NO: 112851 - DNA, 258 bp, Glycine max
tctcgagccgaatcggctcgagatcagtttttcacattttaggtagtgagatactttttattgtcaagttaattattgacataattattattttataagctagaagagagatttagttcagggtggatgtagaatacaataaaaaaaaaaaaaaaaaaaaaaaaaaaaaaaaaggggggccccccaaataggggccccctcacccgggaatttattccgggcggggtccttgggggggaaaaattttccccaaagggg

SEQ ID NO: 112852 - DNA, 166 bp, Glycine max
tgatcgaccgattcggctcgactagtagaatagtagaatagtacagggtgttggctacccttgatacattaatcaagacagaagtgtgagagaaactagaatccgaagaaccatggagaaggagtagaaagacacgccgtggttccgaatgatcgcttctgaacgc

SEQ ID NO: 112853 - DNA, 202 bp, Glycine max
atatgagttccttcaccaccatcatggctcctgtgacaaacttgcatggagcagtctccaaaaccttaattcccatcacatgccaccttccaaatgcacacaaaagcataacaaagagaggacaagtgattggatttcttggaagcaaagcacaaaaggaagcatcagagtgtcaagttcaggccacaagaagagcagcagc

SEQ ID NO: 112854 - DNA, 261 bp, Glycine max
  unsure (1)..(261): unsure at all n locations
gtttcttacaagcctctactatactgcttcaccttctgctctagctcattcagtgctcatcgttggctttctgatactctctgtgtagacgaaccagaccttcacgcagatgggatatngctctctgaattctctggcctccgaagctcatcaggcttcctttcctcttctagaaaatcttcagaggatttgcattctgtcattggcttccagacctatgctattggaccgagtggaagattctaaaaggtgtgatagaag

SEQ ID NO: 112855 - DNA, 232 bp, Glycine max
  unsure (1)..(232): unsure at all n locations
ggttatcctagccacacacactgccttgacgacgatatcgtccacacaactcacgaccccccanntcgcgnnngncaccgccattccanccgccaccccgggctactaagccggcagcagttagcattaaccctattgattgccagattcagaagggtcttctccgtcctttatttctccccagaacctttccccacataccttgcactgatgtggctggagaaatagttga

SEQ ID NO: 112856 - DNA, 142 bp, Glycine max
ttgtcaccttcatatcttccttgtcactgcccgcgtgtcgtcgccatagccaccgtcaccacccaagcctccgccgcaattttccggccatgtacctcgaactcgaggtgtttcaacggcatctccggtaaacttaaccggg

SEQ ID NO: 112857 - DNA, 135 bp, Glycine max
ctcgagccgctattagtgataatgattattatcttagaggcagagactgtgattgttgcagcagagaatcattgttgtcatcttgtgtaagtctagtgattgttccccttggaaaatttgattctaatgagatgt

SEQ ID NO: 112858 - DNA, 230 bp, Glycine max
acaagagaacacaggataccgtgtttcatagtctctcacacacaaacctccttcggatacagttaaatctcaggatgtataactacgattttacgctttttttcgaaataaaaaatagattagaacatttgccatgggaacccagattttgcgacatcaggatctgtagggcgaacgaatcagggctccttcggttaacttttcccggcggacaagtcccgataattact

SEQ ID NO: 112859 - DNA, 251 bp, Glycine max
cttctagtttttaaagtggtgaaaatctatctgctttgagtatcgtgttcattgagtgtggtatatcggacattatctagactctgaattacttaatatttttatcattttgtgcaaatcctagaaatagcctctttgtttgcaagagtaaggctgtgttcgtctaccctccccaaactccatttgatttgtgttatttgcaagcaaattcatggttcgtgtacacaatgttgcaagtgctctacttattt

SEQ ID NO: 112860 - DNA, 242 bp, Glycine max
atgttatgcaacgaaaagagatataagaagcgaagacagagtatgagatgagatgggatatgaatttgttatataaataaggggtctctaatttattttttcttacctctcttttttcttctcgtccgtctcctaactcttgtgccattatcctcttcatacctcttgactttcaggaatctcagggtaagcaaggcaaatagaaaagaatagggttttttttttttttttttaaaaattag

SEQ ID NO: 112861 - DNA, 135 bp, Glycine max
gctgttcgttaagtctccacattgaagtatacataccagtaattaattctatttccatcattagctttcaattcggctaatggacacatcattggtgtttaccgtgaggaggcgtgaaccagatctgatagctcc

SEQ ID NO: 112862 - DNA, 265 bp, Glycine max
caacaaataagatgaaaaacgtaggaaaattagagtttagtggagaattatagaaattacggtcccttcttctaattgtgtgcgagtagctgttcttcagcttctgctttacaagagttggataccgagcagcagcagcaaatgacggaaggaagctattcccaaactatgcaaattgatccaaaaagggctcgattccatgctccgttgtgtggtcaccacttcctgtaatctcgtggttcattccttgcattggtcacattgg

SEQ ID NO: 112863 - DNA, 177 bp, Glycine max
ccacttcaccttacctaaaatccactttgcagtgcaagattgcaccctccaaggctcgagcctcgtcctgctcgcgaaatcgcaacacgtcgagtctctgttccccgacctcattggctccgtgaccacctctctgaaagtcatgcctctacaacagctccacttgtgcaccgaagt

SEQ ID NO: 112864 - DNA, 256 bp, Glycine max
cgacgttcaatactattgttggagatgcagatgtatcttcttggagatactacatcattaggcagtactgatacagaggagtcagactacgactcaccattgatcgccacagcattgagatgcttctataccagcgtatgcatcacgttgagtgaaatgagatcatctgtggatctatgagctcagctagctcaactgtgtatatggattggttaatctggcaacttcttttcccagccatgctactccaggtatt

SEQ ID NO: 112865 - DNA, 265 bp, Glycine max
cttctgtaaaaaaagcttgcattaaactttgttcaaaattataacttaacgtaggagattatacaattatatatggatgatttaaatttaatattactgattacttataaagttatataaattttaaaaaacctagtgactttattctggagaattcattaataaaaatttattattctcaccctttcatacaaaaaaatcaaaaaataaaactattgatgatgatgtttttaaagctcttcatatcaaaatagattgaagtgga

SEQ ID NO: 112866 - DNA, 219 bp, Glycine max
cgtggtcaagtcgtcttacaatcatgggtttgggcaaagttgctgtcaagatacgcggcgccgagtgcgcgagtgaagccatcatacttggagtgattacttcgataggtggtttcctgtttggttatgacacgggtcaaatttctggaatgcccactttggaggattcaattcacggattcggaaaggaccagggcaatggcgagaaggctttcagcc

SEQ ID NO: 112867 - DNA, 260 bp, Glycine max
tccaaatcatatgatttctggtgctcttttgtgtttacatatgctacgttactgtcctagattttttttgagctagttttgtttataaatgttagtgggagattcaaactgacaacctttcttcgttcccttttgccttcacctttaaactctctttcaaccacttggccaactttatatttccatgttattgtcttagtgcagacttaatttaccatttttttctttttttttttacctagcactaaatatatgactat

SEQ ID NO: 112868 - DNA, 116 bp, Glycine max
ctcgagccggtcaaaatgacgtcgactgaaccgcaagatatcgaaaaacttcaagagcagatccacaaaggcacagaactgactaaaacgtatcttgctctactcaaagaaaagtt

SEQ ID NO: 112869 - DNA, 265 bp, Glycine max
ggattctgacccctcaagcaagctctcatgtttaagctttgtgaatagaaaaagtttggttgggaggacaaacttcattaaaagtagctagctagtcaggttcctcgaaggtgaaaattagtcaaacaggattctgacccctcaagcaaggtcacatgtttaagctttgtgaatagaaaaaatgtggttgggaggacaaacttcactaaaagtggctagtcaggttcttcaacggcaaaaattagtcctcaacaaagttgattaa

SEQ ID NO: 112870 - DNA, 240 bp, Glycine max
cttctttaatgggtgaagattcttatgggaagatgtacagaggtcatgtgaagatcggctcacttgttgctattcggtgtgtagaaatgaaaaagagacacagcactcatgactttgtgcaacacatagagctgatatccaaacttaggcatcgcctgctagtcagcgctattggacactgctttgagtgttctttagatgattcaagcgtcagcaaagtatttcttgtctccgaatatg

SEQ ID NO: 112871 - DNA, 206 bp, Glycine max
gagcgaatcggctgagattttttactttctaatgtagcttggtgcggactaggaataacattgctgttgatgtagagtgtgaatatctaatgccgagggcatctaaggatgttccctactgttattaactgtcagtatatttattttggacggttttgtgaaacatattgtgaaccatcaatcaaatggaattgtggaaaaatgtt

SEQ ID NO: 112872 - DNA, 190 bp, Glycine max
tgatcaagctgattctggtgattcaaatgatgatgatggttcttcatcaagtcatggagatggtgctgctgaagagagttagagaaggttttttttcttttttgtgtttttctggtagatcaaggttttaaattgcggtccagttatggttttgttgcggtcggtctttgatgttgcaggaaactacaga

SEQ ID NO: 112873 - DNA, 129 bp, Glycine max
ctcgagccgcttgctatctttttcttctatagtagacacacggagagagtctcagagcaatgaagacccttcaatggctaccactaaagtttgacattgtatactattctacgtacgggcatgttggga

SEQ ID NO: 112874 - DNA, 206 bp, Glycine max
ctcaaagtccaatatattttcatgttttatgccaaagtttatagtggcaagaaagggacatgtgtcaccaacatcatctcgctcatcatcctcatcctcatcatcatcatggtcatcggtatatccggcatactcatttccatgagggacacagatcaaggaagcatctctttctacagctctaaaaatgtttgctcttttctaaa

SEQ ID NO: 112875 - DNA, 264 bp, Glycine max
cttctgggtggtgatcaagcagctgcagtcctttcaaaattaaacttgaacagaaagtgagctgcttcgcaatgaggagcacatttgaattcaaaggtgtcccgcgacaagcctacttgtgaattgacaaccatcacatataagattttgttccattttttgtgtttggcttttcctccccaagcttaaatcagaaaaaggttttctacttcattacaggcacaccataagcctggggacatcaaagcttacagaaagaaacat

SEQ ID NO: 112876 - DNA, 262 bp, Glycine max
cggaaatgagattgctgtctcattacaacaaatggaatttttggagcgatcttatgccctgttctattgtccatcttagccagtataacttttcttaacacacacacacacgtatcttttggtaggaagtgagcaatgtttatacagttccgtctgtatttctcatttaattaactattagatttatagtttattttcttgaaataggtaaatgatagatccgttgacttccgcggaaaatgttgaggatatttattctccg

SEQ ID NO: 112877 - DNA, 204 bp, Glycine max
attcatatgaatcatgacgtggcacttggattccttgtaatgggcaagttcccgtcataagtgcatttgaattgcacaacataaaattaagtaattccattacattaaccacgtgtattcaattacttaattttatgtatggaattaaaattgaatcgttcgagtattaccgagtttaatcttcagcaaaaataatttttaatc

SEQ ID NO: 112878 - DNA, 271 bp, Glycine max
gacacaagtaaactggttggtgactacatagaacaccataacccttgaacacaatctaagcattaagagatcggaagttctgtgaatgggaattcagttcagcaagcagtgacttggcgatcctaggtttagactctgctcagcaacatcaactgctactgtgcgtggctcccacattggtcccatacccacctcgactatcatcaccacatctacccctgcttgcaggttagttcaagcctggcgagcagagacagaactacctgctctg

SEQ ID NO: 112879 - DNA, 264 bp, Glycine max
ggaggatgtgcaaaaaaaagcataagccgtccaaaaacaaaacactgcccctcacgtgatgtctcgtgggggttatgaatatttagaaaaaaagttgatggatgagaagagaaagaaaaaatctagaggaagctactcatccggaagcacctacaccgtcattaatcctccaactcccatcgaacgacacgtgaagtggaagctagctcgcaccaagaaaactggtgacatgacatctgaggcaagaaaggaaatcgctgacaa

SEQ ID NO: 112880 - DNA, 255 bp, Glycine max
ggagcttctttttcccaccttgaattttataaagagggtcatttactatgtatgttgcagctgaggatattgaagctggacctaggacgaagtttcaaacggaaccaactctaccaatatatctaaagttcacggatgtgacctacaagatagtgatcaaggggatgacaacaactgaggagaagcggttagaatccctaacagaagcagagctacaagcactgcttgaagaagttgaggaagagaagagtcgct

SEQ ID NO: 112881 - DNA, 277 bp, Glycine max
gtttttgaatccttattccgagaaggtagactctctgaggctaaagatctattgtacaagactcctcaccatatacgtacacatagtaaaatctgtaaactttttggttcatctgagacaaagagtgacactcaggctcagctgctgcctgatccctagaaagttttctctccccagtatgcatgtcgtctttcttcaaaattcaaatgattgatactatcaagtttgatcaagcttttgggtggatttggtcattagctgttggaaaaccatgggg

SEQ ID NO: 112882 - DNA, 120 bp, Glycine max
tgatttctccgctgacgactcttgcagcctctgggattcatcgccttcttcttgctgtgggaatgatgggtacggagacagtttggaattcccaaagcaactggaacactgtttggggtt

SEQ ID NO: 112883 - DNA, 271 bp, Glycine max
accatgtctccctgcattactccgatcagggccctaccgactcagcattcgccattcgcgttctcgacatggccatcgacgcgatcaacagtctcacgaccagccccaactctactctgccttcacccactaccttgacctccctcccagcccgacaaatcgaagaatcgcctcgtccatctgacggcgaattcctgggagagcgcctcaagggcaccaagatcgatgaccttcttatccactctcctgctctgactcacgcatggagcca

SEQ ID NO: 112884 - DNA, 265 bp, Glycine max
ggacaggttacgtaactggcaccaacccttcgccgcacggtgggcgtggtgcattgccttctgaaggtggtagcccttcagacttgctcttcttagctggtggtggttctgctgtcttctagcttcttcttaactcttttttctttttactacgtttaagctaccttgttttcaaaataacaaaaacaaaagctttcttacttcataaattcacctttcgtccacttcttattttcccttaattaaaatgatgctcaaaatcaag

SEQ ID NO: 112885 - DNA, 273 bp, Glycine max
cgggaactaaggagggtaaatgggtcagtgccatttttcttaattgtaaatcttcgttctttggtgtggcagattttgaagcaaaaattctggggaagaagagaaaacacagtgagactactcaaagtgtggcacagcccaaaaaggaagatgctgctccagagagaccagctaggacccttttggggtggaaggataagactcaagttgaggataataataatgctgattcaccaatatttaggaacaaagagaagctattggtcacttgct

SEQ ID NO: 112886 - DNA, 135 bp, Glycine max
caaaaacttaatgtcgtaggccccgtcctcgctataaacacgggtccccagacaccaaggcacccggcacttcccaatcgcaaatttgcttccccaaatcgtagatctacggtttaactggagtactgtggtaag

SEQ ID NO: 112887 - DNA, 264 bp, Glycine max
atcaaatactgctacacaagcaagatatgaagtatatatttacatgttctacccaggtttacatgagggaatttaaatggaaagactgcaaaaatcctcaaaatgttaaagttgcaagtatagttgaccaagaattgttcagggaaaatatagtctttgtcactggaagaaatggtcgcctatatcagtacaacaaagtgactgatctgtggcatgagcattaccaatctcaacatttgattctatcagagtttcctggaacag

SEQ ID NO: 112888 - DNA, 263 bp, Glycine max
  unsure (1)..(263): unsure at all n locations
ttcaaatctagctctgatattcgaaacgcactttctagattttaattatcatcttggttcatcaatatattctctaacacatctatcaatttatantcntgaaagcctcaaattcctaacattttctatatgcttttcccaaatactacttcactctccaattcttctaatcccctacataacaacactcactacttttagatctaccaatgccacttatttatatccttatctaaaaacagccttagaatctcaaacactca

SEQ ID NO: 112889 - DNA, 214 bp, Glycine max
ccatgtgatttagcatatggctgctcagttgacatcactgccataagggctctcaccgtaaagtacacgggagcagaggaaccagcaaatgcagtcaacgctgatctactagtgaatcgtcgatatgcacgctcgtaggttacggtgagacaaccataggaagaggtgtcaactgagcagccagtgctcgagcataagaatgtggggttggact

SEQ ID NO: 112890 - DNA, 263 bp, Glycine max
aacaactacaacctgttcccatgaatcacaataagactctctttggtgatttgtctcagttaccagaccggagctccgaaatgatacgaggaatcgacgtcaattcggcggcggagtgcgacggcgtttcctcgccgaacagcgctgtctcgagcgtgagcgacggcgacggcaagcagagcgagagggacgacgataataatgctgccgccgtggccggtgagaggacctcgtgctcgcgtaggagcgacgatgacgacggt

SEQ ID NO: 112891 - DNA, 262 bp, Glycine max
aactttcgtcactgttacagcagattttattgattattataaatattctatattacgacttagtagcataccactttacataactatggcttttatagctgactagatttgaattatgtttggtttggtttggttcacatggttatacggcatcaactaattctgtcattagtcagctgtaacttcatacaattgaaagcttagttgtggaaattagtaaatgaattataaaaaggtgtgtttagggagcatttaatctctg

SEQ ID NO: 112892 - DNA, 104 bp, Glycine max
ctccggattcagctcgagctcaaaatgcagggtttaattcgcaaactggtggcacaggtacaggcacagcatccccttcgcaacaccaactctcaccaccgtat

SEQ ID NO: 112893 - DNA, 259 bp, Glycine max
ctgagattctctaattccgttccttccgtaggcccccagatccgttttgccctatttcggagatgaagagccccaggaagaagaagagaccgaagccgcagaagaagcttgagaagaacaaaggcgttgttgctgctgctgctgttgttgccgagaacgaaaacgataacgaagaagtatagagaaaacgcagcattttggaggcactggttgaggccttctccttgtcttcagtcagggaagcttccatggcctataa

SEQ ID NO: 112894 - DNA, 252 bp, Glycine max
tggaccgacctagtttgcaaaatgatcactttataactccaagatggaagaggtataaagtgatcattttggagttatgataaaaacagatcaaaatttcctgaaggtgctgctgctgaaacaactgatagaccaggaacttcttccagtgtaatgactgaaagaccatttctgcataattcttttggaaccagtactttgggttctttaggcttgaattgctcaggcagcattgatgcacatcaaaaggag

SEQ ID NO: 112895 - DNA, 238 bp, Glycine max
cttctcacaaaaccttaggtcagatttctaggtctgtcttctctgatcatctgcgactgcagctaagtcattataccgtaggtctcctagcctgcggatctcgaaagtcattgtgttcgcttcgagatctattcccgtgtgattctgtaattaaattgctcaggtgtagtcccattaggttgcaaagcaactcttggcattagctgtgctccgtttcatttcaaaacctgttaggggg

SEQ ID NO: 112896 - DNA, 102 bp, Glycine max
cttctcagttctcacttatttggttgccaagaatttcgagattgttatgaattatagttacgttgatagtccatctcatgttaatttccaagggaaacattt

SEQ ID NO: 112897 - DNA, 241 bp, Glycine max
gtacgtacactccgcattcagatcctccatatttcgtaatcattcatccaaccaaacttataactcttctgttctgcagattatttctcaataatctctttccgagattagcataaacttcaacgtgctccaaagcctccaccatcccgccaacttcctcgtctttggactgggccgcaattctctcatgtcggccagccttaacccccacggtcctaagctgttcctcgaggaggaccct

SEQ ID NO: 112898 - DNA, 214 bp, Glycine max
aagatctattcaatggatctatagtaggggatatttcaagaatttagtagtcaataagcagggttatagtatattggacatcactgtaaaaatacgggaataggttattatataatactaataaggtgagttatatattggaagtatcaatgaatgtgagagcaggtgaaaaactctatcttgagttggactttggcacatccggtgccaggtt

SEQ ID NO: 112899 - DNA, 245 bp, Glycine max
gcgatcgagagagaacagggaatggacgaggaacgcatagggttagtgttgacgagagccacagaactccgattaaaaatcagcaattgcatccaaagagccaccgccaatggtccctcgccgcacgctaacgacgacgacgatgaagccatggaacgccttctcaacatttgcgctgcccttgaagccttagagagccagctctcttccttgcaggttctgcaacaacaacaacggtacgaaag

SEQ ID NO: 112900 - DNA, 214 bp, Glycine max
gtaatatattactcgatgatctattacctagctttcaggctcccttcgcgcaactcttgatcttccagacaaaagacaaaaggacaaaagagattgatacagagtatcgagtatatggatgctcatcgtcattgtagctcacatgtgtccgctggttactcttctccgccgtattcacgaccacggactacattgtgggtgcgaatccaggctg

SEQ ID NO: 112901 - DNA, 203 bp, Glycine max
gcaatcgtgatctgtacagctaacgtttacaatgggttctcgctacgaggtagcactgaagctctcaacagcacgcgatctcaagaatgtgcactgggcgtatggaccgaaccgtgcatacgtcatcgcattgggtcgacccaagcaacatgctctcgacgcgcgtggccgacagcggcgatactgacgcgaattagggacaa

SEQ ID NO: 112902 - DNA, 129 bp, Glycine max
tataattgtaagatatatatcaacttgtggcggattgtgatctaagtgtggggacaaggtgaccttgcaatttttgttcatacttatggtttgtgcaggatacattattgaatgaaatgatctaattgt

SEQ ID NO: 112903 - DNA, 268 bp, Glycine max
ggccgattcatacgccaagcccactcatgtgctaccaaatgtaagttagagagatgggggagaaaatgagttgtttttggagtcatgagctaaggagtgagaaagattatggaactgttgatgttgctcgcatcccttattgtgaaaagcttattttgagttttctatggtgtgcagacaaggaagggaggctggaagagatggccaagagaaatagtatattgagaagaatgggcagttttgagtgggacaggtgtgaggatccaac

SEQ ID NO: 112904 - DNA, 257 bp, Glycine max
ctcgagccgcgagtggtgttgctttttataataggatatacggtatgcatctatatcagcatacatttgaataaagtgttacgaatgacatgattccgagtggtgtgcttttaactgtatagtgaaagatttgtgtcatgaacaaatctatatttgtccataatggtctgtttgtgcatctaaaaaaaaaaaaaaaaaaaaaaaaaaaaaggggggcccccccctaaggggcccccttccccggggttttatttcgg

SEQ ID NO: 112905 - DNA, 248 bp, Glycine max
  unsure (1)..(248): unsure at all n locations
tgcatatcttcactgaaaacttgagtgtcaccaactccatcttccaacatcatctggcacacaacataaaaaactaaaaacatcacaanctttcttattacttgaagtccatgcgtgtgtatattggcgaaaacccaagtcctacattggctagagataaaaccaagatatattataccagtgaaagacaattctagccctatgagctagcttctgggattgagctagacccagacccacgattctaa

SEQ ID NO: 112906 - DNA, 229 bp, Glycine max
gttgtcccagggtgaacactatggttcattatgagtgtatgaccaacactgcctgttgaaactaccacattccatccatcgacaacttcaggcagtgtatgttcacacaataaaactgaacctaactgttgtcccagggtgaccaatgtgcaatatgccgtaaagattcagaatatcactgtaaattagtacgatgacatgtatcaaagatggattataccatcggcct

SEQ ID NO: 112907 - DNA, 262 bp, Glycine max
gttgagctatgctcctatgtaagacatctgtattagttgatggttaggggtctcattaatgagtaatttacattattatccaaaattgaacaagtgaaaaattaacaaacgattgtagagaggaggggttgggggaatgaatgtcgataaccactgcaagtctgcaacccattcaaaacaaacatcgcagacctaagtttctgctgtgagaaccgaagccatggttggtggcggttcagatctgagtttttgctgccaagat

SEQ ID NO: 112908 - DNA, 259 bp, Glycine max
tcaactacgagctctctgcccgctgtcctgacctaagaagtacttccaattgaatacctagtccaacaaaatggcctctcgaccttcccaggatgcgcgcgtactttcgcatggccgcggtggtgccggcaacctcgccaaagatgacccgaccgcgaactaccccatgctcgatgacctcactactcccacgttgaagtcgaacacgtacaccacgggccgcggtggaacaggcaacatggctcagaacgaccccgag

SEQ ID NO: 112909 - DNA, 258 bp, Glycine max
ggctcgagtgtggttgcaatatgacttgatgcttcttttctacatgcatgcttttgacttgttgccaatgctgagtcgattttattctcattactatatggtccaatatttgtatttatttatttagacttttctatctaaaaatacttgtaacaaaatattccaaaaaaaactttattatatgcaccaaaaagatatagacactgtctaataactgtatttcctcttggtaggacttggaggaactgcctctggaag

SEQ ID NO: 112910 - DNA, 258 bp, Glycine max
cttctggaacagaagtctgtgtctgcacacattccgtcaatgcaggaacatggtgcatattgccccatagcactcaaggaatgtttcgtatgttggtaatttgtacattgcttctttattgctgcggaaaatctcggatctgtcattttactgaaaatgagctgatgtggtttacatgttttaatgtttaaattaattagagatagctccttctaatagttactattttaagtgcgatactgctacaaaaattataga

SEQ ID NO: 112911 - DNA, 259 bp, Glycine max
gagcgagttcttgtatgagcaggtaaaacttggctaaatgttgtccagttgaattcatagtatggatggatttcattaagatataagacaccttgacaaatgcatataatacaatactatatactatataccacttttttaaatcttttttgtgtgcatgcgtcttaaaaatatatttaaagttaaagaggacaagttcttgttcacaaatcacagacctattacctaattttaatatggatcataaatttattttttc

SEQ ID NO: 112912 - DNA, 254 bp, Glycine max
gatcaacattgccattgagggcaacagcccaggcgagaagcccttggaagtgtcgcccactcaagcttctgctactggatctccacacgctcaccgacgaggtcgcggcagtgtgagcgaaaacctcggtatgacattcaagcgcgtaactgaacgcatgcgtacaccagccgtgggccccagcgcgccaaatctccaccagtcaaccgcgctgagcggtctccttacgagagtgttcctgagttctctttccc

SEQ ID NO: 112913 - DNA, 265 bp, Glycine max
gcttgtaatcaagacaatagaagccattgcgaggagaggttgagcatgtcattcttcagcgtgctttatgtattttcctcatgtgggcagccaagatatgaaagatggtttttatgaaaagttggaatctgagcttcaaggttcaaggaatacttattatgtaggcggacttatggcatttgagctcacatagagaaattcatcttatgccatggcttggaactgcaagtactttggcagtataggaatgattttccgattattt

SEQ ID NO: 112914 - DNA, 160 bp, Glycine max
tttagaagaatgcctttttctttctatttcagaatgtgatgaatttttctgatactaacaagtgacaaaaaaaaaaacatttatgtctgaactgagcttctcttggttaatatattggacttgttagtttgatgccctctatgcaatacactcagcttcc

SEQ ID NO: 112915 - DNA, 176 bp, Glycine max
ctagatttcctttctcttaggtttcccatgaccacactcgtgcaattctctatcaaatgttcgaacttgaagcacaacttctttcaccatggcatatacaagagacccacttgctctttctctcggatagaaacaaagtttggttcttttaacgggaatagcttgaaactgagagt

SEQ ID NO: 112916 - DNA, 254 bp, Glycine max
gtttcggtccatcaacagcaacagcaacagcaacagtctccaaggatgccaggacctgcaggccaaaagtcacttagtctaacaggatcacagccagatgtgactgcatctggcgcaactacaccaggtggtagttctagccaaggaactgaagctacaaaccaagtccttgggaagagaaagatacaagatttagttgcacaggtttctttgaacttttgtctatgtctctttctttatatgtggttatattt

SEQ ID NO: 112917 - DNA, 266 bp, Glycine max
ggaaaagtatgtttttaagattttgattgtttttctatcatcagttatttcattattcttgaatctttgattcttattgaaattgctctaactttaagtacttttttctatgcctgcttgagcaatagccaattgccaatacttgttctgatggatgtttttactaaaattctgatttgttaatgttgtaataataactagtactgtcagttcaccatgagaaaaaatgatttggactatctgagtatgttagttaattcttagtg

SEQ ID NO: 112918 - DNA, 281 bp, Glycine max
gaagttttcttagagtacgggacaaatatcttatttcaattcttctataggtttatcattttaaaattttaaagttagatatccttccaagtggtaaggcatctattctttttggatttgcttttcggatctatgtctaggcactctatctggacaagataacacgatcaaccaccttttgtataatacttttctacatgtatggttagtgctgaaaattaaagaatattctttcttgaatcgtccaagttgtagactgtaattttggctatatcattgga

SEQ ID NO: 112919 - DNA, 282 bp, Glycine max
gtgcttcaatttaagaacttgaattctcttgctggcccaaatatgtaataattagatttgaattactgctacagctgacaagatgagggatgaattgatttgtttctgcttagtgtttagtccatgcaaaaatgtcacctacctgtaaagtttgtataacttttagtgcagatataggttttctgtctaacaccttcagttgtcaggccaaaattatgtattgtctgtttgtctacttcagcttgatggtcccaaggaccttgtatatgtgacagggtattg

SEQ ID NO: 112920 - DNA, 240 bp, Glycine max
ggctcgagatttcattgatgaattcatccttcttgctcacaagggcaactaactcctgctgtagggttttcatgaagcaattagttcgatcctcggcaacaacgtcatcaaatccctacagcaggagttaaatgcccttgagagcaagaaggatgatttcattgatgaattctcggaggaagactacaatggaattactgaaagatggaaggccaagcagatgcggggtgcagatggtga

SEQ ID NO: 112921 - DNA, 217 bp, Glycine max
  unsure (1)..(217): unsure at all n locations
cggctcgatgttctcagctcaagaaggattcttgcctaagtcctcgtttttttatcggaatggtagatttgaggtgaaaaggttccatatttgttagaggttgntcttggtggtgtagtaacagtaagactagaaaaaggaaagatatgagttagaggcgagcgaggcttggctgtttgagacttgcagagatttgtctccatcaaattttgccttg

SEQ ID NO: 112922 - DNA, 220 bp, Glycine max
cgaaatatctgcgtgggttccgggacttggctcggacattgcagtttaaggatctctgcattggaaatttgtttcaatttatatgttctaaacacggcttaggatacctggcatgggagttgttactgtttctaccttagctgctaggacgccattaagattgaatacaaggttgaccagtcatcagcaggtgcataaaagacctttaattgtagctttt

SEQ ID NO: 112923 - DNA, 221 bp, Glycine max
ttgccgtttcgctttgctctcttcttaattctaatcaatcagtgcatgcaccttctttccgaattccgattatttaatcgcaatgttcatgttcctgattctttttttggtttggaatttttgctctgattttgatttctgatagatattacagtgtgctactcagatctggtgctgcgtgttgtgattttttttcttcctttttttgtgtttaattgatt

SEQ ID NO: 112924 - DNA, 221 bp, Glycine max
ttacagtgcaaccaagtagcctaaatgataaaaaggttttgttctgtaccatttgctgattactgagtcagtagatactgcattgttatttgtgtttcttttttgactttgaggtcatacttttctcgacacaaattataggtgataaccctgctgcataatacttcccagataaagaaaatgaaaggaaaataaagtgactgagattcaaaatatcatta

SEQ ID NO: 112925 - DNA, 215 bp, Glycine max
atctgcatctcaggatcgtcatccagccggacaatgcattgctgctctacgtccccgaaggctggggtatggctctctggtcttccctggcctactgtgcccgctatatcggccaagaacagctcgatcatgccgcgttcgagactggtcgtggcgccggtccggatgatttcccctcctgtctcacgtatgccgcccgtcatgagcaaatggtc

SEQ ID NO: 112926 - DNA, 248 bp, Glycine max
atttggcagcatcatttcaaggttgagcttatatgcaggtagagggttttttgttgggaggggggggatggaggagaggaggaggacttctgctctagctgtaacatgagtgctaactttatcatgatttcagctttaaggaatttgtggatacatcttttacaagtaaaatctgttatctgtggagttacttctttattaatagctatggcttctatattcaagatgaagatcttgtaggaatcgtt

SEQ ID NO: 112927 - DNA, 249 bp, Glycine max
tctcgagccgattcggctcgagctattatgatttttagctattcaactaatcaataggtatctatggtgagaaaacagggatatgaaaagccaaaatgagagggatatacaatagagggtataggcaggaaagctagtgatgtgtcaattcttatgtaaatccataacttatgatctttagttcttcttacttgactggccttgtaacctttaagattttcattatattggttgtaatcttgattgatg

SEQ ID NO: 112928 - DNA, 263 bp, Glycine max
gtttaacggttaaatttctaatttcaaaataaaaaggtccaaacatgaaccatttcactttaaaaaaaatcatctttataaaacctcagaaacacacacaaaagaaagaactgatgtcttgctactatactcatgctgcatcaaagatttgaagtatattgaacctcaagtaaaaaaatcaaacactcttttaacatttaaacccctattgtggtgctgtgattccattgcagccccatcatgatgagtgctggagagttgga

SEQ ID NO: 112929 - DNA, 277 bp, Glycine max
aattatgaatctgcagtcgttaatcaagtgcaacgcccacaacttttattgaataatttgaatgttggtgaaattgagaagctgagttccgagcaaagggagcttgaagaaattgttgctaatttggaggaaagtgttaaaaggtttcacgacgaagaaagaagcttactgaatcaatctgctaatcttcgtaaacagtgggaggacattagtattacagtacagaatgagcaaaagaaacgtcaagcaatcattagccgtattgatcaaaagaaaa

SEQ ID NO: 112930 - DNA, 269 bp, Glycine max
gacgaggatgacagtgcggggcttcaaactactatgagcaaaagattgagcatctagagctgaaggtgcatgatgaaatacagaatctggcgtgtctgcaagcgcaacgtaatgagctcaattcaagaggtctaaatatcatctttttaacaagattacagatgattcttgtttgagctgatgtgtttcttattaaatataaagttctcttgctgcatgaagagctgcagatgatacaggagctttgttcgtatgtaggcgagtaacaa

SEQ ID NO: 112931 - DNA, 255 bp, Glycine max
ggttaggcaacaaggtgtccgtgggatagtcaatctctccagctcggaggtgtgttgacttctcgattgacagacacatatttcactacaggaagattccaactttattcgcacaaaggtgacagtcatgtcatgctctgcccccttggctggccttctcagattgcgttacgaatcttatcatacaattgatgactctggcaatgcttcacagttagtgttcgataaatcaggggatatctatgtagggacacc

SEQ ID NO: 112932 - DNA, 269 bp, Glycine max
ggcttgtgaatcagcaccacattcacctgagctttttgtgaggattccaaagcatggcttcccttgcagcatccactgctgctgcttcccttggcatgtcagaaatgcttggaaaccccatcaacctcagtggtgccacaaggccagctccatctgcctctagccctgcctccttcaagactgtggctcttttctccaaaaagaaggctgcacctccaaaaaaagctgcagctgctgctcctgccaatgatgagcttgccaagtggtat

SEQ ID NO: 112933 - DNA, 196 bp, Glycine max
gtcgataattattaagacaaaaatagaggaaatttgggatcccaaaattcattttgatttttcaatgttattctatttctttcctattgtgtttcgttgctaagcggggtatcatctcttgttggtttgtttatcttcttcttgatgttgacgaaattcgagacgaagagcaaccgtgtgaagggcctgagcttcc

SEQ ID NO: 112934 - DNA, 264 bp, Glycine max
gaaaaattgttaagcttccgccaagttgttggctttttactttgttcaggtcattaatacctttacttacgtgtgttcttttgaggcagatcttggtatagcttgagtttggacttatacccaatttagagggaattgaatggaactggtttttcttacattagcgttggtgtatgaggaggttgccaatgtattgctgccttggcattgataatctagctagtaaatagatagctttaacctcgataataatgatagtagtag

SEQ ID NO: 112935 - DNA, 258 bp, Glycine max
ctgctcgaggatcgtttttcctttttattttcctcacacgttgataactcgagagactgagaatttgagattgctctgttcacaacattgccttgtgttttcaggctttagcatttttttacaatattattattttttgatggatgagaatgatattattttaggctaaattggtagaatgagtttctggtttcaattataggtttttttttttaaataactggggggatgggggagccttctgtggattctttaatc

SEQ ID NO: 112936 - DNA, 264 bp, Glycine max
gcccaaaccaaacagcgccttgggcatcttcggctcgctcttcaagaaactaaccaaccgaaagagggaaacattagagggtgttcttgttaaggttaaagacagcgacgacgatgttgttgtggtgggatcctgtgaggtcgggttcagttgttcctgcaacggaaggccaagcagtgctgtgtggtcggagagcaacgaggataaatcgttggacttggaatcttctagtagtggccactcatttgatgactctgttgctga

SEQ ID NO: 112937 - DNA, 258 bp, Glycine max
ctcgagccgctagtgtgaacattgtatcgtaggtgtatcatgtggttaccacttttgctaccgaaaacatagcaaagaagtttattttgtgtcaatagtatgagtcagtatatacaactaatggttaatggatgcaaatgtttttgttgaacatcaaaaaaaaaaaaaaaaaaaaaaaaaaaaaaaaaaaaaaaaggggggcccccccaaatattccccccccccccggggattttattccgggggggaaccccgggg

SEQ ID NO: 112938 - DNA, 265 bp, Glycine max
tggagtcggagtacacatcttacattgcccctgttgtcgtgaagaacggtgagcgacagtgcgcaaaattgatttatcgcaaaatgtggtagctacaggtaccttcatttcaaatcgcagttgcatcctagaaattccgctgataccggccgaaggtggcaaaccgttcgtgatcatcccggcgacgtacgatggtcacctgccgtatcagttaggcttctcaatgacgcttttcacatcgaagccgactggctgtgattcccat

SEQ ID NO: 112939 - DNA, 257 bp, Glycine max
ctatgcagcttggtagggaacttactgttcaaccgcagaatattccatatgaacattttgtttggtgactttgatcaatagaaaatgcaggccctgcaaatattagttagcactttccaaagaaaaaaaaggagaagtaacaacattgatgaatcggagaaaatgtaagatacattcaacagatgtgtaactcaaactcacctatagtcatttcacccatgttgtgtacttgttttatcttagtcttacgtttcgaa

SEQ ID NO: 112940 - DNA, 245 bp, Glycine max
tgcaaacttaactctcaagcttagtactccacgaagtttattcattctctaatgagtatcatagtttatacactctttgtctcttctcttgtagtttccatagctgcagacacaacatccaattcacagttccaatccctcagtcctgaagagaccatagtttccccaagaggaatctttgaacttggtttcttcaatcttggaaatccagacaaaagctacctcgcaattcggtacaagagcta

SEQ ID NO: 112941 - DNA, 270 bp, Glycine max
ggcttgtgaatcagcaccacattcacctgagctttttgtgaggattccaaagcatggcttcccttgcagcatcatctgctgctgcttcccttggcatgtcagaaatgcttggaaaccccatcaacctcagtggtgccacaaggccagctccatctgcctctagccctgcctccttcaagactgtggctcttttctccaaaaagaaggctgcacctccaaaaaaagctgcagctgctgctcctgccaatgatgagcttgccaagtggtatg

SEQ ID NO: 112942 - DNA, 271 bp, Glycine max
ctcgagccgttttcattgagtggggttacatctgcacttgggagtattcttcgtcgtacatccgactccgccatagctgggccaagccaaacgaccattcaattgctgaagaatgtcagctcgtcgcgcagtcgattagaaaagaagttatcatcccgcacgacccatcaaccaaattcaagcctggtagtgaaacaccgtgttatatcaaaagcagcgttggagcgctcagcaagtcgaacaaataacatttccctttgcgcgccatcca

SEQ ID NO: 112943 - DNA, 283 bp, Glycine max
tctaaagttgtaactgttttcatgtttttctgcctactttttgctgaattggcggaaaaatcttgaaccgtttggtttctgagattataaagaaagaggttgagggttgagagcttcttatcagagttcttatgttcaaatccttttcttctttgctttgaatcctcattctgtcttcattcaatggcttcttcaaacttgtcccatgtgttgtaaaatctgaggtttgatatctgaatgagtctaaatttttaagatttattattattagtatgtaatctag

SEQ ID NO: 112944 - DNA, 269 bp, Glycine max
ctcgagcgaatcggctcgaggctgcacagaatctaacaggtcagagttctgatatgaaagttgaggttttcgatgttccatccacgaatactgatttggaagatgcaaaagcttttgaaaaaaatgatagatctgccagtcaagtaaatgacagtaggcctctgaagtatacattccaaaggaagcgaaaaaaggaatccttgggaaacacagaccaaaacattgattctgagaagcgtatagtgaagaggaggttggaagacaaacaa

SEQ ID NO: 112945 - DNA, 260 bp, Glycine max
  unsure (1)..(260): unsure at all n locations
cttcttttgcttctccagtgagtttgggcgacctcatgggtgtgagttcctctgggangtctcattgtgtggtgaggagagtctctctttcaagagggaactgcagggggagaaagagatggcattgtgtgtcattgtctgtgtgtagatattcagttaccacaactgattttgttgctgaccaagggaattcagtgtcccttgattctaacagtagtaggagtaatggtggtgatgatggtgctggttttgtgcttaag

SEQ ID NO: 112946 - DNA, 251 bp, Glycine max
tacagatctccgtaattttggtctttttagtttatcattgtataaaatattgcttagaatgcacctttctgccaacaaaccaccgttccatatccttaaaatgatggatgaagataaaattgagatggataacgagacactttccattcttaaagctttcactggatgtgttcaagctgaagtgtttggaggtgaagcagtaacctggaactcagtttcattcttaggctttttcaaggaaaatttcaatt

SEQ ID NO: 112947 - DNA, 145 bp, Glycine max
ggtaaaatctgtggttttgcctctctataagagctaaggatatatccacatgaaaggagggaaaatgtggtgacaagcgacggattccctcctttcatgtggatatatccttagctcttatagagaggtaaaatctgtggttttg

SEQ ID NO: 112948 - DNA, 249 bp, Glycine max
gagttggaccagtatgttaaacttcaggtaatatatgaagattgctatctgttttttcattttgtggtgatgtttgtgggaggtcttcttggtacaaatgatttatgttcaaaatatttctgttcattagaaaggtataaaggactggcctgtggcttaatccaataggaaagtgggggaaaatactaatatattattgcagtcattttgggtagaattttctggttatgtttgtccagtcattaccta

SEQ ID NO: 112949 - DNA, 239 bp, Glycine max
agtacagcgattcggctcaggtttcctgatcatccaagttccagtgatgtctcttattctggggacaatgattgacagcttctcaaattctgagcaacttgggcattctgtacctaccatgacatcaggtgaagaaactgatgaagagagtgaggcttgtccagcaccaaaaccacacaagaattcggtgaaactccacttgaaacacagatcagggagcaaaggtgctgagcctaaaa

SEQ ID NO: 112950 - DNA, 160 bp, Glycine max
caatgcagttctacgctatggcatttctcacccagttgtcaatgatggagacatgtatctttggcggaagttgggtataaactcatggccaacatttgctattgttggccccaatggtaaggttcttgcacaacttgcaggagaaggtcccaagaagggt

SEQ ID NO: 112951 - DNA, 246 bp, Glycine max
tcatttattatcaggctagattacatcacatgggataaagtatggtcaggaagtctattgcgacataatgaagcgaggtttgcatctttaacaaaatgctgcgagacagagatctcttttgtgtgaacagaatctagcctgataataaatgtgactcttttaataatcaatctacttcaagaagatttcatttcttcaattatccctttgtggtttcaaagttaagaaaaaacatctaatgcatgg

SEQ ID NO: 112952 - DNA, 233 bp, Glycine max
acaactacaaaggctgcggtaggagataagatattgaagtagtgctaagtgcctaacaccggcagtgaacagtggcctctgcatcagcatctctgctcaagtcttcacttgttcttgacaaggctgagtgggtgaagggacagacacttcgccaaccttctgctgcatcagttgtgagatgcaaccccaccaccccatcaggcctcaccatcatagcgggttcctatgctgat

SEQ ID NO: 112953 - DNA, 261 bp, Glycine max
cgacaagatcctcgacctaatcttctccctctacgtccccaagttccacgccgatagcctccccgcgctcctcggtttcttcaagcactacctctcttcctcctccgactcgccgctcctctccacgctctctaagttggagacttctcttctgcgcttctacgtcgtccacgccgtccagtgcaaccgcaatgacaaagtcgtcgacttcttcgcgctctacggtgccgaattgctgcagagctcgcaagattggactca

SEQ ID NO: 112954 - DNA, 255 bp, Glycine max
cagtgaagctgtgaaaattcccctctctccgattcttcacttcaaacaacccgtttccatggacttgtacggtcgggcccccgccagaaatggatccaacccgctgaaccagcccgaatggggcaccgacactgctctcgaaggtctgtttctctcttcttccccttctgttagggtttccttagtttggaagttaggaggttttgtttctctattctaattagggttttttttttatttttggtgtagaatcga

SEQ ID NO: 112955 - DNA, 245 bp, Glycine max
aaagtgcagcagcatcttgaatggaacaacaaggagggttgtgaaagttgatatctcttacagtgacatatatggtaacatattcgaaaatttctctcaactcactgaactcacgcaccttgatatttcttggaactctctctctgggggaattcctgaggatttgacgaggagccaaggtgtgctcagcggaatctggctcataatactcttaagggggagttgaatttgaagggtttgacaaa

SEQ ID NO: 112956 - DNA, 259 bp, Glycine max
ctcgagccgctttttgtttacttcgagttctatgtaacttgaaagagatcgaggtaagcaactgtcactctgttaaggcaatatttgatatgaaaggtgcagaggcagatatgaagccagcatctcagatttctcttcctttgaagaaactgattctaaatcagttgccgaatctggagcatatctggaatcctaatcctgatgaaattctcagccttcaagaagtgtgcatttctaactgtcaaagcctcaaaagttt

SEQ ID NO: 112957 - DNA, 255 bp, Glycine max
cttgatatttgatctcctaattctttctcatccatctactatgctttatttattttgttttttatttgcacttcaggaaagattagctctgaaaggagggggagctgaacttggcccttcagttgcattctttggatgcattttccgtcaaatggtgagttatctatcctccatgtaggtttatgagttctttttctgaaaagagatttatgagttaattataatttaggtcggcttaccaatattattttaata

SEQ ID NO: 112958 - DNA, 251 bp, Glycine max
ttctcttctccctttttctctctgtctctctctctcggtctcgctctacttctcatcaagcacagtgttacagactcaccgatcttccgattctctttcgtcttggtttatgagctcgaaggagagacccactcttggtggcacgcggattaagacccgcaaacgaaatattgctgcgccgctggaccctgcagcattctcggatgcagtggtccagatttatttggataatgctggtgatctggaactta

SEQ ID NO: 112959 - DNA, 245 bp, Glycine max
  unsure (1)..(245): unsure at all n locations
tactagtgaatgggagaaaagaaaggttaaagggaaggttgcaatacagaaaatggttgtggacttaatggtactctatctacataggctcaaacaaagaaggtctctatatccaaagagtcctgccatggccgaattcgcagccctgtttccttatgaacctaagccagatcagngacgggcacatattgatgttgtaacggatttgacagatagagaaactccatggacagattatttgtgga

SEQ ID NO: 112960 - DNA, 249 bp, Glycine max
ttcggcataagctcaatcagggaacctctggaagagatgttctatagagtatatgggcattgaagaagagggtgaatgatggagtttttctgtagcacgatcatcatggattctccagtcagattgtatgcctagggagagtataaattaataggtccattgtttggacctgttgtgttgtttgtgttatcttctcatatagtgcagagttagtgttgtagaagcaacctgtgtcttggtatttttttt

SEQ ID NO: 112961 - DNA, 246 bp, Glycine max
  unsure (1)..(246): unsure at all n locations
tacacttttcccatgtatacgtaattaatgtaagagtaatgaaaattaattacgtatacaagnggaaaagtgaattaaaatgagtttgactgggggatacacagagaaaagagaatataatacgttacacgtagtagtacaatatgagagtgatctcgtctcttctccttctccccctctctatttctgtttctctcccgattttcgcttcccaatttcttccctctaatatcatcttagctagaa

SEQ ID NO: 112962 - DNA, 245 bp, Glycine max
gggacacttaaatgcaattgtggtgcaggcccaacttagagaggtgacgttgaaggaagagaaggctgcgttcgaaaatgcaatatcagattgtgagaataaaataaaggagaaattgcaggaggctgatttactgagggaaaagttgaaggttaggattgtgatttttattgtgagattggttttggttcaattgatttatatatatatatatattttcggatttattgggttacaggagatgg

SEQ ID NO: 112963 - DNA, 243 bp, Glycine max
actaagtgacattaggcacagatcgttcaagcaaggtcttggattcaagagttgtgaatgaaaagaaaaacgtaattgtgagttttatagtttgttgattggagatatgagattgacttgatgattgggaaggggggcttaagggtgaaaggagaagggggaagagagaggtcgcgggttggaatacctcccactaactaacatttctaacaaaactaacaaactaatatttgctgattgaat

SEQ ID NO: 112964 - DNA, 249 bp, Glycine max
aatacacaagagtctattcagccttccatcgttgtgcatgataccaaaaagtttattcagccttctaatcatgttgtgcataacatgaaagagtttattcatccttctaatgttgtgcatgatatgagtgatgaagaactattatggagagcttcaatgacccctaagatcagagaatacccctttgatcgagtcgccaaggtggccttcatgttcttggtaaggggtcctgtgcctttggctattttt

SEQ ID NO: 112965 - DNA, 266 bp, Glycine max
ttgcgaaaaaattttataccttccaatcacccacccaaaagttagggacttcaaattttatatgaagatgtgagattgattaattccctagtgaaggggtctggggtcatgtctttcggtgggttaagtattgctttagtcttgtatttgggtgtcttctgctggctctgtgtgctcagctttactacttcttatggtggaagaagagaaggacacagatggatattgagatggatgcaaaaggggtgttttattgggggtgctgg

SEQ ID NO: 112966 - DNA, 165 bp, Glycine max
gcatgcacacgatactcagaactcagctcgagtttcacctgataccttgagagagatcgctcacctagccttcgatctcttcgtttcatacttagagatcaccatgctttgattccacttgatttcctttctgggtattctgaggggctcttggaggactactct

SEQ ID NO: 112967 - DNA, 126 bp, Glycine max
gatgaaccgactggctccagttcctcatcctcatgacgctgcccctacccctggtgtgacagctgctgttagacagtcggatccgcgcagggtcgtggatcctggtgcgccagacttgagagtgca

SEQ ID NO: 112968 - DNA, 196 bp, Glycine max
ttaccctgcctcgcttggcttgtgactcttccctagtttgaatggttttcgctgccaattctggctcagtttttgatatgactgccatttgcagtctgccatgcctacattagtctggtggagtgatatactataaggataatgggcctgctggacatatggatacgaatgacatcttgcgtgtggcaagtttatg

SEQ ID NO: 112969 - DNA, 232 bp, Glycine max
aattaaaataatatactatgtttacttgcttaaggagatctattgttcaccatagtaatcaatagcatgctatagtggagtagcaaagcgaagtggcttgaggccttgagctactatgggattcaaatagcggacagttttcaatagtatctggccattctggttgcaatagctgccaaaatagagcctttttgcatgctagagctgttaccatgatagaggcttcaaaaac

SEQ ID NO: 112970 - DNA, 227 bp, Glycine max
tctttgtctactcatcttaatggctctgatatcattgcaaaggagtgttgccgcttggtcacgtgcagccacgttgaggaggctgttgaactcatggaggttctcgcacgtttccagatatcaatcaaggtacttgttcagccgtctgacataattaaacgatgtgttcttagtcggaacccaattttagctgtgaggtatgcatgtcttcttccccatgcacatat

SEQ ID NO: 112971 - DNA, 228 bp, Glycine max
atggataccatcatgatcatgatgatcacaatggtcaagtaaatggattttcaaatggtcatgcaaagaaaataaatggaaagcatcaagggaggaaactcatgggtgcaaaaggaaagatgcttcttcctctttttgatgcaatgagttcagaagcagaagatgtagagttgagtggagacgcgttagatttccctcacttgcaaaacaattcagttgaaaaggtta

SEQ ID NO: 112972 - DNA, 183 bp, Glycine max
agaaaaagaaaaaacaaactaaaataagccaaagcaacagcagctgccacaacgtcctttatggggaacgcgtctcctggaagctcactccggagcggggacagtgcacgcccgattccgcgtcggcaagaaaaatgctaccgccccaaagacagcctttacgggatccggccgtgacaccga

SEQ ID NO: 112973 - DNA, 224 bp, Glycine max
ctggctctatacctccttgcttcagtagcatgtcatttggaaattttactatacccttgtatagtcttgataggcttaaaccatttagccctagacctgatgttgcagaaatgcaactcacaacaaaaaatttatatctttcattcaaaagtgacaaatttcacatgatgtcaggattagatttgtcatctaatcaattgacaggagagattccacaccaaata

SEQ ID NO: 112974 - DNA, 185 bp, Glycine max
gctaggcattcggctcgagcatttattgctgcaattgcttgacttggtccgtcaagagtttcttgttcgcggttcttggcaactgttcgagttgtattcggtagtttgatggacatgatctgtggtttctgtgtggctggtgaagtgtccttttgtggtggctatatcggtgtagacccagcctc

SEQ ID NO: 112975 - DNA, 223 bp, Glycine max
ctaatttctaacaaaatattttaatttgctcctcctctttcgcacccttctccctctctctatttttcttttctttcccgctttttcatagctgaacgataaatcaaaccctataacgggagagatttcattccccaaaaaatcgcttccttctctctcctcatttctgagttcccaactttcctcacctgaggtcagaatcatacaatacattcctttctgt

SEQ ID NO: 112976 - DNA, 217 bp, Glycine max
gatacttcaacagttcaacacttcaacagactatatataagagtatgatggccgtgctttttagcataaatgaacacaacaaatgtgaaatcattgttgccaagtgccaactttccgagttgtgcagaatctgagcccttttgaaaaaaagttaagcaggttaagttgttatctggtgggccaggagaaggttgtttggaaaccatttctgaaaata

SEQ ID NO: 112977 - DNA, 221 bp, Glycine max
tttttcacccgtatttgcctccttgcgtttgcatttccccaaggcccagaaattttggatgtgagaagaacacagacgatgactaatacgatggtagggttgagaccctcactctcactttcaattcctctttcttattcctttccatcctcttctcccctttctctcaaaccccaccctctccttctctccccaaaaccacacccacttctcacattcgc

SEQ ID NO: 112978 - DNA, 209 bp, Glycine max
attgctcagaaacagatcaaaagattatcatttaaatggtgtctgctccagctattgagctttgtgtgcttccttgtttcggtagtcgccgcagttggttccattcgtggaattagcaagaatatcaaaaaatacaaacttttcatgtataaacaataggccattttgcgcattacttaccatctttcgtgtacgtgtaagtttaagat

SEQ ID NO: 112979 - DNA, 133 bp, Glycine max
gtcgcttctcatgcatgatcgcaccttcaactctcttcttcttcaccatggctttacttcacggttttggcgctgtggagttcgttttgtagcatcaccttatcatcagcttctgcttgctttcaccacaacg

SEQ ID NO: 112980 - DNA, 136 bp, Glycine max
cggctcgagaacaaaaactcccgttttctctctctgtttttccatggccatctgatcaaacttatcttgattctctctctcagggtttgctattctgagtgatgggtatgccctgccgctgttcccggacctccca

SEQ ID NO: 112981 - DNA, 247 bp, Glycine max
ccagcttgaattaagctgcactagtagattctttgacatcacatacattgtgaccctctatcctgtgagcatggccacagcagttgtagctaagaacataggccccaagcctgccactctaaccaatgctattctaagccattttagattcaagaaaagaggtgaaacagcaattcaaggcctcagaagctgctcatatattccacacgctcctccatcttctccctttcaaatcttgaccccatca

SEQ ID NO: 112982 - DNA, 250 bp, Glycine max
ctcgagccgttgagtttctggagtctgacatttttgcaaggttcataatgtggtcatttccggaactatttcggtagagtttcctgtcgttggccctgtttgcattcaggttttccaagggattcagactaacaagtagggatgctgaaaaaaactagtttgaaaaaaatatctataacaataagtaggtttatataactagttatataaaagtaggtataaaactataattataattaatgttatagtt

SEQ ID NO: 112983 - DNA, 247 bp, Glycine max
gttctagatcgcgagcggccgccattgaccactttactttataattctgttgattctgttgatgatgcaacgccttccccatgtgttgagatacgaaggttgaaggaaggtgacattttttctaaaaggtgaacaaaatgatgaaatgtctgtatcattagttctccgcatagctgatccgaatggtcagtataacttatagtagatttttactcttaacaaaaccatgtttataatatattgatag

SEQ ID NO: 112984 - DNA, 239 bp, Glycine max
aaattctagaagactcgaaaaatccgagaagcagaagacgcagctcgtaggtcaagaataaccaaagctgtaattagagttcgcttccccgataatcacacgttggaggttaccttccacccatccgaaacaatccagagtttaattgatctcctcactaaagttattgcacagccagagcaaccattttatatatacactactccgcctaagaaggtgatcaatgacatgtctcggga

SEQ ID NO: 112985 - DNA, 292 bp, Glycine max
  unsure (1)..(292): unsure at all n locations
tggtcgcgtgaattgggcaccgcagagctataaccatcctagtatgatcggcttgcctcataagtatcgtgatttgcacctaacatggagatgttaatgctcataagttggatgctgttgccttgaaaacaaaaaatgagagagaaaatttatatttttgccacgatgcacaacgtataagnccaagantaaaagtggaaatatgggaaatcctgagccattcaaaagtccaggttcagctcagaaggtaggccatcagtttgataatgagaatgaaggccatagtgaagtt

SEQ ID NO: 112986 - DNA, 247 bp, Glycine max
agataaactgaggtgtatgctcaaccttgaccatttagaacaagtttcagcagcactatccaataactttaacttgaatgagagtagtatttatgggtgtgtaagtttgtgctagcatggttactcaactcaagatatagatatattgttttatagttgatggttcagaagaaaactataagtattttgcaatgggcaatgtcattgtcatgcagattgcactaagatggatatatgagcaaggggc

SEQ ID NO: 112987 - DNA, 273 bp, Glycine max
gtacagtttttgagggacacattatgacacatctgtccaccttcaggagaattcatggaatttttgcctcataaacctgcaaaatatcatgaagttgttgcgaaatactcacaagaaattagtacactaggactcaaaattttggagctgttatgtgaaggatgaggacttgaccataatactgttgtggtgaacttagtgatagtccagtattgctagctcatcactacccgccttgcccagaaccaactttaacttttggagctcccaagc

SEQ ID NO: 112988 - DNA, 281 bp, Glycine max
tactaaatctaagttactatgactgcgtagacccaagaggagcttcttgcgcaacacctcgaacagcaaaagatccatgatgatgaacctgtcgtcgaggatgatgatgacgaggaagtggatgatgatgatgacgatgaggatgatgaccatgacgaaggactagaaggtgatgcatctgtaggtctatgcagaccagtcgtttcacttcgtgttggataagttgcagtcatcttggactgaatcttggcacaatctaccaacctgaactcatgtgatta

SEQ ID NO: 112989 - DNA, 227 bp, Glycine max
atccatttgtaaagttgccaaggatgcagctggagttgcatgaaatgtgttagctttaggtgttgttgtttctcccatacccacatgtaggatgattatcagaaatgggtcaacagtgatgttctcagggttgccatatatttattccctgctgaattgcttgatctgcatttggatggcacacctctgatatctggtgataattttttggttataactggtaattc

SEQ ID NO: 112990 - DNA, 217 bp, Glycine max
tattctttcatttttttgtaaaattactacatggttccatatagaggtataatagagttagtcagaacaaagtttaagatgctgaggtggtgatttcatagttctgactaactcttttttacctctttctggacacatgtagtattctttcatttttgtgtaaaattttcattgcttttcccttataaagatcattgattctttatttgttaatatt

SEQ ID NO: 112991 - DNA, 122 bp, Glycine max
gttattagatgttgagagacaaatatgtacacattatttgagtgacatatattatttggatgttccgtcttgaattcttgatcctcatttctctatgttgatcaccaaatagatactgagtc

SEQ ID NO: 112992 - DNA, 274 bp, Glycine max
gggccacatatatcctttcagctgaattttgttctttagtatcctaagaagtagagtgcatggtttgaactttgaagtgcatgttggtaggagaaaattttataacgagtccaagagatgaggggtttatcagtcttttccaagcctaaagcctgaccagcagctccatattacattatgatttattttgcctccaatcacttcggaaaggataagttgcagtcttctaattcaatatcttggcaaaatctaccaacctgaactcatgtgatta

SEQ ID NO: 112993 - DNA, 253 bp, Glycine max
gttctagatcgcgagcggccgccctttttttttttttcctggttctgggggttttctagatatgtttaaccggtttttcggtaaattccctcgcaacccctcaaattcatctcacaatatttcaaacggggaaggagggttcattcatggtttctcactgaactcatcttctaataataccctcttgaagccaattcagttttctccaaattcttcaagttcttgttcagttgggtctcgttctgggaatgag

SEQ ID NO: 112994 - DNA, 256 bp, Glycine max
aaatgagctatagaagccatagttctctcgttttcaatggccagttgaatctttagtgtggaataactacacatttacgttatctgatatgattatgatgtcatttgccatcctgaaacagaagtaaaaggcaatgtttttctttcctagttgttttgcttctattagtttatagcttccaaagtaacatgtcagtttcaggcaattcttgcaggtgcatttgctaataaggacttcaacagggccacagcaactg

SEQ ID NO: 112995 - DNA, 249 bp, Glycine max
gacactcccttcccatctaagcttcttattataaacccaaggcagagtctcctctttctccgaactccaaaacacaaacaaaaactcccgttttctctctctgtttttccatggccatctgatcatacttttcttgattctctctctcagtttttgctattctgagtgatgggtatgccctgccgctgttcccacacctcccacatcattgaaatcatcatcaccagcttcttccgccacaagtcttaa

SEQ ID NO: 112996 - DNA, 254 bp, Glycine max
tacaagtcaacaagtacttggcatacagtgatggtatgagagtaattgagtcaggcaaattgccaacacagttccctggtatggatggccgactatttactgaaatggaccggtatgtttgtgaaaaggatgccttattgttttaagacaatatcacttgtctgtagtatgtgtaatttctgttcttgatattttctatttaaggaaaatagaaaatcttggaatgtgtctcattattagtacttttttcatga

SEQ ID NO: 112997 - DNA, 247 bp, Glycine max
tgtttgaggctcaaacttagtccatgtaactatctggaagtgaagaattattcatgaagtactttgtggatacgtgttccttctgttctataaatgtgtggatgtgatcaaactaaatcaatggagccctctaaaaattaagccctattcccggggtattatttcgatacgtgtaccttcagttctacaaatttccccatgtgagatccaaataagacctcggggaaaccatggtaaaacctttccc

SEQ ID NO: 112998 - DNA, 245 bp, Glycine max
gcggaaataatcaatgtctgcacactattttaagagtggatggcagcttgagttagaaatttgaattttttcattctttggcattgtagtagtgtgactacccaggaaaagagtaacttattgatggcacaagacaaggcaacttgattgatataatataataatatgcgggttggtttatgcttcatggagttgcttatttttacttctaatctaataattccttgatcttctagacttctacc

SEQ ID NO: 112999 - DNA, 150 bp, Glycine max
catagtttgatgataggcaggacgacgaaggaacaatgttgctttgtagttgtgacttcaatctgaactcaaatgtaaaatttattattattattattattattattattgtggcagcatactcttgatctctcttcaaggtcttgtcga

SEQ ID NO: 113000 - DNA, 209 bp, Glycine max
tacaaatctcatctgatgatttctgcaagacttcagatccttctgttactggtgttgagcttgtgcagctaaggaatggtccatctaaaaatgcagaggcatgtgctaaggataatgcccgtgatagtattactaaatatccgtggctttcaattgatgctcaaccttcgcgtacatggcattcattgcgtgtgtactcgcaatctgat

SEQ ID NO: 113001 - DNA, 253 bp, Glycine max
ggtacaagaccgttggtatcttctagagcatacttttttgtgaaatggaatgtttggagtgaataggcaatttagtccctgagattgtaaccactttgcatattagtccctgacttaaattttaattcataatagtccctaactttacataagttttgcaaaatagtctctgtcgttaaattctcaggtgacggcgttagtgaggtgtataggtggcaattcagtgccacgtagattgtccaagtggcactga

SEQ ID NO: 113002 - DNA, 273 bp, Glycine max
tcataaggtagcttgagttgaaacatgttgtgaccattttatcgtaagcataacaagcagttgtaccaaatagataaacttgctacttgttttgattttgattcactaacaaaactcaaagccatggaacatggaatgaccttttttttatcagacatagctaaccaaagattctaaaccctcctttttttccacagttccttgtggatagcctaccagagaaaatgatttagatcggatcgtcccaaaaatgatgacacaagtctctctcgt

SEQ ID NO: 113003 - DNA, 229 bp, Glycine max
tcttagcgtgcataagactatagagtcaactatcgcctccgcttgtggtactcttctccattcatctactgatcctgatgagtacgatcgggtccaaggtcagacccttcgctatcctctcgtgcgatgtactactacctcaagttcagctctcaccatcacagatgctatctatgctgaagagctcgtccggaccgccattccagcggactcaccggggctaggtatt

SEQ ID NO: 113004 - DNA, 269 bp, Glycine max
agtaagttcagtttctgcttgcagccaaccaagcagcaataaacacaaacttacaaactggtttattctcaaactttctctctctctcgcttcattctcccttcttcttgcgtaaagatatacgaagcttcctcttcttctctgaggctgtacctttggttcattgaaggtttttccttcaccaactttccagaggaagaaagtgccttgatttccgaacctgctcgttttattaccgagggtttcgcagacaccaaatacatgatact

SEQ ID NO: 113005 - DNA, 274 bp, Glycine max
aattggcattagtggtctctaaattgattgagtatatatctttatcgttcttgtctgaaagatctgttcatgttgctagtctcctcctgctcctcctttattggtttagaggttgtaagttgatcaatattgaaactggaattctttgaataggttcctgcctttgcagtccaagtttgaattttagagaggcctctctttcaagatatttgagagcgctataatttggaattttaaattcattcatctttcatgtcagaatagtttactattt

SEQ ID NO: 113006 - DNA, 271 bp, Glycine max
gtgatttgaattttgaatatcttgggaggttgaagggtaaatttcattgcatttgctgaactttgcttcatggcattgacatggaatgctaagcaaatgtacggcagacagaatagtcctaaaatgtggcatgcagactggaaaatcacgaattcagatgtggaatgcagagatgcaaattccttaataaaaaaaccagatatactaaaatgagtggatctaaaaggaaaatctaggatggccagggatgaaacttaaaggacggaatagg

SEQ ID NO: 113007 - DNA, 133 bp, Glycine max
tgtatgtcattttgtattctcttctctttcaaaaagattattttgtctttgattaatatgtgtgagatggaggcgcttttgggttttgacgtctataaagtaaatagactggctgtgtacgcactctaggaaa

SEQ ID NO: 113008 - DNA, 257 bp, Glycine max
gttctttaacaattaacgtttcaaaagcatcttattcataatttgcatattcctagataaaatcattcttagagctccatgtaatagctttggattctgtgataactgcctctcaaccacaagcgctgattattcgattttaaactttttagcttctcataacagacttaaaagcaaagtgctggtttaacaacgataatattgaggtcacaactgatgcttgattatacatttaacatgtttaaacattcttttat

SEQ ID NO: 113009 - DNA, 266 bp, Glycine max
aggctcgagctcataatcccaaaacgcttctccaagtccaagccacctacactccacaagacccagctgcaaagtcttcgtctttatcccagacttccatctgggtcaatcccagaagccccagagtcaaacacctttggaagaatccctatcatgccatgtcttcatctctcaccaaactcgccaagtctctcgactcctgaaaccccacccagcaacgcgtctctcaaatacttcaagttttgggggacaaattttcgcatccg

SEQ ID NO: 113010 - DNA, 143 bp, Glycine max
  unsure (1)..(143): unsure at all n locations
acctnaattagtatcacgcttgagctttgaagcactttctttatttccagaacatggacaagtgcttcacaactcaagcttgatactaatttttttggacatttaccttgctcgatgcactgaagaaggtaaccatgcagccg

SEQ ID NO: 113011 - DNA, 282 bp, Glycine max
ccacttgggtttcttcgttataaaaaagcatccatttatctcacacccttttgctttttctacatttccctttcctaaattcctcttctactactcacacctctcttttctctcccactctttctccctcctcaattacttctccttatttgtctgattttcactagctatctgtgaaggtttcgttttgcaggtcgctccaatggggaaatcctcctcttcgctcaagaagaaacgttctaagagattatcgaatgccaaggcaagcagtaaaagtaagat

SEQ ID NO: 113012 - DNA, 285 bp, Glycine max
aaatctttttgacggtttgtacatgtgtacatgtacttctcgtatctccacgtcctagaattagatctcttcagcagccaacagacagagaatttacaagaccggtactgacctcgtgtcattggatgtgtgaatttctgaactcatttcacagaggtcatgcattattctgctgcttctctttgcatccaagacctggtgtcgatttagacttggaattcctaattcaggattgttcaagtgtgagctggatcccccttctatcctctggcattggcatgtacc

SEQ ID NO: 113013 - DNA, 221 bp, Glycine max
cgtctcggccgtccggttttgttctcaaaccaattgcaaacttatttcctatttctggtggtgaggctagccttctgagttttaaaagaaaaggccaagtttggatttgtccacaacctgcagatgtagttgaaatctttatttatcttggtgaaccttgccatgtttgtcagcttcttctcacaatatcccatggtgcagatgattcaacttatccatca

SEQ ID NO: 113014 - DNA, 231 bp, Glycine max
ctgaactttggcaacccaatttcaccttatcctagaagaatatatttcaacggggagagctgcgaaatgccttaacctgacaagtttcctatgttaccagatggtagctctagtttaagatccacttattgtggttacagtatatacagaatttttgtttcacgacatactttatggatctttaatcttaccctccccaaaaaaatatatttccaatcattggttttattt

SEQ ID NO: 113015 - DNA, 270 bp, Glycine max
ggaccaaattgaagattgtcaaccagttcagtactctcttttcgatggtgaaggacaaaacctgccttacaggaatttgatgggagcacagcttctacatgacttggcagggtagaatatatatatatgctaccctgccaagtcatgtagaagctgtgctcccatgacttggcagggtaggatatatatatattcttcatttgaggaattgaggattaaaatggtgagtataatcaagaagaaattaagattagtcttttgtttttcttt

SEQ ID NO: 113016 - DNA, 270 bp, Glycine max
gaaaaattttcaccgtccaccactgtaagatgttttattcttttatattctgtatggatatttggctaatttatcattgattcatcattccaggaaatgaagtaaaattctttaatgaaatataggcaaatctttggagaaactttctgacagtatggcttgatgtttgagagtaataatcataatgttgtgaaagcaacacagcatgttgaatctcatggcaattgggtttgtctgaggatatatattagctatctagaagaatgttgt

SEQ ID NO: 113017 - DNA, 270 bp, Glycine max
ggatcaaatcaaattgtctgtttttccactcttgtatgaagcacaagatcatattcttcattgtatgtttgtctttcattaaaactgacatcaggtgattgggatctaaattgtaaatgtaaattgaacacgagcctccagggaaatattttatggaaattctaacgtgtgacttttccttgacaaatcaattgaggtttgattgagtcttaaagttgtctcatttcttgactagatatgaaggaatttacgacttcctggatctgtatg

SEQ ID NO: 113018 - DNA, 248 bp, Glycine max
  unsure (1)..(248): unsure at all n locations
agcattgaatcgtgagactataggatagtagtttttgtaattaagttgtaacacgttcatgcgtcaaaagtcgccttaaccgcgtggttttgcagaatgaacaccctacaagagttgttaaggcatgtcaatttcatcatgttccaaagacaacaataaaatcgagctttcagagttcaaacctcagcacaattaaaattttgaatgtgacgagttattgaaccanaagggtattgaatagtttctac

SEQ ID NO: 113019 - DNA, 263 bp, Glycine max
gcagcgtctatatataaggttgcctccttcagaattagagtctaactggcacaagaagatctctaaaatagtaaatataataaccttcgttgctgcaactttaggcggtatccttgcaatttttttcatctacagaaggaacgttgctgataagtcaaagacaaaagaaagcattgaaagacaactagaagatgtggatgtgcctttgttcaatctgctaaccatcaccattgccactaacaatttcttattgaaaaataaga

SEQ ID NO: 113020 - DNA, 272 bp, Glycine max
gttatctgtctgtctatatgatagagcatatcccctctcaaaatcagtggcttattaaaactcaggaaggagtacttagtggctttcaaagacataagccttctcccatgatttctttcttcagaaggtaaatattcagaacttggctggacatgaccagtaataccaaggagctagacacaaaatagaactaaaggaagccacaatctattggctattctgatatgtaaggtttacttattccatgaaatttactttcaagattggatggt

SEQ ID NO: 113021 - DNA, 260 bp, Glycine max
agaagtcttggtatttatcgtcaacttgccactggttagggtttgcagggccattattccatcggtttcttcttctggggtcttttggggctaataaggtttgtggagagagaagatgatcgttgtgctgagcatgattattgatgggtagcagaagtagaacggtaaacgttaacactaaggacactaacaaggttctgaacgggatgccaagctacgctcctccattgccttcttctaattccatagccatggaagca

SEQ ID NO: 113022 - DNA, 260 bp, Glycine max
ctcctcgtcttcaatcctttctttattctcttattcatccttctcttctgaataatccagatctctttctgcccttttctccgtcacgcttttcgtgtccggatctgtatggatttgatccagatctacacgccgatggtggttttggccgggtacaacagagaatcgatgacaagaacgctgatccgacggtagatccagccgattccgcttgttcgatcgctacagacccctgtatcggatcattaagcagcgtgtct

SEQ ID NO: 113023 - DNA, 264 bp, Glycine max
  unsure (1)..(264): unsure at all n locations
aatcaattcaaacaaaccatctttaacaacagaaaatccgaaaggaagaaatggttgttttttttgttggtgagagagagggataaataaatagagagaaagcgtggattttggttcgtccactcgcacacactcactccactctccgcagcgtctttccccacacccaaagtttatagttggaatctttcgagcgaatttagacgtggttanncctcagtaggtgttgttgttgaacaaatagttttgggtgatgacgatgat

SEQ ID NO: 113024 - DNA, 269 bp, Glycine max
gaggaacatcagcaatttgtcaaggatacttgcattggtaagggagtgtcaccagaaggcaagtgtatgtcagaagattgtgcagtaaatcatgatccaatgtcatgtcactttgagaatgacttgaacaccagaagagattcaaatctaagaactatggaagcaatgtcaatcaattcaaatgggccagagtatgaatctaaacctcttacccttaaggatgccatggaattttatgattcaagaggtttagtgatggatggtgaaga

SEQ ID NO: 113025 - DNA, 262 bp, Glycine max
gattgatggacgccgctagacgttgggtgtttacatttttttcgccaatttagaagaatttctgggttgcggaaaatcaaagcatggaggtggaagttgaagttcaaggtgaagatggttccaaaacggcactgggaaaggatggaaaacagtgtttggacgaggctgtgggttcaacaccgaagacggcacagtgtctcgtcgccacgtgtccttcgaactcgaacattcagactcagagggtttcattccaagccatcgg

SEQ ID NO: 113026 - DNA, 265 bp, Glycine max
tgatgatttgtgttttcttcatgtccaagaagtgttttcaactaagattttcagttacaaaactcagaaagtcattcttatgtatgaactcactttctctgattatcaatgttctctgtaatatcgcaacataaatgtttttaatacctgtttttgtcacacttttttccttccaattgaatgtacctgaaaagcagagaattcagttgtgcatcagttccaatatttcaacagcctctttcagtttttcatattaattgcatga

SEQ ID NO: 113027 - DNA, 234 bp, Glycine max
ttagaattgaacatgtcatccatggtcatccaattcacaacttgctccaattcaacttatgctgcaaaactaacaagagttaaaactatgtggcatagcaataagacccaaacctttatcattttataattcatagataagccatagacgttaagattgtggtctacaaggtttacctctaaatcaaacatgatttatcagcactgtaagccaaggataatttcatcagcactg

SEQ ID NO: 113028 - DNA, 208 bp, Glycine max
tagagagcggctgagacattgtctgatgagggtccacaaggaatcccccctccccaggatggatcaagaggactagctgactttgaggacggggctgatagtaaaagctgtgctgctgagatgggaaatgtatctgaagtaccaaaccctcagtatcagctgagaaggtggaaagaatcttggaagcccaggatggatcaagaggact

SEQ ID NO: 113029 - DNA, 264 bp, Glycine max
ttacggactgcaaaattgcctttagcaattagcactagcatacagttaaacgacccttaatggcttgttcaatttaaagatttattgttaagtccaaagagtgtctttagttttctgtcccatgtacatatatatatataattagccacccttatgggtggcactatgtgcaacctcacaattttaccaaatctataatcttccccttctctctcctctccccatctccctgatggggttctcatgaattcaagtagtgaaatc

SEQ ID NO: 113030 - DNA, 266 bp, Glycine max
tgctaaagcttctccaaagaatttgaaggcgacagattcattcatgttcattttttccttttccccttcgtccccatcaagtttctgattctctcttttcagttcctttctctttcttcattcttctttctcttttcactattttctttacatttttttctttttctctcgcttttttcgcgttcactttctctactctgttttacgcattttatttattgttttgttagttgattttgcgattcgagtaattggtctgcttgtgc

SEQ ID NO: 113031 - DNA, 228 bp, Glycine max
ttctgagaaagaacttgtgattgttattataattctagaatagggtatagtgtaaaataaggttaaacaagtgttattgtcaaattaaatcaagcatttttcttgctagtgttagtcggtgatatatatggtgatgttattaaacatgtatgccaatacttctatttttgtttgtagatggcaacgtgtatgcgtagttaatatgaatttcttgttcactgtttgtgt

SEQ ID NO: 113032 - DNA, 144 bp, Glycine max
ggaattggtcatgtagaccaccaatttctcagccatcaaagtggcatgatgcatggttctgctatgaagaatccatcacgaagtccccattccatttctgggactaccaatggacacttttgtgagctcaagccttctttcagt

SEQ ID NO: 113033 - DNA, 245 bp, Glycine max
catgctccatctcgagccgattcggctcgagctcgagcagttcgcctcagatattactcttcctccttctcattctcacagcattaaacgcagtcgttttcatgactccataattcaccggaagcagaacaacaacaagaagcagaccagcagcgcgagttcacatgggattgggaacaaccgcgagaagcagaagaagaatcgtcatcgaagaaggttctagaacaagaacacacaacaacacc

SEQ ID NO: 113034 - DNA, 218 bp, Glycine max
tctcgagccgctcgagccgctcgagcggtcacgttgtttggaatcgtttatactcaaacgacacacacgatttagtggactatcaagacaaacaggtatgttccattcttgatgagacactgcaagcagttggtgctaaggcaatggtggttgggcatactcctcaaactataggtgtaaattgtaaatacaattgtagtatctggcgtgtagatgtt

SEQ ID NO: 113035 - DNA, 226 bp, Glycine max
ccatggtccctttttcaggctggagtccttatcaggctcctgccacaaacccttcacttccattcagcattacttataatgctggttcaacacagttttatgggctaagccagcttcctacatcaccagctacttttactggaccttatcaaccttctggttcctcaattggtccttcaggtgctagccagaaggagcatccatttccagaaaggcctgatcaacc

SEQ ID NO: 113036 - DNA, 214 bp, Glycine max
tgctactagcgggtctggtgatgttgtgagacggggtggaggaggaggcgggggtgatgagcttgctcctcacccggccttgagtttttctcttggttacctgggtttgtctgatctgcttgttgttgaaagggtgtgtaaatctttacattccacggttcgtggggatccgcttttgtggaggagtattcatgtggatcagcctttgaacgag

SEQ ID NO: 113037 - DNA, 176 bp, Glycine max
tcctaatccaagctttacaattgacacaaggttttgattcttttaaacaaaatcaaattgcaattgctttggatcattgaggtattgaggtgtcgggtgtaattaaggtaaaccttaaaagcatcattgtaatttactcttttttctattaaattacaagaagggaaatttcgtgt

SEQ ID NO: 113038 - DNA, 221 bp, Glycine max
gaaaaaatcccatattactggaccaaaatgaattgaaaaaaaaaacacacacacacacacataaaggaaagacacgtgtcaacagtatgtaccacacgcgaagagaggagatgtgatttttgttcactggcattgtttctaatctgtgtgtcgtgaggcaacaacaactatctctcatccttcttctttctgtatccgtaacacttgcaacacacatggct

SEQ ID NO: 113039 - DNA, 218 bp, Glycine max
ggagccggcgctggcggtggcatccccaacgaggcgatggaggcgatgatgaacaacccgcaaatggctgctttgcgcaatgcggtgcagcagaatcctgcactgatccagcccttgatccagcagattgcgggcgccaatccgcagctggcgcagtcatcgctcagaaccccgaggcgctcctgcagctccttggcgccggtggcgaggatgacgac

SEQ ID NO: 113040 - DNA, 212 bp, Glycine max
tgttggaaatcagtaaaacaattactgtttcttgatttaagcagcaatctggaagatgcccctttatttgattgtgtgatacatctaaagtggcaactcccagattgttggaaatcagtaaaacaattactgtttcttgatttaagcagcaataaattgtcagggaagattcctacgtccatgggcgcccttgttaatatagaagccttgat

SEQ ID NO: 113041 - DNA, 176 bp, Glycine max
ctcgagccgctaagattgcagtagtgctgggtgctaacacctgcagtcaacaatggcctctgcatcatcatctctgctcaagtcatcacttaatcatgactagtctgagtgggtgaatggacaaacccttcgatactcttcagcatcagttgtgaaatgcagccacaataaatcat

SEQ ID NO: 113042 - DNA, 159 bp, Glycine max
caagcactgttcgctctctcattcgaaccattcgatctcatcatctcaccaacctgtgagtcagactgcgaatgactgtagatttacagtgccaggctctgagctatgagacttaggcatcttcgctgtctagattatgcttataacgacattagccct

SEQ ID NO: 113043 - DNA, 207 bp, Glycine max
atttttcaagagtttggggggtcaggttgagttggtgaaggatgggaagccttatgttatgtttggagatgggaaactgtgtgcttgtaagcctatgagtgagtctgatctggcttcttttattgtgaattgtgtgctgagtgaggataagattaaccaggtgttgccaattggagggcctgggaaggcattgactccattggaaca

SEQ ID NO: 113044 - DNA, 155 bp, Glycine max
gaacccacagaaaaggaaattattaatgctagacatttagatgcttgtggtctttgaacgagtctccagttacagtttctatatgccatgcagccatattgatcatgtggtcatagccatatacataaaggagtaaaccctaattttatatattt

SEQ ID NO: 113045 - DNA, 268 bp, Glycine max
cagggacttatattgaggaactattggttctaaaaatgtatgaacatagttcagttgtctttagtgccatcgattttatgatggaacaaatactttctctttgttttggaggcacaataagaactggtcaaatttcttttctgatggatttcctaattttactatttttttgaatgtttgtgaaagtacaaatgagaaaagggaactataaagcatagtatgtgaagagcaagggatatggtatttataggctttatattttataaat

SEQ ID NO: 113046 - DNA, 276 bp, Glycine max
caatgccgtgtttttagatactagtacctattttattaccaatactatgagaagggtagctaaagcaggtactagtatctaaaaacacggcattgattgattccgaaacccgaaaagagaaacgggaattggtaataaaatagcaagtcccagagtttttatttctttcttctcctctgtctattttattcccaatcctctagggtcttggccttttcttcattcccccccctttgttttataaaaaaaataaggcaataacttttgttgcttgta

SEQ ID NO: 113047 - DNA, 264 bp, Glycine max
gggcaagaagatcttcgaatcagtcaaacaagttcaaaggtcagatataaatagacatatatggggactgtctcagtatttttaatgaaattttggcactgctgaatgctgatccttatataagttgtataaaataaaatttaacttctgtctgctgtaatttttttaaacatatgcagcaactgattgtgaagggaacacgactacaacatgagtccagttgtcatgtggtaataagtctccacaattaaattagtcttattt

SEQ ID NO: 113048 - DNA, 266 bp, Glycine max
tgacaatcttggacgaatcaatggggtgtatgctggggcaacatgacgaatccgggaagaaagagcgcgctgtttactacctaagtaagaagttcacgacctgtgagatgaattactccttgctcgaaagaacgtgttgtgctttagtatgggcgtcccatcgcttaaggcagtacatgctgagccatactacctggttgatatccaaaatggacccggtcaagtacatctttgaaaagccagctctcacaggacgaatcgcccgg

SEQ ID NO: 113049 - DNA, 250 bp, Glycine max
  unsure (1)..(250): unsure at all n locations
gctcttcacaccaaagcaattttctgccaagattcgtgtcaatcctcccaaagcaagaattcctgcaagcttcatgaagaatttgcaaacttacttaagcccgttaccacaggcaatagtcacttacaacagtgcttaccttcatctccgctcaagaaacaaagccccgantcaactgaaacaccaagattagcaaaagtgaacttctccaacttatcaatacctgcagtgtntctcaaatctactacta

SEQ ID NO: 113050 - DNA, 259 bp, Glycine max
tatggatatatgatatataaaactatctcgaatgttcggtaactccttctaattgattttttaacgatgatttggagtgagatacttttaagcttgatcagacaaagaaaattataatctttaagcgatcatgatggaagagtgggtccccacaatcttcttccctatcttaactttttaggggaagataatgaaagattgtgttgtgttgtgtcacagtgacttcagtcctttctactaagggtgtgtttgacttaag

SEQ ID NO: 113051 - DNA, 262 bp, Glycine max
tgcaaacatgattctggtgagtttctctgtctgatatttggggatggggatttctatggtttgtgtaaaatacaccagagcgtaatggaataagagatatagttatcaaattaagacttagtacttgagcagtggccatttggctgcctccccccggtccctgatgctttgactttgtgttttcttcacctctttggtgtatacaacttttcaaactttggaaatatgtgcaggttaagagaatgagagaaacactatactc

SEQ ID NO: 113052 - DNA, 260 bp, Glycine max
gaaagaaggtagttttccaattgactgatactaatgaactgtcgcttttggagtgtacagtgtcccttcttactgactatgaaattgctaaacattaacttgattgggggtacgtgctgatttacttgtattagtatctgggatattgctgggaaaatgtaagtgtatagatgttatttaacatgtggtcacattttgtagtgttaatttgtgtcttgcaagtatgtttctggacctattttgagatgataagccattca

SEQ ID NO: 113053 - DNA, 130 bp, Glycine max
tctcgacgaatcggctcaggtaattagtaattaactgcaagtctaagccagctaaacaaagtaatcatcgttcatgtatgggtgaatcatgaaggaacagctgaataaattatttgtatttttcattatt

SEQ ID NO: 113054 - DNA, 267 bp, Glycine max
cactgttgcagaatccagtttgtgacaccaaatccaaatcactattcactatgactactcagacccaagaggagcttcttgctcaacatctcgaacagcaaaagatccatgatgatgaacctgtcgtcgaggatgataatgatgaggaagaggatgatgatgatgatgaggatgacgaggatgatgaccatgccgacggtaagttggtaaatgagattaactgaagagtgctcatgagccatgacttgctcatttcattcttgtatt

SEQ ID NO: 113055 - DNA, 262 bp, Glycine max
gtcttggctcgctccctctcggatcagatctgcgctctccgttttcagatcgcgttttgtttcaattcgacactttcctcgcttcaaagattaagcgaacaatatggtaacactcctcacactcccttggtttggcattccaggaattgcttgtctcggttaactttttattatttaacactgattatttttatatcacgttgatggtatgaatctcctcctacaaatgttaatttcgttatatgtatatagttttaatccg

SEQ ID NO: 113056 - DNA, 154 bp, Glycine max
ctcgagcgaattcggctcgaggcgagcagccgcccagttttttttttagccgggtttttgctaaagcacttattattatcaaagggttttgaaacggggtaacgtaacaattactaacatattaaggggccagtattcggggtgagataaaaag

SEQ ID NO: 113057 - DNA, 260 bp, Glycine max
cacacagactcctttaagattgaaagtaaactgaaagagactatacaagggaagattccattatttacccagctataatctctgagtgtagaatctttttcttctgaaatggcaatcttcccttgtatagtctctttcagaagaaaaagattctacactcagagattatagctgggtaaataatggactctccagacttttcagatctaggcgagtcctatcatattcatatgcaattgcattttatatgtttggagatg

SEQ ID NO: 113058 - DNA, 260 bp, Glycine max
aattagtacatgtttgataatcccaggaagttaaaaaatgtagattataatttgctttaagcttttactcagtcaagttttttgtttactacatcaaagggtcagaaaaaaaaatctgctgatttggttttgatgtcaaggagtgatgctcaagaggttaaggctagataatcctgtgtgagcaggaaaactgcacacagctgttggttaattgctcaatcctcaacagtattggtctgaactattgaatcttaagttat

SEQ ID NO: 113059 - DNA, 255 bp, Glycine max
agagtaaaattatataaatatattgttattctctaagctttaattccgaattttcaattttctgttggatattgaaccttgcttttatggtttatgcagtcattcttctattttaaaaaaaaaaaaaaaaaaaaaaaaaaaaaaaaaaaaaaaaaaaaaaaaaaaaaaaaaaaggggggccccaataaaagtacgtgtaccaccggggaattttttgcgggaggggaacggggggggaaaaaattttcccaaaag

SEQ ID NO: 113060 - DNA, 253 bp, Glycine max
cggctcgagcggctcgagcggctcgagaaaagtgttcgtgctggattttacactcttggactgtgtttggcacgcaatttacggtattctggaattgattttcatcgctaacacttgacaatctcaaaattacatcaatttgtgagttgccggatggtgcgcctcaatctcaatttcaaaactttgctagctcatattatattgggaactctttgattttaaagcatcgttcctcaacacgaatttaggattt

SEQ ID NO: 113061 - DNA, 101 bp, Glycine max
atttcactctttcactctccaactctcaatccgacacgatggaacgttaaccgttgcagaaaatcgcgatttcgggaccaaccctagcatccctcaaccag

SEQ ID NO: 113062 - DNA, 249 bp, Glycine max
tgttaaactgagctgtatgtgataattttcaaatgtttctctcacctgatacatttcatatagatggatacatttaatggtttcttttcattattaattgatagaagaatttaaaaattaatgaatgaaattactgataaggagtttaagtaaaattaggtgtggtaatagaaaattaatttaactaggagaaaataatgatattgataaaatagatatgaattagttgaattggatacaagagtaaca

SEQ ID NO: 113063 - DNA, 240 bp, Glycine max
gctgattgcaattttaatggacttttctgagtgacaaagtattcaacttaaggtcaaaaaaaagaaagaaaaaaaaaaagggggggccaccggtgagtgagttcgtcgaccgggaatttaatccgggcagggtacctggggcgtaccagtttccccaaaagtgagccgtatatcagctggggctaatcaggttcaaggatgttccctgtgagaaattgattgccgctaaaatttccaacc

SEQ ID NO: 113064 - DNA, 262 bp, Glycine max
ctgctcgagatggaatcacaacctctcggtttccagggggacttgcatattaaccaacctacatggagttaggtatggcgtctataagagtaaatagcatatatgaacttttctttcacatgcatacgtgcattattggcgttctcaagagtggcatggaatcacaacctctcggtttccagggggacttgcatattaaccaacctacctggagttaggtatggcgtctataagagtaaatagcatatatgatgaatacttt

SEQ ID NO: 113065 - DNA, 257 bp, Glycine max
cgtgaaactaagaatggtattcttcaacatgacctttatcatgaggctcccccaacacctggggtgtatgatcctcaaaagcaatgtttcaacttcttgtccttgtcaactggagttagtgatcagttaaaggccaacgaaatttttaataaaggtgaaagtaagttggagccatattcaaaacagcaactgccttattttcagtcactacaactacaacagcagaggcagcatggcctcatgcccgttcaaagttc

SEQ ID NO: 113066 - DNA, 260 bp, Glycine max
ctcaaatgcctaaaagctttcagaaaatacatggattagcagggcgttttcattttcagagggaacctgcaattaatatgggaatggtgagaagatttgcttccacaatctgaggcagattagattgaagcaatgcttctgaacctaaaggaatcatctgaatttcataatagatcatttgaatgtgctgtggactctgttcaggccattgcagctagtcatctctggcagcttgtggtggtacgtgctgacttgaatgg

SEQ ID NO: 113067 - DNA, 256 bp, Glycine max
ctcaggggttctaccggaacctcaaggatttatggtgcactatcctgcttatccatcatccatctctcgagctgtggatactcttgggggaattcaagccatccagaagacccctattctcaccctgcatttggggagcttcgtcctaccaactctctgcttctcagaatatccaagacaaaaccaccaccagctgttcatgatgccgaagcttctagcagctctacaaatggggagcaagaccaagagggaagtc

SEQ ID NO: 113068 - DNA, 135 bp, Glycine max
atttatcagatgctggcattcttagcaggagtcagccatattaatatttataattttacaattcaataacaggtgccatattattgttttacagctaaacaccaacaagggcggcagtcaggtcatgaactcccc

SEQ ID NO: 113069 - DNA, 196 bp, Glycine max
aaatctcttccgctccccaattttcttctataccaatacaatttaaccatactagatttcagtagttggaagttagaaagagactttcctaatcggatgttggaaaacaacacaaaactgatggaagttctgtttagaaattgctctttaactggtaccttccagctacccatgcgtcactctccaatcataaggc

SEQ ID NO: 113070 - DNA, 217 bp, Glycine max
aaagccgcttcgtctatggacatgaaaagggtcgatccagtttccccctttgggccttgcttcgaatccaatggcgttggaagctcccaagtggggcccaacgtgccgatcattgatctggcgctgcagagcgagatggtgaagtgatgcctaaacggatgaaactccagggtgcagtcttccagtgaggctacgagcatagtgactttttggggac

SEQ ID NO: 113071 - DNA, 203 bp, Glycine max
  unsure (1)..(203): unsure at all n locations
tttgggatgatataaagaaaggagagattgagataccagatgtactgaagctgngttacatacttgatcttccaatataatcctccgctcaagtatgtaagccggcttcagtacctttgggatgatatagagtacggagagattgagataccagattttgttaaaagtcatgatgatattctggagaatagaccactcaaaga

SEQ ID NO: 113072 - DNA, 122 bp, Glycine max
tgacaaagtaaggtttgtttcatcaaaaagatggtggcacccattgctgtttcttctccagagtccactcttttgctgaaccccatctgtccaggaggcctcagcatcagagctggttccta

SEQ ID NO: 113073 - DNA, 211 bp, Glycine max
attggttaagaatagttcattcaggagcttcacacgagatgaacaaatgctaccttgacagtaacttatctacgttaagcatcccctttcgattgaggaggatgaaccgttccacaaggggatgccaaacgtacatacgttactgtcaatgttgcatttgttcattggataagaatagttcattcaggatcttcacacgacatgtgttgat

SEQ ID NO: 113074 - DNA, 238 bp, Glycine max
ctcgagccgctcgagccgggatcatattttcttaactagtgagttttagccctcttctggttgtggcatatcattcttgccaccttctctgtcataacttttgtcatgcatttcaccagtgtgttttagagagtttcttgtcagcatgtcctcctttctacagtccttggtcatgttctttattttgactgttattttcttctactgctgtgacatctctgaggtgtcctaacgattg

SEQ ID NO: 113075 - DNA, 241 bp, Glycine max
gaaaagttctctgtttctccaccggattacaattgggcaaaaaagaattttgaaatgcgaggttcagtattgctgaaaaataatctaaataaggctcgaaccacaatggataaacctcattggattacagatggtgtctgggagagattgtgcaatcattggagatctgaaggattcaaaaagaagagcacccaagcaaaaacaaatcgagcatctaattgtggagcaattaagactggtg

SEQ ID NO: 113076 - DNA, 185 bp, Glycine max
cttgttcttgacaagtctgtatgggtaatgggacatagccttctaaaaccttctgcatgaattttcaaatgcaccgaattagcatatattgggtcatagctataaccccaatatataccaaaaagacattgaacgggctgctgttatagactacactggggacatgaaaccgtggctggagataa

SEQ ID NO: 113077 - DNA, 251 bp, Glycine max
ctcagcctctccgtaacgacacgaccgaaaactacatacactccgctgcgacgaccagcgacacctgcgaaccgcgtttgacgggctgcaacgacacgagcgccacgctccactttctttttcgccgctgagcctttaccaccctctccaataccccagcaagtcgactgcggccatgcctaccacgccgcctccgctcgaccgagcagagatcttcagcacggcagacgcagcggaccgcaaggaccctg

SEQ ID NO: 113078 - DNA, 240 bp, Glycine max
cttcccgatgtcttctctcatatagcgactctgcaatggtgattatctcccaatttcaacgaagaggagcagaaacccgctcactcttcaccaccacaaccccaatcctcttcctcttcgttcagtggtacttttgacatgtcaaaccctatcacttttctggtgagagtcttcgagttcgtctccgaacacagtgactttttggagacaaagagcgccgaaaaggaggtagcatcgttg

SEQ ID NO: 113079 - DNA, 144 bp, Glycine max
ttggacaccttgtaaggcagaaaggaccagttcgtggtcttgagtctaatgtcattgcaccaaatcttcttgcatctggggctgaggatggtcatatttgcatatgggatttggtcaatccttcagaacctacacatttgccac

SEQ ID NO: 113080 - DNA, 279 bp, Glycine max
tcctttctacaatgtagaaaggaaatataggacagaaaaagttacacggtagaaaaacacagaaagatgcctccatgaccatagcatattcctttctacaatgtactgatttttttgttgctctagatctcagccaaggcatgtgacagttggcaaaaaagatgctgcgtgtataatttctgaccaatattttaagtgtggctgatattatatataagggtctattgtatttatcaataaccgacctttctttccagtaagtttcaatgtttttaattt

SEQ ID NO: 113081 - DNA, 266 bp, Glycine max
accatggctgcccaacccaaacctcagaaccgacccatttctaatatcgtcttcgtcgttgctatgcagacggaggcacttcccatcgtcaacagattccagctcactgaggaccctcactccccgtcggtctcactcactctcttttcttagggtttaagatcacttactctaattagttaatcacacactttttcctttctttttatttttatttggttaaatatattttattacattaaattttaaaaatttcatttttattt

SEQ ID NO: 113082 - DNA, 265 bp, Glycine max
gtagtattctaagcttattttatacataatgatacaattttgacacttaccaatagtgtctagctcggttgtttatcggtgtgcatgattttttgtaaaccttgatatctgattttgatttttatgtacataatgatacaatattgacattccttttgcttatgtattggaatattctctactagagtctagagaagtaatgttggcttattttatgcattattgtataatttggagaattgggttttgattatagtagataata

SEQ ID NO: 113083 - DNA, 269 bp, Glycine max
ctgtgaccatggtctagggattgcaaactggggtgagcctacctctatatgtagttctgaggatgaattaagtgggagctataggttcaaagatgttaaacaaaaagcaatggaagaagtaatgaatgggaaattcaaggcacttgttggtcgcttcttaaatctgtgggagtttcctcttctgatgaaggtgataggagttgggtggacaagttacatctttatcatgggaagctgcttcttttttgaagcctggtgcaattggaggt

SEQ ID NO: 113084 - DNA, 260 bp, Glycine max
gcttaatttcatgttgtgtagctatattgtttgatttatgcatttcttttatcactttcagtgtcaaattactaagatattccatttattagtccataaaggtttttacatcattgttccatttctggcatgttgccacttctatgtgctttttttttttcggcattctatgttgccacttctatgttgcttattggttgagggcttgagggttagaatatgtactcacacgtactacaatttcaaagtaaaatggatca

SEQ ID NO: 113085 - DNA, 267 bp, Glycine max
cgcggcccgagaccaagtcaaaccgagacggtgacactggctgagtggaatttccgccgccattcgaagctacagcgatggccatagccgccaccatttccgttcctctcacatcccccacccgccgcactctcgcctccgtcaatagctctctccccattctcccagatccactttgcccacaccgcaacgcactttcaaataccctaattcgcgcctcgtcgcgtcctctatgagcaccgaaaccgccgtcaaaacctcctccgc

SEQ ID NO: 113086 - DNA, 263 bp, Glycine max
gatatttcggtacgtgcatatgaaacaatatctatctgatgagaaatcttaaataaattttcatattatttgactcgtgtatatgaaagaagatcttgtaagagatgctaaatagatagatttctcagtattaaggatgtctaattcaattaattaattgagtaaaatactcaagtttgatttcttctaatcaaagagagataatctttgactctggcttgtgaagtatgtgtattatcatcgatttttgtcattaaattcct

SEQ ID NO: 113087 - DNA, 257 bp, Glycine max
ataaattaagagccataattggagtactgaatgatatttacgtttacggcgtgtgatatacagatactagctagaactagaggaggctcccgtttcagttacattcgattcaacgattgaccagaagagagttcaaagaataaatttagatcacccaagattccaatattgctatgaaacaatagtggcatctaacgagtttattacgagtgagtgtatccatatggggtaataataaaagggggaggagagcttga

SEQ ID NO: 113088 - DNA, 260 bp, Glycine max
tgggtcaattcattacacttgttagttcactggagatgcttgtttgacaagatgattaataataataataataataatttaatactctgactgggacatctgagttttttggaatgggtatgctactgctttatgggggccagttttgaaattaaattagttagcaaaagagaatgaggatgatgtaagtaattaagtatcttgttttttgatggtgacaaatgtttttttcttcttcttaatttgtaatgagaaattgt

SEQ ID NO: 113089 - DNA, 252 bp, Glycine max
  unsure (1)..(252): unsure at all n locations
tactcacacaccactaggcttttgttttgttgatttacaatggccttccatggctatgctgcagcaccaacaattgcagcacttttctgctttctatacttcttccacacgagacactatctgcgactctcccttttgacagactaccccatcctcggcatgctgccacaattactcttcaacctgtggcgtgcccatgattttttcactgtnannttgaaacggcatggaccaacaggtgagttcactgga

SEQ ID NO: 113090 - DNA, 265 bp, Glycine max
atagtgtgctatgaagacaccataacacagcttcacataataggtgaaagaagagatacacctctccctcgaaatttctcaatagattcctttgtcacaacactagtaaggcttcccagtttgaaagtcctcacattgtttctcttggtatatggggtcctttgcctagtaagatagctcgtttgtcatccctggaaatagttaacatgagttccaattttctctatggttcaattcctcaggaactttcatcactgtcaagtct

SEQ ID NO: 113091 - DNA, 265 bp, Glycine max
atgaaagtgtgtggaaagtgaggaagcatgttgagagatctttaatcttcattccaaggtgttattattattatttcattctctatccatatgtcacactacataattatgtacaactactatatcattttaactttttcgcggaaaaggaaaaaaatcttgaaaattcaccccaataaaaaccgtaaaattttggaaagagaatatgcactaagtggaacttttttttttccttatgtgtgtacttgtgttttatagatatgga

SEQ ID NO: 113092 - DNA, 129 bp, Glycine max
catgtacacacgaaaatgctagcttctccaacatagcactcaaaagttaattatgagaatggaaacaaaaaatttcatgacccctttgaggattagtctttgcttcattctcctcttccacacaacata

SEQ ID NO: 113093 - DNA, 259 bp, Glycine max
aatatattcatcaaccatgcttttgtttgtaacatactgcattgcacttcgagcacctctgagtctgctatttattctagcagtatgcttgttgtattataagcagaaggcagagagggaagaggatttgatggttgagacttttggccagagttacacagaatatgcaagcaaagttaagtacaagcttattccttttatctattagttgatctccagaagtttagtcagtcatcaaaatctgattgtaatgtcaggt

SEQ ID NO: 113094 - DNA, 265 bp, Glycine max
cgactcgaactaccaacggcgaccattacacttcacagtgtcatcgcgcccgcatacctggccatcacaggctgcctcagcctcacgctagtacccgccgtggcacgccccatggcgtgcgccccacgcgccccaacgtccctcctcgctcgtggccgtggcgcgtcgtcgtcaccttcgctcctggtcacgcgcgccatcgacgtgaacgagttcctgggggacttcggggcgcgggaccccttccccgcggagcttgagagtt

SEQ ID NO: 113095 - DNA, 256 bp, Glycine max
ctggtagaaagtactcgattgctggatttgtaatttggaacgctagtgtgagcgtaaagtccaatgctatgctcaacaccaataagggacctgttcgcgttacatttcctgacgctgaaggtcttcctggacgaccgtcgagtacaacctaccgtatttgcagataggtggcctgcattggggagatcgtacggttgacatcatgggcaacatggtgtttgacgacaagacgaaccatctgcaatgcgagctgcgc

SEQ ID NO: 113096 - DNA, 252 bp, Glycine max
aatattttgaggtaaaccccatcactttgcggctatttgggggcttgtttctctggagagtgaggtcatccatctcataggtgacaccccaagtttccatttattttaaattgattatttgtgagaatattgctcaaatcaggaagtgggtcgttgcaagatatgtattttccacctttcatttgatataattgttcatcctctctatttttttttaaaggagcgttttaggtggggtttgtactgtggcat

SEQ ID NO: 113097 - DNA, 253 bp, Glycine max
gagcgggggagagagaagagacaatgacgcctcactcacctctccgttcctccccgctctctgataacggcgaccctttccactggccgcaaaatgacctctgcgacaactcccacgccatcgtcatcgtgagacaacatcaactcaattcgcccaggccgtgtccctcacgctggaatccgagcactggaacccgtcaccgaagaacttcatcacccatcccatgaggctttagacgaggttgccgagcgcc

SEQ ID NO: 113098 - DNA, 252 bp, Glycine max
ggatgatcatggaagttggaagccaaatattttaaattggcatcttgtagaattggcgatcctcttgtgtcatggatcctttgagtctttcttctgtttcagaacaggccagggagaacaatgtaaaaataagttcttgcttccaagaaagcctgcaaggcaaccaaatccaatcatatacaggaaattgcgtcgagggtcagctgcagggagatttccagagaaacaaattgagtaccctacaaataagga

SEQ ID NO: 113099 - DNA, 249 bp, Glycine max
ccgtatttctcttctctctcttcttcttctctaatcctcatcctttcaaaccctagacattctcgaattccgagccctttatataataatcctatgaggctctaattttcttgatgattttgaggttcgtgagttaggttttggagtttgagttggttgaagagggatagtttgtccgtggtcggtggaatttgagttccgtagtgttcttgttatctattatggttatatttgtcgtgttcgaagatc

SEQ ID NO: 113100 - DNA, 290 bp, Glycine max
agataatttgctataaaaaagaaagaaagagaatagagaaggcgttgaaaggtgttgaggcttggctcaactcaatttcccacacaacacgcatcataatcggagcaatctctgtttcatcttctttctttctgattctgattctgatgggtatctcgtggagtggcaacagcagaagaagaaacaattacctccaaaaccgaccaccacccccttcttactactaccctcctgaatcccaccctcctcctccgctagctcgcacaccaccaccgcagtctcaaggctac

SEQ ID NO: 113101 - DNA, 286 bp, Glycine max
catggccttaaattctccaaactccagcaactttagcactgccctctctcttgggttggcttccaacaccaacgaagccttaacggtgaaaggaatgggccaactagggttgaaccaaaggatcactaaggtgagaaaatcctcattgaccgcaaaagaaagatcgtgtctggttcatggtggcagtgaaaacaacactgagagtatcataagagcaagtcagattgtaagagcccaactggtgcatgcagtatcatcaacaccatccccagtttacagtaataat

SEQ ID NO: 113102 - DNA, 285 bp, Glycine max
ctgaattgtattgaaagaaatttcatgctgcatcttatattcttaaaattgttcaaattttaagaatataagatgcagcctgaattatattgaaaataatttgaacaattttaagaatataagatgcagcctgaattgtattgaaaaaattgttcaaattttactattggttttggttttaatagccattgtcttcatagttatagtgaatatattactagcctatgtcaaaaagtagctattaccaccaaaacagccaaatgtggcgttcactgtgtctgattt

SEQ ID NO: 113103 - DNA, 253 bp, Glycine max
cacaagcatcctccgacctccacgaaggcaatagctgccgctatagatgagctcttcaacgctgtcaagaatggtacattccagcgactcaagtgcagctacgacggatgggctctaccagctaacctccattcaccgcggtcgcgactccgttatagactacaatgattcgtacctcatcgacatcatcaccatgcacggagtcgacatttccgtttccgaaggcgaatctcccaacagcttgttaattatc

SEQ ID NO: 113104 - DNA, 283 bp, Glycine max
  unsure (1)..(283): unsure at all n locations
atcgtgctcgtcaaggccactcccaaggagactccagcccttcgagcaggaaaggaggagccgagggagtgcgtgggggggcaccgncngaaacaggctcggggagcggagataggatctggaaattgatgccagcctagatgtgcagagccccgggtggaggttaagtgtgaagatgggagacaaggaaaagttcaggttggtgcttcgcctgtgcatacgccttaccaacaaaccgaatgcatcaattgaggacatcgggagcccagaaaaactgattgcg

SEQ ID NO: 113105 - DNA, 285 bp, Glycine max
  unsure (1)..(285): unsure at all n locations
ttcggtctcttcaaggccactcccaaggacactccagcccttcgagcaggaaatgtgcggccgtgcgagatttttttgtcccgtacccgncacaggctcgtgtagcacatatattatctggaaattactgccagcctaaatgtgcagagcccctggtggaggttaagtttgacgatgaacaacaaggaaaagttcaggttgttgcttcgcctttgctacgccttaccaacaaaccgaatgcatcaattgaggacatcgggagcccataaaaactgatgtgcttct

SEQ ID NO: 113106 - DNA, 278 bp, Glycine max
aacagaagaaacctaattcctcaaattctcacgctggacatgcttcaatcactgcgcgttctcaatttgatcaatcaatgggcgcgatgaccatcaaccgcaagcgccctgaagaatgcatgaatgtaaaccacaccaattccgattcccagagaaaacgtgccaaattctcgaccaaacccgtgccgtccgccaccagcgccgtcgcgagactctcccggtacccggaggttcacgcgcctttggcgagggaggtccacgcgccgtgccggcagcga

SEQ ID NO: 113107 - DNA, 280 bp, Glycine max
cacgcgctcatcttcccttgcccattgcagggccacgtagggtccatgctgaagctctctgagaatcctaccctacgctccattattcattttcgaaccagcaacgcgtgttgcttctggccttatttctggattccaaagctctttgagtgcaaagaacttcccattcgatgagatgaggacatgtaccgaatcatatgcaatatgcctggcatgggaaacttgcttcgatgtagagatctcccaagtttctgcagaccaggtacagaggggaacttgt

SEQ ID NO: 113108 - DNA, 275 bp, Glycine max
aattaatctaaagcaagcaatgtttatcaacctagtgtcacacaacacaagatgcatgcactagcctttccctctatcccctttgttccttcatagattgttcttgaaccttagagttgtttcatgttttcatttgaagatttaacctttccatcttgattgtccctttcaacctttccaaggccatttaggtatgaagatggtcctttaataagtggtgttgttgatgcgtgaaggtggcttgcaatgttcattgttcgatgacaatgatgaga

SEQ ID NO: 113109 - DNA, 273 bp, Glycine max
aggatgtcttgcagttttgtttcctgtgttctctggcaaaaagccttcctgtcataattcatattgttgagtgattttgtttcaatttacaaggtctgtgatgttttcttatcagtgcaatatggtttcattcgcggatgacttggagaattgatgtttagagcaagtgaagcatgcaattgaacagagtgctgcctggatccatttttcttttactaaaagagtaccttgaagcatagcaaggattgattgatgatgggcaagtgggtggtt

SEQ ID NO: 113110 - DNA, 265 bp, Glycine max
tcttatccaaaaaacaacaatgaaaacgagatatattaatacaacaccgattttcgttttcctaacgagaataaagaaaaggcgattactatagcaacaaactctttataaaagcacatcaaaggaaccataaacaacaacaacaacaacgtaggagaaagaaaagacaagaaaaccatcgaggacgaaattacaacctagcacacagagatatatagcggaagcaaccaacagaagaaccttcaacagttcctccacacgtaca

SEQ ID NO: 113111 - DNA, 238 bp, Glycine max
ctcaaacggcatcagccagaggcgtatagagagcaaaactcagtgtaccaacagagaatatcaagaatggagggtgatactcttcatggcgtttgtgttggcttggacgtggtcgaaatgatcatgggctttctttttgcggctatcaacgagaaacatgactgcagcgcacgtggacatgatgatcgaagaagaaaatgtctgagggattggaaatcagtacgcctggtctgctacg

SEQ ID NO: 113112 - DNA, 254 bp, Glycine max
agcaacccatttgcttatgcagatgaggatgagattgcatttttacgttcgcttgggtgggaggaaagtgcaggagatgaatatgatgaaggcctcactgaagaggagatacaagacttctatgaaaagtacatgaaattgaagctgtgatcaaatattctccaacatatgcgtcaaaaacactatgcattacacagccacttgactcgaatactgggggatatggtggagcgccatgagtaaattatgttcaa

SEQ ID NO: 113113 - DNA, 254 bp, Glycine max
gagaatttggacgccaaagacggaaatctcccattctgcattaccagctttatcgttgagttcgtgacttcgtgtcatctccatctattggtccacttatgttatccttcatggaagttcatgctagagccttcgaaatggacattattataaggaggtgtacttagcaaatagaatgtgcgaataacaatatcccctttgaatttatgaggcccaatatacaaaagagaacttattttatacatttagaccat

SEQ ID NO: 113114 - DNA, 252 bp, Glycine max
cttacagctagctagcaagctggactgaaaccaaaaacagaaaaaccaaagtgcatgttatttcaatattcataatttttctcgacaagttgagggtttttagatcacacatacacacaaagaaaagaaaaaatgatagggtgggaagatgtatacaaagtagtggtagcagtggtgccactctattttgctctattattagggtatggttcactgaagtggtggaacatcttcaccaaggagcaatgtgaa

SEQ ID NO: 113115 - DNA, 267 bp, Glycine max
ccttactgtcacaactcacgaattctcgaaatgctttctttgatctttataaccagatgctctcacagcctttctcccacaaccactacaccttcacccacgccctcaaagcctgctccttccacaacgcgcgctccaaagccctcgaaatccacgcgcacctcgtcaaatcggggcgctacctcgacctcttcctccagaactcgctcctccacttctacctcgcccacaacgacgtcgtctccgcctcaaacctcttccgatcca

SEQ ID NO: 113116 - DNA, 193 bp, Glycine max
ccaattgggtttcttcgttataaaggagcgtccatttttgtgacacgcttttgcttgttctacgtttggctttgctggattcctcttctactggtcacgcctgtgttgtgtctcgcagtctttctccctcctcaattagttctccgtgtgtggctgattttggcttgctttgtttgaaggttgcgttttgcag

SEQ ID NO: 113117 - DNA, 144 bp, Glycine max
tttgtgtattgctttagaacttgttcattctgtttcgtctctgtcactttgctcctccgttgtccctttctattctacttacattcttgactgcaacaaccgccacaggtacgtctcatgctcattctccgtgttctcatagtt

SEQ ID NO: 113118 - DNA, 167 bp, Glycine max
cgacgtgtgagtgatacggtgaggatgcttgaggcgatgcggcggctggatgataagggtagtcaacctgatcatgtttcctacaccactgtggtttcggcacttgtgaaggtgggtgccatggaccgcgctcgtcaggttcttgctgagatgaccaggattggcgt

SEQ ID NO: 113119 - DNA, 243 bp, Glycine max
gcctccacctctgcacctccctcccttgaccaccttcatcacacacatgatcattcctccgctatcttgggattgaaagtaaacactggtttgaatcttcttactaccaatgcaagcagtgatcaatctatggtggtggacgatgacatatcccctaattcaggagacaaacgagctaagagtgagatggttgttcttcaagttgagcttgagagaatgaaggtggagaatcataggctgaag

SEQ ID NO: 113120 - DNA, 286 bp, Glycine max
aacttctcactgctctagccacactcaccctccgattctaacaccaataccctaattccgctattctccaactgtttttcttcttcttcttcttcattcgttctatctttttattttattttatttatgaagcctcctccttggctgtgatttttacttattactattatttttcagctcggtatgtcgttttgcttctaaaccctaatcctaatcctaatcctgcagattttactttaatttgttttggtgaaagttctggattgatgaaactgctgtatctttt

SEQ ID NO: 113121 - DNA, 276 bp, Glycine max
ctggaagtcaagaaacgaaatttcaagattcatactctggaaacaatagttcttttcctatgaataggcagaattggagcatggaattcaaggatgcggcctctgctgcggaggcagctgcagaatctgccgaacgtgctagcatggctgcaagggcagctgcagaactttcaaaccgtgaaaatatgacaaggcagtattcaagtggatcacatagttcttctagaagcgggttgagagatgaaagatcccaagaatacacttttcatgatgaca

SEQ ID NO: 113122 - DNA, 279 bp, Glycine max
tgctgagatggttcttcaagtagtattatctaatgattgtgaccagtgctataatcacaggggaggccaatgtcggcttgacgccaataaaaagttctactgtaaagaaggaccaaagaataagagtagtaaaagtttgaagctgatacttggacttgtaacaggtttaagtgttatattgtcagctattctgatcattggatacatagtatttagacggaaatatactccatcacacccccaatcccaatcaagaaacacatatgttgatgtaattgg

SEQ ID NO: 113123 - DNA, 266 bp, Glycine max
ctaaaaaataataattagtaatagcatcatcattgcagcattcactctctccgtccggcccgaccgtctctcgcccggttcggtgtttcccagaccaccggttcagcctccgctgcgaaaaccaatcgcggcgccgcgcttacgcatcatgacggttgcgccggtccatgctatctcgctcgccgatgactccgcgtcggtcgagatgtcggtggacaacgcgctgaagctgctgggcgtgtcggagggcgctttcttcgacgaca

SEQ ID NO: 113124 - DNA, 285 bp, Glycine max
tcgagttccatgatgacgctctcaaggaggctctattgctctctgcttcgaacccccaatgcatatcgccacttctccaccgatcaccttttcgactcggacgaggccgactcagcacccgacccacccgcacccgacgccgttcaagaagaagaaaagttcgtcatcgatcgccccctcgagaatggcctcgacgttggcatctacagggtatcgtattcctattcgaaattcaatttcacaattagcgattcattttcccattcaattgtgctgtgttgtgtt

SEQ ID NO: 113125 - DNA, 281 bp, Glycine max
tgcatacatgatatctatattttaacattgatatttgatattatcccttgttaacatgaacaagagataaaaatgacagaatccacagtctcactcttaccaaattgaatctatttctttcttaatttacaccaaaaaaattatttccaactactcatattttaacgggtctaattgaatctatttttttcgttacaaatctatctaattaatccaaggtaagtaaaaacatcctacaccaaattcataatggaaaaaggaaattgatcacttacgtaaag

SEQ ID NO: 113126 - DNA, 236 bp, Glycine max
tgagagagagaacacacggtgtgagagaaagaaagtttttggttagggaggaacccacctacattctagttagggagaaagtgtgagagagaaagaaagggatcggaagaatgaagctctagttttctctgagagtaagtgaagaaaaactcaaaatagaagatgtttatcatgctgatggtgatgagagagatagggtcagcaacaagaacagaggacaagagattcatcacact

SEQ ID NO: 113127 - DNA, 278 bp, Glycine max
cttatatgtctatgagatgacttagatgaacatgatattgccttagggttatggagcacagtccgcagaagtaaaacagaggctttttaagttaatgagaaacctcaattttaatggggaatctggttctgagccatatacgcccacttcccaaaatttaggtggagtggctgtatcagatgggttttattctccagacttcaggggagattttggggctgggcttttggatcttcatgccatggatgatacagagcttttgtctgagcatgttattt

SEQ ID NO: 113128 - DNA, 242 bp, Glycine max
atttttctctgcctcaaccagcaaccaaagacacgaagaagcaactagagctagttcatgaaagaggaaacccaccaagttcaccattacacatggattctaacgtaacatattcgcgtttcaagattaatcaggagtaaattaatagtttgccggccactattaattcttgaatgaaaacaaacaaggcaattgtaaagtctatataaagcagctctaataaaaggcaatttctccaagta

SEQ ID NO: 113129 - DNA, 276 bp, Glycine max
gagaaagcacttgaaaaggtttgttaagggggtaatgtgttgcattttttatttcctgcattaatagaacaggtctattgggttaaacactgacgtttgaaaaacataaaaaaaattcaagtttttagtatttttgtctcttcctcccacctatagagcagatctgtgactgctaaggtatatcatcaaatctagtaattaccaatttaccatcattgctgtctttcatgaaagctttcccaacattacaattttttaaataaaaaatctggtatt

SEQ ID NO: 113130 - DNA, 269 bp, Glycine max
ctcgagccgatttggacactgcattgcatgtaaatcaggaaatcatgactacatctactcgggacatctcagataatgaagctgatgagcagcagcagtcggaaccacaaatgcagcatttatctgcaaatggaatttctcatgcaggtaccacccacttacccatatccagatccatactacagaagtatctttgctccctatgatgcacaaacttatcccccacaaccttatggtggaaacccaatggtccaccttcagttaatggg

SEQ ID NO: 113131 - DNA, 270 bp, Glycine max
ggggtttcttcaataacttatctgaaagcaacaaaacaaagggaaagtagatgtgaacaagtatatgcttgagttatttttattatttataataatcattatcaatgcatattttcttcaaatcaataaccgaaaaaaaatgtttatttccaaatcaatactgatgcaatgtttataaacatgccttaattctgaaatcaagaacacataattaagttaaaataccaatacagagaatgaagtgtcattaccttatattgacagaatgag

SEQ ID NO: 113132 - DNA, 152 bp, Glycine max
ctcgagccgaatcggctcgagaacaactcctttttttacctcttcacattctccatttcacagggttctgatcatgttggggaagaggccccggccaatgatcggaaagttgtcggagttgttggtctcgagaggccgcacggtggcatatt

SEQ ID NO: 113133 - DNA, 267 bp, Glycine max
gttccttacacaccacacaccttcctcatcaatcaatggcgacccccccaaacgacgccgcatcgacaaagaagccccagcccataccatggacccaccaggagaccgtgcacctcatccgcgcctaccaggagaagtggttgcccttaagcggggcccactccgccacaaccagtgggaggaggtcgccgtcgttgtcgccgcccgctgcggctatgacctcgcccaccccgctaagtccgccctccagtgccgccacaagatgga

SEQ ID NO: 113134 - DNA, 240 bp, Glycine max
ctctcattgaccacacaaccatttttctctctctgcactctccaatcatgcgcctaacttactaacaactcttcaactttatagccaccgaaacgatgtcggagaatctcgacgcttccgaaatctcgctgagcattggtcggaaagtctcggcaagcggcggaattaccggcaatacaactcggaatctctcggtgtgggcagcgagagatctgttcctgagacgtgacgattctttgt

SEQ ID NO: 113135 - DNA, 259 bp, Glycine max
cgaaggagatagtgagagagcttcttcctctaattcgagtgtacaaggatggcagcgtggagcgtcttctaagctctgaaaacgtggcagcctcccctgaagatccccaaactggagtctcatccaaagccaagtcatcgcagacaacccctaggtctccgctcgtatattccttaatagatccaagcaaactaccaactccctacttaccttattccacggcggcgctggtgcctctaatcgggtatccgttttgtcg

SEQ ID NO: 113136 - DNA, 256 bp, Glycine max
ttttgagtcacggcagaattctagtgctgctgctacggcctctgaggtgtctgggaaagctgtgaatggcccatttcaatttgtaaaatcagagtgtcatccatctaattccgtcacacatgacgattccctgtttgtgcagcaaatgcttctcccaaagcacaagataatattggtaaccgagaatctaaatcggggctccgagctctatttgcccgtcgatgagggtatctacgccaatgtcatgcattgaact

SEQ ID NO: 113137 - DNA, 205 bp, Glycine max
ctcgagccgtggaaaactgcatcttccactaccatcaccacacactcctcactctcccttcaatttctcacaaaccccacttcagattcttcacaagacctgatcttggtggtggtggtggtggtgttctgttgctcctcctcctcctcctggttggtaatcccataggcgatgaccctttatcggacaagttgtggaaccaccc

SEQ ID NO: 113138 - DNA, 269 bp, Glycine max
  unsure (1)..(269): unsure at all n locations
gtcgagggaatcggctcgagctgttgttgttgtttatgacctccgattttatttcttggcgaactgaacatgactatctaagtcataacaaactgagcacagaaaataggaatgaccaaatgggttgtaattctcattgtccagaaaaagatatcacttatatggattcgatcctgagctaggatgcatccatgatagctatatgtactgctanaatgacaggaaaaataactgataggtagtcattcagttatgttgaactggctgcg

SEQ ID NO: 113139 - DNA, 191 bp, Glycine max
gttgaattcatcgccgagcatcagatccgaaatgtcgatcggagatgcttttctgtgcttactgttcatcgcaacttgttggaatcagcagatgcagcggaaatccaaagagttacgatgatcagtaagcaagaaaagcattcgatcgaatttgtttggattttcgcgctgctatctgctcgattccatct

SEQ ID NO: 113140 - DNA, 273 bp, Glycine max
cttacttgcacaggtgcaatgtggattacatgcaacccagaaggataaaaaagtttctgaggccattcgctgcttttttaggtcttcatctggaaatggtgcatctgaggctctgcagagtttatctgatgacttaggaattccatatcttgagtttagcggttgtacatcaattgctgcatggacgcttcaatactatcaatgggccatgcagttatttgaacgttatagcattagtgaaggtgcttgccagtttgctcttgctgcacttga

SEQ ID NO: 113141 - DNA, 262 bp, Glycine max
  unsure (1)..(262): unsure at all n locations
gatagcttccgctggagcacttgccttcgtgatgaatcccttgagctttgactatctttttgcttcttcttgctagccttcgattgtatggtttcctgtatcgctcttgtctagctctancagcccgatccctgtgatctcgtacttggccttccccctctctttctcttcgtcccgggatagagcctttcactaaagggaaggttcccgagcttggccgaaaaacatcctgggattagcactgctttggcgattggcaaga

SEQ ID NO: 113142 - DNA, 270 bp, Glycine max
tcgagcgaatcggctcgagtagctctgtaattagaattaggatactaaaattgatcacaaattgagaagcaacaactgaaagagttaaagtaattatattacaagatcttgatgtcatttagaaaagaatagcagtgattatggagatatatatactttatgttaaaaaggaggagaagtgaacatggtgcacaccgtcaaaaatccctttcgtcctttagcttggcattattcggagggagacatcttatctctgtgaatcgtggctgc

SEQ ID NO: 113143 - DNA, 253 bp, Glycine max
cttataaatgttcaactatcaaaccaataagcagttttaaaaaaacaacttttatttacaaatggatatggtagtgatttaaatcttaacaatttaccttaaagccacttaaaatttttaaaaataatgaggaaatgttttgtaaatgctttgaccaagtccagcaccacatacacgttacaatattagtggcgcttagttattataaaagttatttgtaaataattttagattttaattcaaagacaacaaa

SEQ ID NO: 113144 - DNA, 255 bp, Glycine max
ctcgagccgattcggctcgagtgttagtctttccttgctggtacggcagcatccggtgtattaacctctgctttgagagttggttacaaaagcagcatttgagaattctaaggacggtctccgcaaaggagccagtaagttcaactctccagtacctctgatatcaattgtttcttgtttgtgttcttctttccaaattgattatgactaacttgtgtacttttatcaatttcgttttgtgtgttgtccattttg

SEQ ID NO: 113145 - DNA, 227 bp, Glycine max
  unsure (1)..(227): unsure at all n locations
gaaattttgataaaccgcgatcacaggttgccgcaccttaaaaccggaaacaaaagcaatcgttactcgatttcaagaatctctcaatttcttactacatctgtgtgtacgggttcttaacgggtaagaaaatcactctctgtgctggccacagacttcgtgaatcatttacttttccacacttcatacgagctctcgntatggggatgatctgttaattgataaac

SEQ ID NO: 113146 - DNA, 249 bp, Glycine max
cgacaaggcacacatcaacaacacaaaaatgagcagctttccaaactacagcacaactgaatatattcacaagtaccacttgagaggtccttcaccaacaagcacaactagtagtagcaatgccaacacacaagatactgacacaaaagacgccattagtagactacaagcattgagagtagactttgacaagaaacaaaatacgacttcaccaagctacgaaccattcatcattggagtcgccggagg

SEQ ID NO: 113147 - DNA, 257 bp, Glycine max
ctttctttctttctatgttctctctatctcactctcatctcactatcttttcttttcttttctttttccgaatctgaaatttttcctacaaaatccactccctgtcctcaaagacagatccgaaagtggatgccaaatttattacccctcttggccggagataatggaaccaataggatccccctccttcataccctctatacattcccaaattgttacagtgttcgatgctgtagagcgcaatatagagtttatct

SEQ ID NO: 113148 - DNA, 190 bp, Glycine max
atttttctgtctccttggtatgacttttctgtccttctgcaactccaacaggtcttccatagggggaaaaagtctagcaatctcctcagcctttacgctccttttggacggttttgcaatctcacacatcacccaagacgaggcagaatgttacgggaaactacttgggctaggtggctatctacactat

SEQ ID NO: 113149 - DNA, 201 bp, Glycine max
tggttatcgggttggctatcaagcatactctactgctaatcagaattgggtgaattgctctgaatacttagatagagctaatgccgcatcgaattccacgtcttaaaaggttctatctctattggaatcggcaatatctcatccagtgctatgtccagagtactgactaatcatgtacctaggacttccagaagatcttgc

SEQ ID NO: 113150 - DNA, 249 bp, Glycine max
gaaaaacgcttaattttgtaattattaaattaataaaaaggggattgacgagccccctgatggggcagcaacactgaaggcagggcaaaatcccctgcccatgttcaaaataccagggccaagtttttcacaaaaagaaaggttaggtcccgtaaagggcctagtgtaccgtaaatattgaggaaaaggccatggttccaaagtcctaacattgctgcccagaattttcccggtgggcaggtcctagaa

SEQ ID NO: 113151 - DNA, 261 bp, Glycine max
ccactaccaaacttcaactcactttctctctctctctccccgatctataaatcattctctcactctaaaatctctctctccctccctccccgatctataaatcgttctctgactctgaaatctctctctctctctctctctactcttctctctctctcactcttagaacgcacagttttgtaattgtatgcgttgtatgacacttcgatagctcttctgctgaagaagtgagacacatgtactctgatggagatgtgtatg

SEQ ID NO: 113152 - DNA, 259 bp, Glycine max
  unsure (1)..(259): unsure at all n locations
gaaattttgataaaccgcgatcacaggttgccgcaccttaaaaccggaaacaaaagcaatcgttacttgatttcaagaatctctcaatttcttcctacttctttgtgtacggtttcttaagggaaagaaaatcactctctgtgctggccacagacttcgtgaatcattttcttttccactcttagtataacacctggncactctccnatntgatataggncttcgtgtcagatctaaacttcttctgtctctttctcag

SEQ ID NO: 113153 - DNA, 238 bp, Glycine max
agcctttgtgatttatacatgaacaaatgaacttcttattcgtaattgatttggtttgaggatcaggaatgttactaagaaactgtgttatgcaacttcctaaaggaattcaagataaccataacttactgtgattcctttgtctcatccttctcaatgttctcatcttgccatatattatttttaatcggcatgtcatgctgtagtttttcagtgattatttaatgacatggagtag

SEQ ID NO: 113154 - DNA, 281 bp, Glycine max
caaaaatcccatttcttgttcctcttcactttactgatttttcaaggtagatgcccctttgggaaatagttgccgttgattgagaaaaggctgtagaccaatcctgttgttgaaggtaagtgcgactctaagcaagccttgatcgatagtagaaaacaatgaagaacttatgtgagaatggctctggtcctacccatttaacatcttatgctcttggatgctcatcatgggggacttcctctgaatctgatgtgcaacaatcatccatgtccaaaagtttg

SEQ ID NO: 113155 - DNA, 165 bp, Glycine max
aagaaaagttgtaacatcaatattctgtgatgcacctaatgtttatcgaacttattttccttatgtctgaaatggctatgtttggcatctacattatgaggttcttaattggcttaattaatattgaagagtttacccgtcaaaaaaaaaataataaaagaaaaa

SEQ ID NO: 113156 - DNA, 161 bp, Glycine max
gtctggtggtggacactgtaatcgggtatatgaagcactcaaattgctaaatgagcttctccctgtccgggctatagatgagaatgatcaactcatgctagacaaaggatcctttctagataatagcccagatcttctgcgtagacttggaatggatgtgt

SEQ ID NO: 113157 - DNA, 269 bp, Glycine max
ctttcattcatgcccaattccatggcacctttactcattaatcaactctctgtagcccttgggggtcttcgagccataaacacactttccaccactgtgtccatcactgaaacttccaatgccagccaaacactgagctgtgtcatgcgacatctaaacgaacaaggacaatcaaatgtcgactgtaccagcttcgctcaggctcaggctataacacttgacgtcagtcccagtgttgctgactctcagattgtgggcggcaagtcgtg

SEQ ID NO: 113158 - DNA, 142 bp, Glycine max
ccgcaaacagcttcacttcacactctactcccaaaatggcggctgctacgacgtcgtattcttccgcaatcgccgcctcgtccgataccctagccaaacctgcttccacacaacatacgagcttgcgaaagggggatgtgct

SEQ ID NO: 113159 - DNA, 120 bp, Glycine max
  unsure (1)..(120): unsure at all n locations
cttccccattagaggctcataaatcccacacaatagactacacaancngnagcanagattgaggcaatgataacccaattaatgcagacatagaattggattacaccgaggctgaccagg

SEQ ID NO: 113160 - DNA, 259 bp, Glycine max
  unsure (1)..(259): unsure at all n locations
attggaggcaatatatcctagagatccaggtctcgatgcatcatttcaaaagtggggtcacacccaagttgctgtcggagctagggttgcttgttaccatgatgaaatcagactttcccttcctgctatgtggacaccaacgcaccaccttctatttactctatgtcatgttgatctgcaaacaaaattgcaagcccanagccagtggtaattggatatgcagcacttcctttatcttcccatgcgcagctgcgtcata

SEQ ID NO: 113161 - DNA, 272 bp, Glycine max
gcgaagagagggtttttgtctcgcggcgtgacgtgttttgtctgtgttgtgagtgagagtgaaagtcagagagtaattgggaatttcaaatattggttaagaaaaaaagaataagggaccgttgggacttgctcgcgccatggagaaggagaatgagctccacgccaagacactcatctgtgccctcaaccttctctcgcgcgacctacctctcccccctcacatcctcaattccgtctcttccatctaccgaacaaatgtgatggagggat

SEQ ID NO: 113162 - DNA, 273 bp, Glycine max
atttcttctcatcttctttttcttccctttaaaattattattccgtgcaaacacaacaacaacttcatcaccaacacgaagaacaagattagcgttatgggtctcttcctttctaggaatttggcttgcaaattcatatacccttttcttttttccaataaggtttcaaaggatttgttccccaagcagttggagaacatgatgtctctggtctctcctcgtactggcaggcatttgcagcgctatgacaaaggctgtgccatgtgggatgat

SEQ ID NO: 113163 - DNA, 265 bp, Glycine max
tggagacagagataggggggccgtcacattggtcaagcataatgaagatgatagaaaaactgagtctgaatctaaattagctaggcttgcagggcatgatgatgatagttctgagcaaagaggaagaaattataacaaggatgttgaatcacattttgttggtcgaactgctcgctatggtgaagatcatgaaacaagaaggcatataagagatgatgataatcatagggagcatgagcatagaaggatagtaacgtggagaaaa

SEQ ID NO: 113164 - DNA, 163 bp, Glycine max
tagataagataagcccttgtactctttttgttgttgtctctgaacgtatactacgctaacttctcttccccgaatctcttccaatctcccttcgccggtgcatcccttccccgatctgtcgcgcattccgccaccgcttctgcaaaagtatgtacagtgcttc

SEQ ID NO: 113165 - DNA, 245 bp, Glycine max
gctatgcaattgcagttgaaaccgctgtgtaagcacaaggaaaaagagagggagctcagtttcctgaagatttccgatttttcattatgaataagaacagcttttactatacgttagtttcctccatctcattcgactgctcttcttttggtggcaagtggagcagaaaaagattgtgtaaaaacttggaattcagtcgagatggctatggcagttcgaaatacaacaaatcctgaagaactgca

SEQ ID NO: 113166 - DNA, 249 bp, Glycine max
ctgacttcttctcagctatataagaataccaaggttgtatgttggccatatcagtgtaaactaagaagttattttgttttaattggttcttgttgcagctgttcacttagtttgatctgatcttatttatttgtcagcagctaatgctttagcaaacaggttcgtgacatttcagggtcattcctctgggccccatttctcgctttggagagatcaaactcatttttgaccatgctcttgctgctttca

SEQ ID NO: 113167 - DNA, 259 bp, Glycine max
gcaaacgatccaaactcttctttcatttgcagcatcataattagtggtagcaatgatggtagcggcagctggagctctaggtttttgaaggtggctagtgcagctggcgctacatccgccgttgccggcggttcatatgccattctttcatcctcagcctctgctagctcttagatactgagtgccgtttggcagcgcacggcgtgagagcatagaacgtgacgatagtggctcgggtctcatctgatgtgcacacggt

SEQ ID NO: 113168 - DNA, 236 bp, Glycine max
cacgaatttcatgaacttgtaatgacgactgggaatgatccaaatgttgagggctttgttggtggcttaaggcttgcttgggtggtacatttgagttgtataccatagtccaccatttgttttatctttctgataaaatactaatttctcaggtcatgagtgtaaaagcagttggcattgcgataaaacttacactggaaggtgcaaaccagactttccactttcaggcatgggtt

SEQ ID NO: 113169 - DNA, 197 bp, Glycine max
attccacaggacagcaactatacgcggcaagtttctgatagccgaatattgggatttaagacttctagcaacttttattcatctgaagagaggccagtgtttccttcatggagcaaagaatctggtacgcactcccatggtgggtctttggataattggtctaggcctggcttttctgagctgacagcacttccctg

SEQ ID NO: 113170 - DNA, 241 bp, Glycine max
cttccacacttcgcaattcaatctctttctcttcctcttcctcactctctctgtctgtctttgtcgtacctttccttcatcctcagccaacgcggtaaccagagggaacgagatcgtgaaagggctcaggcaagagctggtggaaagacaaagcagcctaagaatgatgggttgacccctgaacagcgaagggaaagggatgcaaaagcattgcaggagaaaacggcaaagaaagcagctc

SEQ ID NO: 113171 - DNA, 181 bp, Glycine max
ttctgaagcaatggtgaagggtttgcaagatgttacggaaaatcatggctgtaaagattcatctaatcttccatgtgcatattcatctccttcgaaagaacaagcacacaagcaaataaatgtcatggagaatcatagcaattgggattctgttgggcgcagttgtaggtcagaggatctg

SEQ ID NO: 113172 - DNA, 258 bp, Glycine max
ttccttgatatcttagttatctaattacctcaattaatcccttaattgcaagcatcatggctgaggagacacaccatcaccacttccaacatcacaagggtgatgatgtgcctggcgaggttgattacaagaaggaggagaagcaccacaagcatcttgagcaccttggggcacttggtgctgcggctgccggtgcttatgccttgactgagaacctgaggacaatcccgaccgcgagcatgctcacaggcacaaggt

SEQ ID NO: 113173 - DNA, 179 bp, Glycine max
cttttaccaagaaaatgtgaaggttggcacatatgatggtggcactatgcacaacaatcagtccgttctgatgttcgtaggaaattgtagaaaacgtcttggagataccttggggatcgatcatctctccttgacattcatctaccttgtactagtaatgctttacatttcctggatac

SEQ ID NO: 113174 - DNA, 115 bp, Glycine max
aagagaaagatttgttggaggaaaatttctcatttgatataaaatctcgctgtagattggaaaaaggtcactctacagaagacacaatttgtcagaggacaaaccttcagatatg

SEQ ID NO: 113175 - DNA, 217 bp, Glycine max
gtcgattgacatatcacccgaatccaattgatccgtaaatcactcatcatcatggattcagttgcattaaatggcaatagcaatgataagcctcttcacgttgcgctggtccaagtgctgtacatggggcaggtgtagcaccacatgcatcttgagcaccttggggaacttggtgctgcggctgccggtggttatgccttgcatgagaagtatgagg

SEQ ID NO: 113176 - DNA, 205 bp, Glycine max
gttaagctgctttgagcatgattgtttgtggatgtttaattgtaccttagagagaacaaccttgttggatcttgtcttcatttttatttttaagttgccatcataactgggagctcattactttactagaaataagatgagtgttgatggttgcttagagtgtggagtgtgtttgttttactcatttccccatttccaatgcact

SEQ ID NO: 113177 - DNA, 278 bp, Glycine max
ccaacctctctctttctctatctctcacctcgcaaactgtttctctctctagatcaaccgtaacacaactgaattcttcttcttcctctcctcttccgtttttccgttcgtgtttccgcaatttggagctgacgatcaaccaccgctcaaattcgcgtttggatccgatcgaatccgcaatcccaatcgagtttcggcgggatctgaagagatagagacgagagggatctgcgagcgccataggcgatggcgatgtcggggatgcgaggactctccgt

SEQ ID NO: 113178 - DNA, 233 bp, Glycine max
agctaatgattcaggaaaaggtagtgctgaatctattgtgtcttctcttcccccacctttgccaaaatcaccttcggaatcctggctttggcgtgccttgcctttagtttctgtgaagaattctttcctgcactcaagtcaaggtactcaatccaaagctaaaaggcatgattctaatacatctggtaatctcaagtgggaaacaatagtgaaaacttcgaatttgcatcatg

SEQ ID NO: 113179 - DNA, 176 bp, Glycine max
ttggcatattgaatatgcgttttggtgaagagaaagcgcgacagctaggcagaaagtggagatggtgagagtagcagaggacattgatcaatggtcaaagaactacacagcattgacaccgttgtggtttctagaaagagcagcacaagtgcaccctaccagagactcccttctcc

SEQ ID NO: 113180 - DNA, 107 bp, Glycine max
gcacttagtgctattcaataattacgataaaccaacaacgagtgtagttattgactggtccatgctggatcaggggatgaatagagatgagaggatttcggttgaag

SEQ ID NO: 113181 - DNA, 215 bp, Glycine max
cacacatatactaatcatgtgtttttgttgaaacaagtgaatatgagccacaatttttagattcattatgtttgctccaagcactgctccttaagatagaattcagaagctaactcctttcacttgtctcattttaagcacaccaccatactaaagctccaattcattaacaggtcggctgacagctaaaagtgtgtatacagctttggggttgt

SEQ ID NO: 113182 - DNA, 237 bp, Glycine max
agagaacgtcggcacgcggttcgactcgatattagattgaatgtaggacagtgtcatttttgcttcataaccgagttctattttatgcatatgagcaacagttcgcagtctcacaatggccggaatatccaactccttatcactgaagcacagtttctctctgagtcgagctcctcctgcttcctcttccatcacattcaaattcagtagatgttacgcgcgttcgccaatgagaat

SEQ ID NO: 113183 - DNA, 211 bp, Glycine max
gcaaacgcaagagcaagagcaagagcgaaagcggcagatgacatggaacgagtatagggttctcagcagccacagttggcgcttgcggacaagctattccttctccggcaacccggtctgctagacattgacaatgttcgatacgaagatggtggcttcaatcatgtccaggaaaacgctatggtccctcgtacgaaagcctagtcgctgg

SEQ ID NO: 113184 - DNA, 107 bp, Glycine max
tcgcgatcacaggttaccgcaccttagaaccggaggcaaaagcaatcggtacgtgatctcaaggatctctcaatttcgttctacgtcgttgtgtacgatttcataag

SEQ ID NO: 113185 - DNA, 212 bp, Glycine max
cttgttgaatctattgcatcttattcacattgactccaaactttggttcttaaatgtggagaaaaattcatttcattctaaatttttaattggacccttgacatcatagcatttttctttagttcacccacatgtttggaagtttcatgcagaaataggaacctagcctgtgatgagactgttgctttagcataacaacttggtgacatgct

SEQ ID NO: 113186 - DNA, 198 bp, Glycine max
gactccaacaacagcaatgtggtggagagctacacaggtcaccagtctcctttgactcatgttcagtcttttgtttctggtgagacccagctattactttcttcaagctcccaagatgttaggttgtgggatgcaacatcaattttaggtggtcctagccattcatttgaaggatgcaggctgccaggtttagcaatt

SEQ ID NO: 113187 - DNA, 205 bp, Glycine max
gggccaagctcggtttacttttattgttttttggattcttcattaccgggtgataatgtcaccttgaaaatgttgcaacccatctgaggacaggacttgtttatttattttatgcgtacccattatttatgtttcatttgtaaaataaggacagcaaattctaatttgtctctcacatttcagcttctttcctcaacttatctgc

SEQ ID NO: 113188 - DNA, 205 bp, Glycine max
  unsure (1)..(205): unsure at all n locations
ctacaacccacaaaacaaaaaccaccattaacccatttctccaaaaacttgagatcttttgtgtcaaacaaccacaagtcccgcgtcgaacaaataaaagcaaacaaaagggtatataaagatagagcgattgagtccaattaaaaaaaaaatgagagacatagtttcttgtttcagtgagaaccagtgnacgtttctcactctt

SEQ ID NO: 113189 - DNA, 202 bp, Glycine max
gcgggcacgtgtaacgccaatgttaatattttatcagttgacgacagttgtgtgctacaaatatactccatataatcatttatataaaaattataattaatcaataataaataataaattaacatcatgaataaaattacatcaaaaatggaaacaatggaagttgctgacactggagttgatctggtacaacaaacaaaga

SEQ ID NO: 113190 - DNA, 203 bp, Glycine max
ggattgaattgaagaacacgcaaattgctcctacggaagggtttttacttagcgcgctcttttgtttctcttggagatataggtgaactgtgaacttggttggtcagagcttgccaacaggcagaaagttgctgaagtccctcaattgtgcttccctgcctcctttcccaaagtctctgtctgtgcaatggtttatataactg

SEQ ID NO: 113191 - DNA, 203 bp, Glycine max
attttctgtctgcactggtggagttttccctgctagaatcccttgaatcaaaggacaaccttgcttcaattaaggcaccggattttgacactgaaaatctcgagtcatccatgcctccaagttgcgcaaagttcatcaagcaaatgcagagtgagatgcagaagctttcagttgaaaaggagcgataaggtttgagatgatga

SEQ ID NO: 113192 - DNA, 256 bp, Glycine max
cacgcagtcatttcaaattcatcagttgacttgacttgggtttgtagtttttgttgcttttttggttagtttcagcttttcaattcaattcaattcatttcatttcaaagactttgatttgaaaggctaacttttgctttccattcctgaccctgaaaacgtcaacacagcaaccaaacaaccagtgaattcaacccaaccccattgtgctgtgtttaatctaaaacaacatgtcgacaacagtcatcttgtctgc

SEQ ID NO: 113193 - DNA, 272 bp, Glycine max
aaaactttgagtcgaccacaaaaaaaaaaaaaaaaaggcaaaatcctttaggcccttgatgaagcaaaaagcggcggaaaaagcccaaagaatctaaaataatttctggacccccctaataaaaaaagcctttgggcattaaaggtttcccgaaaatggccaggtttggattggtaaaacccccccttccaaaggacagacacacacaaggtaaaagggggtttaactgggaaccaaaggcggttccctttttggcgggtttggttaaaaac

SEQ ID NO: 113194 - DNA, 273 bp, Glycine max
ttctactagtgcctgctcaatcacaactggtgggaatctctggcggagaaaacattccacaaataatatttactatgcaagttcttgtgcgtcaaaagcttcgaaatacaaaaagaaaactcaaatagaatgtaatattttgaggtcacaacagtcaagtttgaaccatcattacaagcgcatcgaaggaggggcaacatatcaagattgcgataaaaaatacgttgtgaaagcaatccctgaaccaacttttgattctgaaccttgtgcttc

SEQ ID NO: 113195 - DNA, 265 bp, Glycine max
caaacccaccaccgccccaaagttgaatcctttctgtccccacaacatcaagtgttcgttcttcggatgccccgaattctgttccggtaagcaaagatcgaatctttgccttgttttttggttgcccaggtttttttattttcttttaaattctgctattcatgatcggattgcgtatttgaggttttggtttacagttatggatgtgcgaggagatgggattttcccggatgaggtggttattcagattctagcaaggttgcct

SEQ ID NO: 113196 - DNA, 263 bp, Glycine max
gagatttttgaggcagctattagagaagtaaaagaagagacatgaattgatacagaatttgtggaattactagcattcaggtaagaattttctaatttgtgacacataaaacatgagagataccctttagtttgagcttatattatataaagggaaaggctccaaggttcagtatacaaatgaaaaaaagaagtcatgctgatgcttttgaggagaaatttcatatttatatagatccatggatttagaaagaaaatttcaac

SEQ ID NO: 113197 - DNA, 265 bp, Glycine max
ctctgtttatatggttctttacccgtcacagtggctggaatattagtgccttacattcctattctgtgttggacttttggttaatagaggtccaaggccaaacttaccttaaggtttgaactgacagactacaatacactcttcacttatacaatccatgattgtgttacacccttgtgcactccttccttcttgcactaccattacatgcttcaaacctttttcccataacaatcgctttgtgccatcttcaatggttccgcgg

SEQ ID NO: 113198 - DNA, 252 bp, Glycine max
aatctacatatagaaacatgaacattccaactgtgctagctttaccattcccagcacaagggcatgtaaatcccatgatgaccttctcacaaaagttggttgaaaatggatgcaaagtcatttttgtgaacacagatttcgtccacaagcgagtggtgagatccatggtggagcaacaagatcatagcctcgatgattcgtcgtcactgttgaagttggtctcaatccctgatggtttgggacctgatgatg

SEQ ID NO: 113199 - DNA, 203 bp, Glycine max
cttcattcctcttttcaatctcttcttagttataatagctttcttcttttgctagcttgaaagggttttgtgatacatataatatttttgaattcttcaaacttatatatatatatatatatatttgatttcatggaagagcctttgtggtgaacaaaggtgaggagcctctagatttgcctccaggtttcaggttccacaaa

SEQ ID NO: 113200 - DNA, 258 bp, Glycine max
gaagaaattgctcccaaaattcaacaagttatagaatggtttggacagctgcagggtattgatcttgaaagtgttgaaccctcgatcagagcaggttctctatgaacatataatatcactttcatcatctatcatgctatcaatgatttcatatccttactttggattttatgtactgtttgattacattataccttgatgtgagcgcaagttctttcatcttcttttgacttggggacttggaagggttgtaaactg

SEQ ID NO: 113201 - DNA, 260 bp, Glycine max
gcactgcgcagtcattttctctctctgcggaaaacccaaagaagaaaagttcccattgtttttgcccgtgtgactgtgagcgagagtacccacagcaacactccaaatgtgccgtccatggtcggcttctcccattatccttctctctttctatcttctcctccttttctttgcatccatagtccatagaaactgaacacccgttattatgggctgtgttcaggccaagtcattggatttggaagaaagtcccgaataca

SEQ ID NO: 113202 - DNA, 236 bp, Glycine max
tgattgttgtgactcgttcttcttcgtcgttatcttcttcttatgctgtatgtgtgtatgtaactactctcacttgacaattgtacgagacttcggcagttacggttgtctcgagagcgcctttaagcacgtctcaattgtttatgcgtcgctactgacgccaaggcgagtttatgggcataacttcattatgtttcgtgggataatctggaagtgccagaagcttatcttgtcaa

SEQ ID NO: 113203 - DNA, 257 bp, Glycine max
agcatgtgagccagtgctcccggaggactcagacgagagtcacagaacgagggcattgcttgaaggtgacatttttgtgatgacaatctacagagccaaagggaagcacaggactgaagaacagttcaggcaatagccattgatgcaggcttccctcgtttcagagccttccatgttgaccatttctacactgtccttgagtttcagaaatgaaatgaaatgaaggcagcaactactcctctctgtttcaactttga

SEQ ID NO: 113204 - DNA, 273 bp, Glycine max
actcgagccgattcggctcgagatttgagattttgaatactattggggttttgagtgtcacgtgagaggagtgaggactagtcctctttcttttgtatcaaattttgcagaatactacccgagtgagatacttcgatttaactccctctgttgatggctgaaactcaattgaagtgattcactggactactttatcatcttggtctgaggttgaagctatttaatttctgaatttccgtgagtttcttaatccctgagtatggccgggagcca

SEQ ID NO: 113205 - DNA, 266 bp, Glycine max
ctcgagccgctcgagccgggaatttttgcagcccaacatgctggttgttgatgttgagaaatttgtttcaccacaacaaggtaaatacatgtcatgattttcatagacttttgcaataaccgatttacttggtagtcttggtgattcttttgaataaaaattagatattgtgctcatcaacatatcatggatatttacgccaccagtttctggcaatcaattattgttcaaataaagtatgaaatgtcgattttactcgtctgtgt

SEQ ID NO: 113206 - DNA, 173 bp, Glycine max
  unsure (1)..(173): unsure at all n locations
gttttatgacattaagggttcaaattttggattggaatgggatctacattctgaatttccgagttatcttgggtaacgatgccatgggatgtcgggatgaactcggtgattctgctgtagnactttttnttatctgtaaaaaagtactctgaattttcatatacccccttttg

SEQ ID NO: 113207 - DNA, 267 bp, Glycine max
gttgattaccactataattctgtttcttacaggaacagagaaaatagagggtgtgagaaatggctctaagatgggttctccactcagcttgccatgttttggggtaccctacgaggaacatagaagaagaggagtgcaagaagattgaaggttactcaaatattggagaggccaaaagcgtgaaggggttatcccttgcaaacaatttcaatgaggttgatcagtgctatccttgttcagggtttcaaatgccacttcactatccac

SEQ ID NO: 113208 - DNA, 259 bp, Glycine max
ctggaaaagagatgaaaataaaatttatttgtaaggccaaaaaccaatgtgatgtgttaatgatcttgtttaaaggttggtctgcattagaattgaagtattcaccggaaaaaagtttatacttttcttgaaaaaattcttccattatgatttcatttttaaaaccttccattctactatcatttctattagctatgtagttgtcaagatgaaattggctttgtaatcacactcttttgcactttcaaggctttcccct

SEQ ID NO: 113209 - DNA, 258 bp, Glycine max
atgcaaatgaggaatttccgcataatatctccttctcaagattagagaggtatgttttaatttttaaaatgtacacccagagctggctgactgacatgatggaaggcatgatggaagaacatagaccatgtagagctttatgcataaatggttttaatgcctcagttcaaagttttatatcattaccaatcaaggatttctttcaaaaagcagagtatcttcatttggagaaccttgagggaggttacgaaaatgtaa

SEQ ID NO: 113210 - DNA, 228 bp, Glycine max
ggttcaccaaaggagtcctcttcttcagattccaataccagcagcatcagcagcaccaaagaaatatcacaaacttctcagacccccaagaagttgctttatgaatgtgctattgcactttctgaaggaaatgaagtggaaggatcatctatgataaacaatctccggcagatggtctcaattcagggagagccttctcaaagaattgcagcctatatggttgaggga

SEQ ID NO: 113211 - DNA, 255 bp, Glycine max
ttcttatcaaaatttcccaaaaaagtcctccctcaacaaaacatagtaaatatcattaaccgaagttaagaaggtttctgtcataaattctttgatgttctgtttcgttgtcaatcatgtgtacagagttctaataagtgaacaaaacttgccattctcccaaaaattatatgcatttgtatcgttatattaagcgcttttggtgatataaaactattggtaatttatcaaatattattaaaacatgacatcatc

SEQ ID NO: 113212 - DNA, 275 bp, Glycine max
atatctatgagctttggtattaacttggggacatacatcctacagaggttatctcaggaacccagaaacaaaaacagagtggaataagatgaatttctgatatcatattagattatatttttattttcaaatataagtaaaatttaattactttttcttatttaataattacttttgttgacaggacttagataaaaactagagtagttgactgcacattttttccaattctcgctgtgtccttctcagatggtcccttacaagtactattatat

SEQ ID NO: 113213 - DNA, 269 bp, Glycine max
  unsure (1)..(269): unsure at all n locations
gaaattttgataaaccgcgatcacaggttgccgcaccttaaaaccggaaacaaaagcaatcgttacttgatttcaagaatctctcaatttcttcctacttctttgtgtacggtttcttaagggaaagaaaatcactctctgtgctggccacagacttcgtgaatcattttcttttccacactacatacaatataanaacactcgcatatactatataagaatacgtgtcagatctaaacttctactgtctctatctcagtactctgttg

SEQ ID NO: 113214 - DNA, 270 bp, Glycine max
ggctaaagtttcctctacaatagcataatgtgttagtggagtcactttcaaatatgacataattggagagggttcacattcttcagaagattctcctgaaaaggagaatcagtgcaaatccaaaaagattgatgccagattgggacagagcatagaatcctcaatacaatgaggttcaagctcagatggaaacaaatctgggtagattgtctcttgacgatgctgaaactcctaacagctccatgttgacatcttaaaatttcgcaatct

SEQ ID NO: 113215 - DNA, 264 bp, Glycine max
tttttcttctgcttctgccagcatcttgcgtctctctctctctgacacaaactccattgatttgcaacttgtaagcaaccgaaattgataaaaacaatagcggcgtttcttgagcattccgaggatatctctctaccttcttttctattgtctttaaattccaacattccttcactctcttctcttcgcaccatagggacgacttatgggttccacagagaatgaatcaccgctcgctgaagaggctcttcttcaggatgatga

SEQ ID NO: 113216 - DNA, 252 bp, Glycine max
agattccggtccgaggcgatctgtcattagggtacagttgacaacatacacaatatgtgtgcctatagggtcaatcctggtattgcaggtactcggtcgcttgggcagcatcctcaatccgattcgacaggaactgtttagaattaaatggcaacagtgacgaaaccattgagattttgattctagcaagcagagcttttgtcaattttctattgaccttctcggtggaggaattttagtggacaacctgga

SEQ ID NO: 113217 - DNA, 263 bp, Glycine max
  unsure (1)..(263): unsure at all n locations
ggaaacaaaagcaatcgttacttgatttcaagaatctctcaatttcttcctacttctttgtgtacggtttcttaagggaaagaaaatcactctctgtgctggccacagacttcgtgaatcattttcttttccacacatcatacgaatctcgtgcacnctcctatnngatataggacttcgtgtcagatttaaacttcttctgtctctatctcagttctctgtctaatttcaagtcagttactggcaatcttggattagtgctc

SEQ ID NO: 113218 - DNA, 266 bp, Glycine max
aaaaaatctttttttgacacaaaagttaaaaaaaaaaaaatgcttcaagagaaaaccaataataatatcaacaggcagaaatacggtccgttacatgatatcgaacaacatgctacggaaattttcgatagtgtcccgagaaaacgtcgtaacagtgaactaataccaaatgacccgtatcgggacatcgaacttcactgcaatgaaatctttgaacctcgtcaaaggaagagaagtaatagcgaattgatccctaatgtccttta

SEQ ID NO: 113219 - DNA, 258 bp, Glycine max
gtgaactggaggatgaatttgatgccagtggtgatagttcggcccagcttcttgctgctgctaatgctgctaataatgctcaagcaattattacaactttgttagaggagtatgagaatatatttgatgaagaaaatatacagagatgttccatgtcagcagattctcaggttgaaaacagtgggagtgaagattcaactgatgatgataatatagatgtgaaagaaaatggttaccatgatgcagagaagagttgat

SEQ ID NO: 113220 - DNA, 278 bp, Glycine max
tcgcgtgtactttcttacgaaaccgagagagcgaatgggcaaacacaatttctcttatctgctaatgtattgcttctatagagagagagatagaaaatgttggggatcttcagcagattcagtggtgtcgccgccggatgatatcatagtcgatggtagacacgaatgccgtagcagaagacaatggcggcataagctgtctgcaccaggttacgtgcgagattcaagcgtcgtcagtatcgctttacctctgagaacacgtgcttaaacgtacacac

SEQ ID NO: 113221 - DNA, 271 bp, Glycine max
gatgattgggtatcattgatggcgaagtacccaagattatatcatatttctcaacagcaacacaaatacattcagcaaatggggccgatatcagacggagggtgggagtggcagttccagtggaggaggtttttttggaaggtgaaatacacatggctgcaaaatttttggaggatatagagggtctggtagtacgattgcagctacaagacacctggagttgggagggagagtcaagcgggagatatacagtgtgaatgcctataggttg

SEQ ID NO: 113222 - DNA, 263 bp, Glycine max
cgcgtggtttgcattgcggaggaggtggcgagtggggacgcggaggtggtggggaggcgcgtgagggagattgggaatttggcggacagtgtgtggggcccggtgttgtggtgagtttcggggacttgaagggttttgtgagcgacgatgaagaaggtggtggtgagggacagagtttgaggggtgtggttggagaattagcgaagttgttgcaggttcattatgacaagttttggttgatgggtgctgctgcagttacgata

SEQ ID NO: 113223 - DNA, 268 bp, Glycine max
atgaaatcgatatttctcatgaatttttaaaattggagggaacaaggagcatggcggttccggcagaatccaattattgaagaagaagaagaaatagagcagggtggccccatgcaccacccttctgctccgtcacacgagttgatccgagttacataatcttgttgataagaaaaagcttctgccgttggattctgcttctcggagtagcttgagtgaagttgcttcacttggccctaatcaagaaggagagaagaaggggcttcgc

SEQ ID NO: 113224 - DNA, 175 bp, Glycine max
cttgttgagagttgccgcttggaacaaaggctgtataatagttataattgtgatgtctgggaatgcagcagtctcaaggagtgattgaggcgctcattggtacaagtgggttgaacaaacagcaacagtacagagcatttcgatgcatgtaagtggacataatcggatgcacatt

SEQ ID NO: 113225 - DNA, 268 bp, Glycine max
gctgcaacagatgttgatccatctgtgctaccaaaaccagccattctagagtgagagagtaaggagggaaggttcttttcacaaagctggaagacctatgaagaaaaggaagacagatgatatttgcattgatggttatcaaggatacatggcaaatcatatggctacaggacatggagcggctggtttgggcaccttttctgaaccaggaaaggctaacttggaaacagaaaggaattatggtttttcaggttcctggcaagcatta

SEQ ID NO: 113226 - DNA, 160 bp, Glycine max
aaccactgcatatcttgtatttatcattttccatcgtataatatcaccttggaaagaatatttcttgaaaaccaataattgcttttaaatattctctctggttggcatatatcaaccatcatttgacttctattatagatgctttcattgttatattatt

SEQ ID NO: 113227 - DNA, 178 bp, Glycine max
gttttaactttaagggccacgaactacttgaatttgctagagaatcagttgttgtctatttggatgatgaggatggagctacacgaaaagatgcagctctatgttgttgcagattggttgctagttctttctctggtatggcatgctcacatgttggttctagcaggttgactcgatc

SEQ ID NO: 113228 - DNA, 191 bp, Glycine max
cttgaagtaaacccatctctactctcttctcggagtttcactgtggaactaaggcatctacttcactattgagtgggaatcccggatctctgtctgaaagcaggctttatcgactttctttgtccgagacccatacatttgtagttcgcacgaggacactaaagaaagcagctctaactccagaagctaga

SEQ ID NO: 113229 - DNA, 104 bp, Glycine max
tctatatctgaagagaatcccgatagtacatctgtttttgatggtagcacgtacaaggacataaattcctaccaatctcatcggcatccttttgaaactaatga

SEQ ID NO: 113230 - DNA, 245 bp, Glycine max
  unsure (1)..(245): unsure at all n locations
gaaattgcgcataaaccgcgatcacaagccgctgcagcttaaaaccggaaacataagcaatctcttcatcatgtcaataatacgggcaatttcttactgaaattgggggtcagaaatcgttggggaatggttatcactctctgtgatggccattgactacgtgaatcatcttcttgtccacacaaattgcaaacagntgnatcaaggtgaagacttgtatgactacgtgacagtattacactgga

SEQ ID NO: 113231 - DNA, 235 bp, Glycine max
aaaatatggataataatgtgtattttaaacaagattattacacatgaaacagtcactgcataagcctttcaagtttaccagaggacattggtgatctatgtaatctcaggaatctcaatatgacaagctgtgcaaggtgtgacttgccatactcagtaaccaatcttgaaaatttgaaggtggtggtatgtgatgacgagacagctgcttcagcggaagcattcgaagctatgct

SEQ ID NO: 113232 - DNA, 235 bp, Glycine max
caacaatttcagagttgctccgatttcctcatcgtggggcaccatcaattgagttaacaatctttgttccatttcggcatgaaaccctaattcactcgcttctcgatctcgttagagcaatctttccacgcaagacacgagcctgcgacaggagaatatgatgcgtcacgagcgttggttatacgatggatgggaacaaggacgacgcgttgaaatgtttaagaatcggcaaaga

SEQ ID NO: 113233 - DNA, 100 bp, Glycine max
ctaataacagcaaactaaaggtgaagtttgccagaaacaagatgggaaggaaccattttgcagcagcaacactgatgctgactgggagcactgtggatgg

SEQ ID NO: 113234 - DNA, 233 bp, Glycine max
cttcaacagcaagggccaattcaccaaacataaacatgagaaacacagagaatggtagttatgcatactatccagattactcaaatatggcatgtggtgtcaatggttatactgttttcaggccatcaagtggtccttagagggttacgaagcgtacccacaaatgagtggtcactaacaaatgtaatgtatttgaggaaattgttgggtctttttagattggagagaggctg

SEQ ID NO: 113235 - DNA, 223 bp, Glycine max
ctgaaatcgtgtttcgcgtttcgtcatactcatttccttaaaatcctaactctaatcatttctcgcccgctacttctatgacccttcctccgaagcttcgaggtcttagtgaatctgtcgtgtgtttccttcaaaaactcactataaagtttaatactttggatgctggtgcctactattctgtggataatttgcgcaggtttgaaggacccaaatgaaaatt

SEQ ID NO: 113236 - DNA, 197 bp, Glycine max
gacgaaagaagatgaagatgggtgaactcgaaaattcggaaaactataaaggaggggaagaaaaactgaacacgttgatctcctttaactcttgacaaattgaacactttctcttctctcaagtggcgtgttagttcattcaccaatttctatgactgcttctgcaattcacatggatccctttgtttccacttaat

SEQ ID NO: 113237 - DNA, 224 bp, Glycine max
ctgaaatcgtgtttctcgtttcgccatactcatttccttcaaacccaaaccctaaccatttctcccccgccacttctatgacccttcctccgaagcttcgaggttttagtgactctgtcgtttgtttccttcaaaaactcactataaagttttatcttttgattctttccccttctattcggtggataaattgagcatctttggcgtacccacatgcagttttt

SEQ ID NO: 113238 - DNA, 273 bp, Glycine max
gttaactcagtctccttattcctacaacttgtcctccaactcaccttacctattctgcttaacaccaagctccctatacgcccagcgaacccaagaccttgtctcgggacttaccctcaacgagaaactcgcccaactcgtcaactcagcactcgagttaccagtggtggagtggagccttgaacggtgctgccgatgtcggcttcaacatcagattcaaaggcatcatcaaatccaccactaggttccccaagtacgccgcgacgaggacct

SEQ ID NO: 113239 - DNA, 265 bp, Glycine max
gcgcatcatccgtttccatgtccttgaaactgacaatttttccctggaagaaagtaaaacagcaaaataaataaaaaaatattgaagaaaaaaaaaacggagagagagatagagagagaagaagaagaagatagtgaaactggtcctgtcctgatccaaactcatacaacacactcccttgtttgtggcctatgttgtgtatgaagacagaagaaagcatgctttaacacgtgctttttcagtcccattgctccaacacttctct

SEQ ID NO: 113240 - DNA, 251 bp, Glycine max
tttcaaccacaaacgtcccctctgcaacgacgtcgtttttcttcttcttcttcttctccggttaagttcccgctttcagtaaaacgcgttttctgcaaattcagctagggtttcactcgagccgcgatctccatccctagctcgccgagttttctcctcttcgggttcttatctccgccgcgtctgaattcgctgtacccctgaatagaagaaaggacttcgaatttcgctgcttcagttagtagctggta

SEQ ID NO: 113241 - DNA, 275 bp, Glycine max
ctcgagcgttcattttctttcactcctgtcctattcatacttcattattccctaccaaaccctcctaaacataatgttaatgataacacggggattggaaagaaaagttcattagtcttctaaagccttccataggtatactatggggattaggagagctattgttataactttcaaatggaaagacctcatagaagtttacaatatcttttgaagaaatgtacatacagttttgatggatgcaaggagctgttacaaattcaacatatatatgt

SEQ ID NO: 113242 - DNA, 255 bp, Glycine max
gggcattaaaaatggaaaattttagttcaagttacatttattactgggttctactaccctttttttttgttatcacaattctcctttcaacttgcatagtgtggctccatagtaaagttccttcctggattcaagggaccccttccttttgtacttgaaaccgggtcagttacacttagctagtaactgtaaggctatagtttatgggattaaaatcattaatttgcttgaatatcaagacatgttatgttacat

SEQ ID NO: 113243 - DNA, 120 bp, Glycine max
tcaccttctactacaatcccccctattgaagcatatccccctcctgtctctcttacatctggggtctcttctttctctgattcattatccaaccgggtctctgatctgcacacaacttaa

SEQ ID NO: 113244 - DNA, 165 bp, Glycine max
cattgaggtaccaagactgcagccactggtgcctccctggtgttccagatgcatggaatgagattctttatgccgaacttctgttgaaacagtatcagaatcagcagaagagaccataggtaaacaacaagtcatttatttagttatattcaatgagtttagctg

SEQ ID NO: 113245 - DNA, 216 bp, Glycine max
ttctcgagctgattcggctcagtcattctttgaatctttatggccttaatattgccttaaagtttgctctcttgcccccatagtcactgaaaattcttgggagaatctcaaaatcaggtttttctctcttttatttcttcccttttctgtttctggggcttaaatttcacttgagaattcattgaacccagatacaaagattcaatcttagccccc

SEQ ID NO: 113246 - DNA, 182 bp, Glycine max
ttttgataaatcgcgatcacaggttgccgcaccttaaaaccggaaacaaaagcaatcgttacttgatttcaagaatctctcaatttcttcctacttctttgtgtacgatttcttaagggccagaaaatcactctctgtgctggccacagacttcgtgaatcattgtcttttccactcttagt

SEQ ID NO: 113247 - DNA, 221 bp, Glycine max
ctctgtctactccgtttcgaaaaccctgtgatgacgtaatctctgccatggtcatgcttattgcttaacgcttcgctttgttacctgcaagcaaataaactaatttaaggtattttattcttcaactttatcacgccctatgcctaattgccttctttctttccccaatttccaaatttcatgttattccttcaatccgacacctttttgcatggattttt

SEQ ID NO: 113248 - DNA, 188 bp, Glycine max
cacattttgataaaccgcgatcacaggttgccgcaccttataaccggttacaaaagcaatcgttacttgatttcatgattctctcaatttcttcctacttctttgtgtaccaattcttaagggaaagataatcactctctgtgctggccacagacttcgtgaatcattttcttttccacacaacatac

SEQ ID NO: 113249 - DNA, 220 bp, Glycine max
tcgatttcgtgttctccggcgaggactcgttcgtgcagtcggcgaagcggcagagttcgcggctgagatcggccggacgctgagaccgggaggtttcgcggtgttccatttcgcgatccctaaagatacgtatagtttcaattcgttccttgatttgttcaattgtttcaaagtagttaagttgcatggcttggaaggctttgattcttcgatgcgtata

SEQ ID NO: 113250 - DNA, 222 bp, Glycine max
cttttccagttttctactttccttcttcttcttccttccttcactcgtatatcacttccttcctcgtttcgttaaccttctaattcaatccattcctcacttccttttcaaccgaagcttttctccgataatcgcagagagaaagaataatggattggggaaacgtaaccgcggaggatctgatcgacgcgctcacgaggtcgattggtcgtcgccgccggc

SEQ ID NO: 113251 - DNA, 227 bp, Glycine max
tgaaatttgaaatggggcagagcgggtgattgtttcttgtttcttgtttcttgccgagacgacaaagcttcctttcataatgggagatccattactgctgctgccatatcattgcaggtaactttttgtttgcttgggtgaactaccgtcaaattaggttcgaacttctgtcgattgattatcaagggaaacagcctttcaattatatgatgcctgagtttctcatt

SEQ ID NO: 113252 - DNA, 218 bp, Glycine max
gttagaccttagacgtagatgtatgatcttaattttaataaattaatttttggatattgttaaattacaatttattaaattcaattgttttctataaaatcatcatgagatcaataatgtttagaagtccgttaaaggcaggtttgtttgtcaatggatttaataattttaccagttgtagtaataactataaattgagaagaaatcatacaatgctc

SEQ ID NO: 113253 - DNA, 218 bp, Glycine max
ggatagatattagagatatttattcattgtcaccaaatcttgttccctgcaagagacatacagtagggagagaagaagttgttgggttgagttggattggatttctaatctaatctatacctttcttttttcctatgcttttaaggcacaaacccttctttcttccctcttctatcttcttcttattgttataccttggctttaccctttaggaagga

SEQ ID NO: 113254 - DNA, 185 bp, Glycine max
gaaattttgataaaccgcgatcacaggttgccgcaccttaaaaccggaaacaaatgcaatcgttacttgatttcaagaatctctcaatttcttcctacttctatgtgtactgtttcttaagtgaaagataatcactctctgtggtggctacagacttcgtgaatcattttggattccacacttag

SEQ ID NO: 113255 - DNA, 254 bp, Glycine max
tacaaggtcaggaattggcatatgctgccttgtcctaaccacagaatcagtaggtcgcaagtggcgtggccaagttggccaatacggcttctttttcttcaaatagggttcctcacactcccccttgtggcctatccaacaagaacatgttggagaaacttgtacaaactcttgtcacttcttcccctagcatattctctcctattactccctttggtctcagagtccccacgttggcttctaataagaggcag

SEQ ID NO: 113256 - DNA, 242 bp, Glycine max
caggaatgatggaggagaagatgattcagaatttgcttcaagaggagactggtggcaaggcatgttatgacataattcttgtctaatagatttatggtataaaagtttacatatggattgtacttgtctgtcacaaagttctcattcttttgctgtctgttaactttctatccacagggggtctctattattaagatcactattgccaaggcatgtgcttctcaaggtatatatgatcttct

SEQ ID NO: 113257 - DNA, 254 bp, Glycine max
gagcaaagcagtaagttcagaatttcgatgctggcacataaatgacggttcaatgagcacgaatccatggtggaacaattagtgacgggtacacgagtctggtttgatctgaaggtgtcatcaatggcagatctgaagaaaaacggttttctgacctacgcttacattcttctccacaatattgtttctcttggccaaatcttcaacaagttagcagcagagcagaagaaaaagaagaaggtgattgttgttcg

SEQ ID NO: 113258 - DNA, 244 bp, Glycine max
ctcgagtcgcttcggctcgatgtaaagactagaactattgcaatctcgtggatatcagacgacaccatgaccatgaccggattcatggtcttgtgtttcacggtcgcatgtattgcacagaccacgtcaggtggatctggttctaccgaggctggcgatcacattacaaaagtttctgattcgctatcaggatgtccggagtatggcagcactgacttagtatgaattgcagctaacgctgccg

SEQ ID NO: 113259 - DNA, 271 bp, Glycine max
agcgtagtaactcggaattggtcgagctcgagcggcaatgataactgtattgtggtgctattggtggcataggaacttaataatagggactaatacgtgattatgtcatcacttgatagtagagactaaaactcttaagagaaaaaaatatacaaacaaaagaccatgtaaaagtatttagagtataaacaaaaattgtaaaaaaaaggaaagaaatattaaactcaaataaattttaaggtcaggtgcttatgaatacatgcttgattat

SEQ ID NO: 113260 - DNA, 249 bp, Glycine max
  unsure (1)..(249): unsure at all n locations
tggacgcgctgtccaagggtgcgcttgaggcgcggggccgggcctactgcccctactcgcagttccgcgtcggcgccgccatcctcatccacccatcttcctcctcttccgcctcctccgccccggagataatcctcggcgccaatgtcgaaaacgccgcatatccagtgggcacctgcgcggacggntcgccgtcggcaccgccgtcacgacctttggttacggccgcggcgatataaaggccgtagg

SEQ ID NO: 113261 - DNA, 253 bp, Glycine max
ggaaagtctattgagagtcaaacaagtaaaagggatgtttctacatctacagacgatttagcaagtgaagatcctgcttctaactcttccaacccagaatcaatgataatgctgctgaggcctctagtttgtcctctgttactgaaactagacactcatcttttggagtttcaactgtgaatatgtctcacgatcagatgagaatgattgagaacattaatgcacttatttctgagctggcattggagaaaga

SEQ ID NO: 113262 - DNA, 247 bp, Glycine max
ctcgagccgctcgagccgattcggctcgaggggcgatccattatcacctctcctcttcaatatcgtggacagaggcacttagcggcatcatgtcaccgcaattgcgaagggattgtatagggggttcttatgtggcaaaaacaaagtggaaattagcctactacagtatgcggatgacacaatcttctttggagaggcaacaatggaaaatgttagagctatcaaagcaatgatgagggctttcgaa

SEQ ID NO: 113263 - DNA, 233 bp, Glycine max
gactctttgaaccaccgcaactagaattagaaccccacgttgcttctagccttagcttccaaggatcgaattgtctcatgctttcggattgatacaagaccccagactcttataggagaaagccttttctgggttaagtcggtaatttggtttttttgtttggtaacatattatgcagcggctgcaagagctgtttgacacactgcggattcggtggcagtgggtaggggttt

SEQ ID NO: 113264 - DNA, 244 bp, Glycine max
gtattatcaggagttggttcagacagccttggctcctctgattcagacacaccaaatggaagtttgtcgcccatgtcatccattagtggcttactacaagcagttttacacgtgccaaacccaaaacaacaacatctgaggaagaagctgggatggacactgattcaactcatgatgagaaacctcttatgaaattcaagcttcctccaaatggatgtgtttccatcaaagaagacaacacagc

SEQ ID NO: 113265 - DNA, 242 bp, Glycine max
ttctaagatggaccccactagtgctgttgagaaagcataccaaggattcctttctcaacagcactagtggggtccatcttggcagttaatgactcagagagaaaggaaaccttggtatgcttcagttacctggccacagttgttcatttcacagtttctgcactaatacgtacaaacttagtttcatggaaagtccttctggaataaagatcatcttggtgactcatcctagaactggtgat

SEQ ID NO: 113266 - DNA, 172 bp, Glycine max
ctgcagtgttgcaaaagttgaggagacccagagctcatctcaacaagagcaacaagcctgctgttaaaacaattaagagtccagatggggatttgattgattgtgttttgtctcatcagcaccctgcttttgaccatcctcaactcaaagggcaaagaccattggatccacc

SEQ ID NO: 113267 - DNA, 162 bp, Glycine max
ctctcgagcgaatcggctcgagcttcacatcttagacataaacgtctatgtctgaatgtgttgttgagcttcctattttggacatttctcagccattacagccatcttctctaacctctctctctaaagcctgcaaagattggggattttcccacataatca

SEQ ID NO: 113268 - DNA, 166 bp, Glycine max
ctttttctgtttgataaataaactagattatttacatccttgaagaacccagcttggctttgaacatcattagttttagatttatttgatgaaaagattaataaataggctccaataataaagatcattaaattgggtttattccattcatagtttctgataatga

SEQ ID NO: 113269 - DNA, 165 bp, Glycine max
tttgattatatggaagactagagagaatggtggtaggtggtaggtggtagccaaattgtacataatttacactcattgccaccaaccaatctttttgcctttttctctctcaagtctcaactcaacaaccgaacttgatagatactgtgagtgtttttgttcctc

SEQ ID NO: 113270 - DNA, 263 bp, Glycine max
ctcattcatttttgttattctttgattctttacctaccttgaagaagaagaaaaagaagaaacaaggtggtgcgtaacagcaagaaataaaaaagaatggagggaagtgatatatacagagcaagtaacagtttacgatcaagaagttccacagtttggagaaacagtggtgtggaggcattctcaaggtcttctcgcgaagaggatgacgaagaagctctgaaatgggctgcacttgagaagctccctacctacaaccgtct

SEQ ID NO: 113271 - DNA, 260 bp, Glycine max
catcccataaccaaactattcaatcccatctgatgaaccacatccaaggctttgtgaccgagaccgacccagagatgttcaacctcaccacaggcatggagatgatagggttttccaagaaccttgagcaaaacagtgaaagcaacggtgtcatgtggaaaagtttcttctgcaaaccaggtcaacacgcgggtccttcctcttccaaaacgatgaacgagtcttgtagcaatttttataaccaccagcatgatcataag

SEQ ID NO: 113272 - DNA, 261 bp, Glycine max
tatgcctctcccttcgcttactgttgcaccttcctcctaaatgattactcccgctcggcgtgcatcgccgccgatatgagctcaacaacaacagcaatagacaccataaaactcaccgtgtcgcgccagagctaaacgcgatctcaacgatgatcagctatgtcgaattccaagttagaacttcgtcttggtatactgcgccgtttcggcagaagtgagttcaatgcttagtcgctcgagaactcagctccaagatcatga

SEQ ID NO: 113273 - DNA, 258 bp, Glycine max
gaaaaaacttgaagcatgagccttcttttgttgagtttcctcttgatcatcccaatccttcttcttcttagaagaaaaagaaaaccatccaaaagggtccctccaggttcacttggaatacctgttgttggccaaagccttggccttcttcgagctatgcgtgccaacaccgcagaaaaatgggttcaagagagaatcaacaagtatggtcccatttcaaagctaagcctctttgggaaaccaacagttttaatccat

SEQ ID NO: 113274 - DNA, 256 bp, Glycine max
atcaggggcaacgaaatacagcatacatatgatccaggtactgatgagcacattaccacgcaagttgtgagcatgattgcacatctgctatacagaccttgtcgtggtgatgagaaatagatgcgcgacaggatcacacatgctgttggctcttggtacaatggtggcgatcagcaagatagaagcatcgaggttctaatcactcctcccttctgggttaccgctcgcagttaccctcaatatcctgaataatgat

SEQ ID NO: 113275 - DNA, 255 bp, Glycine max
ctcgagcgattcggctcgagattattattattattattgtagcaccgtcgaaatcaaaaaacaccatcaccatgaacggaaaaattgtcttgtgtttcgcggtcgtctgtattgcacagaccatgtcagctgcaactggttctaccgttgatgtcgatgacattaaaaaagtttctgatcaaatatcacaaacttttttgtctgtcaccaatcacttagtgggaattgcccctaactctgccgatgcccaaaaat

SEQ ID NO: 113276 - DNA, 260 bp, Glycine max
ccaatctcatctaagagaagtctctgctgacattgttttgttcccgaaatctttgctctgctttttggagggttttgaaaacatttgaagaatttatttgggctcacttcacagcaataacacaatcccgccctcagcctctcttgttctcagcttcaattcgttttcaattcttgccgcatcgattcccaaccctaatcttctaccatgactgagtactgggtcagccagggcaacaaatggtgcgacttttgcaaaat

SEQ ID NO: 113277 - DNA, 254 bp, Glycine max
gcaaatcgcagcaatcaacctcatacttcatagccacggtcaccttcgcaacaactgcctcacaggggaagcgctagcaaagtacgatattctgctgctcgacgtcactctggcgctcatcgacctacaacgatgattagccccggtacccaggacttctcctgcaaccagactctcgtcctatatcacaagagcagttagcgtctgaagtgatatctatctacgctggcttgactacggtacagacgacatgt

SEQ ID NO: 113278 - DNA, 247 bp, Glycine max
ctccgatcaaccataaccgctgattcgccggaaaccctactccgttcaccattatgtcgaggcactcttccgttcagctcaatttgaatcccgtcgacggcgaggagaggaaacctaatttgcgaacttcgttttccttttttttctttttctttcgggaacgaagaggaacattgcggagtgaaacagcgctagtgaagtttaaatagggtttttgaggcaacgaaggttccataagaaggcagta

SEQ ID NO: 113279 - DNA, 245 bp, Glycine max
ctaaaagaaggtgctccttcagaaagtggggtattttgcacatggctccaaatctgaggctaagattatgtgttcccttgttgtttttgttgttgagttttctcttgaattctaatgcggaattggatcatcaagtttcacataaggtcatagctgctcctcataaagatgtagggacaaatgtaattgatggcaccggtgtagagaatgcttttaattttgagaatgccaatagtgtggtgggt

SEQ ID NO: 113280 - DNA, 245 bp, Glycine max
  unsure (1)..(245): unsure at all n locations
ctcgaccgctccttccttgatacaactcataactcttttcttgtcttcacaggnttagcttaggtcggcccatatgcgcttgcctcaatggaaaagcatgacatataaaatctaagcgagacccacgggaagtcacaaaacctgcttatagagatgagttacccaaaatccaagggccagggaaggtaggaccgaaacctgtcgggttgcgagattccgaacctaccatttggggaaaagatggt

SEQ ID NO: 113281 - DNA, 140 bp, Glycine max
gaactgcttggaatcacatggctacaatgagcactccattgaatgtcgagtcccgctagcagaacttgaggccattttctaatgacctccacggtggatgatttttagtggacaatatggcgatcatatcacacttataa

SEQ ID NO: 113282 - DNA, 255 bp, Glycine max
ccatgtgtgatttcatcccaaagctaattcatgatggggttatagattcatatggggttcccatcagaagacaagagatccaactctccccaaatatgcctatgatggacacagagaactttccatggcgtggccatgataagttgcactttgaccatcttgtgcaagagatgcaaactatgaggctaggagaatggtggctttgcaactctacttgtaaccttgagcctgcagcgtttttcatatcaccaagct

SEQ ID NO: 113283 - DNA, 237 bp, Glycine max
gaacaattgaacaaacaacaaagatgttgcagttctggaagccagggacggagaggcctcagggccgcgtggtggacgttgaagaaggcggtgttctcttcttgtctggctctcaccattcctcttcttcttctcgatacggtcacgtcagcatcgagaagcaacggcggcagcgtttgcctgtgttcaagtaccgcaccgccattctctaccttgtcgagactcacgccaccacat

SEQ ID NO: 113284 - DNA, 250 bp, Glycine max
cactaactgcgactggagtgaacacgtttctctactataatagtatgatctctatcttcatgagcattccgtcatttggccgattactcgatcgatattgcggcttgtccgtactagacggtacagatttgagaggttcaggtccaatttgtagtgagagtctcacaagattaatgtcgtgcagcgtggacatctcaggtgcgtactgggacacctctgttggatgatggatgtccatctttgtatgcta

SEQ ID NO: 113285 - DNA, 143 bp, Glycine max
tattgaaacgcaccagcgcagatccgagaaaaagggtgtacacgcggacttaacgctagagggagagcacgggctctagctgaataggcctctgtagtgggtacaataccagctcaaactcatccgcttcgacccacaagctg

SEQ ID NO: 113286 - DNA, 215 bp, Glycine max
ggaccaatgggtgctctaaagagaaaaatggcagaggacacaggtgcacggatgtctgtaggtgatggaacacttacaatagatgctaggaatcaatctgtaatggacaaaatactagagaagattgatttaattgtgggccgtcaaattgacgttggatgcatctacacaggtattgtcaccactagaacagagtatggagcatccgtagagta

SEQ ID NO: 113287 - DNA, 218 bp, Glycine max
cggctcaagctgcgatacccagtatatgagaatagaaagatatgcccatacctatccccccgaaaattgagagatccatgtgcacatccctgctaaatgggtgcttcggcatcggtcacagaaaaatctatccatgagttcatggtcaaatatgctaagggcagagacgtcaccttcagcaccaataaagggctggttatccctgtggtttacgtcgc

SEQ ID NO: 113288 - DNA, 228 bp, Glycine max
  unsure (1)..(228): unsure at all n locations
gatctatttttgaagaattaatccttaaaggtcagctgtgggcctgaaaatccataggtcctgaaccataggaggataactacaactccttttaagatgtctgatgtacttgttgaaatttggactttggttagcccaggggagttttttgtttcttggagaggacctgataaagngtgtaaatttcttgtggatccctttgatgggatgtgcaagttttgtttccat

SEQ ID NO: 113289 - DNA, 255 bp, Glycine max
  unsure (1)..(255): unsure at all n locations
gtacggtaagctcnggaatttcaggctcgagactcgagctacgctttctaaagttcgcacatagatgatggttgaagcgaatggtttgcattgtgttgatgatcggaggattcctttgaggaagtttctttaagtgcagcacttaatggtgttgagggttggacatatggaagaatcctctgcacatcgaggtttctcagtgttcagcaaatgacanaagcnagagatgtctctatgtgaggatctgatcggaca

SEQ ID NO: 113290 - DNA, 248 bp, Glycine max
cgaagatctcatcaccaccaccaccacgcaatatactaactcccaaaccacaacaactttttcaaatcttacacaacactgtatcactctctactctttctctgcgtttctctgaaaaaccagaacaagctctggagaaaccgccacaaaaaaaagaaaacaaaacgcaaacctaaccgcaaacggtaaccccattatgccatgcttcacaccacacccctctcctctcttccttcttctcacccttc

SEQ ID NO: 113291 - DNA, 244 bp, Glycine max
cgcaagatgcatagaagtttgctttggcactgtacacctcgtctactctagcaaacaaacaaacccgacgtatacttctgaaactcacttgactacttcacattcacactcactgttccgcgttgcgtcctacgtagtaaccaggaccatgaattccaacattgattcaacacaccatagccatcatcaaagcagaaaacgaaacctacccgatgctgatgattctccggcgccgaatttccac

SEQ ID NO: 113292 - DNA, 225 bp, Glycine max
gaggatatgggatcgaagaagtatgcgctatagatgggcggtgaggattcggagtagttggtgaagatgcgcggaggcaccgatggggtactcatgatgttgctccgtgagcaagaggatgagagggacctctatgaggtcgtccaaggagagttcccggagcagcatgacttgactgtctacgatggcaatgtgatacatggacgctgctatgagggacatgcc

SEQ ID NO: 113293 - DNA, 227 bp, Glycine max
attcaatataactataaatggatgagatcgctctgggcttagagtgattctgagcaactctgagctttttcaaaaggaagagttcatttctcgatgttacgaaatatgctctgctgtaatatcagctgtaacactcaactgataattcgattatcttaaacagacacactcagaatcaaatgaattactggatgacgtaattaaatatgaccggttagatgatccaa

SEQ ID NO: 113294 - DNA, 222 bp, Glycine max
cattctagttattgacacggaaaggggtgaagaagattatagatccaattaagtattaaatatatgtaattaatatgtaattaatctcctcttctttatttcgtcttttatttcttcttttttttacaattgtaatagaataagttaggaaagagaaagaataagggttaatttggcctaattgaaattcggagtgaaatcgggatctcgtccaggcttcca

SEQ ID NO: 113295 - DNA, 252 bp, Glycine max
agcaccagtctcaccgcacgaatatctcgttgattggagcgatccgagattaactctgtaaacatgttggattaccaggacctcacgacaggccatgaacttctcgctgactccttccgttacaaggaaattgcagaatggaatgctgtgaggagctcagcggaactcgggcgctaacagcgagcacgtgatgcagacattggtgcaaacccttctgctgcagatttagaagaagatgagcgcgatgatgct

SEQ ID NO: 113296 - DNA, 257 bp, Glycine max
cttgattctgcaactacacatggttgtgttttggcaaaacatagaaaatcgtcaactttggagtccaatgatttattgctacaccttgagaaaattgggatttaaaaattcccggatactcaagtgaagagaagaagaatcagaacaaacctctattaaatgacctccacaagaggcgcctagatatggttcgcacattgatggaatctttgccctctgagtcgagtgttaacagttctaaagagatgagtatacag

SEQ ID NO: 113297 - DNA, 224 bp, Glycine max
agataaacctttggagatcaattatattgatatttctagttctcctttcactccatggagatgagaaaattaatatcattgaagaccagtcaatttcgtatgatgggaactaagatctaagttagctccattagattggtagtagctattttggagtatgtcataaaatatgactagttctacaatagcaaatttattagaaaacaattctgtattagaaattg

SEQ ID NO: 113298 - DNA, 194 bp, Glycine max
  unsure (1)..(194): unsure at all n locations
ctcgagcggaaattttgataaaccgcgatcacaggttgccgcaccttaaaaccggtaacaaaagcaatcgttacttgatttcaagaatcttccaatttcttcctactcttttgtgtacgatttcttaagggaaagaaaatcactctctgtgctggccacagacttcgtcactcacnnncttttccacacaacat

SEQ ID NO: 113299 - DNA, 221 bp, Glycine max
ctccaggttcttggtgacccaatcagcgagatatagtagagttttgcaagcaagaaggtttggttcttttagctgatgaggtaaatggactattcttcaaaatcttagatattcaattaaattgattttaaatatgttttaattcatgcaccttggatatgacgacaattattagatcctatccgaatttttttatgatgttaaaatatatattggaaact

SEQ ID NO: 113300 - DNA, 218 bp, Glycine max
gagtttctcaccaaacacacacttctcttcttttctcttctcttcattttctgtggttctcactttcttttctctaatcttctaatctcttattttcttcccccctctgttactccccgcttctctgaatccctttctgttaatcatctgtctttcaactcgtgattttttgggtttgcctcaccaaaaagattcaaactttgaaaatttttctcgaa

SEQ ID NO: 113301 - DNA, 154 bp, Glycine max
attttgataaacgcgatcacaggttgccgcaccttaaaaccggatacaaaagcaatcgttatctgatttcaagaactctccaatttcttcctacctcctgtgtacgatttcttaagggaaagaaaatcactctctgtgcttgccacagacttcg

SEQ ID NO: 113302 - DNA, 215 bp, Glycine max
gcagctgtctactctggagtatgcaaaccaaggacgctatgctttagaaatgaagtattatgcctttccgaaattccaatatgatagtacagtcatgctatggagaattgttggatttttgtcaagtgtgattggactaatctgttacgcgttgagttcctctcataacgttctatttggagagcggaacttctcgaagatcatcctttacgcag

SEQ ID NO: 113303 - DNA, 223 bp, Glycine max
ttgatgctatagctgattgggaatgagtttcgtgtctgtttcgtttctgagaatttgaggtattctgtatgcttgtcgttcatactcttgctggggtttagaagttttaagttctcaaaaagagattggaagaagatgcttttgagaaaaaatagggatgaggaatgcctttcttgttcaatatgtttcttaagagaagaaggataagtgctcatgtattaca

SEQ ID NO: 113304 - DNA, 225 bp, Glycine max
ctaatttgatcaagttgaaccctctagataataaaagtattgcaaacaggaactgccactgtatgccattttgatgattgttttgttgtcaattgctacttagaattccttggtggccagtaacaaattaaaacaaagagagaaaagattgaaggagggaggggataataacaatgattctctacagataattacatgtggatggccaggcttggtctctatcca

SEQ ID NO: 113305 - DNA, 200 bp, Glycine max
  unsure (1)..(200): unsure at all n locations
caaactcggcatagtccgtgtctaatggctgttagagtttacccaattggttaattatttatatatttttatgtttggacttgtctttgtgttctcttgttccacacataatttgatatatngtactattatatacttntctaggttgtatctgcatgacaactacgactttggattgtaaatgatatctccttcaagag

SEQ ID NO: 113306 - DNA, 239 bp, Glycine max
ggaagcccttgagaaaggtgaatttgttaaagatgacagaagggtactacagcccttctcgaaaggaccaaggagctgtatcgggaagaatctggctctgcacgagatccgcctgaccctagcttatctttatggcatttcgacttatatgccacgagtgcgagcgagaactggcttcagcaaaaaagttatcttgcgtgggataggcctgcgctacaagtcgtagtccaggggacgga

SEQ ID NO: 113307 - DNA, 188 bp, Glycine max
attctccaaaatcacctcaactaatttcaagtgctcgccatggctgatggcagtagtagcaacaccaagagcattccctgatcctccatcaccccacaacttgagggtggtggatctgcatctcacaattgtggattgctagagattgctacagggtgcagtactcacatactacatgtcgatgacat

SEQ ID NO: 113308 - DNA, 238 bp, Glycine max
atctaattccataccttctatatcttttgtatatatattttcttttcttaagaatcaaacaggtattagatttataacaattcaaacaaactgctaaataaaactccactagaccttggttgaatatatatcatgtgttttattatctgctcatataataactatctgtctaagtttccaaatagggttattgcaggatttgtcaagaatactaatggaccttgctaagggaaagtgg

SEQ ID NO: 113309 - DNA, 212 bp, Glycine max
tctcgagccgattcggctcgagaattttcaaggaaaaagcatcatagtgaaaaaatgtcagagtccaaggatgaaaatccagaccttcctcccaagtcaaagccacaggaggaacatggttttgccatggatttgacattagcctggaaagtctaaggccctcggatcatatattcctggtctctaaccccatgtctccttttctcttttcc

SEQ ID NO: 113310 - DNA, 240 bp, Glycine max
acggctcgagctcgagccgattcggctcgaggtttgaccaaaacccctcacaacacataaccccaacagcacacagaaagaaagaagagaacaacagaacaatggaaggaggaggagctgctccgccgccgacaccgtgatgtccgacgcggcgccaccgaccgcaacagcctccggtggcgatggggatcgagaatattccggcgacgctgagccacggcgacaggttcatccagtaca

SEQ ID NO: 113311 - DNA, 214 bp, Glycine max
cgagaacaaaaaaaaaaacgtgattcgctcttctcttcgaataaaccacaaaaccaacaaacgagaagaggagtaagagaagatggggttgtcgttcaggaagctgttcagcaggttgtttgcgaagaggaaatgaggattcccgactggctaggtccacgaatgctagctcggctacagacaagccatacttgtcaccaagtctccagagctt

SEQ ID NO: 113312 - DNA, 237 bp, Glycine max
tgtccgcccttttttttttttttagggggttagatatttgtacctatttttgaattcatattgccatttgattgcctagattcttagacattcttggacattgttgggggttgattgtgtttttaaaccactaaatttacttttatggctgtgaaaagatagtaatgggtttccttttgtagattcaaaggcttgattattgggggtgtgtaattcacaccctgaaattcacattga

SEQ ID NO: 113313 - DNA, 178 bp, Glycine max
aaagaagagagaaaggaaagacaagaagaagcctgcagaggcagataaaagagaagggagttcaaagagaccaaaaaagtcttaaaataatctgccttttgcgcctgatgttctgctcaaacttgcgttcctagctgattctgctttatgtttgcccaccaattctttgtttttccat

SEQ ID NO: 113314 - DNA, 212 bp, Glycine max
cgaagatcggggtgtcggtggaggatctggcgtcgctgccgtcgctcgacgtggcggcggagaagcgaatcgagggtttggcgatgaaggtcggagagaatctgttcaatttcatgcaatcgtttgcggcgtggacgggtcgaagctgattgttccgatggatatcttggaccggtggttcaagaagtttcaggagcgggccaggcgtgacc

SEQ ID NO: 113315 - DNA, 241 bp, Glycine max
tagtgcaggttccacttaatatatgagaacggttcaaagattaccagccagtttcaacagggaaacaagagaatttacatgcgatcgagtaagcattttctattatacctcagggatatggactcaaggggttgctgatggcaaagtagttggttctggctactggctagtgaaagcattccaaattcagcattacattttgatagtatctgaatataggtttcaagtgctggatgatgaa

SEQ ID NO: 113316 - DNA, 244 bp, Glycine max
caaaaccctgaagaaagacacagccattgtttgtttactttccattgattgagcgaatgtttgttttttctgcgatcattttccattgggtggaagaaagtctcaacctttagtcgaaagagcaaggatctgagtgagtgagcgatcatgtgtggtggtgcgattatctccgacttcattccagcgggtcccgccggcggggcgcacgcgtgaccgccgacatcctgtggccgaatttgaggaa

SEQ ID NO: 113317 - DNA, 248 bp, Glycine max
gtttttcacattcgctgaggcgcgaaaataagggcgttttgggttgcgacggtgttgccaagggtggcggcggcggcgactttggcgacggtgtcataagttacgagagagaataaaaatatattttagcttataaaaaataatttgtttttaatacacgagtttcaaaattcctccaaaattcactttaaaaaaaatcccccaaaattaaccaaaatacttttccgaacccaaaacgacacccagtc

SEQ ID NO: 113318 - DNA, 247 bp, Glycine max
aaacaaagtatacttgttttgatcattaaggaataataacaatgagtggcaaaagcagcttccctgtttgcttttctttggggacatttttcctccttctactcaaccacgtcagtcctgaaaatagaactgaaccgaggaaaaatgcaaatctaagcccattcgagagttggaggagcgcttacttctgcatgaacaatacacccataccaccttcttgcttgggaaaacatggatacataatgaa

SEQ ID NO: 113319 - DNA, 243 bp, Glycine max
gtgattctatcatctccgtcacaatcgcgcgcttaacgctgaatcgatcggtgccaccgtgccaccactcagaaaattggttaaagtggtttggacacgtataaagaacaacttctcagctttgggactgtgagagagtctctaacaggccaacatgagtgtggattcaaagaaaagtgcctctaatggccaggagaaaatgttgctatcacaagaacagcaagcattgatcaatgaggtgag

SEQ ID NO: 113320 - DNA, 149 bp, Glycine max
gccgttcaaagtggtcttatatgaaaaacacttcgggcgttggtgcacatgtatgcttcgataatgctctctggatacaacaggtctattgagaatacaattgagacttgcagatatttggacatcttcgatgtgcattatccaatcgc

SEQ ID NO: 113321 - DNA, 247 bp, Glycine max
gaaagaaacagataagacgggaggtggaagttatggtcaatgacggcccttttgaagttaggacagggttggaatcttatgattttcaacctcgttcattaaaacttgagtctgaggttgatcaggttctccaggctcttagaaagtcacaggagcttgaatataaggtggtggaagaaacacttcaagaccaaaagacttacttaaaaaatttgtatcagcaagtggaatgtgagaagtatgaatt

SEQ ID NO: 113322 - DNA, 269 bp, Glycine max
ctcgagccgctccttccttgatacaactcataactctttttttgtttttcttaattaagacgattcggaccatatttgcttgcctcaatggaaaagcatcacataaaaaatctaaagtagagccactggaagtcacaaaacctgtttatagagatgagttaaccaaaaaacaaaggccaaggaaggcagggaagaaactcgtccggtttgcagaatcagaccctaccattttgggagaagatggtgagaaggagtttgagaaaccaaga

SEQ ID NO: 113323 - DNA, 266 bp, Glycine max
gcctccctctccctctctctctctgtcctcccctagtatcaagttcaactttcaatatattatccacacctcctgtctgcacaaatccacagtttcatcttcttaagtgccaaataaggtatgctttgtagggttccttctttaatattacatacaagcctctgtctttctgtccccccgttttctttctatttttaaaaacacaagagaggtcagaaaaaatttggttcctttatttgactgtccagtggcaattttggtggtga

SEQ ID NO: 113324 - DNA, 271 bp, Glycine max
gaatttcagaccaaccccaagtagactttctaacatgtccatggcctaattttttttcctttggatgtttgtacaatcgagtttgacaatccaatgaaattagactattctatattctttatcaagcttcagtctttttgctattgggtgatctagtttcagatccttgtcttttgaatgctgaattattgggtacataacaaaacaaaaaattgatgtttgagttagttagataaaaacttaaactagtgatttatgtgtgcattattat

SEQ ID NO: 113325 - DNA, 198 bp, Glycine max
ctcgagccgtttgaaattttgataaaccgcgatcacaggttgccgcaccttataaccggaaacaaaagcaatcgttacttgatttcaagaatctctcaattactacctacttctttgtgtacgatttcttaagggagagaatatcactcgctgtgctggccacagacttcgtgaatcatttgcttatccacacaacat

SEQ ID NO: 113326 - DNA, 263 bp, Glycine max
atttgttctaatttattctataattaaaacatttaaatataaatcacataactttaaaatcaatttcattgataatcaataactcaaacacacacttcattatttcatttataagtatatcaaaaaattaataagattttaataacttctttacattttttaattgttggatataattataccttattttctaaagggtgcgtttgatttgttaagaagacatgacaaacagaacaacactgaacaagtaattaagtcatatg

SEQ ID NO: 113327 - DNA, 268 bp, Glycine max
caacacaatgataagtgtctatggacaagaccaaaagttgtatagagcagttgagatgttcaaccaagctagctcatgcagtgtccctttggatgaaaaaacatacatgaatttgattggctattatgggaaagctggtttgatgcttgaagcatcacagctgttcagtaaaatgcaggaaggaggtataaaacatcgaaaggccgttaatatttccatgatcatggtatatgctaatgcgggagtccttcatgaaacggagaaactt

SEQ ID NO: 113328 - DNA, 263 bp, Glycine max
cgacttgttcggagaggaacattccagaagattcttgatcattacctaggactaggaaccgctgttagtcagtacaagacaccaagatgtgttggtcctacaaacaccaacaaaacaaaaaaagggtccaattttttgaaaattattaccatcattcatattcatcaacgacccctcttctgtgcccacttccaaatcttctcctctcgctatgggttgcggctcctcccttccagataggggctcaaggcagttgggtcgac

SEQ ID NO: 113329 - DNA, 254 bp, Glycine max
ctcgagccgcttagaactgtttgaagatgatcaatcaacttctgtacttttgcataggcatacactaaggacagtagcagctcctatggtggatatgcttcttcaaaacctggatgagcacaacaaattaaagaatggacatgaggtgcaggaagctccaaattctgaatctgttttacttagtcctggagacagaactgccatttgtaagagttttccaggagctcttgcaaataaggctcttgctgttgtag

SEQ ID NO: 113330 - DNA, 251 bp, Glycine max
attagacaatggcacatagaattttgaaactggttcaggaaacagctaggatatgctgacatgcaacagtggtctgtgcttggaaatggatcttaagagcataaggttgaatgtagttttcttaaatacgaataggggcatctataagaataacgctccagaatagttactcacttatccgggattctcattgctgtaaactcgtagatctcagtcatcaaaatgtcatctctgttctttccctagccaat

SEQ ID NO: 113331 - DNA, 251 bp, Glycine max
aacctaacctccttcaatctctaagtccccttataaaattcctcatccctttcctcttgctacaacatagtgtcaattcacaacaacccccatccccaatgtcagcatacgaaaccgttggcttcggcttcggttttttcgacaaagatgacccaaacgtatttttgttgggcaatgcctcagtatctggtggggcactaaggctaaccaacaccgaccaacttggcaaaccggtcccacacagtgttgga

SEQ ID NO: 113332 - DNA, 124 bp, Glycine max
atttaaaggtcagaatgagacagtggactgtttggtcaatgatgtcaaatcttcgacagagtttcttctaggaagtagttctggtagtttgtatgttgactctagttcaagtttaggtgaaggt

SEQ ID NO: 113333 - DNA, 245 bp, Glycine max
cgggaaaaacgcataactgactcgacgaaactgaggcaaaacctacatagggaaggttgccccaatatcagcatgcttcccattgcactgcactcatcccatgcgaattaagctttccgattcggtgagttatgacccttttcatttcattgcatagcataatacttttattgacagttattgaaatgatctctggtttgtacatccattttttctggagatcatcatcttaatgcatgaatttc

SEQ ID NO: 113334 - DNA, 249 bp, Glycine max
tcaaaaatgaactgtcttcggaatctttctcggtttgtttgttaatccttcttcctttctccattccatctctttatttctataatccaaatcgaatcgaatgagaatcagattccttctctttccagattctctgtctagcccttcgtaacacctgttacgcgccaccgcaagaaccttcccctttccctgggtttcgtcaacaattctcgtcaatatccaaccatggccctaaaggctgcctcaggt

SEQ ID NO: 113335 - DNA, 181 bp, Glycine max
ctgatacaaatctcatagcagaggtacgtcaatagagagctaatattgctaatcctggtgatgataatataatgtcactccacgcgcgtatagtatggctgccagaagcgaatgctgctacgatatgacagtatatgatgatcacgattcgagacataggatggatgatgcgccatgatct

SEQ ID NO: 113336 - DNA, 235 bp, Glycine max
gaaggtgtagtccgctattttttttgtgagaagtctttgcttgaaatgggctttttattcacaagctctttgggactttcctggagaagcgagtagaaattctcaggatcaatagagacttgtaggagttggactaaggtctctttcaattatcgatcgggcatagttgcaatcttattccacttaatcttcctatcaatttcagatacctaaggcggcgaagtatagctaaaaa

SEQ ID NO: 113337 - DNA, 235 bp, Glycine max
atttgcttccacagttgcttcgccataaagaaataacaaaaggaaacaccttcttgcttttcctacctgattgtaaagaatctctcttttctcatttgggacatcactgttcactttctgcatcaactcgctgttggattttaatatttatctctgctatcaatattattaaggtctcacttctgggtacgttgtgattttttccaagattcttctcgattctattgggattctg

SEQ ID NO: 113338 - DNA, 236 bp, Glycine max
ccttcttctccttcttcccacttgcaatctctttatcataccaacaatctagtttcatttcagtatttcatcttctcctcttctatacttgcttttttccattttccaactaaatggaggaaactttggtgccaaagaggcctagagaagaagcccaagtggaaagaggcttggactttgaagaagattactcctcctcaaagaggcacaagccatacaaccacatcctatccctt

SEQ ID NO: 113339 - DNA, 234 bp, Glycine max
tgcaattattcctgggttttgctagaagcttaaaagagagagagcataggagatctctgatttccaagccagaaaattaagtggaagcagttcttccgggatttgccaaaaagctaattaccacaacctatagctctctctctctctctctctctctctctctctctctatctatcttcaagactagagagagtcatggatagtagctattttggagagccaaacatgggatat

SEQ ID NO: 113340 - DNA, 236 bp, Glycine max
ctttattcagaatgtagtgtgtttatttcttgagtgcaaccgaagtcgactgaaagcctagacgaaatttagctgcaatgtcgagttcgaattctgaagttgcaacattggagactattctaggcaagcaccacccccgacgaaaggattaatctcgggcatatacaaaaacactaagatcatgacttgtgcatcacatttcgacgtgtttcatactacatatgtggaagaattgc

SEQ ID NO: 113341 - DNA, 232 bp, Glycine max
agacactgaacggttcactttgcggcttcccgaggaagttagaaagcagatattgcagaacccgcaactgcatcgcgcgagaagcctcgttatcttaccgagagaaggtagttcgcggcgggggtatcgaaccggtgaaggaagtagcagagggagatcgtcgaggcggttggaccgggggtttaagtcggaccggtgggttttcaccatggcgccgccttttttggtgaga

SEQ ID NO: 113342 - DNA, 234 bp, Glycine max
tctcgagccgattcggctcgagtattaagataaggttgtctataaaacataatgaagtaactacacattaccttctttatgtcctttttaatgactcaaatttataaactgtaattcttttatacttttttaatgacttaatgtaactaaaatcattagtaatggaagaataaatatctttaaacagtatttagaactataataaaatcttattggagtcaaataaaaatataa

SEQ ID NO: 113343 - DNA, 227 bp, Glycine max
ggaagaatctgcagaaagaggttgcataagtgaagttagcacaaaataccaagtaattcgattgcttgaggaataaatatttccaggatattcattcctcaagcaatcgaattacttggggaatgaatatcctggaaatatttatgtttttctttgtttgtaataacagttttctcatatctctataaaaagtattactccccgaaaaaaaaaaaaaaagggcggcc

SEQ ID NO: 113344 - DNA, 231 bp, Glycine max
gtcaatattgcaatccatcacacgggacatctatgtgatatatatatttagaagcttcaactgaaattatctgaagaggcattgcacaacagcacatcgttttttctccatctaaattcatttctgcaggttccgcaagctttttgtagccttgtccagttatacctatatgaacactcttagaaaggtataaataataaagttgcagtgctgaaggagttgtgttgcttg

SEQ ID NO: 113345 - DNA, 230 bp, Glycine max
ctcgagccgctcgagccgctcgagccgttttcatattttttgtaggttgtctgcagatgaaaccaagagtattagacaatgtgaaacttcatttctcatagtctaaaactcttggattcatttaccccgcgatagaagcacacccatatttataaccccatttcacagtaatgatggtttgatgttattattttaacagcatgccatcaatctactcgttagctttctaa

SEQ ID NO: 113346 - DNA, 252 bp, Glycine max
tactaaccctttgggattttagcaccatgagggttctcaacattattttggtgctctttgttcttcttaccatagtgcatgtaaaacaaaacatggctgctagggtcttgaatatggagaatatcccacttaggttgcaatctcttaataagggtcttgtccctccctcaggaccttctggttgcacatacatcccaggctctggcagcacgcattgtccggccaagaaaatgaatggcaccggcggcaacg

SEQ ID NO: 113347 - DNA, 252 bp, Glycine max
gcggttgctaaagggaaagctggtggtgaaagtttgatagcaagtgaacgattgattgaagctttggatttagctaaatcagaagaagaacgatgggctatacattgggaatctgtgaaaaaacatgcacttgaaggggatgaaaaaaaaactcttgacgaacccactcccaatatcttattacaaggacaaacatccgaacaatatgtatttcgtaccttatcacaagttcgttctgtggaattggaagag

SEQ ID NO: 113348 - DNA, 253 bp, Glycine max
tctcgagccgaatcggctcgaggacatggagcaaaagtggcagtgactaggcaaattcatcaatggcagagttgatggcatcacgggcatactgctgctttaagtgccagaaccttgttgctttccatgatgatattgtttctaaagatttccaggtgagattttctcttccatttttggcatttttctctatgtttatgctagttttctaaattgaaatggatcatccatttatacctatcagaataggatc

SEQ ID NO: 113349 - DNA, 254 bp, Glycine max
gcttggcttgagaccatagggcttatagctgggatagggactcaggtaatatggtgaaacttctattttctagtcaatattttcagagaatgtttacatggtataacccatgcttttcatggttggaaaaggcatatgcaggttcacaaacgttgcagagtataatcctactctcaactggcacaaataaaggtgcaggatacttcgctccaaaatggctattcttatgtatgtatattggcctcactgttata

SEQ ID NO: 113350 - DNA, 246 bp, Glycine max
  unsure (1)..(246): unsure at all n locations
ctcgagccgattctactcnagctcgaccgctcgagccgctactccaactacagcatttcacaaacaaaccaaaaaaaaaaccctctctcgtaataatatcatcatatctcactagacaaacacaaaaatgtcaccatacaattacactctcaaacacttggctctctttcttctcttcttgatcacttccacctcagcggcagccggaggcgccagaagaaagctccgttttgacatgtcaagtgg

SEQ ID NO: 113351 - DNA, 243 bp, Glycine max
cagcgatcgaagtttcacatcagccttatccagtttagggtttcggttccttaccctacctttgacgtatcgaaaccttaaatttgggattaggtctgagcaatctggttggtagaacctttggtcttagagagtcaagttttatgtctggattagacgatcaaattcctactgccttcgatccttttgctgatgcaaatgctgatgactcgggtgctgggtcaaaggagtatgtgcatattc

SEQ ID NO: 113352 - DNA, 260 bp, Glycine max
ttgataacttgatcttgttttgtgaagactgaattcaaatgggtgccaattaattcagtcttcacaaaacaagatctagttatcaaatttttctaatgtatctcatcaccgaatgatcatttgggtgcaaaggagtttagaggaccctacaatacttgttacaacgtatgatggagagcataaccatggtcatcaaagagctgtaatatcacttgtctcaaaccaaagtgaagcccttcctcctcttatcgggtcaagtc

SEQ ID NO: 113353 - DNA, 266 bp, Glycine max
ctcgtttcatatgtctctcattcttctctggtttttggcaaaatttttcggatttattcaatttctctctgtgtaaatacttcaacttttccaattctcatcttcgcatgttgattcggtatacctctttccaccgattctgtatttccattctctccctttctctttattttgctatattattggatctctctcaaagaaagttgtaatttttgacattcatcaaacgtgtagtgagtcatttctcttcccagttgtatgcatgt

SEQ ID NO: 113354 - DNA, 254 bp, Glycine max
ctcgagccgatttttgttcttctgtttaaaaggatgaatatctataataacaatctttgctggttctactcccatactttatcttccttttttctcttccttattcttccttctctttctacaaccaacctgacttcactgttttgctatttttcaaaaactcactaacactcctttcaaactagaaacttggaaaaatggcaccgattgttgtaagtggcatggggtcgcgtgctccaccatctcaggtcatg

SEQ ID NO: 113355 - DNA, 125 bp, Glycine max
  unsure (1)..(125): unsure at all n locations
gtagaatccaaaacactaaactccaacacgtatataatagaatgatccgaaacacaganaggtcggatcgccgggtactaacctggtcggtggttcacccatgcgataacatcgctctctctacc

SEQ ID NO: 113356 - DNA, 240 bp, Glycine max
  unsure (1)..(240): unsure at all n locations
caatagctgtacacaacatacgacacaaaaaanggnnttngngnnancgctgatgccatggctcgcttagctcctacgctgccagccagtgatgccggcgccgctgtagaaattcccggcgtcgacgatgcaatcctcaagaagaaagctcacccccaggaagatgacgctcccattgtcgaggacgtcaaggacgatgacaaagaggaaaccgaagacgaggatgaggacgatgacgac

SEQ ID NO: 113357 - DNA, 237 bp, Glycine max
ctcgagcgctcgagcggctcgacggctcgaggttcagtgtaaacctcaagccatgtctagtggtcccactaacaacgcagcactcgaccactgcgccgaccaacaaattccctccgtcgacgacgcaatcctcaagaagaaagctcacccccaggaagatgacgctcccattgtcgaggacgtcaaggacgatgacaaagaggaaaccgaagacgaggatgaggacgatgacgacga

SEQ ID NO: 113358 - DNA, 145 bp, Glycine max
gagatgaatcacttcagcttgaggttgatcttgtcagtcctcttaggttggtgatgcttgcatcagttgctttccacacaacataaaagagacaaaaagctaagaggactgacaagatctacctcaagctgaagtgattcatctc

SEQ ID NO: 113359 - DNA, 243 bp, Glycine max
aaaccctagcatctcccccgctcctaattctcatcctcattgatccattttttttctttctttcgttctctctctctctctccttttttttttttttaacctttacgtttgatcgatcaaaaaacgagtatcacccactatcaggatttgattctggcaacacttgggggcaaaaccccatgatgaaacatagacctcaaaagatagccaataaccctcgaaaactttgcagtaggggccacg

SEQ ID NO: 113360 - DNA, 242 bp, Glycine max
gttagcaggaaggatcgaacttgcaactttttcttcttcttaaccactcaatcaacttttcatctccctcttttcgttgatcccaccttttccgctaaagcttcgattatttgcttttattttttttagcttgtttgtagtttgtttatatcgttgcgttagagaattaggaatcttcgattttctctgtttgctgttaattataatggttctgtcgtgtgtatgtgggtgaagtttcgtga

SEQ ID NO: 113361 - DNA, 245 bp, Glycine max
aaaaaatgggctaacccaattggctgggaaccgataataggaggaaggatttggccatggactgcccggaaccttggaattcctgaagggggaacctgcggaacatttccaggacttcaatgctgaggcccaaggttgcctcacaatcccaaatttaaaagcaaaccttcctggggaacctcaaccaccatcatccaactcgccaatttgtgacgaggcagaagtccgctttttgcctggcgact

SEQ ID NO: 113362 - DNA, 156 bp, Glycine max
tgattgaagagcatgtatttgctttggttggtcagatgggtagagaaaccttctcaggaaccattgagctgctggctacattatgtcactctacgctgtgcacttcacactctttagtaggccgcttttatcttcaagatcccgtagtggctgttt

SEQ ID NO: 113363 - DNA, 250 bp, Glycine max
atacaaaaaaatagttttgaagcacgtcaaggattggaattaggaagataatggggttttcaaaggaagagaaatccaaaagggtgtggagaggtgtgaaggttgtgttcttcttgatcaccatggttatatcactgcttcttttctctgccccggttctcttggttattgccgatgcacttgttccttcagctctactctcagctttttcaccatcttctctcttctcccattttgacaactacgattt

SEQ ID NO: 113364 - DNA, 243 bp, Glycine max
ctcactatcccaaacccttcatcatgtactaccatgtctgatgatttgatgagtcccaaccatttggttgttggctcttctacttcttcatcttccttatcctactatgcttgagggtactgtaaaaatgggactagttgcaggttccttcatggtggaattggagatgctgatggtggtggtgctgctgcgatgtctggctctcctggcaagattgagatgatggagcagtgccatgtactc

SEQ ID NO: 113365 - DNA, 242 bp, Glycine max
aatctgtatattatatggaaagtttaataaaaaatgaatgactaatctcctaggactgcctacctttactatatataggtacaacaggctctagtctgttagacacaaaaactagaacaagataattaagaaggtagagagtagagaatgcggagcgggttaagattgttgggtgtggtgtggtgtgtgatgatggtaacaagaaggagaacaagagtgttagtgagtggtgagagtgcgaa

SEQ ID NO: 113366 - DNA, 124 bp, Glycine max
ctcgagaagctcgagccgcttggttcagagatccttctctgtacttcctccttcgctggtcgatatcaacaagtgtttgaagagatacccaattgacgaagctcatgggcaagaaaggaggggc

SEQ ID NO: 113367 - DNA, 237 bp, Glycine max
catcttgcctattctgggaaagttagcacctacaggcataatggtatggattcttgatccatttgcttgctcttaatcaatctatgaaccttccaaggctttaattgctgcatggtattagaatgctagctttagtacagcatttctactaaagctagcattctaataccatgcagcaatttaaaccttggaaggttcatagattgattaaagcaagctttagtagaaatgctgtac

SEQ ID NO: 113368 - DNA, 191 bp, Glycine max
attgatattcatttcagattcactctagtttttgtttcttccccaattctcaaagataaattgcaccttagcttgacttttggaagtgaaacattttatcacaaaacatttctaagatcttatgacatagggattggggagaatgacctgttgatgtactttaaggagcaaggtggagtattatatgacta

SEQ ID NO: 113369 - DNA, 176 bp, Glycine max
taaaccgcgatcacaggttgccgcctcttaaaaccagaaacaaaagcaatcgttacttgctatacccaaatctctcactttcttcctacttctttgtgtacaatttcttaaggtaaagaaaatcactctctgctgcaggccacagacttcgcaaatcattttcttttccacacaac

SEQ ID NO: 113370 - DNA, 159 bp, Glycine max
ctcgttctgttttgtttctctttatttctgcgacagacctcccagatgggcatgacaccgcccctctcctccttcgatgctctcttccgacttcgccattcccacttccgaggctcagcgcatgctccacttcggcgccgattggctccacacaacata

SEQ ID NO: 113371 - DNA, 259 bp, Glycine max
tagcccgagagcctgggaaacgtagcaggttatggctccatacagatataattcaagttttagaagaaaacaagggaactagtcagattgaaatcatatgtacggatttctccttatttgaagaagtagagatagaatgggatgcaaatgccttcaagaagatggaaaatctcaaaacacttattatcaaaaatggtcatttcaccaaaggtcccaaacatctgcctgatactttaagagtattagaatggtggagata

SEQ ID NO: 113372 - DNA, 151 bp, Glycine max
gttttaggtggggtttgtactgtggcatttgtttaagtatctttttaggtttttggttgaacgaattggtaatggatcacaacacaagctatggaagatgctcagcgtatttgatgtccggtgctatgtcaaggggatagatgatagaatg

SEQ ID NO: 113373 - DNA, 244 bp, Glycine max
  unsure (1)..(244): unsure at all n locations
tgaagtgctaggcactcgggctctgtggaatgggtatctttagctccttaacaagagcgatggacatacgcgatcatgtatcccccaaattcgtccaactccaaagctaggcgactctttaggcctgcttaatcacgcacactgttcgacattctcaatgcctatcccagacttgtccactgtactgatgaatcaagaaganaataaaaagcaaaaatgctatttnaattgtatagactaaaaa

SEQ ID NO: 113374 - DNA, 235 bp, Glycine max
gtgtggctattttgggggtggagatcttgcgcgggtgtcatgcctttgtgaattccctgcgtgattgttaggacaatggattatgtttagatgagtgcgcaactcagagtgagtatggtggcttgtagaggagaaccctcggtgcaatcacaggggggtagtcgtggtggtcagagactatgcgcgaatggtggcttggcatgtctcagggcagtggtggcggtgttcaagagga

SEQ ID NO: 113375 - DNA, 256 bp, Glycine max
gtcaactttcgtttttctccctctcagagtgcaaggacctgggggtggcagggatcctttcttcgattttggtggttttggaggctttggttcctttgggcctcccaggagtttaatctcaagcttttttgggggtagggacccatttagtgaccctttcttcgcccaaccttttggagggatgtttgagtctagtccctttggtggtcctactggatttcctttccccactggtatgaattatctgggttccttg

SEQ ID NO: 113376 - DNA, 280 bp, Glycine max
tacgtgagctcggtatgtgagctcggacgttcggctccagatagcgcctttcagatctgagatgtcctctatctttccacctgagttgctccaccattacatcaatggtccgatgaggaaatacttcaacactaagttgcggtgcgctcatgaaagtacccatagttgctgtgaagcacgtctcggaaatccaatcatacgaacagtgatgcaaaggagtagtatcgtctcgtcgtgagatgaagtgtggcaatagtgccctccaagtccaaatcgtgtt

SEQ ID NO: 113377 - DNA, 201 bp, Glycine max
catgcttatgattgtcgataatgaagaattttatgagcaagagaaaccgctatcactgaagaccattagaagcctcatcattatattgagacaggttctgtggcagctactgtgggtgaatcatatcacatctgctaattcggtaaaatctgttccagttagttcagctagtaaggggcagtctgttcagaccattcaaca

SEQ ID NO: 113378 - DNA, 119 bp, Glycine max
ttgagattttgataaaccgcgatcacaggttgccgcaccttaaaaccggatacattagcaatcgttacttgacttcaagaatctctcaagtccgtcctagttctctgtgcacgatttct

SEQ ID NO: 113379 - DNA, 253 bp, Glycine max
tcgtatcttctcttcttctccaccaattaagtaaaagaaaaaacacaaaattgagaaaaaaccaaactagcgcgcagaatgagaagcattcctattcctccaacaaccacaaccaatacattagcaccaacaagttctacagtggtggtggtgacaacaatgacaacgatgacgaacaaaacctctgttccttctgcatggcactctccagtgccctacctcttcggaggcctcgctgccattaggctctcat

SEQ ID NO: 113380 - DNA, 180 bp, Glycine max
taattttctattcccaaatctcctccttagactgccaacccaatatagctattggatcgaattcagtttggattcggtctgatggtttgggagttctaataagtctaaggtaatctaaacacatatcttataaattagacttctaaattttctttcttgtttgtgttacatttatttatt

SEQ ID NO: 113381 - DNA, 202 bp, Glycine max
gaatacccctcttttgctgcatcagaggagttgtaaattaagagcattggtggacaagctcctggaacaacaacctcccgtaacttcccagcggaaggtggaaggccaaagccttggaccaggataattccattctcaatttggctcctcaagaaaggcttccttcctggttaaggcagtggtaccccccctgtcaagcaag

SEQ ID NO: 113382 - DNA, 241 bp, Glycine max
ctcgagcgctcgagccgaaacactccctttctctttcccctaatccttcttctgtgtgtgatgatgattgatagagaatacgaagagaccagtgtgcagtgagtaatacgttggtcagttcttgtgtggctttgtttggttctctgtgttggaatttgttgatgggtgaagagggagaagatgtgtcaagagatacggaccagcaacacatgggtgtttattgaaatgagtggttcttagt

SEQ ID NO: 113383 - DNA, 243 bp, Glycine max
aatcggacagatcagcgccgctgtccacccctgacgactccttcgacacttcgataggggcagagattctcgtcgtcgacactcgcccacagccgcccgttgctcagtatttgatgccgcctctctacggcgaagatgcgaacgcagcccactccacgccgccctccaagaggcagatagagaccgaccaaagttccaacgagacccagttcgaaatccccaagcccttcgatccgccctgtc

SEQ ID NO: 113384 - DNA, 242 bp, Glycine max
gaggatccgcggggccgccgccgatcactgccgctcggagcttgcggccggagatggatttggaggctttgatggtgaacgacattgtctagggtttaggttttgaggttggaatggaaaatgtaggtaaacaaaaactagtttgaattttcgcagccatggagaatgatgaatgaagagtgagttaggattttgcatcaatatctgtgatttagggttttctactttgctccctccagtgt

SEQ ID NO: 113385 - DNA, 245 bp, Glycine max
  unsure (1)..(245): unsure at all n locations
aaaattctgtgcgttttcttgcacacaacatactagcggaannaatncgccaaattcgaatnatcatattgagatactattaggcataaatctgtgtagttcacaactgagaagtaaaactttaccaaacaagattgcttttgatgacacagcttgtgttgattacaacacaaaaattcttctgatgaaagtgtccagtcgaatcatggtgaacaataattgtgcattgtcattatcatgaaagt

SEQ ID NO: 113386 - DNA, 243 bp, Glycine max
ctcaatcatcatatatgtaagtgccactatccaaataaggatatgcaatccttttaatagtacattttttattggtactacagttttaactcagggtggatgaccaaaataatactttagtagtattcaaaatttaatgttaagagttacacaagtgcattaaaaatgaaatggtctgatcggttttgttatgggatgggattcttttggcctttcttgtattctgtggctctatgccttttc

SEQ ID NO: 113387 - DNA, 244 bp, Glycine max
ctcatatctacaaactctccctcattgtctggtcctcttcctgctccaaactgaaccgcaaaatttttgtttttttcactgagtaagtatctttcctacgcacttcgtttcatttttaatctcatttcgttccatttactaagcccacttgtgtttcgttgcttattaactctctgattagcattgtccctctgttgcgttcactgcgcaccgcgtgtttgattatttgcccaagtaaatgata

SEQ ID NO: 113388 - DNA, 227 bp, Glycine max
  unsure (1)..(227): unsure at all n locations
cgattgccttcaaatcacacactctcttcaatttctagggttttgctattgctttgcctccgttccccctttctcacaaaaaaaacggcttntctccttctcttcggaaccaatccttagacgtaggtttttagttaattaaaggaattccagcgagaatccgttgctcattttaaatcgattatctaaccaggactgaaagacctaatggagtccaaaggtgggaa

SEQ ID NO: 113389 - DNA, 246 bp, Glycine max
cacactcctactaatctatcaattatttctctctttctctttcatgcatattctcaaacacatgctgctcaccacctagctcgatctcaaacccaccgaaacccacaaacccaccaaaaaaaagctacaacccatttcaccaaattcaatctcctcacatcccatcaaaccaaaatccaatttttccatggccctggaaacctggctcatcaaggtcaaaacggcgctgtcgcacagcctcacgaa

SEQ ID NO: 113390 - DNA, 247 bp, Glycine max
acgatcgaagtttgaagctccgcttgcagccatactcgaatcagggcacataaattttcaatttgaggaacattttttttgtttagatcaagaacagaagagcttgctcaagtgacgggaaaaaaaggttctattaggagagagttaatgtagttatcgttctgagatttgtcggctcttgtcatggacccccgcaaagagagaataaagtatgggagactgtggattttggaatgagtaaattcca

SEQ ID NO: 113391 - DNA, 197 bp, Glycine max
attgatcagacctaaaacatacttttgatttggttccatattcttacctgacaaatggcaacatgaggaaaacgcctgccacactcttccatcaagtctttcccgagaggagcagcacccgatcctatacgccgcaacgaggaaagatagtagtcttgaaacaagctctgatttcggcagaccgagcaagagctgag

SEQ ID NO: 113392 - DNA, 224 bp, Glycine max
cccttgtttgtttccatttcttgcttctattatttacttgtttttctctagtattcatggtgctcgctggtaaacttagtactgaacttggggtgaaagcatccgctaccaaatggttcaacctcttaaccacacaacatacgagcctactgaatactagagaaaaacaagtaaataatagaagcaagaaatggaaacaaacaaggcgctgagatgtcttctga

SEQ ID NO: 113393 - DNA, 243 bp, Glycine max
attttcttcgtcgtgccccatacggtcaatacatcgaatctaatagcctacaccaaactatttagtgctgtaattatatcaagtttaaagtcaattattgcattattgtgttgaaagcccgtgaatgaaacttttacacttaaaatcataacattttaatccgtcagtcgaagtggatacatcgaagccaaattgtgcgcatcatttggtgtgttgacagaaaacattatcaacgttaaaaat

SEQ ID NO: 113394 - DNA, 227 bp, Glycine max
ggacaagggtactccactttttcttacagagctgtaattcttgatgctgaggaacaggctgacccatttacctatcactgtggggttttcattgtgcctaagtttacacctaggccatcaaattaggcagttattctgtttgaatttcatgactgaatgttaaatctcagactcgtgcacgtgaatggcttttctattctgaagtaggacagtggatcgtggtcaga

SEQ ID NO: 113395 - DNA, 225 bp, Glycine max
cattaaacttgttttttgctagaagcaggaagagaagcgaaacaaacaaacaacagaataatcaattgagccacttaccatcagatttagatctcccaacagagagtttctcaaaattgccaagtacccttttcaggatcaaggaagagaatcaagaaccaccaaaaggtgttgttctttgttgtagttgtttgtaactgtagcaacatgaagatggttagaaag

SEQ ID NO: 113396 - DNA, 212 bp, Glycine max
gtgaagtgatcattgtccgttggatggatcataaaagcttgcttcttacttttaccctcccttttgttaccagcacttgtagctatgatattgatagcctttgtgtataaccctttctcttgtaaaagtggattttatgtccctgctaggtgcacttagcaataaaaagttacatttgccaggtttgcattggagcggttgttcaaattgtt

SEQ ID NO: 113397 - DNA, 189 bp, Glycine max
tacgccgtgaatctaagcgccccgtgagccgctcgctaatcaccaccagcgcaatggtcctgatcaaggagtaccgcatctgcatgtcgctgaccgtcgacgaggtaagcagagtacaccaccggcggcgcgagtcgttcatttgtttgattatattggcggcacgtctaccggtggccgcaacggtca

SEQ ID NO: 113398 - DNA, 121 bp, Glycine max
attcgggacgggtacctgaaggggtacaagtttccccaaaagggagccgtataaaagcttggggaaatcagggccaaagctgttccctggggaaaattgttaccggctcaaatttccaaaa

SEQ ID NO: 113399 - DNA, 224 bp, Glycine max
ataaattccaatacataatatatatagggtttagcattgatcactaggtgacttgttatttctaatagcattgcatactactacaaatagaatggcatcacgtgggtatttttctgttcttgtccatgcctttgtgtttgcaagtcttgcaacctcagctttctcacaactgtcacctaattactatgattatgcgtgccctaatgctttgagcacaatcaaaa

SEQ ID NO: 113400 - DNA, 129 bp, Glycine max
tgctcgagccgattcggctagagctcgctccgcaacttcgctcaccaatcctccatctcgcggattcaattgcactctcaacagctcccagaagctagttacccagcgctctatcctcgatgacaattt

SEQ ID NO: 113401 - DNA, 223 bp, Glycine max
ataagattcattttcaaataacgtaccgtgtgagtgtattagtggagtcatgagtgtatgtgctcgtgacggcaacgattctgtgctgtgccgtgcatgtggatgtagtgttggcgacggcaacagtgtgagtgctcgcagaagagtcctggagctccgttagctactatggccacagccactagcaattactaggcatgcccatgatcatgaacgacaacct

SEQ ID NO: 113402 - DNA, 217 bp, Glycine max
cttgacattgttgagcccattgatggaaaaccattagatgaagtggttgaaaaggtgaaatctgcaactacatctttaagaagaattcttctgtctccatcattttctgaattcttttcagataatggaccagtagatgtaatggatgaggatgccatttcaagtctctctatacggatgaagttaaacctgactgtttgggaatttgtacttcctg

SEQ ID NO: 113403 - DNA, 163 bp, Glycine max
agacaacgaacaagaagtagatgacgtacaattctctgatgacaaacacttttccctacatggaaagataacgcattatgaaaatctctactgccgtctctctagttgttgtgttcgtcctcatgattccatggctgaagaatcatgcaaggggcacccatga

SEQ ID NO: 113404 - DNA, 220 bp, Glycine max
ggtttttcaaaaatcttcgtttttctctcatcccttcagaaaaatcagatttttggttcacggtgaatttgaatgatttgtgaaaatgggcctaaatttagagttgaagagccattcggagaatgttaatgcccttgcattttccagacaaaggagtaaatagacagttaaagtcaacatgggtgacgatgcttttggcgtggaaacggtgccgatcaaa

SEQ ID NO: 113405 - DNA, 212 bp, Glycine max
gcctgatgtcatagcaataatgaaatttttgtctataatattttcatgtttgttttttaaatgttgtttatgtgtgtacgaaatggaaagggggacactatgaagtttgtgacatacagaacagcatagaacacttcatcttaacaaaaagatctagaggctgttctgtatgttaagatgaagtgttctatgctgtttattcatttgttttt

SEQ ID NO: 113406 - DNA, 214 bp, Glycine max
tgatccggaaggtgctaggttgtggttagctgagacggaaaagattttcgaggcgataggttgccttgaggagcataaggttctttatgcgacatttatgctccaaggggaggctgagaattggtggaagaattcctggaagaactgcagaagagatagagaaatattggacttcaagattttcgactagccagcgatcggtggcagaaaacga

SEQ ID NO: 113407 - DNA, 208 bp, Glycine max
ggggttgcttctgcaggctattcttttaatgtgttaatgaattcatattgccaaatgaatagggcggtagatgcaagcaagattctttgccgactggtgaatgagaaacagttaaagccctggcattctacttacaagctactggtaaccaagttactggttcaaggaggatttacagatgcattgaatattttgggattaatgagaa

SEQ ID NO: 113408 - DNA, 194 bp, Glycine max
gttaaaagttacagaaaagtgcactcttcttctttcccttgacccgtatacttgggttgtaaaccatatctagagctactgagtcagttcagttttcctgttacgggtgattgcttcatttgtatccataggtgtattcacaataaaatttagtgatatttattattaaaaaaaaaaaaaaagggcggccgccg

SEQ ID NO: 113409 - DNA, 218 bp, Glycine max
acacaacttaatcctgaaaaggtaaacagagtgattcttctgtgtccagcattcgatctacctcaaagatggattgattctatgggacaagacaaaatcaactattggaagtctaatggttcactgccattcagagactttaatactggaggtatcgcaaatgttcactatcatttcttcgatgatttttcaaaccatccttcttttcctccaataac

SEQ ID NO: 113410 - DNA, 207 bp, Glycine max
cttgactgtctctctctcgcgtagataaggcagagaggataaggagagatgcttgtacctagagagataagaggcgacaataatacatggggtagcaaggtctatacacggtaggagctagaatactcgatagcaccgacagacatccaagtttccgatgagcttttgggcagccacggtggcttcaacggtggcgctcgtatttgc

SEQ ID NO: 113411 - DNA, 214 bp, Glycine max
tttgaattgtgtgactcaatttagggagaaacttgctgtgaggcaaatggaggagaggccgaggccatggggaggccatccccccaatgtgaatagtattggctttccgaacggtgttatggtttcaataccaagcaagtgatgagctataaggcatctttgtcctcctgaaatgcttgctcctaggttggccagctccggcacattgccaaag

SEQ ID NO: 113412 - DNA, 241 bp, Glycine max
ctcgagccgtgattgatatcactcggatacatgcttagaccatggtgcataagttcttgacttgactacctttggttgcataattgatgaaaagggattgctacaatgattgttgtcacacaactactcatcagagtatttgtaggaactgttacaactaatttaaaataccattaaagcttaagatggtacaggattcattgagattcacatcagccctttcagttcgcacttgcagttg

SEQ ID NO: 113413 - DNA, 234 bp, Glycine max
  unsure (1)..(234): unsure at all n locations
ctcaccatggccgagtcctgcctcctctcttctccctcctcactcttccacacaacatacgacacagcnaacttnacanncccctccaaacccctcacactccaattttctcgcctcaactcctccgtctctctctccctcgccgcaccaactcacgtttcgtccccttgtaactttcgtggcccaaacttccgattgggctcaacaagaagaagaacagagcctcgctgaaac

SEQ ID NO: 113414 - DNA, 233 bp, Glycine max
ttcttgttggcagcctgtttctctagagcttggtggaaaaagcccaatcattgtttttgaggatgttgaccttgataagagtaagtgccttttattttgttatggacaacctatgttttcttgcattgaggaatcatatttcccatgaaactgattgagtggttgtcgatgagtaaaatttgggtacctagaacctattactgaaaccaaaatccaaatagacagtcatatac

SEQ ID NO: 113415 - DNA, 105 bp, Glycine max
cggaacattttgcgacacctatggcggcagctggggaacacgagccattgaaggatttacgaagagcgcttatgagatgtacaatgacactggcatgtatcggtg

SEQ ID NO: 113416 - DNA, 243 bp, Glycine max
gaataataaatttctgagcagaagcatagtgcagcggtggaagcagggttgatcctgattagtattgctgcatcccaattcacaatcctttgattcgaatcgaaggactttgaaacgaaacaagaagaatgcattactgggttcgagcttcttcttctgatttcgccggaacccatccccaacgtcgcagtggtcattccgctgttaacatcgggaaatccaaggttgtcgtgttcggaggac

SEQ ID NO: 113417 - DNA, 231 bp, Glycine max
agtgacatcttggattagtgctcgcactctcctatctgctatgagacttcgtgggtagacttttctatttctctcctttctttcactctcttcttcacactgatctgcattgccgtggcatagtggtcttatttgaataacacttgggcgtcagtgcaatgtttgcttcgttaatgctctctggggacgacaggctcactgacagttcaatttctactttcagagatttgg

SEQ ID NO: 113418 - DNA, 210 bp, Glycine max
tagaagttctgccttgatagatgaatattctgatgatagggaagattttcacatagtcagaagctgaactagaggcataccagattggtcttgagaattatgtgagaaaaacagccttggcagttgaaccggcacatgatattgacttgtcttcctgtttcgggcaatgtgcgccgtgattaccgtgatagtgctcgggaatgttgagga

SEQ ID NO: 113419 - DNA, 201 bp, Glycine max
tatcgacgttgcgctgcgaggtgtggaacatgtctatgaaagcaaaggtgggaaagtggtaggtacacgccgaagatcgaacacaacatgggtggtgtgtttacatgggactcacaggcgcgcaagagatttttcagccggattaatcgaggagagcatctggtcttcggagatgggtctctatccacgcgcctgttgtta

SEQ ID NO: 113420 - DNA, 234 bp, Glycine max
aatgaacatggaaattttgttgaccatgaattacttaataatattctcaacaatccagaagtgattgagaagttggttggagattatggagctattaataattcacaatatgtacataatgcggggtcatccttggcggctttttcaaatcctcctattcctattcaaggacaaaccactacaccttcatcggttgttttttcaactacttcttcctatactccccctattgga

SEQ ID NO: 113421 - DNA, 231 bp, Glycine max
atcgcgagctgccgcccttttttttttttttgggcccaaatgactgccgacgtcttagactaattcaggctttcgacttaggtttccgaggcaacgtaattccggggaatatttggggtaaggttttattaatttccaaaaatttttttccattaaggaatatttagtcaaccataatttttgtggcaaaatcataaccatttcttctcacccttaaaattttgggaccgg

SEQ ID NO: 113422 - DNA, 227 bp, Glycine max
agtttatcagcagatttgaagcacccttgatgagggagagagtcttccacttctcagcagagtctattgcaaaactgaaagcaaaggccaacatggaatccgataccacaaaaatctcttcattccagtcactatcagcacttgtttggagatccataactcgtgcatgctccctaccatatgagcaaagaacaagttgcaggttaaccgcaaacaatcgaacaaga

SEQ ID NO: 113423 - DNA, 232 bp, Glycine max
ggatattttatagacgctgttcttgtagctgatcacttgcgtgctctcagatttgattacgcatatattcgtacgctattatcgatgtcgcgatccgtgactattatgtctgatctgctttgtaaatacgtatgatgttagtcttcattgattttagtatttctctcagttcaaattgccaagaggcttgtcactctgcacactaattctcgtctcgattgtgtggatctag

SEQ ID NO: 113424 - DNA, 224 bp, Glycine max
tggagaatgttcaccttcatttacttccatcaatgaatcctgatgggtttagtttaaaaaagcgtggtaatgctaataatattgatctgaatcgggattttcctgaccaggtatatatatatatatattttaatagtaatctgtataaagtatgttgataaagttggtttaaggttgtggaggatgctttattcttctgctggacatggcttaagaatttggaa

SEQ ID NO: 113425 - DNA, 127 bp, Glycine max
tgctaccatggcatcaaatgaagacactgatggtaaagagggagaggcttttgtggcagcaaaacagcacaagcaatctgtgaaactcaatttgagacaccactcagtgagcaaagattcggagcct

SEQ ID NO: 113426 - DNA, 229 bp, Glycine max
cagaaaccgccatttctgtgcagaattcgaaaatagcaacacgctgatgtctctccgcgaggttttctccgatcaaatgataccgtccgatcagaaaccctaggagccggcgaggcgaggaacctatcgggcatgtacatcctaatcgcagcggcggcgggggcttaatggcgagcataatgttattgtcggaggctggtagtagtacactgcgttgcgggattttcct

SEQ ID NO: 113427 - DNA, 249 bp, Glycine max
ttgactcgagctcgagcctctcgagccgtaacttgtcactattttgagtatttgccacagggaaattggaacataagaagtatctctaagttttactgctgtattgttctaaatgtttggtatcatgttccagtatatttctggttacaatatacacaatctcattaagcccgttgtttaaactttccaggtttggaagaactatgaatgtgaggtatctgaatctggcatttgcaccacagttggcag

SEQ ID NO: 113428 - DNA, 253 bp, Glycine max
atctcatctcatagttgatttagtatttaattcctatgtagttgtttgtactttgttgtaatcatcaactcactcagttcccgtaggttgtcgtgattcatcacagcatattgtctctgaaattcagaaatgacatctgcaatggttcgtaggaacatcgccacccactactccaagtttgcttcttcttggtctttgttgtctcgccattcctcaatcctcaaccctctctctgtgtctttttcttcatttc

SEQ ID NO: 113429 - DNA, 247 bp, Glycine max
gtcaaattggtggtgcaggttctgatgattctgtccatgagttactacctgggactaaacatcatagccaggttcagaaaattatgcctgattctgctggcattgcttctgatgaaaagaaagaaagaagttttcttagaccgaaaggtgatacaaataatgttgtgataaaacaagtagagaggaaacgtagagctgtttgcctttttgatgatgacgacgacgacaaacctaaaactcctgttca

SEQ ID NO: 113430 - DNA, 297 bp, Glycine max
tatcgagcgaattcggctcgacggctcgagaactcaaatggtaccgatcgagtcgtgctgcccagaccatttatcatcaaccttttggatgtgtctgttttcaacaatacaagctgccctatttgcccttctttcagagtcggatcttcaagcatggattctacaatcacctttacagatatcatgttctttatatgcagtaagttccaagccactcagcaaaaagttcaattagtaattttttgttgtgtagtacaataccggcactgttaatcattagcaacttgaattattgtt

SEQ ID NO: 113431 - DNA, 320 bp, Glycine max
tgttggaatggtctaacagtgtgaaaaagttttaaacttgtatccaacaactatgaatggtcgtgggttgactttttggtaacttcaagtggtgttttgattattggttatttgttggctttggttgtgttgggttatgtttttctaccactatggctgtgattattcagaacaaaagaataaagaaagaaaggaaatgtttatacggatgcttcaatttctgaatgatttcacttattctttgttagagatcttattaaccagtcatatagacaaaatagtgtatatatggggggacatctttgtatgtatcctagtgg

SEQ ID NO: 113432 - DNA, 328 bp, Glycine max
cgtgagtgtggtggatgccgaaaacctaatcagaaaaaaaatcgtagttggaggcgccgcactccactccactccaatcaatcagatactagcgatggggaggaagcgaaaggtagcaccgaaatcttctgtatccgccgagcccccgctgaagcaacaccaaccaaaacccgaaaatgccgctcaggaatacgaagaagaggtcgaagaggaagttgaggaagaagaggtagaggaagaggtcgaagaggaagaagaagaagaggaggacaaagaagtgaacgctcctccaaccacaaagagtgacactgaagtttcattttcatct

SEQ ID NO: 113433 - DNA, 311 bp, Glycine max
ctgctcaagacgatttctggcccctcgaccaaaacttcaccacggtagaccgaccagggtccaagtctctttgagtctaccgagactcagctttcagtcacgtcaagtcagactggacagctcaacatcaccatgtcattgatcagttacttcagcgcggtcctgcccggtctttctgagcacgtaaattgcggctttgcctatcaccctctgctttcgccgcagcttggagagaaatccgttgacatggcgtgatgatactccttaccactaacgcggccagatctacacatctatagctcacctacagc

SEQ ID NO: 113434 - DNA, 317 bp, Glycine max
  unsure (1)..(317): unsure at all n locations
attcgagcgaatcggctgaccatgcaaaatgtttttattgacataattcaacttcatcacttccagttaaaattgattcataaccttttgatcagttttttccagaggctagcgaagttgactttgccagacaatcagtttttagtggatgttcttttaagttggactatttgacaaagccttcattttttgaagattttggctttgttgagaaaataaaaatgtcagacagggtgaagaccggagatgaacttttcttggttggctacccatattttaatgtcaatgaaatgctcgttgtnggaagactttataaa

SEQ ID NO: 113435 - DNA, 323 bp, Glycine max
  unsure (1)..(323): unsure at all n locations
ctcgagccgttttaaaacagctcaaccttggtgaaggaacacttatagatgtcaaaacagaagttaattacttcgaatctacagacccaataccggcaggagtctacaaattcataaagaacgaaaacccaacaaatcaaggaaatgctcctggaagtagtcaagctacaacaccagtaaaaaaacaaaactcttcgccctctacttcttccgtttcctcaaagacaaacaaagtcccttggggtacgatattcgaagccanaatcaaattatatgacaagagagccgatgaattcgataaggaagaactttctgatcaagtg

SEQ ID NO: 113436 - DNA, 295 bp, Glycine max
  unsure (1)..(295): unsure at all n locations
cggcgacagccattcggagggtctagcatctctcatcatctcggtncttttatcgtttctggctcgttcgtggggtatcggtttgtgtcgattctcgttctgtagggatttgtcatgcctatacgatcgccaattacactcttctttgatcattcagtgatttcttctcttagcacttcctatatcgatttcctcgttaggttttgccttggagaccttaatctcgtaaaaccagcggttcaattcagtgttccctagaatctagggtgtcgcttcgaaaatgcctccgaagacg

SEQ ID NO: 113437 - DNA, 302 bp, Glycine max
atggagacctgaactgaagaggcttgctaatgtttttctttcttatgtctgtaactttttcaccctttgtcccctttcacttgtgtacaatcaatcaggtggcaaagactggtaaaggaaagagagacccagtcattaaacaagaatagatgttcctccgtggagattttgtcatcattgttcttatctaaacgagattctgccatcattgttcaagtaaatggctatgtagacattctggcataaagttttgatgaggaccccgtgagttattaaatgaatttccggatatgtcatgtaaa

SEQ ID NO: 113438 - DNA, 338 bp, Glycine max
  unsure (1)..(338): unsure at all n locations
ttggagtgtccctctctaacaaggcgtttgacctaattgatagggctctatcttgagtcttatcagaagaattcaaacccatgacctctccttccctccttcccttcaacaattaagtcaaccttacaactcttaactgagaaattcttatcaatttcctttctgcatccagttctttttgtggtatatggaagagagtttcaaggtggaaaccttggtttcactctaacaaccttttgctctgcttcatttgtgctcaggaaatcttttcttaagaaagatgatatttctaaacaggactgactatttagaggtccgatttntttgttatattaaca

SEQ ID NO: 113439 - DNA, 341 bp, Glycine max
  unsure (1)..(341): unsure at all n locations
gaggaaagtccagtatgtcagcgtcgatcgcttcgactactggttctgggtcggacaacaagtctaggacttcatcctcctttatagagtttggagagtataacagtacccaggcggctctctttggtgatgctgctccctcacacagtagcggccacaggaagggtatggtcatcccacactcgcctatcgctagtctcgagcagtggctcggtagacagtcggacatcaccgctgtcgaaagcatggtcttctagattctcgcctcaattgtcgggcaggcaggcgattctaaacgaatgacgtctcctaggaaagaaggacggcgctganaagaagac

SEQ ID NO: 113440 - DNA, 320 bp, Glycine max
cctctatgttgtccaggcctgtagagaaggtccataatttattggagaacaacatgaacaacataagccatctggatcagttaagtgatgaagaaaggagcaagttaagggatttaagtaaacatacactggactcatggattgagatgacatcgggtacaaagaagatcatggagaagtattctgtgaatacttgcggctattgtcctgaggtccaggttggtcgcaaagaacataagttgagaatgtgcaaggcttcaaatcatcagtctcgaaatggtttacatgcatgataagaggcaacattaaatgatcttgtc

SEQ ID NO: 113441 - DNA, 333 bp, Glycine max
  unsure (1)..(333): unsure at all n locations
ctggctcatcttattaattacagatacccacgtctttattacagtttaaatcttctagcttctgataacccgattattgcatgcatcttgaagattctgcagtaagagtaagcacgctttcagttggagaaaaatactactataacggcgtagaacaatttgtatccaactgaaagcgtgcttactcttactgcagaatcttcaagatgcattgaataatcacgctatcagttggatacaaattgttctacgccgttatagtagtatatctctcttattntttcttggggacctcgaatatttatcgagagaactcttgtagatgcagtctca

SEQ ID NO: 113442 - DNA, 318 bp, Glycine max
  unsure (1)..(318): unsure at all n locations
cttgttcaagcggtatggcaacgagatggacattttgcttaagcatggagagaatatcttccggagtctgagatgggatctanacgacctggacccgcacgacgtttcgtgcagcaattggggactgtacgctttccgagggaagcgttacgaggcaacgaagaaagagaccgaagaagaggtgcacagcgaccgcaccgcgtaggtcacatgtgcaaacaagatgtaaatatggtcgtgtacattactgtagcaaactacgccaaggaatctggattgcgcttctgacgaagcaatcgtcactacctgctanaaaaa

SEQ ID NO: 113443 - DNA, 224 bp, Glycine max
agactatagtagtgtacaaaatgtggaagtcataacaataagatgcatgctctagcaaacagaaggttaaacataaaggaactttgaagactggggggtcaggatcacatactttagttttaaccttctgtttgctagagcatgcttcttattgttatgacttccacattttgtatagactatagtagtgtacatagcttgttttgtaaattgcaacgtttggt

SEQ ID NO: 113444 - DNA, 341 bp, Glycine max
gcaagatataaatgtgaatgccaattctacccataaagcagtgccctctatgggcgttaagacaactgagaatgatgatgatgatgtgcctcccggatttgggccaccagcggcccgagtggaggatgacctgccagagtttaatttttccggcagttcaaatccgtcacatttgggccaaaaatcaatgggaccaccaaatatggtcccattacactcggctaacccagccccaccacgccctgcagaacaaatgagggaacttgtgcacaaatatgggcaaaacaaaccaaatgtaccttcggtaaactggcaggataaatgtaggggacaatcaaccc

SEQ ID NO: 113445 - DNA, 338 bp, Glycine max
ggacgggttcgaagatcagggaagggtatgcctgattggcagcaaattgtgaaggagctaccaccaaaggaagcatttttaagcaagatagaaagatgagaagtattgttgagaattcagacggttcaaattttaattattattttttttcctgtcccaagtgtctcctggtatctccgtcgttggtaatgtcccacagcaatatttttcttggccattaaactaaacactgggcatccattcctccacgatcactacagactttttttttgggtataatgttttacactgagatttaaacctataacttcatgtatatttcaattcccaccactagg

SEQ ID NO: 113446 - DNA, 267 bp, Glycine max
ctaacattacttttaattaagcttcaataaacactcgcgcgtctgttcatgcatttatttacggatttctcttaccaaattaacggatcctgaaagattatttttcctccagaagaagaaaaacaattaattccgaactaggaattcgaacttatcaaacaatcacgaaactaacgcgtggctgataattatcgatcaccgaaatgcatacaaataatcagaaaagggaaaatacgaaacgaagatctcaaagagagagagagagag

SEQ ID NO: 113447 - DNA, 266 bp, Glycine max
catcaatcctctctaggaaccatctaccggcaacaggcggcgctgtacctgctcttcatgctgctgtacgtgctggccaccacgctgggggtctcttgggacgcacacgtcagtcgctactacatgtacggcgacgggtcagcgacgtctgtggcgcggattgtcctggaggcggcagtggtgctcatggatgccaagtacctgctagacgaggcgcggcagctgcagctgcacggcgttgtgcagtacatgacggggtacaactc

SEQ ID NO: 113448 - DNA, 269 bp, Glycine max
gcagacagtaaggttggtaatggataggtttgaggtcaagatgctgatgaaagtttactgaacttgtttgaggagctaaacatttccatattgtgctttttatgtcccaagtatggaatcatttatgttttacatgacattgtttatatgggaaaccaattctgctgtgatatctgaaataacttatacagtggatttttctctcttgttatgaagattttgttttcatttattaataattattgccagctatttgatcatgataagtt

SEQ ID NO: 113449 - DNA, 264 bp, Glycine max
cttagcttaaaaaacagggtagttagcctttggaaagcctcataagaaaggaccaaaaggggtgccgaataacccatctttggtcctcaacaatatatcatccttgtatgcaaaagctccattaatatgcatgtgacatgcttgatatctatatagaaaaagtgtcaccttgatttagagctttaggtagtgtgaaggaaaacttgggaaatggatgtgaagaagtactggttcggttcaagaagtcaaaggacacaaaacata

SEQ ID NO: 113450 - DNA, 266 bp, Glycine max
ctagaatgttcaaaattcagcaatttggttattcttgtcccctaaaggccaacatcgaatcttccatcttgcacacaacgctcctgcacgatcctgtcactaagtttcttgtgtgaataaaaagggagaggaagggagaataaaggataaatcctttgtttcttaatcttcattcaaaagttatgggagtctagttcagctggttgaaaaccctaattctctttgactactaactagtgtcagacagagcatccaaactttggaat

SEQ ID NO: 113451 - DNA, 263 bp, Glycine max
gaagaaggttgccgcacgcccaaacgcagcgcttgtcggatacccgcggcgatgtgtgtgtcctccgccgccgaagaagaagtcggcggcttacacggcgagacagagggtcccacccaagaacggttactttgtgccgccggaccttgagctcattttcagagttgcgccaacaagagaagcttttacttagttcatctaaaaattgctgtatacttactgtgaccctttagaaatgtagtcacaaatttaacagcatttta

SEQ ID NO: 113452 - DNA, 262 bp, Glycine max
cggctcgagccaattcctatcgcggaaataaaaccaaaaaaacttgttatttctgccatgctgtcctaaccgccatggcgccaccattcgcaacccaccacgccacagttattcgttggcattttttcaaaaaaccgccacatctttccgccatggctgtcatttgacaacactggtgaagaatagttcaagtgggctactaaattgcattggttatgattttgatattcagtatagaccaggaaaggagaatatagtggct

SEQ ID NO: 113453 - DNA, 262 bp, Glycine max
aaaagattgaaaaagtaaaccgtgaaaggaaatatcatcagcaaaacactgcatatgagcttaatgcgttgtccatgcaatggaaggagctttgtcagaagaatatagacatcagtgctgcctgtgcttcagttgaaaatcgcataaatgaattgaaaagaggagcagcagaaagaggctggaacttggaagctgtaactgaaaatggccaattggcaaaatccgaattatgagattcgtatgttctcatctagttttgtat

SEQ ID NO: 113454 - DNA, 256 bp, Glycine max
gttcattcattcatattttccactccctctttcgccactctcgaaatccgtgcactgatactcagagacaaagatgaaagagagaaggaagtgaaacgcaggacagccttgccgtttttgaaaggccgtaaacgacgaagcaaaacgcgttcgtaacagaagaaagaaagaaaagagtaactgacaactgtaccagtagaaaaatcatcgacggtatgctcatgactgtcactgcttcgtcgtttatttttttgtt

SEQ ID NO: 113455 - DNA, 255 bp, Glycine max
atattaatttactgaacagtgacaagttaaaaccaacatactaaatgtacaatgtatgatatccacctaaatggttaaaagaatgacttctgtaacaatcccagttgcataggtaacttatgtgacatgatgcaacggattgatgtattaacagattagtgtggagctgtggacccttctttaacgtgttgctaccatatggctgtaattgttggtgtttcaccattttcttgagctgttgtgatactaagattc

SEQ ID NO: 113456 - DNA, 254 bp, Glycine max
caataacaacatgcgtggtccttcggcagattgggcccaggcccaggcccaaagaattgataacaatgatggaggacttttggggtctcttactggtgccaccttaaactacagaagcaatattgtttcggatcagcgagtcaaggttactaataattcggattttcatggagaaaaaggaccggaatgtgttgtggctgtacgaagcgaaggtatggtcgaatcgtggattaattgttcttctgattgagagc

SEQ ID NO: 113457 - DNA, 243 bp, Glycine max
attactagttagtgctgacaaattggtgctacttatgagtggtaagaacaattttgtgtttagaagttagcatagagtgaaataaacgaatgtccaagttgtgttcttgtgttttagtcttagaaggtatggtaacaggagaaaagcagtggatgtttttttcttttggttcgttaaggatgtaagttacgtcaacggcatttggtatatcttatctgttctcaaaatgattctttagtaagc

SEQ ID NO: 113458 - DNA, 251 bp, Glycine max
aggttgacttagcatttgcttatttataaatgtcattgtgtttggaataatggtaataattaaaacatgtggttgattacttacaatttcccaggtatatataaaatagaacaaaattaaaggatgggaatagtactacaagaatcagaacttttccctagtggtaaaagcttctctacacctgcactctattattaatttctcatgcatgctaaaatctagtgcgataaagaacaggccatgtgtgaggt

SEQ ID NO: 113459 - DNA, 252 bp, Glycine max
aatcgagccgaatcggctcgagcgagctcgaggttcaacagcatcttgcgatgctagctcctctgtgctgcaaaaagggtctgaaacttgttcagaaatctccttaccacagtacaagttgtctatgattctgtcccagttgtggataataatgaaggcgggaggtaatctcttagtaggtccaactctttgaaggataagaaaccatggaagaaaggtcaattatcacaccatcaggtttctgtacaatct

SEQ ID NO: 113460 - DNA, 251 bp, Glycine max
ccgatgaaggttgaagacttctttaggtacttattctcagatgatgctctaaattttcttgagtcttttcgccaaaagtgtggtgataaagactttaggtgttctccgtggcatcctcaagagaatttgggtatgctcgtgaactgtcatttcaacatccaataaaaatttatcttggagcgaaatttggtggctgccatgaggtccagaaatttcgtgattataggaacagtcatttggttatcgagacg

SEQ ID NO: 113461 - DNA, 247 bp, Glycine max
ggaagcctctcgccgacgacaatttcgccgccgatccttcttcctccgacgtcttcagctccgtccagcgccattccgaggaccgccgcctccggctactcaagtctcagatcgccgccgctgagcggctgctgcggaagccacaccgagcagatcgaagcggcattccgacaacgaggaggacggcgatgccgagcctgaagccgaggtgaagaaggcgaacagaagaagccgaagaagccgaagt

SEQ ID NO: 113462 - DNA, 273 bp, Glycine max
atattttttttggttaattaattcataatcacctccttaaaaggaaaacatgaattttgtatatgtaatcacattttaaaatagcgtaatcatatattaattactgatgaaaaaaatgataattgtaaaacttaagtgattttctccctatttttttgttgtcatctcatcttgagttgttttgactttcaccagcaagaagtaaaacttatctttattaagcaaactatcacacacatcttgattcctgaatatttgttagcttgttttata

SEQ ID NO: 113463 - DNA, 284 bp, Glycine max
agaaaatctctaagttaggaaacatagatttctaggaaatgattgatagattatcgatccaactatccttattaaggaaagaaatcaaagaaaattttttgagttgtaattgatttgatgttttatccacttaacatgcgttgtagtatcggctcctagtcctttacaatcaacttcggcatatgaaattactcttacaaaaatttatttaaaaataaaataaaatgaaaaagattattaaaaaaattatgaatattattttttgaagtatactctaagagata

SEQ ID NO: 113464 - DNA, 134 bp, Glycine max
gaggagtaacaaagaatggattgtattccttggtcggacagacaattattgttgattctacaaatgttgtaactgatgataacacaaagttatggcaccacagattgacacatatctgtcaaaaagggttggaa

SEQ ID NO: 113465 - DNA, 278 bp, Glycine max
gccaattattatagaaattaattccagaagatgagaaggttgggaacttaatctaccagaattacttcttgatgtaacgttaatgatttttttctatttataattattctaatttacacctgcaactactaatatgttctaactttggtcccccgcatgaaagagcataatttatctattttctctctcaaatctctttgtagagctaaaatagtaaattgcattaagaatagaaatgtataacaaggtaatcaaatatcaacatatccttggccata

SEQ ID NO: 113466 - DNA, 280 bp, Glycine max
gtggaaactcggttgaactcgaaatggcgaaacttgaagcgaagctaggaatgatcgtggactcggtggggcagttcttctccggcaaagaccatcttccttattgtgactctgacgtcgtcgctgtatgtatcatcttcatattctcttttagggtttcaaatctcacaatttctcttttcaatcaattatgtatgtgtttaagtgtttgagattgcaattgaatgttgtgttgtgtgtgacactgcgctggcagggatgtgaaagagaggtattggag

SEQ ID NO: 113467 - DNA, 241 bp, Glycine max
gttcactggttagtatgttgaataattcagagtagatgccaaaataaatattagaggcttgtacaatgtgtcatacggcacacatggaactatatataaataaataaatacagaggctttatattcgcaacactgaggaggagggagtattcaggagtaaatagtaaatgaagattatcaggtagtaaggtcttgcatcagcaaatagagggagagcttattcaccagtagaagtgaagac

SEQ ID NO: 113468 - DNA, 185 bp, Glycine max
cggctcgagcggctcgagcggctcgagatcaatccaacgatggtgtaaactgatctctcctcatttaattaccttaactatgaaaaggactgtaataatgcagtacatctaatcggtgtacatgattgcaggcattgaagtcaggccagcttcctgcagatttattgttggataatgttgatgaa

SEQ ID NO: 113469 - DNA, 269 bp, Glycine max
gaaatgcagaaatatattctgtgtaattaactggatccctaattacaaattttgactttcattggcttcattagcttgtcaaatacactaaactactactctaacagttatagacttgtacaatttaacaatgtacactgactatatgtacactaaaaagtatttattgtctatgtcacagtagcaagatgtgcactaataagtctcattgcatcaaataatttccgtagatgcctatatgaacatgctgattgacacctggtgcttgt

SEQ ID NO: 113470 - DNA, 266 bp, Glycine max
caagtttgacagcaacacaacaagctgtaattctggcatattgtcttctaattgaaaagagctcccgacatgatgaattgcaacgatgggacatggccccttacattgaggcaattgattcccagcatttgttttacttcactatacggtgtttatgcgatgttttacgtattcgatgggagttatctcgtagccgaactaaggagcgtgccttactgatgatggataacttggttaaacatgttaagaatttctccagcaatagc

SEQ ID NO: 113471 - DNA, 244 bp, Glycine max
  unsure (1)..(244): unsure at all n locations
cacgtattacaaaatgcaataattttacttcttcggtgctactttaacaaataggataagcgacgtctgggggctgtaattgtagctatttnagtagaagtcttaaaggcggcaaaggaatcgtcaattatagattcgaacagttcaaatgccagtcaagaaaaagtgaccagcctaatatataaagaattgaggacatgcgtaaatactgtctcacttctgcatgttataatgcataccagtg

SEQ ID NO: 113472 - DNA, 101 bp, Glycine max
tgtcgatctagtgattaatgttggtgctgcaatttcgtctggtgatgttccattaaatgcagtgcagcttcttatgggtgaatcttatcatgggatactct

SEQ ID NO: 113473 - DNA, 188 bp, Glycine max
ttttcttaccatcaattcttgttctgtgtgtgtaggtgtgttcttttctgtatttaaatcaagttatcttgtttattttgcagagtatggatatatcaaatcctgcagccttagtcaatgcggaactgttgcaattctatgttggaagaagggtaggatcgtgggggaggttgtgcgatctgatgggg

SEQ ID NO: 113474 - DNA, 196 bp, Glycine max
aatatttcgtatgtctacttgttcttggtggtgttcgtgtgttgtgctttcaaagaaagttgatttattttgtgaaacgatgaatcgcattaccagtaatgcattcacccttggatattttattaatccccaccttagggttgtactacaccaaatgtgggaccttaaggaacttttcaaaattttggtttcgggg

SEQ ID NO: 113475 - DNA, 229 bp, Glycine max
cgaagatttgagaaacgagttgacgggtggtcatatctttaccaagtttagttctagtgtaagtaagcgagtcttgaaagtcagcttggactttactcggctcttgtggtatgatcctaaatggaaaaatcaaagtgatgccaagattgtcaaaacattgcccatcaagttggtcaaggatattgttcctggagcgtcaaccaataatttgaccaagaaacgttttttg

SEQ ID NO: 113476 - DNA, 279 bp, Glycine max
tgtttcctctaatggcactatatgttgctgcagtaatctacctaaccttcagaaaagacactgttaagacatatattgagacacagaatgaaccagcaatgcaaacccacatggaaaaggggtttatggctaatggtcaattagagttgagtcaagttccctacagagaagatttggctgatatcccactaccacaatagggtaccagctggtctataaattaaatgcatcaccaaaaggggtttttctttcaagtcattctaaaagtgaatgtaatat

SEQ ID NO: 113477 - DNA, 303 bp, Glycine max
cttttgtttctcacaaacggaattctgattggttggcggtggtaacgggtttggtgatagattcaataatcaaggtttagtatggcagattctttgatatccagaagtaaaagtgatgtaacggcaatgaaggcgacacttcgtacgcagcagcaacttctggaaaagctatatgctgagttggatgaggaaagagaagcgtcagctaccgcaacgagtgaagcattggacatgatactgcgtttgcagggagagaaggctgtggtgaagatggaggcgagtcactacaagagggtggcagag

SEQ ID NO: 113478 - DNA, 174 bp, Glycine max
agattggttgaagagtgctgttaaatacatcactgagatactttcgttttttgctagtcttcttctttacatgtgaatgagaggttctacatttgtacttatacagtttacgttggtggatgttcaccacattaatttcgattgttttatgaaggttttggtataatatgctaa

SEQ ID NO: 113479 - DNA, 245 bp, Glycine max
ctttatgattcatcgcctgccctttacacggcgccgttcttctctctcctcttcacatcgacggcggagacgcgattctcggaatctcggaagcggttgatactttgatcctcttcctcaacccttccctctttaaaagtttcacgtcacaatgcggagatacctcatttcccaaacaccacactctcgcaaacgcgcttctgattctttctgtttcagattaatcaatcctctgaactcttcgc

SEQ ID NO: 113480 - DNA, 259 bp, Glycine max
tcggctcgagggagggactagtgtggaaagtggaaacagaaagaaatgcgatcaacagtgagggatcacgggattgttcggaggatggcaagtctccctcgaagcataatggagtttataggaagaggaagaagaagaaatcagcacacaaattttcctttgcagcctcaagaccaccatcatgatccacaaccacatggtgcagtagtagttcaagatgaatggagttttctagagagttttgagcagcaatttggca

SEQ ID NO: 113481 - DNA, 189 bp, Glycine max
  unsure (1)..(189): unsure at all n locations
natgaaaaggacatggtgggacatcggatgccagcttcttgtagggttgtttttcttcatgctggatttggtggcaaatgatttgttgtttatataaaaaaaattgtcgttagacaggttcactgtaggaggaatgattggttgatccggcttttgctctgttagcttctatttcaactgccgtcgaaa

SEQ ID NO: 113482 - DNA, 181 bp, Glycine max
ctcacattttaccttaatttttttattagataacattgtttttgttgagggaggatattatggatatggaagctgcagccaagatgtttgagcacgaagatgggatattggatgagataaggaagcaaactaacagtgaccaaaacatgtatgcatatcctttgtcaaatatgtttcagag

SEQ ID NO: 113483 - DNA, 259 bp, Glycine max
  unsure (1)..(259): unsure at all n locations
tgtntttgcgggctggtacaaaacaaaagctttgatctggttttcttttgctttctattgaacatttgacacaattgatcttatggtcctatcagtttttgtttttattgtctgttgcatgaaacagaatgggtgctgatttcataagctgtatgtgactcatgtacccaaatgctttttggctttttgctttgataagtctagtgctaaagttcatagtggcaatttgggttgttgaagttgagcagtgttatgagaa

SEQ ID NO: 113484 - DNA, 125 bp, Glycine max
cggctcgagcggctcgagagcaaaggcaccaaaaaccctcactcgcatcagatggcgcagtctctcgagctagtgctgattcagttcctcatgcccgacaacgacgcccgccgtcaagccgagga

SEQ ID NO: 113485 - DNA, 139 bp, Glycine max
tcggctcgagtctctctcgctctttctcactctcctctgatatttctatatttcggtgctctgtgtctctatgatctggatccaacggtccaacatgatcggggcttgtgctgcatgtgttcccatgttcgagagctcc

SEQ ID NO: 113486 - DNA, 135 bp, Glycine max
ttcatcttgttctatctgtgatgagcatcatggcctcaagagcagtggtattgttcgctatatgtgtgcttccagcgctagctgtggccattcgcccagcatagaaccctgtttgcgcgaagggtcgtctctact

SEQ ID NO: 113487 - DNA, 340 bp, Glycine max
agagtctccaattagaaaagggcagaccttccaattaagtgtgtgactgaaatcaaattgaagaattacccctcaactcaccttcacttacacactctcaaacgtgactgcttctcttattttctcttcccctgaaccttgtgtttttacccgcgaattcaacgcgccgactgtgatagctgagaaacagatgataaaaaaaatgaacaaagtttaagatctgccacaagcaataacaatcaccataccaaatcagagtcaacctatgaatgctttgtaccataacagaattaacaagcctgaaattttcgccgccacagatagctggtttggtgatgtg

SEQ ID NO: 113488 - DNA, 177 bp, Glycine max
aagtctcagaagtgaggggcaaaatagtaatgtgggatggttcggtgcaggaaatagagcaacctttgacagtggcagagttgatgctggagcacccagagcaagttgtggttaagttgcattcagcagtgacgcagacaagggcaacaccattgccagcagatcacaagttagaga

SEQ ID NO: 113489 - DNA, 263 bp, Glycine max
cctagcatcccaaattttagaatcaaacaaacctcagtaccaagaatcctatgccttcacaaaccctaacatcgattcagatcgtttgttcgcacttcaatctccaagtgatagctcaatttgttggagaatataaagttgtggatgtaattgacttgtggatatcaacattgaaagttgtgtatcttcctgtgttggttggtgcatttcttagtcaatatgtccaatctattgtcaaatttggcatgcagttccgctgaaca

SEQ ID NO: 113490 - DNA, 216 bp, Glycine max
cttgatagttagtctctttggagcatagatctaaggtctgccaaatcatgaagggtgttaagatcatagtgtgtgttttgcaacaatggctaagttcgttactgctatgatcttcagcatctatgccatgtccatacttcaaacagtggtaatggctactattgatcaaggaagccacttgtatgacaacaagagtcaatatcgaagtggaagtgt

SEQ ID NO: 113491 - DNA, 266 bp, Glycine max
atgaaccagaaatagtgcaacagccttcgcttaattcatgtgctcagattgattcactgatgcggaatgtttaacttgataaatcctaacccaaatttctgtttgtaacatgaatttaccatgttgcagcaagttgggggtcgtttgtctgtatttggacatcccccttgcctgtaaattatcaacattgttttcaatttattgcgggtgattgtgacccattcactcgattgcatattttaacaaacaatatatcggattcttat

SEQ ID NO: 113492 - DNA, 147 bp, Glycine max
cttatacactcttctcctctatctaacatcacccaacaataatcatcgctgagaacaattagggtgttcaatttggggacataacaatcggggtgaactgtctagagcgcgtgtgctcgacatatggttgtcgatgatctgacgctg

SEQ ID NO: 113493 - DNA, 198 bp, Glycine max
atgcattcatctcatggctttcttcttcttccctcatcacaccttcttcaactgtttcaatctcaacatgccacagaagtatcagatagaagaagaagcaaacaagctttatgtttagagggtgcgcaagttgtttgttcttgtgtctttcctgcagcactctatgtgtttgttcagtgttcctcgaagatttgtatt

SEQ ID NO: 113494 - DNA, 255 bp, Glycine max
gcaacaacaaaacaaaagagatgttgaatctgttaagagaagaggtactattggtagtgcagaagtattattacgacctaagcatggtcgcattattcactataggagtaacatatttggcttcaaaagcttggaaaagagccacaacaaacaatagagaagaaatccctggcaggttgggattgccttttattggggaaactttttcttttctttcagccactaatagtacaagaggatgctatgattttgtca

SEQ ID NO: 113495 - DNA, 201 bp, Glycine max
  unsure (1)..(201): unsure at all n locations
gtgaacgagataacacagagagaaacaanacattgcttctttgaacttgatgctctttgcactgctaatacttgtgagttgtgatatcttgattagaggaatgttttccattaagtggagttattcacattacactcttgggctgttagtgcattgtagcacatgtccttccgcagtattgttcgtgatgtaagggatggg

SEQ ID NO: 113496 - DNA, 133 bp, Glycine max
ttttagtctcctgctactgcatctatctctcactttcagaatagcatgggatttggtataacaccatcacatagaagtacaaaagcgatgtgcagctgattccattgtgtagaagagagcagagagctataag

SEQ ID NO: 113497 - DNA, 262 bp, Glycine max
aagatttcacatagagctcaaggcattgtttcacttgcaagcagatggcatgcgctagtaacatgcacttctgattcatctaaactgagatattgtgctagtacagggagcttggaggctgcaaaacatttaaactcaatgtttttggattactcagaaagtgatctagagtcatcagattacattggtgtgccttcacatacccagttagcttcttatatgtcctcgcataacaagagacaagcctttggtacgtaataca

SEQ ID NO: 113498 - DNA, 165 bp, Glycine max
actttccccaaacaatggttggtttttgggtgcaatcaatgattggcacttctaattgctacaattttttcttcttttatttatttgtttatggatgattgttcaatgtagcgttttgttttacctgtattgtaagatttacacgatataacgttctcgttacaa

SEQ ID NO: 113499 - DNA, 256 bp, Glycine max
gaatgtttcccttgtttgtgtgaactaccttctagctaggctttccattctttccattgatctatctttctactttttggttgtcttcaacatgttttgtaccttaaattgagtctaggtccctatctcttgcttcatatgtatatttcaatagggtgtcatcgttgagaaatttcatctgtgggaagcctataacatgttgctaatataatttaagcacttgttggcaaacttgtaaatgatttcatagttttct

SEQ ID NO: 113500 - DNA, 257 bp, Glycine max
tgtttatcactatcacttccccttcctatctctgaagccattctcgttcattttgtctttttatcttctctttatctccctcaacaagattcctataaagttcgtagcggctttcacacaactttaagaatcattgtatggagccttgcaccaatcaactgacacctctttttaacgcagaaaatctcgtgaatccgtgatcgcaaacaaaacaatgtctcccccttctatgttaggcaaccgcaaagacggttctg

SEQ ID NO: 113501 - DNA, 256 bp, Glycine max
agtctgtgttgctttgtttgccgctttcttctctttctccgtagcaggatgtcatctgtcttagttgattagggacagttcattttacataacctgcgtcgtcaaatatttcaacatacacaaattatttggttgcatgccccattcatactacagtcaaggagtactggactattttctttataaaaatggagtacttgacttggtgaagattgtgaagcttgtagttccctgattcctgtgcggcactaaattt

SEQ ID NO: 113502 - DNA, 253 bp, Glycine max
acgaagcccatttcatgtttttgtagcgtctctgtcattctgcacgcactctgcaacaaaccactcaacaatggcttccaattccaaatcggagacttttctgcaacgaaatggttacgattttctgttgggatcaatcgctgctttctacgtactcaccgtgccttacactaaggtcgaagagagtttcaacgttcaggcaatgcacgatattctctatcaccggctgaatttagacaatgtgctttgcttg

SEQ ID NO: 113503 - DNA, 134 bp, Glycine max
caatatccggactctctgcatctaattccaaaattgtgaaaaacccagaagcagaaggagcaatggcagataagccaagtcgatccctggttttattcggtgatgggttagctcgtttcatcgattcatcgcac

SEQ ID NO: 113504 - DNA, 260 bp, Glycine max
gagagagagagcagaaataatattgattttttaattgaatggaagtaaacgttgtatcaagagggataattgtctaacctttgaagtagactcagccaaaggttcctcctcaagagggataattgtgcttcaaatccgttgtgcccctccatttgagttgattgatcagccattggattctcatcctcactcacttgctccatttcagctacatcaacagaatctccagtcttttcagatgcttcatgtgtgatttctgg

SEQ ID NO: 113505 - DNA, 254 bp, Glycine max
gctttcctcagatatgcagcatccgcaggaggatattggaagattgcatgagctggcaattctaattggaatcttcagacgaaatccttcaaatagatttttatgataccattgacgaatctatcatagggaagggttttgacgataaaatccttggtctcctcaaagttgcatgtgactgtgttaaaggatctttaaagcaaaggccaaagatggttgatatgcacaaaactataagagccatgtgggaaggc

SEQ ID NO: 113506 - DNA, 244 bp, Glycine max
aaacgacttaatagaaaaacgaaggaacaaactcaaagatgaaggtaaggtatgtggttaagaaaagagaatagagaaagaaagaagtgaaaatggcatcccatattccattaggattttattgttgttgttgttgttataaaaaagaaaagaaaagtggcgcacgggtgagtagtgagtagaagcataataataaccctgttagttgcgtgcgtgcgtgttaggggagagaaggataagagag

SEQ ID NO: 113507 - DNA, 251 bp, Glycine max
tgatgatgttataacttgtaagctttccctgttctacctttttcttttcgtactcataaaactacttttctgacatctcatcatattctgttctccgaaggtaacagctgcttcttctggttccattttgcatatctctatcttcatttgattttcaattttcttcatttggggaagtgggtaatgtttttcgtggcacccaattgcttgttttaaattctcactaccattttagtggctagagattgatc

SEQ ID NO: 113508 - DNA, 242 bp, Glycine max
agaaaaatcaccggccagtcatactttggatgatagttctggtttcgatagcatgccaggtcatgatatcttgaatttgactgatgcacctatcaatgagggccagacgggatgctcaccacatggaaatgttgatcgagagagtcaagagagacagaaatatatggtgagaaaggctgataagacctcatggaagaggaaacgaagtatggaaaacgctggaagaagactaggtgtgacct

SEQ ID NO: 113509 - DNA, 247 bp, Glycine max
attgtgatttatcagatggattttctgaagatcctttgcgtcatctcccacctagcaaggtgccacaccttcattgttttattcagaggaaattagcggttcacgacttccttcagcacaatcctattgtagagccaaggcccaacttggtcagaggaatcagggaagcattgctaaggcatctcacggctgttcttagcaatgatgatttggctactcatttcatgttgctgcatcttctatccaa

SEQ ID NO: 113510 - DNA, 245 bp, Glycine max
tggcatagttaaaaatctcatagttacagacagaaatcctgttgcactttaataaattaaatgaaaagatttttcaatgttgcattactgtacttgtccaaagaaatacatttctgacggagacattgtttggaatatatacactttcaggtgatgggtatggtttggatttcaaatgtctttcttctcgggtaatgagatgcatcaagttttgaagtacagtgagcagggatggacattgctgc

SEQ ID NO: 113511 - DNA, 248 bp, Glycine max
tagggaagatagtcaatggatgtttagtcggctggggaagcagtggtggagagttattgtttatttttctaacaggaacataatagtatttgaggcactgaagtttttgtggagcatttgtttgttgcatttggggggtttggagaactctgtggctcttccgctgttttctagataattttttatgcgaaagatatatcccaagtgttgaacggcttgagaagcggaacgggcaagtcagccaaagc

SEQ ID NO: 113512 - DNA, 238 bp, Glycine max
agtcgccttaggatgaaacggcttgggcggatttgctgccgaggaagttattgtcagaacagatccaacatgactggggggtgatgtataggaagattaagaacatgggtgtgttcaagtcaggtgaaggatttctcaaagaagtgcctcttcaggatgtgaggttgcataaggattccatccatagtagagcaaagcaaacaaatttggaatatctgttgatgttggatgtggacag

SEQ ID NO: 113513 - DNA, 247 bp, Glycine max
gaccattacaagtatatattacaaggttatctcttggttattttattgaatgttaaactttattatactactacctgcaatattattcagcttattcttatgaaattttattaaatattgtctatgtacattggttttttggtcttgtttcatgaatcatggttgaggttttacctgtttattgttgattgtttgtatttcctgcacataatacatacatgcatctgaaatatgaaaaaaattctaa

SEQ ID NO: 113514 - DNA, 239 bp, Glycine max
gtcccctctaatccccccttttctctccgaggcatatgaggtaatcaacctcgtcgttttggcatgtctccaagttaagctagcatggcttcctcttctttccatctttttctgttaatctctttgccattcttgtaggttctgcttcccttccgagggggtccttcaacgtcatttgagggaccctcgtcctttaatttagctattcttattcttattaattaatttagccaaagaga

SEQ ID NO: 113515 - DNA, 243 bp, Glycine max
atcaatggcaattatcatgttgaaaaggacatggtccactggctgcaaaagtcactctcagctaaggcagggatctctcacatgccatctccattaggaagtgattgctcatcaagatcaagtccaaaagtccaagtcacccattgcaggaaaaggttgaatcatttcacaaagtcaaaatcattgagaagtccagtgagtaagatactggaaaatagtgagatcaaatcaaatggcatagca

SEQ ID NO: 113516 - DNA, 276 bp, Glycine max
atgaggtccaattcaacactcagtcggttcatttaggcttcactcttcagacttagttgagcctcaccccttttggttggattcaattcatctcagtttggcgagcctaagccattctctcttgactgttttatccttcctagtcaaacaggacaactcacctattatgtgaatttggggcttattgttgttactgataccacataagagggaagaagtgatcctcaacattagcggtgcagttactccgatgccaaacgatgccccaacatgaat

SEQ ID NO: 113517 - DNA, 211 bp, Glycine max
gtactgaataggaaatgaacctgtgtaaaattatttagtgtctattttaagtttcagtttaccatggtgtccgcacaaaatgttaacaaaaacaaaattataatttatttttttatgtaataacatcaggatactataaaattgacattgtgaaaaaaaaaaaaaaaaaaaaaaaaaaaaaaaaaaaaggggggccccccaattttttccc

SEQ ID NO: 113518 - DNA, 281 bp, Glycine max
gtataaataatgtttgcgaatattgattcacaaatcacaaccagttctctatgctgaattcactagcaatgtattttccacatgtaagagtgaaaactagaaaatctgtgaaccataccaggcactacacattactgattagtagaattcaactcagcagattatatattgaaatctcccagagtcagagtacatggaggaatgatattccgccttggttggtatctagggaatggcacaccaaatactggctgcacaccatattctagttttctccttac

SEQ ID NO: 113519 - DNA, 273 bp, Glycine max
gtagaataagagtttaacggaaaattgggatttgggtcaacagctataaaccctaatcaactaactacaatttgcgttgctaaatggaacatcggaacacagaatcagaagctggagatgtttcttcagccacagcagttctccttggagctttagctcctggtgttaatgtccgtattttcactcagcgatctctcccatttttaatttttatactcttttttcattagatttttgtgattttattgttttttgattcagggtcctacatgg

SEQ ID NO: 113520 - DNA, 266 bp, Glycine max
ggaaaaacaaaaggcatgaggatgtgatgcccccatttttctagttttagttttatccacaagctttgttttgtgagttgaaactatgtatttgtaacctataaacccacacaactccaacctccaccacccctcatatcctcatatctttcactctttttccttttgttttgtccaagacactggcttctggagtttgagtgatagttctacacctatcataatgccattcaggagcattgtgcgtgagctcaaggagattggag

SEQ ID NO: 113521 - DNA, 270 bp, Glycine max
attgaattgaatttattgaactagagagagagagagagagagaagaaaaatggcatatgcacacggttttgctccaattttcaaattgggttttgtgttttcttctgtatcaccatcacaaaaaaaacaccctttggtgtatcctgcatcacactgtggatataccctcaaattctatgatggggtgttatctgccagatcctgcaagtacaaaaacccttcctttgtaaaacaaggttcaataagaggtttcagggctctgaaatcggt

SEQ ID NO: 113522 - DNA, 269 bp, Glycine max
tgttcacctatgaaaaagacagaaatgtctaccagagatgcctttttggtggagggagagaagaccagtgtgacgctggctggagatgcgtcatgcgtcgtgtgcgtgaacttcacacgctagggctcttcatggggttgcatgcggagatggttggagttgctgtgcatgtggacgacgtggtggtctttggtgattggtgacagtggtcgaaggtgagtttcgatgaaaaggcattgggaaatctgccaaataagggcagagcatcc

SEQ ID NO: 113523 - DNA, 264 bp, Glycine max
gtttttaatcaaggccatgcatggttgttgctgcagagaaagaaattaccattcttttatgactttttgtgattaattgattgtgtaggttgtcaacattgcacagtggaagggatatctgttgtaacataaaattccaattagaggaagctcctcctgtgtaagtctttcggggatttcgacttgcattttgtgtataataaaagatgaagaagttggaggtgcaaaaaaaaaaaaaaaaaaaaaaaaaaaaaaaaaaaaaga

SEQ ID NO: 113524 - DNA, 250 bp, Glycine max
aatataaaatgatgaattcagattttctttaatcactgtcagctatgctaataataagttattctccaaatactttggactttgaatgttatgttttctcgcagtgtacctatcactaattgagcttagcttcagatcaggccattccaagattgtaaatgcttttacaagagtaaggagtaataagaagggataatataaataaaaaagcattaatattttcatctgttgttaattctcatatatcata

SEQ ID NO: 113525 - DNA, 268 bp, Glycine max
gtccctttctgaaccacttaaagagtcaacagttgaaggccgagctgctctgttggcaaataacaaaatgcctcatccatttattttgatcaaacccaaggatgagcctgttgatgatataccagattatgagattccccttgcagtgattcctcctgactctccaatgggtgcagttgaaaagcaagatgtccatgacactgttgtatcacaatgcagagatgaagacgttgaacatgaagatgtttttccttcctcaaatgaagaa

SEQ ID NO: 113526 - DNA, 264 bp, Glycine max
agacagtaactactggtagttagttatgtattagaatctgtaggatggcagctatgtaataggagtatatatctgattgtagattgtgtaattgggcagtgtgaagttatttgtagtttgtggacagagaatacactctgtaggagacttttgtctctgggacagcaagtgtattgctgtatagtgtgtgattccagtgttctatatgatattttattatgttatcaattggtgttctatcaccttgggagattgagcttgaag

SEQ ID NO: 113527 - DNA, 260 bp, Glycine max
atcccctgcaaggctgtcacctagaaggggatctaaggcgtctaggtggagatggagaacgacctcttccaggagacaccttagatcccctagctggctgtcacctagaaggatgcgtggaaacccaggtcgaagacgttcacctccacctcctcccaggcgccgatcaccacctagacgactacgtagtcctcctagaaggtctccaattggtcgtagacgtactcgctctccaatacgtaggtctgcgcgctcacgct

SEQ ID NO: 113528 - DNA, 160 bp, Glycine max
ccattgctgaataagtgcagcaatgcccaaaaatttgaactagaaactttgaatctggatgcagatgatgatcagcttcctgagacatggaatagtaaagaacgaatctaatatgtgtcaggatttgtctagtagaaatccaaaccagaacatgaatttg

SEQ ID NO: 113529 - DNA, 157 bp, Glycine max
aaagtgagaacacaagatgggtatatatggagaaaacaattataactgcttataataaattaaattggcaatgtaatcgattatttcaagaaagtaatcgatgagatttcccatttaatcgattaaagtgttcttccccaaacctggaaagttttcg

SEQ ID NO: 113530 - DNA, 261 bp, Glycine max
aaaattagctcattgtgttgtgttatttattgttgtttttttctttttcgtgaggtggaaaatgatacggacggtgggtttttggtatccgttgaatgtgtatgggtggggaaagtggaggaaaagctgttagtgaactagtcttagctcttaggtatgtttggatacatttctccataaacactttaggtgaaaaaaaatagaaaataaaatgagttggacttctactataagctaatgttaaattttatataagctttc

SEQ ID NO: 113531 - DNA, 262 bp, Glycine max
ccaattctctgaaatcgtatccttcaaatgctgttttgcctttacaaagctatacaaatgagtatcaggtatcttgttcaggactctccggagttgccactggtgctacctcttcagaagtttgctctggtgcaaataatttttctttgcaagattttgcagttggacgtagtagcctttctctccctcatgatggtagacaacggtcaagtaatggttactcctgtaataaaaaggtgcgtgaaaatggaagaatggtaag

SEQ ID NO: 113532 - DNA, 263 bp, Glycine max
gcctgtgaagagaaatacctcaacagcaagacagaggagagcacccacacaggaaggtcgcacttgccatagctcgcgatcggcggtgcaccttgatatacctctgacagggccaaaatggctcaaagaggcatgggtggggcgacttagaaacccggccttattcaacagactcgaagaggaacttctgtgggatatcggaactaatatttcggtgaaatatatgggggacgacatggttctgctccttggactcacagatg

SEQ ID NO: 113533 - DNA, 265 bp, Glycine max
aaacttcggcaaaatcatgtatgcaattgtaactaggcccgggccgaaatgatatttcattcattgatgtaaaactgtaaatattagcttcattgaatttttgcccatgcgagttacaaattaatttcaccttgagcaatttgttgtattccgtgctataaatgccactaataaaagcactccttgtaaatatccgattttgttccaattggaatggtggtggtcattgttttgaaaaaaaaaaaaaaaaaaaaaaaaggggggg

SEQ ID NO: 113534 - DNA, 183 bp, Glycine max
ggtttttttaataaagttgcattgcatcaactacgtacctggattcttcccttcccagttagacctggattgtaattaatgacgtcgttgcatcatgacgttaccatatgtgtagcttggttgttatgattgtacgaatatgtgcagcagaatgcatattacaattcacaatacgattgaatc

SEQ ID NO: 113535 - DNA, 259 bp, Glycine max
tggtaaaatgttgttttataagttgtgtacaatgcattttctgtgcaatgattttgatttttaaattgctttattgatttattatgtataaatacataatcattcaattatatagaatatatttttgcctttgcattatttttaattatgtataaatatattatttctaaattatttgacttggtttttacatgttacatataaacctgtgtaggtgaaatccataccattcagtggaactggcaagcacaaatacagt

SEQ ID NO: 113536 - DNA, 251 bp, Glycine max
ctcgagccgaatcggctcgcgaactacatcgcgttcctcgccgattggccgcaaacagtgttgccggagtcttacagaccgtagtcccgattagctgaacggatggcgtggttgatattagagctcctctacaaggaggtccgcaactcaaacctagggttcatcctcggggagaattggttgacgaagcatgaattgaaggtgaaagagtatgcttccaagtacgagcgcgtgggaaggaaacgttttta

SEQ ID NO: 113537 - DNA, 256 bp, Glycine max
cgatatctgatattgtgagctcgcatggagttgcgacaatgggggcactgatcttcccccaccctgacatccgccgcccacctcccccttgctgaacttggttctgtacctcttctcggcggggttctcgctcctcatcatctaaaagttgaggcttttatggtgttggtgttcgtcggagggtgcagcagaataggcataagggctagaagcatgtgcggcgccgaagcgtggtagggtggcacgtcgagagtgg

SEQ ID NO: 113538 - DNA, 253 bp, Glycine max
aatttttaatctctccatattcccacgccacttattgtagttggcatattctgaagactctgcaaaatatataaaattacgttttaatctcgaattttacttttccaatgttttctcccttttttgttttgtagttatttatccgagttgttattggaaggcttactccaaattagctgatttgattattaaagttgtaattcactgggggtgaaatctttgtaagaggttgaagaacctggttccgggtatt

SEQ ID NO: 113539 - DNA, 252 bp, Glycine max
tttattctttatgttatgaattaatttcttgatcttgtcctcaccagtgacaaccaatgaacatacgtgatgaactgagaatgggaacaaaccatattgtttgcttaaattagcttaattgattgagcggtgtgcaagagttgttcttaatctcctaatacctgaattcaatttctatggataaaaagaaaattaatgttgccgagtgttgagagtaaagtagaatagttaataaattggatgcataacaga

SEQ ID NO: 113540 - DNA, 255 bp, Glycine max
gagaaatccttggtgacggggaaacactgggggagaatttattctctttgttctgtttcagcttgaatcttttctctatttctatcttgggttcctattgctaacactgactggtcttggaatcagagaaatacataacataaaattagaccaaagggcttgtgtggtcttgaacttgcaacaaatagttgatattgattttataagacactggacttccaaaggaaattgctaagcagatagttaccttattat

SEQ ID NO: 113541 - DNA, 253 bp, Glycine max
gttagacttcgtcacctcactcaccactcaccactcaccactcgccaatacacttcctcagaggtcaattatcgcgcgactcggtaaaatatttcttgcacactctcaatttgctgccattattttcgcatatgaattgctactttcaccctttgtttcgtgttagttagggttgtggattttgagagtggctttgatttaattctagcactagttgcagagagctgcatggtgaatacaaaacgatggttca

SEQ ID NO: 113542 - DNA, 245 bp, Glycine max
gtaaaataataaatgatataacctaggagagagcttgtatgaaagaatagaatgacatgcggcaattagggttataacagagaactgtatgatctttttgaattttccagctcaggaattgtattcttgagaaacaaaagtgaaaactcaccactccacgggcaacactggtatacaagtaattggggagtaagtaattatgggatgacatctcttgaatctcaatgaaatgtaaaccctgcata

SEQ ID NO: 113543 - DNA, 248 bp, Glycine max
gttcctccaccacgaacacacacgccctttccttccttcatcacctcgcgctaacctgcgccccctgcttaaattgcgcactccttctttatcccattctttcctcagattcggaaaaaaaaagctttccggtgctggggagcctagggttagggtttctgagagatgtgggatgttccatgcattgatgagccttatcgcgcgctgttggaagccgttcgggcacggtgacgacgccgtaatgccgc

SEQ ID NO: 113544 - DNA, 258 bp, Glycine max
cccaactactcttcttgatggctttttgataaggctgtatgtggcaccaaggaatggtttagacatttttatttgtttgatgttgaaggtggaggccaaagccacatctcagctgcttgattttcccctaatttctagccgccagaagaggacttgatattgctggtgttcctttgagaaaatactctaccggtgctggaagtgttcttgacatggtatctcctttgacacgacaacctttttctcccatctctttaa

SEQ ID NO: 113545 - DNA, 251 bp, Glycine max
gatcaagtcaaccggctcttagaacgctctgataggtcaaaaggaatgaaaaagtatactgccgtagacaaatggaacacacaacttaaatctctttaccaaactatcagcaacagagttggttaaaccgtggtgtctaacgggagagttatctgttttattgtccccgctgcagttttgttatgtgaattaatgtatctattatggagagttagggatgtgtattgcaccaatagtgaaccaaagcgaga

SEQ ID NO: 113546 - DNA, 260 bp, Glycine max
gctagaaataagggtatgaaagcttcggagcaggattactttgaacagctttcaagctcattcaggtgcttagtggatttgatcccagctgaaaaatgtaagtttgatggggtgaacgacaaagtggtagtggatgcagctaatggggttggtggagtgaaacttaaatatttagggaaattgttgaatggtttgattattgaggttcggaacagcagtgaagatggaggtgtactgaatgatggagttggtgctgatta

SEQ ID NO: 113547 - DNA, 261 bp, Glycine max
agctcaccagcttcatccactgcttttttggtttctctccctttggtggtgccttcccctttgaggaggagagagttgcaaagtttgttttaagattcattcttgctttttcagcttccatataatttccctctttttccattgggggggctcctattccttttttgtgcttagtttttttttattacttttcaaaattttctttgctgctcagaatcagggaaaaggtggatttttgatttttaaaaaaaagttttgttt

SEQ ID NO: 113548 - DNA, 252 bp, Glycine max
ggagaaaggagagctgtcatcacatggacttgtctttctcttactctgacggggtccttccttttcttcttctccttcatattttctctctcaccattctcttcttcttctccctttcttagattctccctcttttctctctgccctccgccatgactgaggataaggagatgtcttcctctgtcaccaatggcgatgattccctcactggtcacatcatatctacaactattggaggcaaaaatggggaac

SEQ ID NO: 113549 - DNA, 243 bp, Glycine max
acaaaacaacgatggcaagccaattatataccttagtggacaaggattcttaccttcacgccctgttgctaatgagattggggatatcctcaagagtcattatactgatccctggtcatcatggaagaagataccaattatcacaagagacttgtggctcggagagtttttgagaaagttttctatttgtccaccggattacaattgggcaaaaaagaattttgaaatacaaggtgcagcaat

SEQ ID NO: 113550 - DNA, 130 bp, Glycine max
ctctgttctcgttttgtacaatatctttgttggtttcagatcagggacacaaaggaagatattttacaaaacgagaacagagtccctacattagaggatcagaatatctttctttgtttcttagatctgc

SEQ ID NO: 113551 - DNA, 131 bp, Glycine max
tgtaattacctaaacggcgtcgctactcccttacccattctctcagccatcgttgttcctttcaaccattctctccctcacctaaatggctcacgcacctcaacctcacgcaccttacctaaattttggtt

SEQ ID NO: 113552 - DNA, 211 bp, Glycine max
ctcggaattatgctcgagctcgagccgtgacaactagcaccatcacgtataacatggtgaaattcaggccaggaatcacgtcactttgtgtttttctttctcaacatctacagctgcatctccgtaatagagagcctcatgatggttgtagcttcacttgttccaattatttcttcttgatcatagtaaatgaaatctcaattatttcttc

SEQ ID NO: 113553 - DNA, 250 bp, Glycine max
actaaacatatacctcaccttatctcgtctttgccttttcatgtttttgtttatcggtttgattctaatgcaatgatatctcatcatgattgtcctagcaggtgacaaaaaaacagatgaggaggttgtggttgtgaatgcatcatcatggattgatgacaggtttgattttgaccctgaggagtgcaatgttgcaaatgggaaatgggtgtttaaccattcaataaagcctctctactcagacataagc

SEQ ID NO: 113554 - DNA, 246 bp, Glycine max
accatgttcattattcccattgtctacgtttactgtttataactgaatctaagacaacataaatttaacatcgtgtttctcgttttgatcttgttcctgtggttagagtttagaatttgaagtagtagctgcattccatttttctccccttggaagcacgaggtgaaacagatggcattgactttgaaagaggaagacgcagctgactgggtttacagaggggaaggagcagttaatcttgtgctc

SEQ ID NO: 113555 - DNA, 265 bp, Glycine max
caatctcagcatatgaatgcatgaataagagagaaagtgcaaatttaaggaaattccagctgcttgcttcagatgttgtgtctgtttttgatcttctccttcgttaccaatctccgatgatttctctctcagtaaaatccaaaggaaaaaccaaaaataacatcaaaactttttcatccatttcaatttccttctctgatttgcttactcttcagattgccattttgcttctgatttttgggtcgtaccttcatacccttttctc

SEQ ID NO: 113556 - DNA, 170 bp, Glycine max
cccgccactactcctctgaccgatggcgccgcgtctcttgtcatgcttccgcaacaagcacgccggcgggtgcagccaccacgacgagggcatgcggcgcatcatcggatgtgtcggctgctgtggtgaccgaatgagcagtattggggtgtgttctgcgtgtggatgtt

SEQ ID NO: 113557 - DNA, 242 bp, Glycine max
gagaaagtgaaagaaattgtggagattaagcaacgcagtcgtggcagaagagaatcagaaaacaatggaagttttgaaagaaagggaacaggcactgcaagatcagttgcagcatgccaaagacagtgtttctactatgcagaaattgcatgaactcgcacaaaaccagttgtttgaactctgcgcccaatctgaggaagagagggcatctaagcaatcagaggtcaatcttctgatggatg

SEQ ID NO: 113558 - DNA, 247 bp, Glycine max
gatcaggagatataatgatacatcatatctcgttgttttattacacctagcttcttcgccttgggtttggtacagaactgccgatgatgacattgaagaatcagtaccatttgatttgctggatgatgatgatccttggatcagaaccactgattttactcctagtggggcaattggtcgatgcaatttttatagaatttcaatcccacctcgccatggtgcgaaattgatgaaggccatgctttat

SEQ ID NO: 113559 - DNA, 239 bp, Glycine max
tgtgcttctcgcacggaattctgcgttttcttttccaccacaaacgcgttttacaatcaagagaatttcgcacatcgtaacaagccaattcatttaaagtaggtatgctcctctgtcatttaacatttcttagacttagactcaataattgctcatcacttggcagattcaccaataccatttatattttctgtaggttgctcacacttacagttctagttcaattcaattcttcacca

SEQ ID NO: 113560 - DNA, 226 bp, Glycine max
gtacattgggacatggctaaattttttagcacatgtacttgttaatggttagcttagatttgatcacatttggtcctggagttcattttagttttacaacagctactctccaggaccaaatgtgatcaaatctaagctaaccattaacaagtacatgtggtcctggagattagctgttgtaaaactagaatgaactccgttgcaaaaatggtcaattcttttggcc

SEQ ID NO: 113561 - DNA, 276 bp, Glycine max
attttgctctagctttgcaagcctcttcttcatctaaaaatagtaggacttgctttaatgtcaaagctttgaacttgaattctttgaattataatgccaatattgctagtgaaactgaaattaggagtgtaaatgcaaagggtaaggaaatttcagctttggatagggatgattggaatggtaagtttttcccttgtgatgatgagctttctagcattgattatagtaaggagttaactgtgagtgcttctcctttggtggatgatgagaaggcaa

SEQ ID NO: 113562 - DNA, 269 bp, Glycine max
ctcctttaccttctcttcatgagcttcgaaatccctctcgctttcagagccgaaaacggggtcgttttcctcaccgacgcattgcccatgcccatgccactcatgctcgaagaatcacgcaacagtgtcaaaatcagagcacccacagggttaaagttggagaaagtttccaccttgaggttcaacgagagcttcacggagggttcggagctgcacaaggtggcgcggcaccgtgggttgccggggagaagctctggggggaagtggag

SEQ ID NO: 113563 - DNA, 271 bp, Glycine max
ctcgagccgaatcggctcgagcacctgtttcgtgcaaaaacaattactgttgtctctccacagtccctccctcacattctcactctagctttttagagagagagagagaagaagaagaagacatggagatcaagaagaggtttggggtgttgatgtgtgcagaggattcggagtacgtgaaaaaagtgtacggagggtattctggggttttcgtgaaaatgctggcggaggaacggaaacatgggacgtgtacaaggtggcgcgtggggag

SEQ ID NO: 113564 - DNA, 271 bp, Glycine max
gtcaagttgacttgtctaagatattgaaccgccaagcttatgataccgcacgtgccacacaattagaggcattgttagaagaaagtcgttctttgtctaccaaaaagcttcatgatagtgacgtgagaaccatatgcatttgtgagacacggatgattaattttgataagactcggatatggcttgaggagattctctgggagaagaaatatgatatggatgtataccgttgcaaaggagtgttaagtgttcaaaattctgatcaacttca

SEQ ID NO: 113565 - DNA, 269 bp, Glycine max
cgagctcgagaattttatgaggacaatgacaatggagcccacacttcccatgttgaaaagagttcctgatgtctgtcagaaaaatgagtgcccaagattgggagaatggattgcagaaaaaattaatgaattcaaatactaagtaatttcaacaagcagcgatgggagctgatatttgtttcatgactttcattataaaggccatacatcagatggcaaatatatgcaatggaatatgactatgatcaaggtcctgtctgtaatgatga

SEQ ID NO: 113566 - DNA, 191 bp, Glycine max
gttccacaacattgatgagcagcagaatttttagccctggcctgatcatcagcaacaccagttttattgattaatgaaactggtgttgctgatgatcaggccagggccaaaaatcaataaaaaaaatctcaaaattgttgattttggacactataaaatgatttgaggttgaagaaaagttatgaaaagta

SEQ ID NO: 113567 - DNA, 270 bp, Glycine max
ataattgttgcttgtcaaaacaacaaattgaatgagaaagttgatgatcttgttcaggtatatgaaacagtggagaaaatgttattggatcctgaagaagctctaaagatgattaggcagacagaggaatcaacaatggttaccggtgaaccaaggagcccgtttaggacgcttagccttatctttggaggcaaagataaattattgaggaagtctgtctcaaaagatcagacaaacgacgaagagaagtcaggtcggcagtcattctct

SEQ ID NO: 113568 - DNA, 270 bp, Glycine max
aacggctttgcctgcaagattttgcacgaattgatggatggtttttgccaaattcaagttccaaattatcaccattttcccaaagtgagtttggaagaacagaatctggtgccataatattcactgacattaacatgataagtggtatggaacagaccagttttctatttcagcaagcttctaaggtcagcttccaagcaggtcaaaatccttacaacgtaacaagtctttttctcgccgtgaaggaactcgaaaagtgtttgtcatttt

SEQ ID NO: 113569 - DNA, 213 bp, Glycine max
caccgaccaggttctgtcaattctatttcgcgaattgaccaacaaccaagagaaaatggttttcctcggcaacaacgagcagaacctggtggtggctgcgccgaggaagctatgcggttacatgccggaggcgaagaaagtggcgttgcagaagctcgaggacgtgctactggagccgccaagagcgtcttcagggaagtcacgaaagtactt

SEQ ID NO: 113570 - DNA, 256 bp, Glycine max
ctttacttcattttaggaaatgggtcttaaacaactgcggtcaacccttgccaattttgaattctcgtgtaactgaaactgcttctgctgcggaagcttctttctttgggggccacaaggattctcgtgtaactaaactccaatgatgaacaaaactcttctcacttatttctacttgttcatctacattttgctttcttctggagtcattttgtacaacaaggttgtcactcctgttaaaatgacatttgaaatt

SEQ ID NO: 113571 - DNA, 258 bp, Glycine max
gcccaatctgtgagtaatgggagtttgcctgtgatgtttggatattcacctgttcagcttcctatgttggagaaggacaactcatggggtttggtttctcgtcctcaacagttacacccttcctttgttggcagaggtccaactaactcagctgcactacaagtaatctcaaacaatatatccgaggccatgccttatgaaggaaggccgttagaacgaaccaaaggagacggtaaacagcgtgtcactgaagaaggc

SEQ ID NO: 113572 - DNA, 257 bp, Glycine max
gaggaagtggtgtatgaaactgaaaagaattttgctgatgagaagcctgcaggcgaggaagatgcacctgaaggtgtgactttgtgacatttttgtctttaattactttgtattaagctccatgaataaccaatttcttctcctaacgtgtgaaaaaaacctgcctccaatatttataatttgtaaggttattagttgcttctattctaaccttttaccattttggtggcctaacaaacagaaatttaatttagtaa

SEQ ID NO: 113573 - DNA, 251 bp, Glycine max
tgcacgacacagacggcaactaacctgcacgcgccgtcgtcgtcgctatgacccaaccccaagatcccttctcttaccctcccattgacccagtcaacttcgatctcatcatcgtcggcaccgccctatcggaatccgtcatcgccgctgccgcctccgccgtcggcaaaaccatcctccacctcgaccccaactccttctacggaagcaatcggttctctctccctccagaacttcacttcctacctctt

SEQ ID NO: 113574 - DNA, 248 bp, Glycine max
ggttttgatttgcctggccaccaattgggggcggtagatcaaaatcaagttctttcatttttacacttttgagtttttccaacctgaaatctctctcttctggggttggatgctcgttccaaaacatccaatccagaaccacaataactttcaaaactttttcttcctgtgttgccttcaacgttagttctaattcatttacaacaccaagaatacatcatttgattgattcaaacattgtcctggag

SEQ ID NO: 113575 - DNA, 253 bp, Glycine max
ctccttgtcagggaagatctgaagcagcgctagtagtcacgtcctgtaatggacgcatactcctccggcgaagaagtggttgttaaggttagacttattgtggtggtatatggggaaagtttctcgtgaaagggagttagtaaagttttgtactgttgtctgatgattagttaagtggctttttgcagacgagaaaaccatatacaatcactacgcaaagggaacggttgacagaagaggagcataataagtt

SEQ ID NO: 113576 - DNA, 256 bp, Glycine max
atttactctctccactctctttgtgtctcccaaggtgctgtgttgtgttgcttggtgcaattaaagctttctactttctacctcaaatctctatagcctaatattctacccgctgaggtgagtcttatattttattttatctccaagggaacctgctagtagtctcatttccattgaatatgaattcctaccaatttttttcttatccttttctctgtggtttttccctatgaaaaaagtgattactaaactattc

SEQ ID NO: 113577 - DNA, 120 bp, Glycine max
caccattcaagctgatgaaaaaaaaaaaaagctgattacggaaaactctactaattctaataagtcaggttccacgacagattattacccctgaacgcagatatggtgcgcaagttgcaa

SEQ ID NO: 113578 - DNA, 255 bp, Glycine max
aaacagttctccaccgtgttgtttcaccagttatagcaccgtgaagttcatgagcatgaacatattggactgcacgcactataccagtgtgtttaacacggataatttgaagggtgttggccctttggactgggtttatgggatcaagctttctttcagtgtgcctgatactggatgtcaaagttgcaaagaatctggtgggacatgtggctttgatactgatacggaaggtttgctttgtctttgctcaagttc

SEQ ID NO: 113579 - DNA, 254 bp, Glycine max
tagtaaatgacaccaaattccaggtcttagacatatgagtaaagactatgaagatatatagttataataatggggtccttgggtaattctttgtgactttaatgctattctttatgattatgaaaagaaaagtggatctaaaaatgtaactcatagggaaactcaagcttttcgtgggcagtaaaaataagtaacttgatcttgtacaaatcttcattgttttgagcttgataatgtcaggtaagtacgttatt

SEQ ID NO: 113580 - DNA, 251 bp, Glycine max
ctcgagcgaattcggctcgaggtacccgtgagccatgcaccgacagttggattacatctcttagttttgtccgtggaaggagctttttccgcagcatttggcagggcgtgacgtgagggcgattttgctcacaccgatatctagagtggtccagctccaaacccgaacgaggctgcagtacgcaacaagaagaagcacagtcgtttagggagaaagagagaaaaaaaggctaaaggtacacctacatacac

SEQ ID NO: 113581 - DNA, 263 bp, Glycine max
tcgaactggtgcacaggcaccacgagcgcttctccggcggcggcggtgacgtggatcaggtcgaagcggtgaagggtttcgtaaacagggacggcctgcggcggcagaggatgaatcagaggtggggtgttagtaattacgacagaagaagaaaaggcttggaaacaacgacgacgacggaggtggaaatgccgatgcgcgcggggcgcacgatgccctcggcgagtacttcaccgaggtcaaggtcgggagccccgggcaac

SEQ ID NO: 113582 - DNA, 254 bp, Glycine max
aggggagcttatgcagtaagtgtgaccactgaccactatgatctcttttgagtttatagatctattttgataaatgtcagtttccttctcaatgtaacaaactcaacacaaaaccagggattaggcttgcatgggaaactaagctgatttaatatggtatttgtgggggagcttgtgcagtaagtgtgaccactgaccattatgatctcttctgagttcataggtctattttgataaatgtgtcagtttccttc

SEQ ID NO: 113583 - DNA, 252 bp, Glycine max
aggaaattgctacctttgcttctggcaaagagatttccgagttggctaatcacgtgtcactctattcaggatgttcacaccatggacaccaaatattattggccaagagattgataaaagatggaactaatctttggaaggtgatgtctccaaacaatcaccacattccttgggagaatgcagtgtatgagattcaagagcaattcatgaagattgcttcttgttgttcaagatctctctcacctcaggacc

SEQ ID NO: 113584 - DNA, 100 bp, Glycine max
gctcgcgagattcgcgctctcaggtcttccaatgtggtgcttcttcgtgggttgggagtgccttagttttctaagcctgcacagcctgatgcattgtaac

SEQ ID NO: 113585 - DNA, 240 bp, Glycine max
tgagagtggatgcagttggtaatgttgatgttaaggtcaatgttgttgcaagcgaaagtgaaacagaggcaattgaaaatttttcgtgcacctgtgaagtagttgatgtcaagtgtgataaccgtgcttctgaaggactaagcggtgacaaagagacagctggcaagtctcctgccattcgcatgtcgtcggactatgtaatagcaacagatagacccccaatcttgggggcttttgaaa

SEQ ID NO: 113586 - DNA, 251 bp, Glycine max
caaagatatcattgttttgtggaggaggaggattgaacatgtaccctggtgctgaagtttttccaatcatgaatcatcatcatcaaccatggtctatgactatgccacatcatcatcaccatcatcaggttcatgacccttttcttgtccctccccaaccttcaccctatgcaagcttgttcaacagaagaggtccttctcttcatcagtttgcatatgatcatcatggttcatcttctgaccatcttagg

SEQ ID NO: 113587 - DNA, 240 bp, Glycine max
atcaattcatcatactcactgtcccaaattcctcttaggtcccaacccagttactatgattccatctgataccgttaatttatgctcgattatttcgcagttatgtcagagttcgtggcccttgtctgttggaacaactctgtcagcttctgtgttgctcgtatctgatatcctttgtgatgcttaagtagcatggtgtctctatggtgatatctttgaatatagggtgttggttgtgac

SEQ ID NO: 113588 - DNA, 251 bp, Glycine max
ccgtaacggcgtccaaaggggaagcgccaagttcgatcgcccgctcaagccccgcccccgcccctcttccccctctccgggatccgcccttcgccgccccaacgccgccgccagaaacggcgacgccggtgagtcccctccaaaacctagacagacacaaatagagtgtgtagtgtgttttgtagagagagtgtaatgaagctctaactagtaagtatctacgattaggacgccataatgaagctcgctag

SEQ ID NO: 113589 - DNA, 252 bp, Glycine max
gcactttggtaaggtgagagaataggaaaaagggaaatatggcatttgcaggaacaactcagaacgtgcaaccaaggtatatgatccctttgtgtgagctttaaatagaggggaagagcagaacaaatgaagaagagaggagataaggatcatataccttggttgcactttggtaaggtgagagaataggaaaaagggaaatatggcatttgcaggaacaactcagaagtgcatggcttgtgacataacagt

SEQ ID NO: 113590 - DNA, 250 bp, Glycine max
gaatcttctcagcatcaagctacaagtgtaccaataaaaattaagtccaatagtcttatttttgagccaccaaaggatagtctcacaattgcagagcagaatagggatgcaaatgttggtgcactttctacagcaaaggggaatggagcagctgttcaggtgcttaaaaagcctactggtgcttttggggcactcctggggagttctgcttcaaagaggaagcttggtcctggtaagggcaaggaagaga

SEQ ID NO: 113591 - DNA, 242 bp, Glycine max
tgcatcatctatctatctatctccctttccttctctcccaaagctaaacactaaatcaaaaaccatcctttagctccatcgcttgtcgttgtccttatcccggctttcttgtcttcaatcgctttcaaagatcatttgaattgaagcaaaatggggagtcatatgagcaagaagatccctgagacttcttcgattggcctcagcaccgacttgcactaaaatactgagttgagttcctatga

SEQ ID NO: 113592 - DNA, 263 bp, Glycine max
ttgactccagatcatgaactcaacaagaatccaaggatatcagacacaataccagatacggtaatcggactcactgggttttcaactactggatgcgatacggaagcagctcgatatattgatgagtgccaaccgtatcggcgaagtccgagtcgtcaatcgcaagtgactacgatcgtgacggctgtcgtctctacctcgacggtctctggactcacgaactctcccaggtcctgaaaatggatataggccctggcactaag

SEQ ID NO: 113593 - DNA, 256 bp, Glycine max
agcgatccagagcctgagcttatcccttaagagaaatcctctctcttatccatttcccatttggcttgctatgagtcatccatcccattcttctatgaccctatgaagtgtaaaatctttcatggctgtgagagacaactccctctgttggagcgtagcagtcaaaacccttggaatttacattcgaaaactgatcaagatgtgtaatatcaacaaatcaaccatgctccgccctgttagggttccgaaatggcag

SEQ ID NO: 113594 - DNA, 250 bp, Glycine max
ccttactgcttcctactgttctaaaagcaaaatcaatgacaccaacttctgctctccaatatctatgtaacttcctagaacgttcttttttgtaaaattaagtctttgcctatgttgatcttaatggagtgtgcgttagttttctcttctcctttaatatttgcctcgcttccatgttatataccttcaaattgagtgatggcaccaagagtttcgagtttagaagcagcccagaaagccataaactcaa

SEQ ID NO: 113595 - DNA, 278 bp, Glycine max
ttttgataataggttggacagattaaagaaaaatacatataagagaaatgctacaacaactacaacagccttatctgtctaagtgaggtttgctatatggatcccatgatatatttgggcttgattaataaccaaattttcaaggatattattcaccatgagatccccttttacagtttcttccagtgtccttcgtggtttccctctatatcactttaaatgaggttaaaaatcattttatctactatccttaggggttctaatataaattagaattg

SEQ ID NO: 113596 - DNA, 275 bp, Glycine max
gtcagattgacactttcttaaactttcaagagcttgctttcgcgtttctctttctgtgtgttgacattcatctctcattcctttatctcttcctcgattttgtgttcaaggttagtgaaccttttctatttggaatcaaagtcttcaactttggctatttggagaccaaaagcaatgctgcctttgttcttctcagtggctttctctgctgttcctttgatcctctatattccaccactcagaagcttaaacctctttgtagagaccattgaaga

SEQ ID NO: 113597 - DNA, 272 bp, Glycine max
atgtgaactaaatttttaaccagcttctttggcaggcttgcatttacatcatacaacaaacgtaatcaattctattctgttacttttattctcttaaaacacacctttctttgaagctacttgatggagtttttctgttgaatttatagaacatactttgtgtcgaagctataaaacagcaggtttcacagttttacctaagatcatccaacagtcatcatggttaaacataacctccactaaaccatagggatattatagaatttctgcca

SEQ ID NO: 113598 - DNA, 260 bp, Glycine max
ctttatgttattttatttattttctatttttatgcttgcagttgcgtcaatgtgccttgtttagtaaaccttgtgaatttttaattaggttggaactcttgctatacttgactcgctgttgaagtcaagactttatttaattatgcataatatttaatttaaccctctgatactgctttctttctagtacggacaaaagcttgtccaatgtgtttgtcttataataattgcctgtttgtgtctttctagttttttcatga

SEQ ID NO: 113599 - DNA, 267 bp, Glycine max
gggaaagatactgagtctgatgtgctgactaattttgataaggatcttggaattcggtttagctcggccttgaactattttgtccgggttggctacattcttcatttgatacttgttttccctgttattcatttctcgctgcgccaaacagtggatgcgctagtgtttgagggatcacatcctctatcagaaagtaggaagagatctctggggttgactgtggttctgttggtcctcatatatattggctctaccatgattccaagc

SEQ ID NO: 113600 - DNA, 264 bp, Glycine max
agaaaacacaaagtgtgctcactttattgttttctcaatgtcttcgtttacgggtgcacgttccaaagcaaatgctaactctgaaatgaccaaagctaacgacactaacctttgccccatcaacacaagtaccattacatcaacctcgccagatacaagtgccaagaatgataagaaaaagaagtctatccttccaaagattttcggatcaaagcgaaatgggagaggttcagacgaagagacactcaaatcatcaagtgcaga

SEQ ID NO: 113601 - DNA, 264 bp, Glycine max
gtgctggtagcaacccattagaaatacatgggactgtatacactgtaatatgtatagattgtggatattccttttgccggagcttgtttcaggaccagttgaaggcccttaatccaaagtgggcagaagcaattgataacttggaccatggaaaccctggatcagataagagctttggcatgaaacaaagacctgatggtgatattgagattgatgaaagattttgggaggaggattttatcatcccaacttgtcacaagtgca

SEQ ID NO: 113602 - DNA, 262 bp, Glycine max
ttgacatcctaaaactaagtaggccttttctagacaggctgaagatgtctcttcacgggatctgaaaccaatgcaacttactgatgaggcatttccaggtggtcctgaagatgtctcttcacaagatctgaagccaatgcaacttactgatgaagcgtttccaggtggtcctcaagacttgtccttgcttagatcctttaggaaccatgttgccacacgcctatggataggagaggaccgtcacgagttgaaggtggttaat

SEQ ID NO: 113603 - DNA, 261 bp, Glycine max
agctctcactctcactctcactccacataatataaatttctggttacaactcaacaagtccacaaacattttccaatctcaaatctctcatacttcttacgccacatacacccttctcttcatttctcactctccggaacatttttttttttaaaaaagaaaaggggaaaatagaaagaaaagaaaaagggagaaggagtgagaataacatgaacaaacaactcacgctgctctgtctctttatcctcttctcatttctca

SEQ ID NO: 113604 - DNA, 240 bp, Glycine max
ctcactccatatatatcaccaccctcaaccaaaccatagtggctcaagcactctatagcatatacttgcctttgtgaaattgaaaagatgaaaaaaccaaacactagtactagtggttcaccaaaacttgatcgcaaaactatcgaaaggaaccgcaggattcacatgaaatctctctgcttcaagcttgtttccactattccttccaatgacctcaaacccaccaaggacatgctttcc

SEQ ID NO: 113605 - DNA, 234 bp, Glycine max
cggcaaacctggccgccgacgccttttgaacaacaacgttcttggccacgactactttgaccttcccgaatgggttgatgatcaagttggtgttcgcaaactcctacatatgactggacggaaacgcatggcccatgtggttgttgcaaaggatggcagtggaaatttcaccaccatcaatgaagcattgaagcacgtgcccaagaaaaacctaaggccatttgttatctacgt

SEQ ID NO: 113606 - DNA, 224 bp, Glycine max
acatggcatagtattttgctattcaccaatcaccatcttcagtcactgtttttatagctaggggaataatataactaatacatatttggaggactggattatgtaccaaatagaactcagtttgacatgtccaagagcaaattatttaattcagaactggaggaatgaattttaatttgatatgatgtctgtctattattggtaacatttgcatgttaaaagaa

SEQ ID NO: 113607 - DNA, 236 bp, Glycine max
caattccctccccttccgttcgatgttcattttctccactctctcctcagatctactttctctgcatcgcatccatgccttctcattctcgcatcctcaaccaccgccatcgctctctccctctccacctctctcgccgcaaacgcctctctctccctccaaccacgtccctcgtctactctccccgttcccgcttcgattgcgctagtctcgagttacatccgttgattattccg

SEQ ID NO: 113608 - DNA, 236 bp, Glycine max
ggaataaagtcctccaagattctccttaatttctaaattaaaggattaaaacaagaaattactcgcgagtattacttaataatataccttaacctcgcaaaatatcaaacttatcttacaacatttcttttcacatctatcaaagaacataattgatgtataaaatatttagaagatcattatagtgttgcgggtatgtttaagtgtgaagtatcttttcaataaaaacaattatt

SEQ ID NO: 113609 - DNA, 232 bp, Glycine max
aattgattacaaaagtttatgtagaaggctagacagagaattggacaaactcactatggaatatgaaaggcagcagaaggtatttgaggatgatattgaaagattgaccacagaagcacaacattgcatattagaggcccaacagaattattcggattcgttggagaaggaaagattgaaataccagaaagactataaagaatcaattaagaggcttgaagagaaggtaatg

SEQ ID NO: 113610 - DNA, 259 bp, Glycine max
cttgaaagccaaaacaaaacaaacggggttttggaaatggaacgagaaaatctaaactgggaaaagaaatgaaagcttaagcctttgagtctgagagagaagagtggggactggagaatgaatagggagtgttggcgaagtagatctgaaaggtgaagaatttgagtaggtaaaacccaaagttttcaactttgaatcaaagggtcatcaaatgctttaacgttttggttttttctgccttccgacactctaagaaaat

SEQ ID NO: 113611 - DNA, 257 bp, Glycine max
catcaggctataacaattttcgagggtactaatactattacccattaacaattagtggatgataatattttgttcataaactcacgtgtgggatttgaaatgtgaatgcatcaatttgtgtttgtattattttttttttaattttaattgaagggagctagtggcaaatcatggtcttaatagatgagttcaagattaatgagtttatggtactcttcgctgtcttgatttgggtatgattgtgtgtgtctgtgaaa

SEQ ID NO: 113612 - DNA, 137 bp, Glycine max
tatgcagataaggcgtacatagagtttcatgatgaatgctggggagttcctgcttatgatgacaagtaagttctaagcactgaatagtactcccttcattttaattcatgagctttttaaaagttttaagattttat

SEQ ID NO: 113613 - DNA, 136 bp, Glycine max
cttaaatcttcgcgtccagcaacttcattaccaaaccaaagaaggtttaggaagtgtagaagacttgttctctaacaatggcattggcaagggttgctagggccaacctgataagatcaggaggtgcttttggcag

SEQ ID NO: 113614 - DNA, 235 bp, Glycine max
atcggaggacaccaaatctcacgagttaactgagactcatgtgagttcgatgaacaagaggttggttctcaagttgccagatcgtgatatatccaggtccacaagtggttttggcgaccatgctgaggtggttggctcatcatcaaaaactggacaagaagctaccgatttgaatggggacgcgccgccatctagtgattcggctgtattgttctgggaggtacgagttgccctg

SEQ ID NO: 113615 - DNA, 256 bp, Glycine max
gcgttctgtgggtttgagaccttttgttggcttcactattctgatggtatcatttggcactacgagactcagtatgcacccatagagtacttcaaaaccaagatttccatgaagaacatatagtatgagatgctcagtagtacctctagctatacgttggagttgtaatgttatgtagcattacattagatgcagtgcgtaggtctgtaggtgcagaaagttattagggtaagaaaggaacaaaagtaaggtacgt

SEQ ID NO: 113616 - DNA, 102 bp, Glycine max
gcaaatcatccttggatgttcctttactaccgcagtggaatcaccatgaggagacagccaatatagcctctcatcattctaccagaaatgctactgtatccc

SEQ ID NO: 113617 - DNA, 256 bp, Glycine max
gtccaataccatggcacaaatggtcaaggcagtgcgcatgatccttgggctagaatcctttggccctacaccaaagaagccattaaatgaatgcttggatattgaaattgaggacgatgaaccaaaacgaaaaccatctttggaagagattgatgccttggaggtacacaccctttacatttatttaattagtattttgatttctcctcttcaagttttattttctgctgtggaattaaaacatatgttgtctact

SEQ ID NO: 113618 - DNA, 233 bp, Glycine max
tagacatcacttttattaaacctttcagttttgttgtagttcaaatactctgtttgtttagctaatacactgtatttacatacactatttgtgtttagttggtcttgccttgactactgatacttattagaaggcaaatataggagtcactcacttttgtgcctgattgtgcacatagttggttatcgtgtccaagtgcacgactagattagacatgctaacatttgctgagt

SEQ ID NO: 113619 - DNA, 243 bp, Glycine max
ctctctcccctgttcccccttctccttttctctatcaggtactctattgtaatgagcttttgtttgtgcaacatcattatcctttcctcaatcttgtagctgaggtgacattatatatttagctcagcatcactactggtttctcgaacctaagcagcgaaggagatgtgtggctgattcaattctaaagggaccagaaacaagcacatctgaatttcagttgttaatttaccatgtatacga

SEQ ID NO: 113620 - DNA, 247 bp, Glycine max
gggacggagtatcagggctccatttatgacgctggaccaacctttgagtcctatggagttccccatggctccgccgatttggttaaggctgttcctgatgatcacaagaaatttcttgctgatttggtttgggtccatgaagaggacgatgtctttgtgaacactgatgatggagttaaatgctgcaaattgattgctgttcatgctggtttggagaaaggaaaagatgtgaaagagcattaaaact

SEQ ID NO: 113621 - DNA, 244 bp, Glycine max
gctgaattcagctatggagatgctgtggtcactaagaatactcttgtaagtgatcatcagtcacaacaacgtctaatgattacagagcccaaacaggttcgtggaagggctgattctagacatggtcaagcgaagagaatttagttcatggagatgctatggtcactaaaaatcccattggaagtgatcaatgtctcaggattacagagctgaaacgggttcttggaaattctgattctagaaa

SEQ ID NO: 113622 - DNA, 243 bp, Glycine max
cgaagatgctttgggattgtttcgtagcatgggagagtgggggtgttaccctaatgagactacttttcttgttttgattaggagtctgtatcaggctgctaggttggaagagggggatgagatgattgataggatgaggtctgctgggtttggtgagtttctagataagaaggcttactatcagctcctcaagattttgtgtggcattgagagggttgatcatgctttgagtgttctgctatg

SEQ ID NO: 113623 - DNA, 152 bp, Glycine max
acgtacaggtagcctaagcgaccttcgtcattacaaagacttgaattaaacttcctaaggcttatcccgaatgccaagacccagcaacatgtcctcgtggcccaaagtttgaaccaccagggctactcttctggttactctgttggtaatac

SEQ ID NO: 113624 - DNA, 241 bp, Glycine max
cttggttgcataacttctgtagaagctggcatcaataacaaggtgaaccttttgagaacaatgctctcttgggaagagcaattgcgctctgaagtaagtttcatgcaagcaaagcatgatgcaaagctttatgatcttcatggttctcttggggaagtggtaattatatgttggcctcatggtgaaattttgaggttaaaggcgggtagcactgctactgatgctgctcaaagattggttt

SEQ ID NO: 113625 - DNA, 129 bp, Glycine max
aaagaaaaccacacaccacacattgacaaataaacgtgcaaacttatgtgtgcataattttcttatgtatgcttaagttttgtaattggatgctatctagtttttcatatctaatagggtgttgtgtca

SEQ ID NO: 113626 - DNA, 235 bp, Glycine max
caagaagcttacccgtttcggcggtttccggtggcgcacgaagaggaaatggaccaatctaatgccgctggtcgtcgccctcgtcgtcgttgcggagatcgcgtttctcggaaggctcgacatggccaagaacgccgagatggttgacaccctcgctgtcttcttctaccgccctcgcgcagtggttgaaggcgacgatttggggctgggtacggtgggttgtggcgcggcggta

SEQ ID NO: 113627 - DNA, 257 bp, Glycine max
gttcaggatcaagtaaacgtgcaccccaatttaagtctctgatttgtctctccacagatcacaacaacgctctcacgcactagtttgaccacttcgctgtttgcacttttggttcctcaccgatccacacaggttggagacacggagtggcagcagaaaaaaaataaaaataaaaaagctaccttttttatttattttgtgttgggggatgggaaaaagtgacccttatatttatataacggtaatttggaaatgag

SEQ ID NO: 113628 - DNA, 251 bp, Glycine max
ttgaaaactcctcctcatcctcacccccaggaggtatggggaagatagaaaaaaacaaaaacaccttattgacatcaccttttctatcatccttcaagtcatcatcttcttcctcttcttctttgatgatggctaccctcctggtcattctcttggccttgttttctccttcactaggccttcccttagcatctttccaaccaaaagacaatttcctcattgattgtggtgctgaaaacacagtgactctc

SEQ ID NO: 113629 - DNA, 167 bp, Glycine max
ctcattgacagggaagaaatataatgcatttaattcaatatggtttgatggtttcgttattttttcgaagactaggaaatcactgcatcatttaatagatattcagtcacgccgagagtttcccaaagtttcaaaatgggaagccaaggttaaataaaattttggct

SEQ ID NO: 113630 - DNA, 252 bp, Glycine max
gagaaattcaaacaacacaacaaaacctcgagaagtaaaccaatttcaaaatccacaccattctcattccccttctccttctgtactttccgttacgaacttgcctaaaagcaactaaatgcttcaacttcactaacgctatagtatcgtgtcaacaatgccaatgcatcaccatcttcttcttcttccccttctcttctctcttgtttctccgatgacctccctcaactccgacggcctctccctgttagc

SEQ ID NO: 113631 - DNA, 250 bp, Glycine max
aatttatcatcgcagcccattattttcagaggtcattcagatggcatatccagtttctccatttggggccaagatgttatttcaatttcccggaatagaattgggcttctctccttgtctaaatctcccaatgaaacagatgggcagcatcacattagccctcagaaactatatgtttctgataatggtcagagaagcttgtcagcgttatcaagtattagtatacttccattctctcgattgtttctca

SEQ ID NO: 113632 - DNA, 249 bp, Glycine max
gtttacaaccccaaacagctaggaaagaaggtaatttggtgggtgaaaaagttagataaagagacgctcctagctactgttttatttagttggatgtttgcttctttgttgggaccctgttgtgttggttcacgtgacaaagaacgtagcaacataatctgtgagcatgcaagacatgatctgctggattgacaaactatgttagcacgaactgtttggatctattttttgaggaaatatggtttaatt

SEQ ID NO: 113633 - DNA, 250 bp, Glycine max
gtctccatccataaaaactaataacctaagccaccggcttgatggacactggaacttgctatcctgcgcatgaaaatagtcccatctttttgttttgtttttgtttttgttttttttgtttttatcggcaagtattagttagttttagtcccatctaagtacatctttttctttctttccttttcttttattgaaaagaaattgaaagagaagaaatgatagatgatgtatatataaaagcattgatacc

SEQ ID NO: 113634 - DNA, 243 bp, Glycine max
tgaagatgaagaacaggtggaaattgagaatttgaatgctagggtcagtgatgttgatgataaaggagacaatcagactagactgtctgaaacagctgatcgatctgttcaggaagctttagaatccggtgctactcaacatgcaagtgatgatgaccttgtcgagagttcttcagccattgcacctgggtatgtacccagtgaacttgatgaaagaattgttcttgagctaccgtcatcaat

SEQ ID NO: 113635 - DNA, 176 bp, Glycine max
ctttcatgtgtattgcaaatttcagaatgctttaggaatatatgtgactgttgtttaacttttttttaccatgtgcaatgtaaaatccctatgaagttatgttgttccacacaagattgatatagcttgactcaatatttttcatgctggtattttgtgtgcgttaaatttccatt

SEQ ID NO: 113636 - DNA, 275 bp, Glycine max
attttggttcatttttattttttttgtgaaattagaacagctaaaattttggctatagattactttggctcttagaaattagaataatactatcaaaacatttcttttctgtatacttacgcctggacttttgaactggttcaaagcccacatggtgcatagaaaccaagatgttcaagcagcacaagcttggtatatgggagctgttaatttctttattgttcctctgacagtttggcatcagaaaatttatgatacaagtctggtggacttgg

SEQ ID NO: 113637 - DNA, 266 bp, Glycine max
tgagtttacatgcttagttctgaacgtggatgtccctttcataatatctccctctttatttccaagaaccttcaactctatctccaccttaaaaggttagggtaaaataatatagttgacaacttgacacaatgggatgattattgaagaagctgaagggagcacccttctggccttctagccctttattctccttcccctgaaccctttttcttatttatttttttcacaacacccatctctcccaaatgcttatcttgatttga

SEQ ID NO: 113638 - DNA, 203 bp, Glycine max
ggaagcagatgctgttgtttcagtattgggtgaaatggatgcatggatactttgtggctttttccttcaaggaggtcgttacactattggaggcatacactatgttgatgattctgatacgcttgttcctgcaggggacactgagtttgccaaagctgcttcctttggctacaaatcttcaaacctgcgtgattgggtagagg

SEQ ID NO: 113639 - DNA, 266 bp, Glycine max
caacaaccttgtcctcaaggttgaaatttgggaattggctttggatgaaaatatcatttttccaagtcacattctcaactagactatccttccacttgatcaagccttgtcaggctgtagcacccattttgtgacacttctttggcctaaaacggcctctggttcaatgtcagtattagttggaattaccttaacttagcctttcttaattgtaagacgtgaaaaattggatggattgaagactatgatggaagttggaatttgta

SEQ ID NO: 113640 - DNA, 270 bp, Glycine max
gaatgcagcaagcgtgtttggttgggggggttagtattcttgagacttgcggaatacagttccatggtggtggagtgtttcttttcgagttatgcaggatgtgggagtagtgatgtttccattactgagctctgcaaactttaggcttgatttgctatagattatcatgtttattgatagatatcatcaaatggatgattaagttggatttaccatgcctataatgatatgataagtagactaattaaagctgcatgcaattatttattg

SEQ ID NO: 113641 - DNA, 261 bp, Glycine max
aatggaaattgattgctttgtgttgatctcgcacaattagaacccagaaactgattgcagcatgtttttgcttttatgatgatcatgcgttttatgatctttccttgcgtgtgtgtgttcctttctaattttgaactttcgatcatggatttatttaaaattctttaatttgccgacatatcgtgaacgattgtggaatcagtgatttttttccatcaatccatggaattcgtctgaatccatgttagcattcggctttca

SEQ ID NO: 113642 - DNA, 264 bp, Glycine max
gagattattgccacttttttctgttttgtgtatagtttgaattcagatctgcaacatgcatgcttcttcggttgttccaaagtgctataatttgtgattttcttggcttggaatcggttgagtaagcataatcgactaagcatgtaagcataatcgattaagctcaaacaaaccgattacgcatgtaagcataatcgattaagctcaaacataaaccgattactatctgtataattactaattagtattttgagtgaatactaa

SEQ ID NO: 113643 - DNA, 261 bp, Glycine max
gagagtcggtctaagaggtaggaacaaaatgaggagtgtagagcgaagatttggcagataaatgagtgaatattgtcattcatggttaatctgatttgcatggtttgaattttgaaaaaatattatttttttttgttcttttcttatcctgaggttcagttatttcgtgtaaatctcagacatgcaagcaatttgaattgaaaaaataatccgggatctttagattctcttctctctcatcatcttcggtctttgctgaat

SEQ ID NO: 113644 - DNA, 243 bp, Glycine max
tagagttggatgctttactttcgttgtcaggtttatgtgaatcttgtagtgtgaatagatttcacactgtttctgttctctctagtttcctatctttttttaacactccttggaatttataatgatggcatgcaaagtattctccctgctatcttagcagaaagaataatattaactgagtttgaataatttgaggactaaatcatacacccaaataaatcaggggtcaaaattaccagctag

SEQ ID NO: 113645 - DNA, 256 bp, Glycine max
aaaaaccttggcccgcatgatcggttgatccatgtttatcatttcttgaaagacacaactcaaaatcaggtgttttcctctaaatctgtctaatatattaatatttttttctttctaaaattactaccttaaaattttttctaacatttgtactttcttttcttttgtgttggtgttttttgaaaacagcagcaagttcagaactttggacatcctttttattggttatccatgagggtgagacattaactgaagt

SEQ ID NO: 113646 - DNA, 257 bp, Glycine max
gagcataaaagaatttcaattatttaaaatttctccctcatccaatcacacttttaatgaacgtggcaattcaattgtgcgtttcagcatccaattttttaattgatgaaaggtgcgaggtgttctacgaatgctgcaagggttttctggtcccccattcttttgggataaaaatgcaaacattttccgtgcaaagagcggagtgtacgttagtcattctcacagaaaagtcttcactctctgctcaatcagtttat

SEQ ID NO: 113647 - DNA, 255 bp, Glycine max
ctggagtatataaaacatgatgacttaatattaagaatttttcaacgtgtcgaaaaacaaactctacaaaagatcctgaccgatgatgggactcccaatgtagctgcaataagtgggctgtatcatgaaattagtcaacgtggggcaaggacttgttagcttctgaagtgaaagagttgttatttggaacaaaattaaatgacacaaatatcaaagaggaacagatagcagacatgttaaaagtttttgaccgaa

SEQ ID NO: 113648 - DNA, 250 bp, Glycine max
atacgctatgtattttcagacaagacaggaacactaacagaaaacaaaatggaattccagagggctagtgtgcatgggaagaattacgggagctccttgcctatggttgataatacagcagcggaagatgttattcctaaacggaaatggaagctcaaatctgaaattgcagttgattctgaactgatgacattgttgcagaaagactcaaatagagaagaaaaaattgctgcaaatgagttttttctta

SEQ ID NO: 113649 - DNA, 254 bp, Glycine max
cgttagtggactgatgtattaatccccaagtacatgtcaatcaggcacagagtcaccatgcatatagtttagttttgttttctggaaccaattattatttattggtactgactcattatgtaggcactggaatattcaacggtgatttgaagttagtgactcagcagcaatttgaagtacaggatcaagcacgccaccgttctcatgactctgggcaccaacattctttgagactaccaccttcgagtccctat

SEQ ID NO: 113650 - DNA, 136 bp, Glycine max
gagctacagcaccattatcattcatctccattactttcctattcgatcctcgatccctctcccacatagaagattcatcaccccaaaacccaatttttttttaataatacaactgcaattatttttattttctagt

SEQ ID NO: 113651 - DNA, 125 bp, Glycine max
gcaacaaccaacgatgttacttaagtcgcagcactgaagaggttccaaaactttcttatggcacgttgcataataccgcaaatacgaaggatcataataacacaaggtctcaatgtgtgtccgag

SEQ ID NO: 113652 - DNA, 254 bp, Glycine max
cagctcgagtcttaatttcataacaaaagaaatatcattcatttgtgctactagcagctactatctatatctatatgtgcacaatagagcttctccaaatactctgaaaacctactccaaattttgcatgctacctgacaactaagaaacgtgctgctgtcctataatttgaactacttatcactgtcaattaattcagagttcagcagagtgccccaacatgctgaaaaagggaaatggggtgcctgcttatt

SEQ ID NO: 113653 - DNA, 239 bp, Glycine max
caaaattgtaagctacttgaggagaaaaatttactacttgggagtgttttggagctcaaagatgcaaagtttgctgctgaacaagagaatagtgtaatcctccatgaggcactggctctaaaaaaccttagtttggtctatgagagctttttcactgagaaggtcttggaacagcgtgcacttgctgaacatctcagcgatcttcactctgtgaacagtgaccttaaacaggagcttgt

SEQ ID NO: 113654 - DNA, 237 bp, Glycine max
cgagaacattatccaagaataggtgtgctgaaatttctggcgtgcagaagaccaataatcagaccataaagtttttaccgttttcaaatgataggcgtaaaaatggccttaacacattcaacactttcccacgaatgtttcagagggctggttcagctcagtttagaaggcctctccttcatttggtgtccactcaagaatcaaggcacaggtacctcacccaatgtgttccccttc

SEQ ID NO: 113655 - DNA, 243 bp, Glycine max
tcctcgtgtgcgtgaaaacgaagcaacgccacacgatggtgttctacttcaaagcgcgccctgaagccggcgatttcaccatcttcatgggcctcgacaagttcgagaacgaggaactcatcagatacggttttcccgaagatatcaggttccctactgttcgtgaggctgcatctagtaaagacaaaattacagagaatgctagcaaaaataggctgaagaagagaattttggctgacattt

SEQ ID NO: 113656 - DNA, 243 bp, Glycine max
gtctttgtttcttgttgagtaacaactcaacctgtgacagtttcaaatgagtgaagcaacggcaagattcgaacggcgggtcctggtggcggtggacgaaggcgaggagagcatgtacgctctttcttggagcctcaggaacgtaattttccaaaatcccatatagtacttagttgcagcttttcaattcttcttcttctcatgagttctactctttcttggaaagtgcttttgaattctgtt

SEQ ID NO: 113657 - DNA, 241 bp, Glycine max
ccgattcattaacttcacacacagacacggtgtctccaccacaccatagcatatagtactagtagattaaacgccacagaccatattcacacacttcgcatcggaaacccctcaaaatgtttaaaatgggtgattaaagagacttcacttttgggattgagcgaatccaagaagcttctagtacatgcttctgattccaatttaaatggtggcttggaagttcatccaaaacaaagttcta

SEQ ID NO: 113658 - DNA, 237 bp, Glycine max
tgaagaaggtgtgttgaggagggaatcaaaggaatcttttgaagggtgaagagagtaaagaggtgaagtgttggtgggttttgctcagatttcttctctctgttgaggatcatgaaattgaagtagatatacttgacaggtttgaatagtagggaatgggttatgctgcagttgaagttgctgttttcccagatgcggattacttagacttttaggggatgttattctgattagtga

SEQ ID NO: 113659 - DNA, 238 bp, Glycine max
cgacggtgaaacttgttttccttgcgcgaagtttggcattcccccaatcgcttcatcctcatctacttaaccctaaccccacactctcacatactacatatataaaaccgccgtcacgatgatgctcagaattcgtagccgcgatggcctggatcgagttagcttcgaaaaatctcggggcaatggcaaagtcggttctattggtgctacgaagatgttcctgcctatgatgagttag

SEQ ID NO: 113660 - DNA, 240 bp, Glycine max
acaaaattaaacatttcgaacaaaaatagattcttctgcttccaacacaaataaacaccactcaatctaccttgtacacgtgactcatctcttcatccaacactagttgagttcttagcttattggagaaaatttgtgttgaggcaaattttgtttccttgcattatcacctcatgacgatgtcaggctgcacaatggccagactctcgatgacctgagtgaggctttactggaagattg

SEQ ID NO: 113661 - DNA, 237 bp, Glycine max
tccattttcttgtgttctgcctccatcgagtaccaagaaaacagaacaaactaaaaatgggactcttttcttctacaaaactgcttccaattgttgtgctgttttctcttcttttcacatcttatgccacaaattcagctgaaaacaactttgttcactgccttgtgaaccattctgagccctctcaccccatatccgcagcaattttcacacaaaacagttcctcattctcttcag

SEQ ID NO: 113662 - DNA, 180 bp, Glycine max
aagccatagaaattaagtgttcatagaagacattgattagaaagtatatataccaaggggaagcagcaaaagaagcagcaccttaggaccagttgcaatcaacagttaagtggtatcttgaggaactccatgtttggagccagaaaaaggccaagatgctgggcctcttgtacatgattg

SEQ ID NO: 113663 - DNA, 232 bp, Glycine max
atccatataggcatagccgcataggccaagtcacacaaataacacaacacaaacacaaaccttcaaaagccacaaaacacacacttccgatcgaagagacaccgcgtcaattaagctactgacttctgagtaatgcatggacggcagagataggaattgttttggctattaaattactttcttttgaggtttatgactgtgttgggttttcactatgagtggtgttcctaag

SEQ ID NO: 113664 - DNA, 177 bp, Glycine max
cgagaatccctccctttctggctttctctctctaaaactatcatgccctccaccgcggctcccgtccttcccatatccaatccccaaaccaccgccgcacccggggcgctatcgaggctccggcgaacaacccggccttccgcgtcttcatcaacaccctctccgcgtctctccgac

SEQ ID NO: 113665 - DNA, 246 bp, Glycine max
cttcataggacttctaatgaagtctatttttttttgtttttcttatttgggtgtgggagttttgttcaaagtttgagttttaatgcttgcactggaaatgagccattgtcaagagtttatgtttccttaacgacataaaattctttttaccggtaccattatgattgcaaagataatgttttgggtctcgaacatgagacattcaaaaaaaagaggaaaaaaaaaaaaaaaaaaaaaaaagaggga

SEQ ID NO: 113666 - DNA, 251 bp, Glycine max
atgattttgcgttgctaataagtgtccttaggatattagtttaagaattaaaaaaaaaaaaaatttattttgtgaatcataagaaaatgaaaaaaaaaatcatgagaaacataattttgtgcctccaaataaagatatttctactttaaattttttaagaaatatacttaaggtattggttagtatttcccttatctatatatgccatcatgccagccatgtgacttgttgacattggtatagtttggtgt

SEQ ID NO: 113667 - DNA, 259 bp, Glycine max
aagcacacaaacaaagtttaattgctactttatatgctcatggctgcttcaagtaacacaacagtgagttatatgtgacagaagacaaagaccaaagttcttctgaaagttctgtatggtctctccaggttcaaggtagccaataatgggtatcaagtgcatacacgtttttgatagattatatagttttttcacttgttcgaagaaaagcaccatgccaagtggcagaagaattttccacagggatgtggaaaaggaa

SEQ ID NO: 113668 - DNA, 265 bp, Glycine max
tgaagttttattacatcatataaaattttagcgggatatttaaaattttgtcttgtcatcatattaattttaatgacattttaaattctgcccctctccactcagaccattggtaattgtgtgaatttttctggataggtgggttattgtgctgaagtttataaagtttagtactttgaaagttgaaacagatatgttgtgtggttgagaaaaagcaagatctggctgacacaattgggctgaatacaatgttagcttctaggta

SEQ ID NO: 113669 - DNA, 249 bp, Glycine max
ctatgacaaagatttcagatcagatataattgaatctattctatgtgggtccctgtttccatcagagttttcaatcaatgatatagttaaacgttgggttgagattttctctggatttgataaagtggaggtcaaggctcttgaaaagatacttgagcaaaaacaaaggttacaggaagagatgcaaaagtatctagttctgaggcagactagtcaggaaaaagacattcctgaggcccaaaaaaagat

SEQ ID NO: 113670 - DNA, 248 bp, Glycine max
cccatctagaatcccttgacttttggaacgctcttaattctttctttctctctctgcctctcatttaaaatctttgtcaccaagaaattaatagcatcaccccaccgtttgagccaaactctgacgtccttcaacacattacataactctgcaccctcctctgttttcaaacacatatatacatcttttcctaaaaataaaaaacagaacaagaaacagagaacatagcaccctcctctgttttgaaa

SEQ ID NO: 113671 - DNA, 250 bp, Glycine max
cagtgaagtaaatgacaagtcagtttctggtacaactcaacttgtttgtgagagatgttggtgtgctattgaaaataacaaaggtattacatcattggactctatcagtcctggagagggaataaactctgttaataactctggcgctgcatcagctggctgtaatagcagcagagaagttacaaaagtgaaaaagaacaccgtattgaaagagcaacttgaattttctcaaagttcaaagagtagccaa

SEQ ID NO: 113672 - DNA, 240 bp, Glycine max
cccatagcagccatgtaaggagtgtccatgcatttttaggcttctgctctggtgacttttgcttttgtctgatatggtgtataggaaattgagaattgtattactttttgcaaactcacatgtgggcccttcatttttgtctctcactacttcactgattgtatttaaattttacagaatctttaaattgcattgacataataggatgacaaaaacaattgttatgtttaccgtcactaa

SEQ ID NO: 113673 - DNA, 254 bp, Glycine max
cttagatcagattcgtttcaaaagggtggtacttggtagtgctagttcaaacttcaaagagctgatatcgattattgaaatttcaaattttcaatatttttcattggttgttggattgagatatatggccatagctcggttagttcggcaagcaaagcgccctcatgggttgtgggtgaagatgacagccgtgaccatattgggtctctgcttcatctttgtgtggggggtgttttcgtcttcttcaacctctg

SEQ ID NO: 113674 - DNA, 182 bp, Glycine max
ctttctactgtttttcttgagattcgaagcacgaataattgtttaatctttgaaattcaaataccctggtggacttgagtttcaaaatacactttttaatatggctatcaaattatgagtctgaccctgcaaaaaaaaaaaaaaaaaaaaaaaaaaaaaaaaaaaaaaaaaaaaaggggggg

SEQ ID NO: 113675 - DNA, 253 bp, Glycine max
gtccatttcttcttcccatattgttctcgtgtgttgtgtgtgtcagtgttttggtgtgtgtgtgagtgagagaaagagaaaaaaagaaaagaaaaagagtgtcttggggcggttttggtttgagtttaacactttcatttcgaagatgccgcgcccagggccaaggccttacgagtgcgtgagaagggcttggcacagcgagcgccaccaacccgtgagaggttccatcattcagcagattttcagggtcgtc

SEQ ID NO: 113676 - DNA, 160 bp, Glycine max
gaagaagtgaagtgcagtgatcattttgttgttgggtgtgagtcttgggtgtgaaaatgtcgcacagcgataccataccccttcacccatcttcccaatccgacatcgacgagatcgagaacctcatcaatgccagcgttcaccaatcagtcccttcggc

SEQ ID NO: 113677 - DNA, 237 bp, Glycine max
tgacaaggttgcactgattatatattattttgtagcttcgttgtttttttttctttctcatttaactttgttcttcctttttgaggggttgggtgggggttaaaataaacatatgtttgtatttttcccccgcttttaccttctgtttacatttcacaatacatggatcacaaatggtgtatgatatgaatgtcatgttctaaggcatgatagtgctttctatttgacacttttgga

SEQ ID NO: 113678 - DNA, 249 bp, Glycine max
caaaaccttaaggttcttgtcaatttttcagtcttcaccacgaaattgttgtgcatctgagggaggacttcacctcatacttgcatttcaacaagtatcatagtagtagtactctcctacgggagttcctggcagcaacctatccttattaggtggagctcgacaccgggcattaaatcttgtacttgcatagcctcttaggagaaactagagtctagagatataatccttcaacggtttgcttggttt

SEQ ID NO: 113679 - DNA, 247 bp, Glycine max
gaagattctgactgacacaagcagagtggtacttctgaagcagattgtttcttcttcttcacactccgctgcgctgcgagatttccatgattgtcccatccatttcaggaagggtttggtgatagattcaataatcaaggtttagtatggcagattctttgatatccagaagtaaaagtgatgtaacggcaatgaaggagacacttcgtacgcagcagcaacttctggaaaagctatatgctgagtt

SEQ ID NO: 113680 - DNA, 242 bp, Glycine max
ctcgagccgcataaaatgactgaggaaagggcaagatgtcattcttcaacctttagaaatcacgtattagtttatacagatcataaatcaaagcttgaagaatgacatcttgccctttcctcaagctttgatttatgatctgtataaactaatacgtgatttctaaaggtttagaagctggaattactctgtaaagaagaaaatgaaaagatacagaagataaatataggaagacaaagata

SEQ ID NO: 113681 - DNA, 243 bp, Glycine max
gttgccttttaccggaaaagtgtttcatcttgcctttggggaatcaagcctctttgccccttcctttgaaaaggtgcaaaagagaagggaactattggcaaatgaattacatgaaagattgttgaagagtgacgatgtgattcctatgaaggttgcagacttcataacagataaaatagaaaacatcagaaccaaacgaggtatcaattctaggttggtttctcagcatatggctttcacaat

SEQ ID NO: 113682 - DNA, 244 bp, Glycine max
cagagggatcatcggctgaatctatagctgcacttgctaaagtggatgttgtcaagcagaggatggaagctgcatatgaaacgttgcaggatgctgcgggattaactcaattgagtgcaaccgtggaggatgtatttgccagtggagatcttcctcgtgctgcagaaacgttagctaacatgaggcattgcttgtctgcagttggggaggttgctgaatttgccaacataagaaagcaacttga

SEQ ID NO: 113683 - DNA, 230 bp, Glycine max
cgttgttgctgcaaaaaaaaaagtgtaagcaatttaaggagagggtataaatatgtctctttcgttgcttaatttctagaaccgcgaaaaagtgcggaacgtttccaaaacgtggggggtgttgtgtaacaatttgcagtctggtctgacagcgacgatgtcgtcctgtgcgtctctgtgatgcagagtgtcttgaagtgagagggtttgtgagttggttggtagtttgg

SEQ ID NO: 113684 - DNA, 254 bp, Glycine max
ctcccatgaccgcagaaaaagcaaaaacatccaaaatacagaaaaagctagaaggccatctctgactaacgcgccaccaaagacctcacgcgcaaccgcagcgcgtgcgtcaatctccgtagcccttttcctttccctctctctctctctagacctcgtcgaagcaccaccatgaccacaacatctctctgaaaatcactcacacgcaaaagagagagagaatcgaaacaccccgtaagcagcacagcacaatc

SEQ ID NO: 113685 - DNA, 244 bp, Glycine max
tgcttgccaactttgggatggagctcaaatgtgaaaactgaaccaattatttgtgctttgcaaaactgtaagctccctaatttccctgatgatatatcctggttggccagaggttctaaagttggatatgagattgaaaaccagaggatgcagcttgagaattgcttgatccagtacttgactcatactagtaagacaatgggaatttctttggcaactaaagaggcaagtgtcacaatgcaaa

SEQ ID NO: 113686 - DNA, 242 bp, Glycine max
attggggttgtttcaaatgcacaatcccttatgcatggtttccatcaacatatatataatgacaatatatacaaaatatataaaatatttgaattaaagctcataaacttgcacctcatttgttcacaactaattggattaggatttactaaaaaatcacatttcctcttggcaactaatcttccagtgagattacctatcaaatacgaagcttcatctagacatttttgtatatcgctgaa

SEQ ID NO: 113687 - DNA, 248 bp, Glycine max
atcacattcactgtctagtgatccaccttcacttcccgtttccagtaatttaaatcacactctaatcagttctcaggattcctgtttgcatcatattcacaagttagttcaattctggttcttcattgttcatacttcatactctaactgttcaccttaaatttcctgtccaagtaacttgggtgatgtagagtttttttatttcttcaccttcctgggttttacttttcatattcctacttcatttg

SEQ ID NO: 113688 - DNA, 242 bp, Glycine max
agatgtcaaggaattgggattccttgttaagcatatggagggaatggtgaggaaaatggatagatatgttactgtcactaggaatttgtacagtgagatggaggtgttgaatgagttggagcaagcagtgaagaagtttcagcataaccagcacgaggagagtaggagggcttttgagcagaagctcatgtggcagaagcaagatgtgaggcatcttaaggatgtttctctttggaatcaga

SEQ ID NO: 113689 - DNA, 245 bp, Glycine max
caaaacaagtggaatcacaaatttctttctccatctttaatgaccaaattgacctttaggcaagattggtaaaagacaaatggactaaaatacagacacgtgtgattacgtgaagaagtggcaccccatgtccttgtctagtagaactcgtccatagaatgatcactttgttataaaaaggctttatattcttatattcatctacaccaagctacaccatttgttcaagaaactaccaagtagca

SEQ ID NO: 113690 - DNA, 246 bp, Glycine max
tgttagtctgaataatatctagacagagtacgggaaactattggcatttagcaacggttcacgctaatttaggaacaatttttgtttttcgaattttgttgacttgttttgtttcttttagtctgattaatttataatctagagataattcaagagattattggcatttaacaatggtttgacaccaaactaggagcagtttttgtttttctgattttgttgacttgttttgattttgtttcagtt

SEQ ID NO: 113691 - DNA, 247 bp, Glycine max
aaaatagtgaatcgcacttgcaacttgccagcactactgaccacaatcactgattttggcggtgttcatgttcgacctcatcgcgaaggtggaaggctagtattggaagctgtagcttctccttctcctcgtccatattttcacatagagcgcggcgatggaaggcttaggctgtgtttgcttgagagcttttcggcctcggatagtgatgatgaagtttgtgatgctgaggaaggtgttgatacca

SEQ ID NO: 113692 - DNA, 246 bp, Glycine max
atcaaatctgttctgcccatagccgaatcaaatggatttcaattggcaaaacccttccccgagtggcaatgccgtggtctaccagtgtttgaaggctctgaatgcctggttcggacagatcctgctaaacacggcgagggtttcttcatcgctttgtttactaggaaagatgctaacttttcagggggctcaaataaaaatgaaactagaatttcccacagcactcccgaaattaaaaacgcgcga

SEQ ID NO: 113693 - DNA, 244 bp, Glycine max
gtctgtatttgtttttgcctacccttacgagagatgtcaagttcaaggtttcttccttccaaccaaggttaagtcacaaaccatatataattgccttctttgtgacgaaagcattatagccaacggtttgtcaaccttcacccgccctaccgtttaagcttttagacagtgttggaattggatatgcccccagcctcatatcttcggcatcactcaaattctcaattaaagataacaactgaga

SEQ ID NO: 113694 - DNA, 246 bp, Glycine max
tggcacattcttaatttctcatgatacccccgaagaaaaaaaaactgacccttttcagttttctcttatctctctgtctttccttccattgagacagacacatttgtactagtttcatttttggagctttaagccattgtgcatctcttctcatttgtgtccactgtaagagggtgttgtgttgggttaccctctctctccatctgcattgtttgtggctgtcagtgttatcatacaaggtgttgt

SEQ ID NO: 113695 - DNA, 244 bp, Glycine max
ttttgaaagaaaaagaattaggaaatgatgttccgaaagagagacaaggaattctcaaagccattgtgaatttcttatgggaggaaggaaagtcttcctatgaacctgtttggccgaacatgaaatttggttggagaattatagtaggatcaatcattggatttttgggagcagcattgggcagcgttaggaggggtaggaggtggaggaatttttgtgcctatgctggctttgatcattggct

SEQ ID NO: 113696 - DNA, 253 bp, Glycine max
cagaaagcttatgcagccttgcctagcagtgtacaacagagacttggaacatacttctacaagggtataatgtatggtgctgttggatttgcatgtggtattataggccaaggcattgcaaatatgatcatgactgcaaagcggagcataaagaaatcagaagaggacatacctgtgccacctcttgtgaagagtgctgctctttggggcgtctttctagccgtttcttccaacacgcgataccaagtcgtca

SEQ ID NO: 113697 - DNA, 251 bp, Glycine max
cccatttgtttggcttctcttctgtcattattcttgaatctttgctaggccaagaccagaatatagaaaaaaagccataaaatggcacaagaaaaggcacttcgtgttaggtacctagtggcattccttcttgtgttcttcactatggcctcatgtggctcaggtgttggagtcaactggggaaccatggcaactcacaagcttccaccaaataaggtggtcaagatgcttcaagaaaacggttttgataa

SEQ ID NO: 113698 - DNA, 258 bp, Glycine max
caaagaagccccttctcactcagttcacgtttctcactttttgtgtgcctgcagcagcatttacttattaaatgctgaacctccaagagggtggttctccttctggaccaagttggaatttctagctacttgttgccacaaaatgattggtctcattttcatgggggggggttgagatctgagtctttagtctttttcactgaaaaagatctataaagttggtgtcttgagtccttgttcgtatgtctgtgtatataa

SEQ ID NO: 113699 - DNA, 254 bp, Glycine max
tggaaaacaaagtgtgcctattgatctaaaggagtccatccgagtccttgctaaacttagagaagcaccttggtattatgcagaaactaaagaacttccgagatcatcacatgaagtaaaagatggacactggcattccatctcaaagggtgctccttggtttccttatgaaggtaaagaaataagccgtttatcttttgaatcgcgagaaaccatcaaatccacaccaaagctaaaagagcttcctagacttt

SEQ ID NO: 113700 - DNA, 244 bp, Glycine max
cagggcccaactccatcttctgaagatgaagtttctgagatcagaaagctgtttgaaaatgaatgcaataggagaaaggcagcggaagcagaggtagaacatctaaaaattctactggggaaaaatacacacacacaggctggaggggatgcagaggttataaaggttcacagcattctggaggatgaggttaatcagaaaaagaaacttgaagaagaaataataatattaagaagtcaattat

SEQ ID NO: 113701 - DNA, 271 bp, Glycine max
atcttgtgttgtgtccctcttttaagctatttccttctcttaacacaattggttgtgccaattgccatagtcaccaaccaattaacaaaggtatatatatcatcatatcatcaccaaatgaaaaatattgggttgttttttcttgtggtggtggctacttttgtggcggcagccacagctggtagcttttaccaagactttgaaataacgtggggtggtgagcgtgccaaaatctatgagaatggaaaccttctcacactctcccttgaca

SEQ ID NO: 113702 - DNA, 258 bp, Glycine max
gagcgagcggactcggcatgactcggcattggcgctttaccatttgtctttggtccagagtaaccgatccaagatggttaaactcggttcggttccggttctattgaatatggttaagtcgggtcacatgacgggtcgggttttgttgattttggggaacttgggttccgggtcggacgggagggccacgatgcttgatgcgggcatggtggagtgtttggtggggttgctcagtggggccgagtcaaggagcgggtc

SEQ ID NO: 113703 - DNA, 252 bp, Glycine max
cccacttttaccactaatgtcactggcattagcttcttctgtatccctcccatttgggcaataactttctcttttcagttttctacttctcccaacactcgcggaactagaaagcctctacttccaattccacgtggcaaaaaggagagactctgattctgagccgcttctagaaccttccattgtccaagaagtttcattccacgacgacaacgaagaagaagaattccttgacgaatttgaatacgatga

SEQ ID NO: 113704 - DNA, 273 bp, Glycine max
ccaattcattaattatccaccctaacccatcattccttcacggcgaggcaacgcaaggtgggtaccccttgctctgcctccgccgtcacctacccatcatttcaaatattcatcgacataccttttatagctatgagcgaggaaaagcatcaaaagcatcatgacaccttgtcatcatcttcttctactcctacttgttatttttcctcctcttcttcttcttcttcgccgggcgagtcggaggaggagctgcagcacatgctgctggtgccg

SEQ ID NO: 113705 - DNA, 264 bp, Glycine max
cgacgttggtgtcaatgatggatgaagtcaccacttttcccgtcataaatctctggatttcttccttcactttacatccgagttcccattggtcgtcattttccttctgattgcccttttcttaattccctgctgtgctgttattttagtcctatactttctagtcactattctttttgctataccatcatttctcgtattgtactttgcataccctacgatccagaggctggtaagagaaataacatcttaagatatagcctt

SEQ ID NO: 113706 - DNA, 279 bp, Glycine max
cattgaggtaatacaaaaagctctgtttccaaatatctaagtcctttactttgtatgacagaggcatcaaaaaattgatcttaaatttttctgcattaggaagtgtccacaatgtgatcctattttccgcattagaattagatgtatctgaacattttccacaaaacgcattgacctttttgttgaactaacatgaaacttggcctagtcttttctgttcaataattatctctttaaatgtccaacccaacctaaagtagttaccaagcagttactcgg

SEQ ID NO: 113707 - DNA, 269 bp, Glycine max
ccagggccaggttggaattggaagctcttctatctatctctactttctattctctagtctttttctcacaacctgccatttctttctacttccattcaccataacgaaccgccaagctactagtaccttacacgattcatctctctctcatacactctatttttctctctgtcccctaccactctttcaaaataatattctggtttatctcaagcggtggaacactcttctccaccagtaccaccatccttcttcttcttcttctctcc

SEQ ID NO: 113708 - DNA, 271 bp, Glycine max
ctttttaagtggctgctttcttccgtgaacagaaagggtcttcatttctagattttttggtctgaattgagatttatctgctactgctgatgtagagcatatagtaatgcgttcaatatgtaaggatagtgttatattggctgaagtgcaaaataatgcaagacgggaaataaaagagagatggtgtgtttgagggaaataaagagtagttagctgaatctaatcagggttctcaatctgatcaagaagcatccttgtcaacattgatata

SEQ ID NO: 113709 - DNA, 267 bp, Glycine max
gggaagagaagtgaaaactacacacatagtcatataaaaacaccctcccattttggttcttgctttttgtctctcaacaataaatcccccaacacccttccaaaccacattgcttttgtgtcaaaattagaccaaagtttttcttcaccagtgatggaggaggaggatcacaaaatgtttggtcttgtctcagaaccagaggaatattgcaaagagttaggtgttgctgtcagagcagttcaaatggcatgcttcctctgtcagaaa

SEQ ID NO: 113710 - DNA, 273 bp, Glycine max
ctgagcttccctaagaatgggatgagtaatatgaaattctggagtgttttaggctcccacatgatatcccaaagccagtctggcgctacccaatgtcatacatcagtttccacttctgggcactacagggtcagtaccagaacgatttgcgcggtttgatattcgacaaccagacaccagaccttccaaagatagcgggtgaatacatcttggaaaaagtgttccaaattgatgtcaacagatcaaagtggataaacttgagtgtgatcttca

SEQ ID NO: 113711 - DNA, 263 bp, Glycine max
gagcaaagaaaccagtcctcctctccatggcatattgatatgtatatatgttggtagttatgtatgcatgtatatattgggtgagcaatagctagctagcattatattaaaaatgaaactggctacccctaaaataattagaaagatcccaagccctctgaagttggtatccagaagctcaagttcagcagcaaagaagccactattggtgtcaggatcaggacaaccgtcgtcgtcgtcggatggaagtagcaagcaacagg

SEQ ID NO: 113712 - DNA, 269 bp, Glycine max
tgagaaataaagtagaatagactttttctgttacttctaccgcacaaaagtgagtgctactgtttatctctaatgggttcattctctggcacttgtgaaattgtcgaagtaagggaagacctaaatacagagaaacatgcaggtatatgtcagtccaattctggatatagcttggatgagaaaaatcagaagcatcctgtgcagaaactgggatataagggtaatctagatgatgatattaataagctgtttgaatcaattactcttaa

SEQ ID NO: 113713 - DNA, 271 bp, Glycine max
taattttcctacaggagcatatcctcactggtggtcatggactcatggtgcaaggatatgatcctgttgtaaaagctcttgcaaatgatcttgatatacgcttgaaccacaggtttgcctgtataatttattgcacgacttagctacatgatttgatgcataatcatttttcataatttattgtggaattaattattatcatttttcgtcacttttatcaacaagaacgcataccaattttttctgttacctcctcctctcataggggtag

SEQ ID NO: 113714 - DNA, 254 bp, Glycine max
ctgcacatgatgtatcagatattctggtcacaagagcaactacagtggttgatattattcaaaatgtaatagacaatcttcatgcgactaaggacatacaagtagctagtttctatcttccagacgatatcaagggagccattgaaaaggctgaaaaattttccactcaaactgattatattaagaaccaatcagaggaaacagcaagaatctcaatggaattcctgggcgctataagtgaaagtcttatcatt

SEQ ID NO: 113715 - DNA, 254 bp, Glycine max
ctgggggatctggacgcagatgggacttggaaggatccgagaaagatgactccccacgagaaactgcaaggattttaaacagagatctagatagagaacgagctgtggctgaagccaagatgtggggagagaacttgagacaaaaaagaaaacaaagtttgcagcagggcagtcttgatgcttaattttctgccttgaggctatggaagatggaagaaaatatggggagcttatctagagaaacaactcaaaca

SEQ ID NO: 113716 - DNA, 249 bp, Glycine max
gttgggggctgatggtggaggtttgatgcgatcaatcctctcccagaaaaccacatattgcccttccgggttttcatccttccgaggttaaggttgtgggattttcatgcttatgtgggttgtgtaatttggaaggtgattaatggcaaatggttattcctcaaatgattgtttgaaaggaatagtagaaaattggtgtctgtcaggttcacagtatcagcttggcaaattgaaatagaatagagattt

SEQ ID NO: 113717 - DNA, 256 bp, Glycine max
tttctgcgtattattccgatcagaatcatatatcatacctaatccatgattttttgtgcatgcatgtgttcccttcattacattgcattcataattgaattttatcatccaattcgtgaaactatttatctgtttcgagtttttgtcatttgaatttggttacaaaattgaagctggatatgaaaccactcttaattagcctactaggttgcaatcgaactctgttggtgttattatttgaatgtagttagttcta

SEQ ID NO: 113718 - DNA, 251 bp, Glycine max
ctcgagccgaatcggctcgagggcaactttggggcttctacccactatgatattgtatttagatgggaaactacaatcttcatttaggcaaagctaccaagatactcctcttatcagttgccaccaccaatttcatgcctcttcccggtgccttcatttctgattcttatctgggtcgctttctcgctgttggtttaggttccttcattactttcctgggaatggcactgttgtggctaacagccatgatc

SEQ ID NO: 113719 - DNA, 233 bp, Glycine max
cgtggctgttttacttaccgcaccacaggcccttccagttgtggtttttgttcctattttatatctcgttctcaaaatatatataatacaagtattgtatgaatttattcatgtgtaacgtataatgttgtatatatctcggagaccagactctgtattacagcatgagcaattaaaattcagcaagttgttgcaaaaaaaaaaaaaaaaaaaaaaaaaagggggggcccccg

SEQ ID NO: 113720 - DNA, 245 bp, Glycine max
cgcggcttcaaccttgtagttattctctttcttcttttttagctatccctctcttgaaaaatctagatctcgttcttccttgatctacgttacgcttttagtgaccggatctgtatggatctgaaccagatctacacgccgatggtggttttggcctggtctttcatagatctgatgcatggaggctcagatctactgtacagaggtgtgcgattcatgttcgtctctcttttggaatctgtttc

SEQ ID NO: 113721 - DNA, 246 bp, Glycine max
cttgctaatactcatttattaaaaaatatctcttccaccccaacggttcactttcccaacgtgcaaagactaattaaccacagtaatgggttgtttgtgttttattaaaaaggacaaaatcaagggaaaggtgaacagagacaacgaggtttgcacgtcggatggagctattgatagccatggtcatcctgcagttcgaaaaagaactgggacttggactactggaattttgattttagtaaacca

SEQ ID NO: 113722 - DNA, 245 bp, Glycine max
gattcttcccacaattaggcttacaatgaaccttgtaagaaaaagctttgctggtggttgtctcacaacaagtgatcataacatggaaatgtttttgatgaaataataaaaataataggtgagataatgacagatattaaatgaaaaataaattaatattcaaaataattaaatatcttctataagggattttcaaaggtgtctcactttctagctgctaagcaaaactaaaactagtttctact

SEQ ID NO: 113723 - DNA, 172 bp, Glycine max
cttttggtaaaataaataagtggagtttttcttttatattatttcacataatgatcatgctagtggaattttttaaaaaaaattaatgtttacaataagaaacccaagctagttcagctgggtggtttttgcagcaaggaaaagaacaattttgttctagttatgcacaagt

SEQ ID NO: 113724 - DNA, 275 bp, Glycine max
gtcgcactccactccactccaatcagtcagatactagcgatggggaggaagcgaaaggtagcaccgaaatctactgtataagccgagcccccgttgaagcaaaactaaccataacccgaaaatgccgctcaggaatacgaagaagaggtcgaagaggaagttgaggaataagaggtagaggaagaggtcgaagaggaagaagaagaagaggaggacgaagaggacgaggaagaagaagaagaagaccataaagaccaataccagcaccaacaaca

SEQ ID NO: 113725 - DNA, 245 bp, Glycine max
atccaggtggagtattagtacaacaagtatttcacacggaaggtggcatattgtaacaatgtcaattgatgctgatttaggtgaagcaacatgttacttggatggtgcatatgatggctaccagagtggattaccattgtgtgtgggtagcgccattttggagcaggggacagaagtgtgggctggtcttagtccgccaacagatattgatgcatttggtacgccagatagtgacagggttgaat

SEQ ID NO: 113726 - DNA, 158 bp, Glycine max
acaacaccaccaccaccaccaacacctatacagggtgcacgcccattccctttatcatctccatatccatcggactcgttgttcgatgtttggttcacacacccgtacaagtcacccccgaggactggcagctactctggatattcctctcaccatcg

SEQ ID NO: 113727 - DNA, 206 bp, Glycine max
ggcttgaatcccttcgcaccttattgcatcgccaatcactcccttttcctttgcctttcctctcgctaaattacaattccctttcttgttcctctccaacttctccttctccgtttctgcggacatgtaaattcggaggacaccgtctttggttcggtctatttttttgggggttactttacttcggttacgcgtcgtcgttttgc

SEQ ID NO: 113728 - DNA, 264 bp, Glycine max
tgggtccctcactaacactcatactacataccctgactccgtctggaatgcctctgttttgttctgtcagagtttcactccgataaggaacatagataagcattgtgaaagagagagagagaggaatagcaagagtcctttttccactttgcatataccaatcattcgttttacggttccctttgttttctttttttctctgctagttgagcaaaaatggaggaagcgagtcctaaaattttcattccaaacacgatccaggga

SEQ ID NO: 113729 - DNA, 262 bp, Glycine max
ctgactatctaacactatttataggtttcatcattgccataaaggaaacctataaaaagttggctggtatgtttgaatttgttcagcaactaataaaagaaaaaggaactgactatctaacactatttttgttgtcattatgaccgtgtactgtgtttgtagtctgtgttccaccttttgtgtgattcatagttttgtatctaccattatttaatttcaagatcaacatgacagagatagagagggatgatctccttctcga

SEQ ID NO: 113730 - DNA, 265 bp, Glycine max
caacctcgtattccagacctacctcgattgccgcaaacccgacaccgccctcgaacactacaagcagttcctcaacgacgcccccatgaacccttcccccaccacctaccgcgtcctcatcaaagggttaatcgataacagcaaactcgaacgtgcaatggatattaaaaccgaaatggattccaaagggtttgcccctgatcctcttgtttaccattacttgatgttggggcatgctagggtttccgatggtgatgcctatttg

SEQ ID NO: 113731 - DNA, 199 bp, Glycine max
cttgtttacacactgacacactccttcatccaactccaacagagcaagaaaacatagtacacaccacacagtgaaaaagagagaaactccatcttctttctttctttctcactcaccacagaacacaaaaaagctttccaaaattccgggttggggaatcacgcgaacccattcaaagggggggggaaggttttagggg

SEQ ID NO: 113732 - DNA, 211 bp, Glycine max
ccaatcttccaccgttcaattcgctgcctcacggcaaagggtccttgaatttagaccccttggttgcttctcagttttgcgaattccatagatcaaggtcagccccgtcaaaatccctcagagaacagcgtctcgggggaaaaggtcaccgaaggaaaattttgggaaactttgtgagttatctgtctcacgagttctcttcattggtcac

SEQ ID NO: 113733 - DNA, 262 bp, Glycine max
ctctgttctgtaatttaattagcaaacattgacatagcctctgaactattacaggatatgttgaatattgttgtatttcacaaaaaaaaagacaaaaaaaaaaaaaaaaaaaaaaaaaaaagggcggccccccattttttgccccggcccccccgggatttaatccgggcccggtccctgcgggggtacgattttcccctaaggggggccgttttgggctttggggtattcagggccatgattgttcccggggagaaatttt

SEQ ID NO: 113734 - DNA, 225 bp, Glycine max
atctggtgtcaccgtcttgttttctgttttagaggaattggtgcctttaatgcttaattttctaatgaagcatgcaatattgttttgaattagtcaccttcaagtcgaggaacatacatatacacatatgtgttgtgatcaccacaccagattccacttctttgctgagtgtgtggatgtgtgtacatagattttgttgtgtatatatttgggttctcaccttca

SEQ ID NO: 113735 - DNA, 248 bp, Glycine max
attacaattaagaaaatcttggataatgaaataggcgaattatatgaggttcttcttaaaattgagtctttttgttttgaggttaattttttcctccacggtcaagccaaggcgattagttacgatagccacttatatttttgtctccgatgtaattgcaatctttaatcgtcgtccttcgtagtgggaatatatgtacagataatgtcttggcataatatattcagaaatgttaagacgttcttcca

SEQ ID NO: 113736 - DNA, 257 bp, Glycine max
aaattatccataaaaaactggttaaagccagtttcacttacccttggtgatgcagctctagccctacattatgcaaatatgattgtattgattgagaggatgttgtcgtcacctcacctggttgatcttgcagcaagagatgatctgtacaatatgcttccaactactgtaacaactgctttaagggctaagcttaagtgccatgcgaaaagtaaatcatcctccaatgctcatgatgcaaaccctgctgctgaatg

SEQ ID NO: 113737 - DNA, 261 bp, Glycine max
ctctcaatacatttctcaagcagctctctgttactaaccctcctctcactcgtgcctaagcttcttctctcctttcgttcaacgttgtggcgtcgctgtgaaaaccctcaaagaagtgtcgtgaattttagagcaatgtgattgcctctggtggccttggcggggaggttttgatatgggatatcgaagctgcactagcttcagctacaaaatgcaatgatccaatggatgatgatgataattcaaatgatatcaatgttt

SEQ ID NO: 113738 - DNA, 248 bp, Glycine max
atcagtgccaattttgtttcacccttgtgggagctacttttttgtctcagaagccggagccgtgtgtgtgggtagctcagctgctatgattatggtgattcacggtacgcttgctgctagctctccagctagtggtattgacgaccatctgccatatgcggatcatgtctattgcgggtctgctcctacttcgatgcagtgaaactgcatgcaccagagccttcctgagtcgagctatgcagcgtggc

SEQ ID NO: 113739 - DNA, 248 bp, Glycine max
cggactgatagcgccgtttagaaccgtcatagttgctttcttcctcattttccgattccgcaatgcaaagggtgtcccaaacctccaaaatctggaggaccgtagcctccaaagctagaataaacgtgttttccatcaacgacccttttgcttcgcgctccttctctgcggttcccgtcgtggcagcaaccaccagaaaattgcatcaaccggagattccgagcagtttccagaaatggggttcggtt

SEQ ID NO: 113740 - DNA, 194 bp, Glycine max
agaatagctagttgaatttatttcaacctttaccaaatccaacataattgggtcatattggtaaataataaagttagtttttaatatgacccaatatatgttgggtttggtaaaggttgagataaagaatagctagttgaatttataagtaagaagaaaaaggggggaggacacaaaatgattgggtttgacag

SEQ ID NO: 113741 - DNA, 249 bp, Glycine max
ctcaaaatcaaaatttaaaatacaaacaacctccatctccaccgttaaaatattccatcaaacggcccagcgccttctgaggacaaagcgagggaacaaacgtgaaccgtggagtctcactataaaaatctcgctcactaactcttgttcttccaaaaccaattctctgcactcttcatcaagctccgctccaacacaggggaaaatgagggagatccttcacgtgcagggagggcaatgcgggaacca

SEQ ID NO: 113742 - DNA, 255 bp, Glycine max
caacaatataaagtaaaagtgttattattccaatataataataataataataataataataataataataaagttcattcaccacactatttaatattatcttaacacgggaagaacttgatttggcacaacatattattctctctcccgaagcaagcatgagggattaattctgatctgatttcgtttccaaacgcggggcctaatttccacctaagtttgataacttcgatttgtgttagaccaaacttttcg

SEQ ID NO: 113743 - DNA, 244 bp, Glycine max
tgaggctcgaaaatgctcgcctgagagaagagattgataggatatctgccattgctgcaaagtatgttgggaagcctgtggtgagctatccacttgtttctccttcatctgttcctcctcgtccactagaacttggggttagtggtggttttggtggccaacctggaggcattggaggggacatgtatggtggagctgcaggagatcttctaaggtcaataagtggacctactgaagctgataa

SEQ ID NO: 113744 - DNA, 247 bp, Glycine max
tgaattatgaacatcaactttaagttctatacatattacactttccatattcacaaatgtatgaaacatgcacaaaacaccttcttcgtcaataatttgaattgacctatattgaacttgaccattgaattcatatacaagacaacgataccatagtgcagtaattataaacataacatcatttttgtaattgatgattgtattgcggtgattatgtttgacagcgttattgttggattcaagagta

SEQ ID NO: 113745 - DNA, 248 bp, Glycine max
ctggaggccttgattgaattacacaatatgactgggacctttgcaaggaatattcagcacttattttctgtttctgatgtccggtttttaatggatgtgcttaaatctgtgtacttgccttatgaatcgtttaaacagagatatggacaaatggagcgtgccatcctttctgctgagattgcaggagtagatttaagaggagctgttattcgagggttgggagcccaaggtgttgaactcagtgaaac

SEQ ID NO: 113746 - DNA, 242 bp, Glycine max
tgaaaacactgatgaggtgttactactgaatacttcttgaatatgattctattcttatttcagttcaatttaataaagaaacgtatgctattttttcacagtttgatgtccatctcatgcttgtttctcttgaccaactaagtacaccaagtttgcagcaaccttacctttgctgtcgaccaactttgtctgtcaagcacctttatgaacacgttgctcgtcagacacctttgccggttgaa

SEQ ID NO: 113747 - DNA, 323 bp, Glycine max
ctcaaacacaggttgatagcaaagaatagcacagaggaaaaatgaaacttaaaccagaacaatatggaggaaataataataatatagaatcaaacgaagtagctttggtgcatctttaagggaagaggcattcagaattttgcaatcaaaatgcaatttaaaatagtacattagtgtcaaaactcaaaagcttctggttccaatgatcataaacattgctatcgagctttaataccttatactaaaatcagggtacaaaaaatgagaataatagaagatggatgttcgcctatacaagaataaaagaatagagtgaagcgcca

SEQ ID NO: 113748 - DNA, 311 bp, Glycine max
gatggaacatcaaccaaaacacattatgtaagatttgcctcagtcttatgaggacctatgtatcacacctgttttttttggcaatattaagttggaactgaaactaattgatcataatagtgaattcattacttaaatttattttaatatgttgaaattggttaggatgattgtacctggttagtcatcagttttcaagtttttatttacttgttagcttctcagtatgtcagatcaaactttttcacaggttgacctgcatatatgctgcctgtaaaatagaagaaaatcatgtgtcagctgggagcttg

SEQ ID NO: 113749 - DNA, 311 bp, Glycine max
ttcagtttggtctatttaaaaaataataattcaatcatttattttcactctaagaatataattcttttgaaacaataattgtttttgaatttgggacacgaatagaaccattttttttattaattatatttgatacgtgaaaacttgtttcatttcttggaaagccaaaggataatatattatagatcataaaagaccatgatatttgacacaagatgtatcaaacatcaggccaaattaaaaagataaatagtgacccatagtatcccacatggacttaaacggacccaacatacccaataaatgtacag

SEQ ID NO: 113750 - DNA, 312 bp, Glycine max
aaaaaagagtggctctatgttaaggaaagcaacctatggagtttatctggcgatgcaaactctataatgcctatgctgagactgagttacttgaacttaccgataaaacacctaaggtacttgagatcttctgaaggtagctttgaaactcttccagaatcgctatgtgcattgtggaatttgcaaatattgaactttcagcttttttagatgtctaaaaaatttgccttacagtttgatgcgcttaaaagctcttcaggagctatctttgattgagtgctcaacactatcaagcttggctcccagataggg

SEQ ID NO: 113751 - DNA, 282 bp, Glycine max
aaacagtctctgcacactacactgaactccattcacaaaggaaaaaaaaaaagcagaagcataaagaagaagaagaagaagaagaagaagaagaagaagaaagaaatggcgcattctcggcaacagaacaaggctggcttcacgctctccagcaagatcaacaacaatgggagcttctctacgggtactggtagtaagagcatatacgacgacgtttacggaggcccactgaagttcggggtttggggcctctcccctcgtttcgaagactacggggggatt

SEQ ID NO: 113752 - DNA, 310 bp, Glycine max
ggaaatcttgtcatgggttccggtgaaggatctcctgcggttcaggtgcgtcgccaagtggctgcgagccctcatctccgatcctacattcgtcaaactgcatcttctccacatgtcctccagaaacgcacacatcctactaacgttttacgacaaacactaccctggagacaagtattccgcaccccgcaggtactgcgccccctgctctgtgcacgctttactccacaacccatcttccaccatcgagggtttccgccccttcgacataaacgtttacagagtcttgggtgtctgcaaggcttggttt

SEQ ID NO: 113753 - DNA, 287 bp, Glycine max
atctcatcaccaccaccaccacgcaataaagttacatcaaaccacaacaactttttcacatcttacacaacactgtctctctctcttctctttctctgcgtttctctgaaaaaccagaacaagctctggagaaaccgccacaaaaaaaagaaaagaaaacgcaaacctaaccgcaaacggtaaccccattatgccatgcttcacaccacacccctctcttctcttccttcttctcacccttctctctatttccttcttctctccttccaccgctgcaagaacctctt

SEQ ID NO: 113754 - DNA, 303 bp, Glycine max
agtttctgaggagagcagctttcttgaagcacaatctttgggtcactccttatgttcccggcgaaatgcatcccggaggggagtttcctaatcagaatccacgcgttggagagggtttggctacttgggttcagaagaatagatcattggaagaagccgatatagttctttggtacgtgtttggtataacacacattccccgattggaagactggccagttatgccagtggaacgcattggctttatgcttatggtattccactcaaagttagcgtatttcattgccattctttctgtgcaaa

SEQ ID NO: 113755 - DNA, 204 bp, Glycine max
tgacatctggtagagatccaggaattatccccagaaatgctcacccacctgaattagatgaaccattagacataaacacaccatccatggaatgggtaaataatagggcccctaatcttaagctgcccagagtgaaagatgttctagtcaatggccacacagtgaaggtgaaattttgtgatacttgcttgttgtatcgtccac

SEQ ID NO: 113756 - DNA, 250 bp, Glycine max
gcttcgcactcgatccgttacgtttcccatgcgcgactgaatctaccataaccaaacgacgcgcaggtttcggaattgtgttctaggttttgagtttcggttccgatcgaccgacgatgctgtccaatcatttccaaaacggcatcgaaacggcgaggctcgtttggtcgcggattcctaattcggaagaatcgcagctcctcgacgacgccgttggcatccttaagaagaacgacggaggcggtgtcga

SEQ ID NO: 113757 - DNA, 250 bp, Glycine max
ctatgttacaaaaggttactttgatgaaccatgcaacattggattttccgcagactgtcataaccatcctcagttttcattaccttcaaactactttgggaactgtttgatccctctcctcacaaccctaaagaggggtgagttggtgggacaaaatgggattgttgcagctgcaaatgccattgaaaggaagattagagatttcaagagtgatgctttgagattggctgaaacaacgatgtcagatatt

SEQ ID NO: 113758 - DNA, 250 bp, Glycine max
gaacttggtgctgctcgagtgaacaaggatggggcagatgtcaaagagctcaaagaacagatagcctgcctcaaagcagcattggcaagaaaggaaggtgaatcagaacattctttatcaggcagctctgaaaaatataggacaatggctagtgagctatcaccttatcatgcaaaccaacagggtgctgatattgtgagcccagggtgccggcaaccaatgcttgatgtaggcaatatagagcttcaca

SEQ ID NO: 113759 - DNA, 251 bp, Glycine max
gccgcgagggtcactacactgaactagtctgaaccaccatcaaaaccccattctcctcttcgcaatcaacctccaaatccaaattttctctctctgccttcacattccaatttcaaacaccatccgaatccaatccaatcaaaacaaactcgtctcttccagcgtttttgaaaaccctctcgatgccccgacccagacccattaattcatgagtcacgagatggaggcactggcagaaaacccaggtaggt

SEQ ID NO: 113760 - DNA, 245 bp, Glycine max
aaaacccaatccatatggaatttgatagaatcctacgtgggaagaatggcctaatttgtgagagtgttcttacggaatttaaggagttagtatcaatgtgtggagggcccaatgagaaactgagagctgactggttaataaattgtctcagggttgttcctgatactccctcagaacgcatgatgggcctcccatcaactaggaagctggcattgaaaaacaaggttgtctttggcactggtgac

SEQ ID NO: 113761 - DNA, 248 bp, Glycine max
cttcttcttccttttttgtccctttgaaaagctaaggaattgctgaattggggtattacatgaaaccttctgcaagtggttcataagtttcctcttctctgttcttcttagaacaagtattctctgatgacccttttcattatccaacacgctactgtgttctgaccccatattccaaaggggtttttgtcttctgatcaaaagctcttttctttgttaaaatattggctagttgttattattgtgtt

SEQ ID NO: 113762 - DNA, 246 bp, Glycine max
gttgaacaaggaaagaaggaagaggttgttgtgtctgtcgtggtacttgagctgaggtaggttttttgtgttactgtggttgacttgggagattgtaagtgttggtggcggctattctgattggactgaattggaatcatggttgcgtgggtttgctatttttggggctgttggggggtgaagtaaggttaaatgattgtgagtgattccgttttgttgatttcgtactggtaactggaattttag

SEQ ID NO: 113763 - DNA, 201 bp, Glycine max
cctatgcatattatgaagacggattcaattgcttcagtgaagctgagaattcaaaccttcaagggattttttgttaaaaagcagaaactggtttttgaagggaaggaattggctcgtaacagatcttgtatccgtgattatggtgttggtgatgggaatgttttgcacctggtgctgaggctttctgatctcaaagctatt

SEQ ID NO: 113764 - DNA, 248 bp, Glycine max
gggctttgagtcactttctatttccacaaaggaaagtgttcattcccagctacccttatataatccataattctctctctcctcttcctggtttggactttgtttaatcaagtggaccattagagttggtgaactcttcttttcctcacactacttagaaggtcaatgtcatggatgatggtcctgcaaaattaaaattcatccctgatcattttcaagttccaacatcaagtatagaatctcctgag

SEQ ID NO: 113765 - DNA, 247 bp, Glycine max
tcctaagccaatagctttaaacaaacagagagacagagaaagcagtgaaagggtaatacatacacagaagaataagaagtagttgtagatgttttcgaaaccctgcacccaactctaacaagagaagaagccttcttcagttcatcaccaatggatccgtgtcccttcctgcgtcttatgatagactctctggctctcaatcttccctccgccaccaaaccgccacctgtctccggcgtccaccctt

SEQ ID NO: 113766 - DNA, 223 bp, Glycine max
gttttgccattgtctgaggtatccaatttggtgagggatgttgacatctcatacaagagttcgaatcatctatccaattataatcttccacaagctgatcccatgcaatttctatgtaaccaattttcttcgctcagactgagggacataaattggaatcaatagtatactactcacctcacttaaattttgtttctgttacacaaatctctcctctgtttag

SEQ ID NO: 113767 - DNA, 262 bp, Glycine max
aagttactcaacaacacctcacgctctcggaaaatgctgcaggcatgaaaccattcattccaaccttcaactccttcttccaaacctctccttcacttgttagatttgttcacattgcaaagagatttttgttgctatggggttgatcgatctgaacaccacggaagatgatgaagctgctccattatctgcttcttctccagcttcatattcttcttcttcttctcactcggggataagcacttctgcttcaaccttggtt

SEQ ID NO: 113768 - DNA, 259 bp, Glycine max
ctttgtatacaagatacgttatgatcaatacctctcctctttgtaggagactatagaccagatgctgtggaagtatctcccacaaagaggagaggtattgatcataactcattcatggtacattttcttatagactttatgatttttagaatttgtgggggaaaaaacttttcatataagaatgtggcctaaaacagtatgagttcaccaacaactcgttagtttgagtagaactgggctcggttcccttaaataagca

SEQ ID NO: 113769 - DNA, 260 bp, Glycine max
tgattattacattacactcatatctatcaccacttttaagaccgatatagtcatagtacaatggccctccccaccaatctcaagttcttctgtgtgtttctcctagtgcttattctctattcctcatccttccttgcatcagctgttgatcctaaggctgaagatgaagaatttaccttcgctgaaggaagtatcaaagggccaaagaattgggggcagatcaacccaaaatggaaagtatgtggagatggaaaactaca

SEQ ID NO: 113770 - DNA, 267 bp, Glycine max
atcgccattagtgactgctgtgaggagaggatcttctgattcaaaattggtgtcctcctcgtctaccctcactccagaaaccaaaactaccatggaagacaaaggccgtggtgctggtgaaagtcgaggtggagtgaatctgacaaagaagagagaattcaccatattcgtagactatagagatagataaacgttcgctaaacccaaagtagatagttgagatcccagcccaacccaatagcgcgaaagccccaaaccttcgccttt

SEQ ID NO: 113771 - DNA, 266 bp, Glycine max
  unsure (1)..(266): unsure at all n locations
gccatggcgcttcaaccaattccgttaaattgttcttcttccacaccgcgtagctattcctnctgtgcatattctcaaattcagagtttctggtgcgaaccagacatcggaacttgacactccacaacgagtgaaggtagcggagaagacacaaaacagcagccacaggccaagcttccttcatcaaattcgagatagatggtcactcaaattagggtcccaaagggagaagttcccatggcaagaacgggaacacgaggtggtcc

SEQ ID NO: 113772 - DNA, 252 bp, Glycine max
aacccgtgtgtttggatgagttggccacgcaaacccaacagctaattttcgttgcacttcgtttcctcttcctgtataacatttataacctgatgcattttcacaatattcaatttcacttcatcccttgtgtttcatcttcttatgtgtctattcattttcctcagaatttccggttttgttgaatatcacaaagcttcaatctcatggcctcgtttgatgaacaacaaggaaagcctttacccaagtttg

SEQ ID NO: 113773 - DNA, 253 bp, Glycine max
gtttctatattctccggatttaagaaaaccacagcagctaggtggtggcctggaatcgtggtgcggcttctatcagagtataaggccaactcagatgggattgtcacttaatattgacatgtcatcaatggcgtttattgaaccacttcctgtaattgactttgttgctcaaattttgggaaaagatgtgctctcaaagccattgtcagatgcagatcgtgtcaagattaagaaggccttaagaggtgtgaaa

SEQ ID NO: 113774 - DNA, 258 bp, Glycine max
agaggaaaggaaaagtggcaaaaaaagcgagtcatttattagagtcgcgagctagaaaattcttcttagaccaaattgctaagaaaattgactcaagtaatggtagggagaggcggaagggtctaaagatgttgagaaatgtgacaaatggtttcattgatgtgtatgaaggtgggagttctgatggtctacctggtttgcaaatttatacattgctgatgaattcaactgatacacagcacgagattttgcatgaac

SEQ ID NO: 113775 - DNA, 253 bp, Glycine max
ctcactcttgaacctaaaaatcatagaggtaaggaaaagcaagccatttactttttcttttttctcttcttcccaaaacaaaaacagtcacttttacacaatgccaccaaaatggtgtaaaattattctggggtccaacaagaccaagtgatgcaaattctgagacccactgagaggttgcaactgtgtgctgcactgtggctagaactacatgttctgtggttcccttcatgctttgcactgtggctggctc

SEQ ID NO: 113776 - DNA, 264 bp, Glycine max
cattattgttaacattgttattactgtcctcagttttctcaattgcctcatcaagaagaagacattccaacaacagcaacatagattggtggtgcaaccaaaccccataccccgagccatgcagatactacataaaacacagccactaccaacacaaacaactcaaacacaaatccgaattccgcacaattctagttcccttggccttggagagagcagtgatcatgcgaaggaaagcacgtgagttggggggaaacggtgtca

SEQ ID NO: 113777 - DNA, 256 bp, Glycine max
gctagaagcaataagatgataatgaaagtgcttgctttgtatgttgctacagtcttggtagcatatgaatgccatggctcagactaccagaagttccctctccagatgaaaactgggtttggtgggcaatacagcaatgaggtggcatgtgccagttggaggcttgacgtggaagcaaacaacgtagtcaagtggcaaactgttcctgcagcttgcggagagtacatagctgactacgttctatgataccaatata

SEQ ID NO: 113778 - DNA, 252 bp, Glycine max
ggattggtgtggatgaaggacaatgtgatggttgcataaaatctggtgggagatgtggacacaacgtatctaaggatgcatttacgtgcctctgtcctaatcagcaatcttatgatgaggtttgtagcaaaagccaaacaagttctcccttagcagcaccaacgcctaaaccaacaccagaacaggaactgtcacccccttttggtccaaaatttcaagaaaagtctccacatgctccgaatccgcggaagt

SEQ ID NO: 113779 - DNA, 271 bp, Glycine max
aatgaaaccaattctcactcctcaaatctcaaacaccctctccaacccctctacatgaaaacctgtcaccaccacttcacagcctttccttcactcagttcacaccagcaagcccgaaaatggtgctgacatgctcattcaagctctccaacgccatggtggtgggattaccaatgtctttgcctactcgggcggttgctccatagatatccatcaagcgctaaacactccaatatcagaatcattgtcccgtggcactgacaaggcaaag

SEQ ID NO: 113780 - DNA, 271 bp, Glycine max
gggaattaccagccatggcatcgtttggggcggaagagtggtactttttcagcccgagagaaaggaagtacccgaatggcgcaaggccaaacagggctgcaacttcagggtattggaaggccacaggtacagataagcctatatgtagtggaactcaaaaggttggggtgaagaaatctttggttttctatggagggaagccaccaaaaggggtcaaaactattggatcatgcatgagtaccgtgttgctgaaaacaagcctaacaatagg

SEQ ID NO: 113781 - DNA, 270 bp, Glycine max
aacttacagcttgatggggtcctttgttccatttggtgggttcttttctacacctgaaatcagaagtcccgtaagctgtacaaatgcaccttttacccgttgtgacacatgcaataaaaaatgtgaacaagaagttgcagatcttctgaaggtaggtccttcatctagtaactcaacgagctcaccctggttacaaaaggttgttaatgtggagacgcatgagggtcggatgcggcaaagactaatgaagaaaacacaagtttgaatgat

SEQ ID NO: 113782 - DNA, 181 bp, Glycine max
ttcttacataagagtggtgattcgtcctacggcatcgggaatctccctactgggcagatatagtataggccatcgcgccaggctggctcttccagtaccaaccatgaagttatcatctacctcttctgggtcagcaaaccaagctgggtcatctatccccaagaccaattgtagaagggtc

SEQ ID NO: 113783 - DNA, 267 bp, Glycine max
cagactcagctcctatctcttgttttaaaataattagcatttgtgaagattattttcccctaattgtggagagaatagccccctaggcattggactcgtgtgtcagtgttgcaaccaagcaaccttagctatgtctctccttgttaattctcctctgctgccactgcaaagtactcggtggttgaaaccgaagcaagaagctaggtttttgtcacacggccaaccataataggaggaggaatgagcacaaacatctttggaactgcg

SEQ ID NO: 113784 - DNA, 267 bp, Glycine max
gtttttcttttggttgcatgttcaactcgaatacaacatacatacagatacctcttcttcttcttcttcttcttcttagaaagtcaaaccaatacaatgagtagaagcagaggacacacgatcatggaggttggacctgacggggttgccatcatcaccatcgttaaccctcccgtcaattctctctcctatgatgtattgcgcagttttaaggagattttgatcaggctctacagagagacgatgtcaaggcaattgttgttacag

SEQ ID NO: 113785 - DNA, 259 bp, Glycine max
cgcaatgaagagacaagcgacggggatcacaagggtaacatcaccagcaagaaaaagaagtagggcaagatggtaattggtggaggatggagtggtaagaacgacttggagagtttgaaggagatcatggatgagttcatgaggcagcagatgcgaatggaggcacagtggatggaagcctttgaggcaagagagaatgagaggaggctgccgagatggcgtggaggcagaccatggaggctttggagaatgacaggtt

SEQ ID NO: 113786 - DNA, 243 bp, Glycine max
ctcgagacgctcgagccgccatatttatgatcattacttttttgagcagtcaacagatatggttgattaaacacctgttatgtataggttatgtacagataacagtgattcttacttcttcctcaacaaggtaacatcccatttcccaattccatctggcaacaacagcaactacttcacttgttgttagatactcatttcatttgaagttggtctagaatggatggagtggacctttgtatg

SEQ ID NO: 113787 - DNA, 255 bp, Glycine max
ctgcctcttcaatgatgcagaaacgtgcatgtggaaagtctatggggctactgatgacccttaaagacggtacctggcgtgatgcatgtgatggcctcggcatttccttgttgctgacatcaatccctggatttcagtatacggtgttgtagcagctgagtcaacgatcactgagtgaatatacaccccaatgctgctacatgctcatctgagcatcgctttccgcgtatatggtcattcctttacgtgcaattt

SEQ ID NO: 113788 - DNA, 267 bp, Glycine max
cggattcgcatcgtgattctaacgttaacttccatttccattttctttgctgcgatgcgaatatgcttcctccaatccgtccttctacaaatgctatctgctgacagatactgagtaccgatctattttctctcctttttcacaatttctcaagttaccattagaaggaagccatggaatctgagagagaaagttttgacctctcaggacctttgctctaacttatgtcttatgggacaatgcatatcatcgaatgtcagttgctgc

SEQ ID NO: 113789 - DNA, 115 bp, Glycine max
ccttccttgacatagatcacgaatgagtctacaacgagtacgacgatgtttcccaagatatgacccatgttgtgatgattggtgagccaggactccttaccatcatcaccaatca

SEQ ID NO: 113790 - DNA, 265 bp, Glycine max
tctcgagccgaatcggctcgagccaggcatgctcattatggtctaaccttatcggatctccacctcagtaaattgcaatcaactctatcttcggctggtttcccgcctcttgatcacgctgctacgccaatgaaggtctcaaataacaagacattgcaaaagcctagcatcagtgagaacgtctcttgcttactatctatgacaaattctactcgtcttcaaagaaattggatgctgggaagacaccttcgctcatgctttttgg

SEQ ID NO: 113791 - DNA, 264 bp, Glycine max
tcttcttggagtgtacatccgaagcaaaacccaaatttcgaagcttcagttccatggtgcagactcttgtctcagtctgcgcagaatccgaatgttttaatttgcacacccaactttactattggctcaagtaggagttgcaattttgtgttgaaggatcagactataagtgcaaatttgtgcaagatcaagcacacgcagcgcgagggaagtgcgtggctgtgctagaaagtatgggtagcaaaggatcggtggtagtgaatg

SEQ ID NO: 113792 - DNA, 269 bp, Glycine max
gtttttgcctacctgagtggcttgatgatccttatttcgagtggctgcactggccacaagcctctattcctttctctgagtatgaaattgactacatttccaagcttgatccttttagggatgctgaggctttgagaaacgagcttccttcgtcgttgagggagtcatccattcgcgttcttattgtttgcaccatcttgttgaagcaagctgccgctgcggcctttgtcttgctgaaatagggcaaatgatgactaggaagttttgtg

SEQ ID NO: 113793 - DNA, 259 bp, Glycine max
gacactttggtgggattaactaccctcttgggggtgttggtgggatagcaaagtccttagcaaaaggtctcgttgatcagggtagcgagatagtttacaaagcaaatgtcaccagtattataattgagcagggcaaagctgtaggtgtgaggctttcaaatggcagagagttctttgccaaaactataatatcaaatgctaccagatgggtacatttggaaagttactgaagggcgttccacttccgaaagaagaagag

SEQ ID NO: 113794 - DNA, 258 bp, Glycine max
gtccattctgtgcagtggagctcgcatagtgaggtcgcccctgccgtgacctgtctgccatctcgaagaagtgttatctgctgtgcgccttaggtcatcgtaccggaaaatgagtgacatgttaacaacatttacgaagaagaaagaggtggataccatcatcagagacacctttgataaagttgtggtcctccgctttggtcgtgcctcgaccttgtctgtctccagcaagatcacattctttctaaagcagcaagg

SEQ ID NO: 113795 - DNA, 256 bp, Glycine max
caaaacaaaacttgatttgtaactttcaccgtatttccactcatatcccacaagcaccaccatgactccacctaaagaaatttcgaccgtcatttatcacaatggtcacataccagacaacccagttcagggatcggtgtacacatgtgcaaacctaatatttatttacgttagtcgttctattacgttaacataattgattcggaaaattaacaactgtctccctactcgagcaactgaaaaagtttctcaatta

SEQ ID NO: 113796 - DNA, 250 bp, Glycine max
agaagtaaacataaagagacattgtatgtgccatgaataaatttataagaagtaaagtatttcggttatccttcacaatcatctctttagtctttatcaaatggaatattcatttaaaaatggaatatttactaaaaaaatttactaaaatggaatatttttttaaaaaaatttatcaaatgagatagattttgaaaaaatattcatttaaaaataaatcgtaaattgaaccacgactgtgtacatatag

SEQ ID NO: 113797 - DNA, 259 bp, Glycine max
ccaagctccctgcactagctgagcttctcaattgagagggtgcatcagacgatgtgcatgttagcattgcatgccacctgcttgcaacggaaacaatattttgagctctgtgagaaattcttgtcgcagcatgcagacaaataatgatgcccaccacctgaacaagtgtggatacctaaaagaaacaacatacaaaaagaaatggtgaaatgacaggaattagttccttcaatctaaatgcgtattaatactttgaaca

SEQ ID NO: 113798 - DNA, 241 bp, Glycine max
acgtaagcttatgtctattttagggtgatgtttagtaattgtgtttgtttgagtaatattgtatttagggtaagatttagtaatatgggtgatgttcagaatgctaattaataaataagctctttagcaaactactagcttgtgattgcagttgacagggaattgtttcttctcccttcagctgttttaagttctattctatatttgagcattgtagtatttgcactgtgttattggtgtc

SEQ ID NO: 113799 - DNA, 246 bp, Glycine max
gttccaaggcacagatgggaatcttggaccgaaagaatgcattcttttacttggatggcgccctgaggctgtagaaatgattcaagagtatgataactatcttggtcctggaagtgttttggaagtgttatcagacacaccattagatgacaggatcaataaggcaagcaacatccatggtcataacaaactcaggaatgtccgagtttcacatcggattggaaatcccatggactatgacacctt

SEQ ID NO: 113800 - DNA, 130 bp, Glycine max
gttcaaattgctgaagtcaagatggaacagcatcaatgaaaacgatatttgtcagtgaaactgtgacgtttctgctgatactgagtgcaaatgtctgagtctcctggtgttggcttcttgtaatcgcaat

SEQ ID NO: 113801 - DNA, 247 bp, Glycine max
catgatttgggtcctaggaatgtacttgtcaagggtggtgacctccctaattcgttagatgctattgatgtattctttgatggtgaggagttctacgagctgtgttcaccgcgtgtaaatactcgcaatagtcatggtactggttgtaccttggcatcatgcatagcagcagagctggcaaagggttcatcaatgctttctgcagttaagacagctaaacattttattgaggctgccttggattata

SEQ ID NO: 113802 - DNA, 249 bp, Glycine max
gccaacccccaaactcctccttctcaagtagtctcatccctcacaccaaacataaaactcccaaacaacccctcatgggttgatttttgaattttattcattgatcaatctccatgccgccccaccgcgatcgcgaccatgaccacgacgacgatcacgtggctgagcaccaccaccactaccaccacagacccatcagaagaaaattggtgaacactcaccacagcggcaaaacacaccctcttatct

SEQ ID NO: 113803 - DNA, 245 bp, Glycine max
gtaaagtttcctcttctcatttcattactccaactgatgatcacaatgataatttggacttggatgactggaatacgaggaacaaagctgtggaagacccttttgttactgatgaagtaaacactcagagaaacaatatggaaacaagttcttataatgatactactgttgtatttgatgattctggatcagaggatgatgatcataagtttgatgttgataaaaagtacaatggtgagggatct

SEQ ID NO: 113804 - DNA, 254 bp, Glycine max
agcttgcataataatttcgtacacttcttctcttcttttctctaactttctttcttaaatcaaacaaaacataaatgaatagggtgaaaccaagtaacctaagacaatgagggagggaatggtcacgtggaaacaattgaagttactgtacgatagggctgctcctcagtcctcattattattcgtttccaactttcaactacctcatttacactagcaactcctttcttcactataaaattctcaacttggtt

SEQ ID NO: 113805 - DNA, 253 bp, Glycine max
ttctctattgctcccatccctttcgtttcatacacttttcaaagggcgcttcttcctcatagctggcaaaatggcaaatgcagcgtctggaatggctgtgcatgatgactgcaaactgaggttccaggagcttaaagcaaagcgagtctaccgcttcattacattcaaaattgagcaacaacaagttgtggtcgacaaaataggggaatctacggaaagctatgatgattttcaggccagtttgccagctgat

SEQ ID NO: 113806 - DNA, 262 bp, Glycine max
aacaaaggcattgttatttctcaaaggaagtacgctttggatattctaaatgaaactggcatgagtggacattgacagtcccatgaattcaaatcaaaagttgatggctgaacagggtgaacccctctcagatcctgagaggtaaggagactagttgggaaactcatttatctcacaatcaccagacctgacatctcttatgcagttggagcagtgagtcaatttatgcagaatccttacactaatcattggaatgctgtca

SEQ ID NO: 113807 - DNA, 257 bp, Glycine max
ggtatgtttatttattttgacatttccaattggaatttccacacttttctttatatacatttttactttgttatttcatggtcaaggaattccttaatgctaatgaaataattttgacatactcaggtgatttgttcactttgtgggactgaacaagaggttcagcaaaactgtataaattgtggtgtttgtatgggaaaatacttctgtggaacatgcaagctttttgatgatgatgtaagtaaataattctggaa

SEQ ID NO: 113808 - DNA, 254 bp, Glycine max
ttttgcgatcgcctttccttttatggattaccgttattttattttttatttttatattcctacaaaatttacctttccgccgtgggaaagaatcatgagttgtttcagctgttgcgaagaggatgacctccataaggctgctgaaagtggaggaccctatgttgtaaaaaatccagcagggaatgatggaaattatcatgcttctcaaactgcaaagcagggcactcagcctgttaaacctcagcccattgaag

SEQ ID NO: 113809 - DNA, 253 bp, Glycine max
attttataagttgccaaaatggaaacaaaacaaactcaaaatggcagttcagttgttctgagttaaattacacttcaccttctgtctcctccgtgcattttaagttgcagttagagggaactttggttatcgtcaaagtttacatattttttccttgacattgttatctgtgttttatatctcagggagcttgctatctgttttgcagtaagaaactgaacatatggaagtgaaaggggacagcatgagcgtt

SEQ ID NO: 113810 - DNA, 251 bp, Glycine max
attaaatccaataaaaattctaaaagaaaagaaaaaaggaaaaacagccggcgacaaggcattgggggtctccactctgcagcttccactctctaaagtctaaagtcttccaaatcccaaaaccctagggaagatgatggcgtcttccaattcacgaaaatcagaaacttccccttctcccgccccgcaattcaccaccaccaacttcatccccatccccgccgccgcagcccctaaaaccgtcgatgacg

SEQ ID NO: 113811 - DNA, 255 bp, Glycine max
cttcattctttctccttccccgtgactcacccgcgcgggaagagatcactccctccccaacccattcatttcgatctccattctccctgatactcctctctctctctctctctctctctctctctctgtgtgcgagttctagggttttgcggatagaaggataacacacttacacggcgtcgtttgatttgaggggggcgcaatatgccggggcaccgctcgaaatcggagaagcatggcggcggcggcgagaag

SEQ ID NO: 113812 - DNA, 252 bp, Glycine max
cccggaatctgctacggccagctcggagacaaccttccaccgccgcgagaatctgtctccctcataacctccgtccatgcgaagcgcgtgaagctctacgacgcgaacccatccatcctccacgcgcttcaagacacgcgcctgcaagtttccatcatggtccccaacgacctcatcttgaacatctccacgaaccaaaccctgtccgaccagtgggtctccgacaacgtcgtaccctaccacccccgcacc

SEQ ID NO: 113813 - DNA, 248 bp, Glycine max
ctgggacaaattggaaggacaaggattagcagcatacgaactcaacaaattctgtatctgcgcagaaacagaatttgttgagttcgtatgctgctaaccctgggacaaattggaaggacaaggattgtgctatttacttggtggtttctcttgcaaccaagaaggctggggctagtgatgtctccacggaactcgttgatgttcagagcttttgtgagtctgtgattgtccccgagctgcaaagtgca

SEQ ID NO: 113814 - DNA, 252 bp, Glycine max
gaacaatccagcaaaatatgttgggctcaaaggttatggtttgacaatttccggtaggatcccattggtatcacttatcacaaaagagaacaagcgatacttggagaccaaacgtgtgaaaatgggtcacgtatatggctcggaatttaacagcaaattgaactatcaagacagtggcaatggtaaagtcaatagtgatgatgattctaatgctgctcctggcttataaagctgcttctcttctgccagata

SEQ ID NO: 113815 - DNA, 248 bp, Glycine max
gtgaagatgaaggggaaaagccaaagccaaaggattggaaaaaagagtagaaaaatgaagggcgcgttgagtaccactaccaacaccactagacacttgcagcttcagctaggtcaagtgtccctcattccactccaacaaccgtcttctactactgctactacttcttccgcagtttcttgcttccagaaccttctagatgcagaagctcccaatgcgtcttcctctcgcgtggcgctcatcgacaa

SEQ ID NO: 113816 - DNA, 243 bp, Glycine max
ctctctcaatggcttgcttctctttaaacctctcagctcttcacatgttcagaccatgcgtatatattcctcaaatcgttgcaaatccattgcagcatcagaatcgtaaaatcaagatcttagcttgccaagctaatcaaaatcttgaccaatcgtccacaacggaaaaatctgttgctgagcttggcaatagcaaaggaacaagttccccaaatggtgttccccctaaattcccaagcaagg

SEQ ID NO: 113817 - DNA, 253 bp, Glycine max
tctgtacagaacttgcatcatatcttcccagccgtcgtgaattcttagcggccgtcctttttatttttcctttttttttttcaatagtgaatatttgtgtacaaacaagcttgcttgctaaggctttgtatattttttgactatggcaacagtaagtttatttagaagcactcgttttgttcgagtaaaaaagagaaacaacaaagaggaaaaagaaaaaacaaaaaagagcctaacgccgaatttgaaggag

SEQ ID NO: 113818 - DNA, 258 bp, Glycine max
tgaagagacaacacacacaataggattgtctgttcttgtctgatggaaacctttcattataagtcccatagaagggcatagttttcgtgacatcgtgtgttgttttgaggacgaataccagacatcatgggggaagaaaatggcgaaggaagatccttagctgaaacccccacatatgccgtggcaactgtgatcactgtcttggtttctcttagttttttgttccaaggcacgttaaaagaattggtaaagtggttg

SEQ ID NO: 113819 - DNA, 253 bp, Glycine max
cccaagcgcgccgtgagctcttcgacccgaaatccgaacccgaattcggtttcaatctcagagagagagagagagagggagagagcgaaacactgacctagctcgcagaatcgacaaccacttctcactcttcaatcgcgactgtgtctttgatgggtccgaggtatgcgccaccagacccaacactccctaaaccatggcggggtcttgtggatggcaagactgggtatctttagttttggaatcctgagac

SEQ ID NO: 113820 - DNA, 256 bp, Glycine max
ccataaccctctctttctctctttaatcttaaaccccgttacgacgtcgtacggcttgggctctttctccctctacccgaaccgaacaacaatcgtgaaagagggagaacagagtaccttcattctctctctctcttactttctctattgcgacgcgtttgattctctcgcttataatatatttctccgctggcgctctcttactggccggcgattgtttcggatcgatcgccgacgccgtcgagttcactcgctc

SEQ ID NO: 113821 - DNA, 252 bp, Glycine max
ggagggcttggtggtgcccccgttaaccagggggggccgcctgctccatatgcgaatcaacctgctatggggtatgggaaccagccagcaatgcaacccggataccagagtcctcaaatgggacagagcagtggtgtgagacctcatcctggtgctggtgctccttacatgggtcattaggtgagtggctcatgaatttttattctgaattttgttaatacatattctgccctatctttatgatttatgagt

SEQ ID NO: 113822 - DNA, 241 bp, Glycine max
ctcaacccagcattttcttcacagataagtcagggttgagattcaccaatttgggatacccatttaggtagagggatatcccaaattggtgaatctcaacggggcattttcttcacagataagtcaggacagcattatgaagaatgcttgtgcctggcagttgataatctacctgttattgatgggaagggtccagtccaagtgtaccagatttctgtgagagcttcaagtcttcattctc

SEQ ID NO: 113823 - DNA, 260 bp, Glycine max
cgagacacagaaaaaaaggtttcttcttcttcttctactttttcttcttcttctatgactcattcttcttcttcttcttcttcccatgtcgaaatcgaaattcatcacttcaaatttcacatccctttggtgctttcttcgtagatcccactctccgcttcatcgtgatacctcactctcagatggccgcaaattctgggaatatctcgtttgcgtctctcagtctagttcacagattcatgggagcactgatactgtcc

SEQ ID NO: 113824 - DNA, 244 bp, Glycine max
gcgagagagagagaggaacaaagcagcacccatttggatcctctcttctcttctttgatctccgttacccttcttgttgtctcgacagagagagagagagagaatctttcgaagttcgtgtgcgtgtgttgtgtggtcgctacaccgatatcagcaccacatgtgagagcacgtgtcgattacgattacctcgtcaagcttcttcttctgagcgatacggtgtgtgagagagagtctcttttgc

SEQ ID NO: 113825 - DNA, 250 bp, Glycine max
acaccttcaatacaccacactcttctagcaccttgcagtggctgactcggatcgctcttctagtgaagtaactacacgttctactgattcatggaagcgacggtcgtccacagttgaattatctgcagatgaggagactcttctcatcaggatgtataaactggtatgggagaggtggtctttaatagctggaaggattcctggaagaacagcagcagagatatagaagtattggactacaagattctcc

SEQ ID NO: 113826 - DNA, 254 bp, Glycine max
ctcgagcaccactctagcgttgttgcattgcagcagcgtctccatcatcttccacgatggccgcgcgaggcctgttgatcagaaaaaccctatacaccgttctccgcgacgacgacgagcacataatctgagctggcatagctgcagctacacatcactcgcgggttgcacgtgtacacgctctccgatctcgattacgacaatagcgctctctagccaccatcatcggcgagatcatgcagctgcaccaccag

SEQ ID NO: 113827 - DNA, 260 bp, Glycine max
cgcaggaagcgacgacggtggtgataatcggtgccggagcttctggtatcgtcaccgccggttgcttaacgacgcaatcaataacttacatcatgatcgagagaagagactgtttcgcttcgctgtgtcagaaatatacctatgatcgtctccaccttcatatgaggaagcaagtttgcgagttatcgcactaatcgtgtctcaagtcttcacctcactacgtgcgtcggaagcagttcatcagactacttgggagacta

SEQ ID NO: 113828 - DNA, 247 bp, Glycine max
ctcaatctttcccagcttttttatttaccagacacactcactactacccttttcacacccaactatctctctccctctctcctcaactccaacccaatcaacccacttcattaatcactccaattgttgtcccactttgtcacattgctactactactcctttaactcctctcccttgtttcctaatataattcccaaaatcacatcattttgcttcaggttccagagacatatacatgataaacct

SEQ ID NO: 113829 - DNA, 271 bp, Glycine max
caacaccaacacaaaatctcagaatgtgaatgtgaaagctgttgtgactattgaacaaagtgatggtggacttgtgccaaatctcattaattcagcggtagatgggatcaaagagttagctgggaaaacacttgttttggagcttgttagtgatgagcttgatccaaaaacaaatatagagaagaagacaccaaaaagttcggttcaaaatataggaaaaaaggaggatgagatacggtatgaggctcaatttgagttatccacggatttt

SEQ ID NO: 113830 - DNA, 257 bp, Glycine max
cgaaacaatggttttggttgccctattaaagctgtcttcacggtttccttcttgttcagagagaatcagggaaataattgttcagtgcaaagggaaccttgtattagaattgcagcaaagatccatagaattcaatttgattattgcaaagcatcaaaatattaggcctacacttgtagagaggatgccagttttggatgaggtgactttcattgctaggagggctggatcttttccaggtgcaggtttaacatcga

SEQ ID NO: 113831 - DNA, 245 bp, Glycine max
gctttgtgacaaagcttgaaatgagaattgcttttgatatggatgttagttagcaaagatgattcaagatctgtgattctaaccaacatttgtgtaaagttgactattcatttttcagttgatggacttgatcagtgatcattgattttgttgctggttacaagtgggtctctcgaggaaaattatagtagaaaacaatgcatatgaaggaagctcagtttcatatattgagaaacatttggttt

SEQ ID NO: 113832 - DNA, 256 bp, Glycine max
ggcgctactagaccatgatcccggtttgattaagacgtttgcgcagtcaaatgcaactcctctaatctctgcggctacacgagggcatgcagatgtcgttgaagagttgttgtctagggatcctactcagttggagatgactaggtccaacgggaaaaatgcgctacatttagctgcacgccagggacatgtgagtgttgtaaagatactactacggaaggatcaacaacttgctcgaaggactgataagaaagga

SEQ ID NO: 113833 - DNA, 257 bp, Glycine max
tttggctggagcataactcttatgtttatggatgcttctttggtacataacttgatctgtagataagattaggcatttagcatgtatggtgtgaagctcgtggtctttttagtggggtttcgtcaactgctaattattttggtttatttatacttgctaggtgaagtttttcagtgttaatgataaaaatgttccttgacgcagatttgatattccagttccttcaatcaagaattattttacatggtttaagtttt

SEQ ID NO: 113834 - DNA, 266 bp, Glycine max
tggatgctgtgtggaagacaaccacaggattttggtatatggctatcttgagaacaacagcctagcacaaacacttattggttcaggccatagtagcatccaattaagttggcctgtaaggaggaacatttgcataggtgttgcccggggccttgcattccttcatgaggaggttcggccacgcattatccatagagacataaaagcaagcaatgtactacttgacaaagatctccagcccaaaatttcagattttggccttgcaa

SEQ ID NO: 113835 - DNA, 224 bp, Glycine max
ctaatttgtaatgtatggaaattgaactttattggagttgaccaacaactcactaccacatgagtcgtgtattaccttactcataactcgtttttatctgggaaatgtttgtttgtcttgtgttattatttggttataatgtgagtagttataggtactgtggtgagaaacttctatccacgctatacctatggataatttttttcttaaaaaaaaaacaaaaa

SEQ ID NO: 113836 - DNA, 265 bp, Glycine max
gtcaattctatagagattgcaccatttcaggtaccatcgactttgtgttcggtaatgcactagctgtttttcaaaattgcactttcgtggtccgaaagccaatggagaaccaacaatgcattgtgactgcacaaggtagaaaagagatacaacaaccatctggaatagtaatccaagggggatccattgtgtctgatcctgaattctactcagtgagatttgagaacaaggcttacctagctcgtccatggaagaattactctag

SEQ ID NO: 113837 - DNA, 245 bp, Glycine max
gaagaataaaaataaattttgtattgagaaaaaagtacaatttaatgttgattgcccttccaacttatgtacaaaaatataccctcagcatacggggtaaggtggcaaaatcaaattacaaaatttgtatgagcagaagaaacattcagtcctcacatgagaagaaaaggttgaccaccaaagcccgtgtaatttcacttctcttgtaaaattaaaagcaaaaacaatgtaaaatttggtcattt

SEQ ID NO: 113838 - DNA, 255 bp, Glycine max
ctcgagccgatgaatttgaatgctaagtctaacacaatcatttggttctctgttgttattagattaggtcatggtagagttatatcagttaaattgactatttagattcatccgtagttaatagttgccattgaagtggtgatttgatttgcttagttactgttcatttctatggcaggggttttcttttgagcagtttgttaaatatggtaaccattgagcattgcttagagattattctttagtcaaagaaac

SEQ ID NO: 113839 - DNA, 244 bp, Glycine max
ttctgtggctttgtttgtgggtgtctttatcttgaaaagagggtaaaggaagattgatgttcgtggaggttttaagtgatttcggaatggaatggtcgtaaaatgatggattgttatgacttatgagattgaggtcataggggcattggagatgattttaatgttgggttttggggcttctattggcacccaacatttttctctttgcattgctccttttttttttatataaatatctttattg

SEQ ID NO: 113840 - DNA, 251 bp, Glycine max
ctcaccacaaatccctccacgttatcaccaatcccaccgttggatctcgatccatccatcctttgtcaacctttccaaaaagtctttccttacaaagtgcttttccaaacttcttcttccttcctccttctctctctcaccctttctcccccactccctagtcagctagctcctgcaacaacaaccactcctcttctttttctcacccaaatccacgcttcccttacaccgcgtttggatctccgttatac

SEQ ID NO: 113841 - DNA, 249 bp, Glycine max
catttttcgataatatgagtgctatggataatattcaatacatatacaaaagtcgggtaggtcaactgcaagccttaaacaattcaaatggcccacttgttttagttggtaagacaggcatctattcttactgtttgtttgacactgcactagatgtttcaccgttataaacctaaatttttaaaatccttgtatgcataaattaactttatcctcttcttgatgaaaaattattaggtagttcaggac

SEQ ID NO: 113842 - DNA, 251 bp, Glycine max
gtatgtgcatgtgcatgtgcatacacacagtcctaatgtaaaacatgctgtttactctatttttcttttcaagttaaaatgatattaatgtgacttgctatattttacatatatgtctaaaagttctatgttttacttttaacaataaaatctatctcatgaatgttttatatgggtatcatctttgaatggttaaggcatttcagtttccaagtataaatgccaatatattgatgatgtacttgatgtta

SEQ ID NO: 113843 - DNA, 255 bp, Glycine max
gcggcgggtactactgcggacgaggtgggctccgtcggcatcatcacatcagccttgtttgtttgtttgtttagtgattcttgctaaagtgggttctcaatagcacaaattcatatcaagcacttgagcatctatgggtataatcaggagtggcttctctttcatagcagggacagtatgtggagtttacttggctcagaattatcaagttcctaacgtcacaaagttagctgacactgccttgtttatggtaaa

SEQ ID NO: 113844 - DNA, 254 bp, Glycine max
gcctgccttccccttctcataggagcttctatcactgagcaactatttctcaaggggtttggaggagactatggccatgcttactctagagcaacttctttggctcgtgaagctattgccaacattcgtaccgttgctgcttttggcgcagaagatcgagtctcaacccagtttgcatctgaactgaacaaacccaacaaacaagcacttctacgtggccacatatcaggttttggctatggcataacacagct

SEQ ID NO: 113845 - DNA, 277 bp, Glycine max
catggtgtcacatactctttaactgaggaatttgtgagtgcttatagaatacactcactcttgcctgataacttgcaattgagagacatatctgctaccccaggacctaacaaatctccaccattaatcaaagagattcctatgaaaaatttgattggagtgcaaggagacgaagcattgacaaaaataggagttgaaaggcaacttgtgtcaatgggtcatcaagcttgtggggccctagagctttggaactatccattgtggctcagagatcttg

SEQ ID NO: 113846 - DNA, 273 bp, Glycine max
gcataacgtaaaaatacaaacaaatcaatgccctgtagggagtacagaaaggtttgttggtatattgtaagcatttatgcaaatattttctatttatgtaaagggcaatttggttcttgaggctcccacctatgtatcacatatgcagtaacacagacttatcctggtaagtgaagagccaatttttaaggattgaatgtgacctaggtcacaagcaaagcagcaaccttactggtgatgggttgcactcacgtgtttctagttgtgtatcac

SEQ ID NO: 113847 - DNA, 270 bp, Glycine max
atcaacacttgttctgaagtttcgcctgaagtgtgggcattaggaggatctgtagttgagtttgttttctccaactttgctcttttctttagcaacaacttctgtgatcttcttggcaatattgcatgtgtacctgctgaactggggtttcctagtgttggttgcaagagggtgcttgcttcatataatgaagctattttgtctaaagattggcctctagcttggagttgtgctcccattctatccaaacaacacactgttcctccagag

SEQ ID NO: 113848 - DNA, 273 bp, Glycine max
caagtgtatcgtttctggttagggcgcaaccgtctctgtcatcggatatcagcaattcagtgttccaaaccgacccgtttttcttcctcttcttcaaattccccacttttcaattggttccagaaaacaacaggttttgacgtgttggattcgaacaatggacacccgaagtggtgaagacactgttgatattgatcttggaggtgtttcatccagtggagaagcgattggggatatgggtgatgacattgtcacagtgctcactgggctgga

SEQ ID NO: 113849 - DNA, 269 bp, Glycine max
cggctcgaggtgaaacggtgttctgatgtgagttgcgcaattcgggcgcgggctttgtcgaatttagcgcagtgcgtggggtttttgtctcgtggtgagaggactagtgcggttctgaaggagtttacggggtttgggagggttggtgatgggaatgttggaggtggaatgaatgatatgctgaggaggaggtgtatggatgataaggcagctgtgaggaaagctgcattgcttttggttactaacttgacttctctcttggaggtgca

SEQ ID NO: 113850 - DNA, 270 bp, Glycine max
gaagttagttacaaattatccaagaaatgcgggtgtgaagaaaggcagcagcagagtggttaggtgtgaattgtgattttttctctccctctgaatattccctgtgtttcatccttatttgtcttttctgccatttttcatattggaattgtactagtcctcactggttgagagtggaatttgcatttagcagagcaataaaacagcacaatcttatttccatctttcctctgtcgcattgcataccttacatacccttctactccatgg

SEQ ID NO: 113851 - DNA, 242 bp, Glycine max
tgagatcatcgttgattgactgtcatgtttcccccgctggcatctcgttctcattctcattctcatcatttactgcaaaacttctgatcagaaccattttttaagaaagaatgatagcaatcaggtctaaaaaatccttcctcatatatctgcattatctagtagtctataaactttggaaggatcgtacagaattaactgcaataaatatgtgattcgtcatcgagccatttcatttattg

SEQ ID NO: 113852 - DNA, 251 bp, Glycine max
ctcttttaaagttctggcccgaaccctttctttcgtcacaatcacaacttggtaaaggtagtccgtgcaagaaagatgaagctcgagttcgcaaatgtgctacttctgtgccttgtccttagctcttctttcttggaaatctcaatggctggttctcgtaagccctctctccctccctccctcgatgatcactgcatgcaaatacagttactgcttgatttaatttgttgatatgctactaatgaagtgat

SEQ ID NO: 113853 - DNA, 270 bp, Glycine max
cgaaaaagttgttggtatcaggaagcagcttaaccaagcagcagaagccacagatccatctcagcctacttctgttcaatcttctgtatcatatgctcctttccaaactactgaagatgataacaagaaggcagcagcagctgccgttgctgctaagcttgctgcctctgcatcctctgcccagatgcttacatccgttctttcttctcttgttgcggaagaagctgcctccttgaatggtagcttaaattctacaggattttcatcagt

SEQ ID NO: 113854 - DNA, 244 bp, Glycine max
cataattgtgttagccaagaaatgaagaaatcccagcaaaacgttgttgaagggagagttccctctccgaaacaacaaaaccttgtcgccgtcaccgtcgctagaaccaccactaccacgagaaccaccaccaccagcagctatgtctttgaataagggttcggggaaactgtctgccaaagagaaatatgctctgattcccgataacttcaccaccctagaacaggttacaattgccttgagg

SEQ ID NO: 113855 - DNA, 260 bp, Glycine max
ctgtaattgcatagggaaacaacatctctatagctatatgcagctaggagactcaagtgtgttggagatctcctcccataccgagcccgagatggcggtggtgtcgccaccagaagaagcaccacatgaaggcggccacaacagtggtggtggtggtggtagtgatgagatgattgggatggatttggatgcaaattcaggtgaaggaaatgaaggtaacaagatgagctttggagggaaccggtggccccgtcaagaaa

SEQ ID NO: 113856 - DNA, 268 bp, Glycine max
  unsure (1)..(268): unsure at all n locations
gagacaggagaacggaattgaaagcanacatagcgaactgtcctgtgtacatgcagctatttctttcaatgctgcatgtacccgtgacagaaatagctgatttggtgcatcttgcagccttgcgactatctccaatagttatccagaaaatgccgagtgtcttcagtaaggacactgagattgtcacgtatgtcgagaatatgttgaggctggagagtggtgcaattggagaaactgttggttctaccatgctgcctgctcttgtggg

SEQ ID NO: 113857 - DNA, 250 bp, Glycine max
ctagcatcaagatatcaaaaattcctattatctgcatttgcaatgaccgttacagccagaaactgaaaagccttgtgaactactgtttgcttctaagttttcggaagcctacaaagcaacagatggcaaagaggttgatggatgtttcaaaggctgaaagacttcaagttaacgagattgcacttgaggaactagcagaaagagttaatggagatatgcgaatggcactaaaccagttacagtatatgag

SEQ ID NO: 113858 - DNA, 249 bp, Glycine max
aaatattaagatgctaaacattggaacacttgttgtactctttgaatttctcatacacaattatacctatgacacaagacacaacaacccttgtacctgcaatcataacttttagtaactcaaccgtagatgtagaaataatagactatcttcccacccttttcaaaactgattaacctacttatgaaaaggactttagctaacaccaacctactgagaagttttgcaatggaaaattaactactgatt

SEQ ID NO: 113859 - DNA, 244 bp, Glycine max
ggtcgaaagagaattaaacgtttgccccttgagcattatttgtagtcatgttcatcagaataagacagatctccaacatataacacaccctctcctccactctccaaataatgctcaagggtcgaaagagaattattggagagtggaggagaggctgtgttatatgttggagatctttcttattctgatgaacatgactacaaagatgctgggtttacggtgggatacatggggccgatttgct

SEQ ID NO: 113860 - DNA, 263 bp, Glycine max
gtcgtaatatacctcatgctgaactgccttccaagattcagatgtatttctttcttgtattctttgcccaaattgtcctacaatataaagcaaattcatgcccaattaatcactaatggcctgaaatctcccacctctgggccaagttaattgagcattattgtggctcaccagatcaacacattgccagtaatgcacatttggtgttccagtactttgacaagccagatttgtttctcttcaatactttgataagatgtgtg

SEQ ID NO: 113861 - DNA, 263 bp, Glycine max
acctcccttaatttcaccttcaatttcttattagtatatattttaaactttgctagattgtttcctaaacacacaacactctcttattttcccctctgcttgtagaaagcagaagggcgaaatatttcgttaattagttaattatttccctttcgttctccaaagtccataacctctctctccacataacacgatggctgaaaattctatgatcattagcattgaccaaaaagcaatggttacccctcatgaagaacctaatt

SEQ ID NO: 113862 - DNA, 261 bp, Glycine max
gtgaacacatgcaatgatcagcagagttgtaagttgctatagttggtctactattttttttcccaatagctttctgtaggagtaaacaactataacccttgatttaatttctggatatgcttggcttcttctgagatgcatttcggggaatatacaaaaatagacccaaggatggggaatatactttgccattgatccatgtttatggattctccaaagcacgagatccagaatttgattttcacgagagaataagaattg

SEQ ID NO: 113863 - DNA, 261 bp, Glycine max
gagatatagaggagactgctacaagacactcagaacttcaattgttgcacgagtctctgacgagagattcagaacagaaactccaagaagctatagaaaaattcaacaacaaggattctgaggttcagtccctgttgagaaaattaagattttggaggaacagatagcaaaggctggggaacagtctacatccttgaagaatgaatttgaagagagtttgagcaaactgacttcattggaaagtgaaaatgaagatttgaa

SEQ ID NO: 113864 - DNA, 261 bp, Glycine max
attgaaaatgtcactcacattgttactaagactactaaaagctataaaagactaaagaaaataagataaaattctgatttcattcattggtccatcaagagggtgcaaagcttacattaaataataaccctaagaatgataaccctccacttgtcatcatctagtattttaggaaattaaaataaaaactactattaaaaggataatacctaagtcatctaatatttaaactacctatttgggcctctctaagcccatcct

SEQ ID NO: 113865 - DNA, 260 bp, Glycine max
cggctcgaggagaagttgaagcagttagacaagagttacaagaagagcgagaacatgctcaacgacttaaggagaattttcatagagatgttatattttctgaatccagagctacctttgctgaggcaaaactcagtgatctttataggaaaatcagaatgtcagattataaggtctgttctatatgcctttccaatgacagggacttggcctttggatgtgggcacatgacttgtagagactgtggatcgaagttatca

SEQ ID NO: 113866 - DNA, 262 bp, Glycine max
agaggagaagagaaagttagagagagaaaaaagaaaagaaggaatcaggttagagaaaaggaggagaaaaagtaagaagaggaagaagaaagggctacggtgccaagacccaatgcccaaaaatcatttccacggttaccagagtttgtaggccaaagaagagaaggtgcaaaaagctgctgatgaactcgcttagcgaggcagattggctaagcgagtctcattcgcttagcgaggcagccagctcgcttagcggatggga

SEQ ID NO: 113867 - DNA, 259 bp, Glycine max
tgatagttccaaaggcattattctttctggtttccatccaaaggcatattatgtgtacaatactgtgaccaagcaaaagtatgaactcccagaacctcagcaattctataaagttctgtgcatggcattgatgttgaggaatatctggatagtgacatatgctacaaggtgatccgtgcaagatgtgaatgcaaactaaaggaacgcaacactgtctcaattgagacttactcatcaaaaagtagacaatggaagcaat

SEQ ID NO: 113868 - DNA, 261 bp, Glycine max
caacaacaaaagcttatactacaaaggagtaaacggttgtttctttgtgaccaagcttcactccatcaacatcaagtgatggccctcaacacctcttgctccaaggccattgttgacatgctaggaactcatgttcctaaatgtgctattgatgtttccaacacacccagattttccttgtcccagaatgacaaaaagggctgcaacttgggattccccaaacttgttcaaaacaagggccttttcccacttcatgctgtg

SEQ ID NO: 113869 - DNA, 258 bp, Glycine max
gtggcctgcaagattttttgagggagcaagagcctgaatttgtaacaagccttgttcgtacccggattttgccactgtatgcaatagctgtgtccctaccatacctagttgctagtgcaaactgggtacttgagaactaggctcctgtctaccagaagagatgagtactgatgaatatcctcaatggcccatggctttggccatgccgattaggcagggccctcctggcaaccctgaggggttctctggctcggggga

SEQ ID NO: 113870 - DNA, 257 bp, Glycine max
aaagaactggacacccatttaggaaaagaaagatgggtccaagaatctgacatagaaaacctcacttatctacaagccattatcaaagagacccttcgtttgtaccctccagcacctttaactgggataaggaagttatggaggattgttgtgtggccgggtaccatgtcccaaagggaacacgtttgcttattaacctatggaacttgcaaagggatccaaaagtttggcccaaccctaataagtttgaacccgag

SEQ ID NO: 113871 - DNA, 259 bp, Glycine max
attgtatccaaccaccaaagaatctcgtgtctgaaacattccccgtagcggcggcgctgtctcttttgcagccgctactacgtttcctttttccccgcccaaagcaacaagtttagttatttgtgtctccaatatgatccatcgtgattaaacacatacatccatggataataacaacaacaactactccgggtttgttcccaataatgatactgatgatgactgtacatttctccaaaccttgttggaattggacccc

SEQ ID NO: 113872 - DNA, 249 bp, Glycine max
ctttctatcactctgttgagtgagtaagcaaatggaggaatagcgatctgaattttcggattctttaattgcttctctcgctttcaccgtccgaactcaatttatagatactccgtcaacctcaatcccaactaactacctctcttcttcctttttgttggttggttggttgaataaagagagaaaatcgtttttgttgcttcttatttaacaggttccttttcgcagcttcaccatatctccgaaatg

SEQ ID NO: 113873 - DNA, 247 bp, Glycine max
atcagagagaagggcaaagaaagggaaggaaatgttgtaaaacctggtgcacaagttgttgattctgagaccgtcaacaagaagtgtttctctgctgatctagagccagagctgcctggttctctctcaatgaatgttccagacccagatttccatgattttgatggagaccgtactgaaaatgcttttggtgagaaccaggtatgggctgcatatgataatgatgatggcatgccgcgttactatt

SEQ ID NO: 113874 - DNA, 252 bp, Glycine max
cggctcgagcaagacctcaacaacgagaaaactcaagaaacattcaactttcacttataatgtttacaggttcacactcggggttaattaccattgtaactcactctggctcataagtgtgcttcattacgatccgtataacttcgagtccttgtgggtcagggagcattcaagtagcgaggtcctaattattaacccgttttacttttctggaatacaaggcagtttaaccatgcagaccccaaagacaag

SEQ ID NO: 113875 - DNA, 244 bp, Glycine max
tgataagcctatggcggtggtaaaggccgttgtcgttcctcacgcccttatggttttgtaaatcaccggcatcgcgtctattacagctacatgcttatgaatggcgtggcgcgagcttggaaagaagagaatatagatgaatttgactagagctttgtcgacaacaccatttagacatgtggcaggatcaaattttgcatccatctttactgtgcaatctgtttgtgcatcagcaagatgtgtg

SEQ ID NO: 113876 - DNA, 259 bp, Glycine max
cccgaaactcatcaacagcccaagaggatgtgaagctaggcacttgctgaggaggaattttcgcagaaacttgttgtgcactcctattaggaggctccgagtgacttttttcattgtctttgaatcacctgagaaaaaggaatctctgcagtttggagagctggaatggcttacagatgtgggtattttcggcgaacaatttgctcaggaagccttggctgcagctgaagtacctcagcttcccgaaactcataacagt

SEQ ID NO: 113877 - DNA, 236 bp, Glycine max
gaaatatttgaaaaaggccaagaatccttagcaccaaatataactcgcaatatttgtttttccactgaccaacaatggtgttgttgtgccctttgtttggaagacaatattgaatcttttaaagaaaactaaattatttttaatagaaagttgaaaaagggtttcaaccattgtgtataagatgaaaaacaattgttgtctattaaattaatcttaattttggtatatatatattt

SEQ ID NO: 113878 - DNA, 249 bp, Glycine max
ggaattgtagttaatattccaactagattgacaggagatggacacagtgttggggagagtggtaccgggctgagggacgagtacaaaagcaggggtttcaatccggttcgagtcactcctttgtggaatttccggggtcactctggaattgctcttgtggaattcaacaaagactggtcaggcttggataatgcgttggcatttgaaagggaatatgaattagatcatcatgggaaaaaggactggttt

SEQ ID NO: 113879 - DNA, 251 bp, Glycine max
ctcgagccgttctagagccgtgctggctgttaaggatggaaaccgcgttgttgctgaggacatgtcctctgatcagacaccatttaggagagatgagtatgagagagtgaagctttgtggggcgagggtgttaagtgttgatcaggtggaagggcacaaggatccagatattcagacatggggtgatgaagagaatcagggtgatgatcctcctaggttgtgggttcagaatggaaagcttcctggagctg

SEQ ID NO: 113880 - DNA, 143 bp, Glycine max
gtaccatgttatcttatcaaggatacagatgggttgtttgaccttgatctgattagagattgtatcatcatctttctttagcttgtggatgcttaagctttagttgttatggatcttggaaattatgtcaagtttagtttctt

SEQ ID NO: 113881 - DNA, 253 bp, Glycine max
aagattctgaacataagagttcatagaagagcatctcattggcaggtatggttgaatttattgggttgatcaaggtcaatgtggttaaaggcactaaccttgctatccgtgatgtaatgagtagtgacccttatgtcatcatatctcttggtcaccaatcagtgaagacacgtgtcgtaaagagtagtttaaatccaaattggaatgatagcttaatgttgtcaattcctgcatcacattccacctcttaaag

SEQ ID NO: 113882 - DNA, 251 bp, Glycine max
aaaaaaccttcatatacttgaaataatattttatccttgtgtcttatattggacttacattgccatttgacatatctgcctgaaatttgcccattgtgaagcactttaattttatccatttttaaatcgtagttgtttcaactaacaagttatgttgttcaaggtttctgttatattctgttgtttctgacgtgtgtaatgggttgtacatttcttatgtgttttgcttttctgtattcttattcttgtgt

SEQ ID NO: 113883 - DNA, 240 bp, Glycine max
gtgcatattcctgcgaactgcaaccacaacatactctacggaaacaatatacgtcgcgtcaagttctgggacccttacttcttcttcatgagacctaagcctgtgtacgaagttaccttccttgatccttatgccggatcagatatctgttaaggctgcgaggtactcgtccatttaagtcgccaaccacgtcgcatcaagtacttgatgatctgtaagggtataagtacacctggctca

SEQ ID NO: 113884 - DNA, 253 bp, Glycine max
agataataaactcaaacaaggtaagctatgtagttgccctccattcttccaccacctattttgaaacattctctctctctcctccaccacattttagggagcacccgcgcttctttctgcgacccacatcgctgttgtttatttgttcatttttggggttgtttatttgctggttccgtttttgttctttttcgtggttttacccttaaaaatcgcgcctttaccaaaaatttgacggataatttgtgggggc

SEQ ID NO: 113885 - DNA, 250 bp, Glycine max
aagaaaaggtcaagtggggtatatgcatcactatccgagagagagagaggagagtattattcccagagaccgccaactccgctactagacaccgtcaactatcctattcatatgaaaaatctctctaccaatgtacgctgctcactctaactcaaacccatctacattataatattatataatggttatgtcaaaggattgattgatgcaggagctgaaacaactcgcagatgaactgcgttctgatgtt

SEQ ID NO: 113886 - DNA, 247 bp, Glycine max
ccagacttcgaggttgttgataaaggggttgaggttcaagagacgaaagaattatatgacggagaagaatctgagaaatccatagaagtgaagtcagctacaagtgaggtcgtcaaggaaataatgcatgatcagttgcgcctgactagattaacagagcttgattcaattgccaagcagataaaggctctagagtccatcatggtagaagataacaagttcacaaaaggtgaggaagctgagtcac

SEQ ID NO: 113887 - DNA, 251 bp, Glycine max
cgccgtcgcacacattcggcgactcctcgacatcgtggcctgcaccacctccttcgcctccgcctccgccgccgcagcagcaaaaccccccgccggaaagtccaaagaccccaacgaacccggttcagaaaatggacccgaaacaaacccgaaacccaaacccgtggatccgaattcggacctggtcaatgccaaaagcgacaaagctgacgctgacatctctatgtgtccacctcccaggcttggacagt

SEQ ID NO: 113888 - DNA, 250 bp, Glycine max
ctcgagccgatcttgcacacacgggtacttcctccaaaccaacattatgaaccctactcttttcactaaaccctcttcttcacttctccctctttcaattcccagttagttccaaccgcttccttcgcaaaggttttcgaataatggttagtggagctctcaaaacgactgagaacagtcttcacaagcaagcttctcaggtttccgatgccaatgatgcagttgctgaccctgatattcctgcaaagag

SEQ ID NO: 113889 - DNA, 246 bp, Glycine max
agggtatgtagctccagaagtatggaatagaaattttggcggaatttcgcagaaatctgatgtttacagctatggaatgatgctactagaaatggtgggagtgaagaagaatattaatggaaaagccagtcagacaagtgagtacttcccagattggatatacaacaggctagagcagggcatagatttgacaactgatggggtgatagccacacaagagaaagagatagcaaggagaatgactat

SEQ ID NO: 113890 - DNA, 245 bp, Glycine max
tcaaggtgtagattgtctaaaactttctttatgtgaaagaatctttggatttaggatttttactctgtggactatagttggaatctgagtttgatgagatctatagtggagactggagaaggaaggaacttgacatgatttccacctgatgtcttcattctggaactgagcaaatgggctgttgtgtttcaacaagcagtcagagtacttgtagcagcgggagcaatggagacacgatcgctcca

SEQ ID NO: 113891 - DNA, 256 bp, Glycine max
cggctcgagagacagcacaattagagagaacacgcggcaaaggagtgccatatgatggtcaatcgtctaggagaagctcaaaggatcaccaagaatttaaggatgtatttgaggtctcagagattccaaaggtagagagccataggtatccatcacaggggtgtgcagacttgatgaccactgatgccggtatctcattcattgaacagaagttcatggatgccaaacgacttgcaactcatcaagacttacagtc

SEQ ID NO: 113892 - DNA, 242 bp, Glycine max
atagagttgcttttccaggatgggaggttcaggtggggtagacttgaaaacctgctagcccaggggagaatggacagggatttctctgcaaaagaggctttgcaacctgtcctgaaggtattattgagtccagatggtgaagaaatcagaaccctagttattaaggaagctgttcgtgtaactgaagcttttactcttagcacaatttctgatacatacaagtcagttcccgattttatgag

SEQ ID NO: 113893 - DNA, 175 bp, Glycine max
ctcgagccgttgaattatgcgaccatgcatttccttggttggactttatttgatctgtttgttttagtatataagtgtttgatccatttagtctcggaataataaatgtgtcgtaagactaacattggagacaatcatgtatccaaatccttcatatatgagagaatattttgat

SEQ ID NO: 113894 - DNA, 235 bp, Glycine max
caaaacggcagcaatgaaaaagatgtcttctgctactagatcgctcaaaattgatgaaatggaagaactagatgaagaagactctgatgtgacagcagaagattatgatgcatcggattagttcagttaaatatttgcttaacatgatacatctaatgatctttacgttgctagcatcatgttgttgtattgtttgattacttagattgcaggttctgtacagaaagagcgcatc

SEQ ID NO: 113895 - DNA, 245 bp, Glycine max
cttttggatatatacttttagtcaaaatcaatatagtttctcccaccattcctataaatatatattttatgaacatgcttgaatcatagacaatagaaattgccattgcactcaccaagtatgcagttggcttcatatttgaattttcagtctgtgcattttctaattttgccccatctactagtttcagaccatgtttacaaagcttcacgagaacatggtattataattttattttcaatcac

SEQ ID NO: 113896 - DNA, 242 bp, Glycine max
aacaatttcccatgatcctgcaaatccttctgctaaggaaacaaagctcaagcctcaacagaattctgaagacaacaatgttcgagtacggaaaagcacaccttctagatcagccaaggatcctgctaggattccaggtagagagagtccgaggagatcaaatatggaaaataatttatcaaaacttgcaactccaactacttggtcagctagcaaatccaccaaagaagtttctaaaagtg

SEQ ID NO: 113897 - DNA, 222 bp, Glycine max
gcgttcattctgttttcgtaagtactgttgtttttctcttctatttctttctttgtttgtgttgtttttgtttcttccttatcgttgttctgtctctcctctgtttcggtgctctgttcaccacttccacgtgagaatgatcttgcttctgtgcatgttcattctctcgtgacctatggatcagactccatgttctgatccagggtctctctcgaacgcctg

SEQ ID NO: 113898 - DNA, 240 bp, Glycine max
catttctctaacatcgtaagttactagaaagtgagagtcattaataagaatggtgtggcctttgaaggagagaggacgcaagctagggtggacaagaagcactttgtagtccctatctgcaactcctggccatagttggcgtgcgtcgtcatgtttttgttatatgttccacgtcttcctcttggtcttgcccctcgtggttccattttttggaggcacgagagtaccaacgagaagctg

SEQ ID NO: 113899 - DNA, 231 bp, Glycine max
gatgtctgcaagctcttttgtcgtaaaatgctcgagtggggaatgtttctttacgagatttaaactatattaaatgttgttgactgggctgtgtacgaagggctcctgaggttgtattttgataaatgaggatttggttctttcagatgcagattctatggagggtacgataatatcgaattattgtactgtggaaagactcggagaattcctatcattgtaatgttgttg

SEQ ID NO: 113900 - DNA, 128 bp, Glycine max
cttctgataacacatttggccagataaataacatcaaatagtggcttctgggctatctggagttgttttcttttcaaatgttggatgtctaagagatgattgaagttaattgggaattgagataagta

SEQ ID NO: 113901 - DNA, 247 bp, Glycine max
gagcatgcatgtgaagctgctgcctctgttgagtctaataatttaaagtcaaaacctgaagcagactgcgtgcatgttgagaaactggctgataaggacccttctgttccagaagattctaaacatttagttgatcaattcagcttcttgcctgagttgattgcttctgtaaaaaaggctgcattagaagatgccgaggaattgaaagctgcagctgatgagcctgccaattctcagaatcacaatt

SEQ ID NO: 113902 - DNA, 247 bp, Glycine max
cgaactcatcatttctaattgttctgatccatatatatcatactttctttgtaataacttaaagaaccccacaaaaacaccaaccatgtccacaattgcaaagagagatttgagttctaatgaagaagagagtgagctgagaagaggtccttggactcttgaagaagacagcttactcatacactatattgctcgtcatggtgaaggccgttggaatatgttagccaaaagtgcaggattgaagagg

SEQ ID NO: 113903 - DNA, 242 bp, Glycine max
gtcacgattctcgaggagccccaagggtttccaaaaattccgtatctttttgggtacccatttgagaagagatcactgggtttcagcctgaaattattggagttacatgggtttcccttgatctcagccgagaatcggtgtcactattgtcgatggaactcaactggggtggttgtgttgtgtgtgccaacctgaatgctgctgattagggaaaaacaaaaaagaaagaaagaaaagaataa

SEQ ID NO: 113904 - DNA, 244 bp, Glycine max
gttccaggacaaggttttaatcagaatgcagtgagttttaattctttgcattcttcaagctgccaagcagttggacaaagtcaagtagcagttcccattctaccttcaaagggtggaattgttgatggtatgctgaaacaggaagtctccactgagaaaaagtacactgctgaaccaaatatcatggatgctggcttatcacaagttagttcaagaaatcctcctccaaccgcgaacgtggtag

SEQ ID NO: 113905 - DNA, 244 bp, Glycine max
gcatcttctcctgaaatcattgactttaactaagttcttgcatagaacctttatgtgtgtgaagcatgaactaatgagaaacgaattagcaaacagtcaaacactaatatccagacatagcttttcattattaaagatagcgtggtatctttggcggcctgagcagaatgattattgttccaattggggcttagcattttttttcttttcaggcttctaaccccacctgggactccccttttcc

SEQ ID NO: 113906 - DNA, 242 bp, Glycine max
aaaatcctcttacagcagcatttgtaattgtcttgttttcctaccctcaaaattcgttcgttcttctgtttttccttgtgtgtttctttcaatcttgtctaaagatagtgtccactgtttgtgtatctcagtgattaaatgtaactgcaatctcttcatcttgttcttcttctttgctttacttgaatctgttcttgttccttttttaaggttccttgcagaaaaatgtaattttggtttca

SEQ ID NO: 113907 - DNA, 245 bp, Glycine max
ctccaatccaaccaaattcaactacctgtacagtttggtacaagtagaggttgaaactaaaacggctaagtcatcatccagttgtaccaatggacttctttggcttacaaggtaaagaacaccaagcaactaccatttaacatgtaattcatactgttatggcattccaaaatttgttattttagagaactatttccttaatttgtaatgttccaagcccagagtctgttgtccatgagtaaaca

SEQ ID NO: 113908 - DNA, 263 bp, Glycine max
caaaatggccgtgacggaggaaaccggcggcgccaccgtgatcgacgagacctacgagttctccgcgccgcgattcttcgatttcgtcaaaggagagtctgatgaggaatcgcgtaaggctgagctctggttcgactccgctctctcctacgctccttcgccattcatgcctaaaatcaagaccggtagatctattactgtggataccttgtgtgattttagtgaagctgacaaaatgcagaagatgtttgttagtgttgata

SEQ ID NO: 113909 - DNA, 255 bp, Glycine max
tatgactttgactatgatgactttaacaggtaaattgcctctacacatttttattttttattttctattttggtcattcattttgttggttctgctccctgttcctctactagtagaacctgcaagatcaatacaaaaacagaaaacacagcaaagcaacaagcaaggatctacaccatgagtttatgtggttcagcaatgtgcctacatacatgagaaatgacagctcatcatcatcacattgatcatgaaaca

SEQ ID NO: 113910 - DNA, 252 bp, Glycine max
gatcatgaaattgacatggtagctgctctcctagctgagattgagtctggccacatccatcaatccagcagggatttcctttggtggaagcctgaccctaatggtctattttcaacaaagtttgcctacaaagtgttgcaggaggctcataataatgctaatgaagacagggcctccaagattatgtggagactgaaaattcccccaagagcgagtgctttttcttggagactattcaagaacaggctccct

SEQ ID NO: 113911 - DNA, 231 bp, Glycine max
aatgttaaaatggtgtaggtttatcatggctgaaatttttgggaatcaaagttataaggaaagtggttgttgtgggtagtggttgaggttgtggttggtaaaaaaaaaaatggattctgcgagaagttggttacaaaaatttcaaccacgtgataaattgagggcctctacaaggaacaaagatgatactaatggcacaaatgaaattccaaatgtgcctatggctgatac

SEQ ID NO: 113912 - DNA, 265 bp, Glycine max
cacaaacacggtaataaaataataccactgtttatatatataaacccaccctccctcgagtttgagttcatcgcaaaatcagaacccaactaaccaaaccagctatggcggcgatgcagaggccactcaagagaaccattgcaatcgccaagctacgcgcgtgcttttcctctctccgacccgccgccgccgccgacatcgtcgcgtctcctccgccgcagctcccgccgttcgatcaccagccgcacccttacaacggtccctt

SEQ ID NO: 113913 - DNA, 255 bp, Glycine max
taatgaataatgttggtctatagtgcgcacacatgctgatgctgtagattgacgaagaagcagttggccaaccgcgataatctctacatattaatataatctttctcgtcacctgagagaaatagaaaatgtggagtcgcgcaagaacccttttccttcgcgtcctggtaatcttctattctcctttctccctctctctccatctctgactttggatattgtttcttctcgactccaggaacctcctaatcacaa

SEQ ID NO: 113914 - DNA, 251 bp, Glycine max
tgttggggatgcaattgtgagaaggttggagaagaattgcttgagtagcagcactaatgtcaatggcttaccaggtcttggagggtgctctaagtgcttaaataccctctatttgcttaacaagaagacttcaaattcaagcaaagcagaagacaggaccaccaagatccacaacaaagattgtgagcttatgggcttgacatggcttctggctaaaaataggacagcttatatgcacacggtttctgcgg

SEQ ID NO: 113915 - DNA, 259 bp, Glycine max
caaaatcaaatcgaattggattggatacaatacaatacaaccctatataagccttcaaaacctgcgctgcgtgctgtcgtttcatttgctttactcaccgaaagtaacggagggatttccttaacccacaaactctcaaataccctctctctctcaccgaccactatgttgcagagacctagacgccgctgcgagggcactgccatgggcgccatcgttctcgatctccgtcccggtctcggaattggacccttctccc

SEQ ID NO: 113916 - DNA, 250 bp, Glycine max
tcatcacatggacttgtctttctcttactctgacggggtccttccttttcttcttctccttcatattttctctctcaccattctcttcttcttctccctttcttagattctccctcttttctctctgccctccgccatgactgaggataaggagatgtcttcctctgtcaccaatggcgatgattccctcactggtcacatcatatctacaactattggaggcaaaaatggggaaccaaacagactatta

SEQ ID NO: 113917 - DNA, 133 bp, Glycine max
ctattatagtgtctccattaatctaccaaagaaaggtttgaatctgggttgatggagaatatgatgtcttaagattggctctgggttcttgtaggactatttctaataatacggatttaaatgatctctcttg

SEQ ID NO: 113918 - DNA, 193 bp, Glycine max
atttaatgtgaaaaacatataagagcataaaatactttctccttttagttccttaatcattactctaacaacattgattagcaagacctaaaggagaaagtatttaatgtgaaaaacatataagagcataaaaaaaaagttatggacaacataattttatgcatttcaataaaatttctccttttagtttttt

SEQ ID NO: 113919 - DNA, 255 bp, Glycine max
gagggtgttctgtgtttcctcccttccctccccttccccggtcagcggtgttgttttgttcggaatctgaaatcggaaatcggaagaatagtcttcacttcagaggcagaagagaagggaaaatcgatgagtaggaacgattccaagtacttttccaccaccaagaagggtgaaatccctgagctcaaagaagagctcaattctcagtaacaggaccaaagaaaagatgctgtcaaaaaggttattgctgcaatg

SEQ ID NO: 113920 - DNA, 156 bp, Glycine max
ggccgccctttttttttttttggttggtttaatttatttcctgggggaaaaggtgtttaaaatggtttttaggaggaaaatggaaaggtttccggggaaaaggggttctgctgtaaatccttggaaccaataatgggtttgggtgattaaaagtga

SEQ ID NO: 113921 - DNA, 110 bp, Glycine max
gttttatcaaattttttgtcggatttacaaggaaagctatccataaaatgtttttattagacaagtcacggagacaatcttgaaaacattttatggatagctttccttgt

SEQ ID NO: 113922 - DNA, 249 bp, Glycine max
caaaacttgaaattggtttagaaattcaagatgtttgtggagtgacagggaaaaagagagttgtcgttattgtaattcttgtgaattacatgctgcaactatgatttcctcatattattcttcacagaagcaattttctattgtggtgttggggtattcctttatctactagaccatgtaagaagacccttgctagtggatacagttgctaacaatagtgatactctacccccacaattgggacagaga

SEQ ID NO: 113923 - DNA, 250 bp, Glycine max
ctttgtttaatcacgtggaccattagagttggtgaactcttcatttcctcacactacttaggataaaccgtccttcacacttatcattattgtcatcctttcttcttgtagaaggtcaatgtcatggatgatggtcctgcaaaattaaaattcatccctgatcattttcaagttccaacatcaagtatagaatctcctgagagcagaacatcatctattacagaacctggaactgatcaatctccaagtt

SEQ ID NO: 113924 - DNA, 249 bp, Glycine max
gacaaactctattctgtattgtgaactacaatctacatttcttgggtgtggcttcttggaattttgtttgaaaaagatgtgactcgtgagtacttggcgagttggcatggctcctatttgcttttaggtgccacccccagaagtagcctaggccatcctatgtaaattgcgaacttgtttttactttttagcccttatttcaaaattccacacacttctctttcagaatcttacccaatgctataaatt

SEQ ID NO: 113925 - DNA, 266 bp, Glycine max
atagtataatactaccccctcttgtgtggtgttcatattcttcaaagtccaaagtagcttctcactgcagattctttcctctttttttatagtacagtactaggcatttgatgaggacataacggaagggcttatataagtttatgtttcaaatggcagtattgataggataaagattgagttttcgttaattgttaccaggtgatacctaaatggtaagctgacctaagcgaaaatttgttccattctttccaatttcttaaaag

SEQ ID NO: 113926 - DNA, 261 bp, Glycine max
ggcaatggcaatggcagggaggagaatgatgtggcgggggagagctgccgccaccgtcagtccccgaggcggtcgtctcagggaaggagaaggactccaagtagggaaagagaccaatccaatggcagagaaagggaagtgagtagatctcctggtagaagatcatctgacaccaccaatactacaaatgcaagcaacaacaacaacaacacaagttctaggcctgggaaaatggtgtctgttccagccactgtttcatct

SEQ ID NO: 113927 - DNA, 259 bp, Glycine max
gcccgtgagagtttaacgtcgaatcagaggcgtagagtgtagggtgaatgcgagatggacgctcccctgctgctggacaaaggcgagggaggcggcgctggtgacggagaacggcgactacgtggcggtgagggagctgaaggaggtgaagaaggtgttctggattgagacgaagagagtgtggcagattgcgatgcccattgttttcaacatatggtgtcagttcggtgtgaattccgtgaccacaatgttcgttgga

SEQ ID NO: 113928 - DNA, 256 bp, Glycine max
caatcttgcaaggactattgggacctgatcacaataaccaaacccaacaacaatctatgagttttccatatcatacaacaatttatggattaaactctaatgaattggttccttcttggtccaaagttcctcaattcttgagagcttcccctcctaaaccaccacccaataaccagttgcatttcactaaccccgcaaccttttggaatgcttctgaggctgcaaacatcaaagatgttcgccccagcttcttccc

SEQ ID NO: 113929 - DNA, 250 bp, Glycine max
ctgaaaatgattcttctttacagtaaatggcattcagtatgctaagagattatgacaattacgtgttattatactggcaaataatagaattgcaggctaacaaacttatatattgttagcattacataaaaaataactgatggtaaggcagggggatttataagatattatttgccagtataataacacgtaattgtcataatttcttagcatttgaaatgccatttactgaaaatgattcttctttaca

SEQ ID NO: 113930 - DNA, 137 bp, Glycine max
ttccagatagtcagcttcaaataaaaaataatttgcaagccaaataacagaacgtgttgcacgcattagttacttatgggatgagacttgcctcactaaaatgcattgaaccacctaaattggatgctaatagaata

SEQ ID NO: 113931 - DNA, 246 bp, Glycine max
ggaatgcaggacattctcctgtttacttgttttcatctagagtgaacgacggaatttgtgattgctgtgatggaaccgatgaatacgatggtcaagtaaagtgtccaaatacctgctgggaggctggtaaagttgctagagacagactgaaaaaaaagattgccacttatcaagagggtgtcaaattgcgaaagcaagaaattgaacaagctaaagtagctatggagaaggatgaggccgaacttt

SEQ ID NO: 113932 - DNA, 250 bp, Glycine max
gccgaggagcatgtgtttagccaccactggatccgcatgattaattctgttttcgataacgtagcgaagaagagaaaaagggtaagtaggaggacgaaacgatgggttagaggatcttatgggacggaattttttattgcatgttgtagcgatgagtattgagacagagggagcatttactgtggtgccggagcatcaatggaaaacgacaaaaacgttgattggtgggtcctttcttcttcaattcaat

SEQ ID NO: 113933 - DNA, 246 bp, Glycine max
gattgtgcagtggtgtactgcacatggagttcctcttgagccaccagaggtcacggatgcgatgggtgaagctttcccatcggcctgtccctccaaagctgcccttgaagccaacagagccacagcaacacttctcattcaacagctcgctggtgggtctcaagctgggaagactgtggctgctagggagattcggttgctcgcaaaaactggaaaggaaaatcgtgccttcattgcagaagctgg

SEQ ID NO: 113934 - DNA, 210 bp, Glycine max
tctcgagcggatcggctcgactaggaacaagagtttatttcagattagctcggttcttcaaaaggcctcatcactttaagggttagctatttatatatatatacttctgtgacctcaaaattgagctgagttgtataactgcaatgggtgtttcgtggtggaagctgttttttgctgctcttgctgggattctactctcaacccaacata

SEQ ID NO: 113935 - DNA, 243 bp, Glycine max
cttgttcccatttcagaagagattagccttgtcagcagactaatcaatgcaattgcaaacaatgcatgcaaagaacagctcaccactggtttgcaaaaactggaccacagcttcccttctaaaaccacctcaaacatggaacctgaaacaccctcagaatggtgggggaaatctctcaatgttcttagtcttgatttctttcaaagagttttgtctgcagtgaagtcaaagggattaaaacaa

SEQ ID NO: 113936 - DNA, 240 bp, Glycine max
aaaaataacccaaactctcttttaaaaaaaaacccgaacacatagaaacagagaaagtttttgaagcgcttccagtggcgtatttacggttatacccttcttgttatgatagcttccaatcggcgtcagcacagagccgaagctcttggcttccacacatattttcggtcctgtcgattgagatacaaagccgccaagccagccgagccaatcttcaaattccaactttacccctaccgg

SEQ ID NO: 113937 - DNA, 165 bp, Glycine max
gcgagccaagtagggttttcagtgatcccctcttatgtgttcgaacgcgacgaaggggtccaaccccgatccaggcgaattgagcgaattaactcagccgagcttcgacgagttccaacgccacaactatcacatatccatctgatggctccacaagcaagatct

SEQ ID NO: 113938 - DNA, 233 bp, Glycine max
gaaaaaattcaggattgaagtttttgatatatgggaggacaggttggataggggggttgttgggaaagctttgcgaagaagagagaattgattgggaatatgggagaggaagattggaagataggaaatcacttatgaaggatatgagaagggtaatgccaacccatgtgttgagtgcagctggtgttactggaaggcctaatgttgattggtgtgaatcacacaaggttgaa

SEQ ID NO: 113939 - DNA, 217 bp, Glycine max
gtgatattttcccttctactttttcgttttctactattcaatgatcctttctcaccaacacaatgttcatcatatttaattaatccgtgttctaaagggaatattcagatagttcaactgcatattttattagtcacttcctgcgtcttcttcagtcattctctaaatttccggcatgggatctttttggtgccccttttacactcttccacacaac

SEQ ID NO: 113940 - DNA, 233 bp, Glycine max
cgtggctgttcatgattcaaaacctggagccactgagggtctggtgattgtgtctggagcaccagatcaaactcacgctgctcaatgcctaattcaaggtttcattttgtgtgggcagactgtagcttgagactgcaagaacaagaggcaatctaaaaattaaaatccacgcagcaaatcttgtaatagatattccattcgtgatggattaaggatttatgtcaaggttgtcg

SEQ ID NO: 113941 - DNA, 224 bp, Glycine max
gtcactaactcgctgtcattctgcacttctcatttcctccatatgacttccatagcctctccattttgtacgtgcctggttgccacttggaggaaccacctggttgccacttggaggaagcaccttcccaactccaaccttgtgaagcattgcaatcttgtgcctcgttcaggtaaagcgatggttgtagctttgcaacctactcaagacgctacaataatgag

SEQ ID NO: 113942 - DNA, 272 bp, Glycine max
ccaaaaataacaaagcagaatcatcaacctatcgtgcagatgaagacggatttcaactgccaagagtcgtatacatggcacgcgaaaaacgacacaactaccctcaccacttcaaagtcggagcggttaatgcattgatacgagtgtcttccgagataagcaacgcccctttcattctcaacttggattgtgatatgtactccaataatgcaaatacaattcaagaagtattatgcttcttcttggatgaaacaaaaggccacgatatagct

SEQ ID NO: 113943 - DNA, 258 bp, Glycine max
ctaaattcatgttatttcaattaagtttgaagtatcaatatcaaattatagagcttttgatcacgtttggttgaaaatatataaactaaaaacatatttttcacttaaattaattatcgattcatatcataatactaaacaataacttctcattcagaggggttagactagaactttataacatgcatcatcattgccatctctcttataaacttatgcattgctagtattattggactgcttataccaatacaattg

SEQ ID NO: 113944 - DNA, 250 bp, Glycine max
gagttttcactctctaaagaaagctttcttctctctcttttcttggcatgagaaatagtcttcaagggagtagataaagacacaaacactaaggagggaactgtttcaaatgatgttcatgttagctagccactattcaaattcaaaccaaagccattaaaaaggtgttggggaaatttaccataggttgttgagtttagatggacagttcatccaactttgagaaactctgattggggtacaaccttca

SEQ ID NO: 113945 - DNA, 257 bp, Glycine max
caccactccccaaaaccaccggagccatcgtcatcggcgcgggcctcgccggactcgccgccgccacccacctgaactcccagaacatccccttcctcctcctggaagcctccgacgccgtcgaggccgcgtgcgcatcgacattgtcgacggcttcctcctcgaccgcggcttccaaatcttcatcaccgcctacccggtagcgcaaaagctcctcaattattaatccctcaagctccagaagttctactccggcg

SEQ ID NO: 113946 - DNA, 257 bp, Glycine max
ctgactgactacctcagggtctgcaaagtttcactaaagattagaatgtttatttgaattttgaagttttgtttgtgttgatggaagaagataatagtgaccatgaaggaagtagaaagaggaaattcactttcaaatgtagtgttacatgagtagcttaggaagctcacaaaaccactgggtggcttgcccatagtttcaaactatagcttcacattccagtccttgcataatgagtaaatgttctgtttttcttc

SEQ ID NO: 113947 - DNA, 251 bp, Glycine max
cccatccaatcctcacatgcatgctgtctctgccaaagtgccaagtcacataccatttccattgttaccatactgtctttccacactacatacgaccccagctcaatcagccacacttaaaaggaaccgctcactcaccaaggatgaaattgatgcttactggaaatcaaagaagaagatagaggagagcaccttagagctatttccaccttgtcagagactattcaggctagcaaaagcacagaacctga

SEQ ID NO: 113948 - DNA, 250 bp, Glycine max
cttgcatgtcgctgttggtactgttgccggtggctatggaggtggtggaggcagcggcggtggtggcgcggtagaacatggtggacgtggatatgaagaccgagctggaggacgtgcatgtgctggtgctggatacgcttcattcagaggtgtagacagtggtggcaacaagagcaatactgacaagccttatggtattaatggtggcatggctttaagggaaagagctgatgcaacttgcaggagaaga

SEQ ID NO: 113949 - DNA, 257 bp, Glycine max
cggctcgagaatctgataagcaggttctaatggatcaatatttctgcttgatgaaaaaacatgatgacatcagcaatattctcagtcacagtgaatttacatggaatgaaaccctacaaacgttaaatgctgaggatgatgtctgggatgcatacattaaggaccacccagatgccatctcatataaaaacaaatgtttgtatcttttccatgatttatgcaagatttttggaaacaaattaatggaagtatcagat

SEQ ID NO: 113950 - DNA, 248 bp, Glycine max
  unsure (1)..(248): unsure at all n locations
cacagatgttggtaacataatagtgccctacggtaaccatataagcatactcagnattaaccttctgcttcatttccataacaaaaagagcatctcggtctgaacaaccatatggaacaatagttgtctctattgtgtgatcttgctttgctcttgtgaagtacattggtgcggtggacgagtcgatgccggctatggcaatgaagaagtcggttaatgctgagaatgcttatatggttaccatggga

SEQ ID NO: 113951 - DNA, 259 bp, Glycine max
ttccgtctgccttcttggatgctataatggatgatgttctcaactctgcagatgccattacctgcatcccccagtgtttggatgccttatgcttaaatagtaatggcctgcaggctgtgaaagatagaaactctctgaggtgttttgtgaaagtgtttacttctagaacatatttgcgtgctcttgcaggggacacacctgcatctttgtctagtggactggatgaattaatgcgccatgcttcctcattgcgtggccc

SEQ ID NO: 113952 - DNA, 257 bp, Glycine max
ctcccgagtatgtaaaagctggtcaactcaccttgaaatcagacgtatacagtttcggagttgtcttgctagagctcataactggacgaagagccattgacacctcaaagccaaacgaagagcagaatcttgtttcatgggcaacacccttgttcagggaccccaagagatatcctgaaatggcagatccacttcttaataagaacttcccagaaaaagatctgtctcaagttgttgcaatagcatccatgtgctta

SEQ ID NO: 113953 - DNA, 146 bp, Glycine max
taaattttgtgagtgtggacatactctgagcgtgagacagagaaggggaagaaagagagagagtgatgggaaggggaagagtggagttgaagagaattggagaacaagatacaacagagcaagtgcacctattgcgaaaacgaaag

SEQ ID NO: 113954 - DNA, 242 bp, Glycine max
ttttgaagaagaatcagtaataaacatcttaatttgcatagtagtcgcagctccatattcccaatgtccctcacctctccatttgtccatggaacgacaggagatcagacctcctgtgatgtctgtgccataatttggtgggcgggaccaagatgaaccaggaactctcgactatacagcgagggacactcaagctcgtgataagagatcgcatcacaacgccaatctgcgtggaattcgaa

SEQ ID NO: 113955 - DNA, 222 bp, Glycine max
attataagaacttctatcccaaggataagaaggaagttccgaagaggaatgacaagaaacatgagtacaaaggtagaacatcaaacacttttgtgcacaccctatttttttctaaattaggaagctttcatggcaaattgttggaatatggtggtggctactggtgtaatgagtaaactggaggtttgagcatgcctagagttaccattttccacacaacat

SEQ ID NO: 113956 - DNA, 250 bp, Glycine max
  unsure (1)..(250): unsure at all n locations
cttcatctgaaacctgccagggtaagatcttacttgagaatagcactgcttgcacagaagttacaatatgatcacacaagnacatgaagaacgaactagaacgaagtttantgaatttagtggctgttgtggcattgggtctggatataatgctgggcgttaaggacatagttaagaacaggaggaatgctgctaagtagaatagttcagtggatgtagagtgcacatggcaagggtaagaagaagcaat

SEQ ID NO: 113957 - DNA, 114 bp, Glycine max
  unsure (1)..(114): unsure at all n locations
tcgcacgcgngtacgtgcgctcggaacgccgcgcggggtcacgactcgaacatcacgatcggctcacggctcagtcgacgtgaccactcgctagcgcgtaggacagggcgggca

SEQ ID NO: 113958 - DNA, 265 bp, Glycine max
attcggctccagcggctcgaggatctttgtttcaacaaatctacatttcatgctgtaattgtagtttcccatttcacccttatctctctctctatccatagtacctttcctcctttcctcatccctcgctctctgtaataaataataattattaccaactcttccgccattggatctgctcttccttccccttctggcaaaaagggtcagtctgctactgggattacatttttccttataattttggaggcgtgctgctgcttgg

SEQ ID NO: 113959 - DNA, 254 bp, Glycine max
ccatgaagcagctatctctttatcggacgatttcaagcctatgcttcccaatctaaagatagatacttgttccttaattattgttaacctgaattggtttcattcaatctcttcctaatatcatgtagttcaggttgtcttttcaaggtgtgaattaccattctcagttgataatcttgagaatttaaaggtggtgataggcgatgaagagacagctgcttcatgcgaagatttcaagcctatgcttcccaatc

SEQ ID NO: 113960 - DNA, 257 bp, Glycine max
  unsure (1)..(257): unsure at all n locations
tccacttccacattgcatatgacccacnanatcttcgactatagctatctttcattctctctctagctacttacaaccactgtatattctacgcgcgcgctttcgatcgatgctattatagtgttccctacctaccttatggctcctctcttcatctcaatgcaaatgcttcttctggatttcacttgcatattattgcatgtcacatgcccagattaccacgacaggacccccaatacagtgccttctacaaactc

SEQ ID NO: 113961 - DNA, 252 bp, Glycine max
cttgtatggtgggagtcatgaaattaattttgtgatttttatataagctttatacgtgtaacattgaagtgtgtgtaaaatcctttatttcgttatgatgatgtattgagattgaaattatgaggtgcatgtaattaaagcccttcatatgttggaattgctttgaagtagtgaagttcttcctctcactttaaaaaaaatcaaaaaaatgggaggccgcggattagtgtatacgatgacccgggatttaat

SEQ ID NO: 113962 - DNA, 123 bp, Glycine max
atcacttcgctctccatctctccggatcccactttgcgaacacaattcttcgattcattcagatcataatttcggtcgctaagcaaatgatcccatatcgataacccgatttcaatctcaatc

SEQ ID NO: 113963 - DNA, 208 bp, Glycine max
taaagtttatgggattttcaagtcgaaaagatgaaatctcattggctaaatgtttaattcatctaatcaagggaaagcctccaaagataaagacttcagatgggaattgcttggatgcagtgtttgtgcagtgattttagatttcttcaacgttttcaaaagctagtccaattcaacaatctgtttttattttagatttcttcaacgt

SEQ ID NO: 113964 - DNA, 275 bp, Glycine max
acgcgtacgcggaatccggattcggctcgaggtcatattgactaatcaatttgacacagtatcatgagatcaaagtaccttgtgagtaaattaacatgtggacactacgaatgaacacggtactttgctctcatgatactgtgtcatattgactaatcaattttctttgcccttgcttcttaagcaagtgtaactgatggaaacaaaagtctctgtattgtgtaaaaccgtcgttgtagcttcgttcccccacccccttctatgcctttgtccca

SEQ ID NO: 113965 - DNA, 281 bp, Glycine max
cacgcctacgaattcgcgctcgacttttggagcagaatcacttatatacatctctccttgcctagtagtcgtagctccatattcccaaggtacctcacctctccatttgtccatggtccgacaggagattagacctcctgtgatgtctgtgccacaatttggtgggtgggaccaaaatgaaccatgagctatcgactatacagtgattgtcactcaaactcgtgaagacaaagagcatccaatcgccaaactgattgcgatacgtaggcaaattttcggga

SEQ ID NO: 113966 - DNA, 245 bp, Glycine max
tttctactcatacttgcacttcaatactatgtttctttcaaactcatgaatcgtcactgttagatcagtaatcatgaatcctcttatgatcaagagctgcactgcatatcagtttagctagcagtttgaaccgtattatctgtgaattaccgtaacagcccttcatcacaggaggaatcaactggctggtctaacaatcactctatgcagttttatgttaagattgagattattcgtccaaaaat

SEQ ID NO: 113967 - DNA, 264 bp, Glycine max
tggaaatgtcatcaatgctcaaccttggggttctggaggtgacaaccgagaactgtggaatggtagaaaaaccggagaaatcaagcctgatgtaaaaggagctgagcctgagaaaggttcagaaaggttctggaaactgctgagtaagcctttggaaggctaccaaggaggtaacaatgaagtgattgagcgtagaaacccattagccttagctcatttcgccaatcaccctccaaaaggggtgcaaccaaatgtcatgatttg

SEQ ID NO: 113968 - DNA, 256 bp, Glycine max
tgctcatttgctcattattcatctcttccctctctactacttctcttgctcttattttctgatacacaagagatggaagatgatgaatctcctcagatcaaaggagttgttataatctcccttccacccccagataacccctcttttcgcaaaaccatcactgcttttactttctcttacccttctcctcaaccttctattcaaccccaccaacaccaaagtcaaccaacacaccctaatgctcaacacaacactg

SEQ ID NO: 113969 - DNA, 260 bp, Glycine max
cttttaaaatatacgagtggcatatttatcttctaattttataaagtttcccatgaaagtatcttgtcatgcatcataacagtcctacaactgcttaacaagtggaaactatatgttcaattaataaccagtcactaactctatctgaaatagtattatgttgtatgtatatcatgggagagcttagtgcctttttctttcttctaatatgtaatttgatattctagcttcccattgtattgcttcagaagatcaggcta

SEQ ID NO: 113970 - DNA, 261 bp, Glycine max
cacacacagaggtattttcacttctctcgctttcattttgcgatgcgtcgattaaaaattgaacaaccttcactgactcgttcagcgttgggttattgactttgatggttccaaattgtgttctgtttagagacaacaccgctaaccaaacgtctttctctcaacttcaacgtctttgctatttaaatttaaatcactgcacaacctattgcagtgtacctcattcttcgtttggttttggtttcaatttgcgtcgcacaa

SEQ ID NO: 113971 - DNA, 248 bp, Glycine max
atgaagaatttgcaaactcaaagaaatgcaactagcacttctcggacatggctgaccttaattttctgatgtgcaaggccatagagaatccaggcttgacaccatcgtcgtcgttgagaacgtcgatcatgtcggtgttcgaggacaccgtaatcgacaacggtggcaagaatcaaagggaggttggtgtggaggactacatgggatgcgcctccgtgcatggggtgggatcctctatcgccattttt

SEQ ID NO: 113972 - DNA, 221 bp, Glycine max
cgctcgccatgcttcgacacacaagagcatcagcggcaccggcatccgggcgaggtggcttcgctacggctcttgtcgctaggaagaagtctgcgaacgggtctgatgcggagttcgctgatcgtcgacagcagttcggaatcggaagggagttgcctccgatgagagactttcctcggttcctgaagtggactaagcatgtccagggtcagatgcggaag

SEQ ID NO: 113973 - DNA, 244 bp, Glycine max
caataaaccacctccgcgcgagcaccttacccagtgaaccctaccgcaccgaaacaaaaccctcgcaaaccctaaacctaatctcataggaacatggacggcgacgacgagacctcgggtccgatgatcgacgaaatctacgccaacggcggtggcgtcggcgacgacggagacaagcggagccgccgcgcaatcatgagcggcgaccagctcgacatcgaggcgtacgcggcgctatactcgg

SEQ ID NO: 113974 - DNA, 234 bp, Glycine max
gttggactcctcgtagcttgaggtgccgcgctgtgacgtggcgccgtccatgagagcgggtggtggggctggccctggtggactccgctttgttgtgagcggatctggagcggcgccgacgcaccgtccagtggaggttgaggcagggcggcggaggcggagagcggtgtaggcggatgagaaggtctacgaccagggagtcgtctgccatggcgaccttgacccagtgatcgt

SEQ ID NO: 113975 - DNA, 255 bp, Glycine max
aagaaaatataccccagagagaagaggagggggcttttattccgttaatttgcccctttggtgacgcgttgtatttcttagccgcttcttcaaccagctctgtgcttccttcttctaccgtctccatttccatttccgcctgcaacattcattcagagctaggttcagtttccgccattgatcaatgctccctactctctgtttccaggttccaacctcgatcttgtatctcccccttgcctttcgtacgatcct

SEQ ID NO: 113976 - DNA, 243 bp, Glycine max
ggaaaggataaacgaaggaagttgggccaatgaaaatggtttggcactttcctacctaaagagagagatgggtggggacgtatcgtatggccttatgaggagctacctcacctcacacaccaatagcatatgaagagagagaagaagtgaagataagcacagagagtgtcatctactcacctctactaccataaaaaaagaaaaacaaaaagccttcagagtcgactattcatcctttcttat

SEQ ID NO: 113977 - DNA, 258 bp, Glycine max
cgtttgcgtaatcagcagctaccttccttccttccttctctcttcctcctaccataccacgggtcggaaggtttctttcatggatgatggtccttgggaaataaaggttattcgtgatcacttttgatttccaacatctggtgtagaatctcttgaggacggaacgccttctattacaaaacctggaactgctaaattctttgagggaggtattgcatcctggtggaaaaggggaaagaaaccaatgatcagaaagtc

SEQ ID NO: 113978 - DNA, 260 bp, Glycine max
caattgcgatgaaggactcaacatcttgacaccaccccatttcctaagtttgctcctttctctgctccttcttattggttttcatttttgtcttctggggttccctttgttcttttcacgtgtgatgtgttcatgattcatagctccacattttgcatctattaatcagtcatgtcagttgatttggattagtcgtgttggacctggatgctgctgctaatacagttgatccacaaatgagattccgtattgcattgttt

SEQ ID NO: 113979 - DNA, 253 bp, Glycine max
ggaatcattaattctttccgttccagtagtagcagtttagtttatttcctcaactcaaactaaaatgctcaaaatgggactcaaaaacctgttcttcttcaaaacatcaccttcgccaccttcctcttctcccacaagaaccttctcctattcactaatggacgaaaacatcgaaaccgctcgctccatcatttccaaatgggaacttatttccccttcttaccaaaccgcccctctattcagcaacacacgc

SEQ ID NO: 113980 - DNA, 275 bp, Glycine max
gtcagcctgagatcatggcgaaagttcgcgtggctgtagatagaccatatcactcctccgaatcaagttcctgcattaccattctgggcttctctagcgttctaatgtagggtgtagatgagaatggtgatggtagcatgagagttatttctctgggtatcggtgactctactctcatcacttattttcgcatctcatatgtagctgaaaaagcagttgcagaagcacttcagtcacacaggtttcgtggctatgctcccactgcaggtcttcca

SEQ ID NO: 113981 - DNA, 265 bp, Glycine max
taagatccaatcaggattcagtttcatggggtcatcagaacttgactcggtcacataagtgagtcttcaagagttgaggaactctgccctcctacgctctgcagtgcgtgtgactcatgtcaattgtgacgactcattcgatacggcattccacgttgacgtgctctccgtaggctcaatggatgggactcagagccttctcatattctcgggagcacccccgggacactggtcacagattagacagttggtgaccttccacaag

SEQ ID NO: 113982 - DNA, 264 bp, Glycine max
attctccaattctccttctccttccaagttaatcatgggtttcaaatccctttttaacatgaagaagaagaaacttctgaagacgatgtcgtcttcgtcctcattgccccacgcgccaccggtatcgttgcattcatcacgcgcctccgtgatggaggaccttgaatatgtcttcaaaaagttcgacgcaaacggcgacggaaaaatctccgcttcggaactcggctccctgatgaagagcctgggccagcccgcgaccgaaga

SEQ ID NO: 113983 - DNA, 273 bp, Glycine max
gggtaacccattaaagaagcatgtgattagcatttttttttcaagtttgtatattcagatatcttgcgtcctaacgcttcataaattcgaaggtactcatattgcatttaaactactatacactcacagaagcctctgcgccacagtctgcatgcctcagcaaaatgcacttgtcactgagggaaattgcattgacacttcattgataacttctagccaaagctcttttatgagaaaatgatttaacgtctttaattttctccaaacaaagta

SEQ ID NO: 113984 - DNA, 226 bp, Glycine max
attgtagcaacagttttcacttttgttccattattagttcttatagaaatatttcttcagcaattatggctagcttgaatgttgcatgtgtggctgtaatgtgcatggctatggtgagtgcaccattgatggtgcaagccgtcacatgcaacgtgcctatcttaccctgatgcagggtggatcggtaacgatcggattcgtgctgtggcggagtgaggaacattct

SEQ ID NO: 113985 - DNA, 266 bp, Glycine max
taacaattcaaacagaggagggtcccctaggcttcaaggttcttggtaacattattggtaactcctaagatgaaccggtatgctactttgcttgctgatacaatctcagtagcataccggttcctcttaggagttaccaataatgttactaataatgttaaaaatggtcctgagacccctaacaattcatacagaggagggtcccctaggcttcaaggttcttggttgagaaatattattactggtggtgcaaaaccgtctactag

SEQ ID NO: 113986 - DNA, 265 bp, Glycine max
  unsure (1)..(265): unsure at all n locations
cccaattgcagtgttcgcttttcactctctttccacacaacatacgaaagagnnagctnncgnactaacgcttcatanattcgaaggtnactcacctgcatttaaactactatacactcacagaagcctctgcgccacagtctgcatgcctcagcaaaatgcacttgtcactgagggaaattgcattgacacttcattgataacttctagccaaagctcttttatgagaaaatgatttaacgtctttaattttctccagacaaag

SEQ ID NO: 113987 - DNA, 263 bp, Glycine max
gaaaaggtatcaaaaagatttctccaactggtgtggcgagtgcaatcgtgagaaaaaggaaaggcagcgctccacagttgctgctaccaaattggatttgttcaggaggcaaggtgaatccactgcataatctgttttgctcagtggatgattgtaaaatgtacctgcaatcatttgtcaatacaaataagctatgattcctgatccaggtgtatgtacaaggtgctctattgagatagttttcttcaagtaagctttggatt

SEQ ID NO: 113988 - DNA, 120 bp, Glycine max
gagagcgaggaggtttagcgtggtgggcgagctagcccccctccccatcaattcaaactaaaatgtctatgctagcttcccccttccagctcctggaactgaacatcatatccgcccaag

SEQ ID NO: 113989 - DNA, 245 bp, Glycine max
tttaaatcaagggttgattgaggaatatgattcaccaaagaaactgcttaagaacaagtcttcatctctagctcaactagttgaagaatacacaaggaggtcaaattctggttttggaaattaaattgaaaatgaattagtattaacctcgaaccagacatgtctatatatatatatatatatatggtcaccgttacacttcatgtagtgttctaccttactggactatggtagagattttactc

SEQ ID NO: 113990 - DNA, 254 bp, Glycine max
  unsure (1)..(254): unsure at all n locations
attcggctagagcgatgatgatggagtgccaggctctcctttgcatgagaatcatgagactgacactttnatgacaaatgatgatgttttggtcgatgagattcctaatgatcagcaagatgcatttcgtcagttctgctttcaaacactcaaactaggtgttggggccagagggcacatgcaattcccagggtcacatccagtttctttaaacagggagaatttacaactgttacgacagcgttattattatg

SEQ ID NO: 113991 - DNA, 236 bp, Glycine max
gttcagttcacatgtggcaatattcactaccttgagtcaatcctataaccaaatatgcattgatgcttactccagtcataaatgctgtaaaaaacaaagtttcatggcattacaacaaaaggttcacacatatgtttgtcagtacttccatgctcattagcactcttattgtagccgtggcaattcccttgtttggatatctcatgtcactcattggggcattactaagtgtctca

SEQ ID NO: 113992 - DNA, 247 bp, Glycine max
ctctgaataggaaaggaagcaatactctcgttacacatcatccttttcttcttctttcactgcttcgatgctctgatatctctctctcattcagggtagtgagctggttgttcatggctctttcctgaaacatccacacctgttcaaccatattaggacttttgtgaatgtgaaggtgaaatgggtccaagacccatatcttgataatgcagtcctgaaagagaaagatctcaaacagacaatttcc

SEQ ID NO: 113993 - DNA, 246 bp, Glycine max
taatcagagacttaatggcaacaattatggattcataaatttggagaaataaggtaatagaaggctagctatatgcttaacacagctagttcgaaaacgagccatcgaagtatctaactgcgcatttagctaatctgtctgagccatctcttttgaaggtatgacacctgctaggttgaccgcgccccgagggagactatggtaaggtcggatagatcgagtcttttgatactcttattcttagga

SEQ ID NO: 113994 - DNA, 249 bp, Glycine max
gcacaaactaccacattcaatgtgttagacaaagtctagaaacaaagactaacaaagtcatgcttggtgaccattgtccaacaacccgtaaccaaagttagaatctttgtgacaaaagctcacatggggcctctctttcagcatagtagtacttttggaagatttttgctccaaaattggaaatgagtttctctcatctcctccttcatctatgtttgttggttgcatttaatccacagctactagttc

SEQ ID NO: 113995 - DNA, 242 bp, Glycine max
ggttcttgaaaatctaatcccatgtcagtggataataaagatggtgcagagcgagaacaatggataaactgtcccttcttgaaggccaagttggctatgaggtgcatagaagtcttggcttattggtgacatgatgagaactagattgggacagggatggggcaagggccagagctagatcatggatagatagttccccaggtgatgatctgtttggtgagtctgctttcctagagcaagat

SEQ ID NO: 113996 - DNA, 244 bp, Glycine max
agcgcggttatggtctggtttcgaggaccagtgcctccaggagaagagaagtagtaagagaacgaaatcaagaatcgggattcttgtctcccttgctaccagcagcaatcttgcagcatcattttcaggatcaggattatcaaacgtaatccttaaggtcaaagaaaagttctttgctttcttgctctttgcactgagttatcaaaacgagacaactacttgggtgttgcaggtgaaaggaaca

SEQ ID NO: 113997 - DNA, 261 bp, Glycine max
attcttatcacatcttaattgattgtttttgctcttaatctttttcaatggaggctgaggttttaagagctaccatgtcaccaccaccttttcctctgtctggttcttcaacaaaaactcacagggcttgctttcccttcaaccccatctcatggaatggcaaaacattgggtctttctcttcaggcatttcccccatcatcctctggacatgtgccatcagagaaaagtgatgatggaagtgaaaacctgacccttgaaa

SEQ ID NO: 113998 - DNA, 256 bp, Glycine max
cgaccagggccttacgcgtgccgagatgctcgctcttcccaccggtcccaaggagcgttccgccgatgaaatgccgttcaaccgccttggcggcggtttctcctcctatgaccgctccggcggtcgctcgcgcgaccgagacggcggcaacaacgaaggttcgtggggcggaggaggcagaagatcctacggcggattcgacgaggagcgcaggggtccgaatcctagggtttcggaactcgatcagccgtccagg

SEQ ID NO: 113999 - DNA, 257 bp, Glycine max
ctatgattgacgatgacggagatgaagatgctgattatgcttttgattacaatgatgatgatatctatgaagatgattattcaagtatgcaggaccaatttgacaatgtggatttgccccctggggtggaggcatcactgccttggttgaaggacatttcttctagtgaatgcaagcaggctattgctttttcccgtacagaatctagttccaaggcaaaagtggatgaaactgatgatatagtcatgcaaaagttt

SEQ ID NO: 114000 - DNA, 255 bp, Glycine max
aaaatacttggtgagcttatgcattgtaatttgaagcatggcaggttgctcaaataatgcgaccactattttgagtgtgaactggatatgaagcttgccttaggtttttaaaacactcatacctagacgaaatcccttgattcccaaaatatagaaactttggatacatgtattactgtctcttgcagggtagctaataacattctagaatctctaaccttggatatcttcatcactacaccaatgataccactt

SEQ ID NO: 114001 - DNA, 104 bp, Glycine max
tacatttatttgttttacatatctccttgttgtgacctgcatagttcacatgaattttaaagttacaaatatatagatgtcattgtaatcttagtccacacaac

SEQ ID NO: 114002 - DNA, 253 bp, Glycine max
ggtagaaaaaaaatagaggaacacactcttattgttttgaatttattgaaaaccacaaaaatgtgtgatgctcttgaatcctgattttgtaatttccaataaattctaaccagtagcaaagagtgagttagagagtatgttcctagcactcctcaaaaaattaaagtgcaaaatgacacaaaacatggtctcaagcagtcaagccaaataagaccatgataacacaccgagtactcaagctctgaatattaac

SEQ ID NO: 114003 - DNA, 252 bp, Glycine max
cctgcatgctcctccaagccaccaccaaccgctacctatagtttctagtatatatacacaaaacaacacaccccacaaacatcacagacacagacacacaaaagtcaaaagggtcgcgatggagcaaggagtcgtagaaggaggtggcatgaataagatacctcgggattcaagagtgaaggagataagacaaggtgatgcacaaattcaggttcaggctcctcagcaaccccaaaagtgtcctcgatgcga

SEQ ID NO: 114004 - DNA, 250 bp, Glycine max
gtgccacacacgtatgtttgtcaaagccaaaatttttatagaaatttattcacctgttcatatcttaattgtatgtagaaaacaatgtttatgaggaatgatcatgaagctcagatcaaagcattgaggtgtgaacttgaagatgagtgtcggaagctggaagaggagttgcatcttcaaaaaatccaaagaagacaggcaaagggctttgttgcagttgcagtggaaagtgatgagtgacaagcctaaa

SEQ ID NO: 114005 - DNA, 255 bp, Glycine max
cttgcacttttgcacaagactcttatgcccttaacctcgaattatatgtatttaattacatgacctgctagtacttttcatttaactatgttcttatccctccccctcctcctccatgttgaaagcttgctaagctttcagcttgtccggaaaggaaacccaaacttacaacccattcatttgtacactttttaagaaaatggtgcattttaaatgtaaaaatgttttgttatttgaaaatattttttttttaaa

SEQ ID NO: 114006 - DNA, 257 bp, Glycine max
cttgaaaaagaagtctctttggtccagaactttggaagagatagttgaaaagcttgtagatattgttacctatatacatcaagcaatttatgagttcgctggaaatcatggacagctgcaaccaagcacagtgagggttctgaaagactaggagaagctggtcttgcactgcactatgctaacatcatcaatcagataaatatggttgcatctcgcccaactgctcttcctccaaacaccagaggccgcctgtatca

SEQ ID NO: 114007 - DNA, 252 bp, Glycine max
catttctacattttcccctctttggagaaatcaaaagaggggaacccatgattcctcctccatcttcctttctcttccagttcctcctcctctttcctctcttactctccattccgattccgattccggtcaccccgtgctcccgcgcccgctgatcgtggagtacccggagttcgacgcggtgctgcggtgcggcgcgtggcgcgtggcgggggaggcgaacaacctaggcgcgtgggcgataattcccga

SEQ ID NO: 114008 - DNA, 248 bp, Glycine max
gagtaatgataggcagatatatataaaatggccatttaataaagtattcaaagtgtgaatacctgaaagttaaatattaaatgaccatgtcttttgaaggaactacattgaaagttaggcactaattagttttggccttttggggtgcacctaagccaaaatcccctgccaaattcataaacttgttgtctcatgtgtgaacaattgggcatttttgtaacaagaacacagttaatagcccccagttt

SEQ ID NO: 114009 - DNA, 236 bp, Glycine max
tgtgaagcatccaatgcaccgtttaaaagagcttcgcttgcgcaaagttaatgatggtgaacgtctctgtcagattctgtacagaatgccaaatctagaaaagttatcttgtcgggcgctaaatatttgcttaaagagtcgtcggagtcacgtttgggaaccgtattacagctgaaggaattggatttgtggtggtcggagataaaggatataggatttgaacgagaaccagttcc

SEQ ID NO: 114010 - DNA, 150 bp, Glycine max
tgtttttgttctgcccttgctgaggcatatcaaggatcagccatctgttgttgctggagatggacctattgggctcattatggcccctacaagggaactagttcaacagatcacagtgctataaagaaatttgctaaggtactgggtctg

SEQ ID NO: 114011 - DNA, 158 bp, Glycine max
cgtacaatttgtgggtctcttaccaactagaacaaccaaccaagcatggctatactactatagaacaacaacttcacttctcaaactgtcagaataatatttcataccatcccaatccaattattcaccctcttcctatttcactccctcattctctc

SEQ ID NO: 114012 - DNA, 251 bp, Glycine max
catgaatccaaaccgatctgtctgaaacaaacaaaaaaggaagatgcatatgtcgattccagtggcaaatgttgcgttcctctgaatgaatactgacccacaaaaacactaccttggtgccaccccttttcctaccttctccacctttcagggttcctgaataattaaagatgggactggctctgggttgtcttcaagtggagcaatcaacggtagctatcaaagaagtgtttggaaaatttgatgatgtg

SEQ ID NO: 114013 - DNA, 243 bp, Glycine max
  unsure (1)..(243): unsure at all n locations
cgtttggttccttgtgatcgattagggttattattctttgtggttgcggaacgaagcatgctgttgctgttcgagaatggatgagttgaacggcgccatgacgaggagaatagcaatgcggaggtggttcgatgggagaggtttctgccgcggatggtgctcagagtgctgcttgtagaagctgatcattccacacaacatagacgcgaanatctgagcaccatccgcggcagaaactctcca

SEQ ID NO: 114014 - DNA, 256 bp, Glycine max
ttcttgctcttggctgttctgcgtgtgtttggcccatatattacactgttagcactgcttatcagaaagcattcgactcaggattatcatacgatagcccagcatcagttctagggcttcttttcgtggtgaatagcattatcttcatgacactgggtttggccattggctacccagttgcttcagcttcagttaaggtgcttcaaggtctgtggaggaatgatttagcagcactaaagggttcttgtccaaattg

SEQ ID NO: 114015 - DNA, 160 bp, Glycine max
attagcgactatggtcttccagtgttacattgaaggtccagatgagtacttatcacgctcaagttctacaaatagggttgctcctaaattagatgtatcacaatatacatcttgcagtaatgatgttgtgaagattctgctgcagtgtacatcaccgttg

SEQ ID NO: 114016 - DNA, 148 bp, Glycine max
gagaatcacttggaaacaaccgcgctaaggttggaacttggaggaacttgtgtctgtgtgtccttttttccagagtcatggctatggctttgagtctctcccaattccctgttcgtgggtctgtttctttgcccaaaagaagactacc

SEQ ID NO: 114017 - DNA, 103 bp, Glycine max
gagggtcattactgttagactggcaacggtagatagtatttctgcgtatcttgagagtgttcaggatgaagtggccgctgtactcattgctaaaagaaccctg

SEQ ID NO: 114018 - DNA, 134 bp, Glycine max
ttcatctacttcaagaagatgaaataaactttcttaataatgcacaatcatatctttttgtgggacttatcttattcgcaagagggcaagtgtcataaattaaatgcaactatggtttgtacactctaaaagga

SEQ ID NO: 114019 - DNA, 170 bp, Glycine max
ggtctttaatgatttcatctctgttctctattaccagaatatgaatgtctctaatttggggtatttttatatttaagcttgatatatataacttgtatctaaaatttagccatagcagttatctgctatcccactatagtgttttttgggttggcctctcgtcactgtta

SEQ ID NO: 114020 - DNA, 225 bp, Glycine max
gaatcttgtttggagtgacaccctactccatgaagtgattaagtgaatattggtgacaagattgacaagattgttgtgaggagggggggagagcatatgcttgcaagttacatacagtatgtatatcacttggtatattgctaaatcttaatgtcttctacctttcactcctgactaatttttagtgtatgtgtagggatactgttaaaatttgtttatatgcga

SEQ ID NO: 114021 - DNA, 259 bp, Glycine max
gagttctcagtgcatggtagtgatgaagagattgacgatcaaccagaggtgggcagtgatgaggatttcagtgatgatggcgacaaacatgcccttgaagaggtagacttgtgttttcatgttttataactgatttacctatctgaatatgtaatgaaattccccctaaagaagaatttcaagtcttttgggttgcgtttggtgttgcccatgctagcaacggcaatgaatctgcaatgagtgtgtttggactggtgtt

SEQ ID NO: 114022 - DNA, 268 bp, Glycine max
tcgaggaagcatggaccaaactgctactaccgaaacagggcagagtgatcttttgtctattatacgtccaatgcttgtttatacaggcttgattgaacagttacaacgtttcttcaaggtcaagaaatcaactagtgcaacaccacctgcaaggactgaaggggcttcatctactatagaaggggaagatgaaagtggaaatctggaaggctgggaagtggtaatgaaagagcgactcttgaatgtaaaagaactgctcgagttcccc

SEQ ID NO: 114023 - DNA, 130 bp, Glycine max
aaagaatcaagcgtttcgtgaattggattctctgcaaatcaggatctgctgcttcagggcttcactgtttgtcttgtagcttcttctggaggtttctatggagagtagtggcaagatggaagactatgaa

SEQ ID NO: 114024 - DNA, 124 bp, Glycine max
caaaacaaataaagctatgtatagcttgcaggaaaggcctcctgggtctcttttgtggtttctattattagcaattaattgcgcacacaaatgtgggtcatgtgacgggatggattctagctat

SEQ ID NO: 114025 - DNA, 100 bp, Glycine max
ataatttcagatctcgtcgatcttgagcttcaacaatggcgaaaccaaggtactctcgtcttccacctcgcaagtcatcgtcgtcttccacgctgattct

SEQ ID NO: 114026 - DNA, 161 bp, Glycine max
caatgattgtgattagtggcaatatgagaagtatctggcctgtgctgctgttcagtttgtctaagaaaatagaatgtttaactgcaagatgtatgttgaagtctaagcttgtatggttcttgagaaggtggatttgttaatatttggggttagcaaattga

SEQ ID NO: 114027 - DNA, 264 bp, Glycine max
ggactgtggttgagaagtatctgttgtgatggacatggcaatgtggtcagttcagttgcctttggtggttgtcttccattggatctcttaatttgtactttttattcacgtgcatttaccaagaattggaagagattttcccgaatgcattacaggtgaaccttagctatggaattttggctgtaactttttgttcgtaaacacaaaaggaacaatagtttaggttaatgtttgtttttcctcacttttaatgaggcattctac

SEQ ID NO: 114028 - DNA, 156 bp, Glycine max
cgacaggcgaaagacatggggaggatgtttggggtgcatttttctggtgtaattcacagaaaggtgggatgcgcattgtacctgcatctcgcattcctgacagtagtggggcagcctctcatccagatggacctcaagtgattgggttgaccagtc

SEQ ID NO: 114029 - DNA, 251 bp, Glycine max
gctttttgaagttgaaactgataaaaatcacgcatctaatctcgaggtactgatacaaaaactcctggagtgaaaaatgggaaagtttcaagtaaagaggcaaagtctaaggctctaaatgcatctcttgggaaaagcaaatctgatatgacgtcaagaagcaaagcatcccctggaagcaaaactagagttacaaagagcaaatctgagaaggaagaggaaaatagaaagaataaggaggaactgatgat

SEQ ID NO: 114030 - DNA, 261 bp, Glycine max
gtgggatgcagaaggaacaatgcatcttgtaaatcaaaccttgaatgcatctactgtaaattcaaatgaccagagcttaggggaaaggggttacgttgtgatgcgagcagcggctagaaaaaatactgctcaggaaggagatctctctgtgaatgtggatatggcttcaggcattggtcttgatcctgtagcaaaaatgcctcccagaacgggcaaatcaaagacaaaaattatagtccagagattgatacgcacactgcg

SEQ ID NO: 114031 - DNA, 258 bp, Glycine max
cttgtcccattcaagcacttgatttctagttacataacaactatatgcatcttgtaactacttaaaccgtttcctacgatttgactctacttttgattccctttccagccaccaaatcaaaccaatacctcactgtttcatagcttttttcttcaacccaacttcgtggtcaacaatgatggattcagaaggagcactgccccaggttcaggaaatagagcaagaaggtgtcggtggagggactaacaagaagatgga

SEQ ID NO: 114032 - DNA, 257 bp, Glycine max
aattggctgaattaataatagtcacaccggagccatcaagttgagtgggagatgcttgccatgactgagattcttgaagaataaaatatcaaatcttgacagattcagcgtgtgtgaccaagttagtggaaattgtactttggaactgtaatcacaaattccctatcactaattttaggtggtggttgtacttttaataagtttatgtgaaaaagaaaaaaacagtgcttttgtatattattcctagatgaattgta

SEQ ID NO: 114033 - DNA, 136 bp, Glycine max
cgaataccaatatgtaaacccgaagacatctcatcagggaattggattactgttagatcaggctgaacacctgcaagtgttaatgtagatagacaattcaaatgtacagctttcagtaggaaacaaatagcttgtc

SEQ ID NO: 114034 - DNA, 252 bp, Glycine max
ctcggttttaccaagcatggagcttcctacaactgatgtggaaccttagcctaagaagattgaacctgagaaaaacgaaggtcccttgttccattgtgatttttgtgatacagaagtagttcacaagctggctcaaatgttcctgccaggactagcctgtgcctgtgttgataacaccacaggcggtcccttcaagacccctggttcagtggctgttgatctgagaaaggtaatgatagaatttgtcaccca

SEQ ID NO: 114035 - DNA, 204 bp, Glycine max
cagaaactttggatgaacctgatggaaagctttcttatcaggaacttggaattgcgaactttctggttttcgtgaatggcttgctctccatccaatcattgcagaatcagagaatgcttcaaaaatgataatttttgctcatcaccacaaagttcttgacggagtacaggtgtttttatgtgagaaagggataagttttgtgcg

SEQ ID NO: 114036 - DNA, 247 bp, Glycine max
atcacagcttagcccgtgctgatttcattttctgttagagtatacttatatcttgaccaaaattgcttaaaccataaacatttaacagcctcattttggataaattattagggttttagcatgtctctctaaatatttgattgtttcttggcgtactgttggttttttagttcatttttggatggtttattgggtactttgatagtggtcactaaaatttggagcattaatggttttcctctcacct

SEQ ID NO: 114037 - DNA, 252 bp, Glycine max
actttggtgagggatccaacacccatcagcgtaatacttctccaactccacttatctgtgcggtgcccccaactcaacatgctgttgttagtctttcttccttcctcatttgctacgaatagacttttcatgtcttcatctttcatctagttttcttgtctttcctgttacgttgttttaggtctcaacacctcaaagcaaagtaggtagaagaaactggaccttggtttaattaaacttggcttctgcaag

SEQ ID NO: 114038 - DNA, 265 bp, Glycine max
tctgaggtgactttaattatgaatggaaaacaatactaaaaatacctaaagaaccacatcaaagttttgtcctttgttttatattataattttgcaatgactatttttccctagtgaacagaatttctggcagaataaattgtgccattgttttgcatttgtagaatctggactattataaccttttatctcctcttactgtctaatgttcttactgctctgcgatagatttgttcattctttgttcactatgtttgtagtggaa

SEQ ID NO: 114039 - DNA, 264 bp, Glycine max
cattaatttgatattggacatgaaggggaattactatccacttaaactggctgcacgatgatgtacctggattatattttggatctaatgtaggatttcaaagaagccatagcaatctaccctgacttgagtaacgtaagattgaaagatttggaattactacttcaagatgttgtagctgctaaatagaagatttgcttgtgccttggaaatgttgctattttagctgccctgcagtggtttctatcgggaaaatggattgac

SEQ ID NO: 114040 - DNA, 166 bp, Glycine max
agaagattgagactttgatgtgtatagtttaaatgtagcaaactcgagctaaaatctgcaattctttgactcgtaggttttcttgatcgtcagttcataaatttaattttgttgggaatgaattgattgtaaatctcacaaaagtgattggatgcattgttgatgt

SEQ ID NO: 114041 - DNA, 263 bp, Glycine max
ataaactaagagaagctaatccaggaaatgcccttcttgagttgcgtggaaatgcaggaagccacgatcttgctttatctgttgaaactctactggctttaaccaaattgacaagagaagttgctaaaggcggattgcctgttgatgatgcagtctgcattcaatgggagaggtgatcgtgctgatccttcaaggtggccagaagttgaaggcccgatgacggttgtgttgttcgaaggttggatgcttggtttcaagcccct

SEQ ID NO: 114042 - DNA, 220 bp, Glycine max
gagaaaaaaagaggaaagttctgaaaaaattgaactccgacaattgcttttctcagcaactcttacttcatagaaaatatagctatagaggaagttggccaacggttaacttccctccgaacctagagagagtagtagtctcttgtaatcaaagcaaagttcagtagtcgattcttggtcaccttctgagactctaacttcaccttcctgacataccctt

SEQ ID NO: 114043 - DNA, 130 bp, Glycine max
atgaaatatctgattcagcactaaaagatgatcaaatggaatctctgttggaggaattaggttctgtttctgtcatgaattccaatcagagtgatctcgatttaaaactaggtacagttccacacaacat

SEQ ID NO: 114044 - DNA, 167 bp, Glycine max
tccgcatccgctagctcgcgcaggcaccagcaggtcagctccaagggtttcttttgttcttttctccttatccatccatatcccttaccaataatatcctattgttttgctttgttcggaaacgaaaccctaattttgggatcacaggtgaggttattgtgatttga

SEQ ID NO: 114045 - DNA, 255 bp, Glycine max
gtcggttgtgctgcaagacaaaacttgcagtgtagtcatcactctccgtgagtgcaaaacaaccccacactgttccttttttatgcggcttgatgcattgctaggaaacaaaacaacaccttcattctatgccctcataaattaacattcagaattcccacttgtctctcttattctctgccaaaacttgttacaagtctttaatttccaggtcttctctttctctcatactacttcaaagttttgctgtgcaat

SEQ ID NO: 114046 - DNA, 251 bp, Glycine max
atcttcacaaccatatcatccccaaaacaaaaaaaatccacgtatttgaaatccgacgctcgtttttgatggatttagcgtgcaacgatgaaccacctaccgcgaatattcggcaatagaaagaagcaagcctccgacatggacccgacgaagaagaagaagaagagtaagaggaattcgacgaagagccgaaggagaaggagaaagaggaagtggaaattgcagtattagagagcgaggatcgagctagg

SEQ ID NO: 114047 - DNA, 173 bp, Glycine max
aaataatctgtagcagcatccagagcaataggatttcgaataataaaaccatttcttctcctatgctagcaataacatatattgcacccatcgcactttgatgagaatggccacgttctttgcagtaatcagaggctcagagactaactcatccttctccattaattttatta

SEQ ID NO: 114048 - DNA, 202 bp, Glycine max
aagaattgcaaagaggagaggcaacgaaaagaggaggaagagagacaagctgcaaaagctgctttacaacagaagaaggtgaaagagaaagagaaaaaactcttgcgtaaggagcgagcacgtcttcggactctttcaggacctattttatcacagcatttacttgatatttctgatgatgatgtagaaaggctttgcatgt

SEQ ID NO: 114049 - DNA, 211 bp, Glycine max
caccactgaagctgctggaatcagtttgcttgcaggggcagtgggtcgttcccagttaagttacaaggggtgcagttgtcttccagcgatcagagaaaaattgaggaagtttcagtgtgaaattccagttttcaaattccaaccttgaggacaaggttgatttttaggaagggtgttgataagcataagcataagccacacatcaccaagg

SEQ ID NO: 114050 - DNA, 122 bp, Glycine max
aacacgttcccattcctctctcgctaacctcaccggcagcgccttcacggtcatcgtagccgacaccccccctccctgtcttaatggcatcaatcccagtcgcgtgttccacacaacatagg

SEQ ID NO: 114051 - DNA, 235 bp, Glycine max
aattaatcatatttttcaattttattgcaggattgtggagacggataagatgagagaaaagtgatgaagctcgtgatttaccctgtcatcattagttactttgattccttgttttcttatcttttagcacagaaaaagttcaattaatcatatttttcaatttttattgcaggattgtggagacggataagatgagagaaaagtgatgaagctcgtgatttaccctgtcatcatt

SEQ ID NO: 114052 - DNA, 208 bp, Glycine max
gcagtacagggcaccagaacagttgaaagacaaggtgatgttgtagagcaacagactgactctgcatatgggaatattagtaaagtttttaaagatttggacaatgtgtctggatcagcaaatgaattgaaatctgagaaagttgaagcagatctgagtccaacagaggttggaaataagcaaaatagtgaagatccgcactatatga

SEQ ID NO: 114053 - DNA, 232 bp, Glycine max
aaaacatacaagacattgatgtcactatcccagacatagaagcaatgcgcctagcacattacttaacaattggatcagagtgttccacttggtttgattctattggagaaaaacattttgcagaatttggatgggacgcaagggtagcacttagtatctacggtgctttcagtggcaaggagtacattaaagctcagaaactgaggaatcgccatttgcaatttcacatgaa

SEQ ID NO: 114054 - DNA, 114 bp, Glycine max
tcaataggtcctggacggagaattcagtgtcagattggaacaaagccggagatactatcaaacatatgtgaattactatggcttttgtgtcctacatcatccacacaacatacg

SEQ ID NO: 114055 - DNA, 161 bp, Glycine max
gttcggatcgagtggagtaacggggtgggttcactagatcagtgagaggcttgacagtattggtggacatcctcatacagatacttatgatcgtagtctactagtagtctccgaaggcaggagatcactatccagggcagtctcactttctcccttcaatg

SEQ ID NO: 114056 - DNA, 233 bp, Glycine max
  unsure (1)..(233): unsure at all n locations
caaagaaacaaactttgagtggatatgaatatgataggtgtcctttatcaaaagtaaaatcatatagctaagccagcggtgngactgaaggcatattttgtatgcccggaatatatgtaaatattttatgtcgtttgcttttgtaaagtatctttctggtgagtagcagacacggaaatttggggtttgcccaggtgcatttctattgttttgttgtagatctaatgatgccg

SEQ ID NO: 114057 - DNA, 230 bp, Glycine max
cgggaaatgtggtaatacaagacaatctgcagtttccaagtggtgctggtggcggttgcggcggcggcggtgctggcggagagatccaccagccccaccactaccgcccgcaatggtttgttgatgagagggatggacttattggttggctgcgaagtgaattcgcagctgccaatgccatcatagactccctttgtcaccaattacgtgttgttggtgatcctggggag

SEQ ID NO: 114058 - DNA, 231 bp, Glycine max
aatagtgcgtagtgagccgagctttgaatatcatgtctagcttcagcaagttgcagatcgagcacgccagcattgatgcatcaggtataggcactggcactgtgcagagaaatgggagtcagggacttcgattcattctctggtctgttctcgttgcatcacgtggtcgatgtcggaggttagtagggaacttaagactattaggtagaagtatttctacttgaatacgtt

SEQ ID NO: 114059 - DNA, 234 bp, Glycine max
aaatcattcttcctccaaaccagacacacgcattctttcctcccaagaaagcgggatcaccctttctccattcgtcaaccgcatttcttcaacttcaaggtttatgtctcattggatgattgatccaagggagaaggtgcttgacattggagggaggggaagagagtgcttggtggtggtgttttgaattgaaaaacgagaggatatcgcagatttttttcttatcgtttactt

SEQ ID NO: 114060 - DNA, 269 bp, Glycine max
ctctgcttcatccagggggactcctactcctagggcctcaagacagtttttggataattctctggattgtttacctctttccagtactgttacagatgaggcctatgagtcactgaaacggcaaaaggtttatttttcagatacagagcttaaagtgggtgatgaatctgacagtccccttttgaatttgagctactcaaaatctgccaaccgtgagaagaaaggtcaagctggaaatggaggcaattacaactcaaacaacactatgc

SEQ ID NO: 114061 - DNA, 267 bp, Glycine max
atttattttatagcttctgctgtgcagggtccttcaatctcacttgggggaacatccgtcatggagccttaattagatttttcatgctctcaatattgaatgaagatattgcttagtatcaaaacctgaacatacatactatatctaccaaccgggaatcctcttcctggacgtgttgtgtatatattctagacactcagaaaaatgaattgttttccgtgtttttcaaagactaagagaaccaacagcaagagtgagcaacaaggc

SEQ ID NO: 114062 - DNA, 264 bp, Glycine max
cgtggcgcatgcacacaccactttttttatgatctctctctctctatatatatgcactatcacacgttatagagggacacataagccaccacagtctcacgttgtagagctacattcatagttatagggagctcaaatctcaatggccctgaaaaggaaccaagggtggtgtgagaggagcacattcaatgaatgaagctttttggtttttgagtttctgggagtggatcaagttggcccccagatcttcaatttgtttgattg

SEQ ID NO: 114063 - DNA, 155 bp, Glycine max
cgcattcttcctttccccttctgttctctcttactcgttgcagtgcacgtcgattatctctagaagcttccccattatctggtcggcccagaccgtaaaatcgggtctgaagtggctcgagtcgcgtcaggtcgatgaagggtatctccaccggc

SEQ ID NO: 114064 - DNA, 262 bp, Glycine max
gtgcccaaagcggacagcaggctctgatcttaccacttaccctttacttttctagtacgcaagcttaagcagctcgatctcttcatcaatcagaaataccacattcactcaaatttcaataagaatatgacttgtgatcgatatcttaagttatgcacccgtacgtgcagtttgtacttaaccacaaaacaatctcacgaatcttctcttctcggtcgatcgcatatatgcatgtgtgaattattcagttgcaactgatgaa

SEQ ID NO: 114065 - DNA, 273 bp, Glycine max
cggatcgagctcaatatgatcaagttcaaggttgtatctctaggctttactttatgttttttttcttcattcttctcccattccatcttcacttccttcctttttccttgtcattttggattttagatattttctgcttggctggaccagtaatattatcttgtggtgcttgtgattttagattagatattttctgtttatcagttaccatgactactttagttgtaactgtgcctctattctgccattgtcactatattaccgctatctttg

SEQ ID NO: 114066 - DNA, 264 bp, Glycine max
aatgaatattgcctcgttgtacacctgcatagggatcactcacattgctgctagcctgaggataaaacattgatagcaatggatttcttgctgccatgttattgttcgcatccaaattcctgttagcagaatctatattagacatgttcttcttgagcagttgttccaaggtattactgtttgatccattgctctcatagtgccatggctgagtgtaggatcctggaatgtgatctagaacactgtttctattcatcaagtggc

SEQ ID NO: 114067 - DNA, 207 bp, Glycine max
cacgtttcctttttatctctatctttcttcagatcttaaccttattcttaccagatggatggctcagttaaactcttatttttgtcctttctctcgttgatcatctctttctccatagctcaaacctgctttcagaccataggcacttgttcttcctgtaaccaaagatgtttctgcctcagttcctcagtatgtcagacaaatcaa

SEQ ID NO: 114068 - DNA, 259 bp, Glycine max
gcctttccttacactacttcatttcgtggcatagataataagggggagtaggtattgcacacatgattcaaaagattgaaaacaaagagtacatgggatttggagacctttgcagatatatgaaggactccaaagtctattaggaaagccacttatagtgggtgcgaacaatctaacatggacattggtgaagtttatcaactctgagagttgtgatgttggtagtactaagaatgacttattggcagagaaatacagc

SEQ ID NO: 114069 - DNA, 260 bp, Glycine max
gtcatttccaaaagagaaaaagacattttcaataccattttttaagcctgtaccaaagtttcttccgattgttaaacctataccaatgccttttccaaagcctctacctctacctatcccagttttccagaagcctataccaaagtggattccagatgttaagcctataccaaagccaattcctatcccggtgttcaggcctgtcccagttccagtgaagccaataccaaagccatctccaacaattgagaagccaaagc

SEQ ID NO: 114070 - DNA, 256 bp, Glycine max
cgactctgtcagccaggaggttcattattggaactgggaaacatcatggggttggagtgagtgaaacttaacataaaaaagacttttttattcatagtgctctgtgttaatatgatttttttttaatatacgtgacctttttgttttatgagaattaatggtaaataatattttttatggacctaaaggtttagctttaataatcttaacttttggccgacctcttttaattgcatacactcgtacattatatgtg

SEQ ID NO: 114071 - DNA, 258 bp, Glycine max
  unsure (1)..(258): unsure at all n locations
ctctcactctcacactctctcactcacactcacactcacatcattgtatagnagattagagagagagaaccctaaactaaaaccctaaaattccattgcagcaagcaaaggcattgatcgatctgcatgggtcacgtaggttccagcaaggacggcaccgaggctgggccttccgccgccgcgatgggcatcgacgacgacgaagacatcgacctcggcgacgtcgatctcgacccgaccaacgccgaaatcctcgaa

SEQ ID NO: 114072 - DNA, 258 bp, Glycine max
gcaaaacgcgttcgtaacagaagaaagaaagaaaagagtaactgacaactgtaccagtagaaaaatcatcgacgcgactcgctgaagcggtgaattaaacaaaccgaagcgtgaagagaaggttctggaagaagcggatgggaaaatcgacgaataataacagagactggacgcagatgtacgcgatctacggaatggagcaatggcagaccctaattttcctcttgtgtcaggcgatgctgttttcagtgttgtctg

SEQ ID NO: 114073 - DNA, 255 bp, Glycine max
caaccatgacatgtctgcagtagctgacatcatcgttgtcactgcggattggctaaactacagagctgtatgccgttgtgacaggtgctggtaatggaattggcttagagttagttatacaattagcttacacctggagtcaacgtggtgctcactgcactagatgcctcgacaggtatccaagcactgcacgcactcaaggactacgggtctatctgagcttgtactgaatcatcaagctgatgtggctgatgc

SEQ ID NO: 114074 - DNA, 254 bp, Glycine max
ggagatgttacttgatgcagcaacatgatgatctttgggctaagattctgcattctaagtatggaggttggagggctctagatgaaggaacatcagtcaccaatgaatccatatggtggcaggatttaaggtcagtcatccatgaacaaggtgtgcaggccttgcttcaatctgcaatagagtggaaagtggggtgtggggatgaagtaaggttttgggaggactgctggcttacagatcaggaatccctaagg

SEQ ID NO: 114075 - DNA, 256 bp, Glycine max
tattaaagcaggtcacaatttgtaattgtaattgtaattgtagtagaatgaggatgcgttcagctaaataactttaagtgttgtgttaataagtgttcttatcttataagagcttatgtcaaaattttgatcatgaaacttactaatgtggtctggtgatgggtgttagaattcaattgcaaggtgtgagacttgagtctcaaattggaagtatgaaattctagtgtggggtgtataaggctctacaactacaaca

SEQ ID NO: 114076 - DNA, 254 bp, Glycine max
gaaaaattacctgtataccagagtattgcaagtgtaaaaaggtcttaaaattatgataatttcaggaaccatgaaaaattacctgtgtaccagtgtattgcagtgtaaaaaggtcttaaaaccatgataatttcaggaaatgacaaactatgtgccaattactccattaatcaggtaactggtggaaatttatttccttgatatgtaaattctactattgctgcatcagattttgatttttcagaatgtgagaa

SEQ ID NO: 114077 - DNA, 251 bp, Glycine max
gacctctgttttgtttaacacaaaatctaaaaggaaaaaaaaaaaaaaaaaaactatttcaccgattctcgggatctttggcctcgaatcgactcgaatcgattcgagaggtaaaagatccaaccccgcctggcctctgttttgtgatcgaaagccataaaaagttgttttcgatcacaacctcaatcgtattaagctgttgttgtcccccgtcgtcaatttcgaatattgaaaggttttagttgttgatt

SEQ ID NO: 114078 - DNA, 251 bp, Glycine max
gtgtgaagaacgacgtcgctttctcgtttgggggaaatctaaaatttccctaatctgaagcgcaggcagagaccttcccactcctcagagtgtcgccgcagcagcctccgtcgccggcagaaattgcaatcttctgctgccttattggaattcagatcttataatcctcagtttggtcctatgaaggacagacacatgaagaaaaaagtcaaaagattgaaagacatggttgagccagataaaaattgcga

SEQ ID NO: 114079 - DNA, 249 bp, Glycine max
aatatattttacagtttcttgtgaataagaccagagaaaatacaccaaattaacataatagaaatgctgacatacaaacaatacttgtgttttctcccaaatagcatagtaaattttgtttaatatgtgaactgtgaagcatttaaaatttgatgtgaatgtgatgatatcctaaacgggttttgttgcgtgaataggtatacccactcttcgcttcagttggtgtggctgttggaatctgcggtatgc

SEQ ID NO: 114080 - DNA, 252 bp, Glycine max
tggacagaaaaattcgggtttagcaagatgaaacccaaccagcttaccaactacagaatgaactgccatcaaatcatggcattcaaagggacaaatatgcttcataaaacggtgcctcaatgtcgggtcatcaatactcaattgtgagaaatttgtatacaaaaaagtgaatcgtgaaaggggaaaaccctagctttcttgtcgccatcttttttttcattcaacctagtctgtacatgtatcgactttagg

SEQ ID NO: 114081 - DNA, 250 bp, Glycine max
caacaaaataccttccaattttcatcacaaagctttcaatttattgcttcaaccgaccattcaccatggcatcatcagcaacaaacacttggattaaaaccacactcccttctcttccgacatcttctccgactaccttaaataataggtttccttcctatcctaattccaattccaattccaacaccatctcatgatcccttcaaacactccacttccccaaaaagtaccaacgaacctccacaaccac

SEQ ID NO: 114082 - DNA, 244 bp, Glycine max
gcttgtttcaattcaagagaagataaaatgggctgatgcaatgagtgaaattgacaagaagcacaggaaggatgtggaagagaaggtagaagaagtaaagaagtccattttcaagaagttacacactgtaagcaggccgacatcgacttcagagggcatgaggagatctgctctgaatctggtggagtgatggattatgaagaagatcgaagccgaccaaagaggaggcggcatccaatttctt

SEQ ID NO: 114083 - DNA, 117 bp, Glycine max
gtaagggtccaagagtgcctcttcctccctatgcttatttagtacatgctttagctgaataagcgtagggaggaacaggcactcgtggacccttacgttgagcggttttcaacgcat

SEQ ID NO: 114084 - DNA, 240 bp, Glycine max
tttttctaaagaaccctccgaaattcagcgtcgtccgtcatcatatcataatcatcaccaaaccaaaccaatcttttaattcaaagctcgcatttccggagacgccgtcgattcggcaacgccggcggcgcctcctacaccactacccatggccgccgcagttaaagcgaagtcctcgacggcgacgacgctctcgctcgccgtgagcgtcgttgttctggccatcgcctacatttacgt

SEQ ID NO: 114085 - DNA, 238 bp, Glycine max
cgctcattgttctaccgattgaaagcacgtcgaataagcgcttttaggatttaaaggggaaaacttgaagtgcctctggataagtggtggagtttgtttgtttgattgattttgcaaatcagttgaatggtaggatccccaatcacccaacaagatcaggtgtgattgaaggaaaaaggggcataggggaagttgaagtgaaaaatgctgagtgatagagatgggaaagaggacatgg

SEQ ID NO: 114086 - DNA, 235 bp, Glycine max
ttacgttcttagttctccacgccaaatataacagaagtgctgattggccatatagctattggcatattcaattacctttttaaaagcaaagtccaatggccaaatagactagtgttgtttatcaatataccagcaaatcacaagttcggggtgagaattttgatcataagaaccttgtaataacaacagcagctgataatggaaagaaggagagtaatggagcacctaaagacat

SEQ ID NO: 114087 - DNA, 235 bp, Glycine max
gttataaatgggcttttggtttggtggatgatagagggttatttttgttctaatgttggtcatacgatagagttccctattttactttctttcttgactttgtgaacattgattcgatttgggggtgtggatttttcttctgatttcttcgccaagttcgggttttgaccaattgggtcgctgattctcgcctcactttgatctgggtcgttcccttttcttcaatctcagttgt

SEQ ID NO: 114088 - DNA, 237 bp, Glycine max
gggtcctgcaaaaacatcagagatcccttggattgcattgatcggtcaatctgtttcaatagctacggcacagtctggatctgctggttctgaaaattcattagaaactgcatggagagcagagagtgaaagcctcaagtccatattgacaggagctgctccgagtaaacttggaaggattgctttagtggatgccctggcacaccagattcagaatcgtatgaagcttcggcttcc

SEQ ID NO: 114089 - DNA, 257 bp, Glycine max
aacggggactgccagcttgttgagtttctaggtttgtgtgaatatttctgttcaatgaattgagaagaaatattcacacaaacctagaaactccacaaacggggactgccagcttgatttacttgacttgacccatatttcctcaatggactttgggccggaatcataccagttgcaaaatgatagggtagttcctggtgaaagtcacgacatggtgaatattccgtttcagacttcgatggggttaggtgttgcaa

SEQ ID NO: 114090 - DNA, 193 bp, Glycine max
ttcaacttccaaccaacagtagctgtagattctatggtctccaactacaacggaaagaagggaaaagtaattcactttccctttcaccaaccaaaggaaaaagtaaaagttagttaaagtcgaaaattttcagttagattccccctcactttgatttgatctctatgcccttcatctcatgctccgaaccttt

SEQ ID NO: 114091 - DNA, 256 bp, Glycine max
cttcccaaaaaatatacagcaccatggaacaccaaaaagaggagcaactagaaccagtgagtcctgtgggacaatacttcaacagctctgtgctatgcatatacatcattggagttttagaattcgaagttccaatagatgacttgcaaacatatgctcttcttaaagatgttttccttcccatcaatccacgcttctcctccatgctggtccaagataaagatggagagaaaagatggaagcaagttgatgtaaa

SEQ ID NO: 114092 - DNA, 259 bp, Glycine max
cgtacgtaaactttttacgcaccgtgtgaaaggatcaatatatacgttagattaaatggacagcttagattttttttcctttttatattttttcttttcttcttttctgtctttccagatttgtccctaatctttctctcacattccaattcaaacaacttccctcaatacagcggagacggcgaggaagccgccgccgtaggtccggtggtttccgccagcgaggcggcgaatcactctcggcctctcggaagcccag

SEQ ID NO: 114093 - DNA, 261 bp, Glycine max
aaaacttttcctcctcttggtaagcataaaaataggaccgggaaggaaaaaagtggtctcacttaaattctcaattttgtctaaattggacaaaaaaaaaagaagaaccacaacttaacttcttgtatggattataaagcaaatgcgaaggaaacaaaaagaatgagaagattgcatctaaaatgacaacatcatccatctcttacacgtttattgtgcaagaatgagaatgagaatgaaacaaaaagaaattcgaagata

SEQ ID NO: 114094 - DNA, 197 bp, Glycine max
taaaaactgatattcagcaacgatatggctttcgtgtgtactatctgtctgctcagatcccacagatctgcatcttcttattcttcctttccatattgtgtgtgtgaattagaattctgcaagatcagatctctctctgcgagtacatcagatctccgatgtctcagtcatgcgctcaggtggtccacttcgacaac

SEQ ID NO: 114095 - DNA, 192 bp, Glycine max
ctgcaatttagcttggcgtcccatgccatgatcgtctttgatttacaattcaatttctttgcaccacagatcaattgattttaacactgtttgacattgtaaatattactactcaaatgattccgagtgcaattcaaaactcaagccttaaacataaaaaaaaaaaaaaaaaaaaaaaaaaaaaaggggggg

SEQ ID NO: 114096 - DNA, 173 bp, Glycine max
cttatgtattacatggataagattaccaaaatataggtccctccaggtttcagcagtctgcaaagtaagaaaataggcataattagtgagaattttgaaatgaagtgtgtgactattaaaaacttctgttcaaaactgcagaaatttattctcagtacagtctatacaacata

SEQ ID NO: 114097 - DNA, 258 bp, Glycine max
aaccaaacttgccaaagtcttttatttccgtaatttggaaatatctatgtagttggtttcttaatttaattaaaggtggaatgaaaactctccctcacacgtcacaactttgtatgatagctcaaggtttgtatcttctggctcataaatttcaaggttgtctgcttcagcatgataagggaacaaggaaacacactgtacatggcttagcgttctacgctggtattcatccggaagaagtttggatagaacaagttc

SEQ ID NO: 114098 - DNA, 241 bp, Glycine max
ctctctctctctcttgtatcgtggcaaagtaaaagtctctccctcacgggacagtggttttagctgagctctctctcactgcaatgcaatctctctctggatttgtccttttcttcctctgagcgataatggcgaaagagcttctcctgcaacttcgtctgctgcttcttcttcccgaacaacggtgtcgatttgcacctcctctgccaatgctcaacaacttcgcattctccgctttgtg

SEQ ID NO: 114099 - DNA, 236 bp, Glycine max
tggttctgcagataaaatacttgagattatttggtacttaagttaacacagacagtgactgtgaatgatggatgttgctgaggttgaggaaaatctgtttgccgcaagtgatgccaagttacatggacagatgtgcaagactctttctataatctattgcaaagtactgtctgtatttccttctttagaagctgctaggcctaggagtaaatctggtattcaggcattatgttcat

SEQ ID NO: 114100 - DNA, 237 bp, Glycine max
agctaatctcccctgcatcctccactggcgagaacgtgcagcacaacgccaccaccacttccaaggcggcctcatcagattccgagaattttgccgagtcagtgatcaaggggccaaagcaggcctctggggagcacaagaacaaaaggaagatcaaggtgactttctcatcaggtcaagagcagcagaatgcaccatcacaggcagttaggaaatgcttgcactgtgagataacca

SEQ ID NO: 114101 - DNA, 235 bp, Glycine max
ccatccacccgtggtgatccacatggttaggaggctcatgcctcttgtatgttgtcgagcgagttggaacccggtacacttttctcattcgtgagccactctgtgcactaacacgtgatgcacgtgccgtcgactgggctacagtgtcgcttgagttacaccttggggttgagaaccttctggagcttcctctgctgataggagtagccacatctgctggcccatttgctcttac

SEQ ID NO: 114102 - DNA, 236 bp, Glycine max
ccgcactttaccgcaccctgcgactccgcgtgggtttggcgaaaccttctagaattttcttccatggaggttatcagagttctaacggcggcgttcacggtggcggttcttgtgacggcgcttgccttgtagcgcctccactggtggcactgtcataatccggcgcgaagttgccccctcaacgtgggagagtgtcgctgaagaagttgtttcgggtacggctaagagatttctgg

SEQ ID NO: 114103 - DNA, 230 bp, Glycine max
atttattggaccgtttaatttgtgattcacattaatttctcaagcaccagagtttttagattcactcttctgaatgtggttgtagtgagagagaaaaaaaagaggccaaaattgtttgtttgtttgtttgttgagtaagggttttgcgttgcgttatggctgaatcatcggcgtgtcttgttcgatccttctcctctcccgcagaaactacttgttacgagggtaacccc

SEQ ID NO: 114104 - DNA, 231 bp, Glycine max
agtcaggccatgaatgagaatagagatattgcaaagacccttcttctgtactcaaggtggacgcattacactgggcagaaacaaaaggaagatgtaataagtctttatactagggtgagggaactgcaacccaaatgggagaaagggttcttttatattgctaagtattgtgatgaagtgcttggtgatgccaggaaacgccaggaggaactgcttggtgatgccaggaaa

SEQ ID NO: 114105 - DNA, 129 bp, Glycine max
ccctagggctttgagaaaaccacattgcccgaaggcagataagcaaacgcagggaagaaaaaaagataaaagagtttcataataatcataagctgttagagatgaagaatggactcgacaccacccatg

SEQ ID NO: 114106 - DNA, 264 bp, Glycine max
tcaacacctcctccctcactcactcatcaatggcatcaacaatatcagcaatggccatgatcaacgccaaatgcgtcaacccaaagttccccaaccccaccaagctcgtaccatcaaaaccttcccttcaggtcaaccttccaagggcctaatagcctcacccgaaaacaccaaactttccactgcgacagaatcgcaggagcaatattcacaaccctcggaacctgcgacgccgctttcgccgttcaacaaatagccgacata

SEQ ID NO: 114107 - DNA, 258 bp, Glycine max
aattgtgtattggcacagataagtggatgattccgatgctattagagacatattctggacacatccagacgccattaaacttctgggtgctttcaacactgtattggtcattgatagtaacgataaaaccactaggtatcagtaccactacttgagatcgttggagttacttcaaccgagttaacattctctgctgcatttgcttttgtggagtctgagcgagctgaaaattttacttgtgcactaaaaagattaaga

SEQ ID NO: 114108 - DNA, 256 bp, Glycine max
atctcctgctacattcagagttcttcccctaaactggactgttgggatggttggaatactagcaggcactgttgaggacgcattcattgtttatgcagctatcagtggtgagattccatatcataaaaccttcagtgtacgaccaagataaatcttccacggctgagcttgacaaagtccatatctgacatcaagttagcaaaatacgggaagtggtttgatgattgcagtgatgatgtcagaatatgctgcacca

SEQ ID NO: 114109 - DNA, 263 bp, Glycine max
tcgattccaaaagctgcttcctctcataaattctctttcaacgcataatcattccatttagttatcatctgtgacaccatcacactgcgatcatcatcctcattcctactttgcacacccttatgacaatgatgatgtcatgacttagattcattggtcacagtcacagactctgaagaagaaaaacaacagctttgaattgattacaatacaaccttaaacgatgtcgttgaaccgtggtggaggaggagaagaagatgaac

SEQ ID NO: 114110 - DNA, 252 bp, Glycine max
caggaaacagaagccatgagaaggaaattgcaggctacgaagcagaacaagtttatgctggaagatgaagttaggtaatgtttttcatgcctcaaagtagtaggtggtttttcatagtttgcagtttattgtattcataaaatggttattgactgttcatagtttgcggtttgttgttatcctcaccactgtctctcttgtaagctgcagatttttgaggcaacgttacaattacttgctaaaacaccctat

SEQ ID NO: 114111 - DNA, 254 bp, Glycine max
agcagatgcagcagctggggacacttggctgacacccaccagcagaagaagccgaacccacatcgaacccaccactgaaccttagaaactcctgctgctgttggtgttcgtaactcctaaacatctcttgctgtccctcgccgccacagcggcagccaactgctgcgcctccaagatctgctgctgctgctgctgaggcgccggctgtgcgtcgcgaatcaccaactgcccgccgtgaacagcggccgtcgcag

SEQ ID NO: 114112 - DNA, 244 bp, Glycine max
gggaaggagagcagatatgaagcaaggaatttacccacaaaattgaatcctcagccagaagaagtatgcccaagtgccgaatggaagtggtctagaactactgtagtttatgatgcttcatctgatcatctcattcctttttatcccctctctttttggaaacattggttcaaccactgggagttacttgcaacttagagctgcaaatattcacaatagaccaatttctggtttaagaggagag

SEQ ID NO: 114113 - DNA, 242 bp, Glycine max
cgaaacagacagagtggaagattcaaaacgagtacgtacgcgtcggttcatggtttcatcatcttcactgataataacaccaacagaatcgcacaactcaaccgtatctccacgctttctcaattgcgtcttcctgccactacttctacaaaacaacaaaaacaatctttgttttgtttcttcatttgtttttcctccaccaccttctgaggtcaccttgaaagtgatttcattggaagcaa

SEQ ID NO: 114114 - DNA, 245 bp, Glycine max
attaattaaattttgtcttataacatcccactaacaaaaactagtaactaatatttgtgaataataaaaaaattgtcttatgacaatattcagcataagagctttatgatcccaggcctggggtttgtagtctatccacatatctttaccaatgccagtgcaaggaattcactgccagtgtcaagcataggactcaaccttgtaaataccaacttagattactaattgatttgttgtagttgatg

SEQ ID NO: 114115 - DNA, 240 bp, Glycine max
ctcatcttacactagatggcattcccttgagagcccattggacccatcactgagggacgcattatacgccaatctaaatgagaaggagcctcagccaattatgcatgagcccagaagaaggaagatgagtcaaaccacaaacttgtgtttgactatgtcaatgctgcactattggaacttgttggttatgggtcagaaaagtgcttaaagagaagtaagagccactacagggtccaagtc

SEQ ID NO: 114116 - DNA, 241 bp, Glycine max
gaaaaagctagatgggagatattatcaggtgagattgattatttgtaatgttgtaacaagagtttatgcattataggttttttatatgctgttttataatgcctgatttgagcctagaagtcacttcaagatgcaaccgatccttcattgacttctactttcagattaatgaattcatttgccaatagtatagttatttttttcttgtaagattaattctgacctgttatttatttattta

SEQ ID NO: 114117 - DNA, 249 bp, Glycine max
ctcagacgatgcatataccgtgggatgaagctgggtgtttatgccttgtgggtgacttgtttaattatgatgcacctggaatggagccatctggcattgaggatttagagcattttctatctaactcttccatccatgatactagcttattaaatggagataataatataatggtagatgcagaccaccttgattctcactcagagattaacagatggttggtttgaggaagatgttaatgcatattgc

SEQ ID NO: 114118 - DNA, 246 bp, Glycine max
atactcttgatttttcgaaattcgcttttgatgcaatgttgtatgtgtggatattatgtgaattttgttgtttggtgtttcaattgtttagttttggatcttgatatggttggttaccttgttgactggtaatgaacattttgagggtgaattaggcaatttgcattgtcgatgtgttgttttgagtttaggccttttgtgttacgcaggttgctgagaagacataaaaaatggtaaagatttgct

SEQ ID NO: 114119 - DNA, 252 bp, Glycine max
ggactgaatgatgtgagacagtttcaattttctggagtagaagatcatgaagagtatgggggaattgactcattttactcaaattttgggttcttcccagatgatccatcagaagaagggtaccttctatccactaatcaccaaaagtatcaccaaatatttgatgattatggactattggatgataaccttcagtttgacatggtatctccaccactccaatttgatgaacaatatagaaccatggttcca

SEQ ID NO: 114120 - DNA, 113 bp, Glycine max
ggaagtagtcctaatgcagctgatgttcctactttacttggatatggttcattttcgcttcttaatgttgatagaaaaacagctgacaaactggtgaagccccctccacacaa

SEQ ID NO: 114121 - DNA, 243 bp, Glycine max
gtcatcgcttgtgtgggaaaactgccttctattcatgtgcatcatcctgtattaaatatataacgttttaaggtggttgtgttatcgttcacatggagaaaatatacagtgggggttcttccatcagaaggcgttcattgagcatatcaagtcacataagccatcatacagacaatgatgatgatgctgaatgtgagagtgtttcagaggctggagacattggagatcgtgttactattcgaa

SEQ ID NO: 114122 - DNA, 241 bp, Glycine max
gacaaggagccaaaactcgcaggattcggccttagcatacagggaccgcaatttaattcgaagaagccgaaacaaattaatgcagatcatattatggatactcttggttacatgcctttggagtatgtcatgaatggttctgtcactgataaatgggatgttttctcatttggtttggttctgctacgagttgtgtgtggaatggattatttcataatggcagcagagaggaaacgtatgg

SEQ ID NO: 114123 - DNA, 107 bp, Glycine max
attgcctgccgaccagtttatcaagggatgaattttctgtgaaagggctttatgcgaatactccaagttcaatgggagatgaagactgtacctttcctccactggat

SEQ ID NO: 114124 - DNA, 246 bp, Glycine max
atgatgcattgaagtctgcgttcaagttttcatctgctgaagcaagtccgttgaaaagtatatctgattataatatagacacaaatgaaaacatagaaggtctgccaattaatgacgggaacgttaaagcatctcctattgataaaaaattgaggtctccaatgaatgccaatcatgatggaattccttcttcactatcaacattccatgaatcagccatgaaatctggtaatgcagatgacttga

SEQ ID NO: 114125 - DNA, 244 bp, Glycine max
cttctttcatttttttcagcattttccacgagggaaaaagaaggaaaacatcgtgagaagatagaggaatcattagcagcagaagggtgtgtggatttggaacaaaatggcgagagaagcattcattttcaaggaaagcgccttgttatctctcagagcgttgaagagcttgttgatgttgatatttgcggttgctatgctgctgctgctgccattcagagggcggaggagggtgccaccggcc

SEQ ID NO: 114126 - DNA, 246 bp, Glycine max
cacaataatcaatcctttcactaagtatgctgtactaatcaccccaatagctaatgctattgaggaaaaatggcttctctgcaaaagaaagcctattgccattttggttagaacaaccattttggtcagcaccgtgcttatggcactattcatgccgttgctcggttatgttatggcatttattggtgcattttttagcgtgacaatctcattgttgttcccttgcatctgttacttgaagatgaa

SEQ ID NO: 114127 - DNA, 103 bp, Glycine max
cgaatactctgagagcgaaagccagaagagagacgttagtattttggtaataataccttcaaaactagaaatcaaatttgtggttgtatgcactgcattgcag

SEQ ID NO: 114128 - DNA, 240 bp, Glycine max
atcaaattttagacgtgctagaagagtagtgcttgacatggctgaatgttgcccgttgtcaccacagtttgcatcttcactttctgcaattgctagttcatctagtagcatgcttgttgagagtggaatgcgatttatgcacatagttgaagagatattggaacagctaacgccaacggttagtttgcatttcggaggaaatgtactgaacagaatcttacaactatttgataaatacat

SEQ ID NO: 114129 - DNA, 243 bp, Glycine max
ctttgaaagactgcaagtttcctgagtacctcatgcttgaccctgggggaactgagtctgagggagtttcacttatgaaggtttgcccatatacatattgttctcttaatggccatggtcatggtcattctcctttgcctccattgaagagcttcatgtcagcaaggaggcatcttttggagactcagaagaatataaaggcggaagttgcgagccctcaaagatggaaggtgcccccctgtg

SEQ ID NO: 114130 - DNA, 269 bp, Glycine max
atcactttcttccccatcgtatgtgtgtccctgtcagagtatgatatgagaaactctataaattaactattttttctcccactttctgaatcaaacacaacacacacacgtaacttcatctgggtttcaggaaaaaagaaaaaggaaaacaatgggttccgataatcaccagaacttggagttcttgaaggagatcggtttgggctcttccaacattggctcttacattaatggccagtggaaagccactggttcttctgtcacttctg

SEQ ID NO: 114131 - DNA, 262 bp, Glycine max
gttttctatttgtccaccggattacaattgggcaaaaaagaattttgaaatacaaggtgcagcaatgatgaaaaatattctaaatgaggctcgaaccacaatgaataaaccaaattgggtcaaagacgatgtttgggagagattatgtgagcattggaaatctgaagaattaaaaaagaagagcacccaagctaatatgagtaaagagactggcacccttcctactccattggacttgtttcgtctcaagcatcaactttca

SEQ ID NO: 114132 - DNA, 151 bp, Glycine max
ttcctttgtgtgatttcatttgactgaattgcattaacatttcccctcttgttctttttcttctggtcattgttgatatggcattggccattgccacccatgaaatgtgaatcattcaatcccaggatttagcattagcactagtgattgc

SEQ ID NO: 114133 - DNA, 254 bp, Glycine max
cttatctcacccttctttgactgttctcccacaccacatgcatgacactcctcctgctccttattctcctcttacacgcggcggaagctaagggccagtggcaggtcctctacaaaatcatctgtactgtcgccatgtacatactgcttctccacaacgaccgcgtcatcatcttctaccgctccgacttcggactctccaacctaacgctccacgcagaaatatgccgtaacgaggcatacgagttgctcgtc

SEQ ID NO: 114134 - DNA, 146 bp, Glycine max
gtcaattcggagcactattctcaatctcatcatgctgtggggcgaaacagcattaagggccactcaattttcaatggcccttgtctttttgtgggtctaggtccaaaaggcttgttggattctgatgcagttaggagccccacttc

SEQ ID NO: 114135 - DNA, 258 bp, Glycine max
acagtttggaggggttaacggcattgctttttatgcaagttctatattcatctctgctgggttttcgggaagtattggaatgatagcaatggttgctgttcagatcccaatgacagctttgggagtacttttgatggataaatctgggagacgaccacttctgctgatctctgcatcgggaacatgcttaggatgcttccttgcagccctatcattcaccttacaggacctacataaatggaaggtaggaagtcccat

SEQ ID NO: 114136 - DNA, 216 bp, Glycine max
ttttcctccatctgtttgcgattatgcatttggtttatagcatttcatcactatacctaattgtggtgtctttgatatccagtttggtccatgatctatcagataagctttggctatacccaaaaatcacaagcatgcagacttagtatttgcagactgattttcgtttcagatttcacttaatttgagatgttttgtcaaattttgggaaataaa

SEQ ID NO: 114137 - DNA, 256 bp, Glycine max
gttggctatggcactcgcatttgttgacgtgtcaagggatgctatggccttgtctccaccggatttcattgcggcctgtgagatgctcgagagggcgttgaagcttttgcaggaagaaggggcaaccagcctagctccagatttacaagcacaaatagatgagacgctagaagagataaccccacgttgtgttttggaacttttagccttgcctcttgatgacgaacatcgagcgcggagggaggcaggtcttctt

SEQ ID NO: 114138 - DNA, 229 bp, Glycine max
tacagattctctgtgttgtgttgtgtacttgtgttaattgtgttgttgttgtaggaaatttaagtgaagagagaatgatgatgaagtctgctatgtgtgcattggtgcttgtggcactggttgtggttgaagtggggcccatggctgaggctgcggtgacttgcaacccaacacagttgactccttgtcttccggcaattaattcaggttctgcaccttcgagtgcttg

SEQ ID NO: 114139 - DNA, 238 bp, Glycine max
tctggtcagacatatgacagacctttcattcaaaaatggctaaatgctggaaataggacttgccctcgtacacatcaagtcctttcacacactgtgcttaataacaaatcatctaataagggaaatgattgagcaatggtctaaaaaccaggggattgaattgtcgaatactgttcaatatattgatgaggaaggtttaaacgaagccgaccgtgagcattttctttgtttgcttaag

SEQ ID NO: 114140 - DNA, 236 bp, Glycine max
gagattcttttttaatgaccaaaggaaacagaggcaccagaaaaagcaatcatgaagtgtttctccttatcctcaatttctcttttcattctcctctttctctgttccgagagtgtgtcctctcaaaatgtatccgagagtgagcagcagcaagctagcattcctccaagaggttggaactcctatgattccttttgctggacaatttctgaaggagaattcttacagagtgctga

SEQ ID NO: 114141 - DNA, 153 bp, Glycine max
caggagagaaaaattttcccattttatcccttcagcttgcttcatttgcattcgacttgggttaacagtgacctagagagagaaaaaaaagaaaagaaaaagatgtgatccggtgcgtccctccaaaattgaggcagaaagaggatagaagtg

SEQ ID NO: 114142 - DNA, 231 bp, Glycine max
gttgaaacattgatcacagtttgggctagccattattttgagccatgtgattcgtttggcggattggatcttaagcccaattaaaaagaaaagtttaaatttatattttggaatgaaatggaaagagctgggttgaatttgtgttaaggtgttgctaggtgcacctaacatttttttcaaaatgtcaaagttgtccctcatttgtgttgggtgtgcatgagaggttggttt

SEQ ID NO: 114143 - DNA, 149 bp, Glycine max
gttttctagagttcacaatagcgtccatcctgctatctggtataattttgtagggaggtggctccatgccactataatatagactatagaataattaaacttttttttttatgtattcatagttttattcaactagtctcttctgggtt

SEQ ID NO: 114144 - DNA, 148 bp, Glycine max
aaaataatcactgaagaatcacaaaacaactctggaagattgcaggtccaattgttattgctaatgagaacttgaatccaaatgatactaggcggaagacagttaattacttgcaaaaagctgccgtggcatatggtcctggaaagcc

SEQ ID NO: 114145 - DNA, 230 bp, Glycine max
aatttatgttgcgcaccgagtatgactcgccaatcgcttctctgaacaattctggataatttcaggaaaggagtatttttggagagaaaatacagtgagcaggtacatttagaaagtaaggaggtgattttagcatttggagcccagtgttcacgaacccaacaacaacaataaacagagaaaaaaattaatttgccctatgtctagctttacgacatcgttttgctctt

SEQ ID NO: 114146 - DNA, 206 bp, Glycine max
gaaaaaacagaagatcccccagtttgctcttttagcaatgaaactagagtcctaacaccagctccagaggatgagagtcagaggcatggtggctctggaagcagaagtataaatgctgagctgggaggagaacattgtgagaaatctgaatgtgattctcattggggaacgggatctgtacacagacccgttaatcctgagctgca

SEQ ID NO: 114147 - DNA, 150 bp, Glycine max
ctcctcataatccatctctcaagtctcaactcaactcaaccctttaacacaccaaccaccacaacctcaaaaatggccattagaaaatcaaacaaacttccccaacacgcagtagttttgaagcaaatcctaaagaggtgttcgagccta

SEQ ID NO: 114148 - DNA, 255 bp, Glycine max
ctgcaacagttattttagtgtgaaggtgcagccatagctcagtcacttaattcatcgggtatagttagtgtgaatgacaaacagatttacattcagttgaaaatctcattataatgtgcactttggcaacaatataagcagaaagcatgatgactacaaaagtgagttccgacaacttccaatccttcgacaaatgcatcacagttttgaattcatgctatactacaccaggacaaatttgttttgaaatctctg

SEQ ID NO: 114149 - DNA, 253 bp, Glycine max
catgaatgaaagccttgattcattctttggtgcacttttaaatgcccagacttctctcatggagttcattcctcgatatgaaagaggtctcgagcaacgccgtgaagaagaaagaaaagaggattttaatacttctaattttcaaccgattttgcaaactaaagaaccagtggaagaacaatttagaaagctttacactcttactgttttcaaaatatttcaaaaagagcttttgcagtgctttagctatctt

SEQ ID NO: 114150 - DNA, 259 bp, Glycine max
gttggacactattcaaggcctgaagtgcttagcttaattgtaaaggaccatccaacgaaccccgttacttttacatcaacatcgacaaaaattgaagacaagaccaagtagtttcttcctttcatggtcaacaacttccaaacctctagttctggaccttgtccatatacccttatttgaccccttgtatgttaactcctatctccatatatgaaaggttatttgggcttaccttatacaataagcggttgcattttgg

SEQ ID NO: 114151 - DNA, 255 bp, Glycine max
gttctgtgatcctttttccatttctatggacgcaaaagaattattctccacaaatttgatagatggaaaaataaaaataacatgagggaacaacaatatagatgaggctcagttaccagttaccacgctcctttagacaaaaataacaagctcatgggtcccattatctgtttcatatgatacgagattctatttgtttgagttggtttgtctgtcaatttcagacttccatattgaaaggaaaagcactgttac

SEQ ID NO: 114152 - DNA, 260 bp, Glycine max
cttactactactttcttctttctttctccacctgaagtagttctccacaacttggaaggtgatcatctccaattttccatcatggctactgagccttctgcatctgatcatgcttctactactgatgagcattatgtgaagaaggaaaaggacgagtccattgcacaaaagatcgcttctttagcaaatgaagatgaagtcaaacatgacaatactccttcatctaagacagaagaagatgtggtgaaggcagagcttgc

SEQ ID NO: 114153 - DNA, 255 bp, Glycine max
attagttaccgtttgacttgcatgccagagaaccaactattataaattacgcttaaattgaacttttatttagacaccacaatgaatcaattatttaaattgcatgtgctgaaatttagtttttatttagaataacgaggacagtaaggattgattaaattaatattctaatatcatcttataaaactgattgagaaaactttaacactttggtgaaagcacataaatggttttatttataactttgtaagtttt

SEQ ID NO: 114154 - DNA, 255 bp, Glycine max
gaagagtggtagctccaagacaacaagatgcagatgcgatttatttggactaaattgcctattcactcgatttatttgtgagaagagtggtaaaactagttgttgtaactctctctatatattccttctaatcttgtaagattttcgcacatatgaattatgcaaaacttgtataagattttcagaaaactattactctgcgatgttgctaaagatggactatatcaattcatctcttgaggctcttgaagatga

SEQ ID NO: 114155 - DNA, 248 bp, Glycine max
attcttgtgcctcaacctctatagtcaaattagtcattttcttatttttggggtgaaaattaaaatacatttttctcttgtcttattattttcattttcatggtctattaactttaaaatagttatctttaatatcttgaagtattcgttttatataaataacaaattggtttttccgttttaaccatgttaattttagatgatacaataacatttatatagtttgacttttttcataaattaatcaa

SEQ ID NO: 114156 - DNA, 242 bp, Glycine max
cgctcgagccgattcggctcgagcaagcttctaacgagggaagacagacgtcaatgggttttgtgtacgagcaatttatatgggcatttcttgttgggtgcacgttcattagtgtattatctcatcctgatgaagcagctccaaagtacacatttgtagaagaagctgcatctgctccagaaatcttaacttatgactacgtagtgattggtggaggaacatgtgggtgtccactagcagca

SEQ ID NO: 114157 - DNA, 246 bp, Glycine max
caattgcaaagaaggagattatccaccgtttcctctgccctggctgagactgcagcgtcaatggcagtagctgtaactgtcgttggtgcagcagctacccttcttgtaaagagatccaaaacttctgagtcatcacaggttaataatttatctttattgtttgtattaattattaactcagcaatatgccagtgtgccactaaaaaatccaccttgtttttccgtgcaagagcatgaacatctttg

SEQ ID NO: 114158 - DNA, 250 bp, Glycine max
gagtcattgtttttaagaccaagtagaagtcactttatgggtcaagacttagcactaaagccaagagaccaaaaagactaaaacaatgatggagtcattcaagtgttatgtttgagtgagagtcttttctaagcttacgaagtttcagggcagaagacatgcacagcttctgattcctctccaattcattcaacttccaaggtaggtggattattgttctaagaggtaggccttgagccagagtggaaaa

SEQ ID NO: 114159 - DNA, 248 bp, Glycine max
tgtttttctaaaaccttgtttgggagtttttgaataactaaaatcatgaggtaggctatccagattttatggataaaggaaatctttagctgaatgttatccatcattgaagcggcatttggcatggtagaaacggaaagaacgtgattgctttttttttttttttctgttttggaaaaattgtccatgtattgaccccctgactgtttgatttgacgttttgtttttttgggtatcgacagagaaga

SEQ ID NO: 114160 - DNA, 242 bp, Glycine max
cgaccgagtaattttcatctatgaattgatgtataggtgtaaattaatgtacaccatgcaatgtttgacgtgaataggataaaatataataattactgagtttatggaattgcaactaccattctataccagtgtcagaaatggaccacacggtaccagcatagttataacacttacacatgaagatgccaatttcaattgcagcagtacaatccaaccggtaatgaaattctagaaaaatt

SEQ ID NO: 114161 - DNA, 267 bp, Glycine max
aataacaaaaaacgtccattcaacgatcacactcacactcctcgtcgtcgcttgcccaaatcgcttatcgctcttcaacaccatctccctcgtacgaaatccccttcactccctccgaccacggcctccctcccaacacggagacaccgactccatcccctaccacctcgtcattcgcctcatccaagcctccaccaccctccaaccagccttcaaaaccctcatccaaaacatcctcttccaaaaccaaaaacatcaacttttaat

SEQ ID NO: 114162 - DNA, 269 bp, Glycine max
  unsure (1)..(269): unsure at all n locations
ctatttttgccttctccctcttctgcttctccctccactccactggagagatgagaagagaagagagagaaacacagattctttctttcccttccacacaacatacgatatcaatcgntctcttgccgattccgccatttctcattcggattcgagattgttgcaggtgcattgcttttgcctctcgatggtatgttcccgggaaagtgggagaatggaagtcatggccaggcttctcgctgctgagactttctctcacactgtagcag

SEQ ID NO: 114163 - DNA, 250 bp, Glycine max
agcaaacatcagttgttctatattacattgttggagactattagggttacgatggattctgagaagtatgagtatgtagagaacgcagttgaaaaccctcaagctaagcacatggctaatggtggggacaaaagtggaaatctgaagagagaggagcgaatggtagttcaaagcataagggtgatgatgatgaggatgttgatctccatcccaagcattcaaaacctggacacgattctcatgatcgcga

SEQ ID NO: 114164 - DNA, 250 bp, Glycine max
agaccagatagaggcttgaggagttgatgttttaccctataaagtatgtcaatatcaagaagcttccctaccaaagttaaattggtgttcgcattacaaacttatattcagaaatcaaaaaaatgattgtggttatttccatcgttaaaagtttacttttggagtagatttattagaaagactttttagctgactctggcatgggccaggggagttttaaaattgcaatatcaatgagacaatgacttcc

SEQ ID NO: 114165 - DNA, 253 bp, Glycine max
aattgattcatgggaatttggtaggattgaagacaaagctgtttgttatattcaattttgtttcattggatcttattcttgcatgatgtgctataggtaatgagttgagtgggaagggcattggggctagagtggtgctgcacagtatgggaaagacttgataaagcttaaagaaattttacgcacattatacaaaaactccacgttcaaaccttcccttgtagcacctggaggattctataataaggagtgg

SEQ ID NO: 114166 - DNA, 257 bp, Glycine max
ggcttctgtgttcaaggacgtaagataagtgatgtagggaaaatagatatttgaaggtttcaatgaagaggtatctgatgatttgtgtatttgatgagcttttatattaatttgctatagagattctataaccatttgattattttctacctgtttttagggtctgactcttttaggccagttttatgtgaacatggttgtcttggcagtggcaccaaatataatcagaactttgaatgttgattaaaaaaggatgt

SEQ ID NO: 114167 - DNA, 253 bp, Glycine max
atgaattaacacgcaagtatgagcgggtcagtgggggaacaagttctttcttttattattgtgaaagagatggtggccccgcaaattgaaaggaaaatgactgagcagttgcagcaggggtgattgatgatgatgatgatgatgatgggtcttgctcgatctaatctgaatatgaagcagcgattgttgagactttgttactattgggtctctctgattccgcaactattgcgtctcctccaaatgctttgct

SEQ ID NO: 114168 - DNA, 248 bp, Glycine max
tggaccagaagaatacatcatagcttctttctcatttcacacacacaataacctccctcgagcatttcttcttcgtgttattttggttgttaaccatctgcggtgcctccatcttttacgtgacgtgtaggaaccatttggggtgctatgctatgctacctaagacatcatgaagatttcaagttccaagcaattggctgtgggatttgcacttggaaatgaaggataggcaacgttggagagctgaa

SEQ ID NO: 114169 - DNA, 236 bp, Glycine max
cccttttcttttgttttctctcttactactacttaccgccgaatgagtaatgagtcactactactacgtaacattagttgagttgaggataaggttgcagatccttgaggtaccttcaagccaatcgtgcatcaccacctctcccggatcagaatgcagcctttcagaacttttcaaagatattgaaaaaacaaaaacccatttaagttagttttcttttctgcatacatagcata

SEQ ID NO: 114170 - DNA, 242 bp, Glycine max
aacaaatccaagagatagcgccgagatgcatgctatttgcagatgacatagtcctccttggagagtcgagggaggagttgaatgagaggttggaaacttggagacgagctctagaaacacatggctttcgcctaagcagaagcaaatcggagtatatggaatgtaagttcaacaaaagtaggagggtatctaactcagaggtgaaaataggagaccatattatccctcaagtcacacggttt

SEQ ID NO: 114171 - DNA, 227 bp, Glycine max
taaaggaccacctcaccctccccctccattactcccactgcatcttcttcaaattcctgtcctgaagatgacagcaaagtggtatctcattgtgtgtgttgtagcgatctgggccgttgatctgggttcatcatcacaccatgcccgtgccccagcaccagcaccgtcagtggagtgttcaaacctggtattgaccttatcggattgcctcaccttcgttagcaacg

SEQ ID NO: 114172 - DNA, 230 bp, Glycine max
cttcggacatgtaatgaaatgagacgtaaggaaacgaaaaccctcttgttgttcatcttatactgaacttggaattatgtgcatcaccgtcgccaagtctcaatgaacgctgtttggagtctcgaatttctcgggaaacaaacacaatcaatcgtccgaactcaaacctaaacgacaactaatcgtggcgaatggcggtttctgaagaagaatgctcttctgcgaattca

SEQ ID NO: 114173 - DNA, 237 bp, Glycine max
cagccacaggttggcatgcctcctcccccctctggacagaagcaccctaagttcatggacttcaatcagcagaagtagctaataatagttgtagcagtaaatgattgattacatgcaatattcatcacaagtaacatcctgtgcatatgaatgtataactaactggtgagacttgtgaaggatatattgtgcagttcagtgtctttagtcatgtgttgtttatctttagttctagga

SEQ ID NO: 114174 - DNA, 227 bp, Glycine max
aacaccatctatctaaggcagtcaagagccatgaacccttttcaaggagttatgtatgattatatccgtttagaacgacctccattaacacagatttgattgtgtccaacttctagttgacaaagtcaaaacatatatgtagactttatgcatttcgttttattctttttcaaactagagttagtggaaaaacatgattagctagaaagaagttactgatatataga

SEQ ID NO: 114175 - DNA, 229 bp, Glycine max
taatggttccacgccaacggaagcgagcaaaccttcatcagcctctccagcatcatcgaacacttcaaagacagggaacgactatgatttttcctccttaacacaaggaatgtttgcaaaacactgattggcctttgcttaacatcacctgctatgtcatataccacagaagattagttaaaagttacagaaaagtgcactcttcttctttcccttgacccgtatactt

SEQ ID NO: 114176 - DNA, 224 bp, Glycine max
ctggattcaaagtatggaggatggaggggtctcgatgcagcaacaagcgacaataacgtctctttatggtggggagatctaaaattagctcttcaccatccccaacatgagattgttacaggagggttaacgtggaaggtggggaatggagccaaaatcaagttttgggaggatgtttggagctatggagacacaccgcttctggcaaaataccccagattgta

SEQ ID NO: 114177 - DNA, 232 bp, Glycine max
atttgttattatcttctcacataaacaagtgctttcactagagttgcttgaagagtaactttaaaatattttctgtctttatgcttcatttttttaaagttatactaactaactcatctttgtctatcatattaaaaaaaaaaaaaaaaaaaaaaaaaaaaaaagggggggcccccgtaaagggggccgttgaaccggggatttatttcgggccgggcactggggggggaac

SEQ ID NO: 114178 - DNA, 230 bp, Glycine max
gattggaggagatagagaaatgggaatggaagcggaaacctctaattgagttgccattcccaccaccatttcccatggcctctgtttggacactgcactttcgctcgctttctcttcgtccatgcctctacattagtcgcagtaacagtagcactgccactagaaattgcattagcatcagaaatggaatctccaattggcgctctggcacccaacaactcaaacacgat

SEQ ID NO: 114179 - DNA, 221 bp, Glycine max
ctaaaactttggaacccaaatgatgtcttccgaatctgttcttcctctccccgaaaatcccatcattgtggggtttggtggggttggagtcgattttcttgcagtagtggcatcttttcctaaacccgactccaagatcagaaccactgaattcacggtccaaggtggtggaaataatggaaatactatgacatgtgctgcccgtttgggcttaaagccaa

SEQ ID NO: 114180 - DNA, 242 bp, Glycine max
ataaggcattacaaaaacagttgcttttaaattgtgagctggtatgcagtaattgctggtgggatatacgtgcctgttatattgaagtatcagcgtcatacccactgataccgtaatgctaacgatatgcctagatatgcattcaaggagtatcctccaatttgttacttatcttaaaattttattaactgatacatttggaatacaactgccttccaaaaaagagcaacccacttgggaat

SEQ ID NO: 114181 - DNA, 265 bp, Glycine max
cggctcgagttcacacccaccattggatccaccaatctccaacctttcttctccactgttccgtttctctctccaacggtaactgcattgcccctttctctctctagagttctttcctatttcaatctgttgcatttgttttcatgttcattttttcctgtgtgattctgttgcattgcacgtggtcatgctaaaaatctgtttttgattggaattctgagggccccagaagctcatttgatctgggtttctcttgtttttgtgt

SEQ ID NO: 114182 - DNA, 268 bp, Glycine max
attattatttctgttgtagatattgtaatgcagagctttttgactgatggttttatcccaggtcctacttcatttgcaccaatcgttgaaatggccatgacaatagttgagcagactggaggccagtaccatgttttggtgatagttgcggacggccaggtaacaagaagtattgacactgagcatgggagactaagtccacaggagcagagcactgtggatgccattgttgaggccagtaaatttcctctttcaatcatattggttg

SEQ ID NO: 114183 - DNA, 266 bp, Glycine max
atccctaacacaacagatgattgttcagcatgtacggaaagaataatcaaatcacaatagttgaattttcaaaaatcaaggaagtttgaagagagagaaattctggtggcatagtaaagaagcactaacttacattgctcatgcatatcttgattaagtccctgtgcaagaccttgtctggaatatcttgttcactggcctacattggctcatgttgagtgtcatttgtttttattattatacatctttgtggtcccctctcttct

SEQ ID NO: 114184 - DNA, 268 bp, Glycine max
agaagatggatgcaaccggggaagaaataatttgaactctgactaattagcctcaatattattaggaaaaatatcttgttaagtttaaggtccatttcccttcattagttgactatgttctgaaaaaagagtcaggagggagtgaaggagagattaataacatttgtgaaagaaaaggggaggagaaaggaaatgaaaaaaaaaatccaaaaaaactatacttgtttgtatgtagtgctctctcttcctctctctctttaacacttgt

SEQ ID NO: 114185 - DNA, 105 bp, Glycine max
cggcgagctctagtacttattccttaagtatgtgcaataattttgcccctatacaagacaaagggttggtctagttaatgtatagtagcaaagtgttacaattca

SEQ ID NO: 114186 - DNA, 267 bp, Glycine max
gaattgtctacccttggtaaccaaatgtgtgatgttgcatatagctgtatgccttatattgcagatattggacctgaaaaagtacatgaaggtatagagcattttggattacctgagggaatcccttcattaccagaatatttggctgattactgctctttggcacgaagaaaatggcctgttgctgaatggaagttctatgttgccttttctttcttccgggcagcttcaatttatgcaggagtgtataatagatgggttaagggt

SEQ ID NO: 114187 - DNA, 255 bp, Glycine max
ggaatttggtgctgaatcatcagtcattgccacaagtagttcaaaagatgagatgcatgagggaaatagattgaaagctgcaatccaggcagctttgcttagaaggcctgaaatacacaagaggaaagaagctcctgaccaaactaatgagtttcctacatcaagcactggtttgaaacgagaagtcacttctcaaaagcaagtgttggtttccagcactttgaagaatggtatatctgctgaagaaagcaatat

SEQ ID NO: 114188 - DNA, 260 bp, Glycine max
gttttatcttatgaagacagtgactcctaaatttcttgtctttttctatatgtttcttgtccatttcttaggctgctgagttgtccattttcatgaacgataggaggataagtactcaagtcaaagcctcagcacaagcgcgacaagtgggacgacaaatatccatatcaagtcctggatttatctatgaaccctatgaacctcgtgagaaaatcccattttggaagagatggttcactagaagtggttggagaagaaca

SEQ ID NO: 114189 - DNA, 251 bp, Glycine max
accatgttttgtttgccgggaacaaggagtccagagttttttgatcaacaaagtataggtccatcattatctttctggtttcgtaacaagttccctgtcatggatctctgttttgttattggaccaatgggtaaggactctattttgtttagacccatcatgaccatcaatggcaacacaatggagacacagttaactgaaaagaggtgttgtttagacttccgagcattagattatcatatacttatcat

SEQ ID NO: 114190 - DNA, 205 bp, Glycine max
tccaggtgctgctgctgcagatcaaggtggtggtgctgctgctgtagaccaaggtggttctcctatggacatctgataatttaaaattaagcactagaggtgttgaataccaatatctaaagacgagtaggtttcatgtgccatgggacaagatatttctttgatggattttttttcttcttaatcctgtttgtttttgcaattc

SEQ ID NO: 114191 - DNA, 247 bp, Glycine max
caagatcatcatctccatgaaaaccctaaccctagaggtggtcccactcttcttcctcctccttaccaccaaacagctcctcacatgtcagccacagcattgctgcagaaagcagcccaaatgggtgcaacgatgagcaaaaccggctccatgattaggacccaccaacagcaggctcacgtgtctgccaatgctgctttgaatttgtcctcacgtgaccaccagatgaaccccactccccatgact

SEQ ID NO: 114192 - DNA, 249 bp, Glycine max
cggctcgagatgactagctctagcttgttcttctcctcaccacccctctttctcaatccccacccacctcgctctttcctccccttcagacctctcaaaccactcttcaacccctctcttctcctccgccctccctccaaatctcgccacaaccctttcctaacccgcgccgacgatgacgacggcgacggcggcggccccgaccactacgagatggacgaggacgaaatggaggagctcgacaacaag

SEQ ID NO: 114193 - DNA, 245 bp, Glycine max
gtaggaagggttgcacgtacatctgtcggcacccggatttggcgttgtaaaaccgcatccttgtttgtctgcagaagcatgggctcataacagattcaagaataataatacacgagaaagacaaatctatgcatgatgatctaatttcttatttccctctcctctgttcctttctctgcatgcatacacagcagcagcatttattactaacaacaatgactatcatatacgcacaatgaagcatt

SEQ ID NO: 114194 - DNA, 246 bp, Glycine max
attggtataggcttgccaaggtcttgttgattgagcgttaagtgctttaactaatcaatcccaagaccttggtttaccttgccacacaaaaaaatatataaaaaggcaaaataataataaaaaaaagagaaggcttggagccaagaaaataaactcaaagcccaagctgatgaagcacaaaaaattgctcttgaggcctatgtcccagtgccagaagatgtcaccgacgaactcaatttccatgtt

SEQ ID NO: 114195 - DNA, 240 bp, Glycine max
ctggacaacacatatttccggacacggagagatcattcagttgggtgttatccatcaatcaatcataacagttgttgttgttgttgtggttgttgttgttgttggggatgggatcgtgcctctcggtgtcgggggcatcggcctccgtagatgcttttgatgaatcatcttccaattccagttccagaactgcctctgattataacatggaaatgcggctccacagagttcctggcagat

SEQ ID NO: 114196 - DNA, 245 bp, Glycine max
gtacctgagactctatgcttcaagatacggtagggacgagagtattgcgcttttggagagaacaggagtgtacttcggtcctgagcgttacacatttgagcacatgccaattgatgccatgagaggacaaatatttaatgcctgccgttcatgaattggtatgttacagaatatggatgctgcttggtcgagtggttcatttgtcaacagcttaaaaattcaggtttcagcatctaagtttcaaa

SEQ ID NO: 114197 - DNA, 242 bp, Glycine max
attcggctcgagggaaaacgtggagtagatgctagacagaatagagaagctggtggcaagttctcagaccgaaggaagaggcgtaaccctcttgagagcatacaacaataatggaagaggacacccacacaagatccccccaagccgagggcatggtggaacacagtgtcatgagcattgtggaacgtcaggctacaagtcgagtttacactgccgatgcgtattaacgacgaggacgagca

SEQ ID NO: 114198 - DNA, 246 bp, Glycine max
acacggtttacttaagatcaaggagttgtgctgttgtattgactccatacaggtggtttcctgcacttgcagtggttaaattctgtaagacttggtatttaatcgtggggcttctcaacaagatgcttttactgagatatcacagttggtacaaagtgcgcttgatgggtacaaggcttatgctctaggatacccatcaaccgatgtgaagtggtttactcacaaaattagacttcaatttgatga

SEQ ID NO: 114199 - DNA, 106 bp, Glycine max
caatttccccccttcgttcttcagctcatgacgacgtcgttcggaggaccagccaccacctcagcgccgctcaaggacaccaagcttcagatcccaagcttccatt

SEQ ID NO: 114200 - DNA, 248 bp, Glycine max
attttatacctatcctcttgtatagattagataaccacgggtttatcttacaatagttgtaaagtatctatatattatagcatgtatctcagaacagttctttgtgtgataaaaaaaaaaaaaaaaaaaaaaaaaaaaaaaaaaaaaaaaaaagggggccccactaaaattggcctttccccccgggatttattttccggagggaacacttagagctacaatatttccccaaaggggaaccatttaac

SEQ ID NO: 114201 - DNA, 265 bp, Glycine max
taaaattcctaatcagaaaaaaaaaaccctagtaatgccgccgatggggaggaagcgaaaggtagcacccaaatcttctctatccaccgagccacctctcaagcagcaacaaccaaaacccgaaaatccccctcaagaatacgaagaagtcgaagaggaagttgaggaagaagaggtagaggaagaggtcgacagaggaagaagaagaagaagaggaggacgaggaagaagaggaggaggaagatgatgaagaagtagtaaacga

SEQ ID NO: 114202 - DNA, 246 bp, Glycine max
gagagctacgccatgcccacaaaacaatggcagaagcatttcccaaccaagcacattacatgctgaccgatgattcgcagggtgttgaatcacacactccaggagtgccttgtccaaattattccgagtctgagcatgcagagaaagcagatagtgaagttcaaaccttgaggaaagccctggccaaaatacagtctgacaaggatgctatctttcttcagtatcagaagagtatggagaagttat

SEQ ID NO: 114203 - DNA, 245 bp, Glycine max
gtgaaataataatgtaatacaaagataattttttaaatctttctctaatacttttattatttctgtttattatatgaaatagtaaatatcatctctgtttgagttatttctgttatatatttgaagaagtaaaaagacgagtatgatggtgtaaaacctaatctctgataatgggaagcgggaagtattagtggtgaggtttgagtccagtatgttctggaatgcgttggtaaatccgattcata

SEQ ID NO: 114204 - DNA, 103 bp, Glycine max
cgaggaacttatcttgagctccacaggatagctttcagagatatatgttcattcgctacctacttccactaaagggacttgagctggccaatactgcactttg

SEQ ID NO: 114205 - DNA, 255 bp, Glycine max
ctcgatattttgatttgttttcttttattgtttttccttgcatttctttgattcccttcacttcaccaatatatattacaccacgcgttagttactcacgtattctgcttctttctttctctcacccttggttgtttatgctttactacttgtccgtccattcattcaacttttcatattataatgaatactcgggaattcgcacacacactcactcactttgtttcttgttcttggtgtagttgaaatctgggt

SEQ ID NO: 114206 - DNA, 247 bp, Glycine max
gcctgtggattcacctcaacaacctatgacccttgtgtggatatttcacttaacttggataccaatgtctcttcaacagaaaagggtaaaaaacttaccaaacaaaatgaggatggcagtatgtctacactttttggttgtttagatttattcacaaggccagagacagttggggtcagaccagaaactttactgccggaattgtcgggaaaggcaggactcgttgaagcaaatgtctattagaaag

SEQ ID NO: 114207 - DNA, 241 bp, Glycine max
agcgatggctgatgtttcagattcacgagaacaccccgttcttggttcagcgcaactgttggtggagctggaatctgcgctgggcggtgagaaaacggtgacggcgcaggcttcttcttcttccttaggcttggggattgaggttatcgacgaaacggcgttgctagactccgttgcgaagaagaacggaggaaccaagaacaatcaccagaagtctcagccctcaaataagattgggaac

SEQ ID NO: 114208 - DNA, 136 bp, Glycine max
gaagaaaccaacacccgtaaaggccaacaaagaacaaggaactccaaaattgttagtgacaaagtcattaccatcatctttatctaatcgagttttaaggactacaaaggtgaatcagtcgtcattggcaccaagc

SEQ ID NO: 114209 - DNA, 167 bp, Glycine max
acttatcaggtcctgtgactccagttaccggtggcatgtcacaagccgcaagtggtactaataatgatccaacaactacaacagtagataatggcactacttgggactttccatctacttcagtagggcagacaactgcatcacccaacaatactagtgtttggtca

SEQ ID NO: 114210 - DNA, 151 bp, Glycine max
ctctgtcacaagtctcaaaactctgttcttgggttgtctgattctctctgaaccacacagcgtgaccggcgatcttaatctcgccggaaaattgccctacgctcgccggaatctccaacttttccgatttgaactccgaattagattctgt

SEQ ID NO: 114211 - DNA, 269 bp, Glycine max
caaatccaattaatctctatagctcatagcaaattcagagcaacaacaattcagaaaatagccaaaaaatcaaccaaagaacatcgttgacgttaatggctcaaagggtttagagaagcctctgtggtatgcgaagacataaacgtacgccgagatgatttttccacagtgattgtgaatcacattcacggcgagatcaaggtgggagaggaaggtgtgaagggagggattgcggtcgccgctagcaacccagtcgggggtggagttga

SEQ ID NO: 114212 - DNA, 269 bp, Glycine max
catcatcatcacgtgcgtgcgattaatcgaaacgaaagtacaaaattgcaaactccctgttcaagtttgaggtcttactcagcttccaattcttacactgttatggattcttcttcttcttctacccagtttgaaaattttgtagcttccttggttgctcatgtaagtcacatataggagcaatttgtaactgaggttaccgagaattatgagacaacatgctggggttgtggactgcgtgttttgcttccatcatgtgcatctgcttt

SEQ ID NO: 114213 - DNA, 261 bp, Glycine max
gaagaaaactaagattgattcttctacattattgtcagagaatatcttggagctgacaatagagcatgtgctcaactgtttagaaaaactatttggagctggtggcatcatgaaaaatcatgatggggattcatgtaatttgcagcctaccaatagaacaaatcaaaatcaaaattccagacaaaggccgagattatctcctacagatgcatgtcgccctagtaaccgtggatctacatacagtgaagccttacaagtata

SEQ ID NO: 114214 - DNA, 261 bp, Glycine max
ctcaaccaaagtgcttgacgcaaaggcgatgaagcaacaaaagcaattgttaaggttgtaacttgtatcatcattcatttcatctgtgttgtgttgtacgtgtgatttccattgccgccaccgattacccaccaactgatatacataacctcttcacctttccctccttccctaatttatcactaaaaaaacaaacaaataaaaaaaaagtccactaagttggggcacgtcacccatctcgcccttcccctcgctcatctc

SEQ ID NO: 114215 - DNA, 262 bp, Glycine max
catagccacaaaccatcctcaatttctcatcaaatcaaaactcatacatacacaaataacacaaaaatgaaatacagtgagatatcccatttcagccacccacagcacaagctgagatttgagtactcagaattccccttcaaatgtgatggctgcaaggaagtaggcataggatcacgttacaagtgctccatctgtgacttcgaccttcacatgcactgtgccatgataacctcccccaccttgctccaccctttctaca

SEQ ID NO: 114216 - DNA, 261 bp, Glycine max
ggactttagagattcatatagatggaaatctgtccgaagttgtcttaactggattctggaagtgaaaccacatggagatcgggttggaccattggtagttattggtcttataaacgaatcatctatctctacaaaatggaaagtccctcctgccataaactatcaggagtacccgcctggtaatataattatacctatgggaagtaggacattaaggccttttcacacaacaaatttgacaggtgtttgcacctgaaaatg

SEQ ID NO: 114217 - DNA, 260 bp, Glycine max
caaaaatcatgcatacaatttctagcttttagatataacgaattatttggtagccacgtagctaagaattaatcaaacccgaaattacataaaagctaaaaaatcatgcatacaatttctagagggttgtggctttttcagacaatagtagcagaaacaagtgcctctgagatgcattttctttgagatgcattttatatttttagtgcatagcttgctcaaaagtatggaagctaaattggattatcattttctcagct

SEQ ID NO: 114218 - DNA, 255 bp, Glycine max
ccctccatccgtgtgctgctcttatctttctttttcattgctttgtcacttttttcctttggcaatgtcgaagccagtagaaaacttctggcaccaacattacccgatttggggaattctcttcctcgcctgatatttcctccatttccaccagtaacggactggccagagtataggttgcctcccccattgattcgcacgcttccacccttctcacctccttcagccacaactaccaatccttgagttgaatag

SEQ ID NO: 114219 - DNA, 259 bp, Glycine max
cgtttcctgaaaagaatgagctgcagagcagatctttagatagagagagattctttcaccaaaagtttcagctgaggaatatgcaaatgaacggtattggtaccatggatgatgattctgttcatcggagaggtaatggatccgaaaagtatgtgtcttttgacattgaggataagtctgaaagaggaacaaaaggtgttgattcctacatttctgtgggaggtgatgggtcattgggaaaaagcttccagaatcctat

SEQ ID NO: 114220 - DNA, 254 bp, Glycine max
gggcgatcgattgttactctttaagaaaagggtgccactatgtttttcccctttcgcgatgttggattatgaagactttgcgtcatctggaaataattgtattgtcatttgaagagaaagcgaagagaaagatatagccttcatttacttgacttcattctgattttgcccaagatacattacctgtatttgtatgtacatctgtatctctgattgttggttttgcatttttgtgagtgctatttgtgttttca

SEQ ID NO: 114221 - DNA, 99 bp, Glycine max
gcccgttcacgtcctcatctcgatgtgacgtcgtttcactcccaaacccagatgtttcccagaagcaccaccacgtattacacctcctattcgattcag

SEQ ID NO: 114222 - DNA, 280 bp, Glycine max
cacaaatattgtttttgaaaattgtgatcatcatccaagggtaaaatggatttagtttctgtaggctactgtttgtgataacattgagatatgacatggaaatccctcatttcctatgaattcataattctactgtaggagtgtagtgtccaattacgttctccttccatcttaatttaaaaaaaaaaaaaacattcttcttccatcttgattaaaatgctatatgttgtgacaagttgttggctctcactatgcacctgaaaaacaatgctatgagatg

SEQ ID NO: 114223 - DNA, 282 bp, Glycine max
attattatttaaatgggtctcacattttttgtttgttgtgttattactttctaaaatgagagaaatcaaacctgaaggaataattttaccaagtttcaaaaattaaacattaataactgcgaaatttgagtttaattgatagtcaattttgattaagaataattaaaattcttttattttactattgtttttaatgaaataaatgagaattttaatatcattttaattcttaaccagcaagattcaaaagaagaaagattataagtactttgaagaaaaatt

SEQ ID NO: 114224 - DNA, 277 bp, Glycine max
gttcctcgtatcatattctgggtttatggttaatacgaaaagcacctctgaaactttcagcagcatttatctgtcataaagtaacttttggctcatagttttgtataataaagtcgtttggcagtatatatatagcgatcagcaatcattcaagtgcttcctcatcagatatatgctgataacgtagagcagatgaaagaggagatagagaagatggtggctagtaacagctcagatgatagcataggaacacctctagtaataaggggatctgata

SEQ ID NO: 114225 - DNA, 277 bp, Glycine max
atcaaatcaatccatccaacctacacatttctcatcttctccaaattaacaaaaatggtagctgggaaatacccttcccccacatacttcatcttcctgctcataaccataacacgtttgatctccacagtgggcaagacctcccaatggatgaaggccctaacgccgcctccggaactcgcctcggtctccctcgatgacaccatcttcagcaagctccgcaacgacccagaggccctccaggggagggcctccagggactacgggaacctcgtcc

SEQ ID NO: 114226 - DNA, 278 bp, Glycine max
cccttagaaatctaaaagcaaaatttgtcccttccaaagtattccaacacagagaaggctcaaccaccaacatgggaaagaaaatggaagaacatgtatccaaaaggcttgccaaagaggaaagaactaagctcctcagcgaggttgtggagctgaaggaaaaagaaatcaagcctattgaaaatgagaaagctccaggaggtaaggtaaaactgcatagtcatgtcagtcacaaatcacatgtaaatgaaactgttgataaaaaagctaaggtaaag

SEQ ID NO: 114227 - DNA, 198 bp, Glycine max
ctttgacagcgcgattagcacgaagaaaaaaaggcattgaaagcaagaaaagaagcaaacattattctcgtgagtgcatgcctgagtaactgagtgagtgagtgagtgagtgagtgtaacatcgttttctcgtttgtgttttttcctttaaaatggaaaaccacatctacgccgcctcttacagcccttccacacaac

SEQ ID NO: 114228 - DNA, 265 bp, Glycine max
cataaatgtctttatttgattagtcagatttttatttttttttttgaatggcctcttgggtttgcttctggatcctgattttggggtacacacaatgtcatacattgctttctcccttttttcttgttctggaacacgatcacatgtttttgattgaaaagtggaagcagtgttagaaaatctcatgagaaataacacggctctgaaggcagccttgggagttttctcctttttgaagcttcttgcggcggagggagacaaagag

SEQ ID NO: 114229 - DNA, 269 bp, Glycine max
cttgttcacccttcttccctttctcacttaccactctcccccttctttccaaaacactccctttccctttctattcacttcccctacccttccgtgatgatgtagatagagaataaaaagagaccagtgtgcagtgagaaagagattgctcacttcttgtgtgggtttgttttgttctttgtgttggaatttgttcatgggtgaagaaggagaagaggtgtcaagagagaaggaacaatacatgggagtttatggaaatgagtggttgt

SEQ ID NO: 114230 - DNA, 262 bp, Glycine max
gaaaaagaaaaaactgtccgatacttttttccttaaacttatatgataatgctttgacatcatgttcttaatgttaatttgtaaagggtactcttaagtatacttatgcctcaacattgtgggatgtccatataatcctaaacatatgatatctgattggaacttttttttcttgatttatctgttctgaacttctagatgctaaaaagcgtaagagatgttcacgacctctggtattacataagaaaaagaggagattgtt

SEQ ID NO: 114231 - DNA, 263 bp, Glycine max
gttagagtgtttctttccacaactcaagaagccactaatgtaaatccttttttatatataagtatttgttggttaagttagagcgtttcttccatatcttagaaacaaccagaatttaaatcttgtaccacttgtttaggaaacacaagtcgctatcacttttatcgatcgttgttgatcttataaatgcttatataacaaattattcaaacactttaaaatttcataaacatttatcaatgtgtcaactgaaatttaagaaa

SEQ ID NO: 114232 - DNA, 261 bp, Glycine max
gtgcagagtgcgaagattcggaagctacaattggaaactgaaggtgcaataagagaagcagaagagacgaggagaaaagttcaagagctgaagcaagaagttgaaaaatcaagggctgtggctgaagaagcagaggaaaaacttgagctcgttctggtggaggctaaagaggcaaaagcagcagaacaaagagccgttaaagagatgaagattttgtctgaagtgggtagagtcccgtactcaaaattcaatggcaagatc

SEQ ID NO: 114233 - DNA, 254 bp, Glycine max
gaagatcagaatcagattaattatttcatgcagaaggggagtgacagaagaacaaatacccttcattgtttagagaaattgagttcaatagacgggtagccgcattccatcaggaaggaagcagaccttcctgagaagtcaagttaccaactgacgatcactagtggacataaaatgatatgatactagaaatttatgcaatagcagaatataaccaaatttcaaataacaaaacaaaaaaagggcggccgccg

SEQ ID NO: 114234 - DNA, 257 bp, Glycine max
ggcatctttagtacgtggttggaatgtgcaggaacacatagtttttttcatcataaatatgctttcacctccagttcctcctaaatattccgggacagaaagttatttgattagccatgctccttttttgaatgtctttctggtgggaatttcatctgtagacagtgttcagatattctccctacatggcgtggttccactacttgcagctggtttaatgccaatatgcgaagcttttggatcatctgttcctaatg

SEQ ID NO: 114235 - DNA, 252 bp, Glycine max
gtcacgcctagtcctccgaggcgcgagaatgaagatctggaagattatagcaaacctgacgaaatttctgatcgaaacgacggcgccgggaagatcgatacggaggttaaagcaaaaacaaaagcaaaaccggaatcagaatctgattctgaatctgagaaatctgccagtagtgaatcagacgattcgcgttcgaggaagaagagaaggaagggttctgctggttcttcgaggaaatcatatagcgagagt

SEQ ID NO: 114236 - DNA, 249 bp, Glycine max
aaaatatatattgatatatctcatatgtaatatgtatgtgttgtgtggatattaaaagcttaatatagaatatggtccctagttttgctggtttaatctaaaccttgttcttagaatttgtgatccccgcagaatattgtgtaatcagactagtcactaatctctttggttgacaataatagtcaaaataccagtgattgttgcacagaaaatttgcccatgtatttatacctcagcccaccatgaaat

SEQ ID NO: 114237 - DNA, 238 bp, Glycine max
cgaagacgcgcttcttccgccgccgtccgcgctgttcccgcacctgctgacgtggcagatcgtcttctgcgtcggcgagctcaccgagggccccgacgcgccggtagtgtgcctcgacgtcgtcgaggaggacgtcgccagatccagatctgtttactgtgatcagtgccgagttttcggttggagcggccatccggtgtgcgggaaacgttaccattttataatcaaagccgatggg

SEQ ID NO: 114238 - DNA, 264 bp, Glycine max
ggatgtcctaactcctaagacatggtgaggggatgtgaaggatgggctaaatgtgagtattagaactcatcggagaatgggaattgaactggtataaggtgcttcccggaaaattgtgtgctactaccactatgctacaaggccatcattggcacatatatcagttgttttacttgtattcatggtgtatagtagtcagcatgttataattattttctgaaaggtaattattactctgtggcagtcattgctttgtgatcccaa

SEQ ID NO: 114239 - DNA, 270 bp, Glycine max
taaaatttgcatgaagtattttccaaactttaatccaaatatagcctttgtcttttggcctctgcgttaatcttgaaaggtatatttgacggaatagggtgtggttgataatgtgatggacatggacagagttcgatttataaaatagctggagcaataccaagtttgatttatattatagcttagagaaattagatcatcacatgtctagattgatgatgtggttatatctgctatggtttctttatgccataagaaatatgatttgtg

SEQ ID NO: 114240 - DNA, 256 bp, Glycine max
atcacctaccactgataactccatcccttccttcctctttatcatcactgacattttcccttcatgtccctctaactcgaccacctttgtgtatgttcttcttcttcttcttcagatagctccaccccatcttagattcacactcacattttccacacatgggaatattgtgttacttatatagacacttgcttttgctgacacccccaagattcgggggtctcaaagatctggccttttgggtttgttcccttgt

SEQ ID NO: 114241 - DNA, 268 bp, Glycine max
gaagtgttggatgatggtgatgaaccaaaatataaacaacttgtgtactctgactatttcaagtatttcttcagcaaggctcatgatgggaagaaaactattgaatttgccatgatatgattggtgactgtatctatgaatatttggttttgactaagtctaatgacatcgtgggctctatgtagccgacctcacttaatagaataaggcttctgtaattgtatgatttgtgctcattgttggcagtatttaaggtgtttgaaatcca

SEQ ID NO: 114242 - DNA, 267 bp, Glycine max
agcttccattatttacaagattacgtctgcgttggttcaacttatgagattactgttactaaagttgcctgcaagtttgagaatagaactactgatattctagttttttgtacggtatggtagttgacttatttttaaccttgttcctgtgagaaaacatatttagcctatgacttttggcagtttgaggattctgaagctgataccatgccacagattcaatcatttgggtctttttttgttgaagttaaattgtcttattgcgtg

SEQ ID NO: 114243 - DNA, 266 bp, Glycine max
taagaaagccagcttcttcttcttcagctgctgctgctgctgctgcttcaacttcccaacaaatatttcaacacactctctcattgcttcaatttccgttacgtaaagccactttctcaaacctcagtttcctgttgttgtggttgaagttggtgagagacgaatcttggggaattttggatctgtttgccgtgaaaccctaatttcttgcttgtgaggctttggaaattggggttctggttagatggaagctgaggatggaagta

SEQ ID NO: 114244 - DNA, 263 bp, Glycine max
gcctctctcttcattttttgtttagcatgttttgccactgcagcacggtgaagagacttaccttggatttggtgggaagaacagaacaggttgatgtggcagagtttgggattactttgttggattgttttccaaacataacatatcttaatttaggtcctggagcttggcatgtgatggagaattctttcagctggggaggtttgaaagatgggattgggatgaagatgataaaagaacttatagcacatctagtggtccat

SEQ ID NO: 114245 - DNA, 256 bp, Glycine max
gcgatatctcattttacaaacagaatagttgcattgattgcacaagtgtacacactcaatgattttttactgctcaagagagaagagggagaagagatatgtcctttgtccctaagagaaaatccaagcaaagtccacatcagaagaactctacaagacacaaccaacacacctaccacagttttccccacaaatccaacccggccttcacctgtaatcacacctccagatacaccagacatcatcacagttcctt

SEQ ID NO: 114246 - DNA, 250 bp, Glycine max
cttcttcttcttcatcctccgacggtcatgaaggattgctcttttcttctgttatatatactcttggacacttttgctcaagtttggagacgatgattgtgtgtatgtgttgaagctcttccttcggtttcaattcacttctgcaacatctactacatattgcagggttcttgaggatgggacaagaattggagtttgatctgaatgacaagtcttgcgtgggtctcagtcctgatactgttcttccaca

SEQ ID NO: 114247 - DNA, 261 bp, Glycine max
agcgaacgaacgaactaatcaatacaacgccatatctctgtgcatcgcttccttccctcgtcctcaattcgaatcaatttcctcaaagttgctcccagttttcttcgcatcacaattcggaaggtacagggagagggtttgacaaatgatgggtttattcctcagatattttcatctatgccagctctcaatgatgcagcttcttatcttgcacaaacaacatcattgataactggatgtttctctgattattcagaacct

SEQ ID NO: 114248 - DNA, 215 bp, Glycine max
tcgggatgcggctcgaggcgatatctcaggttacaaacagaagaattgcagtgagtgcacaagtatacacactcaatgattgtttactgctcaagagagaagatggataagagatatgtcctttgtccctaagagaaagtccaagcaaagtccacatcagaagaactctacaagacacaaccagcacacctaccacagttttccccacaagtcca

SEQ ID NO: 114249 - DNA, 256 bp, Glycine max
cccacaacaaaacccccaactccccacccaccacctacgcgcacacccaccacaccaccccccaccaccaacaaccaccacacccccaccccaacgcccaaaccaccaagcacaactctgatctctccttcaagccaagctcacaggtaaagggcatcacatcttggagcgcacttcatagtgaactccttcacaatcagaagagcaagaccctcggagctcctcaacgttctttctttcccaccacacaacaaca

SEQ ID NO: 114250 - DNA, 244 bp, Glycine max
caggtcatccaagacaatccaacaacaatgttcagctcttcacctcaagctcccaagtcatgctgcctcatcctctcatccaatctcttcattcaaccaattcaactcttaatcgacgcattccaacatcacctagttccaaacttcttcattcagataacaacaatgatcgtagccaaccacacaacggtagtagtactactcgttcttgcagctctcatcgtggctcctctctgatgcaaac

SEQ ID NO: 114251 - DNA, 106 bp, Glycine max
cgcacgcaagctcggcaactaggctcgcaagtaatcgcaaaatctaggcgtttgtctcgttccgtcgttccgccaacaatcggcgctccagcagattctcacaacg

SEQ ID NO: 114252 - DNA, 144 bp, Glycine max
ttactgacgctaatggaactacagctaatattggtgaacatgatactagcactaccaatggccatgatgatgatgatgccatgttattcacttgctgtcgacattaatcaacaactgaggcaagtgccaccaaagcataacgtg

SEQ ID NO: 114253 - DNA, 121 bp, Glycine max
cgtaccacctccaacttgccctagcagtaagctataactcatttgaggctctgtgagaactgagcaatggctaaagatgttgaggttcaagagcaacgagccgagtactctgcgacagact

SEQ ID NO: 114254 - DNA, 156 bp, Glycine max
  unsure (1)..(156): unsure at all n locations
cacgcgacatctgaactgcttctctgattccagtttcatggccgcattccaaggtattgatctcttgccgacattcagcaatgaatttgcgccattgnagggaacggtcaaaagcttagttgcaacaacgtggctcaaggttgagcaaccaacacc

SEQ ID NO: 114255 - DNA, 154 bp, Glycine max
atccagcgacttcctctcactcgcctgtccacagaacttgccacctacatggcagctccaacatctggtgctgcgtcaaatgggttcggatcttccttctccagtggacgaccaggagccacacctttggccctgctattggaggcaaagttgg

SEQ ID NO: 114256 - DNA, 137 bp, Glycine max
cacacaatttcttcaccacacgtttctccaacgcatgctccaactaactatcaacgatcgtgccttcttcttgattgatttacgcagtgagcatcggcactgcatcactgacaacgaccgacagcactaccgcgtac

SEQ ID NO: 114257 - DNA, 130 bp, Glycine max
atgatttcatatggtgtttccgaacattatcttctcccaacattccagccttccatgcacctgtggtgcctctctactgtagctgctgtcatgtccttcacctactcattcattggacttggccttggta

SEQ ID NO: 114258 - DNA, 149 bp, Glycine max
attcggtcgacgtcttagcgacaagacactgtctcccgagtgaacacacgttacagcaatggttcctctgctacaattggcaactcattacgacacacagcaaccacgcacgttagttcacgaactgcgatcacccccttcgttttctc

SEQ ID NO: 114259 - DNA, 246 bp, Glycine max
cacttcaacttgttgtgactcagcacaactgtacgaaacgccagctttgcaaacgagctggcatctgcatatactcttgagactccactctccataatcttttgctgttgctgctcgtgatgatgttctgtattgggctccatctcttgcttatgaaactggccttgtagcagcgattatgagatcagacaaaaatagtggtattagacgaaggacctcatttgctttaactggttattaaacgag

SEQ ID NO: 114260 - DNA, 108 bp, Glycine max
gatctcactgagtctgatcaactaggagaaatgctaaagcaaattttttagttggactgaggcatagtctacaaaatgctatgagaacctgttcatggttttgatttg

SEQ ID NO: 114261 - DNA, 243 bp, Glycine max
cttccaaaaagtaagtcattagtcatataaggttaagatactatgtttgctttgagatttaattataagaacgagacttgattaacatgcatgtactaagcttgagaagtattaatatgaagaataacagcttttgaaataggattcgcacataagaaatagtcttaccaagaggatagttgctaattgattataagcatacaagattgaaaatgcatttagaatatcaaagtgcagtaacat

SEQ ID NO: 114262 - DNA, 252 bp, Glycine max
gctaaccctgctagctatgctgattgtacgcattggtgtttgcctggacttccagatacttggaatgagcttttgtttgccaagttattttatccttgaaagtgaatcaaaataaaagatccttgttaactcggttccttgtgtggcatgacatgaaaaattgtaaatgggaggctacaacctacgagctttagaaatggtaaaagagaaagaatgaatgcaaagaggatttgtgtagaataatattacatt

SEQ ID NO: 114263 - DNA, 241 bp, Glycine max
actagaagctccattattggcaacaagctagcagcagaggagaagaatcagaattcagaactgaagcagacacggccgaaggaagaaacgaagacaaagacacaaccatgaagcgccttcttctcataacaaactgtctcttactcaccatcggcacctacggtgggcccctcgtgatgcgtctctacttccttcacggcggccaccctgtctggctctccagcttcctcgaaaccgccgg

SEQ ID NO: 114264 - DNA, 229 bp, Glycine max
gccaaatgcatgcttttgagagccattattatccttatcctgttgagaacccacttcattatgttcctatttatatggttgctcacggttaccctcgtgagtattctcaggtctttcagtattttgttgtgatagactttgtggctacttgtgacaaagataaaaacccccatcctcaagacataattcagtttccatctgttatagtgagtagcatcactggccagct

SEQ ID NO: 114265 - DNA, 241 bp, Glycine max
catgtgcaaatttgggcttttgaaaaatagtgctagactggttagggtttgcttgtagaagtttctttttcttttttgggaagggggttgccccgaagccgtttatcgttacaccctaaggtcacaataaggatctcccaattgttgaaacagttagagatgtgcttgaacagtgagacatatttgtcaatactaatcaatctttataaatttgtccttgtgccttccacgtatgccaaag

SEQ ID NO: 114266 - DNA, 214 bp, Glycine max
cggctcgagcgtcgctttgaagcagtgaccgaccgtgcatccctttgtagtttccagcgctcaacacgcgcaacgacgatgatgcaaaccaatatcaccaccacaatcctcatcgcgttctcttcggtcaattcctcgaatgttctaccttgagccatgtccaacctcgttcagattcgcgtcgccgccgacgcaggcgacggcttcgactctc

SEQ ID NO: 114267 - DNA, 203 bp, Glycine max
agcaattgacataccaagacatattggcactgccttgtgcatggcagctgcttctaagaaagaccatgaaaatgaggggagagaactggtgcggatactgcttgcagcaggagctgatccatctgctcaagattcccagaatgggaggaccactttgcatacagctgctatgaataatgacgtggacttggttaaggttattt

SEQ ID NO: 114268 - DNA, 202 bp, Glycine max
ttttcaaaatgacttctagcttctttgtgtttccctacttttatctctcatacattcactcaagagagagagagaagcatgttcaccggcacaaagcaaatctgtctagttttctggtgtcgcattaatttaagattaagattttagggagataagatacctatgaaaatacatcactaacaaataagttggctaatcacag

SEQ ID NO: 114269 - DNA, 259 bp, Glycine max
gtgcattgccggtagaaaaactgttgttgaattagacaattagttaggtcttgtatgcacaaacttttcaacaaatacttttagttataggataagaaaatgagaatgtaaaatgaatccaactttgtccacaagttaaaatcaacttattccccttaattttttgcagaagttaaatgattaaatgaaagaacttctaacatgacgtggtgcagaagttgtttttaacttctagcaggatttgagtcatttaggaatc

SEQ ID NO: 114270 - DNA, 248 bp, Glycine max
agacctatcattaaaccaagcaacgctcggttctcttttctctttcaccatatccattgtcccttaagtctaaggtcatgtctcccctctgccttatacacaccaataatttgccaagaaaccgaacccaacccaaccgcaacaacaatttcgttccatgatttcgacatgatcaccgatacgcggagaaacgagcagaggctcaagatgaagaacatcttccacatcagcgtcgtctccgccgtcct

SEQ ID NO: 114271 - DNA, 131 bp, Glycine max
ttgcgtcgttccagacagcttcagcacccagcagagactcccttcgcatccaatgtctacgctcttcatcgccctccaatgctgccaatgctccaccatgcaggtgaagcagaagaagaagagcagcaaca

SEQ ID NO: 114272 - DNA, 234 bp, Glycine max
tgtatatgccattgttgtgcatactggactttcttctacttcagggcattacttctgctatgttcgctcagctccatacacacgtcatactatggctggttcaatggcaactgaggtcgcagtagcaactgcactggctcaggatgcgcacagattgtgttacgcgcgtcagggtacgccagggggttcgcgccatctgcgtgagtacatacaacggattagaccgaagattct

SEQ ID NO: 114273 - DNA, 120 bp, Glycine max
gcaaagggcattttcaacaggagcgtggtcacatccgtataagacgatggtaaggatctcaggtgtggatgctaaatgttgggcgcactaatcccttgcaaaccatggctgagttaagaa

SEQ ID NO: 114274 - DNA, 236 bp, Glycine max
ctccctcctcctcctccttcttcttcatgacatggcctcatcaacaaggttttcccctctgccccaatccgaacctgatcgtgacaaccatgaagaccaattacccctctcaatttccgtggaatccacaaacactaggtctggcatttcgtccgaacattattacgccgaagaaatattcagcatcagcgcacgcacatgcgaaatgattcaagacctccttggcctcacgttgt

SEQ ID NO: 114275 - DNA, 123 bp, Glycine max
gagcataccatggtgatgtgcctgaccgtcctcgggccgtgtcagtggcaacgcaacgagcggacccgcgagagtcccaacttgccaccgcgccgagtcacacaacactggccccggcccaaa

SEQ ID NO: 114276 - DNA, 254 bp, Glycine max
gcaaaattcctttgggccaacccgaggagtgatagccacatgctccaatcaagattagtctctaacccagcaccaaaaggcaaaaaaagaagagtcaattcttcaatgtgacaccaaacatctagactatggggagcatggcaccaagttggtctgatcaatggggaagtggagggtttgccagtgaccactatgagaaggaggaagaggagaagacgaagatgaagaagagtgggagcagcaagaagatggca

SEQ ID NO: 114277 - DNA, 242 bp, Glycine max
ctaataaaaattattacttttggttatatcttgagcagtgaactgcatatatagcctgaatatcggatgtattaattaagaaattacaaaatgtttgtctttgacttttactaatgtttgctaccaaccttgtgtcccccttcccctggcccctgcacatcaagaatggaagatagaaaatacacatttttttttatattgatgtccaatattcagttatttaatgtccaaattttaacagt

SEQ ID NO: 114278 - DNA, 256 bp, Glycine max
ctcgagcctttatcggctcgaggaggagatgaaagtatcttatcaatgggctagccctgtgacaagggagatggaaatttcatatcaatgggtcaatcatatgagaaggaagatggcaatttaatatctctgggcactcatataccaagggacatgagaactttataccagttggtccaacctatggtaaatcaggagaaaatttcataactgttgctccttatgacaagggtactgatcatattatatcactggg

SEQ ID NO: 114279 - DNA, 252 bp, Glycine max
ctcctgcaaagcttccaacactggtggacatgccagccaatgtctctggctgcggcgacggtgctgggaaccagagaaaatttgatttcaaattcattcgcatttccctctaaatttcagagattatcgtcccgttatcgctgaacattgaaagccctcatttcatgacctatctcatttctcatcatgacctagctccaggctttgctccacgaaagtgttgttgttcaggtgaggtttatgttgtatcaa

SEQ ID NO: 114280 - DNA, 245 bp, Glycine max
attcaacaacgccttaacccgtcgtcatgggcgaaaaagaaaatccttctgcagaatctgcaccaaccacaaccgttcccaccgtttccagaaccacaaaaaaacccaagaaactaaccctaatccctctgatattcctcatctacttcgagttcgcgggcgggccctatggcgagctacccgcggtgcaagccgcgggccccctcctagccctcctgggcttcctcgtcttccccttcatctgg

SEQ ID NO: 114281 - DNA, 263 bp, Glycine max
cggctcgagcggctcgagatgattttgatgggaataactcatgaatagagattctcctccaagcctagaatgagtactatttacaatatggagggcaataggaacaaaatattaaaatgtcactggaaaagaactgatacttggaggagaatctctattcatgattttgatgggaataactcaccatttggtttactcttgtaactaagataaagtgattgtatacaaattccacgaccaaaaaaaaaaaaaaaagggcggcc

SEQ ID NO: 114282 - DNA, 263 bp, Glycine max
ctcgatacgcttctttgttgtgtcccgagctcagttccttccacccaacatacgacataactctctctctctctctggatatatcatatatcatatatcatgccaccttcccctattactactactactactgttgtgtgacctgagactggttccaagcacagcatttattattattcttctatataagtatactatataagaaagagggtatcaaagccatatcagaaaacacaaaggaataataatatattgcggggggt

SEQ ID NO: 114283 - DNA, 262 bp, Glycine max
ttttgcccgcggtgccaaaaacaatactcttgttgataacggtgaagctccttctttaccttttccctttgtttgagaaccctaatcccgttaactcgtaaaaaaaccacagctcttctctttctctcaattctctcagattttgggttatcgtttgaaatggcatcggtatccagtcaaccacagttccgttacactcagccaccgtcaaaggttctccatttgatgaacttgccatgggagtgcacagaggaggaactga

SEQ ID NO: 114284 - DNA, 261 bp, Glycine max
cttacttgctatgaataaggtctcctttgttaaagttgtaacttacgtttctggagaagccctggatacaaaagttacaactttaacaaaggagtccttacttgctatgaataagcttaggcaagaggtggagtcggagaagagtagagcaaaactggatagccgtaattgtgagccagatttagagatgtgcattagagcaaaaaataatgcatgggttatttctcgagtcacaagagggaaggagctttacatggttct

SEQ ID NO: 114285 - DNA, 237 bp, Glycine max
tgtttccatatcttcaagggacagttattgcattgatggtgagcttcgtcgcttagcgatagctggtgatggacttgaaccacatgatcctcaatggcgggggtaatcgtagcaactacatcggctgactgcgtagtaaaggctgaacttcactcaggtgtcaagctggacgtataatggaaatgagtcctgtttagatgcttggtagtctgcacaggatcggaccgtagagtgccc

SEQ ID NO: 114286 - DNA, 244 bp, Glycine max
  unsure (1)..(244): unsure at all n locations
caataacttccaaaaccttatattcttatgttttcttgaacattagttctaattcatttacaacactcagataacatcatntgattgatacaaacatttgtcttggagaaatttgtagctggttccattgaagattggaagtactaacacatttgaagtgaaaaatttcgtccngctaaatagatcgaagagattcaacaatgtcgtcaggcgcggtgaaaggcccggtgaaaggccaaatgaa

SEQ ID NO: 114287 - DNA, 259 bp, Glycine max
tgaattttaaataattacagatccaaatcatcaatatgcttgaattgaatgaatcccactccataaacttgcactttcccctcactcacatcattctcttcttcacatgtatcaaactctctaaagctcaatcctccatggagccagttcccacctacatcacccaccacagctgggagccttccgtcgccatcaccgtcggcgccataatcatcgccctcctcttaatgggaatcatctcaatctaccttcgccgctg

SEQ ID NO: 114288 - DNA, 221 bp, Glycine max
  unsure (1)..(221): unsure at all n locations
agtgagtggacgtttgaagtttgaagtttgaagtttaaacatagagaaacgaaattgaatgcaacccaacaaaacacattaactcccatttccattcaatcaacgagaatagngattgggggatgaaaagattcttgctaacctcggagatcatgagggatagaatgaccggagtggacatggagcacgagggaggtggatgcgccggtggcgggaatcgg

SEQ ID NO: 114289 - DNA, 244 bp, Glycine max
gagagctcagccttgattatggtgtagctgatgagtggacaggcaaactctctatatgtaactgaatggtccatgcacttcttgagttttaggcatggttttgtgaggtaaagcctagttctatcattctactttgttgcttttacaactatcttccttttgtttacatcttacttttgtctggtactctgcgctgtctccaatgtaaactctgtttaccatataccataatgagtgatagaca

SEQ ID NO: 114290 - DNA, 232 bp, Glycine max
cgagaagatccccgaggctgaacaatgttgaacaacgacctccccctctgagacgatgtcccaggttgaacaacgagtcaagcgacaaaaaattgaaagacacgagagtgaagaagggcggtgaagctgaaacgaaggaaaatcgtgtcgtttcggacgagggtttcggtggaggaagaaagaagaagagaaacaggaagaggattgaagttgaaacgcaaaaaacggtgtc

SEQ ID NO: 114291 - DNA, 229 bp, Glycine max
cattgatcgaaattcgaatgatcgctttctctgatctaaactaactgtgactgtaccggaaaatcaaccacccccaccatcattttcattctcattctcctctctctgttttttctatttcctttctttcttatcgctccccatttacttgttttttcatttttgcagggtttcttttgctcatcaccaccttcttcatattccctctccaaccatggacgtgggatcg

SEQ ID NO: 114292 - DNA, 146 bp, Glycine max
gctcgacgcatgaacgtaccctccaccttcaccaccaccacacccaacctcgtggtgtgtcccttccctgagccatgcttcttccgcaagtctacgcatctctacggcgcagcacgcgagatcaccttactatctctcgctctctc

SEQ ID NO: 114293 - DNA, 127 bp, Glycine max
ggtcgttgagtgagtgagtgtggtttcacattggctggtcaaatcaagaatgacattctccctttcattcaccactctgctttcccttatctctgtcattctgcttcatgtcaatgccttccccgtt

SEQ ID NO: 114294 - DNA, 163 bp, Glycine max
tcaatattttaccgttctttcctctaaagttaaaaattactcttccttcccccagtagatttaaatacatgacacttcatttttttcatgaattttctgttataattccgttaaaaaattattcttaaaacatcatttatactaccgctccacacaacatacg

SEQ ID NO: 114295 - DNA, 228 bp, Glycine max
ccttcaatggtttggtcacagttagttctttcatattcttcctcttggtcctttcttgggcttatttatatgcaattcccagttctcaatcattgattcggagtcatgagattcccaacaacagttctgactcatttgttcagagtcatgagattcccaacaacagttctgactcatttgttcagagtcatgagattcccaacaacagttctgacacattgttcagag

SEQ ID NO: 114296 - DNA, 271 bp, Glycine max
tcgagctcctgaaatgagcttagccacagtgcgagcttatatatggaagaaatcagatgacttggttctaaattacagactagttcaaggcagttgactacaaattgcatatgcatcagaggtgggcggtatttcttttttaactgatgtgaatgttgataaaagtgatcataggttattaataatttattctctttcagattggaggaaagtgagctttaaccatgtcagaatggtcattattggtatcacaagtaacttttgaatgatt

SEQ ID NO: 114297 - DNA, 269 bp, Glycine max
cacctactcaatcacgtttcttcctccctccattgaggcgagcaacagaggtcatatatcaccaactgtactggcaatggagaaaggaagtatggagaacaatgagaaacatgtgacagagaatgatcctaagattgactacagaggatggaaggccatgccctttatcataggaaatgaaacttttgagaaattgggagccattggcaccttagccaatctcttagtctatctcactactgtattcaacctgaagaacatcacagcca

SEQ ID NO: 114298 - DNA, 262 bp, Glycine max
gacaaatagtctaaaccatattaatcttaacccttatgcaaatcatgttttagtttttattaatttggctacagataagaatttttatctatatttagtcggaacctaaatcagggtaaataagtactattatactaatcactgtcattggctgtatttctggtaaaatgttcttccactccgtcttggttttgttgaacgtgaacttaagatgtgttggagcatatccgagtaattaaagtaagaaaaagtggcagaagtg

SEQ ID NO: 114299 - DNA, 269 bp, Glycine max
agatgaagcttctattctatcactgcagatattgatgagaaagttcccatcccaattcggtggtttatcgcgttaagcaaaaaacccaatcaaaattctaagtctctttgtttacgttgttcgtttccctcattgctttgttctcttctctcttctctctcacattcaacttcaaaggcgtagagtgagatccgaacgatgaagagagtattcggcgtcaagaagaacaaggatcctcctccttccattcaggatgcttccgataggat

SEQ ID NO: 114300 - DNA, 164 bp, Glycine max
caatatcgtctagctagctagctagctagcaagtagcaatgttaaaggaccaaccacaaccagattggtcctgagcccattggtccgggttgcagtccttgatccgaagaactgtcgaagagttccaatccctgaatcggtcacatgcagagccttgctagcta

SEQ ID NO: 114301 - DNA, 192 bp, Glycine max
aaaattgagaaactcattagtgaattgttaaaaaaaacgaaaactcgacctggcacccaattttgagaaagtgggttcataatatctgtgttgtctggctccatttgcccttccatttgcttgctggtcctgtatcaacaggaagctggtgtaagagaagagggagaaggattaggtactgtctctctcttt

SEQ ID NO: 114302 - DNA, 213 bp, Glycine max
agggtcctcactcctcaatttagtccactggcatttccttttctcttgcctttccgataaccactttcaagtttcaagtgcagcttttctacattgcaaccccctcgacaaaacaaaaccatcaaaatcctcaggttgtgagtgagaaactgagaataatggtttctggatggagaaggacgtttcgcacatctaataccattccacacaaca

SEQ ID NO: 114303 - DNA, 240 bp, Glycine max
gaagaagatgaagaatctaccaaagggaatgagtatttttctaggcaaaggaatgtgatacagactcctggttccaacacaaaactgaacagaatcaactcagagccaccacctgagagactccgtgcagaatacatctgctccatttgatggccataagcagacataacttcaagctgtatctagtatctatccagaatccagttgaagtaacacctcccccttgtgtccagaaccaga

SEQ ID NO: 114304 - DNA, 109 bp, Glycine max
atacacgcacgcacagttcaaagctctctccatcatcatcaacgtagatttcctcttccattttcacgtgattcccaatctcacacctccaccgattccacacaacata

SEQ ID NO: 114305 - DNA, 236 bp, Glycine max
gttgaatcctataaaaaatttcttggtgggacagcattattcgtgatctatgaattttgtttggaatgaggtctaggagaagggtgtgggggtttcatgatgacaaactcttcagttcttcatttgctaaccttttcatgaatcctttctgctttagaaaatactgagcaatcactgaattggagtactcgcctaaagatagctctcggttctgccaggggattggcttacttgca

SEQ ID NO: 114306 - DNA, 236 bp, Glycine max
ggcttgtgaatcagcaccacattcacctgagctttttgtgaggattccaaagcatggcttcccttgcagcatccactgctgctgcttcccttggcatgtcagaaatgcttggaaaccccatcaacctcagtggtgccacaaggccagctccatctgcctctagccctgcctccttcaagactgtggctcttttctccaaaaagaaggctgcacctccaaaaaaagctgcagctgct

SEQ ID NO: 114307 - DNA, 235 bp, Glycine max
gagagttggaggcgtcgaggttggaagacgagatgtgggcccagttcaacgggaccgggttctggagaagcgcttctcagcgccaccaccaacaacaaactgatggggaatcatgccaagaactccaatgatttcggtacacgtgtcgcgtttccattcgacgacaactcaacgaacgcattcatttacctggattctatgcatgcgacaatgtttaatgtgctgtcatagacga

SEQ ID NO: 114308 - DNA, 258 bp, Glycine max
agatacccaaagtagaaatatgggcaagtcaaacaaaaagaagcatccaactaaaaagaaaaaggtgaactctgaagcagaagtgataacagttggggcattagacaacttgcaacaaatggacaaattcagcacaagagcagtaacccttgaaggttattatggcacacagcagagcgtgcaagggatgttgaacttgatgggaccaacacgtgatgattactacgggaatcaacagacacttcaggggctgggacc

SEQ ID NO: 114309 - DNA, 258 bp, Glycine max
tgaagatgatattggacttttacctctccctccagatgtcagcaactacttgatgtctgaggatgtaccgaatggtaatgctaatgcccccatcagtgaaggaatcaatggtgcagaagtggaacgaaggttaagccaacctgatgataaattttcggttgatttagtcacccgacccatgacaaacagtgttgaattcagacatgaaacctctcagccaactgctggtattatttcaaatgtcactggccctgcatc

SEQ ID NO: 114310 - DNA, 255 bp, Glycine max
tttctcttttttttccacctacccttaactccataacccctagttagacgcactcaacactgaacacaaactaaaccatgacaagcgatgaatgagattacctaccctctttgcccacgtaatacccgcgtgcacccaaacgtgttataccccaaagtcgccactgttggacttcctcttcccatttttcactattcacagtccaaacaacacacctaaaccagccaaccagtcacgcacactaactcttaccca

SEQ ID NO: 114311 - DNA, 142 bp, Glycine max
gacttgacctaaacggagcaaaactcagcactaaagacggttgcaatttgcccctcacgggtctcgtcgacagcatacccgagttaacattcttccacgttaactccaacaccttctccttcaccggtggcttccacacaac

SEQ ID NO: 114312 - DNA, 241 bp, Glycine max
ctacgtctctctctctctctctctctgtgcatcgctattctatttctctcactccctcactgttcctccccaaatgctgaacctgaaccacacccactgatctacactgtggaagacattcccaagatttcagctttggcggaagaagagcagagcaagcggaaaccctcatgagagaggcaatgtgagggagggagaaggttccttctttttcctctttctcaggtttcggaaatggtgg

SEQ ID NO: 114313 - DNA, 243 bp, Glycine max
ggggaagatgaggatttgagttgggatgttgaagacgatgagaatgacgatggtgggattagatgtgatgccaaacctgtgattatgaataaagaggttggtggtgaaaatgtggataatacccacttacatgttgatggcaatgaagagggaacaaagagattggatgtggaagaggagtctaaggaacaaaagaaagacaatttattggaaagtgaggaagttggcaacaaggtggataag

SEQ ID NO: 114314 - DNA, 160 bp, Glycine max
cgttttgtttgtttcaatatgtttgcacttcccgcctcatagacaagtaaggacaaacaagaacgtggttcctcttcatcatcttcatcccatgatgaagcattaccatgtcttgtacatgtttttatttttcttaccaatttctacgttaagtctccac

SEQ ID NO: 114315 - DNA, 246 bp, Glycine max
ctaggcatatgtgtgtgcctaaaaaaaattgtctctattgtttagcgacagggtcttaaattgtagtggcattgctcttctgactagtaaaattgctgaaaattactgaggtaaatggattgtggtcacaatcccttacactatcgtttcactttgatcagaaaaaaaacaaaaacactaagtgacacgagcagtcatattcatcactgtgccacgttttactgattgcattggtagtaggtatct

SEQ ID NO: 114316 - DNA, 193 bp, Glycine max
cagctaccttcatcaacagggagtttatcatctcttaccacattacacttgcaatacaatcaactttctgggaccctttatgttttgcaagaccttcctctccaagatctgtacaattcttactaccaaaatactttatagatatataaatgaataatatgtatatcctgcaactgcatcaatccacacaaca

SEQ ID NO: 114317 - DNA, 117 bp, Glycine max
ggttaggcccaaatatgcagtttttctcccccttgtgaagatgtatacatgtgctggaaaactcagtgtaacccggaaatgtagattatgtctaatgtctaatatttcattctagtt

SEQ ID NO: 114318 - DNA, 226 bp, Glycine max
cttttacgttttcttaacatttttcgggaatgcgagctgaaatgtcaatcatcatgacatgagattggtcctctctatattgatcgcacaatgtatcagaggaaatataggaagagacgtagtggggtccagcacccatgtgccctcctcctgtctccaccagctgctgccgctcaatgatgagacccctgttccccttcaagttcaagttcaatttccacacaaa

SEQ ID NO: 114319 - DNA, 238 bp, Glycine max
caacatcatccgggatgtaaacggaattgccactttccagagaacgaaaggaacaaggaaatattgaatctgtacgttgccttttaattctggtggctggtgatcatgttaaattacatttgtcctttctattagcataatttggtttgtaaattcttttaagtgccatttttatttcaagggaaatcttaagggcagcaatagttgaattattccagggcaacaaggctatggtgta

SEQ ID NO: 114320 - DNA, 233 bp, Glycine max
aagaagaggaatgatgcgaagggtgcaaagatggcgatgcgtttggaactgtattgatcgcccgagtcagcagctgcgtctattgcacgagggccctgacaccgtagaagagcttctggagaggcatctcgttaaaaacaaaaacgaaaaccagttggagaatcagaggcaactcaccagcactcgccgcgaacgctctgtctctaccgtgacattcttcgggccacccgcct

SEQ ID NO: 114321 - DNA, 274 bp, Glycine max
gctttctagagctggtgctctgggaggagtagcgattcggcggttgaagatgcgaaggaaggcaccacactaagtaaggttgcgtgaatggaaagcattttagaggttgtttcctttttgtagcattttggtgttttttgtctctttattttgacctatttacaaaattcgttgttttgtgctttgttctgtgttcagagtgtcatgggggcacaaaaaaagttttatttttgttgatagagggttttactcgattgacacgtcgctgcttctg

SEQ ID NO: 114322 - DNA, 210 bp, Glycine max
ccatcttcgagatttttcgttgcccttattgttgggctctgaaggtaagtttcacatttttcctgttgtaacgctgttttagttgttaaaaactactttcaatgctcaaccttgtcgtagtaccagcagcagccttaagtctttgaaacgaggatgtattaaaatgatgccccaacagatttgcggaagttgcgaagataatttctttct

SEQ ID NO: 114323 - DNA, 272 bp, Glycine max
cgagctcagcatagcagccgcagagctgaatttcttcaaagggaatcacatgctaggcaacagcagtaccagcaaatcataagggatccttaccccggtggtggcatggcaccccgagaccctcatgcaccccgagatcctcatggttacaacaatgtgaatgattcaggtgcaggtggagaagtgcaacgaggctattctgccgatcactttgatccttaccgagagagagctcgatttcttgggggtggtagagatcaaggatttgaacc

SEQ ID NO: 114324 - DNA, 176 bp, Glycine max
caaacactccctcttcctcaattttcttcgatcaaacccaatttagccaccttcagcttttcacaatttccatagtttccttgatctcaattattgcatgccaaatcatgtaccatttagagaagccacaaagagatgataaacagtttctaactccctctttttcttccacacaa

SEQ ID NO: 114325 - DNA, 262 bp, Glycine max
gaacttgtcagccttatccttttatagcaaatctggatcaaaatgaatggccatcatcaaatgtcgcaaacatggccaatcatgcttaccattcctcacactttagtaagcaactttctctaagtctcgcaacatcgacaaccgcgggaatgtgctcggaggtgagttgctctaatgtgaccccatgcatgaatggaaccatgtcagggttggagcaagcctcttgcagtagtagtagggaactttctatgaatttgggtgg

SEQ ID NO: 114326 - DNA, 262 bp, Glycine max
agggaggtcaatatgctagagacttggattcaaccaagtctgtgattgaggattacttcaacagtgttagaccatcagatgatggtcttgatgtggtgttgatagacatagatggcatctttccaccaaatccccattcttccaatttatttaaaagcattaacaattttgtattagaggcaaagaatttaaagaggatgcttgttttaagattatacatgaaccttcaagctggtgggtggtccataattttgttatcaag

SEQ ID NO: 114327 - DNA, 246 bp, Glycine max
ttcgagatgatttctggggagtgaatacttcctattaatattacttgcctgcatatatacctttgcagttaaacggtattgaaattttctgctctcataatgtgttttgttaccatttagtattagagtaggctattgttttagtttcttaaaattagaaaaatgtcaactaaatttctgaaattgaaatttattaatagtaactcactgttcgttccattatggactatgataatagtaagttat

SEQ ID NO: 114328 - DNA, 224 bp, Glycine max
ataaaaagtcatggcgaagattaacaaatttgttgaacattaattattcctgaagcactaatgaagccttaccctttccatatctatactttccttgaactagtcagttaaagctgtgatatatgtgcagcctagtcactttgatttatcctgtttttgcttgagaaagatgtatggttaatattgattactgtctatagatatacgatattcacatctacctc

SEQ ID NO: 114329 - DNA, 183 bp, Glycine max
agaatgttggctaatgagcaaatgagttgctatttgggtcagaaactacattacattcttctgttgcacatagaaatgtaatgtagtttttgacccaaatagcaagtcattagttcattagccaacattttgtgcaaaatatttttggttttggggattcctccttcaattcaaatgcacaca

SEQ ID NO: 114330 - DNA, 247 bp, Glycine max
ctcccaggtaagtaagctcctcatcacatatctaaaacaaacccttccaaaaccaagacaatacttcaaaggttcattccaatggcatcctcgtcaagttttgttcatttggtaaatctaggtttagttttagtactacttggctttattgtccctagaagtgaagccaggccaagagcattctttgtgtttggacattcgcttgttgacaatggaaacaacaactatttgcaaaccattgctcgtg

SEQ ID NO: 114331 - DNA, 239 bp, Glycine max
gggtagacataaggttatgtaggttggtccttgtttgctttcaaaagtgtgtttatttctgttcatggttggagtttagaagcggtgctgaaacctatgttcttgttgttgatggctgcatacgattgattttctggtttttgaattagatttagaggttttctgcttatctatattttccaggggaaatttgtcagctgaatggtatatgaatatgtagtttagtttagttggtgtgg

SEQ ID NO: 114332 - DNA, 247 bp, Glycine max
gatttgttcattctttgttcactatgtttgtagtggaatccatacggctttgtagtgttgttaattcagataaagtttgcattgctatgctcctttccaatagtgtgatattgagaagtccttagtatcattgatttttgtagtttttctctaatatgaactcatttggacataggtctagatgcttcccatgtgtgctttgttgcctgattttgttggttgtaagatgttgcatctaaaattcatg

SEQ ID NO: 114333 - DNA, 241 bp, Glycine max
agagcgcggtgacagtgaagctttggctccctctcttcctttctctccaagctggaactcatggccgattcatcagatgtgtgtcccgctgaggatgctcttaaggcattcctagagtacttggttgatccagtgctgccagctagaccttctatacgagataattccccttcaccatctcaacaccagttagttgccaaacaggtatgtatgctcattcttctcttttattcttgtacaa

SEQ ID NO: 114334 - DNA, 257 bp, Glycine max
cgacgtatcttacaccataaccttcgagagccaaaagaagaagggttgcgtcttacgtaaacaatcaaagctaacaagaaaagtcctaaccggagtaaccggagtagtgaaccccggagagttaacggcaatgctgggtccctccggcagcggcaagacgaccctcttgaccgccctggccggaagactcgccggaaaagtctccggcaccataacctacaacggccaaaccgaccccaccttcgtgaaacgcaagg

SEQ ID NO: 114335 - DNA, 243 bp, Glycine max
caagattgtagtgattcagaatctcagagaactgctccaagggcatcatcatcttcaggcaaaagagattgttgtgactctgcttcttccgtgtcaagagaaggttggcatggaaaacactctaaaggaagtgcggattcacttcgtgctctccgcttgacaaccaagctccgtgacttacataaacttgccaaggttgattcagaatcccataaagaatttgaacactggaatgaaatgctt

SEQ ID NO: 114336 - DNA, 238 bp, Glycine max
attgaattggagcggacgacagagcatagagagaaaaaagtttattacagtggtgcgaaagaaaaagggggcacaaatataaagttccaaacaatcgccaccccaaaccaaagcactgtttctttcgctgtgcggattttccctcaaaatggcaattgctcgctagtcgccagcaaggacacacaaaaacaaacagaagaaaagaaaaagaaaatgcaaaacgagagtgtgaatgtga

SEQ ID NO: 114337 - DNA, 236 bp, Glycine max
tagatcacaagttagagatgaatcatcttttttcatttagcatataatataaggttttttgtactaaaagatggagttcattttttaccttaaggccttttaaacttgtagtacttctggacgaaccaaattatgcctgtttgaataacgaaaaaaaaaaaaaaaaaaaaaaaaaaaaaaaaaggggggcccccagattttgaaccacttcacccgggaaataaattcggggcggt

SEQ ID NO: 114338 - DNA, 245 bp, Glycine max
aatcaaagcactcccttctatctccctcttttcctctctgtctggtttgcattagtatacatacatataaatattcatgtatttgtataaggtcaatccccagaagaagctgaaggtccttttttttctgttggtttctttggttggatctagagaagacaatcttagttgtgaaactcagacacacatgttgggagtaattattttgttgtaaattctgagccttttgcaggagaggttaaact

SEQ ID NO: 114339 - DNA, 245 bp, Glycine max
attttaatgggactttattatacaggtactttttgatagtaacctaactctcccactctccttttctcaagacgtgtgaccagaccccacccccctactcacacaaaggagaaaagattgaacactaacatcaaacaacaaacaaaaaagaccatggtaatggtaaaccctctaaattattggggaagacaaaagaatgagaaagaaagctgccctttctctcgctactcctcctaccccaaaca

SEQ ID NO: 114340 - DNA, 242 bp, Glycine max
acctggccatgtttttgaccagcttgtgtccattgggaaattaattactgattttcaggaggttgtggatgttcccaatgggagttccgcgatggatggtgaggaggggcttgatgatgatgttggtgttgctgttgagtttgaggagaatgaggatgatgatgaggagagtgatttggatattgtgcaggatgaggaggaagatgatgaggatgtcgcggagccaaatggttccggggcta

SEQ ID NO: 114341 - DNA, 241 bp, Glycine max
atggagaatacatgcctagctagtaaactcttacattcttcttgaaaggttatacggaaaataattattatttaattgatagtaatgtaaaacttttacacttaattaatattagttcataaaagaaaacaaaaaaaatatttgtaaccaatatgtttccttttacaacgtgattactctcattcctcccttacaaatatctctttctcgtcacacgaaccacccttcatggtatatttct

SEQ ID NO: 114342 - DNA, 244 bp, Glycine max
ggtcgaggtggcttatgacgatatgaggccctccgtcttcctcctgtggcttgtcattacttctgtcctcgcgcactctgccctagcttccatctctctcagcttatgtcgtagactgtgggggcaccccagaggtaacggtagacaatctcacgcacattcctgatgagagttacatcaaggtgggcaaaaccatctccatcatcaagccagacttgttgccaatactctcaacattgcgata

SEQ ID NO: 114343 - DNA, 238 bp, Glycine max
ccttcagtctccaacatggaaaacatgatgaggccaaagcgccaagtttcaaacatggatgaggaaacgttgtacccatcaaagaaataccttagttcctcttgcaacttccctactaacatcagcaaccaatacgagaacccacaatgaggctacctcatgaagcagtctttgatgaatcagcggttaatgcttggtcctcatcttcaatttcaaggataatccaaaaatatcaaaa

SEQ ID NO: 114344 - DNA, 234 bp, Glycine max
ataaaactaaacacacagttgtttcatcagcacacccgcaggtctcctaaacaagtcacattttattcatcatggacatgaagaaggtcacttgtgctgttctcatcgccgccgcctccgtgagcgctgtggtggctgccactgaggtcacagcccctgcccccggcccaagcagtggagcttcagctagcttgccccttattggctccttggttggtgcctcagtcttgtctt

SEQ ID NO: 114345 - DNA, 188 bp, Glycine max
  unsure (1)..(188): unsure at all n locations
gctaaaaccttgacccagtctgaggtcaagaatggtaggttgtctntccagttcctaggaaagcttgcagagagatttttcgctcgtatggtctactcagcggtccctcctggtcatactatgcgtgtcatgcttggtcttggtgttgcatggaagtcctgatccatctatagggggatgtcgaggcg

SEQ ID NO: 114346 - DNA, 272 bp, Glycine max
atgcggctccagctatcatggctgagcatgatgctcgagatgtacaaaggcccctcgaccaatggagaagcagcaaagggggattcatggcttccatgtacattttagtcttgccagcattggataacatgggctttgaggcaaacatggtaagcatagtcctatacttttatggagtgatgcactttgatctagccagttcagccaacacactcacaggcttcatgggctcaacctagttgcgggaccttgctcgtggcttcatctcagat

SEQ ID NO: 114347 - DNA, 248 bp, Glycine max
gatgaatctgaataccaagctttctcactcataagttcccactccctctcttatcatttatcaaacaaatttttcatctttccccacttgttggattaatggctgcctcagctttgtcactaacatccccattccatttcagaaaaccccacaacagggtttcacctctcaatgctcattctctcattctcatccaaaagggtaaacaatctcttaaatcaaacttctcattctcaaccctgaatgct

SEQ ID NO: 114348 - DNA, 205 bp, Glycine max
ccttttcagtcattagtgtcagtgtgaggtggggttgatcttagtttgttgttctcggggtcagttattatctgcttgcgtgttgctatagttgttgcgtgttaagagttttcaaatcactagtggtgggtagccttttcaatcgtgtcaatgcctcctacatactttgccgcttcgttgggagagcactggggaccagtggtgg

SEQ ID NO: 114349 - DNA, 249 bp, Glycine max
ggaacattacaagaaaaagaaaacgagtatggttttgtcattattaattatgccatgtaaaataattaatataagattattttaatcttgagtttcaatattttgtggtctacatcatgtaagacataaatgtgtgaaataatttgtttgagattattttaacttatttggtagtgttgaatttgagattttttaagatattttttttggaggcaattttttttagtcgaataaaattattataattgg

SEQ ID NO: 114350 - DNA, 248 bp, Glycine max
acacaagatgtttccactttaccttactagagttctgactttcttcatgtatgcgtttatgtttctacttatttctgttcattgtattaccgttctcaaacaagttattatataattaagaccggtctcatttcaaaaaaaaaaaaaaaaaaaaaaaaaaaaaaaaaaaaaaaaaaaaaaaaaaaaaaaaaaaaaaaaaaaaaaaaaaacaaaaaaaggggggcccccccaccaagagaccccccccc

SEQ ID NO: 114351 - DNA, 238 bp, Glycine max
gtccatacagaagcgtgatgatgctcgacagtttatgaagtttcttcatcctgatcttggcgttggtaattcaatccgattcttttttattagctctgaattggttagaattaattgattatgtatcagcgttgtatttgagatttgaaaacatttttggttagtcaaggataaagctgttttcttcagtttaaaaatgtgtaatttctatgtttgatcttggcagaacttccagaaa

SEQ ID NO: 114352 - DNA, 213 bp, Glycine max
ctgaggtcctatgattcagtctcttctacaagaattacaacttgacattgtaacccctgttgtctactgtgataactacctaagtactgtcactggcttataatccattaattaactgttgtatgaactcatggttataaaatgatggttttcttgaaaaaaaaaaaagaggtggccccgcggcaatatgccttgtctagccgggattatttt

SEQ ID NO: 114353 - DNA, 239 bp, Glycine max
cagacttgaatagggaaaaggattttaaatttttcttgtgatctgtgtatctctagtggtatgaggcttttgttgttgttgttgcatctgtatttatgtgaatagcttgcgctgtttgggaacatttcatagtcctgtacttttaggaatttattttgttccactaaaccaaaccaaggacgacatatgtacggaagttaatacatctgcacacattttggtatataaaataaattctt

SEQ ID NO: 114354 - DNA, 243 bp, Glycine max
cgaccatgttttgataaacttctctcataagttaaaaacaactactgcacctcagcttttgaataagtttgatgagagcttctataaaagttgaagtgcataagttgacctcaacttatggaaaaattatgtttttccattttattttcttctcctataagtatgatgtagaatttaggtgggaatcaaagtatatatggagaactttagccaaacaaggcttaaaaggacttggatctatat

SEQ ID NO: 114355 - DNA, 208 bp, Glycine max
cacatctgttgctggattttctcgcgaacgtaatcgcacttgagacggtcattattaggcgcgtactacgatatggtctgtaagccgatcaccgttcgcttgaatacaggggattctgggatatgctccttatctctgcacgatggccgcaattttctccgtaatgtctactgcagaggagagaacatggaatggttaagggcgaggg

SEQ ID NO: 114356 - DNA, 211 bp, Glycine max
  unsure (1)..(211): unsure at all n locations
cctggttctatcaattccagaaaatgattacactataggatatgcatcagtatcagactataatgctcaaaggtttccgcataaccaatgccaccatgagnagaatgttgttgcaactgttatggctcttccaagtcctggaacatcaggaacgatgctcttacctgtcgatgtggtcaatgagacttcaactagttctaaaagaaccacg

SEQ ID NO: 114357 - DNA, 245 bp, Glycine max
gttgcgtgaaagccgcgccagtttttttttttttttcagagcagggtcccctgatatctatatattcgggtgcaatgaaatcattttctgtccagaactaactacactggccttttgttctcgagtcaatttctaaatccaccaccagaccctctcttcaattctctattataattatctccaaacccttcaatctctctaactcttctctcgaatcttccaccgcaatggccaccgctgccgag

SEQ ID NO: 114358 - DNA, 230 bp, Glycine max
ggggaatcaagtaaccagagcttcatgtgaatgaacacctgatttgaactgagaaaaacaaattatatatctctattcttcattttatgcaacaatgatgagtttcatgtttttccctgtaagctctggtcatatatgaatctcatcattgttgcataaaatgaagaatagagatatatatgaccagagcttacagggaaaaacatgaaactgagatggtggaatatgga

SEQ ID NO: 114359 - DNA, 236 bp, Glycine max
caattgttgaaaatattcttaaatatccatactttgaaaatagacaatttagttcttgatagatttatgagacctattctgtatgttaatcttgggtatcatgttatcatcattatttttattattttacatgaatcttgggttgtagcatttgcgatcattggtttgttattggtgaatttacgtaaatgttggctgatggttgctgcatctcttttgatcttttttgtttttgg

SEQ ID NO: 114360 - DNA, 232 bp, Glycine max
ctggagcatcaccaacgagcatgttctccttcagtccatggatctatactgttggtgctgcctctcatgaccgggtttatagcgactccatatgtcgttgaaataatgtgaccatacctggagttggtcttgcacctggcacagatgggagcagactttgtagactgattcatgcacatcatgctttgagcaatgacaccacagttgctgatgatatggatgttggttgagt

SEQ ID NO: 114361 - DNA, 232 bp, Glycine max
acttaatctatcaggtatcagatcatttacctttatcacttctcagtggtcagcattagatcccaacatgcatactaaaacaagtattctaaaggtaaaacaacaaaattctgaacttaattatactaactaaaccaacatggtcacatgtaagaagacaacattccttgactaatagaatgttgatcagccatgtagcatataatggaagaccaggaaacagcagataaac

SEQ ID NO: 114362 - DNA, 238 bp, Glycine max
gggagctttctatggggaggatcaaagacaaagaacaagaaaaaggaatcctcagaaggtgcagaagttgctgtggagtcagatcatcagggagttcataatccagtttcactgaatagcatctcacaaaatcaaaaccttcctccaactcccccatctctaagtccttggtcaacatcacgtccgttggacatgcgtaattcccatgtggacattgatttaatgcgtgggtgacaca

SEQ ID NO: 114363 - DNA, 230 bp, Glycine max
caaacggaaacctcgactccatgcatttcacattgttctgctgctctgctatctctacacccacaacagatagcagcacgcgttcaggggttatcgcccaacggcaacaacctccaaactgaaacctttcgtagagaaataataatggaaatatgttaccatgcccacatcgatcgcgagattgaatcgctcctagaaagaatacatcctcccagggtctgtatcgataa

SEQ ID NO: 114364 - DNA, 229 bp, Glycine max
aaaggagttgaaaccatcgcttattccacgatcgcctcttactcagctgaactaatggcggtggttgggtcctctgttcttgagtcaaatttgtatttctattgtaacatcacattgcctttgttacccattaaattgttggaagaatgcatcatcatccgcagatagattattgtatttgatatttagagcaaagtactcatgtaaatcccaccttgggatgaagtat

SEQ ID NO: 114365 - DNA, 163 bp, Glycine max
tgcaaattgatattcaaaatagacattgttctaaaatattgtcttctcgttaaatggcagtttgtatgtttttattttattttatgccaagcagtctgtagaaggttctgaagatgtctattggattactcatcttagaggtgcatgtcaggatggttaatac

SEQ ID NO: 114366 - DNA, 227 bp, Glycine max
atttaatgagtttgtgaattccctgctttctgattctaaggatttctggcctacaatatgatgatttagtgaaggttgactgtaatttgtatgagatccaaattgagaagtatcttgtggaaggactaaatacttgcttaatggttcataagggtcaattgttggtatctctggagaccctagtgttccatttgtgtactggatttctgtgggtttatctgcactat

SEQ ID NO: 114367 - DNA, 252 bp, Glycine max
gtcgatgcaatttcaattctgatcatgtcaattttctcttttctctatactatttcctgttgctgtttttgttacaaaattgttgctttgtttttgttttttttgttttcattttatctgttttgtggttgatgtcggcgtcgaattacgaattctcgcttgggtttcttcaattttctagaattttgttatggaagttgtgaatctattttaaaacttgtcaaattactgatactcattttgaaataattt

SEQ ID NO: 114368 - DNA, 251 bp, Glycine max
atttgtccaagaatatagtggaacgcctgtctgctcttagaacgcgtatagttgtaatggctggtcaagaaggtcctacaattacaagaacaaaaagaaaaactcagcatggaggttcaacactggctgaccttctgcaggctcttgaggattacttgcctgttgttctgggattagttaagaatggaagccatttacagtataaagtacaatttacttgggtgaatcaagaggatgacaaagaggaaaca

SEQ ID NO: 114369 - DNA, 240 bp, Glycine max
aagacaaatgacgtccaatagaataataatataacaaaatcttacaaatttcattcactccatccaaggaagaacatcaactattgagtaatatacggttatggagaacttatgtaatatagattaacccacaatagcacatttattggaatttaaccagttcagcaccagcaacttaacaaaagaaaaatatggaaagatagccgagtatgtaattccaactcaaaacaaacaactggg

SEQ ID NO: 114370 - DNA, 118 bp, Glycine max
attgactgtgatgaaataatgttcattttgttttcttgatatttcacacatgttgtgtttatatttgacaatatgacttctatttacattgcttaatggtatgtgatgtgttcttatg

SEQ ID NO: 114371 - DNA, 284 bp, Glycine max
attaatggaagccatttccaaccaaaaccacattcctctcttcaatgcaaatgaaaccctccctgaccaattctccctcctgtcaaaggtccttctttcaaaattctcaaatcttctttggccttgtaccttcttacttgtgcaaaaccgggaactaatgttccattttgtgctactatgtttcccccttgtttgtttcctggtgaagcatttcctctcaaagccctcacccatttaccttgtggacttctcatgtcttaaacctccaagccactgcagggtgc

SEQ ID NO: 114372 - DNA, 226 bp, Glycine max
ggccagactcagttaaacttattgcaacttgtgctctagtgctcatagtggtcactgctttctttctacttcccaaaactcagggtctaattagtcaacaatgagaaagtactgattacattctcttagttgttggcagtgactaaaccaattggtctcaggttttctaagttttagatagtagacactagtaatagatttcttctctttcttagtctcttttgct

SEQ ID NO: 114373 - DNA, 282 bp, Glycine max
atcaggttgacgttattctcagcgatggaagcttccacagagccgccgtgctgagcggtgcttcaacaggtaaatgattgctgtttgtttgagagagaaaaagaaatgtgttcagtgagctgttagtgttatgctgcttaaagtgtcattatcctgcaaaacagagattgttgtgtttgaagtgtggtagttgattgtctatgagtggaaatgtggaatgcgtacgttttgcgtgttatattgatgttcattggctgcaaagtttgatttcatctggttatg

SEQ ID NO: 114374 - DNA, 148 bp, Glycine max
gctacacaggagcgactaaagaagaagcacaagatccaaaaagactcaggaccagtggaaaaagtgattcgccacttccctcaaacaaagcctatagttgctgatgccaaaaaaaacaaacctgagctctctgatgatatattggatg

SEQ ID NO: 114375 - DNA, 275 bp, Glycine max
ttctagtgttcttttaagctctttgtgatatttatgtaatttgatttcatcttctttgtggtgtgcaatgaataatggtgatgaagaaatgaacttatggtaatgtgtttgcaaagacacaaatttagccactgtttcgtgtaaaattttctgcgaaaatttaggttcattcgtttttaaatgatatttgctacgcaatttgttatgtaacaaaatgtgatttcattggtagtacatgcaatgaaccagtactgtcctgtgctgtactttgcatt

SEQ ID NO: 114376 - DNA, 269 bp, Glycine max
atgttttcatgttcttctctggaaatacgggagaagaacaagatgcaagagaaccacaaggcataatgcatttcgagattgacatagatgtcacgttgcatgacaagaaattagccagattgaatcctttttattgttgttgttggcttttcagaaaaggttaattgtttcctctcatgggaaattgctgtggaactcgttgcaaggttgatgacactttgaactccaaccacagttctgcagatgttaccaaagttcaccgtagaagc

SEQ ID NO: 114377 - DNA, 125 bp, Glycine max
gtgcagggttgcgatccgaaatgggtcctggctgcccatagctgaagctatacaagctgcataatggcaagtccctcggaaaggaatgatcggatgcaattgccattgtgtccaactccacacag

SEQ ID NO: 114378 - DNA, 278 bp, Glycine max
agcaacttcacctgctccaacttcgagacatcaaatgatcatagtatttgaatgccatgtctgattgtctggctcattaagcatgcagacaaggataagacatgtgatagttttcctatgagtaactgtttctgccaattgattgtcaacattaccagatctgctatgcactcacagttgaactcagcaatgatgttgcacggatctctgaaacgtaattatgtatacatggtcacccacaaatggtgttcagacaagaattgagacagatccagcag

SEQ ID NO: 114379 - DNA, 267 bp, Glycine max
aagctcgaggacttctttggggaaatttcaattccttgagtaattagggttctcctgtttgattacatctaattagaggcattaattgtccgattcagccgtgtgccataaaatttgacggacactggttcaaggtaatcatggtgcacaagcgttcttttgatgctgaggaaatacttgaggggtctttcaaacacccaaaacatgcaggaccaagcactgagcttttttcattaccagaatctgttttccccgatgatgattgcc

SEQ ID NO: 114380 - DNA, 269 bp, Glycine max
taccgcggtcgcggttgcagaacggagaatcatcatcggaagctgcaggcaaacaggtatcatcacgggctcagtctggaggcttaaaaagtgcagatatttgtactccagagacagcacatgattttgaaaacccaaaggagtctgaatctcctcgttttcaagctatattgcgcgtcactagtgcacccagaaagaggtttccttcagatatcaaaagtttttcccacgagctgaattcgaaaggtgtctggccttttccattttcg

SEQ ID NO: 114381 - DNA, 270 bp, Glycine max
gcagcatccaaaggcttctagggttttttttttttctctatcaatctttattagtgttttcaggtcctcctcttcatatctaagtagttcagcgtttttttgtttgtcctttttaattcaattgcgtttagttgcgaagtgcctatgatggtgttaaatatactccgagatttatttctatgacatcaacttcgttctgaggcactagcttatccttccttattttcgattggaagcacatgaaagtgctgtgagggttttgctatactt

SEQ ID NO: 114382 - DNA, 261 bp, Glycine max
ggttattcttgtctttacttatcattattattattattattattattatatatatatatatacaggttagtcagcttggaacggttgctcaaaaataccagtcttttactcaaaatgcaacacccaatgtatctgttcccgaattacaaaataattgcaatatgtttgttgcatcagcccgtcagttggctaaagccttagaagtaccattggttaatgatttaggatacaaagagatacgtgcgctgcctacagatatca

SEQ ID NO: 114383 - DNA, 267 bp, Glycine max
gaacattattatattgaatgtcttgtcttgactgagtcagatgatgtgatttgcataatagaatgtgttgcttggttttttactcttttaagccatgtataatggcaaaacatgtgggctttttaacatggtgaattcttgtggcttcaaagaaattttggtattactgtggagggtgggtattgtatagtgcgttagaaagcatattttcaagtttttctgtacagttttggtacactgggtcaatcttatgccttccccaattaa

SEQ ID NO: 114384 - DNA, 273 bp, Glycine max
gctcggctcgcgcctcaattcagcttaagagcccaatatcggccccagcagtaactggcctgcctctaatatctgtcttacgcaacaagctttgcttctagtccactttcaattgggcataagccaacctgagccgaattactactctaaaagctgcccacaagacgcagcgatcatacaccggaacaagtcacactgactatgtaacaaccatggacacactgccgcttcgtcgggtcgaaatctcttccacgactacgcggttaagtcatg

SEQ ID NO: 114385 - DNA, 261 bp, Glycine max
attctcagccgcaaaacaattgctttgtgattccatcaccatcagtaggtgcatcacattccactcctgatcagcatgttatcttggccaatattggtgggttccaaaccggggttcatgatttcagtgcatggagggagtgtagaagtgagatgctagtcatacaaactatggatggacagaacttacaaggtcagggattatctcacagccttggaatccacatgaccctcaggagttcaaatgccttctatccatgat

SEQ ID NO: 114386 - DNA, 244 bp, Glycine max
aatgactaacgcatccttggatctctttctacctcttttcttcgcgactggttgcactttgaacctaaggcagagatgccacagagtctcctctgccttagagaaactctcacgatggcggttcaggactttgatctcatctcagagaggagaaggaacgagaagaggcaagaggcgaggtagaggatcctgaatagcgtggtctcttccgatgtgctcgattccatgataggtgcagtactct

SEQ ID NO: 114387 - DNA, 209 bp, Glycine max
tgcagcctatagttcagggtataggtttggataccgaggctgtcggtcatatcacattagtgatgattctgaatttctgtacttttgtgttcttactccatacattccattgcggtgggtgcccagaatccgccgcttcgcggtgctaccgcattttacagcgaaatatggcatctttagaggaggctgcttgccactctccttcttat

SEQ ID NO: 114388 - DNA, 253 bp, Glycine max
gtcatggtgtgggagtgtggctaaagcaaactactcctcagtcctcactctgctccaacactcacagtcactgcacttgttctgatgaagaaactctcactcttaccttcggatttggacaccaaatgttccttcaccctctctttgatgagtatgatgggcttcttcgtcgcttccttcgtcctctgctctgtgattttctcactctccattgttcttcgagaccctccctcagatgccgccctgcacgaac

SEQ ID NO: 114389 - DNA, 252 bp, Glycine max
gggtactgtgcttggaaatatgatgggagattcttggttaagagcacacgagcaatataaggactattatgcagcactttatttgaggaccagctggggaaagcttctatctattcttgtagttccaagggacatactttcaccctccagtgcaagtgtgacaagccaagacttggcaaagagactaaatgctttcaatctagcttttgatgaaaggtacaagaagcaatctaattgggtaatatccgatga

SEQ ID NO: 114390 - DNA, 109 bp, Glycine max
ctcacttattattacatcaaggataaggctaattcatcattgtttggtgctcagaaaaagtaagaagacatttgtcgattgttatccctttctttaagtcctccctgtt

SEQ ID NO: 114391 - DNA, 236 bp, Glycine max
atagatcgctgctgtgtttgtcttagtgtgtttgttattcactatcgtcattcctgttcctcaagctttgtagtgagcagatataatggctgttgaaaggtctggaattgccaaagatgttacggaagtgagttgtgtaccatgatgcccatttctgcatgctttttcattctgtgttttgcccctgatgatagtgtttctttctagattatgtactgttgtctgatgtgtgtttt

SEQ ID NO: 114392 - DNA, 234 bp, Glycine max
gttgtctccttgaatgtaaataacttcacaaccacgccaaccttggctggtcaatgggacacaaaaataagcattgacaacccgaatgacaaacttgtcgcttatttttccaacttcaaggttgacgtggcgtacaggatggcgttatggcaattaatcatgcgcctgggtttgtgttgaatacaaatgatcatatggatgtgaacgtggcaggtttgtctaactaagggaatg

SEQ ID NO: 114393 - DNA, 234 bp, Glycine max
tggatagataacatcctatcattttgaatgcattgatgttgttttgttagctaggagcttctttgctttgatgtaaggtgtcaatggctttttgtgaatcaagactcaataaaatcattcagccaaaaaaaaaaaaaaaaaaaaaaaaaaaaaaaaaaaaggggggggcgccgcattggggactcctccccccgggaatttattccgggccgtgacttcggggggaaacatttt

SEQ ID NO: 114394 - DNA, 236 bp, Glycine max
accaaaactgacgcttttgttattcttcgagtctctgagagagatgtgtggaggcgctatcatctctgacttcattctcctttttgagacttctaatatcctcagggttttttgggagaattggctaaaaaagggtctaccacagcgaaatctgtggcattccaagttcgagctgagaaatttgcaaataggaagaggaaaaatcagtataggggaatccgtcaacgcccttgggg

SEQ ID NO: 114395 - DNA, 234 bp, Glycine max
atttgtaaaaagaagagaagaagaagagatatctgaaaaagggggttctggtggattgaattgcattagcaatgggcgtgtcttcaaattcaaaggaatcgatggaactatgcatatttgatttgaggagggccaacacgaaggccaagagctcgataagatcctcttcttcttccccgccggtttgcccttctcaaagcaactctccgtcattggcctcagcgaaggactcat

SEQ ID NO: 114396 - DNA, 235 bp, Glycine max
ggtcctgattttgtactattatgtacactctctattggactttcagacatttctagctgtgggtgatgactctcattttcattaacactgtccttctcagcatcttcatcacacctgttaggctgttcagaaccccctgttgaactgtctgagaatctgacactacttcctcttcaattgatccttcagcttctacctcacgtttctgatcacaagaaattagttcatttcctgg

SEQ ID NO: 114397 - DNA, 269 bp, Glycine max
cggctcgaggttagccaataatgatacttaccgttttgtgtaataattttaataacgacaggaaaaaatagtagaaagtggtaagaatatgtattgtcagactgcttccgtccagataatcttctaggcttctttttctacctcaatgttaagttgattgtggctgagtgtgacattgaatgttaataatctagccatatttctttctcagacccggctcaagtattcacctgataacctactatattgcagtattttttaatttagat

SEQ ID NO: 114398 - DNA, 236 bp, Glycine max
aaacatttaacaccagctcagccagaaaaacatgccaaaaatgtggtattaatatacagaacagaactattatgttacacatgtatctaagaataaaattaaagaagtaagtaaatgtgtgtatgttttagttttagatggtaagttgagggcgtataatattctcgctataagtatagagaagaagatatagccactttattatctccccggtatagaggcacatgaaggaaggg

SEQ ID NO: 114399 - DNA, 253 bp, Glycine max
gcttcttcataattgagtctgaaaggggttctctattggcactgaatgatatagagagagaattatgagttggttgaataaaaataaaagtacttgtagtgatggtagtgccaataatgaatcttcttcaagtggaatagttggagaaagggataatcatcttgatcatgaaattgcacagctcacaaaacttaggtcaagtcctcatgagcttttgggtcgtgttgttcctggtaagatgaggttacctgca

SEQ ID NO: 114400 - DNA, 254 bp, Glycine max
atttagatgaggaaggagtttctaaacagaatgatgagatgctatacgaggtaaatgcaaattctggaaattggatgatagccgggaggaaaagaggatatgcatctctgtccacaaaacaaggggcaagaatagttatctcggtactatgcatgccactggtggctggttatgttcaccctcccgtacttgggctgccagatgttgatgaggcaaatataagctgcaaacctgctgggccacatctggtttgt

SEQ ID NO: 114401 - DNA, 256 bp, Glycine max
tctcaacttcctttcaattttcttatttccatcataatttcactgttgttctctgaaagcttctttggttcgttttttttttttcctcgcaacctcttgtttttggcttggcagcggttggatgtttcttctccttggttattatttatcctgtgaaagatttgatttttaaggtccgcaagagttctttttgtttaaaatacaagtgagtattctcaattttgtttctgattacttttttatgcctttctggctt

SEQ ID NO: 114402 - DNA, 209 bp, Glycine max
tgcataggagagaagaacatcaatggtgaggattgcttcatcttgaagctttgtactgaccctgaaacattgaaggctcggagtgagggtcctgctgagatcataaggcatgtcttgtttggctactttagccagaagactggacttcttgtacacattgaggactcccatctgacccgcatccagtctaatgggggcgatcaatttat

SEQ ID NO: 114403 - DNA, 244 bp, Glycine max
acaagacataccttatagattggatcataatttgaacgtttgtgacataaattggatcaacattaacttgcaagttttgatgttttaaatgctcggagacagattttattgtatagtaatagtaattcttctcggattgcttgaggtagaagagaactttatttgtatggtaaatttttgtaggctcgatcaggattgtctctagtagaagatattaatatgcaagcggtggggaggcttggca

SEQ ID NO: 114404 - DNA, 249 bp, Glycine max
tcgatctcgagcgaatcggctcgaggcttggaaaagctagtggtctgaatgaatctgatgcaatggatgatgatgacgatgacgatgatgtggatgatgatgttggtgtccctcctgtcattgctacaaagaaaaggatgcccttaaggaagaacccattgacaatagcccttcaaagccaacagcaacaggacctgctcgtggaacaccttcttcaaagtcttcaaaggggaagagaaaattaaatga

SEQ ID NO: 114405 - DNA, 246 bp, Glycine max
gtagagtcacgcatcaaattcccatcacaaccatcttacttacacaataagcacctctcattaatttctgattttctctaacatggctatggtggtcctcacaccccttttggccatactcggtattctcctacttagactcatctgtgacagcctctcatgttactggctcacaccactacgcataaaaaagacgatggatatgcaaggtgtccgtggccctaaacctcgtttcttcaccggcaa

SEQ ID NO: 114406 - DNA, 240 bp, Glycine max
cttttcttttctgttttcattttacctgtgtttttgggagatttaaataggcttccctctgctttatggagataatatctgttttttaataaagaaatacaaatgccctctagctgaaaccttatttttttctttgatttattatatctaacttcaatgccttttctcttttgttttatccaatatatatctttggttcccttttagaacaacttgacttttgattcaggattggtgaat

SEQ ID NO: 114407 - DNA, 242 bp, Glycine max
tagagaaagaactattggaggaggaagagagaaaacagagggaggaggtttcaaggttagtggaggagcgtaggaaactgagagatgaaaaagtggaagctgaaaaagatcacagcagatcatgaaatgtcagtaaggagaaggaccgtcagaaggaagctgaaaagaagcgtcaggaaaaaagaaaagagaaagataaggggtctagtaagagcaactctgatgttgaagaattggaaaga
